United States Patent Application Publication US 2017/0114356 A1 - sequence listing, part 86

SEQ ID NO: 136578 - DNA, 3334 bp, Zea Mays
aaaaaagaaagggattttacagtttaggcatgcatactgcagaaacccggattgaaatcttagacagtcctactttctttaatgacgtgttcatgccacaatcacttgtttactatatactgaagtgacttgtatttgaaaatatgaaaatgaaataaatcttattctagactcgtatttaaaatatgaaagggaactaaatatcattcttaccagggtgctatgctcatttttgttctttgtgcatcctccaatcctttactgattgtgctgaacaaccttgtttttagagatctgctggtatccattcggattgatggcccaggatggcaatggtcaggaagttttttccctgatcacctgggagatgctcaattgaaaatgcggaatagtgcctcaggtttatcatatatggttcgagttgaagtgcaaaatgccgatctagacttaaacagcaatagattttctggaaaaaataatatcaatactggtacagtactgattctgctttctgatgataagactggttttgtaccttacaggatcgacaatttttcaatggagaaactgcggatatatcaacagagatgtgaatctattgaaacaattgtttatccctacacatcctgtcaatatgcttgggatgagccttgctatcctcatcgccttactgttgagattcctggagaacggagtttgggtacattcaatctggacattctcaatgatgatgttcatgtgtcactaccatccacatccgagaaagctgcaagacaattctgcatctcaatacatgcggaaggagcaattaaggtgctaagtgttcttgattcaaattgccacaataaggaaacaaatgaaaaggattttctgggatcaaaggaacctaaagttgttgatcacaaactggagcttgatatgaattttgctgaggttatcaaattacacttaccattcatcgggatatctttaataagttcttgtccacaggaattgttgtttgcttctgccaaggagatgactgttgttgccatgcagagtttagatcagcagagatttacggttcagatacaatctatgcaaatcgataatcagttccctgatagcccacacccggtcatgttgtcatttgagggcagtcataagggaaaatccatgaacttttttaagagtaaagatactaagctgaaatcagcaaatgacattctttccagtaccagtgaacctgtgctgcagtttgctgcagctaaatggagaaccaaagatgtatcatttgtttcctatcaatatataaacataagtctagcacctcttcgccttgaacttgaagaacgacttgtcttgagcatgattgaattttttagatctgtttcctctcgaataaatattggacacttggagaaaagtattgagctaagtataggtggtgctacggacatgttaagagaatatgaaaaaatctcaaagaatatatcagacaagctcctggtgcaagacagtgaattgttgccttctgttgtcccagttggggctccatggcaacagatacaccttttagccagaaaacagaaaaaggtgtacattgaattgtttcagttgactcctgtcaagttgactttcagttttacgagcacaccttggctcaataggaatgaaggtggttcagaccccagcgtaggtttcaacaacgctactgcaatccagagaggtcttatggccctcttggacgttgaaggagtaccagtttaccttggagaaattatagtggaaaatcttatggccagctggcaatctgttcaggacattcttatgaggcattatagtaggcaaatcctccacgaactttataaggttttgggttctgctggcgttataggaaatcctatgggttttgctaggaatgttgggtttggtttaaaggacttcatatctgcttcaagaaaagggaaattgcagagcccagttgaactattaaacggtatagcacaaggttcaaagactcttattggaagtacggtttatgcagtcagcagtgccacttctcacttcagtaaaactgcttataagggccttgttgcctttacatatgatgagcaagctgcttcgaagatggaagaacgggaaagacagctaggtttgcatggggaaggagtactgaatggttttctagagggtctgactgggctccttcaatcaccgattaggggagctgagaaacatggtcttcccggggtcatctcaggtttagcaatgggaacagctgggcttgtggcacggcctatggctagcattcttgaagccacaggcagaactgcccagagcattagaaaccgaagcaaccctcacgaatccaactacttgcgagtacgtttccccaggcctgttgccagagatcgccctttgtttccctactcctgggaagaagccatcggtgaatcgttgcttgcccaagctgacagtggcagactaaaggaggagacatttgtcatgtgcaagacactcaagggggctgggaagttccttgtgctaactgagaagctgcttctgctagtctcaagcccatacttggtggatctaggatcgcctcggttcatcggtgttcctcctgacccgcagtggtcgatcgacacggagatgcacctcaagagcgttgttcatctggacaggtctcaggaggtagtgaacattgttgggagcaacggacagacctcacctagggacaaaagaggtggcacgagaaacagggtcatgagctcggccttcgtccccctgtttcacctcagcatagagctgccaaatgaggaggatgcagaagggacggtgcaggtcctacaggcactcatcgagaagggcaaggcacggaggtgggacaagaacatcctacaccggagcaacatcagttgaggttttcacaacagtagtagaggttggtgttttgattgaagtggaagataaactaaattccaccccgtgactcaggtggattaaatatacaaacaaggcctcaaggcagagcagtcaccagcatacataagcttagtgtgaataagaaaacaaagtgttccataggtggtcaccgttggacacgtgcttcggttttgttttaagcttagtgtgaataagaaaacaaagtgttccataggtgatcaccgttggacacgtgcttcggttttttttttttttttgcggtctaggtgtagcttctagaagttttgtcgacggctcttgtaaatgaagtgtgagagggcttatgttatgtgtagcaacaccactgttttatgccacggctatgtttacaaacttcgccgttcatgggccatggatatttctgatt

SEQ ID NO: 136579 - DNA, 834 bp, Zea Mays
atgaacaccaccaatatctccaagttacaggagaagctgggtgatggagagattgaagcattccgaacggatctcacccgttccttgggcgaccgcgtcgaagcacagatcgctcaattggaggcagcaaccttggggcgtgtcgacggattggtgaccgagacctccaatcgggtggcggtgctggagaatgccacctcggcgttcgagtcttggcggccacgagtcgaacattccgtggacggcatcaggaactccgtggacaccttgcgctcagaccttgctcggctgacccaattcctcgagcgcaacaacaacaccacaggagatcatcgcggccaagacagcatccttggaccatatgtaccagcgggagagcacacatctgcttccccgactcgtactggaaggcccgacgggcacggcactgcaactactaaccgggagtatggttttgggaaaccacacccaatccaactcccgatcaatggcgacaaatccattgggggtactttaccatctacagatgaccgtattgcctcattatatgcctatcgcaaagcaaaagggctctgctacaagtgtggattgcaatataaccgtggtcatcggtgttcagacacagtacagctacaagtagtggaggaattatggcaaatggtacaatgcaccaatactgaagcaattccagaatgcgccaaggtgtctgaagacaatgttgagattaatgtgttgcaattgtcacaagcagctatggatgggtctgaggcccgcccctcgcactatgaaatttgtgggtcacatagcaggcatggatatcttggcactgcttga

SEQ ID NO: 136580 - DNA, 1389 bp, Zea Mays
tgttcccccatcaaatatttcagaaggaagcgcagaggggctgctgcttcacaatcccctctctcggctgctcagtcagcgaccactgctgatttcatcgctagaatgtccaggccggccgctcgggtcctgtgtgggccgcagaagcagaagcggcagcgtcgccccagggcacctttggatccgtcaaaaattgtgtgttggaacgtgcggggtcttaatggctcggcccgtcaggatgttgttcgttgtttggtggactcagtcaaggctgatgttgtttgcctccaggaaacaaaaatgtcggttttctctcgcttgtttgtgtttcggttgcttgggtctgagtttcagaattttgttttcacaccttcagttggggctagtggagggattctagtggcttggaagaataatatcagctcatgtggctctaggattgatgaccattgtgtctcggtgaattttagccttgagactgggtcatcttggtggttgtcttgtgtctatgcccctcaagggaatcatgagaaaattcagttcttacaagacctcagattgattaggacccactgctctgggccctggctggttgttggcgattttaacatgattctgtgtgatgaagacaagagtaattccaatgttgatcgtgctatgatgggcagatttcgaaggtggaaggacgatcttgccctcctggagcttcctctgattgggcgcaggtttacttggtcgaatgggcatgcctgtcctactttagtcagattggacaggatgttttgtactgctgattgggaagatttatttccagattgccttctccagagtgctgctactcaagattcggatcactgccctctcttgttgggcctgtgtgatattaataaaaggaaagggcgcttccattttcaggccttctgggtgaaattggaggatttccaggatgttgtggctaacgcatggagttcgattcccgcaggccagtgccctcttgttagtctttccaagaaattacaggctacggcaaaggctttgcagcgttggagtgataataaagtgggggatttaaaactacagcttgaaatggctcgggagctccttcataggttggagatggctcatgacagcaggactctatctccaagtgaggattggttaaggcgtacccttaagaagcacatcttggtgctctcctccttgtcgagatctatagcccgtcttcggtccagaattaattggttgaaagaaggggacgctcatacttccctgttccatgctcaggctagattaagaaagaagaagaattttattggttcattatctacaagtgaagggcttattttgacatcacatgaggataaggctgatgagttgttccatttctat

SEQ ID NO: 136581 - DNA, 528 bp, Zea Mays
atgttcgagggggtggtaagccaggtgctctatggcctcctccgccgctacgtcaagggcatccagaaggagcagcttaagatcggcatctggaaggaagaaatactgcttgaaaatgtagagctgattctggaagcctttgactacctgcagctgccattcgcgctgaaaaatggacgaattgggaagctaagcatccggattccttggaaaaagctaggatgggaccctatcattattgtcatagaagattggagctcagattctctggacaagagggaactagctggaaagttggctaaacttaatgccattgagcttgctaaattttctagaagagttacagataatcaaacgggacaatcatttttgtcctacatatcagcaaagatactggatagtatccaagtttctatgcgaaatgttcatattgtatacatggatacccacaacggtcaagttaccatgaaggtggtcaaaagtttttcaagctcatttttcattgatgtcacaatgactggaatttaa

SEQ ID NO: 136582 - DNA, 1819 bp, Zea Mays
gtgagcggccactgcccactgcgttggccgcggtagcagctagcagtccaaggcagagctctcacgcggacggcggacctggccacctgggggggcgcggacggagccttcgctttcccccctaccctccctttcgaacgactaccgaggaggcatccgaggtggccagccacgatgatggccgcggcggcgctgaggccgcacaagtcttcgccggcgcgggtgcccacgcggtgcgtggccgcgctctgcgccgcctgcttcctcgtcggcgtcggcgtcgtcaacaggtactggcctgttcctgagcctcatcccggttgcccagacaaggctggccctgaccactcgagggccgtgttgaaccaagcgtcacagactcgcgaagtcgtcatggcgttggacaagacgatatccgacatcgagatgcgcctggctgcggctagagccgcccaggcgatgagccagggcatgtcaccgggcgactcggactcggagggcgaccagggaaccgcgcggcgtaggatgtcttttgtcatgggcgttttcaccactcttgctaaccggaagcggagagattcaataaggcagacgtggatgccacagggtgatcagttgcgaagattggaagacaagggcgttgttatccgttttgttgttggacgcagtgcaaatccaaacctggaaaatgaggtcgaccatgcaattgatatggaggatgaagaatacagtgatatcttgagaattaatcatgtggaaggctatggagggctccctatgaaggttcagatgttcctttcgactgctcttacaatgtgggacgctgatttctatgtaaaagccgacgataatgtccatgtcaacattggtatcaccagatcgattttggcgcgacacaggatgaaacctcgggtgtacattggctgcatgaaatctggacctgttgttgctaagaatgactccaagtattatgagccagaccattggaagtttgggactgagggtaacaactactttaggcatgcaacacgtcagttgtatgctgtaaccagggatttagcaacttacatatcagcaaaccggcatatcctgcacaagtattcaaatgaagatgtatcatttggctcttggttgatcgggttggaagttgagcatgttgatgagagaagcctttgctgtggtactcccccagtgtactccttgttgaccttgtgaagcaataagcttcttgtctggccggtctctcgatagcatgttctatccttttcacttcaatgctgctgtaactgactgcgaatggaaagggcaggccgggaacccatgtgcggcgtccttcgactggaactgcactggcatctgcaatccggtggagaggatgacagaggtacaccgacgatgttgggaaggccttggagccgaagggcacgcacagtctttgacttttgacagccaatagttggcgcttggcggatcattgtcgcaccattttcttcctcttctttagggccctgtaattaatatgcggagatgaacttgtatgcaatggctcggtttttcagatgtgcagcaatggcatcgtttcctggccagttcgcgtgcggaaactggggtagagaattaggagttcaatctgcaagtgagtctctaataactggagatgcctcactggacgtccgatgaaactggggtagactgtttgattctctgatgaaagaattagctgtctgtctgagttctctatgatttgtctctgatatgatcctggatgtgttggagacagtttattgctcgagaggaaatattataacctacttatgac

SEQ ID NO: 136583 - DNA, 1812 bp, Zea Mays
gtgagcggccactgcccactgcgttggccgcggtagcagctagcagtccaaggcagagctctcacgcggacggcggacctggccacctgggggggcgcggacggagccttcgctttcccccctaccctccctttcgaacgactaccgaggaggcatccgaggtggccagccacgatgatggccgcggcggcgctgaggccgcacaagtcttcgccggcgcgggtgcccacgcggtgcgtggccgcgctctgcgccgcctgcttcctcgtcggcgtcggcgtcgtcaacaggtactggcctgttcctgagcctcatcccggttgcccagacaaggctggccctgaccactcgagggccgtgttgaaccaagcgtcacagactcgcgaagtcgtcatggcgttggacaagacgatatccgacatcgagatgcgcctggctgcggctagagccgcccaggcgatgagccagggcatgtcaccgggcgactcggactcggagggcgaccagggaaccgcgcggcgtaggatgtcttttgtcatgggcgttttcaccactcttgctaaccggaagcggagagattcaataaggcagacgtggatgccacagggtgatcagttgcgaagattggaagacaagggcgttgttatccgttttgttgttggacgcagtgcaaatccaaacctggaaaatgaggtcgaccatgcaattgatatggaggatgaagaatacagtgatatcttgagaattaatcatgtggaaggctatggagggctccctatgaaggttcagatgttcctttcgactgctcttacaatgtgggacgctgatttctatgtaaaagccgacgataatgtccatgtcaacattggtatgcaaagatgggaccctttcgcctttgatcaaccaagtatagtgctggtgcatcacactgtgatttggggggctcttttcaatacaggtatcaccagatcgattttggcgcgacacaggatgaaacctcgggtgtacattggctgcatgaaatctggacctgttgttgctaagaatgactccaagtattatgagccagaccattggaagtttgggactgagggtaacaactactttaggcatgcaacacgtcagttgtatgctgtaaccagggatttagcaacttacatatcagcaaaccggcatatcctgcacaagtattcaaatgaagatgtatcatttggctcttggttgatcgggttggaagttgagcatgttgatgagagaagcctttgctgtggtactcccccagactgcgaatggaaagggcaggccgggaacccatgtgcggcgtccttcgactggaactgcactggcatctgcaatccggtggagaggatgacagaggtacaccgacgatgttgggaaggccttggagccgaagggcacgcacagtctttgacttttgacagccaatagttggcgcttggcggatcattgtcgcaccattttcttcctcttctttagggccctgtaattaatatgcggagatgaacttgtatgcaatggctcggtttttcagatgtgcagcaatggcatcgtttcctggccagttcgcgtgcggaaactggggtagagaattaggagttcaatctgcaagtgagtctctaataactggagatgcctcactggacgtccgatgaaactggggtagactgtttgattctctgatgaaagaattagctgtctgtctgagttctctatgatttgtctctgatatgatcctggatgtgttggagacagtttattgctcgagaggaaatattataacctacttatgac

SEQ ID NO: 136584 - DNA, 1759 bp, Zea Mays
cagggggataaaggtgagccgagtccacgtagcaaccgtgagcggccactgcccactgcgttggccgcggtagcagctagcagtccaaggcagagctctcacgcggacggcggacctggccacctgggggggcgcggacggagccttcgctttcccccctaccctccctttcgaacgactaccgaggaggcatccgaggtggccagccacgatgatggccgcggcggcgctgaggccgcacaagtcttcgccggcgcgggtgcccacgcggtgcgtggccgcgctctgcgccgcctgcttcctcgtcggcgtcggcgtcgtcaacaggtactggcctgttcctgagcctcatcccggttgcccagacaaggctggccctgaccactcgagggccgtgttgaaccaagcgtcacagactcgcgaagtcgtcatggcgttggacaagacgatatccgacatcgagatgcgcctggctgcggctagagccgcccaggcgatgagccagggcatgtcaccgggcgactcggactcggagggcgaccagggaaccgcgcggcgtaggatgtcttttgtcatgggcgttttcaccactcttgctaaccggaagcggagagattcaataaggcagacgtggatgccacagggtgatcagttgcgaagattggaagacaagggcgttgttatccgttttgttgttggacgcagtgcaaatccaaacctggaaaatgaggtcgaccatgcaattgatatggaggatgaagaatacagtgatatcttgagaattaatcatgtggaaggctatggagggctccctatgaaggttcagatgttcctttcgactgctcttacaatgtgggacgctgatttctatgtaaaagccgacgataatgtccatgtcaacattggtatcaccagatcgattttggcgcgacacaggatgaaacctcgggtgtacattggctgcatgaaatctggacctgttgttgctaagaatgactccaagtattatgagccagaccattggaagtttgggactgagggtaacaactactttaggcatgcaacacgtcagttgtatgctgtaaccagggatttagcaacttacatatcagcaaaccggcatatcctgcacaagtattcaaatgaagatgtatcatttggctcttggttgatcgggttggaagttgagcatgttgatgagagaagcctttgctgtggtactcccccagactgcgaatggaaagggcaggccgggaacccatgtgcggcgtccttcgactggaactgcactggcatctgcaatccggtggagaggatgacagaggtacaccgacgatgttgggaaggccttggagccgaagggcacgcacagtctttgacttttgacagccaatagttggcgcttggcggatcattgtcgcaccattttcttcctcttctttagggccctgtaattaatatgcggagatgaacttgtatgcaatggctcggtttttcagatgtgcagcaatggcatcgtttcctggccagttcgcgtgcggaaactggggtagagaattaggagttcaatctgcaagtgagtctctaataactggagatgcctcactggacgtccgatgaaactggggtagactgtttgattctctgatgaaagaattagctgtctgtctgagttctctatgatttgtctctgatatgatcctggatgtgttggagacagtttattgctcgagaggaaatattataacctacttatgac

SEQ ID NO: 136585 - DNA, 2018 bp, Zea Mays
gcactcataggttagctggtagcattacaacataaaaaaaggcaagaaagtgacccaatctttggtagaaccgcggaggagcagggggataaaggtgagccgagtccacgtagcaaccgtgagcggccactgcccactgcgttggccgcggtagcagctagcagtccaaggcagagctctcacgcggacggcggacctggccacctgggggggcgcggacggagccttcgctttcccccctaccctccctttcgaacgactaccgaggaggcatccgaggtggccagccacgatgatggccgcggcggcgctgaggccgcacaagtcttcgccggcgcgggtgcccacgcggtgcgtggccgcgctctgcgccgcctgcttcctcgtcggcgtcggcgtcgtcaacaggtccgtacgcctcccctcccctctccccagccctagcccctaacaacccgccagcatccggtccctcgcctcgctgcttttgcctgccagctgcaatctagtctgaggcaatgctcgtcgctctcaaggcaagggagcggtggtaactggtctgcatcgatctgtgtggattgtgcaggtactggcctgttcctgagcctcatcccggttgcccagacaaggctggccctgaccactcgagggccgtgttgaaccaagcgtcacagactcgcgaagtcgtcatggcgttggacaagacgatatccgacatcgagatgcgcctggctgcggctagagccgcccaggcgatgagccagggcatgtcaccgggcgactcggactcggagggcgaccagggaaccgcgcggcgtaggatgtcttttgtcatgggcgttttcaccactcttgctaaccggaagcggagagattcaataaggcagacgtggatgccacagggtgatcagttgcgaagattggaagacaagggcgttgttatccgttttgttgttggacgcagtgcaaatccaaacctggaaaatgaggtcgaccatgcaattgatatggaggatgaagaatacagtgatatcttgagaattaatcatgtggaaggctatggagggctccctatgaaggttcagatgttcctttcgactgctcttacaatgtgggacgctgatttctatgtaaaagccgacgataatgtccatgtcaacattggtatcaccagatcgattttggcgcgacacaggatgaaacctcgggtgtacattggctgcatgaaatctggacctgttgttgctaagaatgactccaagtattatgagccagaccattggaagtttgggactgagggtaacaactactttaggcatgcaacacgtcagttgtatgctgtaaccagggatttagcaacttacatatcagcaaaccggcatatcctgcacaagtattcaaatgaagatgtatcatttggctcttggttgatcgggttggaagttgagcatgttgatgagagaagcctttgctgtggtactcccccagactgcgaatggaaagggcaggccgggaacccatgtgcggcgtccttcgactggaactgcactggcatctgcaatccggtggagaggatgacagaggtacaccgacgatgttgggaaggccttggagccgaagggcacgcacagtctttgacttttgacagccaatagttggcgcttggcggatcattgtcgcaccattttcttcctcttctttagggccctgtaattaatatgcggagatgaacttgtatgcaatggctcggtttttcagatgtgcagcaatggcatcgtttcctggccagttcgcgtgcggaaactggggtagagaattaggagttcaatctgcaagtgagtctctaataactggagatgcctcactggacgtccgatgaaactggggtagactgtttgattctctgatgaaagaattagctgtctgtctgagttctctatgatttgtctctgatatgatcctggatgtgttggagacagtttattgctcgagaggaaatattataacctacttatgac

SEQ ID NO: 136586 - DNA, 1944 bp, Zea Mays
ggtgagccgagtccacgtagcaaccgtgagcggccactgcccactgcgttggccgcggtagcagctagcagtccaaggcagagctctcacgcggacggcggacctggccacctgggggggcgcggacggagccttcgctttcccccctaccctccctttcgaacgactaccgaggaggcatccgaggtggccagccacgatgatggccgcggcggcgctgaggccgcacaagtcttcgccggcgcgggtgcccacgcggtgcgtggccgcgctctgcgccgcctgcttcctcgtcggcgtcggcgtcgtcaacaggtccgtacgcctcccctcccctctccccagccctagcccctaacaacccgccagcatccggtccctcgcctcgctgcttttgcctgccagctgcaatctagtctgaggcaatgctcgtcgctctcaaggcaagggagcggtggtaactggtctgcatcgatctgtgtggattgtgcaggtactggcctgttcctgagcctcatcccggttgcccagacaaggctggccctgaccactcgagggccgtgttgaaccaagcgtcacagactcgcgaagtcgtcatggcgttggacaagacgatatccgacatcgagatgcgcctggctgcggctagagccgcccaggcgatgagccagggcatgtcaccgggcgactcggactcggagggcgaccagggaaccgcgcggcgtaggatgtcttttgtcatgggcgttttcaccactcttgctaaccggaagcggagagattcaataaggcagacgtggatgccacagggtgatcagttgcgaagattggaagacaagggcgttgttatccgttttgttgttggacgcagtgcaaatccaaacctggaaaatgaggtcgaccatgcaattgatatggaggatgaagaatacagtgatatcttgagaattaatcatgtggaaggctatggagggctccctatgaaggttcagatgttcctttcgactgctcttacaatgtgggacgctgatttctatgtaaaagccgacgataatgtccatgtcaacattggtatcaccagatcgattttggcgcgacacaggatgaaacctcgggtgtacattggctgcatgaaatctggacctgttgttgctaagaatgactccaagtattatgagccagaccattggaagtttgggactgagggtaacaactactttaggcatgcaacacgtcagttgtatgctgtaaccagggatttagcaacttacatatcagcaaaccggcatatcctgcacaagtattcaaatgaagatgtatcatttggctcttggttgatcgggttggaagttgagcatgttgatgagagaagcctttgctgtggtactcccccagtgtactccttgttgaccttgtgaagcaataagcttcttgtctggccggtctctcgatagcatgttctatccttttcacttcaatgctgctgtaactgactgcgaatggaaagggcaggccgggaacccatgtgcggcgtccttcgactggaactgcactggcatctgcaatccggtggagaggatgacagaggtacaccgacgatgttgggaaggccttggagccgaagggcacgcacagtctttgacttttgacagccaatagttggcgcttggcggatcattgtcgcaccattttcttcctcttctttagggccctgtaattaatatgcggagatgaacttgtatgcaatggctcggtttttcagatgtgcagcaatggcatcgtttcctggccagttcgcgtgcggaaactggggtagagaattaggagttcaatctgcaagtgagtctctaataactggagatgcctcactggacgtccgatgaaactggggtagactgtttgattctctgatgaaagaattagctgtctgtctgagttctctat

SEQ ID NO: 136587 - DNA, 826 bp, Zea Mays
gcactcataggttagctggtagcattacaacataaaaaaaggcaagaaagtgacccaatctttggtagaaccgcggaggagcagggggataaaggtgagccgagtccacgtagcaaccgtgagcggccactgcccactgcgttggccgcggtagcagctagcagtccaaggcagagctctcacgcggacggcggacctggccacctgggggggcgcggacggagccttcgctttcccccctaccctccctttcgaacgactaccgaggaggcatccgaggtggccagccacgatgatggccgcggcggcgctgaggccgcacaagtcttcgccggcgcgggtgcccacgcggtgcgtggccgcgctctgcgccgcctgcttcctcgtcggcgtcggcgtcgtcaacaggtactggcctgttcctgagcctcatcccggttgcccagacaaggctggccctgaccactcgagggccgtgttgaaccaagcgtcacagactcgcgaagtcgtcatgtaataccacaagcttcttccattccagaatctatctgcctggttaaaatatggggggtctgtctgttgtaatgcagcgtctcggtgtttcggttgcagggcgttggacaagacgatatccgacatcgagatgcgcctggctgcggctagagccgcccaggcgatgagccagggcatgtcaccgggcgactcggactcggagggcgaccagggaaccgcgcggcgtaggatgtcttttgtcatgggcgttttcaccactcttgctaaccggaagcggagagattcaataaggcagacgtggatgccacagggc

SEQ ID NO: 136588 - DNA, 820 bp, Zea Mays
acctctctgctaacgccgctcgcgcatcctattgccctcgcgccaccgtcgccgccgctgcagcgagccaccgccctgccgtcgcctgaggtagacaccaagccaccgccatggggcgtatgcacagccgcgggaagggtatctcttcatcggcgctgccgtacaagaggactcctccgatctggctcaagacagctaccaccgaggtgaggagatgattaccaaggctgcgaagaagggccagatgccgtcgcagattggtgttctgctccgtgaccagcacggcatcccgcttgtcaagagcgtgactggtagcaagatcctccgcatcctcaaggcccatgggttggcgccggagatcccggaggatctctacttcctcattaagaaggccgtggcgattaggaagcatctggagaggaacaggaaggacaaggactccaaattcagactcattcttgttgagagcaggatccaccgccttgcccgctactacaagcgtaccaagaagctcccacccacctggaagtacgagtcaaccacggcgagcactctggtggcctaagtgatatcctctgatggcttggtctttagcacctatgagcttgttctagatatgaatttatgtaattcttgttatgtctggagctggttagatggacaaggaacctcaactttttctatgtttacttggagaatcccataaaccatttttggtttcgcaattctgtctgttaaacgtaacatgcatccatgttttgtcgagcgtttcctccaccatcataaattcctgtagattatatttttcttctagttatca

SEQ ID NO: 136589 - DNA, 821 bp, Zea Mays
acctctctgctaacgccgctcgcgcatcctattgccctcgcgccaccgtcgccgccgctgcagcgagccaccgccctgccgtcgcctgaggtagacaccaagccaccgccatggggcgtatgcacagccgcgggaagggtatctcttcatcggcgctgccgtacaagaggactcctccgatctggctcaagacagctaccaccgaggtggaggagatgattaccaaggctgcgaagaagggccagatgccgtcgcagattggtgttctgctccgtgaccagcacggcatcccgcttgtcaagagcgtgactggtagcaagatcctccgcatcctcaaggcccatgggttggcgccggagatcccggaggatctctacttcctcattaagaaggccgtggcgattaggaagcatctggagaggaacaggaaggacaaggactccaaattcagactcattcttgttgagagcaggatccaccgccttgcccgctactacaagcgtaccaagaagctcccacccacctggaagtacgagtcaaccacggcgagcactctggtggcctaagtgatatcctctgatggcttggtctttagcacctatgagcttgttctagatatgaatttatgtaattcttgttatgtctggagctggttagatggacaaggaacctcaactttttctatgtttacttggagaatcccataaaccatttttggtttcgcaattctgtctgttaaacgtaacatgcatccatgttttgtcgagcgtttcctccaccatcataaattcctgtagattatatttttcttctagttatca

SEQ ID NO: 136590 - DNA, 1637 bp, Zea Mays
acctctctgctaacgccgctcgcgcatcctattgccctcgcgccaccgtcgccgccgctgcagcgagccaccgccctgccgtcgcctgaggtagacaccaagccaccgccatggggcgtatgcacagccgcgggaagggtatctcttcatcggcgctgccgtacaagaggactcctccgatctggctcaagacagctaccaccgaggtgagttgtttaaccaccactcccacattcctcagtgtttcgatttaggcgatgcaggttgtcgattgacgcgctcgcatggtatggatcggcaggtggaggagatgattaccaaggctgcgaagaagggccagatgccgtcgcagattggtgttctgctccgtgaccagcacggcatcccgcttgtcaagagcgtgactggtagcaagatcctccgcatcctcaaggcccatgggttggcgccggagatcccggaggatctctacttcctcattaagaaggccgtggcgattaggaagcatctggagaggaacaggaaggacaaggactccaaattcagactcattcttgttgagagcaggatccaccgccttgcccgctactacaagcgtaccaagaagctcccacccacctggaagtagtaagtcaaccagatcccattccttgcctgctcttgctagcagtgcctgattgcctgaaccatggatttgtgaattgatagctatctaagtgatgtttttttctgtgagagcccatatgtgccaattgcagcttaggagctgtcttagatcagttagtggtgtgtgtagatgctatgctcgtagtctaatcagttgaaattaaataaacattattggctgttatatattcaggttgaaggtttaggcttgcgtttttgttacacttcaatttgagatggtagtctttgtgtaggcatgtttagtgtgggtgtgtgttagtgggaatggcactattttgatgtttataacactggtatgctgataatggggtgttcattctgaatactgaacactgacaaagctgaacttgactttgtttcaaatactgctggtggcagcgagtgtccttgtttccattgaatgtagttgatgtcgaggagggctagttttacacttaaatcattagtcgagttcatgtgcatgtggcgaattgaatacaaaaattagtgaatttgcagaattatttttacggcaaaccttaaaactaagagtttcattaagtttcactctagctaatttgctgaccagcgaatgttttcttcatcgaaactgttagtacgttataggctgaactttgtccataagatcaattcagttgaccctaaaccctagcacctactgcacatcatttgtcatctatttgttgttatatatttgaactccttgttttgaagcttcttgcacattgctgaacctgttttacttgttttttgtgcagcgagtcaaccacggcgagcactctggtggcctaagtgatatcctctgatggcttggtctttagcacctatgagcttgttctagatatgaatttatgtaattcttgttatgtctggagctggttagatggacaaggaacctcaactttttctatgtttacttggagaatcccataaaccatttttggtttcgc

SEQ ID NO: 136591 - DNA, 1542 bp, Zea Mays
acctctctgctaacgccgctcgcgcatcctattgccctcgcgccaccgtcgccgccgctgcagcgagccaccgccctgccgtcgcctgaggtagacaccaagccaccgccatggggcgtatgcacagccgcgggaagggtatctcttcatcggcgctgccgtacaagaggactcctccgatctggctcaagacagctaccaccgaggtggaggagatgattaccaaggctgcgaagaagggccagatgccgtcgcagattggtgttctgctccgtgaccagcacggcatcccgcttgtcaagagcgtgactggtagcaagatcctccgcatcctcaaggcccatgggttggcgccggagatcccggaggatctctacttcctcattaagaaggccgtggcgattaggaagcatctggagaggaacaggaaggacaaggactccaaattcagactcattcttgttgagagcaggatccaccgccttgcccgctactacaagcgtaccaagaagctcccacccacctggaagtagtaagtcaaccagatcccattccttgcctgctcttgctagcagtgcctgattgcctgaaccatggatttgtgaattgatagctatctaagtgatgtttttttctgtgagagcccatatgtgccaattgcagcttaggagctgtcttagatcagttagtggtgtgtgtagatgctatgctcgtagtctaatcagttgaaattaaataaacattattggctgttatatattcaggttgaaggtttaggcttgcgtttttgttacacttcaatttgagatggtagtctttgtgtaggcatgtttagtgtgggtgtgtgttagtgggaatggcactattttgatgtttataacactggtatgctgataatggggtgttcattctgaatactgaacactgacaaagctgaacttgactttgtttcaaatactgctggtggcagcgagtgtccttgtttccattgaatgtagttgatgtcgaggagggctagttttacacttaaatcattagtcgagttcatgtgcatgtggcgaattgaatacaaaaattagtgaatttgcagaattatttttacggcaaaccttaaaactaagagtttcattaagtttcactctagctaatttgctgaccagcgaatgttttcttcatcgaaactgttagtacgttataggctgaactttgtccataagatcaattcagttgaccctaaaccctagcacctactgcacatcatttgtcatctatttgttgttatatatttgaactccttgttttgaagcttcttgcacattgctgaacctgttttacttgttttttgtgcagcgagtcaaccacggcgagcactctggtggcctaagtgatatcctctgatggcttggtctttagcacctatgagcttgttctagatatgaatttatgtaattcttgttatgtctggagctggttagatggacaaggaacctcaactttttctatgtttacttggagaatcccataaaccatttttggtttcgc

SEQ ID NO: 136592 - DNA, 775 bp, Zea Mays
ggaaacccgaaatataaaaaacccaaaaaaacccgacccgaaatttcgggtaaacccgaacgcccagtcctaccggccagccagccagccacccaccaccacaccacccatagcagccagtcgcccgcacgactctttcccggctacccacaccgcgcgagatctccgatccccgcccaaatcccacgacgccggcggcggccatgggcggcaaggacctgacggaggaccagatcgcctcgatgcgggaggccttctcgctgttcgacacggacggggacggccgcatcgcgccctcggagctgggcgtcctcatgcgctccctcggcgggaaccccacgcaggcgcagctccgggacatcgcggcgcaggagaagctcaccgcacccttcgacttcccgcgctttctcgacctcatgcgcgcccacctcaagcccgagcccttcgaccgcccgctccgcgacgccttccgcgtcctcgacaaggacggctccggcaccgtcgccgtcgccgacctccgccacgtcctcacctccatcggcgagaagctcgaggcccacgagttcgacgagtggatccgcgaggtcgacgtcgcgcccgacggcaccatccgctacgacgacttcatcctccgcatcgtcgccaaatgatcccgtcccttctccctcgagtctccgattcgccgatccaccacccccgcgctcttcgtctgtaatgacttcgtctcccgtccgccgtgatttcattttgtttacccgctagctcatttgaattc

SEQ ID NO: 136593 - DNA, 1120 bp, Zea Mays
atgcgatgcatttggttctatcgcaataatctaatgatgattatttagattctttgccggcatgtacgtacgtctcctctcctccagttccagctcgaccctaaccctaaccagctaactggctatataagcaccacggttgctgcagacattcctcactctccaatctccaaacttgcattgtctgctgtaggctgtagctacacactctctaggagcagcatcgagcgccggcccgctgtttccgagcaagatggggaaacaacccttcttcctccaccagctgctcgtcgtcgtcctggcactcttcgtctcgccgacgagatcggacgattggcttccggccaccgccacattctacggcggcgctgacgcctccgacacaatgggtggtgcatgcggatacggcgacctgtacgagcagggctatggcgtgaacaacgcggcgctgagcacagcgctcttcaacgatggtgcgtcgtgcgggcagtgctacgtcatcaggtgcgacagcagtaagaccggatggtgcaagcctggcagcagcaacttcgtcgtggtctccgccaccaacttctgcccgcctaactgggagctccccaacggcgggtggtgcggcccgcctcgcccccacttcgacatgtcccagcccgcctgggagaccatcggcatctacagcgccggcatcatccccgtcctctaccagcgggtcaagtgctggcggagcggtggcgtgcgcttcaccatcgccggcttcgaccacttctacatggtgctcatcaccaatgtcgctggcagtggctccatccagagcatggccgtgaagggcgccaatacggactggatccccatgtacaggaactggggcgccaactggcactgccttgctggcgggctcgtcggccagagccttagcttcgcgctcgtctccaccggcggacaaaacatcgtcttccaggatgtcgtgccagcgtggtggcagttcggccaaactttcaccacctaccagaactttgactactaaactttatccatgcattccttccacaacaacatatttgcaggttcgacaaatatattgtacaacaccagatgaagtgtattccttgtctaaagcccg

SEQ ID NO: 136594 - DNA, 2419 bp, Zea Mays
ctcccaccagtgcccctccgcgcgccatgccgtcccgtagctccctcctcccgctcctgctcctctgcgccgccgccgccgccgccgccgcgtcctcgcgcaacgccgagctggacgcgctgatggagctgaaggcggcgctggacccggcggggcgcgctctggcctcgtgggcgcgcggcggcgacccctgcggccgcggcgactacttcgagggcgtcgcctgcgacgcccgcggcagggtcgccaccatctcgctccaggggaaggggctcgccggcgccgtccctcccgcggtcgccatgctcccggccctcaccggcctctacctccactacaacgccctgcgcggggagataccgcgcgagctcgccgcccttcccggcctcgccgagctctacctcggcgtcaacaacctctccggccccgtccccgccgagctgggccgactcggtagcctccaagtgctgcagctcggctacaatcagctcacagggagcattccaacccagctgggtcagctaaacaagctcactgttctcgcccttcagtccaaccagctcagcggcgcgatcccagcatccctcggggacttgccggcactggcacggctagatttaagctccaaccaactcttcggctcaatcccctccaagctcgctgagatccctcgtcttgcaacgctagacctccggaacaacacactgtcaggaagtgttccatctggtctgaagaagctgaacgaggggtttctgtatgagaacaatccggagctctgtggagcgcagttcgattctctgaaagcttgtcctaacgacggcaacgacgacggcagaacgccccggaaacctgaatcgacctctgtcatcaagccccagcagattcaaaaggcggccgacctcaaccggaactgcggcgacgacggaggctgcttgaagccttcgacgctccctacaggggctgttgttgccggaacattcgtcatcgtggcaggagcagcggcctgtggcctgtccgcgttctcatggcaccgccgccagaagcagaagatcggcagcagttcggtcgagcatctggaaggccggcctagcctggaccggtcgaaggaagcatacgagagaagcgccgtgtcgtcactgatcaacgtcgagtactccagtggcggctgggacacttcatccgaggggtcacagtcacagcatggggtggcgaggctgtcgtcggcggcagagtgtggttccccgagcgtgaggttcaacctcgaggaggtggagtgcgccacgcagtacttctcggacgtgaacctgctcggcaagagcagcttcgccgcaacgtacaagggggtcatgcgggacgggacggctgttgcggtgaagagcatcagcaagagcagctgcaagtcggaggaggccgatttcctgaggggcctccgtgcgctgacgtcgctgcggcatgagaatcttgtcgggctgaaaggattctgccggtcccgggcgagcgggggatgcttcctcgtctacgagttcatgaccaacgggagcctttctcggtatctcgacgccaaggaaagcgatgcagcggacgccgccgccgtcctcgactggcctacacgggtctccatcatcaaaggcgtcgccaagggcatcgagtacctgcacagcagcaagctcgcgcaccagagcatctcggcggacaaggtcctgctcgaccacctccacgcgccgcgcctctccggcgcgggcctgcacaggctgctggccgacgacgtggtgttcgcggcgctcaaggacagcgcggcgatggggtacctggctcccgagtacgcgacgacggggcggtccacggacaagcagggcgacgtgtacgcgttcggcgtggtggtgctgcaggtgctggcggggcggcgcgccgtgtcgccgccccacctccagcaggacggcggcgggcggctggacgacctcgtggacccgcgcctgcgcgggcggttctcgcgcgccgaggccgccaagctcgccggcgttgcgctgctgtgcaccgccgaggcgcccgcgcagcggcccgccatggccgccgtgctgcagcagctcggcaccagcagctagtgatcgtcgtcgggcggtacggtggtgggccggagtcggagcacgctggctacctgcccgcgtgtggtgactgcttggtgttgagttagttaaccgctactgatctcggctactcgcttggtaactgcatttgctccttgtttgagctgagccccggctccttcctcgggagctcggttgatgtagtgtagtagtaaagtaagatggtgtgattgcatagtgacggcgagtttttattagttaactaccgcctcatggcactgatgttgtatcgaggatttctgttcgaaacgtggaaatgtcacgacgagttgcgc

SEQ ID NO: 136595 - DNA, 425 bp, Zea Mays
catgcgcgctcggtctctcctctccttctctctgcccgtagccgccgccgccgtgttgtcaccgcccgtcgccgccgccgccgccgccccgcccacccgccgtcgagacccgccgcccgccccgtcaccgcccggcgccccggcgccgtcaccgcccggcgccgccgccgccccgtcaccgcccgtcgccgccgtcgccccgctcgcccgccgtccacacacgccgcccgccccccgtcgacacccgctgccggccgccactgccctgcccactgctaagtaagtatttttatttttattttgtagtttccactgttgttattaaattattagtatgttaaataatgtttatcttattatatccgagggcctaaatttgattatatggcgaaatttggttatgtaattaattaagtttgttttcg

SEQ ID NO: 136596 - DNA, 808 bp, Zea Mays
caaaatcacccccggaaattcctaatcccaacccaaacagcccagtcgaatcgccccggtccgcaagagcggtcgcatcccaaagcccagaaggcccgaaccccagcgagacaagcccagagtcggtcgctgaaccgctagacgtgcccgcgccagcctcggagaagaacagtggccacgacggcggcggcggcggcggcgacgccactgatggagtccctggaggccctcgtggcgcacatccaggggctctccggcagccccgaggagctggcgcacctccacagcctcctcaagcaggcggacggcgaacccctgcgcgcccacgccgccgcgctggtccctttcctcgcgcacctcagtccagagacccactcactcggctacatctacctcctggatgcgtgcgcggcatccgcttccaatctgagcgacttcggcggcggggacttcctggtcaccatcgccggcttcctcaccgcgtgctcggcggaccagatacgcctggctcctgacaaattcctgcatgtgtgtaaggtgctcaaggatcaggttatgcagctcaacatgcccatcagagggatcgccccgttgcgggcggcggtccgtaagatccagtcctcgcccgagcagctgaccccggtccacgcggactaccttctcctgtgcttgctggcaaagcaatacaaggctggactcagcgtcctggaagatgacatattcgaagtggatcagccaaaggacctgttcctctactgctactacggagggatgatttacattgggctcaagaagtttcctaaagctt

SEQ ID NO: 136597 - DNA, 1554 bp, Zea Mays
tatgcattgtgcagccataaaattactagatgagctaactttttataagtggaaggatgatgaccctcaatttgaattccactgtctttcttgtgctaaggatatatcatgcccactgtctaataaaatatgttttgtatgcctttctatacagtgatgtagttaatgtttttgccagcatgcctactttctttagttcaggagctatgccattgattgttacattatgctcacttttattcataggttgctagaatacagaaaataataaacaacatacagagagggccagtccatcggcgtcatcgccgatggcatcgacaagaacgacaagccgcataaggtcaggctctactccatcgccagcagcgcgatcggcaacttcggcgactccaagacagtctcgctgtgtgtcaagaggctcatctacaccaacgatgccggagagatcaaacatatgtatgaacaacagaagaaaaagattcagcacaaaagatctatcggtgggcctgtagtggatcttggcaagattgtacaagtcattttggctaatgagataggtcttggcaagactgtacaggtgttgtcagcgtattcttttttcctggatgcatgcaggttttttgagcatattcttttttgcattgcaatagcaagcattgttctcattggtgaaattggaggtatgactgaggaggatgttgcaacattcatccaggtgagaagaactgcctgcaaatcattaggagtgctggcaaaattttctactcagtacacagagaaggccttggacttgttgatggacatgatgaatgatgatacagaagcagttaggctgcaggctctagaagcactatttcgtatggcaacatatggatgtttgagtgtgcaggagaagcacatgcatatggtattaactatgaacatactccgttcacaaatgcatgactggtccttccagatagataactatcatagatctggaatggttccattggctgacctatatgaggcggagggggtgattctattgcaggaggagaaggagggagtgattctcctagaggtggaggaggatgaagtgataggtgaaatggcaacagatgaaatggaacacaatgacagtggaccagtctttgatcagaccccaactcctcatgatgatacactaaaagggacaacactttctggaactactccactccttacagagcttgattgcgttcgttctctgtgggatttactctgttccaaggacattgaccaaagcagggttgtcatagattacggtgaatacaatggaaactgtctcgatatttatgaatctttcgcagaggggaagtgtcttgagaacgtgttcatgcagtgcttcgttgagtgtgttcgtgatgattccaaaaatcatcgtcgaactatgacttctaacagattattacttaatgtcaatgttggggtatgttcttcttcacagttattgtaattattcactgaatatacttacacactctctatgttgtttctaggctctgctaaattttgaagagcaggaacgtc

SEQ ID NO: 136598 - DNA, 559 bp, Zea Mays
ttcatgggagcatgtggtttgttaccaagatccgttgtatatacatatgacttatcaatgattttcaggttgttgtaactatccagtatcgtacaactgacctgttacctagggggaaacactgcatgagtgttgttggtatccttgtctgatatgaggcggagggggtgattctattgcaggaggagaaggagggagtgattctcctagaggtggaggaggatgaagtggtgatcgacttcaagccaactccaagtgccatgtagacctctgcctccgctccctgcacacatccctcccagtcgtcttcaaggtccagacctcctccccactcaagttcctcgtcagcacgttgcgcggtgccgtgtcgccgctttcctcggtgtccataggcatggtgcgaggcatactgcttcatctctaatcacctttatgtgcacatcgtccatatgtgacccccttctccatataatttcaacaaattttactcttttgggctccgtgtaatttcattggtaaaatctctactacttattaacgctgcaaagttaacctgtca

SEQ ID NO: 136599 - DNA, 1352 bp, Zea Mays
tccacctttcccgcaccttgttgcacataaaaattcccacgccccgcacccaacgacctccgcgtccgcccccaaaacccccgcaaaccctagccgccgccagctaggcaaggaatggccgccctcctgcggctcgccgcagcccgatccgccctccccaggcgcgccctcgccccacaccggaggctcgcggcggcggcggcggccgcgatggaggagtggtggtccgactgggagcaggacggcgaggaggaggcgcgcgcctcggcgccggccgccggccttgaccccgccggcgggggccccgggggcgtgcagtgggtcgtcatgggccgccctggcccgcagaagcacgcccacgccgcgcgcctcgccgaggtgctcgccgtgccctacatctccatgggcgcgctcctcaggcaggagctcaacccctcctcgcaactctacaggaagattgcaaactctgtgaatgaagggaggcttgtgccggaggacatcatatttgggttgctgacgaagcggcttgaggacggatacaacaagggtgaaaatgggttcattcttgatgggattccacgcacccgtatgcaagctgagattcttgacgagattgtggatgttgatttggttcttaatttcaagtgtgctgatggctgtttcatgaagaagcaatcgagaggcaacatctgcgcccactgtggacagctctttgacgtcagcaattcagcatctacgaactgtagccccagcctcgggagctatacatggcattctcaggcagaacctgctggtgttttaggcctcgaagcctcaaggatggagaggatgcgcacatatgctgagcagaccaagcagctggaagattactacaagaagcagaggaaaattgtggaactgaagacatctgctcgcccggtggagacatggcaggggctcgtagccgccctgcacctccagcatctggactcgcccccgacaccgcacaaactcaccgcgtaaatatcattattaattttgctacctccgagtagagagtctaaaggatcagaattccgatcctgcctgcagcatatctaatatccctatgtttgtgggttctggctcgagagagtcagtcggctgtcttttgttttgttttgttattgttatagataaaggtaagcgattttgcagacacgcttattgtatggttgtaaccgagagttgtggacttgccttggcttgcgagtgtactcgcttatatgctcctttgtgatgatgttttgcacctgtggtatcttcagttgctccattgtggtgttgtccaccatatgttttgttctgtgcatgatgttgatagtcatgccctt

SEQ ID NO: 136600 - DNA, 127 bp, Zea Mays
aattcgatttaacgttaaactatatgctgatttttcccttttatatttattttgatttaaggttaaactattgttggataaaatttctgtttatgaaacttacatataattcgatctaaggttggag

SEQ ID NO: 136601 - DNA, 321 bp, Zea Mays
atggacaggtccaggtcggccagcacctgcaccgcctccagcagcagccctcgcttcctggcgctgtccacctgcagcagcgtggccgtggggcagacggcattgtcgatgaccacccgcggcgtgttcatccggatcaccagcttctcgtactcatccagccactccatcgccgccggccggcttctctcgtgctccgcctgggtgagtgcgtgcgtgcagactgcagagtcagaggcaggcaacgaagagcccgggcacgcgggtcgcctgtatataaaagcaagcacgcgcgcccgcgcgccgcggcggcggctctga

SEQ ID NO: 136602 - DNA, 379 bp, Zea Mays
agttgcagccatgtgtaattcagggttatcatctatttctacttttctcaagttgttgtatatgttagtttgatgggggagatgtggtacatacttttgtccgcaacatcgctaacggtttgcctacacaaacctaccaaggttaactttgatcaggatgctacgcctatcacgcttttgatatgctggcggccaacgtgaatgcatctcacttacaatcgtgcatgttacctttccttccctgatgttcatccttagtgacttgtactgtgtagtggcagaagaaaaacctactctttttgtatatatcaactgcctgttgttaaaccttttgctacattgcatggctgcaaactgtgctctacttatttgtgtggct

SEQ ID NO: 136603 - DNA, 565 bp, Zea Mays
gagacgagacaactgatacagacttcattctctttgggcgcatggctcaaagaattgtcaaaaggccttgcgttatgctcatagcgagcactccatcaggcttcattccagatgcaatcacaaagctgcttgaaaggacgttcatttggaacgttagcttctctaggcacacaattaactctggaaatgtctgcttccaggtcaatgctactgtaaaggaactaggcaatcaaaatgttgacatttcaacatcaaccgcagggacacaccagtcttcgcttatgttctcacaaggtgcaagcagcagcatggaagacactcctcacaagacagacaccttgtcttcacctctgacacctttgacgccccagggtagcgtcaccactacaaagtatttggaaaccgttggcgctggagatgctgagtgtgtgactactcagtcctcgacaactaggaagagatcatgctcttcgcctggcaaatcaatagcgaaaaaactgttcgttgctgacgatgaggaaggaagcatcagtcaatccagtggaggtggtgttggtggatccag

SEQ ID NO: 136604 - DNA, 531 bp, Zea Mays
atgggaccgatccaccttcaccttctgcatgggagccggtctgccgctgctatggtggcccctggctccgtgcggacccacgtgcagctgcagcaagcaggggatgcagccctttgtgtgatcctcgtcggtgaacccggcaccccacggctgcatacgcttcagcactgcagcgacatagtcgccgacgctgttgtcctctccacagaaactgggttcacactcttcacctatccagatgtgcatactggtgttctgcatattctaatctcgatatttagaaccatatgtagcaacaaggaaagttggcagcattatttttccataaatatgactatcaataagttaaaccaccattctgcgtaccaactgaagcagtcttcagttgctggaaagctgatggaccatttaaaccctttggagagcgtccacttgattgcaatgcggcatgcatttctagccttgttctgtgtagaagagagaggatgtgatagtgaagggcccgaaacagagggtgccattagtatttga

SEQ ID NO: 136605 - DNA, 840 bp, Zea Mays
ttgtacacacactcactagtagcagcatcgatcgccggccggccgtttccgagcaacatggggaaacgcttcctccaccagctgctagccgtcgccctggcactcttcgtctcgccggcgagatcggacgactggcttccggccaccgccacgttctacggcggcgctgacggctccgacacgatgggtggcgcgtgcgggtatggcgacctgtacgagcagggttacggcgttaacaatgcggcgctgagcacggcgctcttcaacgacggcgcttcgtgcgggcagtgctacgtcatcaggtgcgacagcagcaagaccgggtggtgcaagcccggcaacagcaacttcgtcgtcgtctccgccaccaacttctgcccgcccaactgggagctccccaacggcgggtggtgcggcccgccccgcccccacttcgacatgtcccagcccgcctgggagaacatcggcatctacagcgctggcatcatccccgtactctaccagcgcgtcaagtgctggcggagcggcggcgtgcgcttcaccatcgccggcttcgaccacttctacatggtgcttgtcaccaacgtcgccggcagcggctccatccagagtatggccgtgaagggcgccaacacggactggatccccatgtacaggaactggggcgccaactggcactgcctcgccggtgggctcgttagccagggcctcagcttcgcgctcgtctccaccggtgggcagaacatcgtcttccaggacgttgtaccggcgtggtggcagttcggccaaactttcaccacctaccagaacttcgactactaaacttcattcatgcctttc

SEQ ID NO: 136606 - DNA, 900 bp, Zea Mays
tctgctagatactacacactctctagctagcacgtagcagcatcgatcgccggctggctgtttgcccggccgcaagctaagatggggaaacgcttcctccaccagctgctcgtcgtcgtcctggcactctttgtctcgccggcgagatcggacgactggcttcctgccaccgccacgttctacggcggcgctgacggctccgacacaatgggtggcgcgtgcgggtacggcgacctatacgagcagggctacggcgtgaacaacgcggcgctgagcacggcgctcttcaacgatggcgcgtcctgcgggcagtgctacgtgatcaggtgcgacagcagcaagaccgggtggtgcaagcccggtaccagcaacttcatcgtcgtctccgccaccaacttctgcccgcctaactgggagctccccaacggcgggtggtgcggcccgccccgcccccacttcgatatgtcccagcccgcctgggagaacatcggcatctacaacgccggcatcatccccgtcctctaccagcgtgtcaagtgctggcggagcggcggcgtgcgcttcaccatcgccggtttcgaccacttctacatggtgctcatcaccaacgtcgccggcagcggctccatccagagtatggccgtgaagggcgccaacacggactggatccccatgtataggaactggggtgccaactggcactgcctcgctggcgggctcgtcgaccagggtctcagcttcgcgctcgtctccaccggtgggcagaacatcgtcttccagaacgtcgtgccggcgtggtggcagttcggccaaactttcaccacctaccagaacttcgactactaaacttcatgcatgcctttcttccttccacgacaatatatatatctaaagcccaat

SEQ ID NO: 136607 - DNA, 1233 bp, Zea Mays
aagaaacccaaaagcaaatcgcgcacccccagtcccccaccgtcccacgccatgcggccgcccccttgctaaccaaccacggcgccgcgcgcgcgcatcgccgtcgcaatggccgccgccgactcgtccaagcccgcgcgcgcggccacgctccccgcccgcacgctcctcctggcgctccccttcctctccctcctcctcctcttcctctacgtctactccaccacctcgtggcgccctgcatcaggcctccccgcaaccgccgcaacaacaacaacaacaaccgtcgccaccaccaccaccaccaccgtgccgctgaccccctcccctccgtccccgcacatccggatgcggcggtcccggtaccgttcctacgacgactacctccgccaccagctgaacaagacgctggacccgcggctccggcgggtgtgggcgacgcgggactggcagcggaaggtggacgcgttcgcgcgcctcttcgcggggctccgggacgagggcctcctctccaacgcgtcccgcgcgctctgcgtcggcgcgcgcctgggccaggaggtggccgcgctgcgccaggtgggcgtccggggcgcgctcggcatcgacctggccccggcgccgccgctcgtcgcccgcggcgacttccacgcgcagcccttccccgacgccaccttcgacttcgagttctccaacgtcttcgaccacgcgctgtacccggaccgcttcgccgccgaggtggagcgcacgctgcgccccggcggcgtcgccgtgctccacgtcgccgtgcaccgccgcggggacaggtactccgccaacgacctgctggacgtgcgcggcctcgtcggcctgttccgccgctgcgacgtcgtgcgggtgtccaaggtcgacgccttcgggctcgacaccgaggtcatcctccgcaagaaggggtcgtctcgccgctgacgacgtctctagccatgcgtccatccgctgggtcctccacaacagtcaccgaccgaatacacgatccaatcttggcttgcaaactacgaacggcagagagaaaaaggcaagtgttgggcatcgatttattttggtttctgtactactaattgtggcattgtaccaacacctagcaaacacagtaggcatccatcttgttcttgctttgtatacctaggcaccgaattggtggtagttaggaaaaaacaattgagttcaattgaattgaaatcaatccgctttgattta

SEQ ID NO: 136608 - DNA, 1244 bp, Zea Mays
cgaacagtcgctcggcttcagctcgcccacgacgagaacgagacaaccccccgcatttcaaagcgtccttgggccgtgagcgtgaggaggcgccatggccagcgccggcgggcggcggcggtccaaggcgaagccgcgggcgagggccgggggcaaggcgaagaagaggaccaagtaccttagcctcaccgagctgctggttaaggcgcacgcgcaggtgggagcgtcgccacggtccccgtgggaggacgaggaggcggtggcggcggaagtgaagccggaggacgacgcctgcggtgacgacgacgacgaccaccaccaccaccaccacgaggcgtccaccctgttcgaggccgtgccggcgccgtcgctctccgacatcctgggcccgtcgccgcccgagtcgccggccggctccggctccggggcgctgccgggcgccgaggaggaggacctcccgcgccgcgcgctgcggggcagggccagggagcgctgggtgtactgcaccggcgggccttcgccgccaccgccagcgacggcaaccggcaccgccaccgccaccgcgtcgccgtgctcgtccgccgcgagcacgggcgcgtcgccgcgctcgctgctgctcaagctggactacgacgagatcctcgcggcgtgggcgggctgcgggccgctctacatcggcgccgccgtcagcccgcgtccggtcctcgcggacgctgaggtggctgtaggaagggcggagagggtgaggcggtacagggagaagcggcggcggcggcggctcttcttcgcgaggcgggtccggtacgaggttcgccggctcaacgccgtcaagcggccgcggttcaagggccgtttcattaaggaagaggaaagggagctccggcctgcgcctgcatagcctcctgccctgccctccttctcctttgcttcttccacggctgaagcattcattgagctgtctgtctgtctgtctgtctgatgtatgcttcccaaatctactgcatatcacacacagtcatagactgacagaccacaagtccacaacatgtgacccgttcctagtcagataggcccacctgtcagccaacgttctatgtagagtttgtcttgttccttgcgcctgccacagtgccacctgggtggacgagagcgggaggcgggagcagtgtcggcgacgccgatggctcggaaatcctttggcaataaaaaagaaaaagaactgagggaataactacgaagtaaaa

SEQ ID NO: 136609 - DNA, 1011 bp, Zea Mays
attccgtttggctggacctgcgatctgagggtctctgttcgtgtccaatggccatgcagagccaaggataaggtgtcgattctggagcacacactgggcgcctccggcctcgcagagataagcaaacccgatcccccggttctagaaacacggagacggaggcgctagctagcttaccttgccatcacctcctcgcctagcctgccactgccagcaggtgccaccgccatctctgctctgctctcgcaacgcaagcacacgcccggccgcctgccacagttgccatggcgaccatagccacgatggcgctgctgaagcccgccgccaaggccgcggcgcggtcggcgccgtccaccagcagcggcagcgtctcgctgcgcgtccggacggggcaggccgccaagaaggctgcgctgtccgtgtccgcgtcgtccacgctggcgggcgccttcctcgcggcgctggcgtcgtcgcccgacgctgcgctggcggacgtggcggcggcggacgccggcggcgacagccgcggccagctgctgctcgtcgtggtggcgcccgccatcgggtgggtgctgtacaacatcctgcagccggcgctgaaccagctgaaccgcatgcgcagcagccaggccgtggccgccggcctgggcctcggcgccgccgccgccgccgggatggcggccccgcccgaagcctccgccgccgtggtgcaggacctcgcggcaatcgccgccgccgcgcccgccgacgacagccgcggcctcctcctgctcatcgtcgtcgcgcccgccatcggctgggtgctcttcaacatcctccagccggcgctcaaccagctcaaccgcatgcggtccgactgaagctagctagctagcgtccgtttccgtatccgcggcgtgcgttgtagacgtgaagcacgtggttggttgatcaacgtacgtggacgtggcctgtctttccatcttcattcttgagcgaaatttgctcgcgctgtggtggttgacagtgaaa

SEQ ID NO: 136610 - DNA, 663 bp, Zea Mays
ccttgccatcacctcctcgcctagcctgccactgccagcaggtgccaccgccatctctgctctgctctcgctgcgcgtccggacggggcaggccgccaagaaggctgcgctgtccgtgtccgcgtcgtccacgctggcgggcgccttcctcgcggcgctggcgtcgtcgcccgacgctgcgctggcggacgtggcggcggcggacgccggcggcgacagccgcggccagctgctgctcgtcgtggtggcgcccgccatcgggtgggtgctgtacaacatcctgcagccggcgctgaaccagctgaaccgcatgcgcagcagccaggccgtggccgccggcctgggcctcggcgccgccgccgccgccgggatggcggccccgcccgaagcctccgccgccgtggtgcaggacctcgcggcaatcgccgccgccgcgcccgccgacgacagccgcggcctcctcctgctcatcgtcgtcgcgcccgccatcggctgggtgctcttcaacatcctccagccggcgctcaaccagctcaaccgcatgcggtccgactgaagctagctagctagcgtccgtttccgtatccgcggcgtgcgttgtagacgtgaagcacgtggttggttgatcaacgtacgtggacgtggcctgtctttccatcttca

SEQ ID NO: 136611 - DNA, 1607 bp, Zea Mays
gcaactttgatttgtcatcttgcgagcggcccacgagtcgtccacatctccacgctcccacccacaaaacaggcccaaactaaccattcctggccgcacacgtcaccccccggcccaaccctagcaccggcattccggtggcgcccaccccttaccccacatgtcattcacccactaacgacctcacatataagcactcttccgttcacagagcaaccacgcgcccccccccccccaaggccccaaccttccaggaaaaaaaacccggaatccgcacccatccatggccgccgccgccctgctgcgccgctcgccggcggcgcgcgcgctcctctctccggcgctctcgtcccgcctcgtcgcgtccaagccccactcctcctcccccacgcagccgccccccgaggcaaagggcgcctccagcacgaagaccttctcgatctaccggtgggacccggactcgccgtcgaccaagccgcacctcagggactaccaggtggacctgtccgactgcgggccgatggtgctggacgcgctgctcaagatcaagaacgagcaggacccgtcgctcaccttccgccgcagctgccgcgagggcatctgcgggagctgcgccatgaacatcgacggggacaacggcctcgcctgcctcaccaagatctcctccgcctcctcggcgtccaccgtctcgccgctgccccacatgttcgtcatcaaggacctggtggtcgacatgaccaacttctacaaccagtacaagagcgtcgagccgtggctcaagcgcaaggacccgccgccgcagctaggcaaggaggtcccgcagaccaaggccgaccgcgccaagctcgacggcatgtacgagtgcatcctctgcgcctgctgctccacctcctgcccatcctactggtggaaccccgaggagtacctcggcccagccgcgctgctccacgccaataggtggatacaggacagccgtgaccagttcaccaaggagcgcctggacgccatcaacgacgagttcaagctgtaccgctgccacaccatcaagaactgcacgcatgcctgccccaagggcctgaacccggcgaagcagatcgacacgatcaagaagctccagttggacgcctgaaagcggtcatgccttcccttcaagacgaacatggaacaaaacctgtgaaaaattgcccttcttttgcgccgtggttttctacctgacaaataattcccgatttgggggcctcctggaggtagtgtagggagtgaataactgctacagcatttcatttttatgccgtatctaatttggtcatctgcaatgcattgtatggatcaccatcacttgtggatgattgccgttgcactttaaatttgcttcacataaacgaaatttgtctggccttttgagagtgaacgagtgttaaattgttaataacagtccgtcgtactgtggcgctcgttggtgaacgtatatagggtaaatctggttgttatctataagtactacctccgttcttaaatgtctggttgttacctataaattgtactacctctgatcttaaatatctgaccccgttgacttttttaaaatatatgtggtaagaagaatg

SEQ ID NO: 136612 - DNA, 1582 bp, Zea Mays
gcaactttgatttgtcatcttgcgagcggcccacgagtcgtccacatctccacgctcccacccacaaaacaggcccaaactaaccattcctggccgcacacgtcaccccccggcccaaccctagcaccggcattccggtggcgcccaccccttaccccacatgtcattcacccactaacgacctcacatataagcactcttccgttcacagagcaaccacgcgcccccccccccccaaggccccaaccttccaggaaaaaaaacccggaatccgcacccatccatggccgccgccgccctgctgcgccgctcgccggcggcgcgcgcgctcctctctccggcgctctcgtcccgcctcgtcgcgtccaagccccactcctcctcccccacgcagccgccccccgaggcaaagggcgcctccagcacgaagaccttctcgatctaccggtgggacccggactcgccgtcgaccaagccgcacctcagggactaccaggtggacctgtccgactgcgggccgatggtgctggacgcgctgctcaagatcaagaacgagcaggacccgtcgctcaccttccgccgcagctgccgcgagggcatctgcgggagctgcgccatgaacatcgacggggacaacggcctcgcctgcctcaccaagatctcctccgcctcctcggcgtccaccgtctcgccgctgccccacatgttcgtcatcaaggacctggtggtcgacatgaccaacttctacaaccagtacaagagcgtcgagccgtggctcaagcgcaaggacccgccgccgcagctaggcaaggaggtcccgcagaccaaggccgaccgcgccaagctcgacggcatgtacgagtgcatcctctgcgcctgctgctccacctcctgcccatcctactggtggaaccccgaggagtacctcggcccagccgcgctgctccacgccaataggcttccgctgtgggggacacttatgaaaccaaaacccaacatgttcatgcaccttcaagctcgaggatatcacggggtgtcagagaagagaaacctgcgggaccacaaacgtagattgcttgcagaaaagtttgagctgagaggaaagctgtataaggctgtctgtagggaccctgatcttccattggatatgcgggagaagttccgctataaattgtccaagttgccaagaaatagctccatgacacgccttagaaaccgctgcattttcacgggacggtctcgtgctgtctacaagaaattccgcatgtctcgtattgtgttccggacattggcaaacaagggtgaactgatgggcgtaaagaaagcatcgtggtagatgttaacgagccagtagaaaaaaagcgctagctctgcactagtccaggaaaaataaggttgtttacatgcaatctttcagtgtgtgatccctgaaacaatctttgaagtttctgaccggcagaccaattttatttaagtattttagttgaatcagtgtactgttgttttttggatattttgcactcatgaagttaaaggatcagaacttgtttctgaatgcagaaatgttttctctgttatctta

SEQ ID NO: 136613 - DNA, 450 bp, Zea Mays
atatgcccgtatctgaaccaccacggcgatttcgcgggggtcgttctcttcctcagctagagcgctcccgtaccgagggtataaaatcgtgccgctgcttctttccccttgctcctaggattgcagcagattggctgggcggtgctgttggagggcagcctgagcaccacatgctcggctccatcctcctgtccacgctcacgccgcctgggcactcgtgctcgccgtcatcatctcaacggggcgccgcttcgctgtgttggtcgcggctcttgtccgcacctcgctgggatccaaccccaagctgtcgcggccatccatggttggctccaccgagctgtgctcttggggcctggtctccagatgcttcaccctaccggatcgagcagactccgcgggagaaaccagtgtagcagagccggagatcttggttttctgttaaataaatcc

SEQ ID NO: 136614 - DNA, 2783 bp, Zea Mays
gagtgaccgtgcgagaagggggaaaaacaatccaaacactctcgccagcacacaaatctcgcgcacgggttcgggggcgccagctcgatccgcggccgaaaccctaggtggtgacgacggtggtgctccgtggtggtgctggaggacgaggaggagggctgggagcgatgacgtcgccgaggaaggacgcggggttcctgacgcaggaccagcgggagaagctgcggatcgcggtgcagaacgcggagacgcagtcgctcgcctccccgcgctcgcccacggggggcaccacctccgcgctgctgcagcagtacgagctgcagatgctggagcagaagcgcgccgccgcggccgccgccgccgcccggggcggcggcggcggcggaggtgggcccaggcacgtgcgccggtcgcattccgggaaggccatcaaggtgaagaaagatggagctggcggcaaagggacttggggcaaactaattgagactgatgcagaggcatgccttgatcgaaatgatccaaattatgacagtggtgaggagccatatgagttagttgaggcccctgtttcaaccccactagaagactacaagaaatctgttgtccctttaattgaggaatatttcagcaatggggatgtaaaattagctgcttctgatcttaaagagttgggtcatgatggtttccactgttactttgtcaagaagcttgtttccacagcaatggataggcatgacaaggagaaagagatggcatcagtgcttctgtcgtatctttatggcaacgtggtcagttcaactcaaattaggctgggatttgtgctgctattagaggctgttgatgacttggctgttgacatacctgatgtggttgatgtgctcgcccttttcattgcacgtgcagttgttgatgacattctgccacctgctttcctcagcaatgcaaaagtgagtctgtcaggatcttcaaagggtatgcaggttgtacaaattgcagagaaaagctatctttcagcaccccaccatgcagagttaattgagcgacgatggggtggttcaacccacatcacagtagaagaggtgaagaggaggattgctgatcttctgaaggaatacatcagaaatggtgatacagctgaggcttgtaggtgcattagagaattggcagtgccgtttttccatcatgaggtggtgaagcgagctcttactcttggaatggagagtccagctgctgaagctcttattgtcaagcttctgaaggaagcatctgaagaatgtttagtaagctctagtcagatgatgaaaggattccaccgtgttgctgagagtcttgatgatctcattcttgacataccatctgcaaagtctgaatttcagttgttggtatcaaaagccatttctgagggatggttagattcttcctatgtgaactcaggtgtcaacggaagcgttgaagacgatgaacatgagaagctggctaggtacaagagggaggctgtatccataatacacgaatactttttctctgatgatacaacagaggtcatccgtagtgtcaaagagcttggttatccggaatacaatccgatcttcgtcaagaagctcataacaattgctatggaccgcaagaacagggagaaagaaatggcatcggttcttctcccttcattaagcatggagctgttctcgtctgaagacatcgccaagggatttgtaatgctccttgaatctgcagaagacaccgcgctggacatattggatgcctcagatgagctgggactgttcctagccagggctgtgattgatgacgttctcgcacctctaaacttggatgagattagcagcaagcttccaccaaactgcagtggggctgaaacattgaacatggcacgctcccttgcgtcggcccgtcatgccggtgagaggcttctgaggtgctggggcggtggaaccggatgggctgtggaggatgccaaggacaagataacaaagctcctggaggagtatgagagtggaggcgatgtaggggaggcatgcaactgcatccgtgagctgggtatgtctttcttcaaccatgaagttgtcaagaaggcgctcgtgatggcaatggagaagaagaacgagaggaccctgaacctgctgcaggagtgctttggtgaagggatcataaccatcaaccagatgaccaaggggttctcaagggtcagggatgggctcgacgatctggctctcgacattcctgatgccagggagaagttcctttcctatgtgcagcgcgcgaagaagagtggatggctcctgcctgggttcggtgtggcatcttcggcttgaacagctgggcagaagagaagtacgaagctgaagcggctcagcaaacccagtttggatgtgtgttttcgtcgttcgtggttgcccttgcgcctaggttagcggagcgagcccttcctggttgcggtggtggtggcttgtgtaggtctcgcatctgacatgttcatgctgttcttgtttcatttcatttaactctccatagaccctttttttttacatcaagctaaaacagagaagagaaaaaaaagaccatgttgtaaaagttctcccatgctccgcctgcattgcggccggttttttcatcctcatttagctgcaatcgtgcgttcctgccctctcatggccgccgtagctgtttttctatgccattggatgcttggattgtgattgctagtttgttactcttttattctttgtggaaatggtgtggcctggtgaatgcctggattgctagca

SEQ ID NO: 136615 - DNA, 2646 bp, Zea Mays
ataggatcacctattcacccccctctaggtgctctcaataacctatgttcgttaagttagtcgttgtgaactcttttctaatcgttcactttattggtcgtgttgtaccaagacatattaaatggagtaaacaataacaccagttagtcaaattaaaaaatattatacggagagcagagacaatcaataaaaaatcttgagatttttttggtagatagtttacgtgggtattgttgtaagctgttggaacgcataggcaactgactagtatggtatgtatggacgagctcagctatatcgttaaacttgctcttacaagctaaaagtttcagcgaaacaaatatgcactgagctatagctccaaagtaaagcaatggaggtatcctaaaaagaccaagaaaaaaacaataatatgcgaaagattacacaggaggaaaaagaaatcgtagcaccggtaaacgtggtggaggtgggggattcttcggcgcggtgcgcatcacaaaaacgcgttcgccaagaaatattttttaccgggcgaggccgatggagcctatccgttctgtcgagaggagatttggatttggtccaaagaggacctcgccgtcgtctttaatttcctcacccgatttgggccctcgcgctcgcgcaccaccaccacctactgtgtctcctctcctccctccccgtctccctccgctgcccctgcaccgcctgccgggaagagaccgcaccagccaccagcgcctccgcgagttcgacccccaatccccacagcttcccgcaccaacaaatccgcccaatttgcgggccactcccggcggaaattcgtgacaaagccgcggggggttttttttttttcccttttttctttcgctcccccgcccccgttttcccttttgactccgccgccgggtctgctcctttattgctgcgcctgcctgattgtcttttctcgtcggaacgcgcggtatcccgagggcggcgatcgcggattcgcctccggaagcggcgatttggtccccagtacagtccgccatgattaagcaaatcctcggccggcttcccaagaagccgaccaaggccggcgagaaggagctggccggcgcgggcccgtcgctgcccagcccgacgtccgacgcgagaaccaccaccgatctgaccgcgtctagcaggcttgtcagccccagcaactacgcctccgcggcaacaaatccaggccagagctacgcgcccagggccgccgggctcggcgccggcgccagcaacgggttcgcgggctcggcggccgggtacgaggcgctgccgagcttcagggacgtgccggcgtccgagaagccgggcctgctcctcgggaagctggccatgtgctgcgtggtgttcgacttcgcggacccgaccaaggacgtgcgggagaaggaggtcaagaggcagacgctgctcgagctggtggactacatcacctccgccaccagcaagttcccggagcccgtcgtgcaggaggtcgtcaggatggtgtctgtgaatctgttcagggtgcccacccctgccccgagagagaacaaggcgctcgagtcgttcgacatggaggaggaggagcccgtcatggaccccgcgtggtcgcacttgcagatcgtgtatgagctgttcttgaggtttattcagtctccggagacggacgcgaagctggccaagagatacattgaccacggcttcattatcaggcttctcgacctcttcgactcagaggatcctagggagagagagtacctgaagacgatccttcacaggatatacggcaagttcatggtgcatcgccccttcatcaggaaggcaatcaacaatatcttctaccggtttatattcgagacggagaagcataatggtatcgcagagctgttagagattctggggagtataattaatggctttgctttgccgctcaaggaagagcacaaattgtttctagtccgagcgctgattccactccacaaaccaaaatgtgttgccatgtaccatcagcaactgtcgtactgcgtcactcagtttgttgagaaagattgcaagcttgctgatactgtcataagggggttactcaagtattggcccatcacaaatagctcaaaggaggtgatgtttttgggtgagttagaggaggtgctggaagctacacagccagcagagtttcagaggtgtatggtgccacttttccgtcagattgcccgctgtttaagcagttctcactttcaggtggcagagagggctctctttctatggaacaacgaccatatcgagggtttgatcaaacagaacaacaaggttatactgcccataatcttcccagcgttagaacgaaacacgaaaggccactggaaccaggcggttcaaagcttgagtctaaatgtccggaaaatattcatggaccatgatcccgcgctgtttgaggagtgtcacaagaagtttgaggaagaggaagcccaagaagctggcgtaagtgtcggtttcatcatcataggacaaaggaaaggaggtaaaatggtctttttccgggtcaatgtcttgatccaaggactgttaggagcacttgaaagacgaggaaggaggcaggtagcacttgctcttgctgatggtgattttgctgaaatgtaa

SEQ ID NO: 136616 - DNA, 318 bp, Zea Mays
tcacttgtattgatgcccaattgcatctaaaagtgttgtccacttctattgcagcagtgcttgaggattcagtgatcagcagatctgcaaggacaaaaggtatgtctattgacccttccctatttttttatctataaatgtatatattatataagttggcaaaacgcctagcatcgcctaggcaagcctaggctggactattctctaggctaagggtcatcgcctagattccgcctagcgcctagcaaaactttgtactttagcaaccactcattattttaatctatcttttcttataagtttgaattcatgtgactt

SEQ ID NO: 136617 - DNA, 1466 bp, Zea Mays
actaagcagagagaataagcttaccaagtcatcagtcatggtcacggctagtgcgattcaggcttttgtgaacttggtcctcactccttgtgatgctggttatttcattgccaagtttgcaccaaattatttcatcacctacatgtcgttccagatgacaggtgttactgacatattggttggtggttgcgattccaggacacttaatcatgatgttgattggttggagaaggttctgaaagataaggagcatgtcactaaacttgttactgttttgaaaaaagtgaggaaccttcttgacttgtccaaagacaacctgcagatcaaggaaatacaatatgaatccacatcagatgagagggtaccatcagggaagattatacttattgatttggatggttctgagaaagttgagacaactggtgctaaaggacggggtcttgataaggtgaagacaatcaacattgtcattgactcactaagctttgtttcagtctcaatcttccagcttgaagggattgtattgggtctaatcgccagtgctgtcagattctctggtctgggtgctgtcagtagtggccaaggcaatttttctatctttgtttgggatcctggtaatcgcgctgtcatgttgctcgcttcaggtgttgttctagtgttgcaagagctgtcacatttcagatggagggctgcagaggcgtgatgcattcaacaatgacgctaatcaacaaccgaagaagttgatcatacaccgtcagcggcttgggggcaagccgcatttcaaggagtggggaatgttaggtatactagatggactatggtcatgtgtactagagaggctataggttatgagagcttaaggagatataaatacatgctgagccatctgtaaaggacatcaaaagcagaaatatcagaactctatcgagaagccttcgtgctcctctgtctctacctcttttcttctccaagtctccatcacagccgagcactgtcctcttccgaaatctcaatctacgagttcttcttccagttctcttgatccccttcctagggagtgctaacaagttgttgaacagagaaaggaagtgcaggcgacgtagacggccgatggcgcctggcacctcgccgtccagcatgttggatccaaggttcagcttccggaggaacgtgaggttgccgatcgccggagagatggtgcctgacagctgtctcgatgatatgtccagcgacgccactctgccagggtgccggcggcgggtgcatgtcacgccggtccaatggcagaaatcggagcttgtgctgttccacgagctcagccagcccacggggtcggagagctccagcttgatcgccagcaaagctcttcgatcgccactcacttcctgctcggaggaagatgcatgcctacatatgcaatggagcaggagcatcagtgttagactatgtgtgtgtgagtgtgtgtg

SEQ ID NO: 136618 - DNA, 464 bp, Zea Mays
cctcgccctcccgctcctccgcgccgtcctgtcccgctcggctgaattgttggtggagggctggaggcgctctgccgccttccgatccgtctccctgcctgcgtcgccacgcacttccacgacctcctcgccagtctcgccgctccgatccatcgcctgagagcagcgaaaaaagattcatgttgttgtatggctgttgcctcaaactatcattatgtttgtggaggaactgtactacatttttctcaaagaaattcctattgccctttgaagttgtggtctgtaaagtacaaaaataggagaacgccagggaatcaggcttaccataaccctatacatagttctcctttaccacatctctgattccatgcagctcaatggccgcatctttcatgctcattctctctgatggggtttgttttgagcatgagatgccgactctgacaactgaagctaagcaagcc

SEQ ID NO: 136619 - DNA, 204 bp, Zea Mays
atggcggcgatcaaggcgcggatcctgcggtgcagcgaggccaaggccgaccaccacaaccagggccgccggttcaagcgcggctacctcgcccccggctgcggcgctgtcgactccgccgtcttctacctcgcctgcctcgtctgcaccccgccgcggccgtcgtcgtcggcggtctcgattatattggcgtccaggaactag

SEQ ID NO: 136620 - DNA, 502 bp, Zea Mays
ggctcctgagctgtgtggatctttctttagtaagtattcaccggctatcgatatgtggagcatcggttgcatttttgcggagattttgactaggaagcctttattccctggtaaaaatgtggttcaccagttggatttgatgactgatctcctgggtacaccatcagcagatactatttcacagattcggaatgagaaggcaaggaggtatctaagcagcatgaggaggaaacagccaatacccgtttctgacagatgtggttgtaactgttgcaatgttcatattaattggcttattctagatgcaacactacaggacaaaattggatggctctttgcacctttggtgctacttcagtttattctaacggggagcgttgagttagtgaacatgcacaaatacaatagttatgttctaaaaggctataatccagtctacaccttccggtatttgagacgaggtaattctgagatttggacatctcctagagtggtctcctag

SEQ ID NO: 136621 - DNA, 1320 bp, Zea Mays
atgtcggaatcatgtgatcaagtgaaggccatcatcaactgtttcttcctctatctattcatcatcaataattttgttgagtggtgggttttggcaggctgttttcttggagctatgtatgagcagagttgcaattttgacaccactaaaccttcaggtataagagagggggaacctgtgcttcatgctcgtggagatggcacatgctcctattgtgacattgcaaaccataagtattcaccggctatcgatatgtggagcatcggttgcatttttgcggagattttgactgggaagcctttattccctggtaaaaatgtggttcaccagttggatttgatgactgatctcctgggtacaccatcaacagatactatttcacagattcggaatgagaagacaaggaggtatctaagcagcatgaggaggaaacaaccaatacccttctcagagaagttccccaatgcagatcattcggcgctcaagctcttacaaaggcttcttgcatttgatcctaaggatcgaccaacagcagaagagaagcttaccaaagaggacgtcaaggaacttatattccaggagatactgcagtaccatcctcaacttctgaaggattacaagaagggtctgaaaagacgagttttctatatcccagtgcgcgccgttgacaggttccgtaggcaatttgctagcttagaagaaaatggagagaggaatgtcgcgcttgacaggaaacatgtttctctcccaaggacaacaaccgttcactctactccaattcctgcaaaggaaggtccagcagcaacctcccaggttgctcaaaggattccagcagctagaccaaaaagagtgtattcaccggctatcgatatgtggagcatcggttgcatttttgcggagattttgactaggaagcctttattccctggtaaaaatgtggttcaccagttggatttgatgactgatctcctgggtacaccatcagcagatactatttcacagattcggaatgagaaggcaaggaggtatctaagcagcatgaggaggaaacagccaatacccgtttctgacagatgtggttgtaactgttgcaatgttcatattaattggcttattctagatgcaacactacaggacaaaattggatggctctttgcacctttggtgctacttcagtttattctaacggggagcgttgagttagtgaacatgcacaaatacaatagttatgttctaaaaggctataatccagtctacaccttccggtatttgagacgaggtaattctgagatttggacatctcctagagtggtctcctag

SEQ ID NO: 136622 - DNA, 1703 bp, Zea Mays
cgaacttcgtcgagctgcaagaaggaaaaggaggtagtcgccggggtcggctgtgtgcgagtcgacgctcgggtctgggtggttgaaggctcgtctgtgcgtggaggctctggcaagctacaggcgatgcgacggcgcgcctctaaccagcctcgaagttcactcgagggggtgctacaggacgccggagcgaacagtcggccggccagccaagtcgtcgtcgctcaaaccaggcaaatcgtctcacccgcgtgcaaccggggcgcgacgtggaggtcaagctcaagccccgcctgtgggtggcactctccttcatcccgtcgccctcaacgccacagtcgggaggcctcgatgctcgcgcccggcgtctctgacctccttatccacgtcatccagcttcccctgtgacggctccgcctgctcctaccgtatcctttttccgggctacccgcggcgtcggcgtctacgtccacgcttatctcctcggcgacgttcacgcagcaccgccgccctgggtcaatcactcaatcggatgggggacgatgaagatgactcatacaccgttgattaggaaatgcgtggctccgatcatatggccaaggtaacgtttcgctcggatttatccaatgccgtagatctaggatcgtatggtcgcgggcgcacgtaatatatttaccatagatctcggatccgacgaccgtaatcgcataccagttcattaagcgccagatctaatcttagccacagaactctgatcctacggcctgtgtcgccccataccctttcgctcagacctctttgcatagaagccccagtttttagttaaattagagcctgcagtcctgcattggatgatgctaagtcttaggaatctttgcgggttagtccctgtgctttccaatattttgcgcgcagttcagacaataaataaaatcagagaaattcattttaatacaaaaataatggtagaagcttgtataaatcatagaaaatgcatattaaatcctttttagtccattccaatttctataattttgtaatattatggtttatcatctagtaccattgttttcacatgaaagtcatattaaaatttatatcctatttaatcttgtgtaaaacacataaaatcattagaaattcataacttaaatctatgatcccgatttgatccattcaaattgcgttagtctcgtataaatatttaatatgcaatagcaacacttattgtaccatgtctcattattttataattagatctatatttaacttatgttggttagtcttgttaaactgctcatctactaaaatatgatctatggtcaatttataatttagattaagttgaattaattactactataggttaccttttctctgggattataaaataaacacagaacctggtgttaatcatgtaatcacatcataacttgatgaccacgactccgatcttagtagttctcgaacccacgatctcgtagcaacgtgtagattactattattcagtttgtacttatgtttggtgtaatgttaattttgtctatacactgtttgtttgtattgctacgactagcggtgaggtcacgaggatctgaagaatcaccctggtaactggaatctcaagtgccaggtcaagaacaggtaccgcaggatgaggcgcatggaggatgctgcgatgagttcgtgagagatctaggtcg

SEQ ID NO: 136623 - DNA, 3039 bp, Zea Mays
atgcccatgtatatgtacagaaacgggggtgtatgcagtatgccaccaggagaagaagggagtacccatggaaacatcgctgatggggatgcaccaaggagacgtcaacgtcgccgccgcatattcaggcgttccacggagaggaagaacccagagaatttagagtttgaacgtcaagtagctgcattcgaggctaggcaggaacaacaacggcaggaccagatttcaagccaccagagacaatatgtgaaaacaagcacaggtgttagttaccggccggcctgtcaaaactcctacaaagaaccacaacaacgcatcacaaatcaaggtgaagtctccccttttgtcaacttcgaaggattggcaggtgaggggaaggggagcttttacaataatgttggtatagaatacaataagaaacaaaggactgatgcttttattggatcattgagtttcaaagtatattttcctcatctgaaaatattgtcagacgatgtgcaagatggagacagcactcagccggctggtaaaggacggcttctaaaagattcagctaagccacctgatgatacagatttcctggaaggtacttttatcaagataaattcagacaaacagaaagctacaagaaataagaagagcggcaagaacaacaaaaagaagaaaaagggcaagagcaagggcaaaggcaagggtagaaaacagtcacatgcttcagaaatgcagactgggtcacccacccaacaaccttcttccacatgcgctaacgcgaccggtggcgaaacctcggcgtcctcgtccagccgtgttgccgttcgggtgccactactggaatacagttcttcctcctccagctgtcgggtgacagcaaaacttgtcatcacttctgctgtaaacagtgcatcttctggtaacgagaaggaactatctgcttctagcagcagtgatgacttcaaaagctttgagagcactacttcatacaccactgctgctagtcgttcatctgctaatgactattatactggtggcaatgcatggaactgcaccatgggtgattatgctggcagcttgtcagatgcgagaagtgagccgtcattgtctgcatcagattattctacagattcacgaggttttaggcgcaagacgacgagtggtgaaggaaacagaccaaatgttcaccatcaaagcttcagtttattagcagtcggtcctggctgtagccaagaagccttgctctgcagcggttattctagcaatggtggtgatttccaggaagttgtctccaggaaagcagcacagaagatgaaaaggatgcaacgatcaactcctgctacgactagttcatctaccatggctgcttcaggacctattgtagcacgtgcacacttcccaagagctccattccgtgaggtcattacaataggacattacataaatgatgatacattttatgctagaaaaccaaaccagaaaaagggtaaataccagaaggcccgcagtttcagtaacatgtcgtcaaagaccggttatactactgatcatggagataatgtttcagctggtagcaacagaatgcttcttataacgacagtgcaccaagcaaaacccaggagtggtcatcatgttaccctagaggctatcgaggaaactagttctccaagctgtcttcccaatcccaaggcaggagagctgaaagccatggctccagttggtgatggcatcatcaaggacacagattcaaaaacaccatcttcttctgataaactttcatcactactaggtcatctggataactcttcatgtgttgatagtagggaaggacagaaaaaagctatggcggccccagtcgatggtgacaccgaagacgcaagagcaccaccatcttctgataaaacttcatcactagataatctggataatccttcatacgttggcaaggaagaacaggaagaagttgtggctccagttggtgttggcactgaagcagacagagattctacagcaccaacttctgataaaacttcgttactaggttacatggttaattcttcatgtgtggatagggacgaagaacagcagaacaaagcaaaattcagtactgatgcatcatcgtctgagttggataagattattgaagccgttaataatgcatatggagttcagcaagcagcatctgatgtgtacatgatcagtgccggtatccatgccgatattgaaaacttcttacatgcggccaccccagtgattggacagacatcttgcacaaaaggtaacatgagcttgcaagatctgcgtctgtggaacgtgtggagctggtatgaagaacctgagtgctgtgggattgaagttcagatgcagggaaagaccaattctagctggccagaactttctacatattttgtacctcttctatctgcggttcagttgtttggacagccagctgggaagtcacaaagtcacggcagcggactcgtctttgagtacttcgaatcggagaatcccttttcacggcctccaatcttcaccaagatcaaacagcttcggcacggcgtaaacctctctgctggtaatccaatatttggggatcctaagcaacttgaaagtgtcaagctatctgatcttcatcctgcttcctggttctgtgttgcctggtaccctatttgtcagatacctgcagctgcagggagctgccaagcttcattcctgacataccactccctaggaaaattggttccacaaatttgctctacggataataaggctgatgcgtatgatcgtatgatctgtccgattgtgggtctgcttgcctacaaagaccagggagagaagtggtttcaactgagagaacaacaactcaggatcaaaccaaggccaccctcgggaaccgaccatgctgaactcctgaacaagaggctgagggcactgaggcaatgtgcatcaatcatgtcgaaggcagtggtgccaagggcgccatctggagaagccatgaactatcattcagattacgagttctttttgtcaaggtcgtctctgcagtaa

SEQ ID NO: 136624 - DNA, 1837 bp, Zea Mays
cttcgtctattgatttcaatagtagcgtttgagtgcgtgcgaacatcgctgtcactggggaaactcagtcacgggcatctggggcgcaggaatctctcgcggagaccgcgacgtcctgcaattaaaatatatatgcttattcatgtgccaagactgtgtcagctaacagcgacaatggttgggggcaaacaaaacttgcaggacgcgaggagcgcgcgggagaaggccatcgacgactggctcccgatcacctcgtcgcggaacgccaagtggtggtactccgccttccacaatgtcaccgccatggtcggcgccggcgtgctcagcctgccctacgccatgtccgagcttggctggggccctggcatcgcggtgctggtggtgtcgtgggtgatcacgctgtacacgctgtggcagatggtggagatgcacgagatggtccccgggaagcggttcgaccgttaccacgagctggggcagcacgcgttcggggaccggctgggcctgtggatcgtggtgccgcagcagctggtcgtcgaggtgggcgtgaacatcgtgtacatggtgaccggcggcaagtccctgaagaagttccacgacgtgctggtgtgcggcgacacgggggtgtgcgaggggaaggacaacatcaagaccacctacttcatcatgatcttcgcgtccgtccacttcgtcctctcgcagctccccaacttcaactccatctccggcgtctccctcgccgccgccgtcatgtcgctcagctactccaccatcgcgtggggcgcgtcggtgcacaaggggaggatgtcgggcgtcgactaccacctgcgcgcgaccaccacgccggggaaggtgttcggcttcttcggcgcgctgggggacgtggcgttcgcctacgccggccacaacgtggtgctggagatccaggccaccatcccgtccacccccgacaagccgtccaagaagcccatgtggaagggcgtggtggtcgcctacgtcgtggtggcgctctgctacttccccgtcgcgctcatcggctactgggcgttcggaaacacggtcgaggacaacatcctcatcacgctcagcaagcccaagtggctcatcgcgctcgccaacatgatggtcgtcgtccatgtcatcggcagctaccagatctatgccatgccggtgtttgacatgatagagaccgtgctggtgaagaagctgcgcttccctcccggcctcacgctgcgtctgatcgctcggaccctctatgttgcgttcacgatgttcatagccatcaccttccccttcttcggtgggctgctcggtttcttcggcgggttcgccttcgcgccgaccacctatttccttccctgcgtcatgtggctcgcaatctacaagcccaagaggttcagcctctcctggttgaccaactggatgtgcatcattcttggggtgctcctgatgattctgtcgcccatcggagggctccggcaaataataatggacgcgaaaacctaccagttctactcgtgagctaccaccagccatgacttgtaagcacgattggagaaatctgtcaaagcctcaaccacgagtttttgtttttgttttttgtcatgccaaacacatacatatacgtactgtttttttaatattcaaaggtgttcttcgtggcttgcgtgtgtacagtattatgtgtatgagggagacataagtttaatgatgctggctgtcaaagataatggcggttcaattacactttcatctcacttgcttcgtagctaggactttggaaggggctacagtatgtatttgggattatttgagcagtgtgttttttgtcgtttct

SEQ ID NO: 136625 - DNA, 2091 bp, Zea Mays
agcttccagcttccagcctccagcctccagcaccagggtgtcagagcgtgctccgaatcccccgccaagaaacgcgagagcctccatcacagctctgctgaggcctctcaattctgcccgtcgaagcgcccgcggcttttattactgtgtatatatatataatactacggcatctatcggtccctcaaatcctcctcctcctcctgccgcagcccgcagggaggtggagttgtcaacgtgccgaggactggagcgcccgcgtccggcgtctctataaacgagaccgcccggccatttggtctgctcctctctgttctcccctgcctgcctgcttccagctgcatctctctccgccgagaccgagaggaggaggaggcaagggaggcatccctgacgtacggacggcggccatggggacgcaggcgccggagaactaccccgccgagaaggtacaggacgcgaggagcgcgcgggagaaggccatcgacgactggctcccgatcacctcgtcgcggaacgccaagtggtggtactccgccttccacaatgtcaccgccatggtcggcgccggcgtgctcagcctgccctacgccatgtccgagcttggctggggccctggcatcgcggtgctggtggtgtcgtgggtgatcacgctgtacacgctgtggcagatggtggagatgcacgagatggtccccgggaagcggttcgaccgttaccacgagctggggcagcacgcgttcggggaccggctgggcctgtggatcgtggtgccgcagcagctggtcgtcgaggtgggcgtgaacatcgtgtacatggtgaccggcggcaagtccctgaagaagttccacgacgtgctggtgtgcggcgacacgggggtgtgcgaggggaaggacaacatcaagaccacctacttcatcatgatcttcgcgtccgtccacttcgtcctctcgcagctccccaacttcaactccatctccggcgtctccctcgccgccgccgtcatgtcgctcagctactccaccatcgcgtggggcgcgtcggtgcacaaggggaggatgtcgggcgtcgactaccacctgcgcgcgaccaccacgccggggaaggtgttcggcttcttcggcgcgctgggggacgtggcgttcgcctacgccggccacaacgtggtgctggagatccaggccaccatcccgtccacccccgacaagccgtccaagaagcccatgtggaagggcgtggtggtcgcctacgtcgtggtggcgctctgctacttccccgtcgcgctcatcggctactgggcgttcggaaacacggtcgaggacaacatcctcatcacgctcagcaagcccaagtggctcatcgcgctcgccaacatgatggtcgtcgtccatgtcatcggcagctaccagatctatgccatgccggtgtttgacatgatagagaccgtgctggtgaagaagctgcgcttccctcccggcctcacgctgcgtctgatcgctcggaccctctatgttgcgttcacgatgttcatagccatcaccttccccttcttcggtgggctgctcggtttcttcggcgggttcgccttcgcgccgaccacctatttccttccctgcgtcatgtggctcgcaatctacaagcccaagaggttcagcctctcctggttgaccaactggatgtgcatcattcttggggtgctcctgatgattctgtcgcccatcggagggctccggcaaataataatggacgcgaaaacctaccagttctactcgtgagctaccaccagccatgacttgtaagcacgattggagaaatctgtcaaagcctcaaccacgagtttttgtttttgttttttgtcatgccaaacacatacatatacgtactgtttttttaatattcaaaggtgttcttcgtggcttgcgtgtgtacagtattatgtgtatgagggagacataagtttaatgatgctggctgtcaaagataatggcggttcaattacactttcatctcacttgcttcgtagctaggactttggaaggggctacagtatgtatttgggattatttgagcagtgtgttttttgtcgtttct

SEQ ID NO: 136626 - DNA, 2505 bp, Zea Mays
gggggttctcaatcgatcagaagccaaaggaataataataataataataataataataataataataataataataataataataataataataataataataataataataataataataataataataataataataataataataataataataataataataataataataataataataataataataataataataataataataataataataataataataataataataaaccaaccggatggattgttccaaatactccttttcacacgtaacaacggccaaacgccatcccatcatcaaccacgcaaagagagagagagagagattagatagctggccggccgccgccggcaagcgtgatgcattattcccatgcccatctaaaagcgacgacgcgacggcatcctcccagcttccagcttccagcctccagcctccagcaccagggtgtcagagcgtgctccgaatcccccgccaagaaacgcgagagcctccatcacagctctgctgaggcctctcaattctgcccgtcgaagcgcccgcggcttttattactgtgtatatatatataatactacggcatctatcggtccctcaaatcctcctcctcctcctgccgcagcccgcagggaggtggagttgtcaacgtgccgaggactggagcgcccgcgtccggcgtctctataaacgagaccgcccggccatttggtctgctcctctctgttctcccctgcctgcctgcttccagctgcatctctctccgccgagaccgagaggaggaggaggcaagggaggcatccctgacgtacggacggcggccatggggacgcaggcgccggagaactaccccgccgagaaggacgcgaggagcgcgcgggagaaggccatcgacgactggctcccgatcacctcgtcgcggaacgccaagtggtggtactccgccttccacaatgtcaccgccatggtcggcgccggcgtgctcagcctgccctacgccatgtccgagcttggctggggccctggcatcgcggtgctggtggtgtcgtgggtgatcacgctgtacacgctgtggcagatggtggagatgcacgagatggtccccgggaagcggttcgaccgttaccacgagctggggcagcacgcgttcggggaccggctgggcctgtggatcgtggtgccgcagcagctggtcgtcgaggtgggcgtgaacatcgtgtacatggtgaccggcggcaagtccctgaagaagttccacgacgtgctggtgtgcggcgacacgggggtgtgcgaggggaaggacaacatcaagaccacctacttcatcatgatcttcgcgtccgtccacttcgtcctctcgcagctccccaacttcaactccatctccggcgtctccctcgccgccgccgtcatgtcgctcagctactccaccatcgcgtggggcgcgtcggtgcacaaggggaggatgtcgggcgtcgactaccacctgcgcgcgaccaccacgccggggaaggtgttcggcttcttcggcgcgctgggggacgtggcgttcgcctacgccggccacaacgtggtgctggagatccaggccaccatcccgtccacccccgacaagccgtccaagaagcccatgtggaagggcgtggtggtcgcctacgtcgtggtggcgctctgctacttccccgtcgcgctcatcggctactgggcgttcggaaacacggtcgaggacaacatcctcatcacgctcagcaagcccaagtggctcatcgcgctcgccaacatgatggtcgtcgtccatgtcatcggcagctaccagatctatgccatgccggtgtttgacatgatagagaccgtgctggtgaagaagctgcgcttccctcccggcctcacgctgcgtctgatcgctcggaccctctatgttgcgttcacgatgttcatagccatcaccttccccttcttcggtgggctgctcggtttcttcggcgggttcgccttcgcgccgaccacctatttccttccctgcgtcatgtggctcgcaatctacaagcccaagaggttcagcctctcctggttgaccaactggatgtgcatcattcttggggtgctcctgatgattctgtcgcccatcggagggctccggcaaataataatggacgcgaaaacctaccagttctactcgtgagctaccaccagccatgacttgtaagcacgattggagaaatctgtcaaagcctcaaccacgagtttttgtttttgttttttgtcatgccaaacacatacatatacgtactgtttttttaatattcaaaggtgttcttcgtggcttgcgtgtgtacagtattatgtgtatgagggagacataagtttaatgatgctggctgtcaaagataatggcggttcaattacactttcatctcacttgcttcgtagctaggactttggaaggggctacagtatgtatttgggattatttgagcagtgtgttttttgtcgtttct

SEQ ID NO: 136627 - DNA, 1609 bp, Zea Mays
agcagagcacccaccgccggaagcggccgtcggacagaacgacacgtggggcacggcacagtccgggcccgcacgtcatcgaagacacctgacctgcccatgcgtcttctagagaaaggcaagatcaagatcggaatcaacggtttcggaaggatcggcaggctcgtggccagggtcgccctgcagagcgaggatgtcgagctcgtcgccgtcaacgaccccttcatcaccacggattacatgacgtacatgttcaagtacgacaccgtgcacggccaatggaagcacagcgacatcgccctcaaggactccaagacgcttctcttcggcgagaagccggtcaccgtctttggcatcaggaaccccgaggagatcccgtggggtgaggctggtgctgagtatgtcgtggagtccaccggtgtcttcactgacaaggacaaggctgctgcacatctgaagggtggtgccaagaaggttgttatctctgccccaagcaaagatgcgcccatgtttgttgttggtgtcaatgaggacaagtacacctccgatgttaacattgtttccaatgctagctgcaccacaaactgccttgctccccttgctaaggtcattcatgacaactttggcattattgagggcttgatgacaactgttcatgccatcactgccacccagaagactgttgatggaccctcagccaaggactggagaggtggcagggctgccagctttaacatcattcccagcagcaccggtgctgccaaggctgtcggtaaggttcttcctgaattgaatggcaagctcactggcatgtccttccgggttcccaccgtggatgtgtcagttgttgacctcactgtcagaatcgagaagggggcctcttacgaggaaatcaagaaagctattaaggctgcttctgagggcccactcaagggtattatgggctacgtggaggaggatctggtttccaccgacttcaccggtgacagcaggtcgagcatcttcgacgccaaggccgggattgccctgaacgaccacttcatcaagctcgtctcttggtacgacaacgagtggggctacagcaaccgcgtcgtcgacctgatccgccacatgttcaagacccagtagagagagatatttctgcctccctatcgtgggtcgtccccaatggcctttggtcgcagaccatctttgctgcttgtctatgctgagaataaatgtgaacggtgcccctggacgctggatccatgctggttttggacacgttgtctttttgtgtttaacttatctgctaccgtcctgtaacgaattcactaagttctagttcttttgtgctttgttaagaatataaacaatgaggtttcaattttggtggcgccatccggtctgattgcgtactagtatcatgcatatctgagctggtctttccggagtaacagtttttttttgtttcgtgtcaatgattctcagcctgttcatttggtcttaatccatatcggttactactataatgttgtcttgtctctatagattgcagcagtctaacacatgttcttggtatccttttgggtgtgtttaatgctatttgctctgtgttgtctttttcgtt

SEQ ID NO: 136628 - DNA, 2060 bp, Zea Mays
aaagaaagaaaagaaaagcggggggaaatatgccttccttccttcttgcgtcacagaccacgcgcggatacaccgcacaacagccaggcagcaagcagagcacccaccgccggaagcggccgtcggacagaacgacacgtggggcacggcacagtccgggcccgcacgtcatcgaagacacctgacctgcccatgcgtcttctagagaaaggcggacggacaggtcacccccgcacctcattccaggagttgcatttcgctttctcctttatttatttataccaataaaaaataaatccgccttttctcctccctatcgtgtgtctcctctcgccggctttaaaaacgcacacaagcgctaaaaccctctccaccgtccacctcagctcccatatccgctcccctacctctccagcatcctcccgtctccgtcgtctcgtctccgctcctcacctcgccagccatgggcaagatcaagatcggaatcaacggtgagtctgtacccccaacacaaactcgttcttcctgctcggttcgttgggtctggactctggagtgatctgagtggggtctctgcgcgcctgcgtgctcaggtttcggaaggatcggcaggctcgtggccagggtcgccctgcagagcgaggatgtcgagctcgtcgccgtcaacgaccccttcatcaccacggattacatgacgtacatgttcaagtacgacaccgtgcacggccaatggaagcacagcgacatcgccctcaaggactccaagacgcttctcttcggcgagaagccggtcaccgtctttggcatcaggaaccccgaggagatcccgtggggtgaggctggtgctgagtatgtcgtggagtccaccggtgtcttcactgacaaggacaaggctgctgcacatctgaagggtggtgccaagaaggttgttatctctgccccaagcaaagatgcgcccatgtttgttgttggtgtcaatgaggacaagtacacctccgatgttaacattgtttccaatgctagctgcaccacaaactgccttgctccccttgctaaggtcattcatgacaactttggcattattgagggcttgatgacaactgttcatgccatcactgccacccagaagactgttgatggaccctcagccaaggactggagaggtggcagggctgccagctttaacatcattcccagcagcaccggtgctgccaaggctgtcggtaaggttcttcctgaattgaatggcaagctcactggcatgtccttccgggttcccaccgtggatgtgtcagttgttgacctcactgtcagaatcgagaagggggcctcttacgaggaaatcaagaaagctattaaggctgcttctgagggcccactcaagggtattatgggctacgtggaggaggatctggtttccaccgacttcaccggtgacagcaggtcgagcatcttcgacgccaaggccgggattgccctgaacgaccacttcatcaagctcgtctcttggtacgacaacgagtggggctacagcaaccgcgtcgtcgacctgatccgccacatgttcaagacccagtagagagagatatttctgcctccctatcgtgggtcgtccccaatggcctttggtcgcagaccatctttgctgcttgtctatgctgagaataaatgtgaacggtgcccctggacgctggatccatgctggttttggacacgttgtctttttgtgtttaacttatctgctaccgtcctgtaacgaattcactaagttctagttcttttgtgctttgttaagaatataaacaatgaggtttcaattttggtggcgccatccggtctgattgcgtactagtatcatgcatatctgagctggtctttccggagtaacagtttttttttgtttcgtgtcaatgattctcagcctgttcatttggtcttaatccatatcggttactactataatgttgtcttgtctctatagattgcagcagtctaacacatgttcttggtatccttttgggtgtgtttaatgctatttgctctgtgttgtctttttcgtt

SEQ ID NO: 136629 - DNA, 1958 bp, Zea Mays
aaagaaagaaaagaaaagcggggggaaatatgccttccttccttcttgcgtcacagaccacgcgcggatacaccgcacaacagccaggcagcaagcagagcacccaccgccggaagcggccgtcggacagaacgacacgtggggcacggcacagtccgggcccgcacgtcatcgaagacacctgacctgcccatgcgtcttctagagaaaggcggacggacaggtcacccccgcacctcattccaggagttgcatttcgctttctcctttatttatttataccaataaaaaataaatccgccttttctcctccctatcgtgtgtctcctctcgccggctttaaaaacgcacacaagcgctaaaaccctctccaccgtccacctcagctcccatatccgctcccctacctctccagcatcctcccgtctccgtcgtctcgtctccgctcctcacctcgccagccatgggcaagatcaagatcggaatcaacggtttcggaaggatcggcaggctcgtggccagggtcgccctgcagagcgaggatgtcgagctcgtcgccgtcaacgaccccttcatcaccacggattacatgacgtacatgttcaagtacgacaccgtgcacggccaatggaagcacagcgacatcgccctcaaggactccaagacgcttctcttcggcgagaagccggtcaccgtctttggcatcaggaaccccgaggagatcccgtggggtgaggctggtgctgagtatgtcgtggagtccaccggtgtcttcactgacaaggacaaggctgctgcacatctgaagggtggtgccaagaaggttgttatctctgccccaagcaaagatgcgcccatgtttgttgttggtgtcaatgaggacaagtacacctccgatgttaacattgtttccaatgctagctgcaccacaaactgccttgctccccttgctaaggtcattcatgacaactttggcattattgagggcttgatgacaactgttcatgccatcactgccacccagaagactgttgatggaccctcagccaaggactggagaggtggcagggctgccagctttaacatcattcccagcagcaccggtgctgccaaggctgtcggtaaggttcttcctgaattgaatggcaagctcactggcatgtccttccgggttcccaccgtggatgtgtcagttgttgacctcactgtcagaatcgagaagggggcctcttacgaggaaatcaagaaagctattaaggctgcttctgagggcccactcaagggtattatgggctacgtggaggaggatctggtttccaccgacttcaccggtgacagcaggtcgagcatcttcgacgccaaggccgggattgccctgaacgaccacttcatcaagctcgtctcttggtacgacaacgagtggggctacagcaaccgcgtcgtcgacctgatccgccacatgttcaagacccagtagagagagatatttctgcctccctatcgtgggtcgtccccaatggcctttggtcgcagaccatctttgctgcttgtctatgctgagaataaatgtgaacggtgcccctggacgctggatccatgctggttttggacacgttgtctttttgtgtttaacttatctgctaccgtcctgtaacgaattcactaagttctagttcttttgtgctttgttaagaatataaacaatgaggtttcaattttggtggcgccatccggtctgattgcgtactagtatcatgcatatctgagctggtctttccggagtaacagtttttttttgtttcgtgtcaatgattctcagcctgttcatttggtcttaatccatatcggttactactataatgttgtcttgtctctatagattgcagcagtctaacacatgttcttggtatccttttgggtgtgtttaatgctatttgctctgtgttgtctttttcgtt

SEQ ID NO: 136630 - DNA, 2821 bp, Zea Mays
atggggaagacgaataggttctccaagggccaccagctcggcttcgtgcctgactaccggcatggcgtggaggctatgggggagtccaaggggctcgggagccccccgaggatcgactcggggagctcctgcgcgccgcccaagaggaagtgcgtcagtgtgaattcagaggagggggaaggcgcctcggggttcagcatgcctcgggcccgggaggtgttctcgctgcccaggatgactcgtctggacaagaaggacctagagatgaagctccgccatgagcttgcacaggtgagggacgtccagagtaggctgtttctgagagggtctgcggtcagcatgaatggtgcagcggtcgcgtcggtccccgcaggcgatgtgcaacccaagaaaaaggttgagaagctcaagcggagcgattcggtgcaaacggacaggggagcgccgccaccagcggccacggtcgtcgccgcacctgttgctagctctgttaactacacatcatcgtttaaacaatgtgccaaccttctcaagtccattatgagccatgtatgggcaggcccgtttcttgttccggttgatattgtgaagttgaacatacctgactatttccaaatagtcaagcagcccatggatttgggtacgatccagaaaaagttgaaggcagggatgtactctacacctcgggaatttgcagctgatgtgaggctcactttcagcaatgccatgaattataacccagtcaataatgatgttcatttaatggccaaaactttgagcaagaactttgaaactcgatggaagcttattgagaagaagctccctaaaccagacgataagcctcaaccagttgagaagcctcctgtgagggagcctacagaaaagaattcaactaagggagttgccgttgagaaagaagacatcaccaagaaaaaaccctcaaagaagagtgtacctaagcaagacatatttcaggaaggatattcagcggacaatccagttttgcaaccaaagaaaaggaaaacatctcctttgatacaagatgcttctttggtagaggatgttgttccaaccggaaagagaatgatgacgagtgagcaaaaatatgatattagtgcaagattacaatcatttggtgcattcattccagaccatgtagttgagttcataaggagtcgcgttgatgattgcgatgctgatgaagaggaaatggagcttgatattgatgttcttggagatgatactctttttgaattacagcagctacttgatgactatgacagggttaatccgtcgagaaaccttacaaaagaggaccctcacgaagctgagtctcggagtcaatatgaactcatcaatccatcagtgtgtaacgatggcaatgagctcattgacgaggatgttgatattggggagaatgaccccccaattttggctcttcctcctgtggtacttgaagatgaaacagcagacagaaacagcaagcatagtacatccagcagttctagtagtgactcagaatcatcctctagtgactcagattcaagtagctcttctggaagtgatgccgatgccaaagctcctcaacaaaacagcgggtcaaaggaaaaagttctacctgtcgatggcgtggatcaggaaaaggattcactgagcacattaaatttaccagagcaaagtacaaaccctatatctgtttctgctgatggtgaggggggaaatgtatctgagaagcaggtctcccctgacaagcaaatacgagctgcccttctgagaagccgctttgctgatacgatccttaaggctcgtgaaaaggcccttgatcagactacaaagaaggaccccgagaagcttcgacgcgaaagggaggaacttgagagggtacaaagagaagagagagctcggttgcaagctgaggctaaagctgcagaggacgttcgcaagagggctgaagcagcagcagctgctgaggctgctgctgaagctaagcgacaaagagaacttgagagagaagcagctcgcaaagctttgcaagagatggagaaaactgttgacatcaatgaagggagccattttttgaaagatcttgaaatgctcggaagtgtcacaggtgaacagatacccaacttggttggtgaaacaagtcctgggtttcaaatgggaagcaacacactagaaaagctcgggctgtacatgaaaaacgatgaggatgatgaggatggtgatttcacagatgaaccagtggctgatgttgaagagggagaaatagattaactgtgtttctggaccatttttgatacgttacaggagacctgttggcatgactgatctgcatagctttcctttggtatacaaagtgacctgacgaaagatcgtgtcgcatcgaacctgaaggtctggtattcatttttgtaactgcctaagttttggagccaagttggcaaatgacagcgagcctcagacatgttggaagttcgtcgtgctgcatgtgaggagagcatcgagcgtgcgtatcgtttggattgagaattctctctggactttccatatccatacaatggaacggcgagtttattgcatatatgatgaggccataaaaggggagagggttggaggagggaccacaaggagtgatggtgatggttcttggctcttgcacaggtgcgagccgtttttgaggggtagttttagagccatttccgtgttgtgaatgtaacatcggaaactgtacaaaagttagcctgatagatggaaaacattgacttgaatttatgcagtgcctgttcttcatcgatcacttttttacgtacttgttttcatg

SEQ ID NO: 136631 - DNA, 282 bp, Zea Mays
atgataaggctgcctaccagatccaccgcctgccaaagatggtcagcgcgtttttggtgtcgaaagggagaggggggaagcggagaggaccttgatggactgcgcgatggcgaaggcgagcaccgcggcgacgagcgggcagttggagaacacggccaggtaggagaacgagggcgcgcccggcggcggggcggcggcgccggagacgatggattccgccatgggctcacgatcggacacgcccggctctgggagtggaagggtcctcccgcgtccgcgtag

SEQ ID NO: 136632 - DNA, 560 bp, Zea Mays
atgataaggctgcctaccagatccaccgcctgccaaagatggtcagcgcgtttttggtgtcgaaagggagaggggggaagcggagaggggaaccaaccacggaggcgaagacggcggtggtggcgaacagcgagctggcgaacccctcctgcagcccgacggcgacggcgagcgcggtgacggtggccgagtgcgaggacggcatcccgccggagcccaccagctgcttcgcgtcccaccggttctccttatacctgcacgtcggtcgcgcgcgcggaggaggtgagggcagatgcagatcccgtcagggagggagctcagatccgggcaccgcgtggaagggagagtgcgtaccaggtggtgaggaccttgatggactgcgcgatggcgaaggcgagcaccgcggcgacgagcgggcagttggagaacacggccaggtaggagaacgagggcgcgcccggcggcggggcggcggcgccggagacgatggattccgccatgggctcacgatcggacacgcccggctctgggagtggaagggtcctcccgcgtccgcgtag

SEQ ID NO: 136633 - DNA, 1456 bp, Zea Mays
acggcgacccacccagatagacctcgcccttggctcccatggcttccgggctccggcttcttctcctcgccgtcgcgtgagactgcgctaaaacctaggctttgagacaccaatggcctccgcgacggcgacggcgcccacattcgctctcgcatcgtccttctcgcgcggcggcttccttccgctccctcgtcacgccggccggcccatgcttcagtctctgcgactcgtcgcgtcagccgtgaagcggcggcgcggcgcggtcgtggtggcagcggacgcggcggcggcggccgggagcgcggagttcggcgacgaggagaacccgtatgagcttctgggcatcaggccgcttgatagcttcgatcacatgaaaatggcctacaagaagaagcgcaaggacgccgaggagactggagacgacgagttccttgccaagttggacagggcctatgacactgtcatgatgcagcagctgcagtatcggaagaagggagtcacatacgggtctgttcaggtgtccaaggatatcaagtatgctgacaatcaaccagtggtgccttggggaccaagattctcccgatcaacaatgaaggacatgcgcataaatatggcagtatcagcagcatttgttgtttggatagctattatgggcaatgcagactggaagcctttgcagttcctttgttttgctttcttctacagaatactacagaagctaagagctactgaaccaccaattactccaatatacaatgaatatggcgaggtcgaaggacgagggataagaatggcaaaaagagtagtccgtgctttgggtttgatatttggatgtgtgttcgctgcatccctgggttatacagcagctattaacttgatcgagctttcaatgcagtacactccccgccttgtttattactaccaggagctgattgttacggcggctacctccgttcttctgtgcatcacagcctcatactaccgatgaacacgacgacgagcagtgatggcctggctgaggcgattgtgagatagccgagaatccacaaattttgtagcatacttccaccagcacctgtcagctttgaggcagagagttcttagtgcaggatcatacatgaccacttgtggcacaatgcagatgaccaatggatgaaaaacatttggcgtgaatacttcaacagcagtgttgtgtgtgtgcaatttttaattaggtcttggacatgttagacaacagggttagctgcaatgtgcatgtgctttgttttgcctcgatcaacgaatgaatgaaagtactagctgctgcttctttgttaagctgcctctccgcatcggagctcccatttgtcggacacacaatgctgctcccatttctatacgaacctgctgctatgcaatgtgaactttaaactcgtgtctatgatctggtgtgttcctctttatttgttttttaagt

SEQ ID NO: 136634 - DNA, 1479 bp, Zea Mays
acggcgacccacccagatagacctcgcccttggctcccatggcttccgggctccggcttcttctcctcgccgtcgcgtgagactgcgctaaaacctaggctttgagacaccaatggcctccgcgacggcgacggcgcccacattcgctctcgcatcgtccttctcgcgcggcggcttccttccgctccctcgtcacgccggccggcccatgcttcagtctctgcgactcgtcgcgtcagccgtgaagcggcggcgcggcgcggtcgtggtggcagcggacgcggcggcggcggccgggagcgcggagttcggcgacgaggagaacccgtatgagcttctgggcatcaggccgcttgatagcttcgatcacatgaaaatggcctacaagaagaagcgcaaggacgccgaggagactggagacgacgagttccttgccaagttggacagggcctatgacactgtcatgatgcagcagctgcagtatcggaagaagggagtcacatacgggtctgttcaggtgtccaaggatatcaagtatgctgacaatcaaccagtggtgccttggggaccaagattctcccgatcaacaatgaaggacatgcgcataaatatggcagtatcagcagcatttatatttatctacactgcatccaggttgtttggatagctattatgggcaatgcagactggaagcctttgcagttcctttgttttgctttcttctacagaatactacagaagctaagagctactgaaccaccaattactccaatatacaatgaatatggcgaggtcgaaggacgagggataagaatggcaaaaagagtagtccgtgctttgggtttgatatttggatgtgtgttcgctgcatccctgggttatacagcagctattaacttgatcgagctttcaatgcagtacactccccgccttgtttattactaccaggagctgattgttacggcggctacctccgttcttctgtgcatcacagcctcatactaccgatgaacacgacgacgagcagtgatggcctggctgaggcgattgtgagatagccgagaatccacaaattttgtagcatacttccaccagcacctgtcagctttgaggcagagagttcttagtgcaggatcatacatgaccacttgtggcacaatgcagatgaccaatggatgaaaaacatttggcgtgaatacttcaacagcagtgttgtgtgtgtgcaatttttaattaggtcttggacatgttagacaacagggttagctgcaatgtgcatgtgctttgttttgcctcgatcaacgaatgaatgaaagtactagctgctgcttctttgttaagctgcctctccgcatcggagctcccatttgtcggacacacaatgctgctcccatttctatacgaacctgctgctatgcaatgtgaactttaaactcgtgtctatgatctggtgtgttcctctttatttgttttttaagt

SEQ ID NO: 136635 - DNA, 916 bp, Zea Mays
acggcgacccacccagatagacctcgcccttggctcccatggcttccgggctccggcttcttctcctcgccgtcgcgtgagactgcgctaaaacctaggctttgagacaccaatggcctccgcgacggcgacggcgcccacattcgctctcgcatcgtccttctcgcgcggcggcttccttccgctccctcgtcacgccggccggcccatgcttcagtctctgcgactcgtcgcgtcagccgtgaagcggcggcgcggcgcggtcgtggtggcagcggacgcggcggcggcggccgggagcgcggagttcggcgacgaggagaacccgtatgagcttctgggcatcaggccgcttgatagcttcgatcacatgaaaatggcctacaagaagaagcgcaaggacgccgaggagactggagacgacgagttccttgccaagttggacagggcctatgacactgtcatgatgcagcagctgcagtatcggaagaagggagtcacatacgggtctgttcaggtgtccaaggatatcaagtatgctgacaatcaaccagtggtgccttggggaccaagattctcccgatcaacaatgaaggacatgcgcataaatatggcagtatcagcagcatttgtatgtactctcctcttaattcataaaaaaattacagctattgctaacatgctcattgtgtgaattcgtggttattagaatttgggccagggacagcattttgaccaagttactgacacacttgttttcaccacatccatatactttccatagttcatttcaaaactacaaatatgttaaaataccaaaggcatttatccttttggaattgtgtccattgtactcataagcgcatagcttgaataatatgtattatgtatgatgaattagatggagtagtttttt

SEQ ID NO: 136636 - DNA, 767 bp, Zea Mays
aagcctccagctgacaaaagctaagcaatcgagctgacaagagctaagcaatcgagctgacaagagctaagcaatcgggggagttcactgatgtcttgcttcagcgccatgaccacgacgacgggcggcagaggcacctactactactcgtcctcgccggggcggccccgcggcggcggcggcggcaagaggccgtggcggcggtggcgcgccaagtgcgccggcatcgccgcagccgtcgggtccaggctccggagatctgtcgtcagggccgtcgacggtggccgccggcgcacgccgccgccttcgtcctcatccgttcaccgcgggtggtgccaccaccaccaccacggccgccagagcttcgcgccggtctacgtcgacgacctctacagccacagcctacagccggcagccaaggcccaccgcggcgtcgtcgtgcggcaggagcaggtgcatgagccgccgagcaccagcgcccgcgacaagctgccggcgacggatgcggctgcgcccgcgcacggcgccagtgccagcagcaacaggcagcaggcgcgcgccatggctgcgggcgtcgccgcgatgaggaacgtgctgctgcggagccccggcagaggcggcggcggcgtgctcggggtggtgaaggggatgggggaggtggacctcagggccgagctcttcatccgcaagttcaaggaggacatgcggctgcagagccagcgctcggcggaggagttgcaggccatgctcgcaagaggcctatgaca

SEQ ID NO: 136637 - DNA, 2667 bp, Zea Mays
atggcagagattgctgttcttcttgtcctgaagaagattgcaatagctctggcaggagagaccctaagttttgctaaacatttgcttgcaaagaaatctgagttggtggcagcgcttccagatgacatgaaactgattagtaatgagcttgagcttattcgggcatttctaaagaaaattggccgtacgggccggaaagatgaaatgatagaaacatggatagggcaagtccgaagactggcttacaatatggaagacactgtagaccattttatttatgtagttggtaaacacaatcagacaggatcacctttggattacttgaagaagatagccaagaagcctcagcgtctgctttcactagatgaaattgctagtgagattaagaagataaagcaagagcttatacaactatctgaaagtaaagaccgctggactaaacccttggatggcgggactgatgtacctgcaggaagctatgaaacagaaaaggaaatgtatcttcctggacacgattactcaatcagagatgaggagcttgcaggaattgataaaaataagcaaaccttgattagttcattaaaatttgaagatccatcacttcaaatcattgctgtctggggtatgggtggcattggaaaaagcactcttgccaataatgtgtacaaaaatgaagggttcaactttgactgccgtgcatgggtttctatatctcagtcatataaactcgaagatatatggaagaaaatgctgacagatatcctcaagaaagataagaaagaatttgatcctggaacaatggatagtgcagaactaagggagaaattaataaaaactctagacaaaaagcgaattaaaaaagttcttgtagataatggacttggaagcagagtaataatcacaacaagaactgaggaggtagcttcactagctgaggatagttgtaagatcaaagtagaacctcttggtgaccatgattcctggcttgtattttgtaggaaggcatttcctaaagttgaaaaccatatttgcccttcagagttacgtcagtgtggtgaaagcattgtggagaaatgtgatggtctgccattagcccttgtggcaataggaagcatattgtcgttgagaccaaagaatgttgctgagtggaagctattttatgatcagcttatctgggagctacacaacaatgagaaccttaatcgcgtggagaaaattataaatctaagctataaatacctaccagactatttgaagaactgtttcctgtattgtgccatgtttccagaagactatctaatacacagaaagagattgattagattgtggatagctgaaggatttattgaacaaaaaggggcatgcagcttagaagacactgctgaaagttatcttagagaactcatacgacggagcatgcttcacgttgcagagaggaacagctttggtagggttagatgtatccgaatgcatgatcttgtgcgtgaactagccattttccaatctaaacgagagggttttagtacaacttatgatggaaataatgaaggaatgctagtggaatcatattcccgacgagtggctgtgctccaatgcagcaaggacattctatcaaccattgatccatccaggcttcgcaccttcataacgttcgacaccagcatgacattatctttgtggtattcttctatttcctccaaaccaaagtaccttgcagtattagacttatcaggcttgcctattgagactattccaaattcaattggggagctattcaaccttaggcttttgtgcctcgatgacaccaaagtgaaagagctcccaaaatctattgcaaagcttcaaaacctacaagcattgagccttgagcaggcagagttagttaagttcccacaagggttttcaaacctgaagaaattgcgacatcttatggtttcacggttgcgagatgcaactaacaacagtttcagatgttgggaagctgtggagccatttaagggcttgtggagtttggttgaactgcaaactctgtttgccattactgcaagtgaagtattagttgcaaaacttggaaacttatcccaactgaggagccttacaatttatgatgtaaggagtaacttctgtgcacaattgtttggctctttgtcaaagatgtgtcagctgtcacgattaatgataagagcatgcaatgaagatgaagcgctacagctggatgattcgacatttccaaattcgcttcaaacccttactttatatggacgactgtcagaaggaactttcatgtctccctttttcttaaatcgcgaaaatgggcttcttaggctaaggctgggttacagtcacctttcagaaaatccggtaccacacctctctgaactgtcaaacttgactgagttatctcttataaaggcatacaccggccaagaattatacttccaagcaggctggttcctgaatttgaaggatctttacttgaaggatttgccccatgtgaatcaaatacacatacaggagggagctttggctagccttaaacgtatgggaatggttggcctcctggagctacgacatgttccagtcggtttcatatatctcaagtccctaaaaacaactttttttcataatatgcatcctgattttaaaagtattcaaaaggaaatgtag

SEQ ID NO: 136638 - DNA, 243 bp, Zea Mays
atgtccatatcttctggttgtttggagacatatctgaacttcggattccggatgtgggaatcaaaacaagcaactctcttctctgaaagggacctagctgttggacaggaaatcagatgcaaatctacaattttcaggggaaacaaactgtcacaacttctgccatcacaagtgcagcctcgttctccacatagtcccagactcccaacaactttctttggagctggattgtcaggcccatga

SEQ ID NO: 136639 - DNA, 251 bp, Zea Mays
ccgagcacgacgctaggagaccgccagctctgctgctgcacgaccgaccagcccgtccactccgcctccccttcctccgagccccggcgaggaagaggaacccggcgcagccgccgccggacgcacttccgatggcgacgccacggaagccgatcaagctcacgctgccgtcccacgagaccaccatcggcaagttcctgacgcacagcgggacgttcacggacggggatctgcgcgtcaacaaggacgcc

SEQ ID NO: 136640 - DNA, 909 bp, Zea Mays
atgtccggtgacgggactggaggtgtaaggcaggtccagcaacctcgccaagctgctgctacgccagcggatgcgtcccacgtcggcaccccagatcgtggcgtggcgaacatgggttcccgtccacactctgggctcacgcaccagctgcgtgacggcacgcgtgggcgcagcctacgcgccatctaccccggggcgctggtcgacgtttcgtgcgggctgcgtctaccaaaggcggcgctgctccaacgctggggaacaagcctggtccgacccgtggttgatgagggagacctaggtgacatggcaggcaagagaaagataaaccccgaatgcgcaaagctgatccctgtgaagctggcgtttgataggctccatgcttccctgtcatcaggttctgcagatggtgctcccttcgaaccggctgctgttctgcagggtggggcaccaactacctcgcagggccctctcctcagcaatctctttgtaaggccagttgctgcaatacttgattcacctatgctgcctcaattgatgcctgcagaaacacctgttgtggccacagctgctgcatcaatagctcagaacactaaacatcgacgcttattcaacctctctgcgcgggcacaacgctacctctgtcgcaaacttggcctcttggcgaatgaaggaactcctaattttgataatgctttccaggactttcaggcttggttccagaaaccattatctaaggaggcaggggcagctttggaatccctgttcaacattcatatgccggacaccgaacacgttgacaaggcactgatgggaattgcaggtgaagctatagaagaaatacaggatgagatggacaatctgcaagcagaagcaaggagcaatgctgcagcacgtctggtggctgtctga

SEQ ID NO: 136641 - DNA, 636 bp, Zea Mays
atgccggagccccaggccatcctcccgctgcgcgctctcccgccggacgcgccgctgcccttccccgtccccgcgccgttccacccccaagcccccggccccggtgggaccgccccggccacgcccccgaacccgacccctccgcaatcgttaacccccgccgcgccccttcctcctcttcgacgcggccgccgcacccatgggagatctccgcgcgagcctggctagagtccttccccgacggacggccgcccaccgagcctgaggtcgacctacatcgacgtgcaccgccccgagctcccttccctcccccgctcccagctacacctaggcgatgcgcccgcctagacagcgcacaacgccctaggctacgcggtgggctgccgattagcgcctaggcgcgcctagccgccgcctagccgaacactgaaaaaactaagtactaacgatttaagctaccaaaataataaggttcagtactttctggtctaaggacatgtttgctctgcgccttgaaccaatcaagctaggccgattcttgattctttcactgtgcctgagacggtcagaaaccaacagtaaccattttatccaaacacatctaaacatactgccatctcagatttgcagaagatc

SEQ ID NO: 136642 - DNA, 159 bp, Zea Mays
ccgaatcgattatactcagctgaggatctccaatcacacgacatatgtagcacttaacccttgcatatgtcaacccgccaccggggttcttaagaccggatcaggttcacgcaaaccgagagcacaaatacaccaccgtccagcctcttgccacggagg

SEQ ID NO: 136643 - DNA, 774 bp, Zea Mays
gtttgtaggttttgaagctttgttatagatttagggagctctttcactttggtgtcatcgaggcacaaaagcctaaggaaatagaagaataccacaaagataatgtcgtgctggtgtcgaacgttatgaaggtgcgaagcctggatggatcaatggttgatagaatgtccttgcttcattggagcacagccactcgtcgggaatatgattccactagcattgcttcattatttccatcataagttgtactaaaaccctctcgtttagattggaaaatggctagttcacgcacaaggtcatgcattcggatacatctaatcctaccaaagttgttcctctctgcaacgtgaagcatgctccgtcgtatgagttctctaagataactttcagcagtgtcttctaagctgcatgcccctttttgttcaataaatccttcagctatccacaatctaatcaatctctttctgtgtattagatagtcttctggaaacatggcacaatacaggaagcagttcttcaaatagtctggtaagtatttatagcttagatttataatttctccacgcgattaaggttctcattgttgtgtagctcccagataagctgatcataaaatagcttccactcagcaacattctttggtcacaacgacaatatgcttcctattgccacaagggctaatggcagaccatcacatttctccacaatgctttcaccacactgacgtaactctgaagggcagatatggttttcaactttaggaaatgccttcct

SEQ ID NO: 136644 - DNA, 3944 bp, Zea Mays
caactccaagagattagctaaaaagactagccaaatttactgatttagctaatctctaaaatagattttagagaaaaagtgtaggctaatccaacagactcggtaaacctacggactgaatagagagtgaagcaggctatccaaaattggagagcgaagatggagaaatagagagccactaaatttgaagagtcatttacagagtctattggatacaattttcttttaatattagctaaatttacctttacaaaaccatatatctagtctcttggagttgctctaactttttaggcctgcagactgaccaccaacgcagtgaccagtggcggccactctaccaccaacggtttggtcttcgtctgtacacccgaacctggcatattcatacggtgactgcaaggtgagccacaactcagaggcaagcagagtcagcaaagatatatgaaagggaggagaggggttgaacagattattactctcagaaaccagccccttctaccctaccgttcttcctcctatacaatacaacaactactctcttgcgttgtactcggagccaggatcagatggatgcccttgctttgctgcctatcctgatctcttctcctctcaggatgtaggcagatcgagtaatcagtggctcacattttgacaagacactcaaggcaaacatgcgaatacttcctcagcaaatcctatccagccactccaaaaagtatccacagattccaaagacttttagcaaatccttaagggagcggcactgatgctataaggtgagccttgaccttattccaagtctgatcgaataagaagggatggcagagattgctgttcttctcgtcctgaagaagattgccatagctctggcaggagagaccctaagttttgctaaaccattgcttgcaaagaagtctgagtcggtggcagcactcccagatgacatgaaactgattagtaatgagctcgagcttatccgggcgtttctcaaggaaatcggcaggaaaggctggaaaagcgaagtgatagaaacatggatagggcaggtccgaagactggcttatgatatggaagacactgtagaccattttatttacgttgttggtacacacgatcagatgggatcatgctgggattacatgaagaagatagccaagaagcctcggcgtctggtttcactagatgaaattgctagtgagattaagaagataaagcaagagcttaaacaactctcggaaagtagagaccgctggactaaacccttggatggcgggagtggtatacctgcaggaagctatgaaactgaaaaggaaatgtatcttcctggacatgattacacaatcagcgacgaggagcttgcaggaattgatgaaaataagcaaaccttgattagttcattaaaatttgaagatccatcacttcggatcattgctgtctggggtatgggtggcgttggaaaaagcactcttgtaaataatgtgtacaaaaatgaaggatccaactttgactgccgtgcatgggtttctatctctcagtcatatagactagaagatatatggaagaaaatgctgacagatctcatcgggaaagataagatagaatttgatcttggaacaatggatagtgcagaactaagagagcaattgacaaaaactctagacaaaaggcagtacctgatcatactggatgatgtctggatggctaatgttttttttaaaattaaagaagttcttgtagataatggccttggaagcagagtaataatcacaacaagaattgaggaggtagcttcactagctaagggtagttgtaagatcaaagtagaacctctgggtgtcgatgattcctggcatgtattttgtaggaaggcatttctgaaagatgaaaaccatatctgccctccagagttgcgtcagtgtggtataaacattgtggagaaatgtgatggtttgccattagcccttgtggcaataggaagcatattgtcgctgagaccgaagaatgttgacgagtggaagctattttatgaccagcttatctgggagctacacaacaatgagaaccttaatcgcgtggagaaaattatgaatctaagttataaatacttaccagactatttgaagaactgcttcctgtattgtgctatgtttccagaagactatctaatacacagaaagagattgattagattgtggatagctgaaggatttattgaacaaaaaggggcatgcagcttagaagacactgctgaaagttatcttaaagaacttatacgacggagcatgcttcacgttgcagagaggaactgctttggtaggattaaatgtattcgaatgcatgatcttgtgcgtgaacttgccattttccaatctaaaagagagggtttcagtacaacttatggtggaaataatgaagcagtgctagtgggatcatattctcgacgagtggctgtgctccaatgcagcaagggcattccatcaaccattgatccatccaggcttcgcaccttaattacattcgacaccagcagagcattatctgtgtggtattcttctatttcctccaaaccaaagtaccttgcagtattagacttatcaagcttgcctattgagactattccaaattcaattggagagcttttcaaccttaggcttttatgcctcaataaaaccaaagtgaaagagctccctaaatctattacaaaacttcaaaacctacagacaatgagtcttgagaatggggagttagtgaagttcccacaagggttttcaaaactgaagaaattgcgacatcttatggtttcacggttgcaagatgtaactttcagcggtttcaaaagttgggaagctgtggagccatttaagggcttgtggactttgattgaactgcaaactctgtatgccattacagcaagtgaagtattagttgcaaaacttggaaatttatcccagctgaggcggcttataatttgtgatgtaaggagtaacttatgtgcacagttgtgtggctctttgtcaaagttgtgccagctgtcacgattaacgataagagcatgcaatgaagatgaagtgctacagctggatcatttgacatttccaaatcctcttcaaacccttagtttagatggacgactgtcagaaggaactttcaaatctccctttttcttaaatcatggaaatgggcttcttaggctaatgttgttttacagtcagctttcagaaaatccagtaccacacctctctgaattgtcaaacttgactaggttatcccttataaaggcatacaccggccaagaattatacttccaagcaggttggttcctgaatttaaaagaactttacttgaagaatttgtcccggctcaatcaaatagacatacaggagggagctttggccagccttgaacgtataacaatgaaacacctcccggagctacgggaggttccagtcggtttcagatttctcaagtccctaaaaacaatatttttttccgatatgcatcctgagtttgaaagcagctttcaaaaggaaatgtagatcatatcccgtacatatgcaggacaacaacataagtatggtttgtttgtatgtctacgtgtaccttctgtcctctcccaaaaatagggcgggttgcattggcgaaaagttcatgatgggtgttttgagcttgggcaattactgtggagaggaaatgcagcactaggatccaagctttcgagcagaaagcagcgctgaagctgaagggcatgtcatgtcattcaggtacctagtaggatccaaaccttcgagcagaaagcagcacaggcactggcaccaaagaggaaccatagccgccaggcaacatcagtcatcaggaccggttaataatgtttatgtgtgataatgttgtttcaataattatttggaaccatttcgaactccgaatacttgagagtctgtacg

SEQ ID NO: 136645 - DNA, 1939 bp, Zea Mays
ggaacccacttcacacctgggtggctgggtctggctggttccttccttcccgcttccctcgtcaaccaaatcaactcgtgaggtctcctccccatcgccacacccacgcgccgcgcaccgcccgcccgctcgccccgcctccgatccctaatcaatcggcctgaccctagcccgccgccggccgcccacgcccgcccgcctcggctcgtctcaaatcgggcgccccaggggagcgaggcctcgatcgcggcggaccccgatgctccgcattccggcccctccggcgacgtcggcggcagcggaggcatgatccggtggggactcggcggacctgccagccatggacgccaccgcacgcccggccatcgtcatcgacaacggcacagggtatagcaaacttggattttctgggaactcggagccgtctttcactctccccactgtagtagctgcgaatgaatcttttctagaccagacagagctgttgagtagtgcaaactggatagcacagtataatgcaggcatcatggctgatcttgacttttttattggagatgaggctttatcgcggcttaggtctagtgggctgtacactttaagaaggccaatccgtcatggtcaggttcatgactgggatacaatggagagattttggcagcaatgtattttcaattatctacgttgcaatcccgaagagcattatttccttcttacagatagtcctgtcagtacacctgaaagtcgtgaatgtacaggagaaataatgttcgaaaccttcaatgtccctggactatatatttccgttcaatctgttctcagcctttctgctggatatgcctatctgaaaagtatttctgatgacgattcagatactgtgtctgatatgacaggggtagtagttgatattggggatggagctccacaaattgtgccagttgtaaatggctatgtaatcgggagtagcataaagtcttttcctttctccggaagtgatgtaacccagtttgtttcacagcttttacaggagttcaagaagcatgacaggaagcctgataagtacatcaaacattggtcagctgttaaaccaaagactggggtcccatatacaattgacattggatatgaacgctttcttgggccagagatcttcttcaatcctgagatttactctgccgatttctccactcctttgcccgagttgattgacaactgtgttcagtctgcaccaattgacacaaggagagctctgtacaagaatatagtattatctggtggatctaccatgtttaaagacttccacaagagactccaaactgatataaagaagatagtggatgaccgtgttgctgcgactaatgcccgtcatcgtgtggaagtgagacctattgaagtcaacgtggttgcccatccaatacagagttacgcggtttggttcggggggtcactagctgcatctaaccctgacttctttgagttttgccacacaaaggaggactacgaggaacatggagccagcatctgcagaacaagccccgttttcaaaggaatgtactgaatttttcctcacgacccatcctctagctggtgagctcatttaggtttcttcgacagaatatagtcaattttgattcttttttggtgcgttccaaccattgtcgggccaccctgattaggtatgtagctctgtttgtactagttgtttgttttgtgttctgcgtcgaatgttgtgtatagccaacagtttggttcctgttcgaggtgcttcattgtagccagaacctcggacagtttagaggaaaaatatttggttattcttttacattagcttgttcagacagatttacgggactcttattaataagagaagtcaaatttaggactttgtcgtggatgaccacattatttcaattgaataatatggtatccctactttcaacga

SEQ ID NO: 136646 - DNA, 2032 bp, Zea Mays
ggaacccacttcacacctgggtggctgggtctggctggttccttccttcccgcttccctcgtcaaccaaatcaactcgtgaggtctcctccccatcgccacacccacgcgccgcgcaccgcccgcccgctcgccccgcctccgatccctaatcaatcggcctgaccctagcccgccgccggccgcccacgcccgcccgcctcggctcgtctcaaatcgggcgccccaggggagcgaggcctcgatcgcggcggaccccgatgctccgcattccggcccctccggcgacgtcggcggcagcggaggcatgatccggtggggactcggcggacctgccagccatggacgccaccgcacgcccggccatcgtcatcgacaacggcacagggtatagcaaacttggattttctgggaactcggagccgtctttcactctccccactgtagtagctgcgaatgaatcttttctagaccagacagagctgttgagtagtgcaaactggatagcacagtataatgcaggcatcatggctgatcttgacttttttattggagatgaggctttatcgcggcttaggtctagtgggctgtacactttaagaaggccaatccgtcatggtcaggttcatgactgggatacaatggagagattttggcagcaatgtattttcaattatctacgttgcaatcccgaagagcattatttccttcttacagatagtcctgtcagtacacctgaaagtcgtgaatgtacaggagaaataatgttcgaaaccttcaatgtccctggactatatatttccgttcaatctgttctcagcctttctgctggatatgcctatctgaaaagtatttctgatgacgattcagatactgtgtctgatatgacaggggtagtagttgatattggggatggagctccacaaattgtgccagttgtaaatggctatgtaatcgggagtagcataaagtcttttcctttctccggaagtgatgtaacccagtttgtttcacagcttttacaggaaagaggtgagcttttgccacctgaggattctttagatatatctcgtaaagtgaaagaaatgtattgttatacttgttcagacattgtcaaggagttcaagaagcatgacaggaagcctgataagtacatcaaacattggtcagctgttaaaccaaagactggggtcccatatacaattgacattggatatgaacgctttcttgggccagagatcttcttcaatcctgagatttactctgccgatttctccactcctttgcccgagttgattgacaactgtgttcagtctgcaccaattgacacaaggagagctctgtacaagaatatagtattatctggtggatctaccatgtttaaagacttccacaagagactccaaactgatataaagaagatagtggatgaccgtgttgctgcgactaatgcccgtcatcgtgtggaagtgagacctattgaagtcaacgtggttgcccatccaatacagagttacgcggtttggttcggggggtcactagctgcatctaaccctgacttctttgagttttgccacacaaaggaggactacgaggaacatggagccagcatctgcagaacaagccccgttttcaaaggaatgtactgaatttttcctcacgacccatcctctagctggtgagctcatttaggtttcttcgacagaatatagtcaattttgattcttttttggtgcgttccaaccattgtcgggccaccctgattaggtatgtagctctgtttgtactagttgtttgttttgtgttctgcgtcgaatgttgtgtatagccaacagtttggttcctgttcgaggtgcttcattgtagccagaacctcggacagtttagaggaaaaatatttggttattcttttacattagcttgttcagacagatttacgggactcttattaataagagaagtcaaatttaggactttgtcgtggatgaccacattatttcaattgaataatatggtatccctactttcaacga

SEQ ID NO: 136647 - DNA, 1838 bp, Zea Mays
tccactccgccgctcaccggcaggtccattccgttcggccggctgttccccaccacggcgagcgcgagctgcgctgccggtgtcccacgcggtgactgggactcggcgaggcagcggtcccggcgtccacatcgcgcgcggcgaggcaagcgccaagcgaggcgtcggccagcccgctggtccagctgttgctggattgctgctcgagcttggcgaggccagcccgcagtccgccacccgctcgttcagccggttcctctcaccgcgctgccaccgatggcgacgaacctgggcgtcttctgccgtgctccccgaccctcgcccgcgtcaacggccgccgccccctcgcagtccctctctccctcctccgcctccgtacacattccccattcgacccagcgcggccgcctcgccgcagctccaccactgccacgttgtgtagctagtccaaccattgctaatgtgaaagaccaaactgaggctgaagttgcaatggggtacacaatgactgaaatctgcgacaaattcattgagttcttcatgtatatgaaaccagaaacaaaggactggagaaaattattggtgtttagagaggagtggcaaaggtatagagggcacttctacaagcgttgtcaagtgcgcatacatattgaggctgatccctcattgaaacaaaagttggttgtacttgctagaaaagttaaaaagatagatgatgaaatagagaagtacatggaactcttcactgagctcagagagaaccctgctgatattaatgccattgttgcaagacgacggaaggatttcactggggacttcttccgccatcttaatttccttgtgaatgcttataatggccttgatgagcgagatggaatagtcaggcttggggctaaatgcctgtctgcaattcatgcatatgattgcacactggaacagttggatattgaatctgctcagttgaagtttgatgatatactgaattcctcttcactagatggtgcttgtgacaagatcaaaagcttagccaaggctaaagaacttgattcatctctaattcttctcattaacagagcttgggctgctgcaaaagaatctacaactatgaatgataaggtcaaggacataatgtatcatatttatacaactacaaaagaaagcctcaagagcatctcacctccggagatgaagctgctgaagtatttgctgaatattgaagagcctgaagagagatttggtgctcttgcaactgctttctctcccggagatgggcgtgaagctaaggatgaagatgctctatacacgactcccagcgaactccacaaatggatcaaaatgcttctcgactcataccatctcaacaaggaggagacggattttatggatgcgagaaagatgagcgacccggtgatcatccaaaggctaaccttgctgaaggagatgatcgaggaagaatacatgaagcggtatatacatcctgaggaggaagaagaacccatggacgacagctagcaccagaatgctctgagcgaagcgagcctgtatgtgtaacgccgactcggaacaaacggtgaagatttagaagggacattctaatcgctgccaacgttgacgatccatataagtagtagatagccgatgccctgctccttttttttacgaggcgatggatggtaaatttgtagcatggcaatggcatcatcaggaatggtactttctgttacatgtgtaaagctcaggatttgttttgttcttaggttcgcaattttaaagatgacacgtttaattctggagtctctgatttggacaatcctaagaaaatggttctttcagagtat

SEQ ID NO: 136648 - DNA, 1974 bp, Zea Mays
gcccagccttgaagccgtcagcgtcgacccgcctcacgcttgttcgcccgttctccctcttcccggagttaggtacgacgacgtgccgccgctaggtacctccgcgcgaagacgacgcgccgctggtaggtaggccgtaggcgcgcagcccgcagccgtagagctgcccaggcccggccgactcccgatctgcatctctcggaccgcccgatgccctgcgggctgcgtccagcgtaacctcgcctcccagcgccagggtaaaccggccccagcgagggacgcgcctcaagcggagcccgacagaccggcagctgaaacccttgccaactggctcctgttttgccgggttgaagagaaccatgcaggacatgaagcccgccgctgctgcagtcgccaaggtggtggctggtgactcgcctccctctgctgctagtcctgctcctgcgccagcagtggccaacagcaatgggacaccacagaagccgcctcctattcctgccgccgccttcgacatgcccaagccaaacctccggggccttaacaagcccaagtgcatcctgtgtggtaacatcgcccgctcccggtgcccattccagtgttgcaagagctgctgctacaaggctcagaatccttgccacatccatgttctgaagcagaccaacacattgccagataagccgtcacctgcaactgctcctgcaacaacagaacagcaatctaacaatttacctgcaaccagttcagcgtcaaggctggctgccttgcaaaagcttccccagcactttctgaagtttctccaaacaaagaaatcagttaccaaaaaggacgttgcgggtataaacaagtggaggtttatgaagctaaaggaacatatgcaaggagataccgacgctgaaaacgaagcgtacgagaggtatacgcagaacgtcgggttactggaggaagcattctgtcccatggaagaagatgctgatgttgatcctgaggctgaagcaacttcttcttcagaggaagaaaggatggacctgttggtttcggcggcaaaggcgaggttgaagtcggataacgaagctgccaatagcttcagggagagggttgccactatcttggaccagaagctgaaggacctgcgcgggagccaaagcgccagtgagggtgacgaaccgtctggcccaagtctggacgatcgtctaaccccgaccccgatgaagttcagcacagcgcagaagatggggagagccacggaactgaacgagctgctgggtaagctgacaggagcacggagcgaggacgatctgaagccttgccgtgatcttgccgagcagctgtttgggaaggaggacggctcctctgttggcaattcgaacagagtggatacggagactgagccgggcgatcaggagtcagctgcagcagtagcacggcgctattccgtcccaacgctgtgcagcaggatggaggtgggtgaggacttcgcctcagagatgaacgatgaattctgctctttgactcaggtggcccagctatgaaacctgaaacctggactaatcgcaatgtgacatttttaggggatttcatcacatttaagcctagtttagaaactcaaatttcatccgaaattcgagtgaactgagggaaaaataaaataatttctctcaatcccctccaactcctgagtatttaagttcctaaactaatccttagggaacttaaatccttttttggaattgaaggggattaaggaaaaatatagttacctcaatgtgctttccaatttagaaggagatttgagtttttggaactcgcactgtagtgtcagcaagtgtttggctgttcgaagtgaggccagagcagtgtgggacgttttgtcgtacccctgtttcttagcccgtatttgttctggtatacacgaaagaagcatggagtgaatggatcgaacacgtcgcctcgaagttgcatggacaattcttgagc

SEQ ID NO: 136649 - DNA, 874 bp, Zea Mays
aggcagccgcccagccttgaagccgtcagcgtcgacccgcctcacgcttgttcgcccgttctccctcttcccggagttaggtacgacgacgtgccgccgctaggtacctccgcgcgaagacgacgcgccgctggtaggtaggccgtaggcgcgcagcccgcagccgtagagctgcccaggcccggccgactcccgatctgcatctctcggaccgcccgatgccctgcgggctgcgtccagcgtaacctcgcctcccagcgccagggtaaaccggccccagcgagggacgcgcctcaagcggagcccgacagaccggcagctgaaacccttgccaactggctcctgttttgccgggttgaagagaaccatgcaggacatgaagcccgccgctgctgcagtcgccaaggtggtggctggtgactcgcctccctctgctgctagtcctgctcctgcgccagcagtggccaacagcaatgggacaccacagaagccgcctcctattcctgccgccgccttcgacatgcccaagccaaacctccggggccttaacaagcccaagtgcatcctgtgtggtaacatcgcccgctcccggtgcccattccagtgttgcaagagctgctgctacaaggctcagaatccttgccacatccatgttctgaagcagaccaacacattgccagataagccgtcacctgcaactgctcctgcaacaacagaacagcaatctaacaatttacctgcaaccagttcagcgtcaaggctggctgccttgcaaaagcttccccagcactttctgaagtttctccaaacaaagaaatcagttaccaaaaaggttcattgtctgtttccgtgtgctctgtttgttctgaaccgc

SEQ ID NO: 136650 - DNA, 3074 bp, Zea Mays
atggccccgacattcctgtctggaagatggaagctatctgtgcctgagacgctagacaccgacgcgccggtgccaccaaccgcctatgcaccgttctactgcttccatttgcgtcactactcactagcaccaccattggtcgggcctctttccatgggcactagagagggaagaagacttcagacaactggagacgggctagatgaaatcggagacgggctagatgcaatcgaagatgggaggagcgacgcttgcagggagatggcatggcgacagagaaaccctaggctgcagttttcgtccctctcctgtggccttcctttactcccgagtcccgacgacgacaggagcccttcaccggcgacgcacccttcgccgggcacttcaccgccgacgaccacgctcctgatgaaagaggaaatcatgtttgacaaccaaacaaagccatgcagatcgagggttgactccaaaagcaattcaagttctctgaaacctaagtttggatcatcatggggttcccaaattgtcaaagggtttacaacagacaagaaaaccaagaagacagcagcaaatgcaagcaaaaaaccacctcttccaagtgtcgaaaatgttaatcaggccaaccaacagattccgtatcactctagggtgaaaagatcccttattggggatttcccttgttcacctgctggtgctcaagtccacccccatgtctttgattgccacaatattaggtcccctgcatcccatgatctttttcttgagctggatcatctcagagagcagcttcgtgagtcgaaagaaagggaattgacattacagtcagagttgagacagtgcagagaaaacccaaaagtttcagaacttgagaaggagcttgattctatgagggatgaagttgacaggcttgcacgactgaaaatttcattagaagctgagaaaacaagcatatctgaacagttatcagctctatcttctatggaagaacatcatgaagaaaatgtaagattagatagccacggcaatcggatacttactgtagatggggacaatgcaccttcagaaaacttggagtttgaagttgttgaactacgccggttaaacaaagagctacagtttcagaaacgaaatcttgcaattaaactctcttcagctgaatccaaattggctggccttgagaagaatgaagagagtgatattgttgccaaagttcaagctgaggcatcgttgttgaggcatacaaatgcaaacctcagcaagcaagttgagggattgcaaatgagccgactaacagaggttgaggagcttgcttatctacggtggatcaattcttgtctacgccatgagctttgtaactcagatcaagcagctagagcaacgacggatatagattacaatggtggcatggcttttaatgaggatgataatagcgaaggtgatgcaaaaacttccgaggacagttctgatataaaattcagcattgcagaacgcatcaagcagtggtcccagaatgataagagctgccaagcatcgaaaaaggaatcccttcttgatagggcatggattgaagctgcagaagcacgaagcccgacacgtaggcactcactcggtggaccaaagggatgtgcacaagacttcaacatcattaaaagaaggcaatccgatacctttatcagcctcccggatgcgacagatgagtcatttgcctttaataaggatcctgcaatcagggagaagcgtgatcttcttgtagacaagtatgattttggtcgatctgaaagttcaagatttgttctcagcaagccagaagtatgcaaatcacagtgtctggatgttgaaaagcgtgcgttgcgcatccctaatcctccaccaagaccttctgtttctgtgtcaaattctggtccatcaaatggatcgactgtaaatccaccgcgaccaccgccgccgccgccgcctccaaagttttcctcaaaaagtactggggtcatgaagagggcacctcaggttgcagagctctaccattcacttatgagaagggactccaaaaaggatacttccggtggcggaatctgtgaagcagctaattctgcgaatgtgcggagtagcatgattggtgaaatcgagaaccggtcttcccatttgcaagctatcaaggcagatgttgagactcaaggtgaatttgtgaaatcattaatcaaggaggtgactagtgcagcctacaaagatatcgaagatgtggttgcatttgtgaagtggttagatgatgaacttggcttcctagtggatgagagagcagtgttgaagcattttgattggcctgagagaaaggcggacactctacgagaggcagcttttggctaccaggacctgaagaagctggagtcggaagtttcaaactacaaagatgatccacgcctgccctgtgaaatcgcactgaagaaaatggttgcattatctgaaaagaccgagagaggtgtctacagccttctaaggacaagagatgctatgatgaggcagtgcaaggagttcaatatccctacagactggatgcttgataacaatcttattagcaagataaagtttgcttctgtgaaattagcgaagatgtacatgaaaagggttgcaatggagcttcagtacatgggtcctctgaacaaggatccagctctggagtacatgctgcttcaggctgtgagatttgccttcaggatgcatcagtttgctggaggtttcgatccggagaccatggatgcattcgaggagctgaggaacctcgttcacgtcagaaacagcacccagtagctaggacgcggcaccgcaatgtagtgtttgaagaagaggattagttttcagactctcaggcttaccatctcagtaagcgtagcaggcacgatttttggtcgtgtgatgtttgcatgtgttcctgcgtggtgtgtttcagtgtttgcagtgtgtaagatatgtttgttctgtaccgcgtgtggtgggtgggatgaagtgacccgccggcgctggcttttaacctcactgttgccagaaaatagaaaacgcactgggacatgcacatgcttttg

SEQ ID NO: 136651 - DNA, 268 bp, Zea Mays
atggatcacgtgctcgcaggactgatgggcgaccatctcgcgttgatcgtggaccggctgctgacagagtcgacgctagaggcggcgatcggcggtgggaagcagatggtcgatctgcgtcaggagacggtggacgtcgagtactgccatcgcgggctaggcggcggctcggcaacgaaggtggtggagtgcaggatttgccaggaggattaggacacctgcatggaggccccctgcgcctgctgtggcagcctcaaggtacctgacc

SEQ ID NO: 136652 - DNA, 381 bp, Zea Mays
atgaaagaaagaaagaaagaagggattgaacaaggaagaagggagatgatggaagaaagaaagaaagaaaggaaggaaggaaggagtgcccttgtcctatactatactataggcaacgtgcagataaaaaatggggaaaacatgaaaaagaaacgaaaaagaaaaaaaactaaagctcatggaaggtacacaatgtttgctaccgtcattgactcgagccaggtgagggttcagcgtggaggctcatcgaggtctgctactccatctaccgaacatcagacccctccagctaccttgccgacacatgaacaagatgacgggttagactttgtcgaaacccccttcactagtggaggtatcgaccatcactcgtcactgtaa

SEQ ID NO: 136653 - DNA, 240 bp, Zea Mays
atgccagtcagcatcagccagccttcgaagcagccaaaaagttccagatctaatccaatcccaacacctaccgatggtaaagctacgactgcaagcacattccacaaagggatgcacaagttgcagttaggttgcaaagtacaaacaagaagaagcatgctgctagagcgtcatgcttgggtaaaccaaagtctcccaatccagccaatcctattttgtccatatatcagtacaggataa

SEQ ID NO: 136654 - DNA, 189 bp, Zea Mays
atgtttacatatgcagttacatgttcatatatatgtttgaactactttgcagtgcatatacgtttgatgtattatattgatgtccaaagatgctgtcagtgttcacttttttaaggcaaattgtccactggtactcctagtcgaccgacttttgccaaggttatctggaagtggatgcatctagttaca

SEQ ID NO: 136655 - DNA, 1439 bp, Zea Mays
tcagctcaaataggtagctagatattatcagcaaataaagctccatcataataggttcacaaaacgactgtctgatttatcttagtggcaaacgctggattcaaatacaactagaaccatgaaaagtggcctactgaagtgcaggcaagacgttcaactgatggcggaccgtgacaccatggcaggttgacatctctccacaggcacaccaacgcatccgaagaaatgtatgtacccacgcatgtcatcaggtccacaatccatctcgatctgcctacttggatctctgcctcatctttctgcgcttcctcttgagcctcctcatgcgcttcttcttccactgatgattgacacaggagaacgtatcgctttagataacaggaaaaataaaagaaccacttacacaataaaatgcaaaacaggaccgttcttataagagaatatcttaagttgactgacaacagaaccagagtgcaaaaacaagagttcgtctcgtcatacaacttacagataagttcaaataataatagaaaaacatagacatgaatacatctaacagatgtgcaatagaagaggactatcttgtacgagaataatggtcagttaacagagcaacaaaataacgacaattcaagagaaaatatcttgtctcgcacgattcaaaagtctcaactaactacaaaacattatgtttacacaagtgtctagcaacatggaaacgttttgtgcttcaagccaagaggagctaaacgggagataacgaacaccttgagggatatgtgagcgtcgtctagctgactggtattactagccgtaaccagcaaagcatattgaatgaagacaattgcatatttcatcagttgctggctagatttcatcggcagtgacttaagccatcgtccacggggctcatatcaagtgtatgcgttaaagaaaccttcaccgtggccggggaagaaccctagcagacggcggtggcgccggaagcacgcgacgcctcacagtccgcagcggctggaccgtgcggaaccgagccacggaacacgagataccaagcccgcgcgagacgatctggctcggctcgcgcagggcggcacctcgcgttccacgcaaacgatccagacccggctgctgcgccgaggggcgccacgcacgcacggcgtgatccaccgtcccagaaacgattcctcccagaatcgcgccactcgagcctctctctttgtaatcacagccccgggacatggacggaccgagttgggagctagctactcgtgggaaggagttgctacgccacacggatctaatcgacgagatagtgtgcgcgaggagtaggaaagcagggagaataccttggccctcatggtcgcttcttcgcgtgctaacctcgatgcgtctcctcctgcggcgtcggcggcggttcccgatgtggggaggggatt

SEQ ID NO: 136656 - DNA, 144 bp, Zea Mays
atgtacccacgcatgtcatcaggtccacaatccatctcgatctgcctacttggatctctgcctcatctttctgcgcttcctcttgagcctcctcatgcgcttcttcttccactgggccctcatggtcgcttcttcgcgtgctaa

SEQ ID NO: 136657 - DNA, 909 bp, Zea Mays
ctcgctctccatccaccttctctcttgttcgctagctagctcatctcgccctgccggacgtggttcctgccttggcatatgcatagccacctggcctgcagcggctgcaagcgtctcgtccagtaccgccggggagccgccggcgtccgctgcccaagctgcgacgctttcacggccgccgccaacccatcagggccgccggagatgtctgagctggtgtgcggcggctgcttcaccatgttggtgcactcccgcggcgccgccaacgtgcgctgcccgcactgcggcaggctcaactccacgagatcagggaaccagatgggccacctgtcgtgcgggcaatgccggaccaccctggcgtacccgccgggcgccaccaccgtcggctgcccgacatgccgcaacgtcaatccggtcagggatgctcgggcggcgccgcagacggtgctggtggagaatcccaggacgctagacgagaagggcaagctggtgagcaatgtcgccgtcggcgtcgcctcgtggaaaagatgaccagcaggcggacggcggaccaagcagacccctccttcccgcgcgctaatcatcgtcccaggggttcgcctacagtactagcagactgaactcttcgtggacttgctactactactactaccgtcgtcgtcagcgattaacggcagctgatgatgtgaaatcaagtgtgttttaaagcttgatgctatataatacatatgttttaaaagtgatcgaattagctagctgttgagcagcagcagcaaaagatctgcagcaacaacccaaaaaaaatttgtaaatacgctagcctgcccggcggtcgtcgtctgtgggcttcctttgatttgatccaaaaaggaatggaagggagcgaagcgcgttgtctcctggaatccc

SEQ ID NO: 136658 - DNA, 141 bp, Zea Mays
atggcgctcacgacgttcggtgtcggccaccacagtgcgcagggcggcaactgctcgtgctccacctccggccaggcggacatgggcgcgccctcatgtgttgttgcctcctccgatgaatgtcctgcgctccttctctga

SEQ ID NO: 136659 - DNA, 653 bp, Zea Mays
ctgggatgaggtccgaaggggctagccacggtgctaggcgactccgtcgtggtaccacaacaccgatggcaaattatcggtgcactgattgctcttgtgcccgatgcttctaccaatcgacttcctcatgcgctccacatcctctttgtccagtcgccgaggccggaatggcagacccagcagggatcaaccgcggcaacacgatttcccactcagcgcgcagagatggagcacgatttcctctctgcgtggctttgtttttggagggccatgggaggcattcggcttataagcgcgcggggcgagcgtccgatgaaaggggatccggcgaacgaactccaggaatcgcggcgagcttgttcaccgacgcgagggaaaagggggaggagtgagggcggttgcggagctttggttgacgcgaagtccggcaccgttgcaacgattcggaggtccaggcaatattggcgtggccagatccacattcccacggactactccgtcttctacgcgcacgtcaggtaggaggagcacccatgacgcaaggcagtgggccccaccacgcttccgctgcgcacacgaagacgccccagctgaccatcaccgaccgcgctgaagccttcgggcagggaagatgagcagtaacaggggtccca

SEQ ID NO: 136660 - DNA, 435 bp, Zea Mays
aaagccaaaggagagagagaggattggaaaatgagttcgaatatgctgataaacacaagtaattaaaccaactttgaaaataagcaagcgagaggagggaaagggttcgaaaatgagctacaacaaaaatggcgagatatgcttggcaccatgcacgccatccatcttataggcaaccctaccaagctgtcgttgctctagatgagtggcatacagggagccaggcacatcctaagcaatgcaaaccttcatatattattacgcaaaatcacctttgcacatcctgatccatctatcaaagcttcacgcatcatacgtaaatgcatgcatgtgccaaccgtagcattgttgccaatgcatcttgcacacccaagcagaaagatgtgcatggttttctatatcaccagtgttctagctaactgacatgtatgaatg

SEQ ID NO: 136661 - DNA, 2414 bp, Zea Mays
gtcgtactcgtactggtgcagccccggcctcgcgcgcgcgcgcgccaggtgctcgacggaagttggtccccggcgaccaatgccgagcggcgggaggcggctgccgccgtggacgtcgccgaggagcgcgggggcgccgatgtggagcactgccggtaccccgggcggaccgcgcccgggcccgggctacgggacgccgcccgtcagcgcgggttgcttcggcacgcgcgtcacgccgccgacgagcgggggcacgcgcgtcacgccaccgacgagcgggggcgcgggcgcgcgcgtcacgccgccgtcgaccgggggctgctcgtcgcggccgcccaggccgccgccttccatggattcgccctacgtgcgggccaagcaggcgcagatagttgaaaaggacccaaacaaggctgtaccattgttttgggcagctataaacagtggtgaccggatagagagcgcattgaaggatatggccaatgtactaaaacaagcaaaccggtctgaagaagccattgaggcaataagatcctttcgtgatcgatgtccctatgaagctcaggagtcacttgacaatattcttctagatctatacaagaaatgtggtaggacagatgagcagattgaaatgctgacattaaagctgcgaattgttgatgaggagctagcttctggtcggtggaaaacaaaactgtctaaatctcatggaagagtagtctacctttctctcagagatgaaaaagcaaggctattggggaaccttgcttgggcctatatgcagtccgaaaattatgaggaagcggagatgctctataggcaagctcttgctatagaagctgactacaacaaagagtgtaacttggccatctgtttgatgaagactggaaagttggctgaagctaaatatctgattcatgctataccttacaactgtaatgatgaaagtcatgttaagtctctctcccgggctactgaaatgcttagggaatttgacttgcaatccctcccctctcccataactcaggcgaagtccaaagaaccacggaattttgttgctgatgatgtggagatgcttgtagatctacagccacaaacactatcaactccttttagtgaactgaaatataaagaagcacatatttcagtttcacaaaatgcagagaagcatgagaactgcaattcatgccttccatctcccataactcaattgagacgggaagaaccacacactatggttactgctgatgccgaaaagaatgaaggctttgcagagttccaagatctttctcgactgttcaatgatgctgccacgcctcattcagtacttgagaaactacgaaagaggctagttaaagaggcaccaaaagtcagtattcatgatcaaattcagactcctccaactgaaagcttgccaaactctgaaagaaacctagatgctagtgagacttccgtgcaagaagggaagctattgaccaaaggtgttagaaaaacatggtctgacatggtggatgaagaggaacagcaattgggtgatgacaaaccatgggctgacatggtggcgaaggatgaccagcaattgggtgatggcaagtcaacacatggtgttggaattactgaacaaaacgagagcagtaagcatgcaagtaagctggagtatagaacaccatcgtcctctcaagaaagcaggacccatcaaagaccagtcatgggtggtcaactgcaaggttcttcagcaggttcatggagacgcagtgactccaaaatctacatggataagaacgtgaactgggatcttgtgaggactgctccgacatggagcaggcataaggtacatgaccacaacaatcgagtttggcaaaggcttcacacaattcatccccgtgagagagcctcaggcacgaagcaagtaccacggagaagcaacacatctcagcgcgctctttttcctgactggaaatcaaaaggtgaaggatatggccatggctatgttccgtttgatgataacgaacacactcagtgttccagtcacattgaggccgccactcatcgctggcataataatgaggcaagtacagggtcatggaggccacagaaccgtctgcgggtcttccaggaaatcacaaatgagatcaaccaaaatgttgtgtaactatgtccttgttccttgctgtcgatggaagttctcctttccagcaacatgttgtttgcactacaaatgggatctgtgaaatagttcagcaataaacagtttttcgcttcagttgcttctgtttttgagattcagcatagctacagaaaactatgtgaatatcttcactgcccaccgttcatactactggcacgttggtggatcgtgatatctgtatatattttctttatcactagtgtgccaaagtatctgtaaaaaaaaa

SEQ ID NO: 136662 - DNA, 2616 bp, Zea Mays
ttccttgcctcgctgctgtttcttgctctacggattcactggtggtggtggtggtggcggagctctccgtcctaggaggcgctggtggttttccggattgtttcgtctcgcccctcccctcttggtttgagcttgggttagcttcgtttagacggcctcctccacttgagctctttaacctagacgattgtggcgatcacaccaaactcacatacagatggagatggcagagaccttgcatgtattgcccgatgatggcaatggaagtgctgcagttcagactgagccttattgccatgaagacgccattgaggacatggaatctttcttggatgaagtaaacgacagggttcatgtttcaggaattgtgactggtgctatcatcaaggggatcctaagtgatgtgcggcaagaagctgctagccaaattgctctcaaggatgcagagatatcatcactgaaccagaagctgcagcagccagtaaatggcagcttgagtttatctgagggacgggataaaagacatgatgagttttatagtctccgccagcagcttgactccatttccaagtcactgttgaattctgaatgggggctatcgggatcacagcataactttgaagattcagaaaatgccagcaagcagcaggacaaagaaaattcctctagaaatggtgtagcaaagaccattcatcctggagactctaaagaagaagtttttggtgatccgaaactcttggatcacatggataaggttgctttgatagcccatttcaataaatcaatgaatgagatgaaaaggcagcatgattcagttctgtaccagaggacggaagagatattcaaactgaagcgtgaaatcctgaagaaggatggatcaaacccttttcatttacgaaataacaaagaacttgagcaaacaaggaagaaaattgaggaagtcatctcaaagttggatgtgctcctcctggagaataaaagagcctctgtccgtatcaagtcaaatgcaattcctggtcaacaagataagaacaatgtattaggttctgaaatcgagcaactagaaagcggtgcaagtaataatgaagactaccattgctctattccaactcactcatcacattttgcatccagagaggcagatcatgaactgaatattgtaaggcctcaatttgacgttgaagatgccagaattgcagccacctttagagaagaaatagaaaggattatcataaaagagttcattagtgaaataaacatagaattgcatggttatgagattgagggtggtatgaagcaggaagtttgctcaataattcacaatgaggctattgctagagcaatgtcaaacattgattctttgttgttgaagtacgaggagaaaaagggtcatgctgaagaggaatctctacataagcaaaagattgaaaaactgaaactaattgtggattccttcactgaagtattgagtgaaaaggagaaatttgtatcacagattggattggaagcgatgcagactcgcgtggagtcaatgtgttgtgaacttgatttgttaagggacaaagtggcaaagcaagattcctacctatctgaaaagaacagggaatttgatgccattatgtgcaggttggagcaagctcagcagcatgttcaacacaatgatgttaccttggttgagctgaatgatagacttagaaccatttcaaactctctaaaagacctagagaaacagaatcaagctctacattatgccatggaagaaaaagagaagatgctaacatctgctgtttccaaagacaatgatatgagagaattcatggaaaatcttgttaaatctatcaaagattttgaaattgtcatgatgaatcagcaggctgttgttgcaaataaagtcgatcatcatgaatcaaggttctgtttattaaaagaacaatgtaaacaccttgcaaaagaaggcaatcttttaagaaagaaggccttacgatacaaagagatatctgagacaagagactctaatcttcagaaagctgaacttgaggtggatttgcttggtgatgaggttgaggccttaacggatcttcttgcaaaaatctatactgcacttgatcactattctccagtactgcaacactacaccggcgttatggagaccttgagcatgattaagaagcacattagcatggcgaagtaaaatgcttctggtcggcttgacactgtagaattgtaggtttgacagcaggcttccagtggtttgacataagtttgtagaattgtagatggcagcaagcttttgtttccgactcaaggactaggtgattacccccttttgcaggcagagtagtggtcttggtagcttttgagcactctgtaaatgacccaacccaaccgtagctattagttcttgtgcttggcttttgatgctatggcctatgggctttgccacctgctatgctgggttgcaaaggtgaactcttgtaacattggtagccgagaggatgttagagaagctgagttttcatgtggatctttattttttcctggcacaatggtagataaatctacactatagcctggcgttcaggctttgtagtgatcatgcgtgccaccaaagtaaca

SEQ ID NO: 136663 - DNA, 3030 bp, Zea Mays
ttccttgcctcgctgctgtttcttgctctacggattcactggtggtggtggtggtggcggagctctccgtcctaggaggcgctggtggttttccggattgtttcgtctcgcccctcccctcttggtttgagcttgggttagcttcgtttagacggcctcctccacttgagctctttaacctagacgattgtggcgatcacaccaaactcacatacagatggagatggcagagaccttgcatgtattgcccgatgatggcaatggaagtgctgcagttcagactgagccttattgccatgaagacgccattgaggacatggaatctttcttggatgaagtaaacgacagggttcatgtttcaggaattgtgactggtgctatcatcaaggggatcctaagtgatgtgcggcaagaagctgctagccaaattgctctcaaggatgcagagatatcatcactgaaccagaagctgcagcagccagtaaatggcagcttgagtttatctgagggacgggataaaagacatgatgagttttatagtctccgccagcagcttgactccatttccaagtcactgttgaattctgaatgggggctatcgggatcacagcataactttgaagattcagaaaatgccagcaagcagcaggacaaagaaaattcctctagaaatggtgtagcaaagaccattcatcctggagactctaaagaagaagtttttggtgatccgaaactcttggatcacatggataaggttgctttgatagcccatttcaataaatcaatgaatgagatgaaaaggcagcatgattcagttctgtaccagaggacggaagagatattcaaactgaagcgtgaaatcctgaagaaggatggatcaaacccttttcatttacgaaataacaaagaacttgagcaaacaaggaagaaaattgaggaagtcatctcaaagttggatgtgctcctcctggagaataaaagagcctctgtccgtatcaagtcaaatgcaattcctggtcaacaagataagaacaatgtattaggttctgaaatcgagcaactagaaagcggtgcaagtaataatgaagactaccattgctctattccaactcactcatcacattttgcatccagagaggcagatcatgaactgaatattgtaaggcctcaatttgacgttgaagatgccagaattgcagccacctttagagaagaaatagaaaggattatcataaaagagttcattagtgaaataaacatagaattgcatggttatgagattgagggtggtatgaagcaggaagtttgctcaataattcacaatgaggctattgctagagcaatgtcaaacattgattctttgttgttgaagtacgaggagaaaaagggtcatgctgaagaggaatctctacataagcaaaagattgaaaaactgaaactaattgtggattccttcactgaagtattgagtgaaaaggagaaatttgtatcacagattggattggaagcgatgcagactcgcgtggagtcaatgtgttgtgaacttgatttgttaagggacaaagtggcaaagcaagattcctacctatctgaaaagaacagggaatttgatgccattatgtgcaggttggagcaagctcagcagcatgttcaacacaatgatgttaccttggttgagctgaatgatagacttagaaccatttcaaactctctaaaagacctagagaaacagaatcaagctctacattatgccatggaagaaaaagagaagatgctaacatctgctgtttccaaagacaatgatatgagagaattcatggaaaatcttgttaaatctatcaaagattttgaaattgtcatgatgaatcagcaggctgttgttgcaaataaagtcgatcatcatgaatcaaggttctgtttattaaaagaacaatgtaaacaccttgcaaaagaaggcaatcttttaagaaagaaggccttacgatacaaagagatatctgagacaagagactctaatcttcagaaagctgaacttgaggtggatttgcttggtgatgaggttgaggccttaacggatcttcttgcaaaaatctatactgcacttgatcactattctccagtactgcaacactacaccggcgtaagttttgtttttatgcttcgggcatgattcttatgttttctgttgtttctcttcgtgcctaatctaagaagtattgctgtattgtccataaagtgccctctgacctgtttgttgtttgtctttaatataacttatcctcattattctaggtatatccttttttttatcaagatctttcagtaaaagaaatttgtgaagtgacctaacataaatttttaacaagattgatgttaggtttttcttccaatattaatttgttgcgtgacatgagatattaggtattcgcatgtcttgtctaaccacaggttccatgttatgccagatgctaccgtatgtcataatcactagcaattgcattgcgctcacccaattcgcatggtttcgtgtatgatatttttgttctgtattaactgtactaatatcttttttgcaggttatggagaccttgagcatgattaagaagcacattagcatggcgaagtaaaatgcttctggtcggcttgacactgtagaattgtaggtttgacagcaggcttccagtggtttgacataagtttgtagaattgtagatggcagcaagcttttgtttccgactcaaggactaggtgattacccccttttgcaggcagagtagtggtcttggtagcttttgagcactctgtaaatgacccaacccaaccgtagctattagttcttgtgcttggcttttgatgctatggcctatgggctttgccacctgctatgctgggttgcaaaggtgaactcttgtaacattggtagccgagaggatgttagagaagctgagttttcatgtggatctttattttttcctggcacaatggtagataaatctacactatagcctggcgttcaggctttgtagtgat

SEQ ID NO: 136664 - DNA, 2284 bp, Zea Mays
atcaaatataaatagcatcgtctcactttttttcccaactagtgtgtgatctgtgtgtgagtgtgagattggttcaaattcctatttgaattttagcctttttttactatttaaacatgggagcaggctacccattagtaggtggtaccgtggtagtcagcggtcagcacagccttccctaactatctcgtcaatcgtcagctgcactgcaatctgtggtcgcaacgcaacgtcccccgtcgtggccgcgtgctatcttcctcctccctccctccttgccgcacgcgtcaaaccttgcaaagagagttcggtcgacggcgccagccggcgatggcagcgccgcgccaccgccagggccacattgcgcagtgccttggcaggatcctcgcctgccgcggcagcgccaccgccgccgtcgctgccggcccaggcggccgacggctcaccggcgcggagttcgtcgacggcgtgcggagcctggccgctggcctcgccgaccgcggggtgcgccctggccacgtcgtcgccgccgtcgccctcaacagcgtcgagtacgtgcagctgttcctcgccgtcacctacgccggagccatcatcgcccctctcaactaccgctggagcttcgaggaggcggcgcaggcggtggagctcgtgcggccgacggcgttcgccttcgacggcgcgttcagctcctgggcgcttcggctgatggagggcgacaggttcccatccatcggcctctacctcctcctgggcgatccttgcaggaccggccgcgctgctgcaggttgtgctgtacccattaccgacgtcacggggagcctcggcggagctacggcagcggcggcgatggagcccgtgtcggctccagacgacattgctctaatatgcttcacatccggaaccacggggcggcccaagggcgtagcgataagccacacgtccttgatcatccagtccctcgccaagatcgccattgtcggctacggcgaggacgatgtttacctgcacacagcgcctctgtgccacatcggaggggtctcgtcgtgcatggcagtcctgatggccggaggctgccacgtcctggcgccgaagttcgacgccaggtcggcgttcgccgccatccaggagcacggagtgacctgcttcatcaccgtccccgcgatcatggctgacctgctgtcctacgctcggaaagaggagatggcgccgggctgcgggaggacgacggtgaccaagattctgaacggcggcggcgggctgccgctccacctcgtaaacgcagcctcgcaatcctttcctcgggctgctattttctcagcttacgggatgaccgaggcctgctcgtctctgacgttcatggccctcaccacgccaaagcttcaagagccggagccggagccggagacccaaccgtgcggccaccacggaggtgtctgcgtcggcaaaccggcgccgcacgttgagatacggatcggcatggatgacgacggcaccaccgccggttcttcgccgaccgggaacgtcttgaccagaggcttgcacaccatggttggctactgggcaaacggcaaggcggactcatccgagtgtgacaggaacggatggcttgacaccggagacactgggtgggtggacgaggagggtaatctgtggctcttgggaaggcacaagggccgcatcaagaccggaggcgaaaatgtttacccggaagaggttgaatcggtgctgtcccagcaccccggagtggcgagagctgtggtggtcggcgtgccggatagccgtctcggggagagagtcgttgcgtgtgtcagcgtcaaggacggctggaactgggtggatgcgagagctgagcacgagcaccgaggcggaggcgaggaggtgtctcctcagatcctccatggccactgcaggacgaaagaactgagcagatttaaggtgccaaggtcttattaccagtggaggcagccatttccggtgaccacgacggggaagatcagaagggaggagctgaagagggaactcctggcagcaattcgactgcccagcaacctgtagctttttgaggcgatgatctgtttttggaccaaatcttggttcagttcgactccgattgaagtcttctgttttttttggtctgtaggtgcttttagcttttacctggttggagtttaagatgcgaaaaaaagagcgtttgattattggaaacctgtaacatccatgacttttcttcaccttgacaaaagaagtcgagtcaatggcaagtcccatgaaattcagagca

SEQ ID NO: 136665 - DNA, 2310 bp, Zea Mays
atcaaatataaatagcatcgtctcactttttttcccaactagtgtgtgatctgtgtgtgagtgtgagattggttcaaattcctatttgaattttagcctttttttactatttaaacatgggagcaggctacccattagtaggtggtaccgtggtagtcagcggtcagcacagccttccctaactatctcgtcaatcgtcagctgcactgcaatctgtggtcgcaacgcaacgtcccccgtcgtggccgcgtgctatcttcctcctccctccctccttgccgcacgcgtcaaaccttgcaaagagagttcggtcgacggcgccagccggcgatggcagcgccgcgccaccgccagggccacattgcgcagtgccttggcaggatcctcgcctgccgcggcagcgccaccgccgccgtcgctgccggcccaggcggccgacggctcaccggcgcggagttcgtcgacggcgtgcggagcctggccgctggcctcgccgaccgcggggtgcgccctggccacgtcgtcgccgccgtcgccctcaacagcgtcgagtacgtgcagctgttcctcgccgtcacctacgccggagccatcatcgcccctctcaactaccgctgggtgcgtgcgtgctcctccacttcatctccttttctcggttcttacagcacacagcactcactccggcaaagagtgcaagtaagtttcgtcgtcgtctccccctgttctgaagcagagcttcgaggaggcggcgcaggcggtggagctcgtgcggccgacggcgttcgccttcgacggcgcgttcagctcctgggcgcttcggctgatggagggcgacaggttcccatccatcggcctctacctcctcctgggcgatccttgcaggaccggccgcgctgctgcaggttgtgctgtacccattaccgacgtcacggggagcctcggcggagctacggcagcggcggcgatggagcccgtgtcggctccagacgacattgctctaatatgcttcacatccggaaccacggggcggcccaagggcgtagcgataagccacacgtccttgatcatccagtccctcgccaagatcgccattgtcggctacggcgaggacgatgtttacctgcacacagcgcctctgtgccacatcggaggggtctcgtcgtgcatggcagtcctgatggccggaggctgccacgtcctggcgccgaagttcgacgccaggtcggcgttcgccgccatccaggagcacggagtgacctgcttcatcaccgtccccgcgatcatggctgacctgctgtcctacgctcggaaagaggagatggcgccgggctgcgggaggacgacggtgaccaagattctgaacggcggcggcgggctgccgctccacctcgtaaacgcagcctcgcaatcctttcctcgggctgctattttctcagcttacgggatgaccgaggcctgctcgtctctgacgttcatggccctcaccacgccaaagcttcaagagccggagccggagccggagacccaaccgtgcggccaccacggaggtgtctgcgtcggcaaaccggcgccgcacgttgagatacggatcggcatggatgacgacggcaccaccgccggttcttcgccgaccgggaacgtcttgaccagaggcttgcacaccatggttggctactgggcaaacggcaaggcggactcatccgagtgtgacaggaacggatggcttgacaccggagacactgggtgggtggacgaggagggtaatctgtggctcttgggaaggcacaagggccgcatcaagaccggaggcgaaaatgtttacccggaagaggttgaatcggtgctgtcccagcaccccggagtggcgagagctgtggtggtcggcgtgccggatagccgtctcggggagagagtcgttgcgtgtgtcagcgtcaaggacggctggaactgggtggatgcgagagctgagcacgagcaccgaggcggaggcgaggaggtgtctcctcagatcctccatggccactgcaggacgaaagaactgagcagatttaaggtgccaaggtcttattaccagtggaggcagccatttccggtgaccacgacggggaagatcagaagggaggagctgaagagggaactcctggcagcaattcgactgcccagcaacctgtagctttttgaggcgatgatctgtttttggaccaaatcttggttcagttcgactccgattgaagtcttctgttttttttggtctgtaggtgcttttagcttttacctggttggagtttaagatgcgaaaaaaagagcgtt

SEQ ID NO: 136666 - DNA, 1365 bp, Zea Mays
ggaaggaggaaaccctagcgctcctgctccctccaacactataaaaaccacggccgcagccgtttatcagctaggttaaagcgacgccgccgccgcaagccgtccgccttgcccttcacgaaggcttggtcctcctccttgtatctccactccccccttcacagatccgttcctccagctagggttagcgttcctctgcagcgatggcgatcaagcggactaaggcggagaagaagatcgcgtacgacaagaagctgtgcagcctgctcgatgagtacaccaaggtgctcatcgccctggccgacaacgtcggttccaagcagctccaggacatccgccggggcctcaggggcgactcggtggtgctcatggggaagaacacgctcatcaggcgttgcatcaaggtgtacgccgagaagaccggtaaccacacctttgacccgctcatggacctcctggtcggcaacgtaggcctcatcttcaccaagggagacctcaaggaggtgcgcgaggaggtcgccaagtacaaggtgggggctcctgctcgtgttggtctggttgctccagttgatgttgttgtgccccctggcaacactgggctggatccgtcccagacctctttcttccaggtgcttaacatccccaccaagattaacaagggtaccgtggaaattatcacccctgtggagctgatcaagaagggtgaaaaggtgggctcgtccgagtctgccctgctcgccaagctgggtatccgccccttctcgtacggcctccaggtcaccagtgtctacgaggatgggtccgtgttcagccctgaggtgcttgacctttccgaggaggacctgattgagaagtttgccactggtgtctccatggttgcctccctgtcactggcgatctcgtacccgacccttgctgctgtgccccacatgttcatcaatgggtacaagaatgtgcttgctgttgctgtcgagacagactactcgtacccacatgctgacaagatcaaggagtacctcaaggacccaagcaagtttgctgttgccgccccggttgctgctggggactctggcgctgcagctgctcccaaggaagaagagaaggctgcggagcctgaagaggagtcggacgaggaaatgggcttcagcctcttcgacgactagagctgctgttttcgtcaaactgctgcaagttttggcttttttttttatcatctacaagtactgtttcctatattttttagcagacaaattatcgtgtgtaatcgacaatgatatctccttaaattttaagtacctgtgttgtgtcactcgggttgatgctgtttacctaacaaatccgtttggattttttttgcgtaaaaga

SEQ ID NO: 136667 - DNA, 791 bp, Zea Mays
atcagctaggttaaagcgacgccgccgccgcaagccgtccgccttgcccttcacgaaggcttggtcctcctccttgtatctccactccccccttcacagatccgttcctccagctagggttagcgttcctctgcagcgatggcgatcaagcggactaaggcggagaagaagatcgcgtacgacaagaagctgtgcagcctgctcgatgagtacaccaaggtgctcatcgccctggccgacaacgtcggttccaagcagctccaggacatccgccggggcctcaggggcgactcggtggtgctcatggggaagaacacgctcatcaggcgttgcatcaaggtgtacgccgagaagaccggtaaccacacctttgacccgctcatggacctcctggtcggcaacgtaggcctcatcttcaccaagggagacctcaaggaggtgcgcgaggaggtcgccaagtacaaggtgggggctcctgctcgtgttggtctggttgctccagttgatgttgttgtgccccctggcaacactgggctggatccgtcccagacctctttcttccaggtgcttaacatccccaccaagattaacaagggtaccgtggaaattatcacccctgtggagctgatcaagaagggtgaaaaggtgggctcgtccgagtctgccctgctcgccaagctgggtatccgccccttctcgtacggcctccaggtcaccagtgtctacgagtgattgagaagtttgccactggtgtctccatggttgcctccctgtcactggcgatctcgtac

SEQ ID NO: 136668 - DNA, 1735 bp, Zea Mays
cccggactttcccttctcgttccagcggcctcgagtctggagaggactcgcctgttctagggttcggtgcccagtcgctgctcgcgtctccgccctccggccaggtcactggcgctaggaggcgctaaatcgagttggcgacgcctccctcacccgtccccgatcgacgtcgggaggcattcctggcggcgtcagcgtcggcgtcggcgtccccgcacgcgcgcactactgactcatctgtgcagatcgagccgtcagtgagcatgacagatcttcctttataagaagagttgacaatgtcaatggacattcctagggggcgtttggcttgaagataatcactctcaaccagccaaacgttcaaaattccaactgattcaggaatccaatggaatcctcaatcaaagaatcaaggagtagagctgaagaatcaggaagtggagctctcccaaacttctgttaatttcgataaccggcattcagctctagaagatagctgttgcaagatacgccactggagggtgacaactctggcttactcctcgacgtcatcatgctctgcacctgaagtttgtggctacgatctgcatacaactccagcgaggcacaaccccgtcgagatggatcgatgccgtgctcactgggacgacaccaccacaagaatattcctggacctctgcatcgccgagaaggaaaagcagaactacaacagcaaggggttgaccaagatagggtggcacaatctgtaccgcaacttcaaggaagagacacgcaggtcttatgataccaagcagctgcagaacaagttcaacggcctgaagaggatgtacagcctgtggagactgcagaacgacaaggctggacctggaggaggaggcgggtgggacaagagttcgagcactgttacacaggatgctgacggatgggacaaccagatcacggagaccagtgcagcagaagacttccgtggcaaggcgctcgcgcacgaggacgcgctcgccgttcttttcggccccaaagacggcacaaattcgccgtccgtaggtggtggcgccggtgacagaacaccaggcgggggcggaggaggcgaggaagagaaccatgctcgagcgtcaggggacaatgccgcttgtccggaggagagcctggggtgttacaggtctggccgtgcgtccccatggtcaagccaggaccaccacatccacatggtcggcagccgcccagccaagaagcctaagaacacggggtactatgccgaaggcgtgtccgagagcatgctcggaagcaggaacgagagcagcagtgccatcaggcgtgagcaagaagaggtggtagagttgctgcagctcgtagaaaaggacggcgtgtctcagggatctgagctgttcttcatagctactgagctgtttaggtcgccgatccgacgcgcggcatttaggtgcatcaccactccgaagaaccgagttgcatggctccggtggacttgggacaatgttaagatgtgatgatggcggcgttcttgcttagttttcagttgcctgtactgagaattcttcctcgggcagttcgtgagaaactagttgtattgtattataccctgtcctgtccgttcttttttatttgtcgtgttttagttgcgacaaatattcgagatcggatttagtattattgtaaatatatacagatttccagcacagcgcgttctgtcaatatatacaatgcacacataaaagta

SEQ ID NO: 136669 - DNA, 1535 bp, Zea Mays
gtcgctgctcgcgtctccgccctccggccaggtcactggcgctaggaggcgctaaatcgagttggcgacgcctccctcacccgtccccgatcgacgtcgggaggcattcctggcggcgtcagcgtcggcgtcggcgtccccgcacgcgcgcactactgactcatctgtgcagatcgagccgtcagaatccaatggaatcctcaatcaaagaatcaaggagtagagctgaagaatcaggaagtggagctctcccaaacttctgttaatttcgataaccggcattcagctctagaagatagctgttgcaagatacgccactggagggtgacaactctggcttactcctcgacgtcatcatgctctgcacctgaagtttgtggctacgatctgcatacaactccagcgaggcacaaccccgtcgagatggatcgatgccgtgctcactgggacgacaccaccacaagaatattcctggacctctgcatcgccgagaaggaaaagcagaactacaacagcaaggggttgaccaagatagggtggcacaatctgtaccgcaacttcaaggaagagacacgcaggtcttatgataccaagcagctgcagaacaagttcaacggcctgaagaggatgtacagcctgtggagactgcagaacgacaaggctggacctggaggaggaggcgggtgggacaagagttcgagcactgttacacaggatgctgacggatgggacaaccagatcacggagaccagtgcagcagaagacttccgtggcaaggcgctcgcgcacgaggacgcgctcgccgttcttttcggccccaaagacggcacaaattcgccgtccgtaggtggtggcgccggtgacagaacaccaggcgggggcggaggaggcgaggaagagaaccatgctcgagcgtcaggggacaatgccgcttgtccggaggagagcctggggtgttacaggtctggccgtgcgtccccatggtcaagccaggaccaccacatccacatggtcggcagccgcccagccaagaagcctaagaacacggggtactatgccgaaggcgtgtccgagagcatgctcggaagcaggaacgagagcagcagtgccatcaggcgtgagcaagaagaggtggtagagttgctgcagctcgtagaaaaggacggcgtgtctcagggatctgagctgttcttcatagctactgagctgtttaggtcgccgatccgacgcgcggcatttaggtgcatcaccactccgaagaaccgagttgcatggctccggtggacttgggacaatgttaagatgtgatgatggcggcgttcttgcttagttttcagttgcctgtactgagaattcttcctcgggcagttcgtgagaaactagttgtattgtattataccctgtcctgtccgttcttttttatttgtcgtgttttagttgcgacaaatattcgagatcggatttagtattattgtaaatatatacagatttccagcacagcgcgttctgtcaatatatacaatgcacacataaaa

SEQ ID NO: 136670 - DNA, 1503 bp, Zea Mays
cccggactttcccttctcgttccagcggcctcgagtctggagaggactcgcctgttctagggttcggtgcccagtcgctgctcgcgtctccgccctccggccaggtcactggcgctaggaggcgctaaatcgagttggcgacgcctccctcacccgtccccgatcgacgtcgggaggcattcctggcggcgtcagcgtcggcgtcggcgtccccgcacgcgcgcactactgactcatctgtgcagatcgagccgtcagtgagcatgacagatcttcctttataagaagagttgacaatcaatggacattcctagggggcgtttggcttgaagataatcactctcaaccagccaaacgttcaaaattccaactgattcaggaatccaatggaatcctcaatcaaagaatcaaggagtagagctgaagaatcaggaagtggagctctcccaaacttctgttaatttcgataaccggcattcagctctagaagatagctgttgcaagatacgccactggagggtgacaactctggcttactcctcgacgtcatcatgctctgcacctgaagtttgtggctacgatctgcatacaactccagcgaggcacaaccccgtcgagatggatcgatgccgtgctcactgggacgacaccaccacaagaatattcctggacctctgcatcgccgagaaggaaaagcagaactacaacagcaaggggttgaccaagatagggtggcacaatctgtaccgcaacttcaaggaagagacacgcaggtcttatgataccaagcagctgcagaacaagttcaacggcctgaagaggatgtacagcctgtggagactgcagaacgacaaggctggacctggaggaggaggcgggtgggacaagagttcgagcactgttacacaggatgctgacggatgggacaaccagatcacggagaccagtgcagcagaagacttccgtggcaaggcgctcgcgcacgaggacgcgctcgccgttcttttcggccccaaagacggcacaaattcgccgtccgtaggtggtggcgccggtgacagaacaccaggcgggggcggaggaggcgaggaagagaaccatgctcgagcgtcaggggacaatgccgcttgtccggaggagagcctggggtgttacaggtctggccgtgcgtccccatggtcaagccaggaccaccacatccacatggtcggcagccgcccagccaagaagcctaagaacacggggtactatgccgaaggcgtgtccgagagcatgctcggaagcaggaacgagagcagcagtgccatcaggcgtgagcaagaagaggtggtagagttgctgcagctcgtagaaaaggacggcgtgtctcagggatctgagctgttcttcatagctactgagctgtttaggtcgccgatccgacgcgcggcatttaggtgcatcaccactccgaagaaccgagttgcatggctccggtggacttgggacaatgttaagatgtga

SEQ ID NO: 136671 - DNA, 933 bp, Zea Mays
aaacagctgcccagaacagtgcagcccatcggctgcacccggactttcccttctcgttccagcggcctcgagtctggagaggactcgcctgttctagggttcggtgcccagtcgctgctcgcgtctccgccctccggccaggtcactggcgctaggaggcgctaaatcgagttggcgacgcctccctcacccgtccccgatcgacgtcgggaggcattcctggcggcgtcagcgtcggcgtcggcgtccccgcacgcgcgcactactgactcatctgtgcagatcgagccgtcagtgagcatgacagatcttcctttataagaagagttgacaatgtgtgagcatgactgcatgagaccttttactgcgtcatatattttcattgtaatttatatacgcgtcacacttatttttcaacttgacatattaggacatgcctccatatcagttcatgttaacatagaaacgtcctccatattatgagtcaatgatccactctgttttttatgcaacttcaaaaagcaatggacattcctagggggcgtttggcttgaagataatcactctcaaccagccaaacgttcaaaattccaactgattcaggaatccaatggaatcctcaatcaaagaatcaaggagtagagctgaagaatcaggaagtggagctctcccaaacttctgttaatttcgataaccggcattcagctctagaagatagctgttgcaagatacgccactggagggtgacaactctggcttactcctcgacgtcatcatgctctgcacctgaagtttgtggctacgatctgcatacaactccagcgaggcacaaccccgtcgagatggatcgatgccgtgctcactgggacgacaccaccacaagaatattcctggacctctgcatcgccgagaaggaaaagcagaactacaaca

SEQ ID NO: 136672 - DNA, 882 bp, Zea Mays
aaacagctgcccagaacagtgcagcccatcggctgcacccggactttcccttctcgttccagcggcctcgagtctggagaggactcgcctgttctagggttcggtgcccagtcgctgctcgcgtctccgccctccggccaggtcactggcgctaggaggcgctaaatcgagttggcgacgcctccctcacccgtccccgatcgacgtcgggaggcattcctggcggcgtcagcgtcggcgtcggcgtccccgcacgcgcgcactactgactcatctgtgcagatcgagccgtcagtgagcatgacagatcttcctttataagaagagttgacaatgtgtgagcatgactgcatgagaccttttactgcgtcatatattttcattgtaatttatatacgcgtcacacttatttttcaacttgacatattaggacatgcctccatatcagttcatgttaacatagaaacgtcctccatattatgagtcaatgatccactctgttttttatgcaacttcaaaaagcaatggacattcctagggggcgtttggcttgaagataatcactctcaaccagccaaacgttcaaaattccaactgattcaggtgggggcaggagagaatcatttcttcatttacactaggagctaaaaaaacattcttcaccctgctgcctattatattgtggtggggatcagcagagaaattatcatcagcttaccaccttgttccctcctaggaatccaatggaatcctcaatcaaagaatcaaggagtagagctgaagaatcaggaagtggagctctcccaaacttctgttaatttcgataaccggcattcagctctagaagatagctgttgcaagatacgccactggagggtgaca

SEQ ID NO: 136673 - DNA, 2377 bp, Zea Mays
atggcctgcctcaagctgggatccagggctgatgtcttccggaagcaagggcaggagtggtacgcactttcccctaccatgcaccacgaaactcggtctgttggtggaggccagtactgcacatctggtcttcccagtgatatatctgtggtagttggggaacagtctttccatcttcacaagtttcctctactatcgaaaagtggcctgttggagaagcgaatcagagagaaaatcgataacagggacgatagctgtgcaattgatctatctgatattcctggtggggcgaaggcttttgaactggctgccaaattttgctatggtgtaaagtttgaaatgactgcctccaacgttgtacaccttcgttgtgctgctgattaccttgagatgacggaagagatatccgaggggaatttgatcgcagagacagagagcttccttacccaaacagtcctcaagagctggaaggattcagtcaaggcgcttcaaacttgcgacaacgtccttgatgttgctgaaagattgcagattgtaaagaggtgtgtagactctattgcgactagatcatgcagtgaccctgatttatttggctggccagtagcccattatggaggccccatgcagagtcctggagggagtctcttgtggaatggtattagcacgggagcaaggcccagaaatagcagcccggattggtggtatgatgatgtctcatgtttaagcctcccgttatacaaaaagctcatctcagccatggagtatcggggcatcagtcagggggttattgttggatcccttaaccattatgcaaaaaggcgtttgcctggtttgaatcggcgtaaaagcatcggtgatgctagcaactgtctttctatgactagtttaacatccatcccttctgaagatgaccagaagtatcttctcgaggagatcgatagactactccctttccaaaggggtgttacatcatgcaagctgctgtttggcctcctgcgcacggcaatcttcctgaaagccagcccctcctgtgtgtcgaacttggagagacggataggtatgcagcttgacaaggccagcttggaagaccttttgataccgaatgtctctgattctgtggaaaccctgtatgatgtggagtgtgtgcagaggattgtagaccatttcttgtcaatggaccaagaaactggtggggcctcccctggcattggtgaagatgggcaaatgttagcatcaccatccttaatgccaataactatggttgctaagttgattgatggctatctggctgaagttgcaccagacatgaacttgaagttgccaaagtttcggtctttggctgctgctataccggattatgctcgtccaatagatgatgggctttatcgtgctattgacatatatctcaaggcgcacccatatctgccagaatcggacaaggaagagctctgccgggtgatggactgccagaagctgtccctggaggcctgcacacacgcggcgcagaacgagcgcctcccgctccgtgtcatcctgcaggtcctcttcttcgagcagctccagctgcggagctccatcgcggaatgcctcatgatctcagagcccctagacggcggcggcggcttctcgcggcagctcggcggcctgcctgtctcgggcgagcacctccgcggcgctggctggcccctggccgccagggagaaccagacgctgcgggaaggtatggacagcatgaagcagcgcgtgtcggagctggagaaggagtgctttgccatgaaggaggacatcgagcggctcggccgcagcaggagcgcgggcaagagcaggttcccgttcgcgctcgccgcaaagccccacgtctgcggcaccaaggacaaggaggctgctccggaatcgtcaaagtcggagacgtcaaagtcgaaggcagcggcggcgaccaggagcgatgacaagttggctgtggtcaagggcggtgccgctgccgccggtgatggcgggccgcagctgaagcacaggaagcacaagacgagcctgtctgcctgttagtttttagatatctacaagcacacagtataggccctgaatgaacaacgactgtgagtgagagacgctatcgatgtgatgctcatttttttttcttggacatttgctcagtgaaaaatgcatagcgttaccagcgtgtcttggacttccagctgtaccatgcttccccgttgtggttgtacatgtccatgaatcggaaaagaatttactagtagaatcctaccgagttcctgtgaattactggggttccaaaccgtctctcaaactcaaacctcaaacttgaaagggatccgcattgattttgataaatgtattgtcacttgttcttctcaaa

SEQ ID NO: 136674 - DNA, 2871 bp, Zea Mays
gcgagcgagcgcaggcgccgtcggttgatttcccgcgtaaagcttggatcttggcgcgtggactgccgtaggtgccggcggcggcgaggccgcgagggtctggaagtttgggcggatttctctgtcccgagttcaggtacgcgattccccctctttccctctctcgttctcgttccccttctcattatttccaaacaaataaaagctcccggtttccggcacgcgaatccctcaagtcctgacctatcccctctcccggatcaggagcgcttctccgcagatgtgcaacttcgtctggctcttccgcgtgctctggcggatcctcagcgtcgccttctgagccccagcctcccagcccccgcgcgccgtccgctccgcctcgcccgccggcgactcccggactggactggactggactgactgagcctctctccgcgcggggaaaagttttcccgtcggtggggtttcctgtcgagttcgttcggtccaagcgcgtcgcgtgcggttcggcggaaagctgggacgctgctggtgctcgctgggtgctgcctttggtctcattggcgctgcagtgtggcggtgtccgccgtcctgccggctggccgtcttggaggctggaaccagctagcagcagctccgtccgggacgatggcctgcctcaagctgggatccagggctgatgtcttccggaagcaagggcaggagtggtactgcacatctggtcttcccagtgatatatctgtggtagttggggaacagtctttccatcttcacaagtttcctctactatcgaaaagtggcctgttggagaagcgaatcagagagaaaatcgataacagggacgatagctgtgcaattgatctatctgatattcctggtggggcgaaggcttttgaactggctgccaaattttgctatggtgtaaagtttgaaatgactgcctccaacgttgtacaccttcgttgtgctgctgattaccttgagatgacggaagagatatccgaggggaatttgatcgcagagacagagagcttccttacccaaacagtcctcaagagctggaaggattcagtcaaggcgcttcaaacttgcgacaacgtccttgatgttgctgaaagattgcagattgtaaagaggtgtgtagactctattgcgactagatcatgcagtgaccctgatttatttggctggccagtagcccattatggaggccccatgcagagtcctggagggagtctcttgtggaatggtattagcacgggagcaaggcccagaaatagcagcccggattggtggtatgatgatgtctcatgtttaagcctcccgttatacaaaaagctcatctcagccatggagtatcggggcatcagtcagggggttattgttggatcccttaaccattatgcaaaaaggcgtttgcctggtttgaatcggcgtaaaagcatcggtgatgctagcaactgtctttctatgactagtttaacatccatcccttctgaagatgaccagaagtatcttctcgaggagatcgatagactactccctttccaaaggggtgttacatcatgcaagctgctgtttggcctcctgcgcacggcaatcttcctgaaagccagcccctcctgtgtgtcgaacttggagagacggataggtatgcagcttgacaaggccagcttggaagaccttttgataccgaatgtctctgattctgtggaaaccctgtatgatgtggagtgtgtgcagaggattgtagaccatttcttgtcaatggaccaagaaactggtggggcctcccctggcattggtgaagatgggcaaatgttagcatcaccatccttaatgccaataactatggttgctaagttgattgatggctatctggctgaagttgcaccagacatgaacttgaagttgccaaagtttcggtctttggctgctgctataccggattatgctcgtccaatagatgatgggctttatcgtgctattgacatatatctcaaggcgcacccatatctgccagaatcggacaaggaagagctctgccgggtgatggactgccagaagctgtccctggaggcctgcacacacgcggcgcagaacgagcgcctcccgctccgtgtcatcctgcaggtcctcttcttcgagcagctccagctgcggagctccatcgcggaatgcctcatgatctcagagcccctagacggcggcggcggcttctcgcggcagctcggcggcctgcctgtctcgggcgagcacctccgcggcgctggctggcccctggccgccagggagaaccagacgctgcgggaaggtatggacagcatgaagcagcgcgtgtcggagctggagaaggagtgctttgccatgaaggaggacatcgagcggctcggccgcagcaggagcgcgggcaagagcaggttcccgttcgcgctcgccgcaaagccccacgtctgcggcaccaaggacaaggaggctgctccggaatcgtcaaagtcggagacgtcaaagtcgaaggcagcggcggcgaccaggagcgatgacaagttggctgtggtcaagggcggtgccgctgccgccggtgatggcgggccgcagctgaagcacaggaagcacaagacgagcctgtctgcctgttagtttttagatatctacaagcacacagtataggccctgaatgaacaacgactgtgagtgagagacgctatcgatgtgatgctcatttttttttcttggacatttgctcagtgaaaaatgcatagcgttaccagcgtgtcttggacttccagctgtaccatgcttccccgttgtggttgtacatgtccatgaatcggaaaagaatttactagtagaatcctaccgagttcctgt

SEQ ID NO: 136675 - DNA, 3038 bp, Zea Mays
ccagctccagccctcccaccgctccagccagtcccaccagctgctccttccctgcctgcttcccctgtttctttggctccttccccgctgccctccgcgccgcacgcccgcacgccacgccatagaacagaatgttcttggatgctctcgcgcccgcaacattcccttcctagtacggcccgccccttcgatccataaacaaaaggcaaggaaggctgcgccgccgtctgcctctctcctctcttcgtccacggcccacggggttcttgcctctccctagtcccttcttcatcaccctgaccagtgggtttagcgagcgagcgcaggcgccgtcggttgatttcccgcgtaaagcttggatcttggcgcgtggactgccgtaggtgccggcggcggcgaggccgcgagggtctggaagtttgggcggatttctctgtcccgagttcaggagcgcttctccgcagatgtgcaacttcgtctggctcttccgcgtgctctggcggatcctcagcgtcgccttctgagccccagcctcccagcccccgcgcgccgtccgctccgcctcgcccgccggcgactcccggactggactggactggactgactgagcctctctccgcgcggggaaaagttttcccgtcggtggggtttcctgtcgagttcgttcggtccaagcgcgtcgcgtgcggttcggcggaaagctgggacgctgctggtgctcgctgggtgctgcctttggtctcattggcgctgcagtgtggcggtgtccgccgtcctgccggctggccgtcttggaggctggaaccagctagcagcagctccgtccgggacgatggcctgcctcaagctgggatccagggctgatgtcttccggaagcaagggcaggagtggtactgcacatctggtcttcccagtgatatatctgtggtagttggggaacagtctttccatcttcacaagtttcctctactatcgaaaagtggcctgttggagaagcgaatcagagagaaaatcgataacagggacgatagctgtgcaattgatctatctgatattcctggtggggcgaaggcttttgaactggctgccaaattttgctatggtgtaaagtttgaaatgactgcctccaacgttgtacaccttcgttgtgctgctgattaccttgagatgacggaagagatatccgaggggaatttgatcgcagagacagagagcttccttacccaaacagtcctcaagagctggaaggattcagtcaaggcgcttcaaacttgcgacaacgtccttgatgttgctgaaagattgcagattgtaaagaggtgtgtagactctattgcgactagatcatgcagtgaccctgatttatttggctggccagtagcccattatggaggccccatgcagagtcctggagggagtctcttgtggaatggtattagcacgggagcaaggcccagaaatagcagcccggattggtggtatgatgatgtctcatgtttaagcctcccgttatacaaaaagctcatctcagccatggagtatcggggcatcagtcagggggttattgttggatcccttaaccattatgcaaaaaggcgtttgcctggtttgaatcggcgtaaaagcatcggtgatgctagcaactgtctttctatgactagtttaacatccatcccttctgaagatgaccagaagtatcttctcgaggagatcgatagactactccctttccaaaggggtgttacatcatgcaagctgctgtttggcctcctgcgcacggcaatcttcctgaaagccagcccctcctgtgtgtcgaacttggagagacggataggtatgcagcttgacaaggccagcttggaagaccttttgataccgaatgtctctgattctgtggaaaccctgtatgatgtggagtgtgtgcagaggattgtagaccatttcttgtcaatggaccaagaaactggtggggcctcccctggcattggtgaagatgggcaaatgttagcatcaccatccttaatgccaataactatggttgctaagttgattgatggctatctggctgaagttgcaccagacatgaacttgaagttgccaaagtttcggtctttggctgctgctataccggattatgctcgtccaatagatgatgggctttatcgtgctattgacatatatctcaaggcgcacccatatctgccagaatcggacaaggaagagctctgccgggtgatggactgccagaagctgtccctggaggcctgcacacacgcggcgcagaacgagcgcctcccgctccgtgtcatcctgcaggtcctcttcttcgagcagctccagctgcggagctccatcgcggaatgcctcatgatctcagagcccctagacggcggcggcggcttctcgcggcagctcggcggcctgcctgtctcgggcgagcacctccgcggcgctggctggcccctggccgccagggagaaccagacgctgcgggaaggtatggacagcatgaagcagcgcgtgtcggagctggagaaggagtgctttgccatgaaggaggacatcgagcggctcggccgcagcaggagcgcgggcaagagcaggttcccgttcgcgctcgccgcaaagccccacgtctgcggcaccaaggacaaggaggctgctccggaatcgtcaaagtcggagacgtcaaagtcgaaggcagcggcggcgaccaggagcgatgacaagttggctgtggtcaagggcggtgccgctgccgccggtgatggcgggccgcagctgaagcacaggaagcacaagacgagcctgtctgcctgttagtttttagatatctacaagcacacagtataggccctgaatgaacaacgactgtgagtgagagacgctatcgatgtgatgctcatttttttttcttggacatttgctcagtgaaaaatgcatagcgttaccagcgtgtcttggacttccagctgtaccatgcttccccgttgtggttgtacatgtccatgaatcggaaaagaatttactagtagaa

SEQ ID NO: 136676 - DNA, 353 bp, Zea Mays
tctcgctgattcgagatttagcccctccccgtttcggtggtgttgttccgtgactgattcggggttcgcagatcttggaggtattgtcggatggctcggacggcaagtgtttgtgaccttggtaactccgttttcattaaccacacaccctctagcaaggagtacaacctgaaaccaattggtgatgctggtccctgtaactgaggcgggagggatctttgcctatgcccggaagacatgaatgattgcgttgaaagctgctgcgtgagggaaaggtaaaataattgtatttcatgttaagttcctatgcatatcaagctataaaattgagccttgtcgatacatattgttgt

SEQ ID NO: 136677 - DNA, 212 bp, Zea Mays
ggaagggtaggcagcagatgtcgcactccaacgcgtccttctacatggatagtgtcacagtcgcctcttcctcatcctccaaccccgactcttcctcatcctccatagagagagagatagaggagagagaggagagagagagagagggtttcacattttagccacatttttggatatagggtttcaccatgtgttttatgttacttttttac

SEQ ID NO: 136678 - DNA, 882 bp, Zea Mays
ctagccgccacaacatttctccctctcctccttccagccaaggcacgcatcctccctgccttcttcctccctggcttccacggcagcaagcagcaagcagggagccgagctccaagctcccatgccgtcgagctcgggttcttctcccatggcgtccttccctcctccccttcttcctccagcaagcagcgcccttcctccctcccttgctgtccatggcgagcagcaaacatccaccatggcgctcgacgcctctccccttcaagcgtggctgcagcagggagctgtcttctccagcgcgcaggaacggcagggccgcccagctctccttccccatccccatggcgcgacgcatctgctccctgtcctccactccatgggcgcgagctccactttccatggatggcgcccagaaaattttccagctcctcccacggtgcccttcttccccacgagccaggagcagccgctcccattttccttgcagcgccctgttctttttcgtccagccggctcccctttttcacatggccgaacacagctccctgtccatggatgcagcagcagctcgccctggcccgacgcctctgctcggccagcagccttcgcgcccctattcccctgctcgttctcccttacgcagcagcagccgtaccttccctgcagcgcccctctccatttttcccctctgctccctgtgcggcgagctcatgtgctcacagcacctctccctgccttctctctgtccccagcgaccagcagcaaggacaacccccttccctcgctcctttcggatgtgcgcgaggtgttcgacacaatgcctgcgaggaaggtatgttgtcacagcaccatcgacgctcgtcgggtatttgttgtttttgc

SEQ ID NO: 136679 - DNA, 1159 bp, Zea Mays
ttttgcactcccacccctcaaaaatttgcagccgccacagcctccttgccttcttctccctcgtgcagcagtcctcccacgcacagcagccagcacagggagctcagctccacctctccccatggctgcgagctcccttctccagctgcgcgacgccctccctgctcctccttgtggcgagcggctgcagcagggactcccatggccggacctctgctcctctcttcacggcgccccttcttcctcctgcttcacggcagcaagcaccttccatggacgcgagctcccaaccatggcgccccaatcccttcttccccctacttggagcttcccatggcgcccccttctctccccttggtcgtggcttcctctgctccttgctccacgacgcctagatttttcagcagagagctttttccccatggcgccaccccctgcttgcattcctccctggcgcccagaaaaattgcagatcagcgcccctgctcctcttctatctactgtgcagcagcgctcacctcccgtggaaaaccagccggcttcctgcctccagcaagccgcttttgttccctgcacgcgagctcgctgcggggtgccctagccgctgctcgccccgaccacatctccatggccaagcagcccccttgcagcgagcttctccttttccctcgctgcgcagctcctcggcgaaacgccactgttcctgcagccacgacgtccaagttcctgcgcccagccctccgatccaaaaaacagcagccctgcgcaaagccccttcccttgctcctttccgatgtgcgcagggtgctcgacgaactgtgcagcagcctcgacggctccgcgcgctgccggcttgctgttttgttgcgcagtgagcagcacgccgtgatgcccgtcggtggtttgctatttttttgcgcagccccgtcgtcgtcgttgttcaccccggtgagaccatgacaatccttgtttgtttcacatcggcatttttttccggtgattaattgtgtatatgtgttgttttcttttgtttatggaggagaggaaccccgtgttttgcgtggagaaggcaagccgctcgatgctcgtcgatgttcgtagcgatgcacaaatcggaatcaccgtcgttcttgcaaacgccgtttgggtttgtttatgg

SEQ ID NO: 136680 - DNA, 339 bp, Zea Mays
atggaggagactggacagagcgccgacaaaggagagaggtggggcgagggtggccggacagagagagcaggcgcgcgcgttaaggctggagcaggagcacgccggctagctcgcgcagccgacgagcaaagcaggagggagctccggccggactcgacagaggaagctgggggttgcgatttccatggccgagcagagaaccggcaagggcgcagcgggaagggactcgacgagctgaaggccgagctgggtagggaagcaagcaagcgcgcgggagatgagcagggacggagagaggagcagagagtgtcatcggctggggtggatgccgagtactga

SEQ ID NO: 136681 - DNA, 99 bp, Zea Mays
caaaaaatgatttggttcagttattcgttgccttgttgatatcaggatcttacagtaatgttgtcccatggactgctatgttaacgggtgtctagcagc

SEQ ID NO: 136682 - DNA, 917 bp, Zea Mays
agtcagaacgcatggtgttttcaagctcatatatactccgatccgtcactgaccgtacgtacgtacgtgggcagcagtagcagacaaacgcgcgcatgcaagcgagggctcagcagcgatctggaagctcgcgcgcatagctcagcagcgtcgttggaacatggccgccgatcggcgaggagagtccacattgtccggctcccatcccaggtgcactcccctgaccgaccgagcgcgagctatatataagatcgatccacaccagcaccacccatagcacacttgagcacacaatcactggcaccgattgtgtggcacaacatctcgtcgatttccacgtcgagagtagctagcgaagccgccatatggccgcgatgatcaccggcggcgcgcggcgggcggctgtgctcgcggcggccgccctcctgtgcgccgccgcggccgcgccggccgtggcgcagcaggcgtccaacgtgcgcgcgacgtaccacctgtacaacccggcgcagaacggctgggacctgaaccgcgtcggcgcctactgcgccacctgggacgccggcaagccgccgtcgtggcggcagcagtacggctggaccgccttctgcgggccctcggggcccaagggccaggccgcctgtggccgctgcatccgggtgacgaaccgcgggacgggcgcgtcgacgacggcgagggtcgtggaccagtgcagcaacggcggcctcgacctcgacttcgagacggtgttcaagaagatcgacaccgacggccgcggataccagatgggccacctcgacgtcgactaccagttcgtcggctgctgaggtccagcgccgtgtgaccatggtgatgaacactatatatataaatgcacgcaaccggatggcaggagtatctaatccatatcacagtatcag

SEQ ID NO: 136683 - DNA, 606 bp, Zea Mays
atgtcactcgcgcaaagggccgggagggggagagagcgggtgccccctccattttcggagctggttgattctgcgggagagttgttccacactccttcttcgatttctacttccaggaacaccgccctgctgtcttaatcgaccaacaccctacgggggtcctaaataaacccgcaatttgtcaccgcgacccggcttccggttcagcccggatcgcctgttctgcttaacgacaatggcccacttggagctcccgattccgtggcacggctcaccgaatcagccgcgccgtcctacctatttaaagtttgagaataggtcgagggcgtgcgcccccgaagcctctaaacattggctttacccgatagaactcgagtgggctccagctatcctgagggaaacttcggagggaacccagctactagatggttcgattagtctttcgcccctatacccaagtcagacgaacgatttgcacgtcagtatcgcttcgagcctccaccagagtttcctctggcttcgccccgctcaggcatagttcaccatctttcgggtcccgacaggcgtgctccaactcgaacccttcacagaagatcagggtcggcc

SEQ ID NO: 136684 - DNA, 708 bp, Zea Mays
gtggtcatcggcccttttatcaacgctagtgcagtcttactgggtggcgttctcggcgcactgctcagccaacgcttaccggaacgtatccgcgtctccatgacatcaatttttggtctggcatcgctggggattggtattttactggtggtgaaatgtgccaaccttccagcgatggttttagctacgctacttggcgctctaattggcgaaatttgtttgctggagaaaggtgtcaatacagcagtcgccaaagcacaaaatctgtttcgtcactcacgtaagaagccagcgcatgaatcttttattcagaattatgtcgcgattattgtcctgttttgcgccagcggcaccgggatcttcggggcgatgaacgaagggatgaccggcgatccgagtattttaatcgccaagtcatttcttgatttctttacggcgatgatcttcgcctgctcgctgggtattgcggtatcggtgattagtatcccattactgatcatccagttaacgctggcgtgggctgccgcgctgattttaccgctgaccacaccgtcgatgatggcagacttcagcgccgtaggcggtttattgctgctggcaaccggattacgcatctgtggcattaaaatgttcccggtggtcaacatgcttccagcactccttctggcaatgccgctttcctcctcctggaccgcctggtttgcctga

SEQ ID NO: 136685 - DNA, 303 bp, Zea Mays
atggaggcagcctgcttcgccgggcgcgccggcaggcgcgtgcccgcgccactcccagtggcgtggccgtggctcgagggggaggttctggccgacttcttgcgcttcgtcgaggaggccgcctggtgcgggccgcgcggcatcgtcggtcgcgatggcgtcgtggtggacggcgaccgggaaagcgtcggcaagcctggcgctgctgctcgtgaagccgctgcaccggaagcggagctgctgcgagaagcagggcggcggagttctagagcgcgtaaagcccaatgcgagtttcgtcggtga

SEQ ID NO: 136686 - DNA, 483 bp, Zea Mays
atgactgcagcagcgacgacttcatctccgcagctcgcccgaaacgcgcggcggagcagcacggcgtgtggccggcgcgtagcggagcagcacggagcggcagcccggcgctccggccagcgcgcggcggagcagcacggcacggcggcccggccagccagaggcagagctggccggcgcgcgacggcgcccggcggcgaccgccccagcgcggcggaacgggcctgcgcgggcgcgcccggagaacgccggcgggggacggcgcttccgcaaggcggcgcctggagaggccggcaggggaagagccggtgggggtggcgccaggcgaagcagcgcccgaagaaggccggcgggggtgggggtctccggggccggcgcgcggcgaggcagatctggggccggcggccggcggagctgcacggcggccccgggatcaccggatccggcgacccaaggcggccacgagctcagcgccggctatag

SEQ ID NO: 136687 - DNA, 1557 bp, Zea Mays
atggaggcggccctggaggcggcgcgcgccaaggacaccaaggagcgtctggccagggtcgagcggctgcacgaggcgctcaacgccgcggcgtgccgcgggctgaccgcggctgagggtggcctccaggcgctctccgtcgccgccatcgtcggcggcaaccacttcaagatccacctcaacgccctcgtcccggctgccgtcgaacgcctcggcgacggcaagcagcccgttcacgacgccgcacgacagctcctcattactctgatggagataacttacataaggatagtggtcagccataatattttggaatatcatcttccttttagaaacaggcctgaagataataagtatactgaagaggaacttcttctgttgaaaaataaagatatgggatatatccttcagagcattcaaagtgaaaaaaagaaaatcgaaaagctaggctcaacacttcatgaacttgataacaagcctcaaaacaagcatgtttattttgctgaagacggcggctacgagttcggctactcgaccgcgatgggcgggtctggcgctgtctccggcctcgagatgctcggcatcagcctgttcttgaagtccggtaccaccggtggcgacgagaagcctagcggcggaatttttgccggaattttggttaccctgattgcttttctctccaccgaagttttccgccacaaggcgagcaagaaaagacaaggctactttgagcagcacggaggccggacgttgttgcgaattctcgaaacagatgacaacaacatcaccttcaccttatacgacagaggagatctagcgaaggccacacgtggcttccacaaggccaacatcgtcggggaaggagcacatggcaccgtctacaaggccaacctcggcagctctgctgccgaaaatgcatccaccaccgtcgccgtgaagcgatgcaagcagatcgacaggagcaggacggatgggttcgtgcaggagctggtcgtgctctgccgcgtcagccacccaaacgtcgtcaggctcctcggctgctgcttccattttgaggcgcccatgctcgtgtacgagttcgtgcccaacgggaccctgagcgacctgctccacggaaagcctcggcgccgggtgacgctgccgacccgcctgaagaggccctggcgcacctgcactcgccaccgcacccgacgctccacggcgacgtcaagccgcagaacattctgctcggcgaaggatacgtcgccaagcacgggaaatggcacccttggtgatcttctagacgctgacatagtcgaggaggggagcatgggactgatctatgcggctgcgaagctggtgagccgatgcatcgctgttccgggtaatgcaaggccggccatgggacaggtcgctggggagcttcggcgactttcagatcaaatgccggaaagccctgaggtgcgagtggctctcgaggttgaggatggaaggtatagctacgccgccagcactgagggcgaaactacgagattttctaatcttaccaaaccgagcacagcagaactcgcccgatga

SEQ ID NO: 136688 - DNA, 1144 bp, Zea Mays
agctcaagaagactactagctagtgtcagtcatgatgacatcccactcatcagtattagtagcaggactagtgtgtctcagtgcggcggtggtcgtgccaatgccatggctagccgccggggagagtagtattggtggtgcggagtgcaaaagatcatgcggcggcgtggagatcctcagcatctctccggagcaaggtgaagccaaggtgctcctccctatctcttcttactgctacgactctgcgtctcggacgatggtggccgacgagtggcactggtccttgggcgccaattaccgtttctccagcacggccaacaagttcacggtggtagggtgccgggcgctggcgtacatcggtgacaccaggaagaagaggaacaacgttgctgagaataactacctgaccgggtgcgtgtccacgtgcttcaaccgcacgatctccctaaacacttgctccgggatgggatgctgccagacggtcatccccaacggtccgccgtatttccatgtgtggttcgacgccggcttcatggacatctctgggatcgacggcggcgcggacttatttggtcgctgcagtttcgcggtgctcatggactcgtccaacttcacgtcgtggacctctagctccagcaacatctcgtcgccggagttcgtcaacaatgttagctcgctgttgcagttcttcaacagctcccgtggtggaaaggcgccggtggtccttgactggtccatcggggaggacgactgcaagaaccctgcaggatacgcgtgccgcagcgtcaacagcttctgctcaagcgcagccagcggacggggctacatctgtaagtgcaaccaaggtttcgacggcaacccttaccttcctaacggctgccaaggattgtcgtgatttctgttaaaggaaaatagacggtggtgatctcatccagagataagaagtctccagaagatccagagagaacaagaagactctagaagattagcagttactcattcccttaatcctaattagcaataatgtaaacgcataaagtaaacgtgctttttctcccgaacaggcgtgcgggcgtgaagccgtccgttcattgtgtatatattgtttacgttaatggaatacagacatcggagattcattctc

SEQ ID NO: 136689 - DNA, 1282 bp, Zea Mays
acgctatctgtggcggcaacagtaccccctccaagcgttcaccggtgcacgctccctcctcctcaaccgcgcgtgtagcttctctctcacactacatggagagtgagtgccgggagacgctaccattggcaggcgccgctctccctctctccactcccgcgcgtgaagactccagaggtgccgagttgctcggtgcgactccttcgtcgccgtccacggaagcggaggccggcgaccaacctccccgcgcggcgaagggtacaggcggccggatccgttgggcctcacgcgaggagagccacgcgaacggattcgacgaccgaggagtccggatcgaagctcccactggccgacttcatcgccgccgccgccgttcaaccctgtccgccggcgattcaacgaggctccttccccggctgggtgtccgccgatccagaactcgagctcccgtccatcgatctgcttcttccgatctgcacatctaccgacttcaatggctaccacactgtttacaaccgaaaataagagagggttccccttcatgcattgttggactaaactcaagaacgaacccaaatggcaagctattgttcaaggcacttcactacgaggggcagcagggatgtcaccggttggcagtgccacaccaactgcaagtgtaaacgatttggatagcgattctctaggtttaactgggaaaaggccattaggccgagactccacaaaggcatcaaggaagaaggccatgtccacgtcgtcccagtccatgaagtatttgaccagaattcatgacctgcaaatggcccggttgaaacaaagtgaagacaaagtggagaagaaagaagcacattatgaggttttcaaggatctcgaatataagaagctgcaagttcaacaagaacaaattgaagtggagaaaacaaaactgaagtttcaagaacgcaaagagaagaacgatgagttgaaggaagcaatggctgtggatttggaggacatagccgaagatttgaggcctgctttcatagcaaagaggaaagcacttgtggactggtttgtcaacaatccaaactgagttgttcgtttagtgaaaattgtggaccacggttttcactagttgagtttctgttttagtaatgcgtgctgtaataatcacattttttgaagtgtgactttggactgcgttagtgtcttcatttcagttgaagaactcaagattatgttatgtttgtaaacttattctcgtcacttatggttatgaattgtcagtttgaacttgtccact

SEQ ID NO: 136690 - DNA, 1982 bp, Zea Mays
cacgctatctgtggcggcaacagtaccccctccaagcgttcaccggtgcacgctccctcctcctcaaccgcgcgtgtagcttctctctcacactacatggagagtgagtgccgggagacgctaccattggcaggcgccgctctccctctctccactcccgcgcgtgaagactccagaggtgccgagttgctcggtgcgactccttcgtcgccgtccacggaagcggaggccggcgaccaacctccccgcgcggcgaagggtacaggcggccggatccgttgggcctcacgcgaggagagccacgcgaacggattcgacgaccgaggagtccggatcgaagctcccactggccgacttcatcgccgccgccgccgttcaaccctgtccgccggcgattcaacgaggctccttccccggctgggtgtccgccgatccagaactcgagctcccgtccatcgatctgcttcttccgatctgcacatctaccgaatggctgagaacaatgataacatgcagtttccccctcatggtcctccacacacatcagctcctcaaggaatgcccccctatgtggaatccacagtactggcagcctaatccctacgactttcctagtggatctaatatccaatttagcagcagccaccttacaattcccagtttatcacaacaacaaaatgaagtaggaggttttgcaaataggggcccatggaatcatttcgttggtatgatgaatcctagttatccttgcccacctcccccgcttgctgctggccaaatgcaaccacctagccattttgtcacactgcctaacaactcttcgaaccctatggacccaatatttttggagtccgaggcagagcacagcgcacaggaggttaacagccccagcaaagaaggtggtacacctggtaaagggaagaaaatgaaagaacaaaactttacgccagaagaggatttgttgctatgcacaacttggctagaaattagttgtgatccagtaattagcactggccagaggaaggaaggactttgggcaagaattgataaacggtataacgaaatgagaggtgagtatcctaagagagttatcagggctttaacaagtcgatgggacaaaattaaggctgattgtgggaagtatgcttcgttgtatgcaagagtcctcagggaaaatcaaagtggtttaactgattatgataagacttcaatggctaccacactgtttacaaccgaaaataagagagggttccccttcatgcattgttggactaaactcaagaacgaacccaaatggcaagctattgttcaaggcacttcactacgaggggcagcagggatgtcaccggttggcagtgccacaccaactgcaagtgtaaacgatttggatagcgattctctaggtttaactgggaaaaggccattaggccgagactccacaaaggcatcaaggaagaaggccatgtccacgtcgtcccagtccatgaagtatttgaccagaattcatgacctgcaaatggcccggttgaaacaaagtgaagacaaagtggagaagaaagaagcacattatgaggttttcaaggatctcgaatataagaagctgcaagttcaacaagaacaaattgaagtggagaaaacaaaactgaagtttcaagaacgcaaagagaagaacgatgagttgaaggaagcaatggctgtggatttggaggacatagccgaagatttgaggcctgctttcatagcaaagaggaaagcacttgtggactggtttgtcaacaatccaaactgagttgttcgtttagtgaaaattgtggaccacggttttcactagttgagtttctgttttagtaatgcgtgctgtaataatcacattttttgaagtgtgactttggactgcgttagtgtcttcatttcagttgaagaactcaagattatgttatgtttgtaaacttattctcgtcacttatggttatgaattgtca

SEQ ID NO: 136691 - DNA, 1098 bp, Zea Mays
gtaccccctccaagcgttcaccggtgcacgctccctcctcctcaaccgcgcgtgtagcttctctctcacactacatggagagtgagtgccgggagacgctaccattggcaggcgccgctctccctctctccactcccgcgcgtgaagactccagaggtgccgagttgctcggtgcgactccttcgtcgccgtccacggaagcggaggccggcgaccaacctccccgcgcggcgaagggtacaggcggccggatccgttgggcctcacgcgaggagagccacgcgaacggattcgacgaccgaggagtccggatcgaagctcccactggccgacttcatcgccgccgccgccgttcaaccctgtccgccggcgattcaacgaggctccttccccggctgggtgtccgccgatccagaactcgagctcccgtccatcgatctgcttcttccgatctgcacatctaccgtgtaattccgtatgttcatttgaacgcgtggactactaagcattgagacttcaatggctaccacactgtttacaaccgaaaataagagagggttccccttcatgcattgttggactaaactcaagaacgaacccaaatggcaagctattgttcaaggcacttcactacgaggggcagcagggatgtcaccggttggcagtgccacaccaactgcaagtgtaaacgatttggatagcgattctctaggtttaactgggaaaaggccattaggccgagactccacaaaggcatcaaggaagaaggccatgtccacgtcgtcccagtccatgaagtatttgaccagaattcatgacctgcaaatggcccggttgaaacaaagtgaagacaaagtggagaagaaagaagcacattatgaggttttcaaggatctcgaatataagaagctgcaagttcaacaagaacaaattgaagtggagaaaacaaaactgaagtttcaagaacgcaaagagaagaacgatgagttgaaggaagcaatggctgtggatttggaggacatagccgaagatttgaggcctgctttcatagcaaagaggaaagcacttgtggactggtttgtcaacaatccaaactga

SEQ ID NO: 136692 - DNA, 600 bp, Zea Mays
aagctccaaggccactttgtcaagggtctctgcaatgcacctactggtgcatgatttactggaggttgtgcgcatgaatgtgccacacattggtatgggggttggagttgaagcaggagacatgattgttattcctatcatgtgcacactgcctcctcgctgtcatttgtcgtcactctcgtagtcctgataccggagcatggttgccaggggagagcagtccaaggcaaatttgccatgttggagcagtcacaggagccaaggggctgcagtcacaggtcctgctagccaggatggagcaatcataggacctcctagcagtccaaggaaaatttgcgaggtggagtagttgcaacttttgaaacccacgtgataacatgctcaagcgttcgtatgataaaaaagatggcacataatcaaaagaagatctcatgttctgcgtttgtgaacctgtttgtattttttgaacttgttttgtgaacctctatttgtaaacctgtaaaatctgaggttgtgaatagatttgggtaacttcatacaagtggtggaggcctggtggtaatcctggatgcatataaagcgaggcatgcaatatccata

SEQ ID NO: 136693 - DNA, 1450 bp, Zea Mays
agaatttccgggtgtgggtggacagactggtcacatcgccgatcggtacaagcaactggttggtgaggtttgataactgggagatggaaggtggcgttcggtactgctgccgcactactcttctgctgaataacaaggttccaaaagaactagaagtacagattggttgaacttcaaacaaatacaaagagctatgcatacaagtggtggaggcctggtggatcaaggtcgttgtcgtctccaggtccatcaaatgcgacaaggtcgagcgcacgcaattcagctccgaagtcatctcctttcaacagaaagatgcaagtaacaccaagtcacttgcctttgatggttgatacatttcactgtatatcattgcacgacagatccatttagtacctttttctgagttaaactacttcaaacattgctgaagactacaaccagcctacagttgttgtaattgaagcgggtcaagacatagcatttgcaaagatttagttcattctcatcactctgcaatattcggttcatggcctgtcttattttttcccctacaagtcatctacgacagtttgccagtagcactaaatcttttaactgtggttctctactatgtgtaatctcatatcaagattaatgagtatcgtgatcgtataattttgaatcctatcaacccatatggcaaggcaaagaaaaatgacagtggacatcattctagattttacaaaatcaaaggagcaaccagacatggctgtcatgatctaagatacttcaacgtgattggatcgaacccaaacatatgactaggagaagctccaaggccactttgtcaagggtctctgcaatgcacctactggtgcatgatttactggaggttgtgcgcatgaatgtgccacacattggtatgggggttggagttgaagcaggtgattttcaccaacattggtttgcgaactggagttgaagcaggagacatgattgttattcctatcatgtgcacactgcctcctcgctgtcatttgtcgtcactctcgtagtcctgataccggagcatggttgccaggggagagcagtccaaggcaaatttgccatgttggagcagtcacaggagccaaggggctgcagtcacaggtcctgctagccaggatggagcaatcataggacctcctagcagtccaaggaaaatttgcgaggtggagtagttgcaacttttgaaacccacgtgataacatgctcaagcgttcgtatgataaaaaagatggcacataatcaaaagaagatctcatgttctgcgtttgtgaacctgtttgtattttttgaacttgttttgtgaacctctatttgtaaacctgtaaaatctgaggttgtgaatagatttgggtaacttcatacaagtggtggaggcctggtggtaatcctggatgcatataaagcgaggcatgcaatatccata

SEQ ID NO: 136694 - DNA, 981 bp, Zea Mays
agaatttccgggtgtgggtggacagactggtcacatcgccgatcggtacaagcaactggttggtgaggtttgataactgggagatggaaggtggcgttcggtactgctgccgcactactcttctgctgaataacaaggttccaaaagaactagaagtacagattggttgaacttcaaacaaatacaaagagctatgcatacaagtggtggaggcctggtggatcaaggtcgttgtcgtctccaggtccatcaaatgcgacaaggtcgagcgcacgcaattcagctccgaagtcatctcctttcaacagaaagatgcaagtaacaccaagtcacttgcctttgatggttgatacatttcactgtatatcattgcacgacagatccatttagtacctttttctgagttaaactacttcaaacattgctgaagactacaaccagcctacagttgttgtaattgaagcgggtcaagacatagcatttgcaaagatttagttcattctcatcactctgcaatattcgggtatctcacataaagtttttattgcagttctatttccttttctcatgctgtgcatctttcttatttttgttcaaacaatataatgataagttcatttacttattactgtgattgtttggagcagcacacatgttattataagtcaaattttaagtcaaattattctcgacacgtgattcggttcatggcctatagtaaaaaggatagtttacagtaataacatgtgtgctgctccaaacattatgaggatagtaagtcagttcatttttagtttagaattggctctctcttatttttggtcaaattctagaatgatcagatgctcgacaatacttattattgtgattgtttgctcattttcagttcatggcctgtcttattttttcccctacaagtcatctacgacagtttgccagtagcactaaatcttttaactgtggtaggctatgagtttcatg

SEQ ID NO: 136695 - DNA, 248 bp, Zea Mays
cattgagatagttgcagcgcgtgatatagtctttgctctatcacagttaggagtatgtgctgcttttagtagcggtacgttcgccgaggacaagacaaaaccggatgctggtttccctctttttgactcaccatgtcaacatggcaatttcaggacccaacgtctctgcgagagaccttgggttcccttatccgaaggcaggcaccgctaagcctacagacgtggtggtgaagttctacgtcctctac

SEQ ID NO: 136696 - DNA, 567 bp, Zea Mays
atgggccggacgaagaggagcttttgcagtgttaaccatgagagggattggcctggcactggttcattctacgggaacctcgacttcggtggagaatgtggtgtccctgtccaaactgtgttctacactccaactgaaaaccgtgcaaagttctggtacgcaacagattacgacatgtttagccttctgcattgctcacatggaagaggacttgagacccgggaccgagcagtacagattcatcgagcaatgccacattggcctcatgaagtttcacaatcacagtggtttttacaaggatttcagttcatgggttgggcagaggctttaccttttgcgtcagacagtgctctcctatgcacagaactatcaaaagcaagcaaagatgctctagagtacctgaggaaggctactttgtgctctataaggattgccaggaaagtgccagatttggcagagaacttcatgggcctggatgcatcattgttaaaggagaaacaccatgggtccttatatctgcaattcagctatgcacagaactatgcaaagcaagcaaagatgctctag

SEQ ID NO: 136697 - DNA, 768 bp, Zea Mays
atcccgtctatcgctccgctgggaagtcaaccacccgaccaacctcatcccacctcgactggagcacagttgagctccaattttggcgtttggccgttgcggacgccggagtggctgttatcggtcgcgtgggctataacttccccgattactcaattaactttaccatcaacctcacttagacctcctctgcaccctgctcacacccaccgaaccgctaccgtcctcccttggccgctgacgcaaccgcgccaccgcggagcgccgccgagccgttcaggtcgcacgtggctggccctcctccagcgtcctctccttcaaccgtcttctcgggtaggctggtggtcgtgggctatgtgaaacaatggcagaagctgcagatatcagcggtggagctccaggaagatttggccaggttgatggagaggatcaaagagttctaggaagctaggttgttctagtgtctgttatttgtttctcgaggttgatgaccaacatgtgagaaggcttcggatgttgctgcttgaagttcgttcctgtttacttagctctttgggtagggtgttgaaggacgttctgttatccttgttctgtcttttgatctctatgttgatctgcgattcctgtttcctgaggtctagtaggagaggttccaagttagggaggtccggtttagctgtggtgttttgtttagatgctggttgtttatgaacatcttgtaacaactggtaacccgagtcgaatgctgtttggtgtcttccaatataa

SEQ ID NO: 136698 - DNA, 748 bp, Zea Mays
atggagcgaatggagcgacgccgctacattctagttgactctccaaccaaacgcacacttaaactatgtggagagctggagtctagctgtcacattcttttcggatgccccgttgcagtggttatatggtgctgggtgagggaggccctgaactgggagggtatcccggcgtcttttcaagacttaaaatgtgcgattgggtcaaattcctctatgcaatcttcgggccatgttatagttgctagtgtgtgttgggctctgtggaagaatagaaataattgggtgtttaacaatattcttgtttctaatactaaacacttcttttcaggtcgtgggctatgtgaaacaatggcagaagctgcagatatcagcggtggagctccaggaagatttggccaggttgatggagaggatcaaagagttctaggaagctaggttgttctagtgtctgttatttgtttctcgaggttgatgaccaacatgtgagaaggcttcggatgttgctgcttgaagttcgttcctgtttacttagctctttgggtagggtgttgaaggacgttctgttatccttgttctgtcttttgatctctatgttgatctgcgattcctgtttcctgaggtctagtaggagaggttccaagttagggaggtccggtttagctgtggtgttttgtttagatgctggttgtttatgaacatcttgtaacaactggtaacccgagtcgaatgctgtttggtgtcttccaat

SEQ ID NO: 136699 - DNA, 917 bp, Zea Mays
attaccaggtatgctattcccttgctgcccctcgctccctctcgctccggtcttccgtttgcgccgtctgcgttctccattcggtgagtactccagttcgtccgttcttggtccaggtgagcgcgaactcctacccttgtgcggctagggttcgtccgcttcccctcctctgccctctcctctctgccgctggtgttggatctgtgcttccctcctcgattccccctcctcccctctgcagtctcctgtcgggcgcgtcgccggagcagggtctgtgctccccgtcgcctggcctgttcgtcctctactccggcatcgcttccccgtggagtacccaaagattctcaaaccggcatggcaaacgccgccgagagatgtgctctgaaagcgagcgtggccgctaatggcgctcgtcgtgcggctacctctgcggcaaacgccgccgtggttgctggagacctatgtgctgcaacatctgtgggtaaccaatccactgtttccaccctagatgttctcataacagctacttgcgcggagactcgagctgaatcggcatggggtgaagctcgcctcgctgccttgctggccgaggaatccagggtttccaacttgcaggtttgctttgctttgtctgaattgtgttgtcaatgattggaatggtatgaatatcagttgttgccctatgatgcatcttgctagctgacttcatatgtagctgaggacgtttgcatcacaattgttgctgagggcgtttgcatcacttactctcggttaactgacttcatatgtgttcatggatcagttctgtttactaaatttataagtgctgtaaccgtgtgatgatgatatgtggagtaagctggagctgaattgaattgaggattgaattgttggaattaaagcaatgatgctttgat

SEQ ID NO: 136700 - DNA, 244 bp, Zea Mays
atttcatatctagaagtatgtacttacggcttgttcgtctgcccttgttgcggctgcaatccggctgcggcttctacagtatttttgtctctatggattgcagctgctacagtgttttgcagccactacagtaccccaaatatgggcagccgaacaagctgttaaataggtagcaaataaatgagtaaaatactttgcattcatgctgattccttttgtttgtgcatttaaacttgagtggaag

SEQ ID NO: 136701 - DNA, 687 bp, Zea Mays
gccagctctaggaggagctgaaaaagggtccgccatcctacgccaggtgccccggtcttggtagcctcgtcgaccccttcgcctggtcttcgtcgggcccttcgccggcgacaaacacccattagtagtcctcccgtggcaggccagacattcagattgaactcgtcggctctcgtcctccgtcctctggtcctctctgagcgagacagcaagagagatgctgctggaaggaagcttgcgaattcgaaggacggtaaatgagttctttgcgcgcgcgaaaggatgggctcctgtgtccagaaggatcgtgggttgacaaaaagtctttggccctgtcttgcttattgatgtgtggttgcagtttggtagttctctgctggctcttggctgctggtttgtaatatatcgttatgttagctgatgaatggtcggcttttgatactttccatcgttaggtctttatctcgtgtgtgagtttcgctaagtcgaactcaataaaatcgctagtgacttcacagtctgtagtaaggctgtccagtagttgatcgtcggttaggcgtttgaggtctatggtaccttaagttcgccgcctggatgtaattgcactcgttttgttatgtttcctatttcttaatgaaataggggggttcttcccctttctgtcaaaaaaaaaaaaaaaaaaaactc

SEQ ID NO: 136702 - DNA, 767 bp, Zea Mays
aacctgcggcttgcttcccgagtgcccaacaaataggatgcaggcggcgataagcgtgagcacgacgaggaccacgacgacgatggcgagacacttggcgtggggacgagacacagctcccaccgtcaccaccatggacagatacagcccgagagctatcgcacagaagaagaagaaaccaaccgtgttgaatggccctaccatgaagcgtccggcgatcgccgtgaagaggccgccagaactggcgatgccttgtgaaaggtccagcaaatggcccagagcgagacagcaagagagatgctgctggaaggaagcttgcgaattcgaaggacggtaaatgagttctttgcgcgcgcgaaaggatgggctcctgtgtccagaaggatcgtgggttgacaaaaagtctttggccctgtcttgcttattgatgtgtggttgcagtttggtagttctctgctggctcttggctgctggtttgtaatatatcgttatgttagctgatgaatggtcggcttttgatactttccatcgttaggtctttatctcgtgtgtgagtttcgctaagtcgaactcaataaaatcgctagtgacttcacagtctgtagtaaggctgtccagtagttgatcgtcggttaggcgtttgaggtctatggtaccttaagttcgccgcctggatgtaattgcactcgttttgttatgtttcctatttcttaatgaaataggggggttcttcccctttctgtcaaaaaaaaaaaaaaaaaaaactc

SEQ ID NO: 136703 - DNA, 2627 bp, Zea Mays
gccagctctaggaggagctgaaaaagggtccgccatcctacgccaggtgccccggtcttggtagcctcgtcgaccccttcgcctggtcttcgtcgggcccttcgccggcgacaaacacccattagtagtcctcccgtggcaggccagacattcagattgaactcgtcggctctcgtcctccgtcctctggtcctctctggtgaggtgttcttattctccccccccctctcctaggccgccttcctccttgggcttctccgttgctgccgatagccatgtgattttgttgcaatgaggctgtggcgggggtgggttcctggggttgatgtttcctttgagccgtttaatggagatcggtcccatggtggtttggaggcccattcgatgtgggatggggcataggatgaagacacatcgcctctagccaaatcaagggtggaaaccgctgtgccgcaacttgacctaatcggctctccttcgctccctcacttggccgctttacttgcctcgatctggtcatccccttcctcggtgagatctagtttcagtggtgggtggaggtgggtgccgatccagcccccgtcctcggaggaggagtggtcgaggattggatcggggagatctctgccggttgcaaggcgtgaggcgatgggtgccaaaggttggagccaaaaatggggcactgggaacaacagggaggaggctcgcgatccgccgcagtggagtagaaacaggaatctgagctggagattgaggcctcccccctggaaagacgatccccaaaaaggatgtagccgactcttcttccactggcgaaatgatcgtgcaaggtaaccctaatttctcccttcattcttctgggtctgagaatgaaatggggaggagatttttctgccagaagtgtggggaagaaggtcatcacgcaagggattgctgcaagtctctttggtgtgagatctgtcgcaaggacacccatgtgatggctaaatgtgtttggccgcgacagattaagcccatgatgccgattgtgggcatggctgcagatgggctagggttcttctcatcccagtatgctaaacccagtctcaggaaacctaatctatcttgcttggggttggttaagattctggaagggtttgtgtctgcctctgagcttgaaaaggattttagctttcactttccttggggaagaacttggaaggcagagaaatgtccagctggttatgtgatgcattttccgtctcaagataagctagatgagctgagtcagtttatagaggtcaaaatgaagatgtccggagctaaaatcatggtgctgccctggaactgtcaggctaatgcgaaagcaaggctgcatactgtttggatgagtgcggagaatgtgctagatgagttaagacactaccaggctatctgcgagctgggatcgatcttgggggctgttgaggaagtggatttaaaatctctggagatgtcagagtcggtcaagtttaaggttcatgttaagagcattaacatgattccaaaaatagtggaagttggtgtcaagccttttctgtttgatgtgtattttaaagtggattcaattgtggaagaagggtggaatgaggagaattcgaatcttggtaagagagtgaaatccaatacatgtgtttctgaaggatctatgtctaaatcgacagggaaaaaagctagaaaggagtctgtggacggcaaggagaagaatgaggttgcttcttcggctggcaaaggtcactctagaaaaactgctactgttactgagagtgaaggtcaaaagataacccacaaaggggacaaaacactgcagcacaatgaagaggacagtggaggtcaggttaacttggagctcagtgaggaggatctccttagctctcaggaattggctgagttagctaaaagtgtgggtgtcaatctgcagtgctcacaagaaagtgggaatgaaaattgcaaagctgagaacactggtgatggggtggttgctcagagagataaaaaaggcaaagctaaaatggcagaggggtttgaggggctgaggaggagcccaagacttgaagctgatgatgatttgaacattactgagaaagctatcaacagagctgaagctaaagacaccttcatacataaagagcgagacagcaagagagatgctgctggaaggaagcttgcgaattcgaaggacggtaaatgagttctttgcgcgcgcgaaaggatgggctcctgtgtccagaaggatcgtgggttgacaaaaagtctttggccctgtcttgcttattgatgtgtggttgcagtttggtagttctctgctggctcttggctgctggtttgtaatatatcgttatgttagctgatgaatggtcggcttttgatactttccatcgttaggtctttatctcgtgtgtgagtttcgctaagtcgaactcaataaaatcgctagtgacttcacagtctgtagtaaggctgtccagtagttgatcgtcggttaggcgtttgaggtctatggtaccttaagttcgccgcctggatgtaattgcactcgttttgttatgtttcctatttcttaatgaaataggggggttcttcccctttctgtcaaaaaaaaaaaaaaa

SEQ ID NO: 136704 - DNA, 1203 bp, Zea Mays
gacagctcatcggcgtccatggccatgaaccataaacaaacctttaatattccactaatttctccataaccagcaaggacccttcgttcaacttctgaagttagggcgaacacccgaaaggccacaagcgagatcagccgttaaaataagaatgggcccaaggtctcgaatctacctagttctggtgagcaaactacgacgacactatctgattatgatggtaccacaccagaagacatttgagcctgaaactaccgaatcggacccaatcctgcaacctatatacgctatacgctaaaactcgagaacaaacaggatccaccagaaaactataatcgcaggaagagtaaactgtaaaccgaacaacccgaccaaacccaacttggctcgcacacggcgtcgcgcggaggtaaagcggctccaggggatctgcgagagcacagagattcaaggcagcagaacaaatcaacaggtgaagaagaaattgtccccactcgaaattgaaacggggtacagggaagaaacaaaacgcgagctggagcaaggagaaggggcagccggcgaacaggaacgagatctaggctgggagagcgacggccgtgaaaagcaggggcatggcgagcagcaaggcgacggcgcggctgagagaagctcggcgagcagagagatgaatggcacaacgaccatgggggagagcatcggctgaaagtagaggacagtcaggcaatagcgtccaccagacagagggcgcgcggttgggagcccgacggcgagcagagccgcacggtggagatgaaaagaaatttgagcgcgcgcaggacgagcagagaaagcttggggaggggatggggaagagctccagggcgcgcggccatggaaagcgggcggtgcttggtccggttgaaggaggctgcacggtggttttggctgccacgtctactgttgccctctgctccaccggaagaagcaccggatggtggcgagcaggtagctgaggggcgcggccatggttccagggaggagcagaggcgcggtccagtggaggaaagatcgagctggggaagaagacatcagagatgggcgccgagctccatagatgcagggcgagcagaacgaacggggaggaagacgcagggagggagacggtcaggcacgaccatggctgggaaggggttcgagcgctctagctgtgcgggagctcgg

SEQ ID NO: 136705 - DNA, 553 bp, Zea Mays
tacatagagcctatccactccaccgagggcgaaatggaccaactcttaggttttcgatccgacggccacgttcttcacacggagttgcttcgccttgacgcaccctccacgatcatgccacgtgccaccaccggttccctccggaaccgctgctgccgagttttgaggcccaaactcagcaaaacccgccatccgtagcgctgggtggttttgaggcccaaaccaccaaacccgccgtgagtaccgcacctcgtgcgcgtcctccacgaccagacgcgtgtcccgccagtcctcgtccacgccggcaacacggtccactccaccacatcctcgcgcgagtgcgtgtcccaggtgtcagccaccacggctagtcacccggctgctccggtctgtcagtcaagacccagtactcgcccttcaccgctcccggtccatcagcacgagcccgcatgaccttcacctcagccgtcgaccaccgtccctgtgctccacacctgcacaccacaagtcaaccgacatggttgcacaagcataatctcacactctggttagt

SEQ ID NO: 136706 - DNA, 559 bp, Zea Mays
tacagatgctgagcttgacgggacattaggattgctctcacgagggatcacccatttctcccagtcatcatgcttcctgatcttgttatcctgcattaacagacaccgcggcctatacaataagcacaataggcccaaatcattcagggctcaggcatttaaaaaaaaaatcaaacacaaatgcctaacgtgtctaggtatggaatttacccacgaggatggcagggcacaaatttgaaaggggaatcaattacaccagtgcatcaaaaaaattgcagctcccgtgatgagggtaaagcattaacacagtgatgagggtaaagcatggacgggaggtaacctatgtaccaacaattgttagcattactcagatatcatagtcctataatttttgttgattcggctacctatgtaccagtgttggattcaagtggaatttggtgtgaattattttaatgtttctcttcagcacattttatttactgccttcatggttcacttgtggtaaacctctactgcttaatctcatacaagcctatttcttaataatgagattaac

SEQ ID NO: 136707 - DNA, 690 bp, Zea Mays
gctgcttttttatctcattcttcacggttttcttctttctctctacgactaccatcctcaaatatcaccaaattggacctttgaaacttgtatttgatccagtggtcttctgtggcaagaaagacaaggagtgaatgaagaagctaaataagtgggaggaagaggacaaggagatgatggagaagaaacagaaggagcttgcggcggagaaatagcgaacagaagaggtggaaaagaggcgtgttgctgcttacaaggaggagaagcagaagaagcttgagcgtgcacgccgtgtgaagcagcaatggaggagaaccccaatgctttcaagaagggaaagtggcctcgttgcactcagtagtctcgtagtttgggtagttttatattgattaagtctcgaacaatgttatgtactaatgcactttttactatcctttaattagtgcactcgatattatggttttatgtattgcatcttttagtactttagtttacttatgtgcatgttttaattttgtatttgtttgatgcaatgggcaaatattggcacttcaaacaatgggaggtctcttgtttcggcataatactgatagaacgctgaaaagtctagatgccatagatgtacgatctacacaaaatttcagcagaatttcccttgtttttgacattctcaacaaaaatatttcacat

SEQ ID NO: 136708 - DNA, 369 bp, Zea Mays
atgccaaaccacccaccaattattgctactaatttattgttttttctttcttctcgctgctgtcttgttcttgtcccgatgcagcatgctctaccagctccagcgctcgttctcgttgccgtcggcgtcggtggccggcggcagctgcgagtagaagccgtagtccaggtcctcctgctgctgcctcttcccggcgttggtgctcttgccgtggtagtggtgcgcgagcgcggctcccccgaggacggcgagcgtgagcgcctgcgcgtgcatcctggcgtggatgaggcgcatgcccgtcgcccgcgccggcgcccgccgccggctgtacgccaccgacgcgcccaccgccgtcgcccacacggctcc

SEQ ID NO: 136709 - DNA, 234 bp, Zea Mays
tctggacttgagcacagagccatggccgccctcttgttgctgctgctgatcatcattgttcagaaacgcgatgatggccttggcgccctcgtggcagagagcacagatggcgccatggggctgcagatgcagcagtccatgcttccgctaactccgccgccgccgccgcctcgccttcctttccttcttcctccttttcctccctctggctttggtgctctgcaatggtgctag

SEQ ID NO: 136710 - DNA, 519 bp, Zea Mays
atggggctgtcaatctcgtacccaccggacgactacctgccagcagtggaggacgacatggggcggctgttcatctggtctctcagcttcgacgatatggaggctgccgccgattcgccttcgtattcgccttcggcattgccccccgcctttggctccgggaagctgatcatggagggctccctgggcttcttcgaaagaagagaaactgacagcgtccagatgcagaacgtgttgtccatcaggaatcctaaacctcctaatagagaagcctgcagcagcgtcagtcccggtcatgaaaacttgcataactccattgacgaagctatcatgttgaagttgtaccatgcactatggaggatgcttagtgggtcaactgtagggatctttccttctacatacgacctgtgggactcgctttttgaaaaatggtccccaatagcttatggtttacttgaaaagttcatgaatactccggcaacagaattcaaggtgatattccagaacaatcatatctaa

SEQ ID NO: 136711 - DNA, 122 bp, Zea Mays
cgaacagccgaacgagattgctcgatgtggagttgtattttatttagaaaggagtttaatttttaaacttttagagaagacgttggattttggaggcaaggtctgtttcttgattcttggtc

SEQ ID NO: 136712 - DNA, 1618 bp, Zea Mays
atgccgccgcgcctctcccaccgcagcaccgccgccgtacccacgcttctcctcctcctcacccttctcatgctctcccctcctaccaccaccgccgcggcgcagcaccactgccaccgccaccactccacaggcgacggcgtggtgatctcccaggctgactaccagggcctacaagccatcaagcacgacctgtcggacccctacatcttcctgcgctcctggaacgacagcggcgtcacggcctgctcgggcgcgtgggcgggcatcaagtgtgtcctctgcagcgtggtggccatcacgctcccgtggcgaggcctgggggcacgctctccgcgcgcgggctcggccagctcgtccgccttcgctggcgccatcgcgggggccgtcccgtcctcgctcggcttcctcacagacccctgcggcgtctacctcttcaacaaccgcttctccgccgtcgccaactccaccaggctcatccagcttaatcttagtcggaacacgctctctgacgccgtccccgtcgaggtcgtcgcctccgcgtcgctcgtgttcctcgacctctcctacaacaacctctccggtcccatccccgacgccttcgctggctccgacaagtccccgtcgaagctcctcaacaacaacaacaacaacaaggaggccatcaccgggagctaccagctcgtgttcctcagcttggcgcacaacttcctcgacgggcccatcccggcgtccgtcaccaagctgcagcagctcgacctgtacagcaacagcctcaacggcaccatcccgactcagctcgccacgctcgccgacctaaaatggttaggattattggggagatccaaaagtctatcaatggcatcaagagccaggttagttccctaaatctctagcccagttccgatccagttcttcaggtccgaacaaaagaagaacagatcaaatgacccgttttcgaattgagaaaagcaacgaaagaaaagatcgattgatgaaaatcgaagaaagaaacagaacagcacgcgtgcgtgtgaaagaaatagagaacgagcggtggtctcatctgcacgctatgggagagaggcgtccacgcgcgcaagaaaaacagaggcgggggccgcacgcctgacggcggcgctcgcgtgcacgaaggaaggcgtgcctgctcgctcgcgacgaaaagcggcctcgcccgcatgccacggcagtggctgattccccgtgcgaagcatcgtagcacacgacgtgcgcactcgagagaaaggcgagaaagaaaggccacgcttcgtccatggcggcgcggcgacacggcgcgcctgcgctcgcacgctcggagcagatcgagctgcggcatgcgcggagaagatggccggtggcgagcgcccgagaagggccggcagcagcgtgtccctcctgctgcggcctgcgtagatcgggacgcgcacgcccgcggcagcgacggactcgctcgcccgcctatggccgcggcggtcctgctcgcgcgcgcggtggcatcccgcacaccggcttccgggcgaggagggagaaagggggcgctgaccctgtcttctcggcgcaaagatcgctgctggccaacaggacttggtggtggcgg

SEQ ID NO: 136713 - DNA, 1625 bp, Zea Mays
taccacctcctaagctgatagtttcctatcctcttgatgtctcctgtaatgtattcatttcacgtattgtatgtaacccatttcagctagaactaaccaaaattttgtacaagctagtttctctgttaactacttaactggaaacttggtgatggtgcttacaacttgaccagctagcggcagtagaataagctggttttgttcgtatgaatagaactatgcttgatgctaaccctagaattgtgatgcaagcccacacaaagaaggtggttgagtagcacttcacccccatgcacataatcatggtgtcaacaatgccagtccagttatccactactgtcatcttttggccatttccatcgtataccatggcagcaatctggccatagaggagtgagcccagcgggatattggtaattaggatgttgtgattcactccaatgctatttggtccaaagagctcggaggtcactgacattgctgcagcaaagatgaatcctgagcttagaccaactagtgttgttcctgctaccagggtgcttgcatcttgttggttccacataaggaaaaaggccattggcatggggaccaatgcagcagcaagccaccctgtgcgagcaagtggcaccttcctgtatacaaattttagttaggaagcatgtgatatgatgacatatatgtttgtatataaagcaaaacagatacctgtgaaggatgtcaggtagtgcagaaagaagacgaccgaagaaagagcaggatgagtaggcaataagtagcatggtgagctgtgactgctggtgcaatgactgcgcaatctgccccaagttgttgctgtataccaggccaacagtggctccacagaagtaggctgtgtagtagagccagaagtccacacaccaaatgagcttctttgcactatgttcttcaccgagtgccaccaggtagcccttgctcactattgttccacaacaattgccctgcatctggagctccattggttttagcatcatcgcattggactccatttgatgattgtttctgattaggagcggctgatgtgggtcatcatggtttagtagcgatgcagggtcagggccatctgtatccacatatgaggaactggagcaggcagggatgatgagaggaagggcgaggagaaccatggcacctatgaggatgacccatgcagtagagccagttgcggtgaaagttccaaagaccacaacatatatgccagtgatgaatgcaaggatgtagaggccgaggaagacacgcctgttatgcctgggcgcactttggaggtggctgtcatttgtgtggcagaggaggatcactgggagtgcaagaatagagacaccaagagggaggattgcattgaggaggaggcagatagacagggctaaaggggagagggcgtttgcaaagagagtgtagaaggcagcgctgagcccgttgaagcttattgagagggagagggctagggagcggttgtttgcagagaagttgcggatgcagagaacaaagcagactgtgttgaaccagcagatgctgcaccctgctatcaagcagaccaagaacacctgcaagggccaacatatgaatcagaatttgatcaaataattaag

SEQ ID NO: 136714 - DNA, 691 bp, Zea Mays
cctgctcatcgatcttattcatttggcctcaacgatcaggattagtttggcttccactccttgagccttctgctcaaagcaaccaccgctggctcagctcactccggtggcctccggccgcctctgcctccgaggattcgcttggggggagacgtattatgaggttcgcggggtggtacctgaagattgcggcggtggggcctccattggcgctgccatggagctcttcatgatccacacgggcttttatgagaaggtaactgtcctggggtcagaaaaacgagcttgggaaagcagtctagaggcccaagctatgagagaagctctcaatccatggcaaaagcatgatgaacaagaacaacagaagaaatagtcaagagttatgtgtcttaagtgtctgcgttcccatccgtatacccttgaatcagcttccagaacacgttgaagggctatcgaagacagttataaactgcttttttcatgggatgcaaaaaaaagaggggacattgtacactatcacactgggtttcacttgtttttatgatattttaacattagaacatcagattttgggtatagaaatgggtgaaagttgtctgcttctctgtacaataattgaatgctctatggattgctcatgtaatccttttcagttatgatatttttttaaacatcatttgttggaacaaaa

SEQ ID NO: 136715 - DNA, 598 bp, Zea Mays
cctgctcatcgatcttattcatttggcctcaacgatcaggattagtttggcttccactccttgagccttctgctcaaagcaaccaccgctggctcagctcactccggtggcctccggccgcctctgcctccgaggattcgcttggggggagacgtattatgaggttcgcggggtggtacctgaagattgcggcggtggggcctccattggcgctgccatggagctcttcatgatccacacgggcttttatgagaaggtaactgtcctggggtcagaaaaacgagcttgggaaagcagtctagaggcccaagctatgagagaagctctcaatccatggcaaaagcatgatgaacaagaacaacagaagaaatagtcaagagttatgtgtcttaagtgtctgcgttcccatccgtatacccttgaatcaggtactattagaaattagtgttgatcttttgcatttgctgaacaatctgcaattttttgacttctttaaaattgctggatgcctggatggtagcttccagaacacgttgaagggctatcgaagacagttataaactgcttttttcatgggatgcaaaaaaaagaggggaca

SEQ ID NO: 136716 - DNA, 507 bp, Zea Mays
cgacgcccactttcctccgtagtcttcctcccacaaaaactgcgccacatcttcatcctcctcctcgtaacctcctccaatcgtgccggcggcgcagcaaggtagatcatctgagcctattcatcgcaacctcaagatcccccggggaagaaggggccatgagtcccacggcgtcgtgcagaagatatagaacctactcctacaggctattagaagctgaaggcaattacaatcatcaagaacaatcaaatgatgcaacggctaggactttctcaattacgatcaatgatggccagtattccaagtggaaggatgaacgatgatgctcctcaggaatttggatcgttgtatggtggtgatgatattgagggatctgtggatgagatgatcagtaagctacaccatatacttgattactcttataatggtaatgattataatacatacaattttacatctcagatattgtgtatgcttctacaagcagatcttcttgcatacatgtaa

SEQ ID NO: 136717 - DNA, 471 bp, Zea Mays
atgttggatatattcaaggaaatggtatctttgcgtgtatttgagaggatttttagtgaactcctatactgtgagcactggactacacattatgtttttttgcaggattacaagttcattctgtttttcagatgttctaagctctccatgattaggaaatatctattgtttctgtgcaccaaatccaagttgcagtttgagatgatgatgtgcttatgtgaagttaatgctgacaacaatactattggatgcaatatgggcatgtcggcgctacagaaagctgtagcagcggtagtccatgatgtcaacgctgagggctgggatcgaggattggagggcttgagaaggccgaggtccaaatggagctccaccagttccactgagattctgggcgcctccacggcgccggtaaacatagataagtggataaaacaacaagctatttggataaaaagcaggggacagagttag

SEQ ID NO: 136718 - DNA, 375 bp, Zea Mays
cctccacctccgggcgccccgaccaccacgaccctgagcctgatgcctggcgcggacgtcggcgccgacgagcagcaggagccggccgccgcgagggccgaggagatgcccgagcctgcccccgcccccgccgcggcgccgccgctcaccatcttctacggtggcacggtggtggtgttcgaggacttcccggcggagaagacggccgaggtcatgcgccccgcggccggcgacgacctgcccatcgcccggaaggcgtcgctgccgtggttcctgaccaagcgcaaggaccgcctcgtcgagcgcgcgccctacgcccgcccgtcgtcccccgcgaaggagccggagaagaagacgtgcagtgttgaaatgtag

SEQ ID NO: 136719 - DNA, 556 bp, Zea Mays
gtagctcagcagagaagaaagagggagaacggagaagggggagcggacagacaggcaccgcgagcgcgccttgcaatccatgattccagaaccaattcaattaagcatggtggcgcaaccggcgggtggcggaggtgcggaggaggaggtggtggtggacggcggcggcggccggcatgggcggaggagcggcgacgaggaggcgtggcggcggtgggcggtgctggtggcgacggtgtggatccaggcggtgacggggaccaacttcgacttctcggcctactcgtcggcgctgaaatcgtcgctgggggtgtcccaggaggcgctcaactacctggcgacggcgtcggacctgggcaaggcggtgggctggtcgtcgggcctcgcgctgctccacatgccgctccacgccgtgctcgcggcctccgccgccatggggcttgccgcctacgccgtccagtactactgcctcatcgcggcggcgtcgtccatggccgccgccgtcccctaccctctgttgcttggcagcgtacgtgtccagctggccgataattga

SEQ ID NO: 136720 - DNA, 382 bp, Zea Mays
ggtggttttgaggcccaaatcaccaaacccatcgtgagtaccacaccgcgtgcgcatctccatgaccagacgcgtgtcccgccagtcctcgaccacgctggcaacacggtccactccaccacgtcctcgcgcgagtgcgtgtcccaggtgtcagccaccacggctagtcacccggctgctccggtccgtcagtcaagacccagcactcgcctttcaccgctcccggtccatcagcacgagcccgcatgacattcacctcagccgtcgaccaccgtccctgtgctccacacctgcacaccacaagccgaccgacatggttgcacaagcataatctcacactctggtcagtccactgactacctcagagtgctacccgttgaca

SEQ ID NO: 136721 - DNA, 733 bp, Zea Mays
atatataaaagaagaccttcagctcgcaggaaggaaatccaagcaacaaacttggcattctggcctgttcttgccaggagaaacaaagatcgatgaggcctcaggtgatactcgtcggcactctggctgttatcgctatcctcgcagctctcggcgaaggctcgtcgtggccgtgctgcgacaactgcggtgcttgcaacaggaagcagccgccggagtgccagtgcaatgacgtgtcggtgaacgggtgccacccggagtgcaagaactgcgtcaaggtcggtgcaggaattcgtcccggcatgggccccggccccgtcgtcacctaccgctgtgatgacgttctcacaaacttctgccagaccagctgcccggaggcgccggcgccgtaggcggcgttgctgggtggtgtcttcttctgacgtacggcatgcatgggacgccgccgtacgtcgatctgctgcaagcatgcatgccaagtcgagtttccagcttcgtcagagaagaaatagataaataaatgtcgccggccgctctgttcggtgcttgctcttgttcgtcgtcggtctctctctctctctttttttttttttctagaataaagagccatatgcatgcatgatgcatatgccatgctcaaagcactgttggatggttttcgtttaccagcttcgtgaggtccttcgatttttgttctctttgcagctgttatatatcgtgtcgagtcatgaca

SEQ ID NO: 136722 - DNA, 1111 bp, Zea Mays
aagcgcacaggggctgaatcaccaatgcatgcctcttgcaggtggctaggttcagcggttgctcctgtgtctcttgcttgagtagctaccttttaaatttggtaattgttagtatactaggtggatgcccgtgcgttgcaacgggaagataaaatatcactataactcatgtacaaatgtgttataatattataggaaaaggttacaaatgtgttataatgtttaggaaagaaaacaaacccacagcctgtgtactcactgggacctaaaaacattaggtggactaatctctccacaggacgaaaaggtaatggagttgcaattgcaagcacacaaaaagtggcctgcacaagaaagcttatatcatggcagatgttcttcggacttctgtttatcagatactttcagcattcattgatgacctgcaagctaatgcaaaaccatccagcttagagaagaactggatcagtgaagggagaaagcctgtatatggttcacaagccgtgttggttcagaagttgattctgtttattgagtaccgagctgtatgaacttggttccatgtctctcagatcctttgcttgcacatcagatcatacttggatggaagtgtttggttctcgaacttgcggagcttgtgcttgttcatcttacacttgtggggagcaaccaacaaaaaaaactgtcgctctgttcgtttcgcttgtttatgcatagtacatgtacaagctattggctgtagcacaagcaattagattttcagatgggtgccaggccaaatggagcaactttgtgctcagatcataggaatttccattggcatctattccagtgctctctccacctgcataaggtttgacagtattagtagccgcagtgaagattcttttacagactaacatgccaaagcatcaagctaacctcgtctaacggcccttgtcagagtacttagggatctggtagctctagaggtagtctggacctaccgcctgttcacaagaaaaagtaaataatacagatacgattagttccatactactacatttgagcgacaagtgctcatgtatgctactcaaaacagtttggtgtatggaaatcaatttacatgaag

SEQ ID NO: 136723 - DNA, 828 bp, Zea Mays
aaaaaatcatactacatcatcctctcctctcccctcccctccctccctgtcccgcgcctcttcatgtcccgctgctaggttccccaccgtcacactgccgaatcttctcaccgagggtggccaccgctggacccaggatagcaggatttgagccgcccctcaccaagccacgtagagccatgcttgacgcctcgctctaggtcatacgacagtcgacggtggccctcgccaggccttgcggagccatgctagacgccccgctccaggccgcgaggagccacgctcgacgacccggctgctcgttgcatgccgcacggagctgatctcgccaccgcgctccatgccgcaaggcggcgccccacgccaggctgcgcggagccgcactcgacaccccgcaccgggccacacggcggcgccctcgctggatctctgcgctcctcgtcgccacctgcagtagagatggtttatggctggaacgttcctctccgatcgacttggaagtttttcaaacaagccaccattatcctttcaaagtcactgcaagcgggccaagcaagtactgtacaacttaatcagtgattcagtacatgttgtgtacctgtgtttccagccgtagctactggatctgactaactgacaagagtatggacgttctatttcccagtacagtgcttcgattttacattcgcctgacatttatatggttcgaatgtattcactttatagtccaatctcggcccacacaaatatcaataatcagcacaagataagtgctttgaaaatataactttgtttccataaatttgggaaatttcaaagaaaacaatc

SEQ ID NO: 136724 - DNA, 825 bp, Zea Mays
aaaaaatcatactacatcatcctctcctctcccctcccctccctccctgtcccgcgcctcttcatgtcccgctgctaggttccccaccgtcacactgccgaatcttctcaccgagggtggccaccgctggacccaggatagcaggatttgagccgcccctcaccaagccacgtagagccatgcttgacgcctcgctctaggtcatacgacagtcgacggtggccctcgccaggccttgcggagccatgctagacgccccgctccaggccgcgaggagccacgctcgacgacccggctgctcgttgcatgccgcacggagctgatctcgccaccgcgctccatgccgcaaggcggcgccccacgccaggctgcgcggagccgcactcgacaccccgcaccgggccacacggcggcgccctcgctggatctctgcgctcctcgtcgccacctgcagagatggtttatggctggaacgttcctctccgatcgacttggaagtttttcaaacaagccaccattatcctttcaaagtcactgcaagcgggccaagcaagtactgtacaacttaatcagtgattcagtacatgttgtgtacctgtgtttccagccgtagctactggatctgactaactgacaagagtatggacgttctatttcccagtacagtgcttcgattttacattcgcctgacatttatatggttcgaatgtattcactttatagtccaatctcggcccacacaaatatcaataatcagcacaagataagtgctttgaaaatataactttgtttccataaatttgggaaatttcaaagaaaacaatc

SEQ ID NO: 136725 - DNA, 725 bp, Zea Mays
acacgagctcacgcagtgaaagcaaggcagcatgcatgtcgtcgttgaccacaaaagtgtttggagtgccccagccagggtggtacagggtttattacatcattaataatattcaagagttagtaaccgctctgacccaagagcatccggtggtgctgatgttctgggcggactggaaccagccaagcaaggccacgtactgggatctggccatcgctaaaaaggatgaggccgtattctgccagctggactttgataagtttaaagatgtcgtagagaagttcagagtgaaggctctgccgacgttcctcctgatcaaggagggcgaggagcagcgcagggtcgtcggtgccaaggtcgaggagctcaacatggcattatcagatatcggataatctaggcagctatagcgctcacattctaacttcatcaaattattctaataaattaataagctggaaataagtcttaaaaatacaaatggctaattaatgcattttcgatttacaaagattgaaattcaagaaaaggtgtattaattatatcatatacaactactacacatgcatgcaagccatggttggattttgttacaaaatattgtgtacaaagtgatcaacccctatctgacagttttctcccaaaggacacaccccttgggagacactgcatccattgtatataagagatcctatttgcaataaagttgacaactgtcattccct

SEQ ID NO: 136726 - DNA, 583 bp, Zea Mays
acacgagctcacgcagtgaaagcaaggcagcatgcatgtcgtcgttgaccacaaaaggtaacacgtactactatttgtgttgcttcgtcctacttttttatgccttggcatatgttggctatttctggaggcatgctggcaagattggggaaggagctagcgaggttgtttggggcggtgacgctagctcttgccgacatggattaatatttaacggcggcggtgtactcaatttctttctgtctgatgtctcacgcggtaatttttgtgctgcggtgtagtgtttggagtgccccagccagggtggtacagggtttattacatcattaataatattcaagagttagtaaccgctctgacccaagagcatccggtacgtagccatgcatttttaagtctctctgcatttcatggaatacatttatgaagctgtaatttgtactaaattaatctccctccctctttctctgatctcctctctttgaaaggtggtgctgatgttctgggcggactggaaccagccaagcaaggccacgtactgggatctggccatcgctaaaaaggatgaggccgtattctgcca

SEQ ID NO: 136727 - DNA, 532 bp, Zea Mays
gcatctaagaagacattttacctaaggtaccgatgcttcttaaagacaactcacatataccgcagcaagatgttcatcaaattttatgacaacaacccgaagactgaatccccttcggatgtacttcaaaacgatcaacatatgtttgaaatggtgaaaaacataaatttcgcctttcgaaagaagaatgcgaatgggatgaagagagatagaagcacacctcctgtccctagtgtaccttttaagaaacagtcgatcttgtttaagtatctgccttattggtcagacttggagcttcaacctgaccctagaagagaggagtacgataagcaattttttgaggggcggtaaaagttcccactgggttttcatacaacatgaagaggctagtgccaatgaaggacctatcattaacatgcttcaaggctcacaattgtcttgtgatattgacagtgttcctacctattgcaatcagggcttaactacagttcttagaaatggccacatgtgttacttcttttcgaaggcctca

SEQ ID NO: 136728 - DNA, 744 bp, Zea Mays
tcctcggcaatggtgctagaaatgcttgttggtatttcttaatgtatgcagaaagaatccgcaagcacatggaattaccattgtagcacttcacccggaagtattcagggtatcgtattttccggagggaacggaggtacttttctagctagttcgtccaaggacaacacaaggacagagttggcaagggtagagaaggatttctaaggctttagggtccatggatagataaactctactactacttgcttacttcggacattggcgtacacctggtctaccaagcgttaccggcctatagctctacgctgaacccgaacgtgggggtttacaagggatggacagggccatcaccacctgccgcccacccctcaaccgtggggaacgaggcagacgaaggtagcctctagcctagacaccacatctacgctatcgattactactctagcgttgatcagggttatccatctctatcagggccctctactggagtatccgttacatgaacagacgatgaacccgcaagtgaataagactaaagctcaactaacggaaagacttttatagaaaaaaccacgaacacttagcgaaagattttgccaaggtacaaaagcttgtgttcgtagaggtacaaggggaaaggctatcgacaagtccagaacttccatgatcttcccctcacatctctccctatcaactctagatagctagctagtgcctaggcccatggagtggtgttcttat

SEQ ID NO: 136729 - DNA, 340 bp, Zea Mays
tttatattgaacaggtttcagtttagatgaagtggagattttggagtagaaattggagtcacaaggatgaacttagaatttgcagtcacttgcttagataatctacctggaagtcaggcgccatctgatgttatcaatcttgcttttgttcatgtatgctctttcgcagcttccttgccttattatactgatataaaggaagattgttcaattcatgttaggcctccaggcttcatcatctatgtccagttttagtttgactttatatatgcggatttgcagatatgtcttgctattagtaacaaccttgttgattccttgcctgattttagatttaccc

SEQ ID NO: 136730 - DNA, 1182 bp, Zea Mays
cttcgtccgttcagccggcgcaagattttcctgtgtcttagttgttctcatcctctccttagccgccgtacctcactgcgtgatatttttgccgccgcccctgttcgctttatatgcgcgctatgcgtgctcgtgcggcagattgctcggctgtttcgggcagatgctggggcactcgattccctagcgcccagacttccttcttctccctgaagctcgcctagctcggccgtcctccaagtttcgcccagcccagtcgttcctcctatgctcggcgccggatttctgctcgcccggctctgctccttcgcggcggcagcttggaccaggagctggacatcacgtggggcgacggcggggcaaggccctgggcaacgagcggctgctgacactgtcgctggaccggctggtgtcctgctccctcaagccgacagctttatctctgctcgccccggctcctcgcctcatccatggccgagcgccctctgccagctcatggagctccctctgctcctctgccgcgcgctgtcggagctccctgcgctcgcccatggacgcacgcttgctctgtcctgagtttccttgccgcgcgcagcagtgccctctccctgcgttgcacgctcctgcccagtttcctgtgccgcgaccttgtcgagttccatccttgcttcttgctcccggcttcttgtctcttccttggacacctgctctactgcgcaccaggatgcgatgagttcggctctgattcttttccagcggcgcgtagctccttccctagtgttgcgcccttttcttctgctcggacctcgccatggagattcctcgccgcaccgagcgccgtgaaaaccctgtgctcaccatgccgatttcccctgcggcagctttctcgacgtccatttccctgcacgctgtgtcctgctcgatttgccatgccacatcgcgtccctgcacccagcctttagctcaatacctatgctgcgccattggatgctggtcgaactagggacatgcttccttctctgtcatttgaacagcaacccctttgctcctcgccattgcgccgtcgttgcctactatgtcaggacacctcccctcgtgctcagacgctcatcagggaacccgtcgtcgacaactttggttctacgtcgccggatccgtgcttcagacagcaggtagggtatt

SEQ ID NO: 136731 - DNA, 1090 bp, Zea Mays
tcaaactgtgtcgcaatacggtcgacctttttgttattgctagaaatcatgatcaaaatatcttcgattactgataaaagaaagagagaaaagaaaatctaaaaaaaagagagaaaaaaaaagaaaatatcctctatcctcaccgccctctctctgcttcctatcgtcaaagccaggcacgcatccatatctctcctctcccgtattggtgctcgcccaggagccttatcctccatctgtcgacatgctcatcttctctccttcgtccgttcagccggcgcaagattttcctgtgtcttagttgttctcatcctctccttagccgccgtacctcactgcgtgatatttttgccgccgcccctgttcgctttatatgcgcgctatgcgtgctcgtgcggcagattgctcggctgtttcgggcagatgctggggcactcgattccctagcgcccagacttccttcttctccctgaagctcgcctagctcggccgtcctccaagtttcgcccagcccagtcgttcctcctatgctcggcgccggatttctgctcgcccggctctgctccttcgcggcggcagcttggaccaggatgtcagtattcctgtaggcgacctggagttgggggacgacaggagagcaggaactgatgaagtgatgggccggcgaacaaggaagcccaatagcaaatggtccggtgccgagtggatccgttgaagggtgggccggcgcttaatagctggttgtaataaatagtagcacttgtactgagaaagacagctttgggaataaaaatacagaactcacctctccttcctggttgtcttctccctctcgttcctctctgcaacgagcagcgttcgccatcagaaatgtcagtattcctgtaggcgacctggagttgggggacgacaggagagcaggaactgatgaagtgatgggccggcgaacaaggaagcccaatagcaaatggtccggtgccgagtggatccgttgaagggtgggtcggcgcttaatagctggttgtaataaatagtagcacttgtactgagaaagacagttttgggaataaaaatacagaactcacctctc

SEQ ID NO: 136732 - DNA, 1424 bp, Zea Mays
gacaacctcaacccaccccctgagccatggatgaaccacgacttaccacctccaccacctagcccaaatcaccacgatctacccccaccaccaccaccacctaaccacaacccacataacttaccgccaccacctcccaatccaaatccacaaaacccatatccaccgcctgaaccaccagtacctactctagctcagctgatggccaaccagaaccagttcatggaagctatgggcacaccgcacactgctcatagctcaccaagccccacaccacggcgtcaatggctaccgtcgcgatccacacccagaaaccctcactcgcaagatcgaggggttcatcaagctgaggcctcccacctttgacttcactgaagacccactggaagcagaagtctagctaagagaaattgagaagaagctagacctcctgacatgcaccgatgaggaatgtgtggccctcgccactcaccagatgaccggcgctgcacgagcctggtgggacagcttctgtgaaacccatccagaccctgctagcatctcatgggatgagttcaccactgccttccgtgagttctgtgtcccctaaggagatcctggttcacaaggcagaagagtttcgcaagctcaagcaggggactcagcgcgttcaggaatacgcgagtgtgttcaccaagatgatgaggtatgctccagatgagaccagtacagacaagaagaagcagtattggttcaagcaagggctccatcgtgcgctcagaactcacctcgccacccatgactttccctcgctctgccacatggtgagcaaagcaatcgttgttgaaagggagaggttggactatgaggacagtgtggggtttaggaggaagcgcactggtcccccgaaccgcctagggccatctcagcgccctcagaccgggctacaccagtccagcagaggcacaccctgccccagcgctagtgtgcccagccccagctatgggaacaccagttaccagaacccgagctacccaaagccagcagcttcacatcaagcagttagtgtggcaaggccagcagccccggctccgtcctcaggaagctcgttcatcttcacttgcttcgcgtgcagaaacccaggccatcgtgcagcagactgccccagcaggaggcagccagtgtacctgcgtcctagacagtaccagactccggctaagtcaccagcaaccggaggcacccctcaagccagtcaggtgcgtgtacctccgccagcagcaagaggaaggctgaacaacctgaccaccgaggacgctgcagacgcctccgacgtcgcgctcggtgagtttttggttaataatgcttttgcgacagtactgtttgattcaggcgccaccagttcatatgtgtcatctaaatttgctgcgcaataaccattaaagtcc

SEQ ID NO: 136733 - DNA, 769 bp, Zea Mays
agagggacaacaccttcagtgtagattaaaattgataatcattaagaaaccagactgcattgactagctctgaggtacatgtcaatcgagaaccatcagctacttgtactgacaacctgtgaggcactgttgtacatccatgaagctgagcagccactgacgcactgatgaatgtgtgagaactgctggaatccaacagaattaatacttcaatgccttgcacagacccgaggaacttgatagttttcggcgctaaggatccatccacagcagcttatgacaagaggatagagttcacttgtgcaggaggaacatcatgactgtcatcagagtcagaaagatccattaactgccacatttcttccaccagatgaagttgaacagtttctgcacatttatgtcctcgagagtactggagaccacacttatagcagaggccttgagctttacggtatgcatagaggttggcgatacgatcagcagtagcaggtttgggtatgtcgaaggacttcttgtcgtccggacgctgaggaggtggaagtcaaccgtcctagactggtgggggaggcagaggcatcggccctttagagtatggccgagaagacaccccgccttcccatcgacgagcatcatggttcttggacgcatctgccacctcttcctgcaattgagccaagacaaaagcagtatccaagtcgcgaagcctctgaatcatcactacagatttaatatcatgccataacccttctaaaaatttcatggtgtaata

SEQ ID NO: 136734 - DNA, 418 bp, Zea Mays
atggatggatggtcattactgaagccgcaatactttattcttcaaccagcagttcctttgtctggtgaatttgtaaagggtcgtcagttgaaaaagacagatgtttttcatatgccgctaggcaatcactaccatcgaggcaatcgcctgatagaggaagcaacaggctttgtaaaagaaaacataaatgagataagtttgcaaaagaaaaaggcattcattcaggaatcaggatcgtacaatgggatcgacacaaatggccaccgtttatcctgcgcatacacatggagcagaagcagcccatactgcaggactgtcagcgatgcctcccagagggtgatcactctaggcgtccacacctgagcgcagcgcagagaagattgttcagacatacttgcatacatacacccaaccttct

SEQ ID NO: 136735 - DNA, 2334 bp, Zea Mays
gtactagtaccattacacacaagcagtgagtgaccggccatttctcttgccaaccatggcggtgccgacgacgacgctatcccaccgtagaatctcctcctacagcctcgttgcctccaccgccgctcttctcctcgtcttccatcaccatgtaccgtccaccacggcacagccgctgccgtggcagctctgcaacgacacgagcggcaacttcacggacaagagcgcctaccaggccaacatcaaccagctcgcgaccgccctcaccaacaacgcgtcctcctcaccgtctctcttcgccgccggcgccgcgggcagcgcgccggacgtggcctacgcgctcgcgctctgccgcggcgacaccaacgcctcctcgtgcgcgcgttgcgtcgccgcgtcgttcaagaccgcgcagcagctatgcgccttcaagaggggcgccaccctgtacgacgacccctgcatcctccgctacgccgactgggacttcctgaccaacaccacggacaacaggggcttgtacatcgcctggagctacgacaacgtctccgccgcggtcgcgccggcgttcgacgccgcctccgcgcggctcgtcaacgccacctccgactacgcggccacggaccccgtcaggcggttcggcacgggggaggagccgttcgacgacgcgaagtaccccaagatctactcgctggcgcagtgcacgccggacatgacggtggccgactgccgggcgtgtctggggggagtctataggaggtttgcgcccacgtatttcggcggcaagcatggcgggagagtctttggggtgcgctgtagcttgcgctttgagacgtatcacttcttctccggtaacccgctgctgcaaatcccggggccgcccggggcgccgccgccagcagcgccagcagtgaacatgacgccgccggcgaccgggcaagggggaggaggccataaaaatagaaccagactggtgttggccattgcattgcctttagctgctgcaactgcaatattagctctcgcagtagcatgtttgtattaccggagtagaagaagaacaacagcgcaaagggactcatcaggaaagccatgttctcctagtccagatgacattgataagagcatcgattcgctcctttttgacctaccggcattacgggcagcaaccaataacttcgctgaaagcaataagcttggcgaaggagggttcggtgcagtttataagggaatcctttctgaaggccaacaagtagcagtgaagaggctctcacttggctctacacaagggttaacagagctcaaaacagagctagtcttagttgccaggcttcaacataagaaccttgtgaggctcataggcgtttgcttggaagaagacgagaaactacttgtgtatgaatacatgccaaacaggagcctcgacaccattctttttgattctcagaaaagcaaagagctggattggtggaagagactcgagattgtgagcggagttgcacggggcctgcaatatctccacgaggagtctcagctgaagatagtccatcgagaccttaaaccaagcaacgtgctccttgactctgcttacaccccgaagatatcagattttggcctagcaaaactcttccacatggatcagagccaaggtgccactagccatattgctggaacatatggatacatggcaccagaatacgccatgcacgggcaatactcggtcaagtcggatgtcttcagttttggtgttttgatcctggagatggtcacagggaggaaaaacagtaactcggaccaatcagttgacctcttaagcctagtatgggagcactggagctcaggaacaatccaagagctgctggacccattcctgatgagccaccgagctcctccagaccagatggcgaagcttgtcaacatcgggctactatgcgttcaggacagccctgcagacaggccgctgatgtcgtctgtaaacgttatgctcagcagcgacaccatctcactacaggccccgtcaaggccaacattttgcattcaggagacggaagaccattcgcgcccctactccgatgcgtataagagggcgctgaagctgcagtcgtccactgatagggcagcaatgtcgccgaacgaggttacgctcacggagcttgaaccaagataagcatgcatgaacgccgacaagaatatacatatggccgaaagatatatatatatatatatatatatatactgttttcaagaatctcaagtcgtattagataatgttttttttttctgaatgaactggaggggtaccccgtacggataataattttatttgaatgaaaa

SEQ ID NO: 136736 - DNA, 2239 bp, Zea Mays
atggccactcggcggctcacgcccgactgctttccttccctcctcgccggagttctggcagcctttctccacgccgccctccacgcgcctctcgccgttgctcaagagcgacagccgccgtggctgctctgcagcccccctccagacagcggcatcgccggcaactacacggagaacagcccgtaccaaggcaacatcaacctgatctcagccaccctccccaagaacacctcgtcgagcccggtgctgtacgccaaggaccgcgtcggctccgtcccggacatcgtgtacgcgcacgcgctctgccgcggcgacgccaacgcctccgcctgcgagagctgcgtcgccaccgccttcaagggcgcgcagcaagggtgcccgctcgtcaaggacgtgctcgccttctacgacctctgccagctccgcttctccaaccgcaacttcttcctggacaacgacaacttcatcaccgcgtactacctccagggctccaagctcgccgcgggcacgggcacgggcacgccgatgggggcgttcgacgccgccgtcctactgcttgtcaacgcgaccgccaactacgccgccgggaactcttccaggagattcggcaccggagagatgggcttgggcgatgacaaccgcaccaggatctacgcgctggcgcagtgcacgccggacaccgcgccggacatctgccagacctatctacaacccattgttaatcagctgccggtgagcttcagtagtgtgagtggaggcggaatctttgggacctggtgcagcttccgctacgagctgtatcctttcttctccggcagcccgctgctgcagcttccgacgttcgttgggacgacgcctgctcctgcacctgcgccgccgccgccagccacaagtcaagataaatcgagaaataagacaggtatagtcctagcaattttgatgccttcaattgctgcactgctgggcataaacatggtattattctggataaggaggaggagatcagcagaacaacgaccttttcaatcttactcaacttcgtcagatggcattcaaggagccgatatgctgattcttgatctatcaacattgcgagttgctacagatgactttgctgaaagcaaaatgctcggtaaaggagggtttggtatggtttataagggagtcctgcctgatggccaagaaattgcggtaaagaggctttgccagagttctcgacaagggattggagagctgaagagtgagctagtactggtggctaagcttcaccacaagaaccttgtgaggcttattggtgtttgcctgcaagaacaggagaaaatacttgtgtatgagtatatgcccaatcgaagccttgacaccattctgtttgattccgagaggaacagagagctggattggggaaagagattcaagatcataacaggaattgctaaaggcttacaatatctccacgaggattctcaactgaaggtagtccaccgggacctgaaagcaagtaatgttctattagacctggattacgtacctaagatctctgacttcggcctggcaaagatttttggcggagatgagtctaagtgtgtcactcatcgtgttgccgggacatatggatacatggcacctgaatacgcgatgcgtggcctgtattcgatcaagtcggacgtgtttagcttcggtgttttggttctggagattgttaccgggagaaggaacggtggcctatacaacagcgaccaagatgttgacctcttaaatcttgtgtgggagcactgggacagaggaaacgtcatcgagctgatcgacccatcactgagcgaccatcatcatcatcctcccattgagcagatgctcaagtgcctccacatcgggcttctgtgtgtgcagaggaaaccggcggcgaggccgatgatgtcgtgggtcagcgtcatgctctgcagcagcacggtgcgtctcccttcgctgtccaggccagccttgtgcgtccaggaggttgtcactgccactgacgacgacagctcgtcaggagcttcagcgttgttgtgcgcggcagaaagttcagtgatgacgacgataatgtcatgtaacgacgcatcaatcacggagcttttgcctagatgatgataagacgccgtccagggccagggttgtctgaaccaaatggatcttgatgcaccagttttgtgctactcctattactttgtagtattaatctatatttatattctttctttctttc

SEQ ID NO: 136737 - DNA, 781 bp, Zea Mays
cacgccactgtggatctagatccgacactggctgtgcgggattagtcggcgtgcgtgcttagcagcgtctgccgatggatggagaatggtggaatcgagaaggccggtgtcacccacaagatcgacatcagcgatggccccgtgctcccagtcccgtccgcctcgaatccattcgtttgcctgcacaggagaagaaccacgcgtcgttcgacttcatcttcatggacgccgacaaggacaactaccccgagcgactgctcaagctggtgaggccgggtggcctcatcggctacgacaacatgctgtggaacggctccatcgtgctcctggacgacgcgcccatgcgcaagtacatccgcttctaccgcgacttcgtgctcgccctcaacatggcgctcgccgccgacgagcgcgccgagatctgccagctccctcgttcatgtggtgctgtgtatcggaagaaaatgcgacatcaaacttcgccgccatcgacgcaagcttgggagatgcgacgggggaaggtgtggcggcgcgggggcttgcgacgagaggcgcgcgcgcggcgagctcggccgtggcactgggcttcagcggggaggcggagaagccccgcgaggagggcaagctgatgttgagttcggcggacgaggggcccggcgacgacgacgcagttgaagagccgactccacggacggtgcaattgcggatatattagtgcagccgatgggtgaggagcggctgtagccctacaggaacccggcaaggacaggccaccgtccca

SEQ ID NO: 136738 - DNA, 1226 bp, Zea Mays
ctgcgccagcgctgctcatcccgctagcacacgccactgtggatctagatccgacactggctgtgcgggattagtcggcgtgcgtgcttagcagcgtctgccgatggatggagaatggtggaatcgagaaggccggtgtcacccacaagatcgacatcagcgatggccccgtgctcccagtcccgtccgcctcgaatccattcgtttgcctgcacaggagaagaaccacgcgtcgttcgacttcatcttcatggacgccgacaaggacaactaccccgagcgactgctcaagctggtgaggccgggtggcctcatcggctacgacaacatgctgtggaacggctccatcgtgctcctggacgacgcgcccatgcgcaagtacatccgcttctaccgcgacttcgtgctcgccctcaacatggcgctcgccgccgacgagcgcgccgagatctgccagctccctcgttcatgtggtgctgtgtatcggaagaaaatgcgacatcaaacttcgccgccatcgacgcaagcttgggagatgcgacgggggaaggtgtggcggcgcgggggcttgcgacgagaggcgcgcgcgcggcgagctcggccgtggcactgggcttcagcggggaggcggagaagccccgcgaggagggcaagctgatgttgagttcggcggacgaggggcccggcgacgacgacgcagttgaagagccgactccacggacggtgcaattgcgggtacgtggtgcagcccctgtcaccgtccctattcttggaagtggaacggctagcagcccctatcgccgcctttgcctagctccacggctccgcccctgttcttcccatcctttcgaatgctagctgaaggtctattgaatctgggcatggttgattatcttattagtgctattgaactaattatagaaaaggccaaattcagagaatctaatgtttctgctataagaggatatctcaagatccgcaagtattatgatgcattagcagcttttggttgtctcctagagataaacaaccctcagtggatgtatcgttgatacagcatgcttgagaatgtatcgtgtaaaatgacggagtcgatgaaaagtttcgtggttgctagactggcttaaacttttgtagcagtggtgtactagatgtcaatctcattggtctgtatgaatgaagttagcagaatttgggatgctctcttgcttctggagagctgctta

SEQ ID NO: 136739 - DNA, 99 bp, Zea Mays
gccgagctggacaggttctgtgatgctcttatctccatcggggaagagattgcagagatagaaaatggcaaagcagatgtgctcaacaatgtcctgaag

SEQ ID NO: 136740 - DNA, 105 bp, Zea Mays
gaggatgtggcaaagcgcttgatggactatgggtttcacgcaccgactatgtcatggcctgttcctgacacacttatgattgaactaactgaaagtgagagcaag

SEQ ID NO: 136741 - DNA, 955 bp, Zea Mays
tgaaatacaataagtaccgaggaaattgtctgatactggagtgtagacttatgctgaaggaatgtttagaacaaacatgatggtgtcaacatgaagttgagatatatgaattaattatggaggattgagtgtctgtcagtccatgcaacatgcaaatagcgtatatctgctatctttttaggctcggagtcaacaacaggaagtgctctcattctatgcttcattttcagaacatgaagtggttttggaagctgtgcataaaaggaggtgcaggacttgtagccaatggaatgtaactggaagggaacaatgctgcttgtctcaaggcgcttgtccgtgacgccgtcggcgcccgactccgggggcgatgggaagagttgcgtttcattacacgggacaccaggacgggagggggaagaggaacaatctcatgatctcaccttttttcctcatctgacataattctctctcggcaggtgcaactgctgcatcagccacatcatttgattaatccatttttatgatcagattcccactggtggcggctctcctctctctgagaaaaccgaccctcttggtaccatttctgctgctccatggggatctgctttgattatgccaatttcctacacatatagccatgatgggctcactgatgcttcaaagattgcgatcttgaatgcaaactacatggcaaaacgtctagagaaacactacccagttctgttccgtggagtcaaccgaactattttccgttgaaaataccgtcaccacagtctgctatcttcagttttagtttcactttagtttacctttagtttcagttgcaggttatcttcagtttcagttttagtttctcttcaatttcattttacgtgtgtactcagtttcagtttaccggtgtactcagtttcagtttcagtttacctgtgtactctttgacgttgtttttcca

SEQ ID NO: 136742 - DNA, 602 bp, Zea Mays
atcataccacacacacctccacggacatgctggcctcatcgccctgcccttctgctcgccggagctccacttccctgtttcagcctctcccatggacgcccccctcccttcctgcagcaagccatggcggcagtcctctccctcagtttcctctcatggctatggacatcggctgatccttccctcccatggcgcccattatttcctttccctactgtttcttggatactagatgctggagctgccttcccatggtgctgtcctcttttatggcgctcctctctgttccaaacaaccactcccttatcccctacaccagtcgttcaccatgtgctcaacaaaatgtcgcagcgtgctgcaccttgatttgtgcagtcccgattacgttgtcgtcaccctggtgagatcccgatgttccttctccgttcaattccgcatcggcgttggttcgctgctattaattgtgtgtatggttgtatttttgttgaggagcaaaatcccaagtgtttgggtagagaagaagaaaggaactccagtgcagcaaacaccccgtgttcgatgaaatgtttgaatcggaatcatcagcatatccgcagtttggt

SEQ ID NO: 136743 - DNA, 458 bp, Zea Mays
cgatagtttgttgtaagatataaatattataaaaaaattcagataaaaagtattacagaaaaggcatagtaatctattacattgttgtagagaatgcaaggaagcacaacacaaaacaggtgtttttcaaatcgcacacatgtgtcatcaattccaacaccactccatctcatttctaggatgcttgtagtaaaaatgcagatgaaaagtgacatgaaccctaggctggcaacattattcagcagcagcagatcaaacagtgaacataagcttcagacattccgcaatatacagaaataagtcgcttaaacacagaataagagcactttaatttgaactgatctttgagaaaaatgtgatagtttttgttagcaacttttatgtatattgatagtcacttgtgttccaaaagaagctgcttccttcagctgagtatccatgtggaagatgaggtccat

SEQ ID NO: 136744 - DNA, 933 bp, Zea Mays
caaacttataaaaaaggtcatctccgacagtggcctcgccgcctataaaagccccagcgggcaaggcacaccacccaacaggccaaccatccgattgtcacaaactctcatcacaaagagctagccaagcatgctccttgaccaaaagctagataggcaaccatgtcggaggagaagcaccaccacctattccaccaccacaagaaggacgaggagcagcccaccggccggcgagtactcagagaccgtggccaccgaggcggtgaccaccggcgacggtgagaacgagtacgaggggtacaagaaggagcacaagcacaagcagcacctcggcgaggccggcgctatcggcgctggcgccttcgggctgtacgagaagcacgaggcgaagaaggaccccgagcacgcgcacaggcacaagatcgaggaggagctcgccgccacggcggccgtgggcgccggcggctacgccttccacgagcaccacgagaaaaagaaggaccacaaggcgccgaggaggcccccggcggcgagaagaagcaccaccacctcttcggctgatgacctggccggcgagagcaccggtccgtcaccgaccgaccgaccgccgcgccgcgccgcctgttttcgttgagtgcatgcctgcatgcatgtttgacgtacgattaacaataagtcccttccggacctctgcgagtgagactgagatgtggggccgcgcgcgtcgaggtgttcctgtacgcgcttgattttctctgcatgtataattgcgttgaataagcgagagccatgtgtgggtgtggctcctcccctcccaaagtcaagcccttatgtgtacctgtggttctttgtactggtatatggagatgatgtgttaatgtaacacgattttatttatcacctcatccaaattatttgttactttaccctcgt

SEQ ID NO: 136745 - DNA, 270 bp, Zea Mays
atgggtcgcgccgccctccgtgatgcctccggcacccgtgaagagctgtgccacttcactcgcggcagcaactcccgcaccatcggcagaggacgccgcgaccaggggaggatccgcggccggcccgcccgcctcaaccgggacgttagagctggctacggcgtcgccacgacacatcgggccacccgtcaatgccgcaaggtcctcccagctggaagccgtggaggacgcatcattcgagtcagaggagaaggtggctccctcgcttga

SEQ ID NO: 136746 - DNA, 609 bp, Zea Mays
atggcgaaaaggacgacgacggaagaaacactcacccgaccaaagggaatgaagtccgccgtcaccgatgcctcggcaatcgagatcgcctccccgaaaccactgagcatccgctcaatggtctccaggcccgcgtcagctcgaagcaggaccaactctaatcgctgtcactcctccacctctgcttcgtcgccccctacaggccgcacaggcaacgcactcccaccggctaccacggccagcaccgcttgttcccgaaggccggcggaacccggggctggcagcgacaccctagggctaccacccgcccccacggtgactgatggcggaggggcgggggcaggcaagggcagggacgaagcctccggctgccccgacaaggagtcgctaagggcagctgccccgaccgccggggcctcccctgaggcggacgcgaatggtgacgaatcgataagaaccacgtccggggtggccgcacccgccgcctttaggatgacctgggtcgacggcgtcgccaccgcgggggaggcagatgacacgacgcccagcgggacaaccccgacagccggagggggcattccccccagcagcgtcggctcgaaggcctga

SEQ ID NO: 136747 - DNA, 598 bp, Zea Mays
gcgaccaagtcccgctaagcaggtccacgaggcggggcggacgagcaaacccccgccgagcaagtctgcgaggcggggcgaacgaccaagtccccgccaagcagaccaacaaggaaggagcccaggacgacgctgctggcctacgtcagcacgacaagacagatcatcaccaaaccacgaccggatcatgggagcagtgccgaagggcctctatcaaaacatgactcagggtacgttctcagacatgcccccactgaccggtgggaccagtcaaccccagtcgcagggacctcagcatcggggtctctacagtgacccgtactccagaaggggatagaacagtacgtcataccgagcatgtgcctacgcatgctggaagatgacgtagaggggatggcggaagatgaagctgtactgaagacatccctgaacctctctgcaagtctgctctgcgggacccgccaggtaccgctacatcagcatcagaatagctacaggagcccgtatggcaaacggacgagacgcggtgccataccaggggtacgacgacgcacgacccggccaacgatatcagaggagccgcgccacatcgaggcag

SEQ ID NO: 136748 - DNA, 1044 bp, Zea Mays
aaaaatccccaaatctctccactcccagccgctgcacctggcttcttcgccactctctcctctcctcgttcactctgccaggtggccggccgcccctgctcccatctcccacagccgccgccgccctcagctcctcagccacctcccatggcctcgtctccctgctgcagcgaagccgaccaccgtttcctgcagcctcgatagctcccccccccccccccccccccatgccgtccctgctcacctcaccttcgtcggccgtccttggacgccgtgctcggcgcccgagctccctacgccggccaccatccttcccatggcaggagctccgatcggcccctgctgaccttggcactcggcgtggctccaagcagcgccttctcccccaggaccggctcaccgtcagccgcgagctcctctccctcacgtcccctacagacaagcaggttcgaccgtcgcccaaccccctctccagcgcgcgcatggactcctccctgctcacgccggcctgtgcagtgtcgccggtgagcagcagccacagcaactccgcgctccgccggcttgcggttttgtcaagcccagtagacagcagcaaccccgatgtcttcacgtcgtgcgctccaccccgatttgcgcagcccctgcgcgacgtcgtccacccgatgttgacgctgtgccacgcgcaccaagcgttcgacgaaatgcccaaccaacggacagcacgcgggtctcgaacccgattcggctaggttgttcgatttgtattttgtggtctactctaattacgctttggtcgatgtcgcatatatatgtgtgtgaatatgtttgtatggattcgagttagggaaggagaagaaagcgaagtagaaaagaacccggatgtttcttaggttttcagaggattgtggttgtattggatgtgtgttgaaaatgcctcctcgcaaagagtgtatggtcccatgcatgcgatgtgtgatttttgttggtgaatgcgaaataagtttagtgtttcaaaacggttaattgatagtctctgttagtgct

SEQ ID NO: 136749 - DNA, 1694 bp, Zea Mays
tcttttttttttttttgacggtcaacggggggagcatccccacctgatttcattagatcaatggctcaaaatgggccgtaggattacacaaagcagaacggagattacaaaaggggagaacaataccaatggcccaacacagcccggtcggattacacaaacatgacgcaggctataacggctaggacgacaacagccgatcgacgactagcaccaccagagaacaacatactcgccagcacatgaggaccattgcgcatccacatggcccctcgtagcaacgtcgctccactgccgtgcggccctctaggtgagggaccgcgcaagcgtgagccgatcccagagacgatgatctcccttcaagccggcagcaacacccgacagcgcatccgggctccgcatgccaccatccagcgccgtacgagagcaggagaggcggaaaacaccgacccgacataagatctatgtgtcccttgttgacagaagagcgttgacggagcagaggtgccaatagggacaaagagacctgcaaagaaaaccctgacgaccaagccatgacgtgggccttgcaaaggtgggcaccttccacgtactgacatggagctttcgctgcaaggagaccgccatggagcccagtcccgccaaggtcatggcaccgccgagaatgggcattggagcagaccgagcgaaggtgataggaccccccgcgcaccgggcacagagctttcgctgctcaggactgccaccacatccacgatagggcgccgccaatggtgggcttcggcggagcaccaacagatcgggcgtcctgccccgacccagctggcagagaccgccggagagggccccgctgcatttcggcaatggctatcctcgtccgcttcgtaggggttagatccaggcacaggcataccggatccaccggcggtgagctgcacaggaaggagcagacacgcggacgcactgtagttggacgaagcagagcacaacacagtgggggtgggtgtacgcggaccccagccacgcccgcctggccgccgagggcctgtacgggcccggctagcaaccaccacggggcgccggcaacacaacggccagatccggccaggggtaagccggttctggacgccaggtcatcggagccaccggagggagcacgaaactctcgacctgcggggcagccccatgtagaccggcgggggagcagtggcctagagcgggttgctgcctgtgcagctggtggcggcattgtctcgcgcaagcgcgagaagctcttcccgccccagctggccaccacttggggtcaccacggagcatcgtcgccggcggggggctagaccgggatctagggccgtagagaccggatcaagggctgcagaggccagatccgcgccaggaggccggagaccgcgctatccggcggccgggcatcgagcacaagagttgcagtgagggggggggggggggggaggggtgggtgggagagagagggaggagaggaaggggtgcggggcaggccctttttggggcgccgccgctggctgccaccgccggtagccggaggagaggcggcggcggccgggctgtactgcttttggggttggcggcggcggtgcgagcgggtcgcccccgagtcgcccttgagggcgacgcagaggccctcctatctcaacaactagaatcttagaaaatat

SEQ ID NO: 136750 - DNA, 513 bp, Zea Mays
atggcgggactaaatggaattagggaaggggaaacagggagatctgcaaggagggagatgctggacggacggagaggatggtgttaccttgagcgcctcgcgcatgacgatggtgacgagcagtgtgtggaggacccaggagaggtcggtgaagggggcggaggtgacgacgggtggcgccacgcagcggagagggggcgaagaggaccggaccggcgacgatgcgtcggaggtcggacggccgtcgggcatcggctgccgaaggagacgcgcgggcagatctcgtggcggcgacatgcggagaaggagcccatggcgacgtcgatgcggatgggcggcgcgcgacgagcgggggaaggcacggggccggttcgctcaccatcctcgctggagccagagccggagccggagctggccttgctcgcctcgcctcgcatcttcatgtcaccataccacgtagaggcacgccggccgctgcactcccgccggatctccgctttgccacagctgtag

SEQ ID NO: 136751 - DNA, 792 bp, Zea Mays
atcaatcaatcaatcacccccgcgcccacggccgccaaccacccctgcctctaccacgagcaccctgcaccgccaacgcggcagcatccaccgcgaagccctgggccacgcgacgagcctgccgccctacgccacacgaccggggcaggttgcgcaagacgctcatgctgctcttccagctcgacgactccaccggcagaggcgtcgcgcgtccgtccgaggggccccaatcggcggagttccagtccgtttccgaaggaggaggccgagggggcaagcggatctattttcccccctggcacgtctctctgtccaccgatctccgccgcctcactgctcgcatcgtcggcctcacccgccgcaggcagctcgcccagatcatggcggaggtggaagcagcgcggtgtcgtgtgcgtgggggcgggttgctcaacaccatcgtcatgaacgtggttctcgagccatgcgtgtgcggcggcgacgtcgatgtcgaccgagcgctctagctgttcgaggaaatgcgtgggcccatggggtgcggcgtcgacgatgtttcctacggcatcctgctgaaggtctgcagtttctgttaatgctcacatccttaacgcaagcacaaaagttcatttggtcagttgtctgttctaagtggttgtgagtaatggtggaattgtggagataactgaagaagaacaatgtgattccgacaacataatctatcctaaaaatgtatgataaggatgcatatccactaaatctaatgaaaacagcattgatagaagggaaacaata

SEQ ID NO: 136752 - DNA, 127 bp, Zea Mays
tttttttcctttttttctattttctgttttctctttttatttttaattctgttttcaaatctaatttcagatttgatttctagcttttcaattcaactaaatgcacacatagaactccagcatggaa

SEQ ID NO: 136753 - DNA, 491 bp, Zea Mays
ataatatctttcgtagccgccgcccgccttccgttcctcagtccctcatcttctttccttcgtatccaccgcccggcgaccacactaggccccagcctcctgcgcacttctgtcgcacgcccagaccctgccgtgtgccgtcccaccgcacacttgtgctgcacgccgaagactgccatggcgccgcgcaaggtttgggtggcgcttcgaccgcgaccatcagcgaattcacagatgatttttgcgtatcaataacactagctgtacagctttgtcttccacgcccacgagctccaacctagcatcacgacaaggaagggtgagaaatagagtttggcttgtggtagtggcgttgtacagctgttgtgttgaaaatagcttagatttgattgccttgattattaaactatgctatacggtggtgatgtaacatttgcggacttagtttttttattcgacttgtttattccaacacacttttagctgatgat

SEQ ID NO: 136754 - DNA, 640 bp, Zea Mays
cagttctattgtttttacacaaatttgtttgtgatgcttcaaaccgctaatttattttttaaaaaagttgtgcaatgagcatatcacataataaatgagattcttaggaatatcccaagttgctaatgagtaaaatttcagctttgctttttaaaaaaatatgggtttaagttgttcctaacattcggacatccgtcaaatcagatgccactgcacaaatggacattatagtgaccacactgtcacgtgagctaagcaaactacagcctgcaagagctacacgtggtagcctatattcctgccttgctataattttattgtttttcttttgttaatgagtgtagtttctctggctaatggtaaaaataatctgttctataggcatgcttgaccacatcatggtggagaatgcaagtgttaaagttgcattgaatcgcattgccgttgtttctgtcctagatgcacataccctgtcagtgatgtcttatgaagtttggaggctcatacatccgtttctgttggctctctctagctatatgcatagtggagctgctaatatgcatgaagtttgggctaggtgagcttcctctttcacttgtcaaatcagtataggtattgaccggtgtcaagaagagaaggc

SEQ ID NO: 136755 - DNA, 1946 bp, Zea Mays
ggcagatccctcggctgcgcggcgtaacaacctcgcgccgtattttctctcgaacaatgatcgccgaaccgccttccgtaacaagcggaagtttgttacgccagctgtgtactccctggccgctgcattcctagcctatccctcgcggctatatagcctgagccccgatcctcatccgtcttgcgtcgccacgaattgaggagacgagcgtacgtcgtgtacaccgttgccgagagaatccaggagggagggagagaagaccacgtcgcagggagaagcgtgcgtcgtcgttgtcgaggagtgccgctgcggaccactcgccgttactctaaataccaagcactggatcgctgggtgggcgttacaccggcaaggaggccaccgtgggctggagcgccgccgggctcgctcgacgtcgaaggttgacgaatcacggtggccgaccgatccgagcgaacgacaccgattggaggagccgggtcatcaccgcggttcgcacctccatcgtgggacggaacgtctacgctgcgattgctgacgagcaagtgactgaggaacccgaagcaccgcaggttgaagattctgagcaggagctcgcagaaggcaagttgtgtccttgatcacgttcttacctaataatatttatgattctgttctcactgctgcactgtagggttaaattgatgggacctaataggttacctagttttgtttaccccacaccttgcatacaaatgaattattgggtagtcttgctatgctctatctggttttgggtgttaaactatatgtgaatcatgttcatgacttattatcactgttaactgtttatgaattatttgtggtacatgataagatcatcttgttaattggaacatagagcttaacctgagaaaacagtgctaccacaagggtttaatggtacgcccttggccaattaattaggaaaagtagggagagattaccttacccgaaaggggcaagcggggaggagttgccgcaagtatagggaggttctcgggtcgaactatctgtgatagcttttcggacgagggattcctataccccccctctgcctgaaaccgtagcgggttttctcaaactagtggaactttggaaaggcctcgtagtgctacccttccttgtctcctcggtagagatgaatgggatttctagaccccttggcaaatgggtaacatggcttgtgggtaaagatgcacaacctctgcagagtgtaaaactggtatatcagccgtgctcacggtcaagagcggctcaggactctcgcatgatttatttatggaattaaacttaacctgtcatgcatcgcattgtgggattttattattcattatgatcaaatatttaattgggttggtatatacttatacttagtaattgctaataaaatttgaccaacaaaattaaaggcaatgctcacccataaccatattctttgataagccttacactacacattacccacacttgctgagcgatgaccgtatgggagctcacccttgctataatcacaccaggtgaagagcaggtaccaccagaggaggattactacgacgagttcgatgagatctaggcgtcgtctcccagtcaactatggcgttgtggagatagttattttggttcgatctattttattatcagttattttgtaagacattatcgttatataataaaagttatgacattcgtctctatacactgagtcattgtatgtgtggatcatgatttggcgcacatatgagatgcacctggatttgcccttaaatccgggtgtgacacaaaaatagtatacaacattgatgagatcgaagccaagactcaagtagcagagaagcaaatcagggacaacgcatcttcggctgatcagctgaagcctgtcttactttgtgatgatattgtcgatcagagagtctacttcggtaacc

SEQ ID NO: 136756 - DNA, 554 bp, Zea Mays
cgaacaatgatcgccgaaccgccttccgtaacaagcggaagtttgttacgccagctgtgtactccctggccgctgcattcctagcctatccctcgcggctatatagcctgagccccgatcctcatccgtcttgcgtcgccacgaattgaggagacgagcgtacgtcgtgtacaccgttgccgagagaatccaggagggagggagagaagaccacgtcgcagggagaagcgtgcgtcgtcgttgtcgaggagtgccgctgcggaccactcgccgttactctaaataccaagcactggatcgctgggtgggcgttacaccggcaaggaggccaccgtgggctggagcgccgccgggctcgctcgacgtcgaaggttgacgaatcacggtggccgaccgatccgagcgaacgacaccgattggaggagccgggtcatcaccgcggttcgcacctccatcgtgggacggaacgtctacgctgcgattgctgacgagcaagtgactgaggaacccgaagcaccgcaggttgaagattctgagcaggagctcgcagaagg

SEQ ID NO: 136757 - DNA, 2160 bp, Zea Mays
gagtgatgaaaaggcgaagaacatgaacatggatgaaaaggtcaagatgaccctagagaaagtcagagtaagcattgccacaaacccccatatacttctgatagacagcgcacacacatttacattaaatgggaaagcagtggtgcgtgttgaagcaccctcatctatgaagaaccatgcccccattgacctagtcacgcttatcaatattaaccaaagcatgagctggccagcggcatcacaaacagagatcccatcaaggttggatctgctgaaaaatgccatgaagttcataataaggcagcttggtgatgacgaccgccttgccattgtagcattcaacgacaaggtcatcaaagagaataccactggcattttagaaatatctggcagtggtcggatggctatcgaaaaaaaggtggatgggcttgtggctatgggtgacactgcttttaaaccgagcttggagcatgctgtgaagctcctggacgaccgagcggataagaagcgtgcaggcttcatcgttctcatttcggatggtctagacggccagtccaaatggggagatgagagtatcacccccacggatcctatccgaggcctcctccgaaagtacccagtccacaccttcggtttgggcaaggctcacgacccaaaggcgcttcactatatcgctgatatatcctatggaatctattcctccatcgtcaccgacaaccttgacaagatcatcgaggcattcgccgtctgcttagctgggttcaagaccgtagtagccgtcgacgcttgcgttgacatctggtcaaatagtttgctgataacaaggatcgaccctgggggttacatactccgggggagttccggaggcatcttggttggcacgctctatgctggggaggtgaaggacttcattgtctacttttcttatcgtaccgggagttggtcggggggttactatacaattttgaatgggattaatgccagggtcacgtacagggaagcgcctggcaggcagtcgaccactactgacacttgctcggtgtcgctcccaattcacgtggccaacagctcatctcctcctgcaaacccctgcccaccctaccccatggtcctgcagcagatggtccggttgaaggtgctagacttgcttataagcgtcctgaaagaattcctggtcctgaagggggaggctgctagtgccgtccacgggaaggaaggaggagatgacccggtcttgcaggccatcgcagcgagcttgctgcagaggaagtggaaagagttcaagcagtccgatgaatcctggaaagaagccccgaggaacttcgttaacctgggaggcatcgacgaggacatcagcgccatggtgggtatcctgaagcggggcttgggtgttggatgcatccactcatggctgtcgagcaatcagatgcagcgcgcgacagctacaggcggcttgccaggggctcacatggttgcaacaggccaattccgcacgccagcgatgaacgcaatggtgcaggaggcccataggcatttggccagggaagcatctgcccatgatgcggggacatcaattgtttgcaagcgcgccgtcgagcttctagatgggataaacaagcgattcgatctctggtgcaagctggaccaggaattgccgcgcacgaaccaaccgtcaccacaccaggaagaaggccatgagtcccgtgacctcaccgccgtcctacggggggacatcaaccgagcgaggcagcatgacatatacctggctgccgatcacgcgatcaagcaatggcgcagcttcctcacatccgtggagaagacgcatggccacgggcatatatgatgaggccactggcaaccaccacagcgtgagtggcgttcagtcgatgcagactcagacatacacaattaatataagtaaataaataaatttaatgagcgagaggccgtgacaccagtccctccgatcctgagaataattaatatttgtgcgtactatcctcatcgtcaatatattggtcctttgatttcccgtgtgttcacttactattgttctctaattactagtcctgatcagttccggacgactaagctgtaataatgtatcttttcttttcttttttattaataaaagaccatatgtatatatatgcgtcagtc

SEQ ID NO: 136758 - DNA, 1284 bp, Zea Mays
atggagacactagagcatgatatattccggacctataagcggggcaggagtctagtcggcaaaaaggactggccatcactgggtacgcaaatgttcaacataaaccagtggtacatgaatgcgtgcaagaggaaggagcaattgcttgttgtcagatataagcctgagcattgtgtatctgatcttcttgattacataaatcctgaccaagagagcaaggggggatattctgagtctggaaaaaggagatactcaagcataaaggttttatctcattcaaatgaaagttcaaatggaacaagccctgagatatctccaagacattcaaatcccattataaatgaggaacaacaagttaaagagccatcaaaagatgacagtactaaaattatttctaaagctgaaaacaagttatctcataacctagagatggttggcagcctgttgaaagacctaaatcagctgtgtccaggaaaacagatgaagcattatcgcccaaccactagaaacgtttatgaccctgtttctgaaacggcaagcaagaaggttctacagaggtacacactagagaaacaggggctcttctcacgcgtctcgggcgacatcgcgctcaggatctacctcgtcggagatgatgtcaataatgaaagcgtacaggttcccgctcctcccaaccagcagctcctctcaactagcagcaggagtccgtcgccgcagccaccaccagcggagaccccgaaaggatggtcaggtccgccttcgcaccatagcagccatcggtggagcagccagtggcagccgggaacagcgctagcagcggatcaggcccaggggacgagcacaaggcacgccctcctcgcatcttccgctccatgccaacagccgagccccgccgtggccgcgcctcctccgcccggccagacggtcatcatgcccaaacccgctgcctacgcgccctccgggccctgccttaggcctggtcgagaccaagccgcctctgccagccaagatgggcccgcgagcaaagcagcgcgcggcgatggcagtcactcgaggtcttggttgtcgaagtcgtcagggaaggcattgccgaggcctccagtttggcagcgatgccgacgtagtactggccggaggcggcacccaccatggaggcgggcgtgtatttccccagcgccatggcggtggacatgggcgcggacggagttgcgggaggagggagccggcggcgtcgccatgggtgtcggctggtttgagcaccaggaggggatggcggcggattag

SEQ ID NO: 136759 - DNA, 182 bp, Zea Mays
atggtccgaatagaaatcagcgcatggtgtttccttaagttaatcctggccgctcctcctaacattaacggcccgaggctatcccttctctccccagctgagccacgcggcggcgctacacacccgcggcggccgaccaccggtgaggagtgcccgggtactctaatggatgattcccaaat

SEQ ID NO: 136760 - DNA, 847 bp, Zea Mays
agatgaatcggggctagagccctttttctcgtcactgcggcggcgccggccaacctgcttccgtcacgccctacctctccctccccacgccggccaatcttctactcatcgtggctctagctgctcctcttgccaccacactatcttccaccacagccacctacaatccactcccccatcagccaatccgctcgatccggagaccacaatggcgcctgggcttaaagctgcagcaaaatcaaccaaaccatcagaagtgccactaacagaatatgacaaattgagagccgagaatttgatgaggaataaccaaaagttgcaaagattcgatgttactaaactagcgtcaatactaaccatacttctgcaaagagcaaaggtgacactcgtgaaaaatctggatctttgtatgaggtctatgaaggtgaaggttctgaagatgaggaagtcaatcagtgtgcaacaagacaaagaaacaaattaaagagggtcttggcacatgtgcaacaagatgaacctacaagagtgactaggtagaatacaagggatttggctttaactttcagtccagaactgcaacaagtcaaaaccttaggcctctctactgccacatccacccctccacagggccagaacaactccagtgatcaagcttcttatgatgatgcaaaagtgccagacatggaggaaataactgagatgatgaatatgttgtcgtaatcattgtcctacatgggtggtgttctaatgtcatgttgcttatgtgttgcttatttctatacagttgtggtgcatatacctgaatgtgaatgtattgtctgtttatgtcatttttgcagttccatga

SEQ ID NO: 136761 - DNA, 2371 bp, Zea Mays
gttacttcttgcttcctcctcactacctgatactaccgcatcaaattaattccaggtcctcaaaacaagaaactccaccgtaccagagctgtgcttcagataagatccaaagacccttacttggttccctgcattgattttcagtcttgttgagccaaccaaggtgggcggatcatctcctcctgtggctgttgttaactgccgtattcggaaagcaggtcaagatgaccccggagaaagtcagcgtaagcattgccatgagcccccctatacttctgatagactactcacgcgcaaaaccattaaatggggcagcagtggtgcgcgttgaagcaccctcatttatgaagaaccatgcccccattgacctagtcacacttatcaatattaaccaaagcatgagctggccagcagcatcgcaaacagagatgccatctaggttggatctactgaaaaatgccatgaagttcataataaggcagcttggtgatgatgaccgcgttgccattgtagcattcaacgatcaggtcatcaaagagtataccactggcattttagaaatatccggcagtggtcggatggctatcgaaaaaaaggtggatgggcttgtggctaagggtgacactgcttttaaaccaagcttggagcatgctgtgaagctcctggatgacagagcagataagaagcgtgcaggcttcatcgttctcatttcggatggtctagacggccagttcaaatggggagatgagagtatcacccccacggatcccatccgaggcctcctccgaaagtacccagtccacacctttggtttgggcaaggctcacgacccaagggcactgcactatatcgctaacatatcctacggaatctattcctccatcaccgacaacctcgagaacaagatcatagaggcatttgccgtctgcttagctgggttcaagaccgtagtagccgtcgacgtctgtgttgacatcaggtcaagcagtttgctgataacaaagatcgactctgggggttacatactccgggggagtaccggaggcatcttggttggcacactctatgctggggaggtgaaggacttcattgtctacttttcatatcataccgggagttggtcgagtggttaccatacaactttgaatgggattgctgctagtgtcacgtacaaggaagcgccgggcaggcagtcaactgccactgactcttgctcagtgtcactcccgattcacgtgaccgacaccgtgtatcctcctgaaaacccctgcccaccctaccccatggtcctgcagcagatggtccggttgaaggtgctagacttgcttataagcgtcctgaaagaattcctggtcctgaagggggaggctgctagtgccgtccacgggaaggaaggaggagatgacccggtcttgcaggccatcgcagcgagcttgctgcagaggaagtggaaagagttcaagcagtccgatgaatcctggaaagaagccccgaggaacttcgttaacctgggaggcatcgacgaggacatcagcgccatggtgggtatcctgaagcggggcttgggtgttggatgcatccactcatggctgtcgagctatcagatgcagcgcgcgacaattacaggcttgccaggatctcacatggttgcaaccggccaattccgcacgccagcgatgaacgcaatggtccaggaggcccataggcatttggccaaggaagcatctgcccaagatgcggggacgtcaattgtctgcaagcgcgccgttgagcttctagatggggtcaacaagcgattcgacctctggtgcaagctggaccatgacttgccgcgcactaaccaaccgtcatcgcaccaagaagaaggccatgagtcccgcgacatcaccgacgtcctgcatgggaacatcaaccgagcgaggcagcatgacatatacatggctgccgatcacgcgatcaagcaatggcggagcttcctcacatccgtggagaagacacatggccatgggccggacaagtaggcgcatgatgaggccaccggcagctaccacaaaccccagaacacagcgtgagtggtgttgtgtcgatgcagactcagacatactacaccatataaataaataaatttaatgagcgagaggccctgacaccagtgcctccgccgactccctccgatcctgagaataatatttgtgcgtactgtccctccgtcctcatggccattatattggtcatttgatttcccgtgtgttcactacttttgttctctaattactagtcctgatcagttccggacgactaagctgtaataatgtatcttttattttcttttttatattaatataaaagaccatatgtgtatgcgtcggtc

SEQ ID NO: 136762 - DNA, 95 bp, Zea Mays
ttaaatctggcagcaaggaatacgaggtgaagtgtttgaaggatgggtgcccatggagagtacatgcctacaagggtagatggaaaactcattgg

SEQ ID NO: 136763 - DNA, 122 bp, Zea Mays
gggcattcgctcaccggtcgcccgaccctggggcgataaggggacctgtcgtccgaccctggaacgacagggcccctgtcccctgtataacctaaaatcagccccttcagagctcatttgcc

SEQ ID NO: 136764 - DNA, 234 bp, Zea Mays
atggccgtcggcgtcggctgccaggcaggattccctgcctccctcccttgctcggctctcccttggctcgtcctccccctgatctacggccagcagaagcccctctccaagctcgcccatggccggccatcttccatggagatcggcgcccccctgttcctgggtgaccggtgctctctagccgtcaatgccattcgtcgcgcacgcgtgttcgatacaagaccggtcgggtga

SEQ ID NO: 136765 - DNA, 956 bp, Zea Mays
gacttgaatagtttacaacgtatgattattgcttaggaccctgcactactaaatcaggggactcgcttgagtcagaaaaacttaggaaccaagttttctctctaagttactgacttcattttctactgtttatagattgcgaactgaatttaaatcaaatacttcagtattggtctctagagaggaagctctgccaaccattactaataactgagaaggatttggcaatcgcttatctttgactcaataccttatgacctcggaaaggtttgaacccgtcagggactaaagatgccaaaggttgaagaagggtcacgagcaaagagggcatttactatcctttgcaatcttcaccgttggaaggattatgataactgcaatttcatttcttcttggatatgagctccacaagaggatgagacccctctcttcgccatatgtataggacctaccttcttgacatgacctatgcatccaaaagttctgagatgacccacttgtggtttactgccatgccatgcctcatatggagttttcccttgcacacttcttggcaatattatatatgaggaggtacctagaccatctaatcagattcgtacactaattgatgctattggctatgttattccttggctaattacacatgtgaagcaagctagaagctcatcttgtacccgcaacaagttgatacctgcagcacgtggacaaagctagatggcgtggacaaagctagatgggaagcctagtataattgcaaagtgaatcagttagattctagtagttactaaaatttttaagtgatatttgtatgatattgccactttggctttgcttctttgtgaacacaattggcagttactgaacatgtttgctatcgagttagttagcttcttgatattttgccaaggccaaaagcaatattattgagggtttataatttgattttttaacat

SEQ ID NO: 136766 - DNA, 752 bp, Zea Mays
gacttgaatagtttacaacgtatgattattgcttaggaccctgcactactaaatcaggggactcgcttgagtcagaaaaacttaggaaccaagttttctctctaagttactgacttcattttctactgtttatagattgcgaactgaatttaaatcaaatacttcagtattggtctctagagaggaagctctgccaaccattactaataactgagaaggatttggcaatcgcttatctttgactcaataccttatgacctcggaaaggtttgaacccgtcagggactaaagatgccaaaggttgaagaagggtcacgagcaaagagggcatttactatcctttgcaatcttcaccgttggaaggattatgataactgcaatttcatttcttcttggatatgagctccacaagaggatgagacccctctcttcgccatatgtataggtgaagcaagctagaagctcatcttgtacccgcaacaagttgatacctgcagcacgtggacaaagctagatggcgtggacaaagctagatgggaagcctagtataattgcaaagtgaatcagttagattctagtagttactaaaatttttaagtgatatttgtatgatattgccactttggctttgcttctttgtgaacacaattggcagttactgaacatgtttgctatcgagttagttagcttcttgatattttgccaaggccaaaagcaatattattgagggtttataatttgattttttaaca

SEQ ID NO: 136767 - DNA, 890 bp, Zea Mays
gacttgaatagtttacaacgtatgattattgcttaggaccctgcactactaaatcaggggactcgcttgagtcagaaaaacttaggaaccaagttttctctctaagttactgacttcattttctactgtttatagattgcgaactgaatttaaatcaaatacttcagtattggtctctagagaggaagctctgccaaccattactaataactgagaaggatttggcaatcgcttatctttgactcaataccttatgacctcggaaaggtttgaacccgtcagggactaaagatgccaaaggttgaagaagggtcacgagcaaagagggcatttactatcctttgcaatcttcaccgttggaaggattatgataactgcaatttcatttcttcttggatatgagctccacaagaggatgagacccctctcttcgccatatgtataggacctaccttcttgacatgacctatgcatccaaaagttctgagatgacccacttgtggtttactgccatgccatgcctcatatggagttttcccttgcacacttcttggcaatattatatatgaggaggtacctagaccatctaatcagattcgtacactaattgatgctattggctatgttattccttggctaattacacatctagaagctcatcttgtacccgcaacaagttgatacctgcagcacgtggacaaagctagatggcgtggacaaagctagatgggaagcctagtataattgcaaagtgaatcagttagattctagtagttactaaaatttttaagtgatatttgtatgatattgccactttggctttgcttctttgtgaacacaattggcagttactgaacatgtttgctatcgagttagttagcttcttgata

SEQ ID NO: 136768 - DNA, 504 bp, Zea Mays
atgaaccctaaccctaaactcccttctcctcctccatgcccctcgatcgaccgattgatggaccccatgcgtgccgggggtgttattgaccatgtcatagaacccaaggttgttggggttcaatgtcggctggacaggggatggtgggggcggccaggtgatgtaagccaaatcgctttcggcctcctccagcagcgctgcgaagacgaggtgctcgaggtggcccagcgggaccacgaactggtgacggaacctgctcaacaaccacgcgcgcttgacctagcccccaccggagaccctcactgtggcctcctgagtcggatcacgcctcaccttgaactgcatcgacgcctcaacctgccggggcaaggtcacgtgccttgcggagagatatatgaggccttggaattgaggaatggtggatctgattattttgtcaagggtgttcttaagtctgagggtattatactagctttatttgccatgcactcgtattcaccatag

SEQ ID NO: 136769 - DNA, 233 bp, Zea Mays
cctggattttgttgtcgtaatggacagattgatctagccccgttagagacactaccccagtttaggaggttgtgggagtgctcagatgctgatgcgaggcacttctgtgataacattcgatttttaacggccatttctctttcacttctctatactgttgccttgacagtatgactacaaacatggattgtggtatttacacgttccgtgcacatggcatgatgtaccacaat

SEQ ID NO: 136770 - DNA, 2093 bp, Zea Mays
tgtttatttatttgctggattatttgcgctgaattatataatctagagagattataatccgaaacaaacagggcatttgtccgaggctccaagctactagtcagtcgtgactcgtgcgtacgtacgtgtgccgacaaagtgatgaatcacccaaacaaccacaccacgaacatctgacatctcatcttgatccatccagctttgcctcgatccccggtccggccggccggtagccatgtccaccgcggaagaagccgctgctggtggtggcgacgactatgaccgcttgagcgagctgaaggcgttcgacgacagcaaggccggcgtcaagggcctcgtggacgctggcgtcacgaccatccctgccatcttccgcggccatctcctatcatcctctagcagtagcagcagtactagtcttagcattatcccggtcatcgacctctcggcggcggacgcagtcgcacgggaggaggtggtcgcccaggtgaaggctgcagccgagacggtggggttctgtccgagatgctggcgtcggtgaggcggttcaacgaggagccccacgaggtgaagcggccctactacacgcgggacgcccgtcgcaaggtgcggtccaactccaacttcgatctgttccagtcgccggcggccaactggcgcgacacggtcttctgcgaggcagcgctctcggaggccctggggctgggccccgggcagtatctctttggagaagatcgattggcagtcccatgttcagctgcctcctttgaagattgaaccatttcttgttgtctagatcgctcaacacataagaactagtgtattcagactgaaactgatccctcagagctgcactgaccaatgcgaaagtaacttgcactgaggcgtctaagttcaacaaactccagcaagatcttgcaaaagagcagttaagaaacagatgttctgaagaatcaaggtgcatgttcttccttgttacggggcatggtctgtgggtaaaactccgaagatccaatcagttgaacaaaggacaagctgctcgccttgtgttggatatgtcaaggtagaatcatcaacactaccaaaacactaccttggaatttggaaacatacattggcgaagaataaacaaggaaaaaaaaactcagattgaccattgacgcatttacaaggacacgttccagagtagataactaggcgtcactccagcaggataactcagtttccccgaaatttggatgacaaaaagttttggaacttacaaaattcgtccatggcatccagaggaggaagtgtgaagggaggaagaacgctttgtccagccttcggatccatcacacctgtcgcaggtgggagcgccagcgcaggttgctgcttgtttagcttctcaatgatgtaagagaaagtcccaaaggtcaggcagctctgaatcagagtttgtggtgcacctgaaacccagtacaaaaatgtgatattgatttcaacaattactgcaccaggacatcattctaataaataaaaacaagtcagcataacaaattaacttgaacagaatgcaaacagtcaacgtatgacacggacatcaacagaatacgagtaattggaatctaaacattgatacaccataatgcataagaaacaaaccacaatcaattatggagacatcctaaggacatcaaaatgcagaattgttaagaataataaccatccaactttctatccgtgacagtcagtcaggcactaaggacatcacataagtatgcatgtttctcataaaaggaacaagtctataaaaccttctaacttttcgagggtggtatactttacctcgtcacctttaaaactagttatttagccccctcaactttacaaaaccagacaaataacccctagacaattttagttagcggttttgatgacgtgacactaatttaagtgacatcagttttgtcttttttttaattgtcttctattagtgtccaaattttatataattttacacaaaaatctataattagctattatgtgttccgtaattttcctgtaattttagaaatatcagcttactaaataacaaaaactacataaaaaaa

SEQ ID NO: 136771 - DNA, 752 bp, Zea Mays
gatgaaagtatccaagtttggaccgatttgggttgtaaaaaaatctcctctccctgctgtcctacatttctaggcaccaataaagataagtcttgggtgacgaaaaagggtatagtggtctcattcccttctgaaatatcaagtgctgcacctgttagtgcctgtccacagatggggccttatctgccttagttccctgtctacaaaaagggacaaattggatatttggctgggtgagctcgaccagattcagtgtcctggctcggcttgaatgttggcgtggtgttggtgcttgtaagccatgtatttgtgtccatgttgtgctggcaccctgggagtctttctccactgagttgtatacaagttcagagataattgattacatgttcagctaccttgagtgctgagttcagaaaagttcctcccagtcctcaagttccagcttttgttcactatttgtgtgaggtaagaagaagatgaaattcaagaagtggtttctgaagaggagtctgctttagtgcctgctcaacaagtaatgggagccatctaactggggtttaatagagggatttagacctccgtctctgcaacaaaggagaagttttattcacttatctttgggttagttacttcatgtggaggacttgaagcttagaatgtttttatatatctcttatggaaaggcttcacccttccaattattgtaataagttatgcacttcgagtactatcaggacttgtaataaatacat

SEQ ID NO: 136772 - DNA, 2208 bp, Zea Mays
atctgctccctcccctatctgttttgctgagcaaagagagtggatattttggctgctagaagtgaccaagttcagttttccttgccatgttcagaggtcccactagcccctgttgaaaatatcaacttcaaaccatatgagcctgtgttggactggtgcataagagccacgtattggagtccatatgtattgctggcaccatgggaatacacccttgctgcatgttgaacaggtttaaggggcatctgtccattctagctgcttaaaaggcaaaattcagtgaaggtcgccctccctgccttgagttccacctacagaccactgcagggtgtggagctacttgtgttctagttggtgtagcctctccccagtcatcaagcttggtctgcctagagctggcatgccaccctcgccgtgaccaggtaacttcaagggtttccttagccgagctgtacatgttttgtgctctgcataagatagtgaggctcatatgatggtgagtaaatctccttaagacagttttgatggatgttatatgaaatttggagtaaaagctggctaaagttgggctgttaagttagctgtgattgagtttgttcagttcctgaaatctgtattgcagcacatggtgctcagtttagagccctttaggcatcaaaccatgtggttttggactgaagtttctataacaaacttggagacaatgttagggggataattcttggtaggggtcatgccattgaaactacatcaaactgggagtaatggtgcctaaatgtgtgctgtcagacttattttctctgaactagattcagttaactgaaatctggaatttcactgttggtgctcagtttggagtttttttggtgaccaaatcatgggtttttaggttaggagttctataacaaagtgaaataccaaggtaaggcaaacaagtttcatgtgaatagttgggcttgttactatgaagaaattgggggaaaacctattgtaaaattctgtgtcagacttgctatattgttgttttagttaagctgaaactggacttttcagtagattttgttctactttagtgcatcatagctattgctctgtgtatttttagtcttggagtgttataccaaagtggaagagcaatacttagggaatagatttggttcagtaagtggggtcttttgtcatgcgagtttgtgagataaaaggtattgaacaaagaggagagggatggagcagcaggactgatgagatcagattcagtgtttagtggggttactgaagattttttcatccctactggttgcacttgtgtgaagggatggagataagattgtagtacatatttgaaggtgctagaggtctcactccatgatgaaagtatccaagtttggaccgatttgggttgtaaaaaaatctcctctccctgctgtcctacatttctaggcaccaataaagataagtcttgggtgacgaaaaagggtatagtggtctcattcccttctgaaatatcaagtgctgcacctgttagtgcctgtccacagatggggccttatctgccttagttccctgtctacaaaaagggacaaattggatatttggctgggtgagctcgaccagattcagtgtcctggctcggcttgaatgttggcgtggtgttggtgcttgtaagccatgtatttgtgtccatgttgtgctggcaccctgggagtctttctccactgagttgtatacaagttcagagataattgattacatgttcagctaccttgagtgctgagttcagaaaagttcctcccagtcctcaagttccagcttttgttcactatttgtgtgaggtgtaagtcttgtgatgctttttagtattttcttttcaagttgcatcagcataagcattcatgttcaaatctttacatgtagaattcccagaagaagaagatgaaattcaagaagtggtttctgaagaggagtctgctttagtgcctgctcaacaagtaatgggagccatctaactggggtttaatagagggatttagacctccgtctctgcaacaaaggagaagttttattcacttatctttgggttagttacttcatgtggaggacttgaagcttagaatgtttttatatatctcttatggaaaggcttcacccttccaattattgtaataagttatgcacttcgagtactatcaggacttgtaataaatacat

SEQ ID NO: 136773 - DNA, 716 bp, Zea Mays
atctgctccctcccctatctgttttgctgagcaaagagagtggatattttggctgctagaagtgaccaagttcagttttccttgccatgttcagaggtcccactagcccctgttgaaaatatcaacttcaaaccatatgagcctgtgttggactggtgcataagagccacgtattggagtccatatgtattgctggcaccatgggaatacacccttgctgcatgttgaacaggtttaaggggcatctgtccattctagctgcttaaaaggcaaaattcagtgaaggtcgccctccctgccttgagttccacctacagaccactgcagggtgtggagctacttgtgttctagttggtgtagcctctccccagtcatcaagcttggtctgcctagagctggcatgccaccctcgccgtgaccagaattcccagaagaagaagatgaaattcaagaagtggtttctgaagaggagtctgctttagtgcctgctcaacaagtaatgggagccatctaactggggtttaatagagggatttagacctccgtctctgcaacaaaggagaagttttattcacttatctttgggttagttacttcatgtggaggacttgaagcttagaatgtttttatatatctcttatggaaaggcttcacccttccaattattgtaataagttatgcacttcgagtactatcaggacttgtaataaatacat

SEQ ID NO: 136774 - DNA, 1212 bp, Zea Mays
gatatagagtggacaacacgcgcgcgaaaaaaaaaagccaccaacgcagctgcttctcggacacgcgcctcggagaggctcgcgtttgcgcaattgcgctgccagtgccaccggcccctgcccttccccagccgctggtcccacgcgcgtccagcccacgggcaccaccgccgcaccaggcttttagctctcgacgcgtcgccgccgaccacagcacggctagcgtgtcgattcctcccgctctcgtcgccggatccccccacccgacgcgcccacctctgagtccaatggtggcagagatccgttagggcgaggactggtcccagcttgggtcgggtctccttctccagcttgtgagatcgacactggttgacactgattgtagcacttcgtggcgccttattgggtcgcgggtgcggtttgcgctctacaaattttgggtttggtttcgctgaaccctcatgacccaagcgaagtccactcctgggaggagggagatgggccgggcgcgatcgccggaaccgctcgatttcttcatatggactgtcgaggatgttggattatggctggaagaaataaatcttggtggctacaaacaagtatttcaagaaaatagtgtcaatggagaatatctagaaagcttgtccatgtttactactgagcagattctgcgctttattaggcggtgccatatgaaatggggagactttatcacactgtgcaaagagttgaggcgcattaaagtggcgtgccttaaaggggagcaagaagtccgcaggccatggtgggcgccggcatgcctctccgtagttttcgtgagggcagccaagcagaacaggaagtcccgtgttgtctcgttgaagctggaaccataatgcttgtcaagcacttcgaaccgtcgtgcgctagcctaaagtgaattcccagaagaagaagatgaaattcaagaagtggtttctgaagaggagtctgctttagtgcctgctcaacaagtaatgggagccatctaactggggtttaatagagggatttagacctccgtctctgcaacaaaggagaagttttattcacttatctttgggttagttacttcatgtggaggacttgaagcttagaatgtttttatatatctcttatggaaaggcttcacccttccaattattgtaataagttatgcacttcgagtactatcaggacttgtaataaatacat

SEQ ID NO: 136775 - DNA, 1075 bp, Zea Mays
gatatagagtggacaacacgcgcgcgaaaaaaaaaagccaccaacgcagctgcttctcggacacgcgcctcggagaggctcgcgtttgcgcaattgcgctgccagtgccaccggcccctgcccttccccagccgctggtcccacgcgcgtccagcccacgggcaccaccgccgcaccaggcttttagctctcgacgcgtcgccgccgaccacagcacggctagcgtgtcgattcctcccgctctcgtcgccggatccccccacccgacgcgcccacctctgagtccaatggtggcagagatccgttagggcgaggactggtcccagcttgggtcgggtctccttctccagcttgtgagatcgacactggttgacactgattgtagcacttcgtggcgccttattgggtcgcgggtgcggtttgcgctctacaaattttgggtttggtttcgctgaaccctcatgacccaagcgaagtccactcctgggaggagggagatgggccgggcgcgatcgccggaaccgctcgatttcttcatatggactgtcgaggatgttggattatggctggaagaaataaatcttggtggctacaaacaagtatttcaagaaaatagtgtcaatggagaatatctagaaagcttgtccatgtttactactgagcagattctgcgctttattaggcggtgccatatgaaatggggagactttatcacactgtgcaaagagttgaggcgcattaaagtggcgtgccttaaaggggagcaagaagtccgcaggccatggtgggcgccggcatgcctctccgtagttttcgtgagggcagccaagcagaacaggaagtcccgtgttgtctcgttgaagctggaaccataatgcttgtcaagcacttcgaaccgtcgtgcgctagcctaaagtggagaagttttattcacttatctttgggttagttacttcatgtggaggacttgaagcttagaatgtttttatatatctcttatggaaaggcttcacccttccaattattgtaataagttatgcacttcgagtactatcaggacttgtaataaatacat

SEQ ID NO: 136776 - DNA, 1095 bp, Zea Mays
ctgtccattcggtgttatctctgggtatgtgtggtactaacccgatctgtccgttcactactcgattagggtctccttctccagcttgtgagatcgacactggttgacactgattgtagcacttcgtggcgccttattgggtcgcgggtgcggtttgcgctctacaaattttgggtttggtttcgctgaaccctcatgacccaagcgaagtccactcctgggaggagggagatgggccgggcgcgatcgccggaaccgctcgatttcttcatatggactgtcgaggatgttggattatggctggaagaaataaatcttggtggctacaaacaagtatttcaagaaaatagtgtcaatggagaatatctagaaagcttgtccatgtttactactgagcagattctgcgctttattaggcggtgccatatgaaatggggagactttatcacactgtgcaaagagttgaggcgcattaaagtggcgtgccttaaaggggagcaagaagtccgcaggccatggtgggcgccggcatgcctctccgtagttttcgtgagggcagccaagcagaacaggaagtcccgtgttgtctcgttgaagctggaaccataatgcttgtcaagcacttcgaaccgtcgtgcgctagcctaaagtggtatggaagctgttttcgctctgggtgcatcatgctcaactagtctgtcttatcccttgttagttcttcatatataaggtttggaacagtaatctgttgtagacaaagaaagaaacatataggtgatttgacgactagggaattggaggggatctattgaggaaatcctcttgctattcaagggattttccatggattctcttcaattcctggtcaccaaaccagcccataatatgcagatgtttcctggctccctacaaggtctgctctctgctctttcaaatgctctttcaaatcttcctgagtcgttatggtgcatgcatttttctaaaagaataaaagattggtcaagaagacccgtttccatttttctcctaggtgatgtaattaacagaggatgtttggtttgaagaatcaatttattctagataaggtggtggtgt

SEQ ID NO: 136777 - DNA, 1361 bp, Zea Mays
gatatagagtggacaacacgcgcgcgaaaaaaaaaagccaccaacgcagctgcttctcggacacgcgcctcggagaggctcgcgtttgcgcaattgcgctgccagtgccaccggcccctgcccttccccagccgctggtcccacgcgcgtccagcccacgggcaccaccgccgcaccaggcttttagctctcgacgcgtcgccgccgaccacagcacggctagcgtgtcgattcctcccgctctcgtcgccggatccccccacccgacgcgcccacctctgagtccaatggtggcagagatccgttagggcgaggactggtcccagcttgggtcgggtctccttctccagcttgtgagatcgacactggttgacactgattgtagcacttcgtggcgccttattgggtcgcgggtgcggtttgcgctctacaaattttgggtttggtttcgctgaaccctcatgacccaagcgaagtccactcctgggaggagggagatgggccgggcgcgatcgccggaaccgctcgatttcttcatatggactgtcgaggatgttggattatggctggaagaaataaatcttggtggctacaaacaagtatttcaagaaaatagtgtcaatggagaatatctagaaagcttgtccatgtttactactgagcagattctgcgctttattaggcggtgccatatgaaatggggagactttatcacactgtgcaaagagttgaggcgcattaaagtggcgtgccttaaaggggagcaagaagtccgcaggccatggtgggcgccggcatgcctctccgtagttttcgtgagggcagccaagcagaacaggaagtcccgtgttgtctcgttgaagctggaaccataatgcttgtcaagcacttcgaaccgtcgtgcgctagcctaaagtggtatggaagctgttttcgctctgggtgcatcatgctcaactagtctgtcttatcccttgttagttcttcatatataaggtttggaacagtaatctgttgtagacaaagaaagaaacatataggtgatttgacgactagggaattggaggggatctattgaggaaatcctcttgctattcaagggattttccatggattctcttcaattcctggtcaccaaaccagcccataatatgcagatgtttcctggctccctacaaggtctgctctctgctctttcaaatgctctttcaaatcttcctgagtcgttatggtgcatgcatttttctaaaagaataaaagattggtcaagaagacccgtttccatttttctcctaggtgatgtaattaacagaggatgtttggtttgaagaatcaatttattctagataaggtggtggtgt

SEQ ID NO: 136778 - DNA, 1145 bp, Zea Mays
gatatagagtggacaacacgcgcgcgaaaaaaaaaagccaccaacgcagctgcttctcggacacgcgcctcggagaggctcgcgtttgcgcaattgcgctgccagtgccaccggcccctgcccttccccagccgctggtcccacgcgcgtccagcccacgggcaccaccgccgcaccaggcttttagctctcgacgcgtcgccgccgaccacagcacggctagcgtgtcgattcctcccgctctcgtcgccggatccccccacccgacgcgcccacctctgagtccaatggtggcagagatccgttagggcgaggactggtcccagcttgggtcggatgttggattatggctggaagaaataaatcttggtggctacaaacaagtatttcaagaaaatagtgtcaatggagaatatctagaaagcttgtccatgtttactactgagcagattctgcgctttattaggcggtgccatatgaaatggggagactttatcacactgtgcaaagagttgaggcgcattaaagtggcgtgccttaaaggggagcaagaagtccgcaggccatggtgggcgccggcatgcctctccgtagttttcgtgagggcagccaagcagaacaggaagtcccgtgttgtctcgttgaagctggaaccataatgcttgtcaagcacttcgaaccgtcgtgcgctagcctaaagtggtatggaagctgttttcgctctgggtgcatcatgctcaactagtctgtcttatcccttgttagttcttcatatataaggtttggaacagtaatctgttgtagacaaagaaagaaacatataggtgatttgacgactagggaattggaggggatctattgaggaaatcctcttgctattcaagggattttccatggattctcttcaattcctggtcaccaaaccagcccataatatgcagatgtttcctggctccctacaaggtctgctctctgctctttcaaatgctctttcaaatcttcctgagtcgttatggtgcatgcatttttctaaaagaataaaagattggtcaagaagacccgtttccatttttctcctaggtgatgtaattaacagaggatgtttggtttgaagaatcaatttattctagataaggtggtggtgt

SEQ ID NO: 136779 - DNA, 1429 bp, Zea Mays
ctgctgtggtgaagagtagcaggttcggcggccgggagggggcagccaacacgacgatggagcggttcggcctggacggcggcggtggcggtggcgagctgccgccggggttccggttccacccgacggacgaggagctcatcacctactacctcctccgcaaggccgtggacggcagcttctgcggccgcgccatcgcggagatcgacctgaacaagtgcgagccatgggagctcccggacaaggcgaagatgggggagaaggagtggtacttctacagcctccgcgaccgcaagtacccgacgggcctgcgcaccaaccgcgccacggtggccggctactggaaggccaccggcaaggaccgcgagatccgcagcggccgcaccggcgcgctggtgggcatgaagaagacgctcgtcttctaccgcggccgcgcccccaagggacagaagacgcactgggtcatgcacgagtaccgcctcgagggcgcctacgcctaccatttcctccccagctccacaaggcaggacgagtgggtgatcgcgagggtgttccagaagcccggcgaggtcccacctgcagcccgcaagcaccgcctcggcgcccttagcagcactaccggcaccgccgcgggcgattcctgcttctcggactctacctcggcctccatcggcggcgcgtcgtcgtcatccacgcctggcccgctgttcgcgtcggcggccgccgccgtggccaatgccggcgccgccgacggcgacaccagctcctactgcggcggcgctgccaaccatggcaacctggtcaccggccgtgagctcgtgccctgcttctccactgccaccattaacggccccctagttgccgccgcgctcggcatcgggcagccgtacaacgcagccccgctgccgttcgagcagcagccgccgcctccggccttcctgccgagcctgcgttcccttcaggacaacctccagcttccaccgttcctctcagcaggcggtctgggcggcggcggggctctccactggctccccgccggcggcatggaggtcaaggtcgagggccgctcggcgccaccgcagatggctgtcggccccggccagctcgatggcgctttcggctggagcttctagttcttcgctgcactacatggttgtgcccatctatctagctagtagtggtttcttcatgcgttgtacgttaagcttggttaatcaactgctagtaagtgactgggtcgtcgttctaagtaatgtagtaactgtgttgtagtctctcatctaactgcagtagcagctttatttgttcgtggattagatgtctcatgtgtgccgtgtacgaatcgaagcgtactagtaggagtttgtactcatagttcgtgcagtggatgctagctacaggctacaggtccacacggccgtttccatgg

SEQ ID NO: 136780 - DNA, 1358 bp, Zea Mays
aaacaaaaaaagggccttcacttgactccacagccacagctagctgctgtggtgaagagtagcaggttcggcggccgggagggggcagccaacacgacgatggagcggttcggcctggacggcggcggtggcggtggcgagctgccgccggggttccggttccacccgacggacgaggagctcatcacctactacctcctccgcaaggccgtggacggcagcttctgcggccgcgccatcgcggagatcgacctgaacaagtgcgagccatgggagctcccggacaaggcgaagatgggggagaaggagtggtacttctacagcctccgcgaccgcaagtacccgacgggcctgcgcaccaaccgcgccacggtggccggctactggaaggccaccggcaaggaccgcgagatccgcagcggccgcaccggcgcgctggtgggcatgaagaagacgctcgtcttctaccgcggccgcgcccccaagggacagaagacgcactgggtcatgcacgagtaccgcctcgagggcgcctacgcctaccatttcctccccagctccacaagggacgagtgggtgatcgcgagggtgttccagaagcccggcgaggtcccacctgcagcccgcaagcaccgcctcggcgcccttagcagcactaccggcaccgccgcgggcgattcctgcttctcggactctacctcggcctccatcggcggcgcgtcgtcgtcatccacgcctggcccgctgttcgcgtcggcggccgccgccgtggccaatgccggcgccgccgacggcgacaccagctcctactgcggcggcgctgccaaccatggcaacctggtcaccggccgtgagctcgtgccctgcttctccactgccaccattaacggccccctagttgccgccgcgctcggcatcgggcagccgtacaacgcagccccgctgccgttcgagcagcagccgccgcctccggccttcctgccgagcctgcgttcccttcaggacaacctccagcttccaccgttcctctcagcaggcggtctgggcggcggcggggctctccactggctccccgccggcggcatggaggtcaaggtcgagggccgctcggcgccaccgcagatggctgtcggccccggccagctcgatggcgctttcggctggagcttctagttcttcgctgcactacatggttgtgcccatctatctagctagtagtggtttcttcatgcgttgtacgttaagcttggttaatcaactgctagtaagtgactgggtcgtcgttctaagtaatgtagtaactgtgttgtagtctctcatctaactgcagtagcagctttatttgttcgtggattaga

SEQ ID NO: 136781 - DNA, 881 bp, Zea Mays
tcttttaaatctgcaaggtggtgtctgtttttattcaacaggaggtctacatggtggtgtctataggtctcgatgtcaagcctggttccactgttaagtgtgagcctggatatcgttttatgctgcacctttcccaggctgctcttggggaatcgaagaagagtgataatgcgctattgccttgatgtatgtcaaaattgatgatcagaaacttgccattggaaccctctctgttgacaagaacccacccatacaatttgatctggttttcgataaagagtttgagctgtcgcacacatcaaaaactaccatcgtcttcttcattggctacaaggttgagcaaccattcaaggaagatggaatggatcttgattctgaagatgaagacgaggagctgaatgttccagtagtcaaggaaaatggcaaagctggtgggaagatacagaaaagtcaagaaaaggcagttccttgaatttttcaaaaagaaagatatttttaataatgacctcggtggaccctatgcatttcttgagccgccttttgttcaaagaccccttctatataagatacatgcaaggagaaaaaagaggattcagataactgtatcactttctgcaagtacaaatacacaagcacagaatatctttccccttgatgtacttttagctagacctaccagtaatatttcgcttgagggcattctccgatatatcgagcgggatgatgcttggtggacgtgtacatactaatattaatcggtctcgaagcttccgatacactcagttctcacatgaacgagtcggatggacctccctagaaaccaaacacccctgaatcgcagtcatcatcagcgaacgacaatccgtgtgctgttgtgatgt

SEQ ID NO: 136782 - DNA, 879 bp, Zea Mays
caggattgggctgacatgttactaaggatgtatgttagatggggagagaagcagcgttataagacacgagtagttgagaaatcacctggtgaacaggccggtataaaatcagcaactgttgaactagaggggagatatgcttatggctatctctctggcgagaaagggacacacaggattgttcgtcaatcaccatttaatgctaaagggcttcggcagacaagctttgctggtgttgaggttatgcctcttctaccagaggaatccatggctgtggacatacctgaagaggacctggagataagcttcacaagagctggaggtaaaggaggccagaacgtgaacaaggtggaaacggctgttcgcatggttcatattccaactggaattgcagttcgctgctcagaggagaggagccagctggccaacaaaataaaggccctcagccggctcaaagcgaagctgctggtgatcgccctggagcagcgtgcatcagaaatcaagcagatccgtggagacattgtgaaggcagagtgggggcagcagatacgcaactacgtcttccacccctacaagttcgtcaaggatgtcaggacagggtgtgagacgtcggacatcactggcgtaatggatggagagctagatccctttatcagagcatacattaagtacaagctaactgcggcagctaccagctgatttttgttgaggagcatagcgatgagtgatacctacatccattgtattatgttgtagtatgaggttttcatctctcttgatttagtataatttcatagcactagcaatctagcattgtatttattgatctaggaatcgaagtggaaacatggcaaacatgggttgccattctgtgttctg

SEQ ID NO: 136783 - DNA, 2873 bp, Zea Mays
aacgaatagacccaccgcatctcaacatcctctcctcgtcttctcccaacgccgccgcagcgttcttgtcgggctccggtcaggtgaagtatgctgatgaacttcagggactggatctcgtaccggctcggttcctcgctgctgtccgccaggccgttcgcgctttcccccggtgctgatgacggcgcctccgagggtgatgctcatggtacagcacacaatgactttgtagatactgttactgccaatacattttcttctaatgatatgcgggcgtcagaggtcacagccaactctggtagtggtgcaatttattctggtattgttcaacaagatgatgataataagaagtcagatccactgatgaaagtcgaggcgcttcaaatcaagtttctgcggttagtatacaggactggagtgtctcccagtgctgatgtagttgcacaggttctgtacagattgcagcttgcaaatttgattaaagccagtgaatcagatgcaaggagaacaaacctagctatcaacaaagctagggttatagcagcacagcaggaagcaccgggtgggcctgatctggatgtctcaatgcaaatccttcttctggggaagtctggtgtgggaaagagtgccacaataaattcaatttttgatgagaggaaggttgctactgatgctctggttcctgctactcataggataaagaaaattgaaggaacaattaaaggaataagagtcacagtcatcgacacacctggcctggtgtctcattaccatggccaaaggaggaacatgaagattctgaattctgtcaagcacttcattaagcgatccccacctgatatcatcttatactttgagcgtttggaccatattaacagcagatacagtgattacccactgctgaagcttatgactgacatattggggtctccaatgtggttcaatactgtccttgtaatgactcactgttcctcatctcctcctgaaggaccagatggttacccattggaatatgatacttatacgcgttactgcaagaatgtggtgcagcgtcacatccaggctgcagtttccaacacgcagttggataatccatttgtgctcatagacaatcatccaatgtgcagacgaaacaccaagggtgaaagggttttaccaaatgggcaggtatgggtatcagaactgctgctgctgtgtggggcaaccaagttgctgacagaagcaaattccttgcttaagtttcaagatagcttcctactgtcacaagcaaacaccaggctgccttcgctgcctcatcttctttcttcacttcttaagcctcactcttcatccagttcagatgccattgacagtcaattgacagaaatgtcagatgaggaggatgaatatgatcaactaccacccttccgcattctaaagaaatctgaatatgaaaatttgaccaatgaacagaagtctgcatatcttgacgaactggactaccgtgagactttgtacctaaagaaacagtggaaagaaggaatcagaaggaaaaagcttactgaagctcagagtgatgaagttggtgatgattatgatgagagtgcatccccagagattgtgcacatgtcagatatggacattccactaagttttgactctgattatcctgtgcatcgttaccgtcacattataactgatgatcagttgtttagaccagttttggatccacaaggatgggaccatgatattgggttcgatgccatcaattttgaagcatctcaagagttgaaaaagaatgtctctgcggcaattacaggacagatgagaaaggacaaggaagacatgtatatccattcagaatgttcagtaagttacaatgctcagagaggctgctccttgatggggggtatggatatgcagacggcaagcaaagatttggtctgtactgttcatggggatgccaagttccacaatctgccttggaacagtattggaggtggcatttctgttactaagtttggcaacaagtactttgctggggctaagttagaagactctgttaccattgggagacgagttaaactggtagccaacgccggtaggatgtctggctgtgggcaggtggcacatggaggtggtgtggagattacagcaagggggaaagattaccctgtgagggaagggagtgtcactgccgcggtctctgctttgtcatttgaaaaggaaaccgtaattggggccaaccttcagtcagacttccgagtgggccgtggatcaaaaatatcagtcagcgctaacctaaatagtagaaatttgggcaatctcagcgtcagaactagcacatcagaccacgctgagatagctttgataacagttgtctccttgatccagttcattcttaggagaagatcagcagcagataataaagatgagcaacagattggcaccaatttggatgactaaataacaggtacaaggaaaagacaatgattgcatgctttagatgctcatcgtcatcaggatttgctgcaattatgttaacctaaggcgcctgtcaatctagagttccaatttgtacagaattcttgtatatcaattatgagtataaataatgtatgaaggaggcattttccatgagaagagctccttctgcccataagcgatttttttaggttttaaggatgtaatcagacgccgttttgagttttaacatcacacaaagtttatttagtttattacttgcataggaatgtttatttacttaccaagcttctgttttccaattttaaaaggtctcagtgatgagatttcactgctcagagacggatacaacctttatctgtataaatgaggaaactataacatcacatggtttttgttttgcaatagaa

SEQ ID NO: 136784 - DNA, 2901 bp, Zea Mays
taaacgaatagacccaccgcatctcaacatcctctcctcgtcttctcccaacgccgccgcagcgttcttgtcgggctccggtcaggtacgtcgagctcgggccagttgcgatgtccctgcttggttttattatacgggagattcggcagtccgctacgaggtgaagtgggagaacggggaggagggtgaaagattggggtttcctcgctctttaacttggggcagatttgttctctgattttcttctacccccctctgcaggtgaagtatgctgatgaacttcagggactggatctcgtaccggctcggttcctcgctgctgtccgccaggccgttcgcgctttcccccggtgctgatgacggcgcctccgagggtgatgctcatggtacagcacacaatgactttgtagatactgttactgccaatacattttcttctaatgatatgcgggcgtcagaggtcacagccaactctggtagtggtgcaatttattctggtattgttcaacaagatgatgataataagaagtcagatccactgatgaaagtcgaggcgcttcaaatcaagtttctgcggttagtatacaggactggagtgtctcccagtgctgatgtagttgcacaggttctgtacagattgcagcttgcaaatttgattaaagccagtgaatcagatgcaaggagaacaaacctagctatcaacaaagctagggttatagcagcacagcaggaagcaccgggtgggcctgatctggatgtctcaatgcaaatccttcttctggggaagtctggtgtgggaaagagtgccacaataaattcaatttttgatgagaggaaggttgctactgatgctctggttcctgctactcataggataaagaaaattgaaggaacaattaaaggaataagagtcacagtcatcgacacacctggcctggtgtctcattaccatggccaaaggaggaacatgaagattctgaattctgtcaagcacttcattaagcgatccccacctgatatcatcttatactttgagcgtttggaccatattaacagcagatacagtgattacccactgctgaagcttatgactgacatattggggtctccaatgtggttcaatactgtccttgtaatgactcactgttcctcatctcctcctgaaggaccagatggttacccattggaatatgatacttatacgcgttactgcaagaatgtggtgcagcgtcacatccaggctgcagtttccaacacgcagttggataatccatttgtgctcatagacaatcatccaatgtgcagacgaaacaccaagggtgaaagggttttaccaaatgggcaggtatgggtatcagaactgctgctgctgtgtggggcaaccaagttgctgacagaagcaaattccttgcttaagtttcaagatagcttcctactgtcacaagcaaacaccaggctgccttcgctgcctcatcttctttcttcacttcttaagcctcactcttcatccagttcagatgccattgacagtcaattgacagaaatgtcagatgaggaggatgaatatgatcaactaccacccttccgcattctaaagaaatctgaatatgaaaatttgaccaatgaacagaagtctgcatatcttgacgaactggactaccgtgagactttgtacctaaagaaacagtggaaagaaggaatcagaaggaaaaagcttactgaagctcagagtgatgaagttggtgatgattatgatgagagtgcatccccagagattgtgcacatgtcagatatggacattccactaagttttgactctgattatcctgtgcatcgttaccgtcacattataactgatgatcagttgtttagaccagttttggatccacaaggatgggaccatgatattgggttcgatgccatcaattttgaagcatctcaagagttgaaaaagaatgtctctgcggcaattacaggacagatgagaaaggacaaggaagacatgtatatccattcagaatgttcagtaagttacaatgctcagagaggctgctccttgatggggggtatggatatgcagacggcaagcaaagatttggtctgtactgttcatggggatgccaagttccacaatctgccttggaacagtattggaggtggcatttctgttactaagtttggcaacaagtactttgctggggctaagttagaagactctgttaccattgggagacgagttaaactggtagccaacgccggtaggatgtctggctgtgggcaggtggcacatggaggtggtgtggagattacagcaagggggaaagattaccctgtgagggaagggagtgtcactgccgcggtctctgctttgtcatttgaaaaggaaaccgtaattggggccaaccttcagtcagacttccgagtgggccgtggatcaaaaatatcagtcagcgctaacctaaatagtagaaatttgggcaatctcagcgtcagaactagcacatcagaccacgctgagatagctttgataacagttgtctccttgatccagttcattcttaggagaagatcagcagcagataataaagatgagcaacagattggcaccaatttggatgactaaataacaggtacaaggaaaagacaatgattgcatgctttagatgctcatcgtcatcaggatttgctgcaattatgttaacctaaggcgcctgtcaatctagagttccaatttgtacagaattcttgtatatcaattatgagtataaataatgtatgaaggaggcattttccatgagaagagctccttctgcccataagcgatttttttaggttttaaggatgtaatcagacgccgttttgagttttaacatcacacaaagtttatttagtttattactt

SEQ ID NO: 136785 - DNA, 108 bp, Zea Mays
cggattgctcgtctggaaggctcgcgtggagaagcacaaatacatacttatctggagaccattcgtctttctaggcgtcgaggaggaggcaaggggttaagagggggg

SEQ ID NO: 136786 - DNA, 519 bp, Zea Mays
gcccaccacccaccacccagcagcatggcgagcatcactgtgacaaagaaatcccagtccttcgttgtgccatcgtccacggcaacgacgactccgactaccgatacgctcgagctgtcggccatcgaccgcgttccgggcctgctccacatggtgcggtccctgcacgtgttccgcggcaaggacgccaccgcccgcagcgatgctgctgctgctgccagcagcaggccggccgatgtgatccgcgcggcgctgtcccgcgcactggtggactaccgcccgttcgccggccgtttcgttggctcactgtgcaccggggaggcgagtgtcgagtgcaccgacgacggtgcgtggttcgtggacgctgtcacggactgcagcctcgacgacgtgaacggcctcgactacccgctcatgatctccaaggaagagctgctgccggctgcagaggaaggtgttgacccaaccagtattccgatgatgatgcagatattgttggtcagagtttcaaaactttaa

SEQ ID NO: 136787 - DNA, 387 bp, Zea Mays
ggaacggcacagaacaagcgcagccagatgagcgagggtgctactgccacctcgccggcgctggagaccgaggtggcgcctttgccggacaacgacgacctccatcgagagatctttctccgtctaccgccgctcccctcgtcgctgacccgcgcctccctcatctgcaagcgctggcgccgcctcatctccgaccctgccttcctccgccgcttccacgtccaccacagggcgcctcccctcctcggcttcttcgccgacgaagatggcgacatcgagttcgtgcccacgctgcgccggcccgaccgcacccccggcgcagccatggcgaatacgttgaccgagttgggaaaggaagaccagacgcaacgctcacaatttggatga

SEQ ID NO: 136788 - DNA, 229 bp, Zea Mays
cccctagaaaaacatgcctaggaatttaagataaatttgaaacaacgcacctccatagtgcatggtacagctatacatcgccaaaattgttgatgttcagactcgaacaaaaaattcacatagaaacaacaaattgcaggtgtatatgcactgaagacctaatcccacctgaaatctgcttttcgtacgagtttttccaaaatgagatgcatgagacataaatattgga

SEQ ID NO: 136789 - DNA, 109 bp, Zea Mays
acacaacaggtttcaggttaccaaaaagcaacatacacagcatagaaaataggtttcaggttaccaaaaataccacaaacagatctcacaccagcctacacaggtttca

SEQ ID NO: 136790 - DNA, 1632 bp, Zea Mays
tttggcactaaaaattactttagtcatctatctcgtctataaatagacatcttgtgcaccacacctacacccacacctacacctacacattacagccagtactgctgtcacctcacttagcaaagctaatacgtatgtcatagcagcttgccaccatggcgagcatcaccgtgacaaggaaatcccaatccttcgtcgtgccatcgtccacgccaactccgacgaccgagacgctcgagttgtcgcccatcgaccgcgttccaggcctgcgccacacggtgcgatccctgcacgtgttccgccgcaaggacgccgccgcctccgccgcccactacgatgctgctgccgccggcaggccggccgaggtgatccgcgcggcgctgtcccgcgcgctggtggactaccgcccgttcgccggccgtttcgtcggctcactgtacgccggggaggcgagcgttgagtgcaccgacgacggtgcgtggttcgtggacgctgtcacagattgcagcctcgaggacgtgaacggcctcgactacccgcttatggtctccgaggaagagctgctgccggctccagaggaaggtgttgacccaaccagtattccgattatgatgcaggtcacggaatttgcttgtggaggatttgtggtggggctagtcgcagtgcacacccttgctgacgggctcggtgcagctcaattcatcaatgcaatttctgagtttgcccgtggagtagttaaacctacaatagcacctatatgggcacgggagttaataccaaacccacctaaaatgcctcctgggccaccaccatccttcgagtgcttcgggttcaaacattttgttatggatgtggcagttaacaatattgcacatgtcaagagtgaatactttcaaaccaatggacactattgctctacatttgatgttgccattgccaaggtttggcaagctaggacaagggcaatcaagtacgaaccaaatttcaaggtgcatgtttgcttctttgccaacactcgccacctcctcacacatgtgctacccaaggttggtggcttctatggaaattgcttctatccagtgactgtcacagcaactgctgaggtagttgctagttcaagattgcttgatgtgattaggatgataagggatgggaaggctaggcttcctttagagttttccagatggtccacgggcaatgtgaaagtagacccatatcaactaacattcaagcacaatgttctatttgtgtccgattggacacggcttggattctttgaagttgactatgggtggggtgtaccaaaccatatcctccctttcacttatgcagactacatggctgtagcagttcttggagctccaccgtctatgaagaaggggactcgaataatgacacaatgtgtcgaggaggagcatctcgtggacttcaaggccgagatgaaagccttcttttaggtcctcggattttacttgaaagttcaaacattatgcatttatgtgttcaattcaaataaaaatggtgttgacttgtacccttattagccatataaaacataacatttatattttcatagattttccacgaaatatatatgtagaaaccagtgacccatggaaaccatgtacaata

SEQ ID NO: 136791 - DNA, 153 bp, Zea Mays
atggccacggctagcggctgtagccggccggctttcgtgcgcagaggcctggccctgccttgccgcgtccgcgggagcggttggtggctgcgcaaggatctcgggagggagacgaagagttatgcgatggtgggtgggtatatccgtatatag

SEQ ID NO: 136792 - DNA, 1446 bp, Zea Mays
ctgacccactctcgtcgcacgcaacgcaagtagcaaagcaggacccatcctctcccatctctcggtctccccatcccaacccgccgccgccgccgccgcttctcccgtctccagcgcccacagcgccattgtatccgcggggcgagctgagtcaccaagctggtctagggcccatccatttggaaccctcgcgagaagcaaagcggacggagcgccagcgttcttagatcgattgctcgccaggctgttggcgaggagtcgtcaaccctcacggcagccatgtctgtggagctcatcctgtggcttttctccttcgtctccgtcatggtcctcatcggcctcaccgcataccagcttatctgtctgtcagatttggagtatgattatatcaacccatatgattcatcgtctcgcatcaacgctgtggtgctgatagaatactcactccaaggggccctgtgtgcttctttcctcttgacattgcattggttcccgtttctagtcatgacaccagtaacatactaccatgtcaaactgtatttggctcggaaacatcttgtagatgtcactgaaatttttagacaattaagtgacgagaagaagtacaggatgatcaagcttgccttctacttctgcctatttattataactatttacaggcttgtaatgacagctgtgatgttgtttattgatgaggacataaatttggcagaaactaggagtatctagacttcgccaccaacttgtcatggggatggagcagagttgtagcttgaaccagggagaccacaactcaatgccttgacttagttgtgagaaacaagatcagtttgtgccctgtagctggaggagctaacctggtactccttttaccctaaatcgtaagttgttttagttttttctagatgcatagcttttacgatgtatcctccagatgcatagtaaaagttatatatttagaaaaaacagaacaacttataatttggaatggagtattcatttcatccatcagattgtgatgtacaatgaattcccatagtttggtccatcggtaccatgtttgtaaattgggcagtcaatgatgtgcatcactgcaggatgaacgcacgtttggtaattgttgtgcaattctttgtacttgtggacaagtgctgtattctacacattgtttgcatacagacgatgtgtggttggtgtcataatttaccactaaacctttggtaaactgagcctgtcataactgcgagaaaagattggtaaaaaaactaagttgggatagaatgctaataaagtccggcaccctgtggttatggcaacacctgcaaaaaaaggtgctatagaatgactaacatgtggttactgaagattacgaacctagatattgagttgaactaaaacacgccaaataaaaattttgaactaaaagacgacaaataagaaaacacg

SEQ ID NO: 136793 - DNA, 1368 bp, Zea Mays
ctgacccactctcgtcgcacgcaacgcaagtagcaaagcaggacccatcctctcccatctctcggtctccccatcccaacccgccgccgccgccgccgcttctcccgtctccagcgcccacagcgccattgtatccgcggggcgagctgagtcaccaagctggtctagggcccatccatttggaaccctcgcgagaagcaaagcggacggagcgccagcgttcttagatcgattgctcgccaggctgttggcgaggagtcgtcaaccctcacggcagccatgtctgtggagctcatcctgtggcttttctccttcgtctccgtcatggtcctcatcggcctcaccgcataccagcttatctgtctgtcagatttggagtatgattatatcaacccatatgattcatcgtctcgcatcaacgctgtggtgctgatagaatactcactccaaggggccctgtatttggctcggaaacatcttgtagatgtcactgaaatttttagacaattaagtgacgagaagaagtacaggatgatcaagcttgccttctacttctgcctatttattataactatttacaggcttgtaatgacagctgtgatgttgtttattgatgaggacataaatttggcagaaactaggagtatctagacttcgccaccaacttgtcatggggatggagcagagttgtagcttgaaccagggagaccacaactcaatgccttgacttagttgtgagaaacaagatcagtttgtgccctgtagctggaggagctaacctggtactccttttaccctaaatcgtaagttgttttagttttttctagatgcatagcttttacgatgtatcctccagatgcatagtaaaagttatatatttagaaaaaacagaacaacttataatttggaatggagtattcatttcatccatcagattgtgatgtacaatgaattcccatagtttggtccatcggtaccatgtttgtaaattgggcagtcaatgatgtgcatcactgcaggatgaacgcacgtttggtaattgttgtgcaattctttgtacttgtggacaagtgctgtattctacacattgtttgcatacagacgatgtgtggttggtgtcataatttaccactaaacctttggtaaactgagcctgtcataactgcgagaaaagattggtaaaaaaactaagttgggatagaatgctaataaagtccggcaccctgtggttatggcaacacctgcaaaaaaaggtgctatagaatgactaacatgtggttactgaagattacgaacctagatattgagttgaactaaaacacgccaaataaaaattttgaactaaaagacgacaaataagaaaacacg

SEQ ID NO: 136794 - DNA, 886 bp, Zea Mays
gcaaaagattcttcgttcatatccaaaagacagtactagctagctagactggtagttcatacatgcacatcaggaacagcatgtctagctaggtagattcatacaatagccactggactgctggtcattttgaagtggacgacacgtcgtgaacgtagacgatgatcagtggccgaccctgacgtcttggttttcgcctctcatcagctccggccacacctccatggatatctcgtagagctcctggttgcggtatttgcgaatgcgcctgccgccgctggcagcgaacttggcagcggccttcacgtactttttcttgagcttgtacaccttatcagaaagctcgatggcatccacgccgcggcggacgaggccgccgttcgcgcagagcttcttgagaagcacggagatctgggggagcacgcccatgttgtccctgcggagctcggctagggtagcgaggaccttgcgctcgtcgtcgatgccccactttcggtaccgcgccttcctcttgggccggctcgtggcctcgtcatcgccgccgccgctggagggaggggctggggctggggcgacgccgcctggtgcgcggacggacaaaacagagcgcggtgacgggcactgctgccgcgcagccgccgtcggcctccgccggctcgtggcctcggctccgctgccgtcggcgaatgaagcagccgtgacgacggtcgacgaaaggacgggcacgacggatggcgccgtcgagtgtgggcgccggttccgcggcgcgtccctggcctggtcgccgccgccacggctggcgcatgggtctgggaggatggcgacggagcgagaggagaaggtcgccgaggacaggtcgacgagggtgttgctaacaggttgatcg

SEQ ID NO: 136795 - DNA, 1811 bp, Zea Mays
cactcttcctccctcctgcctgcaagatcccgcgcttcgcagcgcagcgcgttccattccagcttccatctgccgcctcccggcccccatcatggcgccctcgtcgcctcaactcaaagaaccgtcgtccgcggtgaagcaggcgtcgacgggcccggcggcgctgcccgagcgcacaaagaggaagacgtcgccctcgctccccgaggcctcgggtgccacacagcagccggccaagcggaagccgccgccgttccagcgcgcgtggtcccccggcgacgaggtccggatcctgaaggccctcgccacttaccgccgtgaacatggcgggcgcctgccaacgccggttgagctcttcggcgcgctcgatggcagcctcgagaaggaaggcgtcggagcaaaggagctcgccatcaagcagcgcagcttcaagcgccgctacgaccgggacgtcatgaagaatgctccgcccgccgataaacacgaacgccgcctctacctcctctccaagcacgtatggggacgcgttccccctcccagaccaccggttgccaaggtcggaagtgctactcaagcgaagggcgccggcgcccaagcaagcaaggccgatgcccaagcccaagcccaagcaaagagcgccgaccaccagtccggcaaggaggcgctgaagcccaaggccaagactttggatgagatgcgcgagctgtatccttacctggttgatgaggccacgatccttgtcgaaccggcggtgctggagagagtgctcctcaacattggagacatcgacgcccaggtgttggacaagaagatcaggaaggcgaggaagcagctcgccgatgccatcacggaatcggcaaggattaacaacatggaagtgcctacaatatttctgtttacatccagcaagcttcaaccagaaaagttaagagtggaaaatgagaataatcttttggttgatcatttggagaaaatggatgatgtggatatttgtgctaaacaacgattggcaagagtggaacgtgaagtaaaggagttgagacagactgtaatagcttaccagtctcaggcaaagggtataatatgtgaatcagccaagggtggccttcaatcaattgtagctgaaaatcagactccagccaatatactacaaaagaagacagaagtaccaaatgacttgatccataaaaagaatgcggcggttacatcaaaatatcattgtgccgttccccacaatgttcctcccaataagccgaaaatgcaaggggtgatgttgccaccatctaaggcgtttcctggtatgcctaggaagattgacaaaagtccgactccacgcaaagcgatttggaaggggcccatatgttgactaggttctaaaggcgacgaccaggtttcccttgtaacatagctctactgtgtgtttgactaggttttcattttggtccaagctgcacatgatccagcacagcagtatgtatggctcggacggttctgggtctcataagactaccgcaccctgtagtgggtctatattttggtgaaatatctgcaaaaaggttatctagatgttgcagatgtcctgtcaaactgatgacattattagcaacgagtgtcctctggtgcacatgcactaagattgttgaactctggttgtagtcctagttaagcaatgaagctcacatctcatatgctgatataattgtggactaggattactatattctgttgtcaatcaaaaccaatacaagcaatcttaggagcagatctaaactggaattctcaaataaaggtgccaagggactcaggtttcg

SEQ ID NO: 136796 - DNA, 653 bp, Zea Mays
cacacaaaatcagcacttttctttcttccttttggctagttaccttcaatttttgtctcaaaaccagcattgaaacataggctaccccaataactagataaataccccatatattatactacctcagtcctcgaatatttttgaactaaaacatgacagataaaaaaagaacggagcgaataacattattaagctgcaagcagaaacaccaaaagcgcttgccaccgcgttactgttttcccatgtcaacagctgacagcaacttcctgcaccttagcgacaaggtttcccagctccgtcactccagcctcctgcgatttctgcaacagacacacagcttcgaattacatatatagagaagaagtcgcttggcttctttctgtgtttctctagaaaaagaaaacaattggatttctactaggctgcattgacagacaaagtatgtcagcacagttcagtcaaatttactaccaacaaccaccgaattcatcctaacataaagcaacccaatggcatattggcatgtgatgcaacgccacggagtatttgcttgtaagttgccgacgcataataatgaaattcaaagagtgaaaatgctctcatctaggtccttcaatttttcatgtggttcgttcagagtgggaacttagagg

SEQ ID NO: 136797 - DNA, 1547 bp, Zea Mays
aatctcactcttcctccctcctgcctgaaaaaatcagatcccgcgcttcgcagcggagtgcgtgccaatccagcttccatctcccgcctcccccacgcccccggccccccatcatggcgtcctcgtcgcctcaactcaaggaaccgtcgtccgcggtgaagcgggcgtcgacgggcccgacggcgctgcccgagcgcaacaagaggaagacgtcgccctcgctccccgaggcctcgggtgccacacagcagccggccaagcggaagccgccgttgttccagcgcgcgtggtcccccggcgacgaggtccggatcctggaggccctcgccacgtaccgccgtgaacatggcggccgcctgccaacgccggttgagctattcggcgcgctcgatggcagcctcgagaaggaaggcgtcggagcaaaggagctcgccatcaagcagcgcagcctcaagcgccgctacgaccgggacgttatgaagaatgctccgcccgccgataaacacgaacgccgcctctacctcctctccaagcacgtatggggacgcgttccgccaaccagaccaccggttgccaaggtccgaagtgctactcaagcgaagtgcgccggcgcccaagcaagcaacgccgctgcccaagcccaagcgaagagcgccgaccgccagtccggcaaggaggcgctgaagcccaaggccaagactttggatgagatgcgcgagctgtatccttacctggttgatgaggccacgatccttgtcgaaccggcggtgctggagagagtgctcctcaacattgaagacatcgacgcccaggtgttggacaagaagatcaggaaggcgaggaagcagctcgccggtgccatcacggaatcggcaaggattaacaacatggaaatgcctacaatatttctgtttacatccagcaagcttcaaccagaaaagttaagagtggaaaatgacaataatcttttggttgatcatttggagaaaatggatgatgtggatatttgtgctaaacaacgattggcaagagtggaacatgaagtaatggagttgagacagactgtaatagcttaccaggctcaggcaaaggtagaaagtataccacgcaataatatttcatcagtaaagggtataatatgtgaatcagccaagagtggtcttcaatcaattgtagctgaaaatcagactccagccaatgtactacaaaagaagacagaagtaccaaatggcttgatccataaaaagaatgcggcggttacatcaaaatattattgtgccgttccccacaatgttcctcccaataagccgaaaatgcaaggggtgatgttgccaccatttaaggtgtttcctgtcggtggcaaggagcatgatgctagagaccttgtattcattgacaaggcaaaactgcttgagcgtgagtatgttgcgtgtcatggcaaagttaggcagcatcgtgtagttggtgatgatgtaagcagcgttggagaagtgagggttgaggatttgaagattgcaccacttcgggcgggtgtcctagatccatag

SEQ ID NO: 136798 - DNA, 448 bp, Zea Mays
agcatataagatgtgagcttcattgcttaacaaggattacaaccagagttcaacaatcttacagtggtactagtgcatcagaggacactcgttgctaataatgtcatcagtttgacaggacatctgcaacatctagataaccttttttgcagacatttcaccaaaatatagacccactactatatttacagggtgcggtagtcttatgagacccagaacagttcgagccatacatactgctgtgctggatcatggtgcagcttggaccaaaatgagatgcggcaagacatacccagcaagaaatgtagacgatgctgggcagaatcaacaaagcacgatctcgctgccacatatttttttttatgaaacacatagtagagctatgttacaaaggaaacctggtcgtcgcctttataacctaatcaacatatggccccttacaaatctg

SEQ ID NO: 136799 - DNA, 969 bp, Zea Mays
ttcctggcatctccctgtcttcttgctccctctaccgagctccatccaggatagctcttccactgctccctcacgctagcagcagaccaccggcgcccttcttccacctccggtccgtagggacctcctctggtccgaacgcaagcaggtgcccttcctccactgcgcccctcctcccatcggcacaggagcttcccatggccggcgcacgcccctgctcgtgccttcacggccgtcggggcatcggctccgagctccctccctgctccatggccgctggcccctcgcccctgctcttcccccttggtcgcgcgcaggagctccctaggccgacctcggccaggtccatgtccatggcgtcgcctccctctgccctccctgtgctgtgcgctctactcgccagggccggagttctccatggtcgagctccttgtcctccaggccactgggttgcaggaggccgcacccttcttctccaagaccggcgcttgttttccccctgcgtcttcttccatgcacacctgcaggccgccggaccttgctccatctggatttcgcgccatatgctccttcaccaatgccatggagagatctgtcaacagagcaatgctaggcctcgccttggaccttgggttcgcaccagcgagctcacctgtaggttcagccatggctcctgcaatgtctagttcctccctcgcctagcaccacatcggctcgcctcacctcagcccgactgggcgccgacacccagcgagctccttcgcaagcagactatggcctaggatgctgagctcgcctagatcacttgctcctgtgtttcccctcatggcgtgccctgcttagtccagcatccaatcctctctgctgtggtcgagctcaccttcactagctcgcgaccactatccctgtgccgctggatgccattcctctctgttctgcccttgccatccgcgcccccagtgtctggac

SEQ ID NO: 136800 - DNA, 414 bp, Zea Mays
atggctttgcgtggcgctgctcttaataagggagccgttgttgccgccatctgtgtggctctggtggtgtgcatggtggggaaaccagcggaagggtcgcgaacttgcggcatccatcgctgcatctccgaatgcccttccaagtgcaacaagaaagctgcgacctcttgcagcggcgccggtggtgcggatgaagggaagtgcaagatcaactgtggcatgggctgcaaagccagctgccctacatgcgactgcggcagcgaatgcgaccgtcactgcagcagcaccccgggacctacgtacactgcttgcatgtctatggtcttcgcagggtgcaaggactcctgcgtaaagggctgcaagggtgaaaagctaggcgttatatatggctgctggctgaagcttgcgatctga

SEQ ID NO: 136801 - DNA, 122 bp, Zea Mays
gccacttttttttcttcaaattttctttggataaaattttattttctaagatcaaccaaaggaaaacttttatcctctgtgggattttcgctttccagataaaacccaatatgattttttga

SEQ ID NO: 136802 - DNA, 867 bp, Zea Mays
gctctcacaaagaccgggggccctaggcgccccaggcagccgtcgtcggcgcggacggtatccgcgcgcctctggtgcgcccctcagggcgctgcgccgcaacggcctacgagctccccatctgacccatcttgaaacacggaccaaggagtctgacatgcgtgcgagtcgacgggttcagaaacctgagatgcgcaaggaagctgacaagcgggaggccctcacgggccgcatcgctggccgaccctgatcttctgtgaagggttcgagttggagcacgcctgtcgggacccaaaagatggtgaactatgcctgagcagggcgaagccagaggaaactctagtggaggctcaaagcgatactgacgtgcaaatcgttagtctgtcttggatataggggcgaaagactaatcaaaccatctagtagctggttccctccgaagtttccctcaggatagctggagcccaaacaagttcgatcgggtaaagccaatgattagaggcatctggggcgcaacgccctcgacctattctcaaactttaaataggtaggacggcacggctgctccggtgagctgtgccacggaatcggggtctccaagtaggccatttttggtaagcagaactggcgatgcaggatgaactggaagccgggttatgatgccaaactacgcgctagcctagaacccacaaagggtgttggtcgattaagacagcaggacggtggtcatggaagtcgaaatccgctaaggagtgtgtaacaactcacctgccgaatcaacttgccccgaaaatggatggcgttgaagcgcgtgacccacacccggccatctgggcgagcgacatgccccgatgagtaggagggtgc

SEQ ID NO: 136803 - DNA, 1384 bp, Zea Mays
atggcacggccgcgtggtcaccttcagctggcggccggagctccacaggatcgccggcaagaccctctccgaaaagacaaggttcatccaaagcatggcctggggcacgaacaccgagttccaggcacaaaaatttcccaggaatcaactactctgtattctgtgcaaattgataaggttccaacaatcttgtacataaatatgaagactcagaagatctccaaacttcttagtaagcgatttacaccaccggtttggaataagcacaaggaaccgagggaagtgaacatgtttgttgatctactacttcttgaggtgctcgctgataaaggctatgatggtatggctacagatgtatggccctatggcataatcttgtttgttcttatggccggatacttaccctttgatgatgccaatctgatgagactgtacaaactgatctgccatgcaactttttcttgcccaccatggttttcttctggagcaaggaagattattaagcacattatcgatcctaaccctgacttagccaagcagtgggcatgctacaatctgctgaaggagcacagggacattcaggttctctaccataatgatagagtgaaagatagcccctctacaaatggcagtaaagagcatcagggaagaaggccaacactagattgcaaacgggctcggttcgctatgaaggatactggaagatggcaccggcgaagaggaagcgcacaacagggctggaaatctggtgctataactactttaggccaaggtggtagcgacttgattgctataaccattggtaaagccttgggactgagagaaattcaggttttgcatccacaatcgatgagacctgctagagaaggtgatattccagttatggttaagaattcatacaacgctaaagctccaggaaccattattacaagacaaagggacatggataaggttgtactaactagcatagtgctcaagtcaaatgtcactatgttggacattgtgagcactcggatgcttggtcagtatggttttctagcaagggaacttgaccatgtagttgaagagcttgagaaaatagcaatcgttcgtctacttcagcagagggcgataatttcacttatcggaaatgtggagcaatcgtctctcatattacaaaagatgggacatgtgctgaggaaaagtgggattaatgttcagatgatctcgcaaggagcgtcaaaggttaacatgtcgctgatagtccatgatagcgatgcaaaggaactcgtagaagcccttcatcaggcgttctttaaagacgatgtcctggcacaagtcgaagcggagaacctactcgtgggctgatcaacgtagggtttgctgggtccaggcgtgttatctg

SEQ ID NO: 136804 - DNA, 579 bp, Zea Mays
atgggggaggagaggggatcggccattgctatggaggagaagcgagctcgcgcagggagggggcgctcgagcgggctccgcgccccaaaaacacctgggcaggggcgagttcggcagcgcccagggactccaggccgcgcgctagggctgggcagcggcggggctcagacggccgggagtggagttcgtcggggcactggccgccggggctgtccgcgacagtcgcgcgctggcaacgcgtcgcaggccgccgggccacgcgctcgctgctgcgcgagctcgctgccgcgctgggcgagccgctggctggctgcgccgagctcgcggaaggggcaaggcagggaggttggacgcgctgagggagcaggggctggggcgcgagcatggctggctgcgccgcgctggggctgcagggacgccgcgccggggcacgggacagacgcgcaggggtgggctgctggtcgcgcagggaacggtcgctgtcgatcgccgagaacagatgggcggggagtaggggaggaaggagatggaggggactcaccgatgcctggtaaccgccgggtgcctattcctgcatga

SEQ ID NO: 136805 - DNA, 699 bp, Zea Mays
gttctacttttcgttgaccctatggatgaaatggctatccagaatctgagctcctacaaggataagaaatttgtggacattagcagggaagatttggacttaggtgatagcaatgaggaaagagaggagataaagcagcagttcagccaaacctgtgattggataaagaatcgcttgggtgacaaggttgcacgtgttgacatatctaatcgtctgaggtcatcgccatgtgttcttgttgcagcgaagtttggttggtcagccaatatggaaaggctaatgagagcacagactatgggtgatacaaccactttggatttcatgcggtcaaggaaggtttttgaaataaatccagaacatgagataatcaaggccttgaatgcggcatgcaggaataaccccgatgatcctgaagccctaaaggctctggatgttctctttgaaactgctatgatttcaagtggcttgtcgcctgacaaccccgccgagctcagcgggaagatctacgagatgataaccactgccatcgcaggcaagtggtcctcacagtcgcaggcgcaacctgacaacacaactctgcagcacgcggcacctgggaggtcggatgagccgcttgaaggtgaagtggtggagccagagcccgttgaggctgatcagcataaggatgacatatcggcacgaattgtcctcataacttaa

SEQ ID NO: 136806 - DNA, 610 bp, Zea Mays
atgtcagcctggccacgtcctaaatcagcatgtcaggtataagagggaaccttgcataaaacccctcacgttatcgcgcacatctcctgatcctcgttcctctccgccccgcttgcgccgcgcctccgcccccgtctcctgtgagatcagctccggcggcacgcggatatgactacttcaaggcgtcttgctgacaggaagagtgcaaagttccagaagaacatcacaaagaggggttctgtgcctgagaccacggtgaaaaagagcaatgactaccctgttggacctatagttcttggattcttcatttttgtggtcattggatcatccttgttccagataatcaggacagcgacaagcggtgggctggcctgaattcactgagctaaaaccagaaatttatctgtccgtgagctgggaggcagtatctgtgttgtgtagcaaacttgttcatggatatgtagtgcgaatgtcactactgttctgtttgcagtatcaaaagagtttaaactgatgttgtaaccatgcaaaggctgaaaattttaaagagtatgggagaaaccttaatctaaagaagagtggctctgcaattcccgggctggatgatttc

SEQ ID NO: 136807 - DNA, 759 bp, Zea Mays
atgtcagcctggccacgtcctaaatcagcatgtcaggtataagagggaaccttgcataaaacccctcacgttatcgcgcacatctcctgatcctcgttcctctccgccccgcttgcgccgcgcctccgcccccgtctcctgtgagatcagctccggcggcacgcggatatgactacttcaaggcgtcttgctgacaggaagagtgcaaagttccagaagaacatcacaaagaggggttctgtgcctgagaccacggtgaaaaagagcaatgactaccctgttggacctatagttcttggattcttcatttttgtggtcattggatcatgtaagcaccgcaccaagcctttactagcctcccttctgttttgaaactatatctcttgcattttcgagatgtttgtactttttattagtcttttaagcttatgctaatttaagtgtcaacacgtcgtaatgcatagctcttcagcttttaagaaccatgtgaccaaccatttatggataatgttttcttcatgaacaggttgtataaatgtagcaagtttgattcattcgggagagttaatttaagtgattctctgtttagttgttaatatcagtaccttgtgattgatgaaatctgatattttttagccatcactaccagtgcttgaaatctttttgggtgtatgtatgacaagttatctagcaattatgttggatagagcatgttgatttttgtaccattattcgctgcatgtttggatgggacttatg

SEQ ID NO: 136808 - DNA, 854 bp, Zea Mays
gaattcatgtatttttcttggtacttaatctgctgaaaaataatttatttttttcatatcttctctggaatgatgttctgtcttacttgtctctgaagcatactctatattcaggacgctttgctccagttggatgtttaagggaagttccagtgagggggatcgaagggcacgaaggatacattagattaattgagggaaagggagatttattagtccacaaaataatatgtacgaggagatttattagtccacagaataatatgtaccaggactgcaagatcgttgaaggccagttatacacaaagaggttgaatgaaaaacagatcacatcgctgctaaaggttcaagtaggtaatactccagagtacataactgacaggaagttaggtaaaggtggttttggtcaggtctatgttggtcgaagggtttctggtggagctgcccgcactggtcctgatgcatatgaggacgcattgaaattagagcatcgaaacagtaaaggatgcaattatggccctccatatgagtggcaggtttataacactctcaatggttgctatggcataccatcggtccactacaagggtcgtcagggcgactactatatacttgtgagttcacttcttattactctatttctttgcagctcaacagtttttattcacttatatttttaggtaatggatatgcttggtcccagcctttgggacgtgtggaattcaatggggcaggcgtaagtatcttccattcttttttatgatatcttttgtcactcatcagcttttagactaaatggtccaactatcgtaaacaggatgacttcaaggtgtgtacattccttttgctcttct

SEQ ID NO: 136809 - DNA, 340 bp, Zea Mays
agaaaacctcgtgtatcttacagcggatgctgagacagtgcttgatgatctagacatgtcgaaaatatacatcatcggtggcctggtggatcgaaacagatggaagggcataacactgaagaagtcagctgagcagggaattcaatctgcaaagcttcctattggaaactacctaaaaatgtcaagttctcaggttcttacagttaaccaagtgtttgagataatgttgaagtttgtggaaacaagggactggaagacggcattcttccatgtgattccacaaaggaagcgaggagaagctgagaccggagattaatggtgaaagcattcctttaaagac

SEQ ID NO: 136810 - DNA, 818 bp, Zea Mays
actccgctccctgctccctcaagccgccgtcgccccaccttcctccctctcccctcgcatctctctctcaggaactcggccgcccgacacaccgccccaccgagcagcgcccgcgaccccggcgcccagacccgcgcagcaccgcgcccttgaagccgatcgcgcgccccgtgcagcccgaccgcccctgcctccatgccactcgccgagcatgaccgcgcagccgtcaggagccgagacgcgcccaggtcaccgagccccgcacccgaccccgaagatgagcagccacgccagccgccaagcgcgacgccctgcctccggcaccgaagattccgcgaccgttcctctgcgttaatggagttttattgtagtcgttacttcttcattgaacagacgccatcaatggcaccttgaagccttgaaaccgacggccatgtctctctcccttcctcggcgtctctctccctcccatcctctataaattggcgccgagctcctctcttcttcctcccacagccgagctcgcccttctctcactccctcctagttctcttcctcgccactgaagcccaaagtcgtcgccgtcgtgcctcgccggagttcgtctacgctgtcgctgtccgccctgccgttcgtggagcctcaccggagcagtcgtgcccgtcgccgtcgaatgccctcaccggagccccgcacgacatcaagaacccctgccacgtacctctgctgcttgccaccatgtcgcgcaacccctcgccgaacaccttccctgcacgtgattaatccaaggttgaggataaaccactgatttattttct

SEQ ID NO: 136811 - DNA, 1838 bp, Zea Mays
gaaaaaatcgcaaatcccttccctccaccatcgatcgggcttccatggccgccaagcgccgcgcccggcagccaagaaccgaagattccaaggagttgggcctcaatgggggcaacgaaggttccgacgaggaggaggaggagagcagcaagtccgacgcgctgaagcgagccgagcaaccctcgccgccgtcgccggaggatgctgaggccgagagatccggcgaggcctctccgcagaggagcaagccgcgcggttgggttgctatgaagaccaagacgacgacctccaagcgggtcaagaaaccctctccggcgtcggagaaggaatatgaggcgggggactcgggtgatttgtcaccggcgagcgacccgctacccgacaacatcgttgacgccggcgacaacaagatgcccgcgacgctgaagccgggcaagaagagctccccgacgccgcagcaggaggaagagcgcccggagaagcgtgctgcgggatctgatggcgagaccgtggccacgtcgtccccgcagcgcaagaagaaaagtaagaggtccgtcgataaggacaggcgcaaaaagaacaggaatcagattagaaaggcgttgacccaagaagacgaggaccatgacacggtgatggcagagcaagagcagagcaacacctcactgccacaggacgagcacgccgcccgtgaagaggagcaagaggagaagatggcacagcaagagcatgccggtgacacttcacacccgcatgacaaggacatgcgcagcgcccatggagaggagcagcaggatgcaaatcaagagcatgcggatgacacctcacccgcagaagacaatcacagtgtggatgaagaggagcagcaagtggagccgatcccacagcaagagcaacctaatgacacctcacccccacaagagaagaaccgagcccaggaggatgaggagacaggagctcaagtgaatggcaaagccttggaggggaggaatgctccatcaaccaagttgcgcagttttgagtcagagaaaaagccagcggtcgagcgatcatggtcctacgatgacgagctcaagatcctcaatgccttggttgagcacgcccagtcccataacggttctttgccagactcgtcgcatgttttggccaatctcacctttgacaaaattgatgccaatgaggacaagctcactgacaagatccgcaagcttaggacacggtaccgcaggtggcttttacaaggctacacatcttctgtttctggtagtcagttgtttaagctgtctgaaattctctggggccaagctgatgaagatgaacaggttgagccaacatctagggacttcagtgtagtatcaaaactgtatcctcacctggccaaagaagtcaaagcatatgccgaaacgcacagctcgggtgacttaatcatgggaatggtcatgaccatatgtgataagaaggcccgcgatcttgacgctaagtgcaagaagcaacagattgaaacattcaagctggagttgggccaagcaaacctaaccaacgaattgctctctgcactttcaagtcagacccatgtgaaattctagtaaaggtctctgctatcttttgttttagtgtaatgagtagacgtgctgtcattaggttaatgtgggaccaagaaccttcttttggggtactggaaaactcttatctgttaactagttagttgcttagctttgatgtctgtttctgcatatggaagtagctgttacagctcgatggtggaaaacagtactttaacatttaagtatcatgagcttagtgatctaatcagactgcttgtgtgatttattggtttt

SEQ ID NO: 136812 - DNA, 300 bp, Zea Mays
atctctactacctattaagacggtaaggggtaggctgccccattccgtgttctgccattcccattccgtcctcactgcaaagcccattcccattcccagctgcctgtctttctcattccccgtcctcactgcaaagcccattcccattcccagctgcctgtctttctcattccccctccctgcaaagctcattcacatttccattcccggctatcacgtgtctttctcattccccctcccacaaagcctattcccattcccacatgcatcccacgcctagctaaaattaaattaaaaaaa

SEQ ID NO: 136813 - DNA, 1413 bp, Zea Mays
aaactcgaaagggacaaagcagcgagcggcgccgggttccccctcccttcctcgcccctgatctacgccgatcgaaggccgggcggcgatgcttccttgcctgcacctctcggtccaacacacagattagatcagcgtcgaggacgtccgctgctgctccctgtggctgcggttttgcagcataagaaatatagctacacacagctcaatgcttgtcaggatcgatggcagatagggagcatcgaacagtatttgtcacagtggggacgacatgctttgatgctcttgtcatggcggtagattctccagaagtgaagaaggctttattgcaaaaaggttatagtaatcttcttattcagatgggccgaggaacatatgttccattgaaggtctcaggagatgctacccttcaagttgatcatttcacattttcaccaagcatcgctgacaatatgagaacagcttccctagttatcagccatgcagatttagcactggcaggttcaggaagcatatttgagactctgcgactcggcaaaccactaatcgttgttgtaaatgaagatttgatggacaatcaccagagtgaattagcagaagaattggctgaaaggaagcatctcttctgtgcacgcccacaaacattgggagagaccatccgggcaatggacctagagacactggttccttatgagccaggggatgccaaaccagtcgtcaccctgatcaacagatttcttggctttccagttgattgacgaatctattcggttgttcttcaatccatgtggattagatggtattgcgtcggtttaattccatagcaagtcaaaatacatcctaaacccactcaatccactccaatccatatggaatcatgtctaaacgaacaaggtctactcctagaccttgttcggttatttcaattccatgtggattggagtatattggaatggattgtgatgaattttgatttgctataggtttaaaccgactcaataacactcaatccacatggatcaacagtaaaacaaacaagcccttaatgagtctagttgatataaaatggattaactgacatggaaatagcagaccgttctctttgcaattttcatccattaaggcgttagctttattgcagtggccataagtcctcaacctataaggatgtttatattttcatcaaattatttaaggagtcaattcttctggtggtatgcttttgttcgttgacatgtgaagacggtttaatctcaacatgtactattggttctgttttctttgaaacagctcatggaggtatggtatccatgtgtttgtaggagtaaaaatgcatgaatgtatgcgagtgttttaagtagactatctataaattcctaacattttaagacagcagaacagtcagtttggttc

SEQ ID NO: 136814 - DNA, 1419 bp, Zea Mays
cgagcacgccggaagcggtcgaaactcgaaagggacaaagcagcgagcggcgccgggttccccctcccttcctcgcccctgatctacgccgatcgaaggccgggcggcgatgcttccttgcctgcacctctcggtccaacacacagattagatcagcgtcgaggacgtccgctgctgctccctgtggctgcggttttgcagcataagaaatatagctacacacagctcaatgcttgtcaggatcgatggcagatagggagcatcgaacagtatttgtcacagtggggacgacatgctttgatgctcttgtcatggcggtagattctccagaagtgaagaaggctttattgcaaaaaggttatagtaatcttcttattcagatgggccgaggaacatatgttccattgaaggtctcaggagatgctacccttcaagttgatcatttcacattttcaccaagcatcgctgacaatatgagaacagcttccctagttatcagccatgcaggttcaggaagcatatttgagactctgcgactcggcaaaccactaatcgttgttgtaaatgaagatttgatggacaatcaccagagtgaattagcagaagaattggctgaaaggaagcatctcttctgtgcacgcccacaaacattgggagagaccatccgggcaatggacctagagacactggttccttatgagccaggggatgccaaaccagtcgtcaccctgatcaacagatttcttggctttccagttgattgacgaatctattcggttgttcttcaatccatgtggattagatggtattgcgtcggtttaattccatagcaagtcaaaatacatcctaaacccactcaatccactccaatccatatggaatcatgtctaaacgaacaaggtctactcctagaccttgttcggttatttcaattccatgtggattggagtatattggaatggattgtgatgaattttgatttgctataggtttaaaccgactcaataacactcaatccacatggatcaacagtaaaacaaacaagcccttaatgagtctagttgatataaaatggattaactgacatggaaatagcagaccgttctctttgcaattttcatccattaaggcgttagctttattgcagtggccataagtcctcaacctataaggatgtttatattttcatcaaattatttaaggagtcaattcttctggtggtatgcttttgttcgttgacatgtgaagacggtttaatctcaacatgtactattggttctgttttctttgaaacagctcatggaggtatggtatccatgtgtttgtaggagtaaaaatgcatgaatgtatgcgagtgttttaagtagactatctataaattcctaacattttaagacagcagaacagtcagtttggttc

SEQ ID NO: 136815 - DNA, 2649 bp, Zea Mays
atgcccccgcttcccctccgcgctcgcactggccctgttcccctcgcccgcacaaaccgtcccatccgcgagccgtgcatgggacatctgcataccgcatccgccccatcccctccccgtccagcgtcccctcccttcgcccctgctccctccatagtcgtccaggacaccgctgctttcttcgacgagcagcatgcagccggcgcttccctgtcgaaattcgagcagcaactcagccgcgacggctcggtcgccgcgtcaacctcccgcgcccgatcccgtgagaagcgcagggacggcaagccgccggagcgcttcaggcgcaggcgggagccagagctccaaaaattatgggacgataatcaggttctgaaaagggtttctgaaaggaacactgggactgcttttgttctccacgatggccctccctatgctaatggtgatcttcacatgggccatgcgctcaataaaatcttcaaggattgtataaatcgctacaaggtattaactgccattcatatgactattgctgttgatgctgaagaaaaagcggcagcgctcggcgagcgccgcgacatcgccggtgcgctcggtggccaggagcatgacggcgccgtgcagcgcctcgagctccgcgcggatcgccttgtggaagtaaaggaatatcagcacgggcgtctcagtcgccgaggtccccgccggcgtcgggacggggaccgcagcatcaccgccacgagcgtcccctcgcttctgggcatgggcgtcggcgtcgccatcccactgcgccgacggctgtttattgaagagatagaattaggagttctaacttcctacttatggatagctgatgtcacatttcatagaattgtcccggtgaactataggaaccttgcttttgtacatgtcctgctcggtgctgttccattccctagcgatgttctccggctaaagacgcttggagtttgtggtgtggtgacacttaatgaatcatacgagaggcttgttcccacatccctatacgagattagttttgcacaggcactcgtttgtggtatgctggttctactccctggatatgagcccttgggcctccagttcgggcaacaagcatatggcaaagagaaggcaaaggatccttcagagttcatcactcatcgagccaaagattttgtgtcaagcatgaaggacattgaaacccggtttatgtgtatagttgaagcaggaaataaggtttctagaatgcttgaaaccaagaagatcttgcttgacatatgtgctaaaataccaggtcactgcattgctgatagtgaggagcagaaagttcatgttattgctgcttcacaacacaaccacggtgtcgtgtggtcgtcttatgcaagaaaggccagggccactgcgcgcttcaccagagagagcaaggctacaaccaagaggtgtgctggaattatacatctccaaaagctagctagaagaccttggtgggtggtgagcttggaggaggagctcatggctgcttcttcctgcatagcttgcaataatggcagtaccgatgagaaggaggagaagcggaagtgtgatctcgtcgggtacgaagcactgcctgagtggctcaaggacaacgagttcatccatggctactaccggtgcgagtggccgatgaaggagaccgtcctcagcatcttctccatccacaacgagaccctcaatgtttggtcgcatttgctagggttcctgctgttcctgtgcctggcaatctttacagcaatggtgatcccaaggaatggcagcagcaggagcagtaacagcgctgcataccagctgggagatctggtggagatggccaacatgacggtagcgctgaggcacgaggcacttgcagcgtgtttcctgctgccaccatctgctgctgctttgtctgaagatggtcagcagcagatcccaaccagctgtccacccaacacttcctcctcccatcatcatgccatccagatccagagcagcactggtacggcggccaccgtggacgccggcaccgccgccgaccccatcacgcggtggccgctgttcgcgtacctggtcggcgcgatggtgtgcctgctgacgagcagcgtgtgtcacctgatcctgtgccactcggagcgcacggcgtacgtgacgctccggctcgactacgccggcatcgccgcgctgatcgtcacctctttctacccgctcgcctactactccttcctctgcaacccggcgctgcagcggctctacatgggctccatcacggcgctgggcgccgccgccgtgacggcgtcgctggtccccgcgttccaggcgcctgagctgcgcccgctccgcgccgcgctcttctcctgcatgggcgcgtcgggcgccgtgcccatcgcgcacaagctgctcctctacggcggcacggcgcccggcgccgtagcctcggcggggtacgaggcgctcatgggcgtgctctacggcctcggcgtcgccgtgtacgccgcgcgcgtccccgagcggtgggcgcccgggaggttcgacctagtcggacatagccaccagctgttccacctcttcgtcatcgccggcgcgtacgcgcactaccacgccggagtcgagtacctcaagtggagggacgtcgacaaatgctga

SEQ ID NO: 136816 - DNA, 603 bp, Zea Mays
ccgccaatccaccttcgccgccaacgcccgcacaccccgccgccaacgcccacacgccccgccgccaaccgcaagccgcgacccgtacaccacgaaccccgcccgccatcccgctgccaactgcaggcgcgaccccgttagccatcccgcggccaaccgcaaggcgcgaccgccgcgaacccaccagtggagagaacgcggagagagagagaggggttgccgccgcgacgattcctcggaatgttgccgttcttgcttcggggaaggcgagattggagttcactggcgcgtgcggatcgtgtgggtgtgcgcaatttggtgtgtgcacccccggcgtcaaccggatttctcgccggtgttgggtggcgccgcggattcgtctgccgccgtggcctgagctctacactgcgaacgcgccgtctgttgtttttatttcagactggtcttcggaaaggttctaaatcttttgatgaagcccaagcagcgggattcaccaaagagagttgaactttgggtgatatatgggagactgtatcaagcagtgatcctgttttgctactaatatctgattctgctcaggtttgcttcttcattgatctatat

SEQ ID NO: 136817 - DNA, 1081 bp, Zea Mays
atggtggtatggcggcattcgtgcaggaccgacccccacctccacctcgtatgctctctctctctctctctccttcccatggctgatgcctgacacggtgacacccccaacattctccctcactagctagctgtgtcctgcctacctagcggtatcaatacccggctgcagctcaccaccaccaccaaccaaccaacccacagttcccatataggcagccatcggctacacagcctcgcctccgtaagcagagtgtgtcgttggaagagagacgacggcggccatggcgacctccttccaggggacgaccaccaagtgcaccgcctgcgacaagacggtgtaccttgtggacaagctcaccgccgacaaccgcatctaccacaaggcctgcttccgctgccaccactgcaagggcaccctcaagaatgctactaaagtctcaagcgcctttgctggcaccagagagaaatgtgttggatgcagcaagacagtctatccaactgagagggtcactgttaataacactatgtaccacaagagctgcttcaagtgctgccatggagggtgcaccatcagcccttctaactacattgcgcacgaggggaagctgtactgcaagcaccaccacatccagctgatcaaggagaaggggaacttcagccagcttgagaatgaccacgagaagacatcacaggctgggtcactggaggaggatgaacaagagtattgatcactgagcacaaccacagatgaataatgaatcctcttgcatttgcctagagcactatgtatttctgtggcgtggttcgatttcagttttaccaatggaggtcatgtgtgttcagagaacaatgatattgttgtcttgtatctgcatgtaaacgttgttatctttgagtcagatactctacctggtttcaccattttcattggtcagaagatgcctctgcacctacaagacacagaactgttagctcttggcttggtccatcttttgtttaagatgatatttggctaaaggatgcataacaatagaaaaaaaaatatagagaatccaaacaaacaaaaataaaaggaaaaa

SEQ ID NO: 136818 - DNA, 1225 bp, Zea Mays
atcatggtggtatggcggcattcgtgcaggaccgacccccacctccacctcgtatgctctctctctctctctctccttcccatggctgatgcctgacacggtgacacccccaacattctccctcactagctagctgtgtcctgcctacctagcggtatcaatacccggctgcagctcaccaccaccaccaaccaaccaacccacagttcccatataggcagccatcggctacacagcctcgcctccgtaagcagagtgtgtcgttggaagagagacgacggcggccatggcgacctccttccaggggacgaccaccaagtgcaccgcctgcgacaagacggtgtaccttgtggacaagctcaccgccgacaaccgcatctaccacaaggcctgcttccgctgccaccactgcaagggcaccctcaagctcgccaactacaactccttcgagggagtgctctactgcaggcctcacttcgaccagctgttcaagaggacagggagcttggacaagagcttcgaaggaactccgaaggttgtcaagccagaaagaaacgttgggaatgagaatgctactaaagtctcaagcgcctttgctggcaccagagagaaatgtgttggatgcagcaagacagtctatccaactgagagggtcactgttaataacactatgtaccacaagagctgcttcaagtgctgccatggagggtgcaccatcagcccttctaactacattgcgcacgaggggaagctgtactgcaagcaccaccacatccagctgatcaaggagaaggggaacttcagccagcttgagaatgaccacgagaagacatcacaggctgggtcactggaggaggatgaacaagagtattgatcactgagcacaaccacagatgaataatgaatcctcttgcatttgcctagagcactatgtatttctgtggcgtggttcgatttcagttttaccaatggaggtcatgtgtgttcagagaacaatgatattgttgtcttgtatctgcatgtaaacgttgttatctttgagtcagatactctacctggtttcaccattttcattggtcagaagatgcctctgcacctacaagacacagaactgttagctcttggcttggtccatcttttgtttaagatgatatttggctaaaggatgcataacaatagaaaaaaaaatatagagaatccaaacaaacaaaaataaaaggaaaaa

SEQ ID NO: 136819 - DNA, 833 bp, Zea Mays
gcgcgcatcgacctctgattccttcgcatatccccaaagcaagctcgagtgaagaaactcacgaaatctgaagccagctgagagaggcggatggggcagtgcccgtgtttcgggtccgcgaaggcggcggagcaggagcggcgggcggaggcggaccggcgcgagtcgcaggatgctcgcgccaaggccgccgaggccgcgcagaggagacagcaggactatgagaaatcggcagctggaagggcagccaaagcacaaatgaaagcaatgaaggaatcaaaggcatcaaaccaaggtggagagccggttcttaagtggcagatgggatcatgagtttcgtttctgttgatttgcatccctccgcttacttttgatggccgacagaaaattgattgcgactaatttctgataggatgcactgtgattgtgtgattatgccagtgaagtgtacatccggtttaccatctgctatgctgtacatgctatcccatagactgcccaacttcccagttaaaagtcacaagtttgtgtttgtaagtgaacaaaatatatattttatgaacacatgtagtctcgtagcatttgcatggaggcttttaccccacttcatagtatttttcaaagccatgtttcatagtgcgactacagtactgaattctgctgcagccttctttttttcccttcacatcatcaagcatccccatggagattctcatatgtaccatgttctgttagctgatagcttatcaagctttggtatatgaaatgctgaacactcgttgcactttacatggattgttttaatttgagtgttactccatagttcctgagaa

SEQ ID NO: 136820 - DNA, 825 bp, Zea Mays
tttgggtttgggtttgcggcaacgcccgtgcgcgcatcgacctctgattccttcgcatatccccaaagcaagctcgagtgaagaaactcacgaaatctgaagccagctgagagaggcggatggggcagtgcccgtgtttcgggtccgcgaaggcggcggagcaggagcggcgggcggaggcggaccggcgcgagtcgcaggatgctcgcgccaaggccgccgaggccgcgcagaggaggtaagacagcaggactatgagaaatcggcagctggaagggcagccaaagcacaaatgaaagcaatgaaggaatcaaaggcatcaaaccaaggtggagagccggttcttaagtggcagatgggatcatgagtttcgtttctgttgatttgcatccctccgcttacttttgatggccgacagaaaattgattgcgactaatttctgataggatgcactgtgattgtgtgattatgccagtgaagtgtacatccggtttaccatctgctatgctgtacatgctatcccatagactgcccaacttcccagttaaaagtcacaagtttgtgtttgtaagtgaacaaaatatatattttatgaacacatgtagtctcgtagcatttgcatggaggcttttaccccacttcatagtatttttcaaagccatgtttcatagtgcgactacagtactgaattctgctgcagccttctttttttcccttcacatcatcaagcatccccatggagattctcatatgtaccatgttctgttagctgatagcttatcaagctttggtatatgaaatgctgaacactcgttgcactttaca

SEQ ID NO: 136821 - DNA, 89 bp, Zea Mays
gttgtgtttgtgcatcaatccaaactcattaaatatatttgaatctttgattcaaaaactatgtttagattcgaataggaataaaaaaa

SEQ ID NO: 136822 - DNA, 609 bp, Zea Mays
atatgcctcttcttgtaaaatattagccaattttcccatgcttagtgtgggtgaaacataataacaacaaccgcaagagtaatattgaaggatctaaataacaaaacactctactatggtaaatagctaattcattgggttgtcgtggtcgtttctcaacatacatgatttggaaaacaattctctgatctacacaagctaaagttacaagtttgttatacatgaagttgttggcagtcacatacaccatacaagagcatggctatgtagcatgcacatgagcttgatgcaacaattctatgcaagccagctagaccggttttataattcacttagggaccgtttggatcccatcattttgaagaaattgaaatttacctaagacagtaagttatttggtttggaatttgacattccaccactttccaaagtttagatataagcctataccaaattcataggatgagtggtggaaattgattttatgtatcactagtctatgtttctatcctccaacttatgacacactctttggctcgctcccttatagtagaaatgtagtatataaatatcccttcaatatagccaacaatagttttgtgaacacaa

SEQ ID NO: 136823 - DNA, 828 bp, Zea Mays
ccatttaccggcacatattttttttgatgcgtttaatcgaatttatagatgtaggagtttctttttattttttgctctgtgtggatttaggttcctccgtcgatcggtgatagttatggactagattttggatcgatgtgattcgagtttgtgtagtgtattcgagggttccttagttacgttaattgattattgcggtttactatagccaattttatggatcgtttgcccaggttacagacagtttgattctggacttgtctgtgttcattgttgtcatgtatggcacacaagtataagttccaacaattcagctaagcactattatttagtctgcagtggtatgctccttattgtggcgttgtacttagcggaacttgttcactttgacagccgtgtctgtgcgaaccctcatggactgatcaggaagtacgggctgatgtgctgcaggcagtgcttccgcagcaatgccaaggacattggcttcatcaagtaccgctgaaatcaggtgggaatggaccatgtggtagaggcgaggctgtagttttatttccagtaatttagatgttttgttcagaagtctgctagtaaagactgctacgtttatgatgaagaacttagccatgttggtcatattgatcatgagttacctatgttgagcttaaactatcttgtgtccaaccatcgctgggtagtatgattactgtaatgtagggtggttaaggtcgcaaactaatacttatattgcatgtgtcgaagatccattccaattgtacttctagcgcactatttgtgaaatgttgctgggcctgtacggcattgacatta

SEQ ID NO: 136824 - DNA, 568 bp, Zea Mays
actcagtgctcaccgaactccatctatctcttccccacgaacgcttgcggcggcggcggaattaggaggcgatggggcactccaacgtctggaactcgcaccccaagaactacgggcccggatcccgcgtctgccgtgtctgtgcgaaccctcatggactgatcaggaagtacgggctgatgtgctgcaggcagtgcttccgcagcaatgccaaggacattggcttcatcaagtaccgctgaaatcaggtgggaatggaccatgtggtagaggcgaggctgtagttttatttccagtaatttagatgttttgttcagaagtctgctagtaaagactgctacgtttatgatgaagaacttagccatgttggtcatattgatcatgagttacctatgttgagcttaaactatcttgtgtccaaccatcgctgggtagtatgattactgtaatgtagggtggttaaggtcgcaaactaatacttatattgcatgtgtcgaagatccattccaattgtacttctagcgcactatttgtgaaatgttgctgggcctgtacggcattgacatta

SEQ ID NO: 136825 - DNA, 511 bp, Zea Mays
actcagtgctcaccgaactccatctatctcttccccacgaacgcttgcggcggcggcggaattaggaggcgatggggcactccaacgtctggaactcgcaccccaagaactacgggcccggatcccgcgtctggcagtgcttccgcagcaatgccaaggacattggcttcatcaagtaccgctgaaatcaggtgggaatggaccatgtggtagaggcgaggctgtagttttatttccagtaatttagatgttttgttcagaagtctgctagtaaagactgctacgtttatgatgaagaacttagccatgttggtcatattgatcatgagttacctatgttgagcttaaactatcttgtgtccaaccatcgctgggtagtatgattactgtaatgtagggtggttaaggtcgcaaactaatacttatattgcatgtgtcgaagatccattccaattgtacttctagcgcactatttgtgaaatgttgctgggcctgtacggcattgacatta

SEQ ID NO: 136826 - DNA, 1538 bp, Zea Mays
actcagtgctcaccgaactccatctatctcttccccacgaacgcttgcggcggcggcggaattaggaggcgatggggcactccaacgtctggaactcgcaccccaagaactacgggcccggatcccgcgtctggtacgtgtgttccatttaccggcacatattttttttgatgcgtttaatcgaatttatagatgtaggagtttctttttattttttgctctgtgtggatttaggttcctccgtcgatcggtgatagttatggactagattttggatcgatgtgattcgagtttgtgtagtgtattcgagggttccttagttacgttaattgattattgcggtttactatagccaattttatggatcgtttgcccaggttacagacagtttgattctggacttgtctgtgttcattgttgtcatgtatggcacacaagtataagttccaacaattcagctaagcactattatttagtctgcagtggtatgctccttattgtggcgttgtacttagcggaacttgttcactttgacagccgtgtctgtgcgaaccctcatggactgatcaggaagtacgggctgatgtgctgcaggcagtgcttccgcagcaatgccaaggacattggcttcatcaaggtatgcaatataagcttcaaactcctgtgtgaatgatgcttagcatcattaatgctttatgattttgtattggatatttagtctgaaaagttgctatcaaaaaacacgacaagaaaaaagtgaaagaccgataaatccattagttaatatttgtgaaatagctccatttagacactattctgcttttagttagcctccatcgtaaacatggaaaaggctccaagattctatgatgtaaagtgtctgatacttatctgttgttttatcatctttaattctttaatgaattagttactgccagcttttaggcgacatcttgcagtttagggcattcctatgtatttagactgtttctttggcactttgttccctttcttgcaagtgcagctgtggtattttgttgaaacatgccctacactttgctggtagtctttttttattcaaagaatgaattgtggttacatgtttttcatgttgacatgaaaacattaatgtatggctatggcacataaagtgcctacaattattttgctgcccatggcaatatttttgaaatttctccaatttggttgacttactattgctctttaaccaatgcaatgcctatatttttgttgcagtaccgctgaaatcaggtgggaatggaccatgtggtagaggcgaggctgtagttttatttccagtaatttagatgttttgttcagaagtctgctagtaaagactgctacgtttatgatgaagaacttagccatgttggtcatattgatcatgagttacctatgttgagcttaaactatcttgtgtccaaccatcgctgggtagtatgattactgtaatgtagggtggttaaggtcgcaaactaatacttatattgcatgtgtcgaagatccattccaattgt

SEQ ID NO: 136827 - DNA, 112 bp, Zea Mays
gttgtctgtattatttgcagcactgttctttgtttttttattagttgttattacttggtacaacgtccatatgcatgtggttaatatacatagttgtattttttacccagcg

SEQ ID NO: 136828 - DNA, 1290 bp, Zea Mays
cctcggtgactgacgcgtggccctcacctccgctttcccctcctcccaaataaaacccgaccgcagccgccggtcgtccaggaacgccgccgccgccatggccactgccggagccttccacgccggcggcttcctcctcctcccggtccgacgaagtctccgcgggcccagcccctcaccatggtcccacttccgcacccacttcatctcctccaagccgccgccctccacccctctcccgccgcccgtgccgccagctcgcctgtcccccgtgggttctgccttcgggcctcctagcagaaagaccggcgcggttggagccggggctggcgcgggtgtcgtcgggtggtaccttggcctcttggacgcgcggcccgtgctgaccaagagcgtcaccgccgctgtcatcttcaccgccgcggacgtctcctcccagatgctcacacttggtcctgaggattcacttgattttcttaggaccatgcgtatggctagttatgggtttctgatctcaggacctagcctccatctttggttcaattttatctcaaaattgttccccaaaaaagatgtagtgaacacattgaagaagatgtttatagggcaagcagtctatggaccaattattaactcagttttcttctcatacaatgcaggattacaaggcgagactgttgctgagattattgcaagattgaagagggatctagttcccaccatcaaaagcgggcttttatactggccaacttgtgatttcattactttcaagtttgttccagttcatttacagccgctagtgagcaattcattctcatttctgtggaccatctacataacatatatggccagcttaaagaaagcagatgtggaggtggccccgagtacctaggtgttgtcgagtgactcaacatggctgttatctgtcgattcttcgtacaaggcagacttcatgtatgcctcctggatcgcggatgttatcgaccggcgattttaggctttagagagatggattgcttacgatgcatccttcacttttggttagggcatagtgtccacagggattctacttgcttatgtttttggctgaagaccattttgtttggatgatcgaattatactaggttcattgggtgggtcttctacgacgtctttcttacggtcttttgatcctatggctaagaagtacatttacttcaactaaattttctgtatctagttatggagatgcaagtgaacctgttctttgccacaaacaataacagacacaatctatctcatccttttcttctc

SEQ ID NO: 136829 - DNA, 794 bp, Zea Mays
catcactgggtaagatctgtactcagctgtcgaagtcaattagccattgagcacgcccattaacaggtgaactcagagtggaaatccatctggatgtgattatcatgcatatttcaagatatgtatcctcaaggtgaagactttttttttaccttactggatggatgtctccatagtttctgtgcatggtacttgttatctgatccatcttccccaaacattctacctcatctgatcagcgccatcgacgctctgtttcttgtgcacaataatggagagcatgggatctgattctccgcttccataacgcacagctacggcgcaaaactaaagacaaagcatttcaggccttccgtatttgacagactgacagtacagtcacgagaagcacgacgctgcctgcacaggagttgtactgggacatgtctgggagtggaataaagctgctgattttgttctcatcggcttcgatccgtctgttggctccattgcttttggtagaagggtaggaagtcttccagggctggatggtatgctgctatacaaggaatcttgatcacttcacaggttattggcacttgttttcgcgtcccctattccaaaagaaattatgctggcatgttttgcttgttactccctgtgactggtccgaacagtttccaagacaattatgtactgattttgtctgggcattggaagtctggaacagaatgtggcttcctaaacaaggtaatcgattgcactataaaaagttgaataaattgtaaagggttgggatacatttttttgagatt

SEQ ID NO: 136830 - DNA, 415 bp, Zea Mays
agggaaggtcttttaagttgaaccaccagaaggttaagaaaaagtacaaaacaaaggcggacgttgtttctgatctgttggtgggtgctgtgactgcataccgggaatcagaacaactggtaacttcgtcatagcatgaagcatccatggacctggcatgatggtgaatgacttgcacaactgtatctcttttcttcctgaaaacacacaactgtgtctttcagtgtttttttccagtgcaaagcctctcatacatcaagcaaatggatggtcaaaggaagcagaatcgttctttgatgtagtagagcttgctggctctgcctccccagtcctgaaccagtatgactgctggaatgaagctgcgcttgtggggacatcctccatgacccattcaaagcccttggggtagtagatc

SEQ ID NO: 136831 - DNA, 722 bp, Zea Mays
aaagcccgtcagccggtgtgtagacccaatacggcccggccgatttgtcgctgacgtcacctcatcttcaccaccggagtccggagtaatgcgcaggccacagggtcgggttcgctttttcttggcttcttctctcgtccatccacagggggaaggagcaggagggagggagccatggttgtcagcacattcactggccccgggattgggatcgggttcggtgtcggctgcgggttcggcgtcgggtgggggttcggaggaatgcctcttaacacgttcggcttgggtattggtgggggctgcggagttggtcttggactaggatggggctttggaaatgcttttggttgtcagtatcgatcttcaagagtccagttccagggcattgaatttcagaagaaggctggaggagatgaatcacaaaaagttgtttcacccgagcttgctgaaaagtctcatccttatggctagtattcctgctaccacaaaatccacagagactgagttctgtgtgctgagttgcagtttaattacatacatgtgagttctttgttagtaatgttatgctacacttatggtcatttctgttgtaaccagaagttgttaatggatggaattttcaattaggaagaaatgacgctaatatttgccctacatgctattcatttacttttcatggttgaaggcccgtcactatcatttattgctgtgctttatgttgt

SEQ ID NO: 136832 - DNA, 712 bp, Zea Mays
aaagcccgtcagccggtgtgtagacccaatacggcccggccgatttgtcgctgacgtcacctcatcttcaccaccggagtccggagtaatgcgcaggccacagggtcgggttcgctttttcttggcttcttctctcgtccatccacagggggaaggagcaggagggagggagccatggttgtcagcacattcactggccccgggattgggatcgggttcggtgtcggctgcgggttcggcgtcgggtgggggttcggaggaatgcctcttaacacgttcggcttgggtgggggctgcggagttggtcttggactaggatggggctttggaaatgcttttggttgtcagtatcgatcttcaagagtccagttccagggcattgaatttcagaagaaggctggaggagatgaatcacaaaaagttgtttcacccgagcttgctgaaaagtctcatccttatggctagtattcctgctaccacaaaatccacagagactgagttctgtgtgctgagttgcagtttaattacatacatgtgagttctttgttagtaatgttatgctacacttatggtcatttctgttgtaaccagaagttgttaatggatggaattttcaattaggaagaaatgacgctaatatttgccctacatgctattcatttacttttcatggttgaaggcccgtcactatcatttattgctgtgctttatg

SEQ ID NO: 136833 - DNA, 734 bp, Zea Mays
aaagcccgtcagccggtgtgtagacccaatacggcccggccgatttgtcgctgacgtcacctcatcttcaccaccggagtccggagtaatgcgcaggccacagggtcgggttcgctttttcttggcttcttctctcgtccatccacagggggaaggagcaggagggagggagccatggttgtcagcacattcactggccccgggattgggatcgggttcggtgtcggctgcgggttcggcgtcgggtgggggttcggaggtgagagcatgctcattttcgcgtgattaatttgtttctttttggtgtaggcgtgtattagaaatcttaacttgtcaaattgaactagcgagatccttttttggattctgtgttgttgatttcgtgttggctgtatttggcggtaaaatggctatcaaattatttacaggacaagcatgcggttgcagttcagtcccaagttgtttccctttcccatgcgattctttccaagttgcttaatatctgtttactgctaaatagggactagggaccaacattgtgtatatggattggttcctatcacattaccaacatgatcatagtaaagtatacttttatgaagctacttagtaatatgcaacaaatgtttaaaatgattcgttttagataacccaaaatgtcacttatttgtgattggggggagtaatattcaatgaaaatgtgtattcatgatcaagaaatgacatgcttttgg

SEQ ID NO: 136834 - DNA, 461 bp, Zea Mays
gaagtcgtcggaggggcaacaggacgcggagagctcgccattagcgtctgtgaggaaaacaatgatattgagagagagccatcgcaatctagttgtccacaccggtacctagatgtcgatgatgccatagaggcctacacagcatcgtcgagcgtgaaagaagttcggagccaccgtgatttcaagccgagaatccttcgccgaactccaggcactaccgcagaagcacacagagagaaggaaggtagaagagggccatatctagatctcataaattacatctatttaccctgtatgtctttatgtgacccgatctaaccaatcaaatcgtgtcatgttacctatttctgtgagacctactaatttattaaaaatgtgatatattataggacaaataatttgttttaatctattccagttatattagtttcatataaattttacgtatatagtaataacat

SEQ ID NO: 136835 - DNA, 1119 bp, Zea Mays
aagatcgatcaagagtgagctagcaacgccatcgaagcacacacagtgagcactgcagtggggtggggatgatgatgatgggcggcgccggcaagatggtccgcgcggcgctgcacgccttcatccggcactaccacccggcggcgtcgctgctggcgctgccattctccgccgcggcgctgctgtcgcggacgcacccggcggtgctgggcgcttcgcacctgctctcgcggcgcctgcgccgggcgctcgtggccgctggcttcccgccggcgtcgcagctgctcttcctgctcagccaccgcctgtcgcagcgcgcctgcgcgtccctcgccgccgcgcccttcgcgctctccttcctgctcctggccaaggcctgcgccgtgcaccgctgctgcgactgctcgccgccaccaccgcacgccacccaatgctgccgccgccggaacgagagcggcacgttcgctcagctcctgcgctcgtcgtacccggcgatggcgtgcacgcagctcgccaactgcctcgcgctgctgctcgccaacgccgccgtgttctccgcgctgctcgccgcgttcaacgccgccgaggcgatgcacctgctgggcgccgctccccaacccacctccacctccagccccggcagcggcagggccgtgctggcgctgtcggcggccggcgtgatcgtgtactccgtcgcgctggccaacgcgtccgccgcgtgcaacctggccacggtggtggcggccgccgagggccgcggcggcgcgcacgccgtgctcaaggcggtcctcatgctgctccggtccggcgacgccgccaccgccgtggccgcgtccctgccggccagcctcgccgccgccgccgtcgaggcgctgttccagctcagggtcatgcggccgtacgcggctaccggcagggtcacaccggggatgctctgggaggggctgctcgtcgcctacatccacgccatggtttgtgtcctcgacaccgtcgtcaccaccatggtctaccggagctgcaaggccagccgttcttgccacctcttggagttggagctggagctggagctgggtggcggaagccacaggcaggaggacttgagtctctgatttctgcagt

SEQ ID NO: 136836 - DNA, 1124 bp, Zea Mays
gctggccaactaaggccataatcaaaattgtccctattcatttatatcatatctcataaaattgacagtgcatatattcaaattcgaatttaattaaaataaaattattatcagatatagcccgtattctatttccacactacctaccgttgtctcccacgtcgaaaggcggataaggttttcaaacgcacgcgattgcggagatctcggccgcccgatccgccactcctccatccgacggcaggtacgtccccggccggcctactacccggcgacctcggtcgcccatggccaccgcgaaaccttatccccagaaccacacggataaaccctagctgcgcgagccccccggcgatgtcggtggccatccgctccggcgagctccttgcgtgccccgtcgcactccggcgggcgcccttggctgtgtctgtggtgtcggtgcggatgagggctaggggcgccgtggctgtgcgggcggaggcaacggccgagggggtagggaaagaggggaagaaggcggcggggaagaagaagccggcgagcgggatcaccaagccgaagcccatctctacagagctgcgggagttcgtcggcggcgcggcggagctgccccggactgaggccatcaagctggtatgggcgcacatcaagggcaacaacctccaggatccaaacaacaagaagataataatctgcgatgagaaactgaagaagatattcggagggcgtgaccgcgttgggtttctcgaaatttccgggctgctgaacccccacttccagaaatgatagggccttttttgttttgttttgttttgttttgtagatcactctcctctgttgtgctagctgttgctgatgtacgacgagcacatttagctgctaaacctgggctaaaagtggtctctgtctcttgacggcggtttaaggaaggcaaatgcgttccctgaagatgcatgtgattgtgatattcgccgttaatggtgtactagcagttgcttaatcattcatgcttatatcctatccacacacctaccgtcgtagacctgagtggtggatcatcgcattcttcgactcattatgtgtggatttttattatccttgtctttgggttattaatggttgcg

SEQ ID NO: 136837 - DNA, 547 bp, Zea Mays
gcccaaacttcggtgaaggcaagtaaaactgtgatgggttattccgtctgtcagatgaggagtcttatacttgtttatgttgtgctatcatgttcaaattcatatttttcttttgagtaccatcatttgaaaatgttcatgtttcatggatttcataggttgagtttgaggtttgattatgttactcaagtggttattatgtggaatggttggaagtaaatgcctagcacatttttatttgggaagaacttatgatgttgtcatgcataatgcactcattatccattgcattgaagtttcgtcgcgatcgtatggtccgaccgtaccggtacattgagcatcatatgttgcccgagaaggggtatggtgcagcttcatatccttagagatatggaggcagaagtcattattgcatttgtagccatgtgcattcatgggagaggtgttgaatctattatgtggatgtggataatttggacttgtgcatggtgattccacttggcgttgagtttttagttacttgtatacttgctgcaatttactgttc

SEQ ID NO: 136838 - DNA, 373 bp, Zea Mays
ttgccaatacgtggacaagagtgggaatattcgagctggttagggatgcaggcgcatttgctgtttttttacaatgcttttgctgaaacgtttatggaatttgcaggcaccgtagttgataataatatctgccacccaacagaatttgatttcttcctgtgcagccatgctggggccaagggaacaagtcgtcctacgcattaccatgtgctacgagatgacaacaagttcaccgcagatgctctgcagtctctaacatataacttgtgctacattgtgcagatcatccagggcggacctataagatgtcaagtgtgtacgccccaacaacccacagatgtggctcgacgctctccatcgtctggtataccag

SEQ ID NO: 136839 - DNA, 95 bp, Zea Mays
gctttgaatttctattctcctacttggattcatttggctatcttaagaaagcagaattgctgataaaactatgtctacattgaagcaggaggcat

SEQ ID NO: 136840 - DNA, 111 bp, Zea Mays
gtattatggtttacccctaccgggtccctctataatgggcctaggctcaactaaattagagtgtgcatgtcacacccggatttaaggaacaaagccaggtgcatctcatat

SEQ ID NO: 136841 - DNA, 492 bp, Zea Mays
gtgatcacatggtaggcctcatgtgcgctttgctgctgagagttggtcagtttttcttggaatttaccattgttctcttgttttattgcttgattgtggcctcatgcgcgctttgttgctgcatttctcaggttcgacatgccccgtgcctactatcactctcgatttgaagaagagtctgaaggcttttgaactgcttgaagcattagtgtagctttggtgcttttgtgactaatcagctctggagcagctagagtgatgtagttgtgggcttttcaacaatagctagagtgatatgacacattagtgatgtagttgtaggcttttgaactgcttcaagctggagtgatgtcgctgtggtgcttttgtgactgatcatctctggagcttttgtgaatgatctagctagctatctgtaaatgatctagttgtgaatgatattataattgtgatacttttgtgaatatataattgtggtgcttttgtgtttat

SEQ ID NO: 136842 - DNA, 486 bp, Zea Mays
atggaaggccgcacgctcctctccctcctccatgtcgtcgccgtgttggtggcgaagaagacctcgcagctcggggaccggtccccggccatcccgcggctcggcgtgccggcgtacaagtggtggtccgaggcgctgcacgggatctccaaccagggccgcgacatccacctcgacggcccgctccgcgccgccactagcttcccacaggtcatcctcaccgctgcatccttcaacccgcacctctggtaccgcatcggccaggcttctacagatgccaagagaattattgacgaagaaagagctaatgctcggttggatataggaagtgctaaagcttctgtacaaaaaattcaatcagcacttaaagagcaggaaacaatttctcacagaactgggaagcagttcttcagtttcgtagctgcaggattggttcattatgtagaggctcttgtaaggcgaagagaaactggttataatgtatga

SEQ ID NO: 136843 - DNA, 1259 bp, Zea Mays
ggtactatactcatgctgcgtgagtccagcaatccgtatggattggaagccacatgtgggatgcgagtgtagacatttctcaagacaagttccacggctagccatatatgccgtccattagagccgggtcggcctaggccagcaagttgcattagtttaatttggagctaccaacaatggcggccagacgaggcggcatggcgtccggagctggagcggcggcggcgcacatcgcatcatcgatggtgttgtctctgttgcttgttggagttggcgtctcccgtgcccagctccaggtgggcttctactccgactactgcccggacgccgaggacacggtcaccgccgccgtccaggacgccgccggcaacgaccccaccatcctccccgcgctgctccgcctccagttccacgactgcttcgtcaaggggtgcgacgcgtcggtgctcatcaggagcgccagcaacgacgcggaggtggacaacggcaagaaccagggcctgcgcggccagaacgtggtggacgccgccaaggcgcagctcgaggaccagtgccccggcgtcgtctcctgcgccgacatcatcgcgctcgccgcgcgcgacgccgtcgccatgacgggcgggccgtcgttcgacgtgcccacggggcggcgcgacgggctgacctctaacatccgcgacgccgacgtgctgccggacgccggtgactctatcagcgtgctccggtcacgcttcgccgcgagcggacttgacgaccgcgacctcgtcctcctcacagcggcgcacacggtgggcacgacggcgtgcttcttcgtgaaggaccggctctacagctacccgctgccgagcggcgggagggggccggacccgtcgatcccggcgtcgttcctggcggagctcgaggaccggtgcccaccgggcaacttcaacacgcggctggcgctggaccgcggcagcgagagcgacttcgacgactccatcctccggaacatccgctctggcctcgccgtcatcgcctccgacgccgcgctggccaacagcaacgccacccgcgcgctcgtcgacgcgtacctgggcccctgggcgggcagcttcgagcaggacttcgcggccgccatggttaagatgggcaccatcggcgccatcaccggggacgacgccggcgaggtcagggacgtctgctccgcgttcaacagcaattgatctcggtcgtacgcgtcatcggtgcgcggcgttggcgtcacataaaaagagaaacga

SEQ ID NO: 136844 - DNA, 125 bp, Zea Mays
attcttttcttttctatttccccattttaaattcaaatttcaaattcaatccatgtggtaaattaccctcagattcgaaatacaatttggacatgcccaaaatgtggtaaatttatttatttatc

SEQ ID NO: 136845 - DNA, 2184 bp, Zea Mays
tatttaatgccatcccgcttcctccgttcttcccaaaccaaacccagctcaggcacaaccccaacgcaccgccgccgctcgcctggcctcacctcgccggagaagagttataagacaggagaaccccgtccccggggcgcaggcctcggcagcttccgtgaccaccgcccaatcctgccacagctgccctccctcctcccctctgggcgtggccgagttgtaggcatcacggctagcgttgcagccccccggcgcggccccgcagctgcgcaggtggagcccacgggcaccatcgcctccgctgtcgcgtccagccccgctccgcacggcggccgcggggcgctgccctcggccggaggaagcccgtccgatctcctcttcctcgccggcggcggtcgcctctgagccgttcctgtctctcaccttcttcctttcctagcaattagtcccttctgctaacccccccggaccccgacgagttctcaccccgagagtaactgaccgacctaccggcatggagatgaagctgaccatcaggagggtgcccaccgtcgtctccaactaccaggaggacgccgacaagccgcgcgcgggctgcgggaggaactgcctcggcgactgctgcctgcctgcttccaagcttcccctctacgcgttcaagttgactccggcaaagggctcgcaggaggatgctgcttcaaccaagttacttgttgatattctccttagtgagtgggaggacaggatgactcgaggcttattccgctacgatgtcactgcctgtgagaccaaggtcattcctggcaaccttgggtttgttgcacaactcaatgaagggcgccatcttaagaagcgccctactgagtttcgtgtggaccgtgtgctccagccgtttgaccctgccaaattcaatttcacaaaagttggccaggaagaggttctcttccaatttgagaatagtggtggtgatgacagctatttcctgaacaacgctccaatcattgctgttgatcgggctccaaatgttattgctatcaatgtaagcccaattgaatatggacatgtgcttctcattcctcgtgttctggaccgcctgcctcagaggattgatccagagagcttcttgcttgcactgcaaatggcagccgagggaggtagcccatacttcaggcttggttacaatagcttgggtgcgtttgccaccatcaatcacctccactttcaggcgtactacttgtcagtgcctttccctgttgagaaggcagctacccacaagatcccactctctgaggacacgaagaagaatggggtgaccgtgtccaagctgataaattatcctgtgagaggcctggtatttgagggagggaacaccctggacgacctggccactgtggtttctaatgcttgcatttggctgcaagacaacaatgtgccttacaatgtgctcatttctgactgtggcaagagggttttcctgttcccccagtgctacgcagagaagcaggctctgggtgaagtgagccaggagctgctggacactcaggtgaacccagctgtgtgggagatcagtggacacatggtgctgaaacggaggatggactatgaggaggcatctgaaacctccgcgtggaaactcctcgccgaggtctctctctccgaggagcgcttcgaggaagtgaaggcgtacatcttcagcgctgctggcctggttcagtatgatgaggaagaggaggaagccagcgacggtgagggccctacggcctatgttcctgtcaaggttacccctctgcccgtcgctgaagggtgcctcgtcctcccgtgagtccgtggtcggttaaataaagggccgtatatgattgcgagccctgtgctctgccgctattttcttctcgtttgtgtcttgctgctctcgtggtgaactcgctactccagtactctgcaatattaagcagaagctattgtattgtttgggtcgtttgtcagctaaattgaaatgcgatggacatttactagtatctgctctctgtttcttctatatatcatgtgtaggctcacgcgcctgtctcaatttgagcggcttcgttttacatctgcgtcactagagatccggatttgactcacttggtgatggttttagtgatgtggagtcatgtgagaggataaatgaaaggtgatggttttact

SEQ ID NO: 136846 - DNA, 629 bp, Zea Mays
aaatttctgagtgttgtcgcccctctggactgaattggtggtggaatctctttatgatgttctaaaaaaacatctatctgttcaataatgcagtgctacgcagagaagcaggctctgggtgaagtgagccaggagctgctggacactcaggtgaacccagctgtgtgggagatcagtggacacatggtgctgaaacggaggatggactatgaggaggcatctgaaacctccgcgtggaaactcctcgccgaggtctctctctccgaggagcgcttcgaggaagtgaaggcgtacatcttcagcgctgctggcctggttcagtatgatgaggaagaggaggaagccagcgacggtgagggccctacggcctatgttcctgtcaaggttacccctctgcccgtcgctgaagggtgcctcgtcctcccgtgagtccgtggtcggttaaataaagggccgtatatgattgcgagccctgtgctctgccgctattttcttctcgtttgtgtcttgctgctctcgtggtgaactcgctactccagtactctgcaatattaagcagaagctattgtattgtttgggtcgtttgtcagctaaattgaaatgcgatggacatttactagtatctgctc

SEQ ID NO: 136847 - DNA, 1242 bp, Zea Mays
ccaaaccaaacccagctcaggcacaaccccaacgcaccgccgccgctcgcctggcctcacctcgccggagaagagttataagacaggagaaccccgtccccggggcgcaggcctcggcagcttccgtgaccaccgcccaatcctgccacagctgccctccctcctcccctctgggcgtggccgagttgtaggcatcacggctagcgttgcagccccccggcgcggccccgcagctgcgcaggtggagcccacgggcaccatcgcctccgctgtcgcgtccagccccgctccgcacggcggccgcggggcgctgccctcggccggaggaagcccgtccgatctcctcttcctcgccggcggcggtcgcctctgagccgttcctgtctctcaccttcttcctttcctagcaattagtcccttctgctaacccccccggaccccgacgagttctcaccccgagagtaactgaccgacctaccggcatggagatgaagctgaccatcaggagggtgcccaccgtcgtctccaactaccaggaggacgccgacaagccgcgcgcgggctgcgggaggaactgcctcggcgactgctgcctgcctgcttccaagcttcccctctacgcgttcaagttgactccggcaaagggctcgcaggaggatgctgcttcaaccaagttacttgttgatattctccttagtgagtgggaggacaggatgactcgaggcttattccgctacgatgtcactgcctgtgagaccaaggtcattcctggcaaccttgggtttgttgcacaactcaatgaagggcgccatcttaagaagcgccctactgagtttcgtgtggaccgtgtgctccagccgtttgaccctgccaaattcaatttcacaaaagttggccaggaagaggttctcttccaatttgagaatagtggtggtgatgacagctatttcctgaacaacgctccaatcattgctgttgatcgggctccaaatgttattgctatcaatgtaagcccaattgaatatggacatgtgcttctcattcctcgtgttctggaccgcctgcctcagaggattgatccagagagcttcttgcttgcactgcaaatggcagccgagggaggtagcccatacttcaggcttggttacaatagcttgggtgcgtttgccaccatcaatcacctccactttcaggtattaaacttttgatggtatctaaatttacttctcaccacaaaatccc

SEQ ID NO: 136848 - DNA, 1365 bp, Zea Mays
aaatagccgccccagggagacgttcgaaaccttccccatctccggataaaagataaggagtgtctctcctttgccatcctcctctctttcagctaagtccctgccccctctctttttcttacattcaggtcctcgcagctcctctcttttttcttgtttctttcgatctgcgagccgtccaagtccagtactcttctttccctcaaggaactcttgcagccggcccctctggtttcctcgaattcttgttccccggtccctcctcctgtccccgcgtagatccgtccgtccgaggagcacaccgtccccacccccatgtttacccaccagttcctctgacggccgccgtgctccgatgaagctgagcgtgctccgtatccgccgctcccactccttctccgtcgccttcctctactggttctacgtcttctcatgaacgcatcgcccctctccaactgctgatccttcgccgtctctccctctctctttctctctgagatagtctttcgaatccatctctagggctcctgtttctccccatcctccccccaccccaccccccaccaaacagattcaatccgacaagacaagcatccatgtcgtcgtcacgccggagctcgagccccgacagcaacgacacgacggacgagcgcaagcggaagcggatgctgtccaacagggagtcggcgcggcggtcgcgcgcgcggaagcagcagcggctggaggagctggtggcggaggtggcccgcctgcaggcggagaacgcggcgacgcaggcccgcaccgcggcgctggagcgcgacctgggcagggtggacggcgacaacgcggtgctgcgcgcccgccacgccgagctggccggccgcctgcagtcgctgggcggcgtcctcgaggtgctccagatggccggcgccgccgtcgacatcccggagatggtcaccgacgaccccatgctccgcccctggcagccgtccttccccccgatgcagcccatcgggttctgagaatctgagcctcagccggcgggagagagccaatttctgtcgtcgtgccgctgtctatctcgtattggtatatctattcataaatcatccttgtcatggtttgctcttcttgtcagtgttataaatttgcttcttgttagtgttataaatttggccatcggaaaggatgtgtttgtagttgtaatatcttgtttggagttgtaatatcttatcttgcttatgaaatcgaatatgcctatatatatatatgttatgctgtacgagtatgtggctccaaatttgtgagccttctgtctgttatggtgaggcgatgaatccaatttgtgagcacacatgaatcaatttcgagattcgacatgtc

SEQ ID NO: 136849 - DNA, 315 bp, Zea Mays
ctttttaatattaattaaaatttatcattgtacatcactactaatgtaagattaacacaattatttgtttatgatataaatatttttaacattttaaatggtgtacttcagtttttagtatattatttaatgtttaaaatcacttgtaattagcgagaggacagaatcaagcttaagcatgtggggtttacaatgcaccaagggccagacagattattcagtactattaaacaaaatgtaataaacaaatcagtcgcaaaagcaaaaacaaatcaagatgagaaataaatttggacggacaaatcagcggcataa

SEQ ID NO: 136850 - DNA, 1904 bp, Zea Mays
gcacctactactcggctactccgtctcacttctatgcgggcccgaccgacgcaatcgcacatttctgacagagtgaatgactggtatctttcccggaaccctactccgaaacgcaacacacgtttccgtctaaaaatccccaacgcaaccagacgctggtggcgtcccgcacgcccccccccccccccccccccaaactccgatctgccatggcctcgctccagtcctttctcgccgtcaaaccggccgccggctgggccgctccgtcccgccgcgcgcgcgtcgcggccttcctcgctccgccgcccccgaccaccgcggccgccgtgggggcggcgcggcgggagctgtcggccgcgagcctggccgtcgtggacggcgaggcgcggtacctcgtcggcacctacaagcggtcccgcgtcgtcttcgagcacggccgcgggtgcaagctctacgataccgacggccgcgagtacctcgacatggccgccggcatcgccgtcacggcgctcggccacgcggacccagacgtgtgcgccaccatcgcggagcaggccggtaaggtcgtccacgtcagcaacgtcttctacaccaaaccccaggtgggtgctcctgctccctccgatcctccctcccccgcttccctcgccatgtgttcgacgcattgctccggccggcccatttttctctgcttcatctgcagaagcgcctcgctgtcgcaggtggagctagccaagcggctcgttgaggtgtcgttcgcggaccgcgccttcttcgccagcactggcacggaggccaacgaggcggccatcaaattctcccgcaagttccagcgggccgcacacccggagagcggcgacccgcccacggagttcctggcgttcagcagcagcttccacggccggaccatgggcgccgtcgcgctcaccagcaagtcgcagtaccgggagcccttcgcgcccgtcatgcctggggtgaccttcgtggattacggcgatctggaggcggccaagaagttcgtacggtccggcagggtcgctgctgtcttcgtcgagcccgtgcagggtgagggtggcattcacagtgccaccagggagttcttgcaggggctgcgggacgcctgtgacgaggcgggagccctcttggtctttgatgaggtgcagtgtggtttcgggcgcacaggccacctctgggcgcatgaggcgtacggagtggaaccagacataatgaccttagcgaagccactggccaacggcattcccatcggcgttgtcctggtgaaggagaagatcgccgcagccataaactacggcgaccacggcacgacgtttggcggcgggcctctcgcctgccagaccgcgataacggtgttcgacaagatcacgagacccggtttcctggccgaggtgtcgaggaaaggggagagcttcaagcagctgctccgcgccaagctgagcgggaacccgcacgtgagggaggtccgcggggtcggccttctcgtcggcgtcgagctggacgtgccagctggtcctctggtcgacgcgtgcttggacgccggcgtcgtcgtgctgactgccggtaagggcaatgtggtgaggctggtgccgccgctcatcgtctcggagaaggagctggagcatgccgcggatgtcataagggactgtctaccggcgctcgatgtcgttgctgctgcctaatgtatatggtggtgcaataggtccggatatgaaacctgattccaaattttggaatcgaataaatttcatgtcgggccaatgttgttgtgttcattgaaacaaactctttttttttttggaatcgaataattattacatgtcagaccgatgctagctgttccgagagcaaagtggttttattatacaaaatggtctgaagtgttaagg

SEQ ID NO: 136851 - DNA, 1784 bp, Zea Mays
gcacctactactcggctactccgtctcacttctatgcgggcccgaccgacgcaatcgcacatttctgacagagtgaatgactggtatctttcccggaaccctactccgaaacgcaacacacgtttccgtctaaaaatccccaacgcaaccagacgctggtggcgtcccgcacgcccccccccccccccccccccaaactccgatctgccatggcctcgctccagtcctttctcgccgtcaaaccggccgccggctgggccgctccgtcccgccgcgcgcgcgtcgcggccttcctcgctccgccgcccccgaccaccgcggccgccgtgggggcggcgcggcgggagctgtcggccgcgagcctggccgtcgtggacggcgaggcgcggtacctcgtcggcacctacaagcggtcccgcgtcgtcttcgagcacggccgcgggtgcaagctctacgataccgacggccgcgagtacctcgacatggccgccggcatcgccgtcacggcgctcggccacgcggacccagacgtgtgcgccaccatcgcggagcaggccggtaaggtcgtccacgtcagcaacgtcttctacaccaaaccccaggtggagctagccaagcggctcgttgaggtgtcgttcgcggaccgcgccttcttcgccagcactggcacggaggccaacgaggcggccatcaaattctcccgcaagttccagcgggccgcacacccggagagcggcgacccgcccacggagttcctggcgttcagcagcagcttccacggccggaccatgggcgccgtcgcgctcaccagcaagtcgcagtaccgggagcccttcgcgcccgtcatgcctggggtgaccttcgtggattacggcgatctggaggcggccaagaagttcgtacggtccggcagggtcgctgctgtcttcgtcgagcccgtgcagggtgagggtggcattcacagtgccaccagggagttcttgcaggggctgcgggacgcctgtgacgaggcgggagccctcttggtctttgatgaggtgcagtgtggtttcgggcgcacaggccacctctgggcgcatgaggcgtacggagtggaaccagacataatgaccttagcgaagccactggccaacggcattcccatcggcgttgtcctggtgaaggagaagatcgccgcagccataaactacggcgaccacggcacgacgtttggcggcgggcctctcgcctgccagaccgcgataacggtgttcgacaagatcacgagacccggtttcctggccgaggtgtcgaggaaaggggagagcttcaagcagctgctccgcgccaagctgagcgggaacccgcacgtgagggaggtccgcggggtcggccttctcgtcggcgtcgagctggacgtgccagctggtcctctggtcgacgcgtgcttggacgccggcgtcgtcgtgctgactgccggtaagggcaatgtggtgaggctggtgccgccgctcatcgtctcggagaaggagctggagcatgccgcggatgtcataagggactgtctaccggcgctcgatgtcgttgctgctgcctaatgtatatggtggtgcaataggtccggatatgaaacctgattccaaattttggaatcgaataaatttcatgtcgggccaatgttgttgtgttcattgaaacaaactctttttttttttggaatcgaataattattacatgtcagaccgatgctagctgttccgagagcaaagtggttttattatacaaaatggtctgaagtgttaagg

SEQ ID NO: 136852 - DNA, 648 bp, Zea Mays
atgaaaaatatatgtagatatgttggttccgtgaggaacagcccgcaccaaaaacatggtggcccaatgcagcaggcactttgcctccatctagcgttgacggcctttgattcaccagtctcttccactgataatattcccttgaatcgaccgaggaactgcaaggcagcggcgcctgggagcatcccagagcccagcaccagatcagtccccgtctcgccgaacccggcgcctgggagcatcccagagcccagcatgggggagctcaccagcgccgccgctacagcaccggcggacaaaaaatgttgggagtcagccttgttggggtccttgtcgacgttccccttgctgcctttgggcttccgctacagcaccggcggacaaaaaatgttgggagtcaggcttgttggggtccttgtcgacgttccccttgctgcctttgggcttatctgtccccttgctcttcaccgccaacctacagatgtcaaagcaaccgagccaccatcgacaaagacagcaagggaaaagcacgacgacgaaaaaaatcaaaatcaactcacgacgttggatgttataatagcagaaatcgaatgcttggaccaccacgggacagatccacgggatgaacaaggaagaagagaaccgtag

SEQ ID NO: 136853 - DNA, 2244 bp, Zea Mays
cagaggcggcggcagcagtggacgcggaggagccctagccagcctccgggtgccggcgcggcgaggtgagtggttcagtccgacggctggcgtccgcgtgtcggattgcgcgattcccgctgacattccggtgctggatttcggcaggttgtggattcgatggcggtggcgtcgcggctggcggtcgcgcgggtgtcgccggacggcgcgcgccccgcggcggcggcggcggcaggggggagggggaggagcgggctcgcggcggttcggctcccgtcgaccgccggttgggtgaggaggagggggcgcggcggggccgtcgcggccagccctcccacggaggaggccgtgcagatgacggagccgctcaccaaggaggacctcgtcgcctacctcgtctccgggtgcaagcccaaggagaattggagaattgggacggagcacgaaaagttcggtttcgaagtcgacactttacgccctataaaatatgatcagattcgtgacatactgaacggtcttgctgagagatttgattgggacaagataatggaagaaaacaatgttatcggtctcaagcagggaaagcaaagcatctcactagaacctggaggccaatttgaacttagtggcgctcctctcgaaacattacatcaaacttgtgctgaggtcaattcgcatctttatcaggttaaagcagttggagaggaaatgggaataggatttcttgggcttggctttcagccaaaatgggcactgagtgacataccaataatgccaaagggaagatacgaaataatgaggaattacatgcctaaagttggtactcttggccttgatatgatgttccggacatgtactgtgcaggttaatcttgacttcagttcagaacaggatatgataaggaaatttcgcgctggcctcgctttgcagcctattgcaactgcaatatttgccaattctccgttcaaagaaggaaaaccaaatggatttctcagcttaaggagccatatctggacagatactgataataatcgtgcagggatgctcccttttgtctttgacgactcatttgggtttgagcaatatgtggactatgcattagaagtccccatgtattttgtgtaccgaaataaaaagtatattgactgcaccggaatgtcgtttcgggattttatgcaaggaaagcttccacaggctcctggggagttgcccactcttaacgattgggagaaccatctaacaacaatttttcctgaggttaggctaaagaggtaccttgagatgagaggtgctgatggtggcccatggaggagattgtgtgcgttgcctgcattttgggttgggctgctgtacgacgaggaatcgttacaaagcattttagacatgacttttgattggacaaaggaggaaagagagatgctaagacggaaggtaccatcgactggtttgaagacgccgtttcgtgatggatatgtaagagatttagctgaggaagttctaaaactggccaagaatggactggaaagaagagggtacaaggaggttggtttccttagagaggtcgacgaagtagtgagaacaggagtgacgcctgcggagaggctgctgaacctgtacgagaccaagtggcaacgcaacgtcgaccatgttttcgagcatttgttatactgattactgaggatgacgccgccgaacgacgttggactgagcttgtagatgtaccccgtaccctaatacagagtctcgtcttgattcattcaatgcctgagccggaagggctcagtttcaggcacacaggagcagagctttcggttggttgttgacggggggcaaccgctgcacagcccggtgctgtgcctacaaataacttcgcctggaactggaacggatcactcatcactgtgctttgctttgacttgatctgcctgtctctccagggagatggaacaaactactgtttgtaccggcccgttttgttttgcagctatgaaaatcgccgtattgaaaataagtccgtcttctgcacgatggaactgtttgtttttcctttttttttggattgttgggacttgggatgtttgttcggggttaacatggcaaaagtgatctcatcgacgataaataaatgaactgatggtttgatccggaatctgcgatatctgcatgttcctttgtagccggtctttatggtctgctacctctgctacgataccttagggtacatgattttccgtacgcatcgtc

SEQ ID NO: 136854 - DNA, 89 bp, Zea Mays
ataaaccaagactacttattacaactattcagatagcaggatatagtggctgcagatggatagaaagatgttcaatgacaacatgcagc

SEQ ID NO: 136855 - DNA, 246 bp, Zea Mays
atgcagagcatccagcaactccgacttcccaaagtagccaacaggtgaactaaacgaaaagcagaaagacagcccgatgcgaaaggtctaacatgccatcgttgccaggctcaaggcacagacaagctccgacttccaatcttgacccactgccctgccttcgattttagcccgaccttcaaaacattctgaaccacgaagaagggaggttcgcctcatgtcatcgttgccgagccacatgccctg

SEQ ID NO: 136856 - DNA, 198 bp, Zea Mays
gttttcaataaatcatctcctaaatcatgtgtgcaggtaaccttcagggcgacatattggtgccacttctggtctcagcttcagcctagaagggaggaccaagagttaataaagtcttcatgtcgtgatgtggagagggtgctactacagttcttcagcaattttggatgggggtctgcgttgcgtttaactatgtag

SEQ ID NO: 136857 - DNA, 333 bp, Zea Mays
atggggctgggagccatgggcaggagacccgagcagggcaagcgcacggccatggagacgagggaggagctcggcgaactcaatgccgcgtgccggccagggagcagcagccgaccatggaagaggaagctgggggaccgcggcgcgcagagaagagccagggagaggggcgcgctaaggctaggagttcagctgtctgtagggaagagcgcggcggccatggagggacctcagcagggcgctcgcccatgggagatgcacggcgcggtcgggggaagaagacgagggagagagagatgcggctgtgagggagatggaggctggagaagatga

SEQ ID NO: 136858 - DNA, 701 bp, Zea Mays
ccatggtcggcccgaactccgcgttcgggctcgaccactccatggccaaggccatcatgagctcccgcgcctcggcgttcgccaagcgcagccagagcttcatcgaccgcggcggccgcgcgccggccgcgcgctcgctcatgtcgcagcagcccaccgccggcgcgccgtccatgctctccgactgggggtctccggacggcaggctggactggggcgtccagggcgacgagctgcacaagttccgcaagtccgcgtctttcgcgttccgtgggcagtccccggcccccgcgccggctcccgccgagccagacgtctcgtgggtgaactctcttgtcaaggacggccacgccggcgacatatttgcgcagtggtcggagcaggagcagatggtggcctaatctatcgaccgtcactgctggctcatagcatctagctgaccaaagttcattcctttccttcaattgttttccccctttgtttgcttaattcgattcatatgagatgttttttactagtacatatatataggacgttctataatatttgttcatcaccaagaagcatggatgcccaaagggagctctgtattggatgaggaaggaacacccagtattttacttgtacgaatttataaatattttttatatttatttatatcacttgatatatatataaaagatatcgagaggacagtaata

SEQ ID NO: 136859 - DNA, 118 bp, Zea Mays
gtgaggtcgtggccgtccgacgaaatgttccctgccagagaaacatgtgtacctcttgttccacagctccaactcctccacccaaagaaaaatgtttgcacacggggagggggaggtg

SEQ ID NO: 136860 - DNA, 349 bp, Zea Mays
cgatcatatacatataggcctgagtcagacatcaaatagcttcgatttgcattatccgtaggacaccttatatgtatcaaaatcgatatcaaaatcaaaaagatgtacaatccaatttctcgattcaatagaagcccaaagaggtgcatatggtacccaaataaggataggattattcgatgaaagtcgtatgtacggcttggagggatatctttcctatctttcgagatccaccctacaatatggggccaaaaagcccaaaaaaataagtgattcgtttttagcccttataaaaagaaaacggattcttgaacctctttcacggtcatgtcacgtcgaggtactgcag

SEQ ID NO: 136861 - DNA, 906 bp, Zea Mays
actggcttcaagtgatactagctgggatttagctcgaaatggcccacgtgccgatcggagctgggccggaaaatgcttgttcaggctttgaaattaacaccaaataaaaagaagaatggcgggcgcgtagagcattcgcagtagcagataaggcgcgttgcgttatctaatccgtccaagaggctgcggtgctcgctcaggctcactgctcagtgctcactgctcactagctaaaaacatctcctttcttatccatggagacggcagcgctcacctcccactccctgcagcgcccagcagcagcagcagctgctcccgcgcatggccagcggcggagggtcggagcggcgggcctgcggcaccggcagccgcgcgccggcggcaggatccgggccctgccttcggcggaggtcatcagcgagatcctgagccccaagctggtgcccggctcgcccgccgacaccggcgacgtctcctcgctcgtcccggtcagtgccctgatgctgctcttctacttcgtgtccaactgggtggtgcccgagctgctcctgaagggcctcaaggagcccaagcccgaggacgaagcgtccacgtccttcgccgcgtccgcggacaacgccgccgccgctggcccagcggacgacggcggcgcccgtaagatccgcctcaaggtcaagaagaagaagaacgggaaagcgaccatcgtcaaggtctaggtaggtaacaggggagcgcacgcatatggagcgtgcgagggcgtctccgacgtcatgataagttattaccaagtctccatcagaacatcgaaggagaaacactagtctactgattactgccagggtgatcttctgatcgccatgaaagctacagtgcttatttacaccaccttcatggatgatgaatgtt

SEQ ID NO: 136862 - DNA, 558 bp, Zea Mays
ttcgcatgtgcattcatttctaatgaaacaatagaaacattcaagtggatattcaagacattccttgaggccatgggagggaaacatccccgcacaacaataacagatcaagatagggcaatgagacctgcgatcaaagaggtcttccctgaaacagtgcaaaggaattgcttcttccacataaaaagcaaatgctaccagaaaaatggaaattgctttgcaagaaatataggaatgccagaggactttgaggacatagttaactattcactaactgtttctgaatttgagagggactggaagcaaatggttgaagactaccacctagaaaacaacaagtatttcagcaaaatgtgggaaacaagtgccaggttcataccagtatatttcaaaaatgacttcttcccattcttgcaaagcacaggtagaagcgaggggacaaactcaaggtttaaagacaatgtgactttgacttatagtgtgatcaactttttgcatgagtaccaaaggattgtggacccggtgaatgtgtcagaggagtatgaggataaagaaagc

SEQ ID NO: 136863 - DNA, 312 bp, Zea Mays
gaaaataatagtaatatacatttcataacataaacaatgatgtttatagcagcaacaggatgtgttaacaggatatgtttcaaaccagatatataactcgcaaggagaatcagtgagtgaagtaggcaatgaaatgcaaagtggcctatgcacacaaaatgaaaccatgaacaacaacctactagaagcaccatgtgagacatatacacagatgattcttgaggaggactccccgcttgcaaatgcagacatatccaaggtaagtgtgggggtctgtgggaaaaaataatagtaatatacatttcataacat

SEQ ID NO: 136864 - DNA, 313 bp, Zea Mays
aaaacaaactaaaacaaaatcatacatggaacaaaaaacatagtaccatacaatactttacatcaaaaaaacatcatacaaaaatcatgaaaataagcaacaccgaaacatcaagagcaaaacaaaacacacacaaattttgtttttctctggttaagtcacttgtcgatcttgatggccttaaactaacaggaaaaatgaagcatcaccataaaagcagcagcaaaacaaaacaatacatacatggaacaaaaaacatagtaccatacaatactttacattacaatataatacatcaagacaaacatcacac

SEQ ID NO: 136865 - DNA, 1317 bp, Zea Mays
atgatgaaagtgatcacaatggaaggggcagaaatactgcagctgctatatgtccacacgagccagctggtgttccaattgggctaggccaacttgctcctcctatagccacccatgttgtttatggtgcaacatcagcagtggcaacaggttgtgttaacaatgatgtttatagtggtgttgcttctgtggtgttgtctcagaatccaaaggcacatgctgctggtgcatttttagcagggaatgacactatatatgaacctacactagcattgaacttttcaaagttaaactcaactgaaagacataggaacttcggaggaataagtggcaaaaaggaagaagttattgtcattgctgatgatgtaggggctgatcaggaggttcaaactgctgctgttaatatggttggcgctaatttacatgagtcagaagctggggtattcttttcgagaaatcaattagaagttggaaatgtagtcaggaatgatgttggtgaaaattggttacaagttcaaaatgctcacgcccgttttccatgttctaatgtgctattgcgatattataatattcttcgtggcatggggcggagccaatggaaagatttggtcgcagtgcggttttccaaaaccaccactataaattgggaatcttttggactgtcaatagaacccaatgttgtattttccagtgtgcatgcgaaccattggtttttattcattgttgatttgaagaataagcgttttgtttttatggattcatattttgatgaggaagatccttttcaatgttttgttagagacaagtttattcgggtgttcaaagtcctatggttattatattctgattcaaacatagatgtatcatcattcaaaattttatatcccgcggtaccaaaacaggaaaatacgcatgactgcggtattttcacactacaatacatggaatattgggatatatttgttgatatgatgctcaagttcggcattgaggacatccctcaaatctgaattacattggccaacgatctatattttagagagaagaacactgaagacaagtctctagttcgcaacatgtttcttcaggttttttgtgattcaatttgggttgtttttttgggcactcttattattttgtttttctagttttttccttttttcgtgggtggtgcgtgcagtgctgatggtggtatgcagttttttgtttttgtgcatcattttttggtctgatttgctttttttataccagaatattgatcctcggattgtcaactagcatatttgaaccgttgggaagtagctgttcgtgttttct

SEQ ID NO: 136866 - DNA, 864 bp, Zea Mays
gggggcgtagctagttgaccagcaagtgatgtcaggttctcttctacaattaatgtttatttatacgtttgtatatgtgggttcagtcatcattcatacgctaataaaatccatcaaagctagctagctagatctgtgcttttgtcatcagtagatacgtaaatagaactgccatttctttcaaggaaaactgccagtgtggcttgtgcgaatcctttgggtgaaagccaaatgcatggtatcaactgcatatacatataagaagacttttgaggtccagacctctggcctgcttgctgtaaactttagtgcatatgctacctgctgctaaccttgttgatgatacttgatagtgtgcgtgtggtcataacaacaacttgtcggggaagctggtggtctcagtttcatttgttagtttgctactagcatgcatgaccatgtgagttcatgcatgacactagaaacaaaaactaagatacatgcatgcacgcgcgcgtgcgcgtgcacacagtgtcacacacacaggaggataaacaacaacgatatatatagtaatctgttatcttacatcatgaagcagcattttcatatttatgagttacttgtgcagataattattgagatcataatgacgggcaagtgacatcaacttatcgtgtttccgtgacctaatagtatatatctataagcatatatatacgtccaactagctagcctttttctgggcatcatgtcgtgttcactgttcacctttgatgagcgcgctcatgttgagtgttcacaatggcaacgggcaatcagaggaaacgtcgcttgtcagtatttgcttggctttagcctcagcccgacacaacgaatggacgt

SEQ ID NO: 136867 - DNA, 2380 bp, Zea Mays
caattcccaccactgacctgaccgcccgcacgccgcccttggcctcgatcacatcatccctccgctccacttttgccgccgtcctccgtctccctccccccgcgtccaaatccaaccatccccaccgcgcgcctccgccatggatcccttccaccacctcaacagctccttctccaatccctaccacccgctcctctccccgtcgccgccgcactttcccctgccgcccccgcccccgcagctgccctccgtctccgccgcctccagcgcgagcctcgagcgggagcgcctcccgcagtggtcccacgccgagacggccgccttcctcgccgtgcgcgccgacctcgatcactccttcctcaccaccaagcgcaacaaggcgctctgggaggccgtctccgcgcgcctccacgcgcagggcttcgcgcgcaccccggaccagtgcaagtccaagtggaagaacctcgtcaccaggttcaagggcaccgaggccgccgccgccgccgccgcggccgacccggcctccgcgcagcagcagcagccgaggccgcagttcccgttccacgacgaggtgcggcggatattcgacgccagggccgagcgcgcgcaggcattggagaggaagagggccaagggcaagggcgtccgcacggcggcggcggcggcgctggacgacgaaggcgccggcgagggggacgacgccgccgatgttgacgacgacgaagaggacgaggacgaagaggccgcggcgggcgacgaggaggccggcgggggcctgcctgctgcggcggacgcgggcggcagggccggcgcgaagaagcgcaggcggaagcaggcgcgcgccgccgccgctagggccgcggcggggcagggcgaggtggaggccatgctgcgggagttcatgcgccggcaggccgagatggaggagcgctgggcggaggccgccgaggcgcgcgaggccgagcgccgggcgcgcgaggaggagtggcgcgccgccatggtcgcgctgggcgaggagcgcctcgcgctcgtgcgccgctggcgggagcgcgaggacgccctgcgcgcgcgcgcagaggagcgcgaggagcgccgccaccagctcgtcgccgcgctgctcgccaagctcggcggcgccgactgctgacgtgtcgtgctgcgtcgatcggcatgcatgatgcatcatccatcgatcgatggtctccctcgcgcgcgcgcgccacgcgaccagctcgtccatccgaatcggcgaatccttcgaccccccgcccaccggagaaggaaaaaaaaacgatgtttcaccgcgaagcgtgcgcatcgtcggccggatagctactctactttacatatttagatggacatcgaccaccggtgcagtgatcgatcaatccatccatgtccatgcatcacccccatgatctttgttgattagggtttctctgctagaatgcatgcatgaggtgatgtgtatacatggcatatatatatgcttgttaggtaggtggtgaaaagggtttcatgatctatatattgcagctcaccatgcatgcaatctcatatttgtttagtagccatcactgatactataagtaggcttagctaatttcatcatatcctcagcttcaggatcggcttattgagctttttctggctttacaagtgcatggatcggaaggatggatgcatgctcttagcttctccttggtacttctccccatatatagagatcgatctcgaggcctcctctttcctccgtcgtctttagtctttacaagatgatccgtaggacctcccgcaccatggtcggtgcttttccgatccactcgaaaacgggtgtgtgtggtgatatgtctctgcaggccctgcgtagcttttgagcgacacggcctagtagccgcaagatcttgctccgtttcctctctctctctcttcagttgcatgggtaaagatatgcatctcactagcgaaaagagatttgcatctgaaaagttgtaggattggactggccggctaggatagatgatcaagaaagggagagagagaggatgcatggtggatactagctagaagcacatggttgctggtagagggtgcaggagcctgctttgctttgctttgcgctagcttatcatacaggaaggatcgagggaagggtatcgatgcccctgcggccttcccgttgcatatgcatactcttctaccttaggggaaaaaaagtcagaggtgtccagtagaagccactactgctgcatatatacacacgaccaaccaaagtagcaactagctaatcagcatctagtctctaatctctatgaggtgtgcttgcttgtgtttgaaacgataataactagtgtcaattacatgatcatctcctccctaa

SEQ ID NO: 136868 - DNA, 1590 bp, Zea Mays
ctcgatcacatcatccctccgctccacttttgccgccgtcctccgtctccctccccccgcgtccaaatccaaccatccccaccgcgcgcctccgccatggatcccttccaccacctcaacagctccttctccaatccctaccacccgctcctctccccgtcgccgccgcactttcccctgccgcccccgcccccgcagctgccctccgtctccgccgcctccagcgcgagcctcgagcgggagcgcctcccgcagtggtcccacgccgagacggccgccttcctcgccgtgcgcgccgacctcgatcactccttcctcaccaccaagcgcaacaaggcgctctgggaggccgtctccgcgcgcctccacgcgcagggcttcgcgcgcaccccggaccagtgcaagtccaagtggaagaacctcgtcaccaggttcaagggcaccgaggccgccgccgccgccgccgcggccgacccggcctccgcgcagcagcagcagccgaggccgcagttcccgttccacgacgaggtgcggcggatattcgacgccagggccgagcgcgcgcaggcattggagaggaagagggccaagggcaagggcgtccgcacggcggcggcggcggcgctggacgacgaaggcgccggcgagggggacgacgccgccgatgttgacgacgacgaagaggacgaggacgaagaggccgcggcgggcgacgaggaggccggcgggggcctgcctgctgcggcggacgcgggcggcagggccggcgcgaagaagcgcaggcggaagcaggcgcgcgccgccgccgctagggccgcggcggggcagggcgaggtggaggccatgctgcgggagttcatgcgccggcaggccgagatggaggagcgctgggcggaggccgccgaggcgcgcgaggccgagcgccgggcgcgcgaggaggagtggcgcgccgccatggtcgcgctgggcgaggagcgcctcgcgctcgtgcgccgctggcgggagcgcgaggacgccctgcgcgcgcgcgcagaggagcgcgaggagcgccgccaccagctcgtcgccgcgctgctcgccaagctcggcggcgccgactgctgacgtgtcgtgctgcgtcgatcggcatgcatgatgcatcatccatcgatcgatggtctccctcgcgcgcgcgcgccacgcgaccagctcgtccatccgaatcggcgaatccttcgaccccccgcccaccggagaaggaaaaaaaaacgatgtttcaccgcgaagcgtgcgcatcgtcggccggatagctactctactttacatatttagatggacatcgaccaccggtgcagtgatcgatcaatccatccatgtccatgcatcacccccatgatctttgttgattagggtttctctgctagaatgcatgcatgaggtgatgtgtatacatggcatatatatatgcttgttaggtaggtggtgaaaagggtttcatgatctatatattgcagctcaccatgcatgcaatctcatatttgtttagtagccatcactgatactataagtaggcttagctaatttcatcatatcctcagcttcaggatcggc

SEQ ID NO: 136869 - DNA, 218 bp, Zea Mays
ctcagtaggatggtcaaccacatgcacttcatcttcactgtccgagtcccacaacatcgcaggaacagtgccagtgcctccacccagctcgtcgttgtccagcgcttgctgctagcctcccttgcacaccagacgacagaacaaatcaccaagtgaaatacaacaagttatacaagaaatgcagtagtgttgtacctatcttgtggagagacgccacg

SEQ ID NO: 136870 - DNA, 756 bp, Zea Mays
accctactcgtttgccagacccgagcagtccatggaggcttcctccccacgtcgtgcttcttcacacactcagcctttatcgactcctccctcatctccatcatttcagccagcgacgggcgccctcctcctcgattccgtgtctggatgccgccccagccgtttaccgctgccacggcaagctcgctcggacacctcgcctcctcgtcgcatcgccttggcttctggtcgagtatgccctgcgctcgccactgcccttgagccggtcatccccgccgtgagtccctcccggctcggcatcaacgccagcgagcttggtccctgcgccctcccatctccctcacggtgtctgtccagccgccatgggtgcgctcgccccggcgctatccatcaacgccaccagccgcacgccaacctcacccttgccatggagcagcaacagccatggaaccccttcgtgtcgcgctctcgagtgctcaatgaaataccgcagcgagctccacctcgatctatgcagccccagttgtgacctcgtcgaaccccggtgagaacccgtagtctccttgtgtttattccttgttagtacctgtacacaacgtcgatttactagatgctaattatgtatatatttgtgtggtgagtaagagaattttagggaaaatttataaagaaacacgtttcagttcgacgcgctctaaatgttcgacgaaatgggagaaccaaggaactatcgtcgttcttgtatatatcgagttg

SEQ ID NO: 136871 - DNA, 948 bp, Zea Mays
aaacctttgggcacaatgttcatcatttatcatgcatatgctattttctcttgtattggtttagggtgtgatctccgtacatcgtgctccagccgcactcagatctagccttgaccgggagacaccgcaacaaggttggacgtgctcttcccgtcctcacgcccccacgccgctgcgcgctcttcccttcacctctcactacacggcgactgcggggcaggggtgaaagaggcgaggcttctccagcttctcgaggccggagaccgtttgctcaaggatgtcgttcttgacggcctctccgacagcgtggacgcgtagttctcagccatggccttggtcgcggcaagaagcagagcctggtgaggtcccatttcatgtgcttgtcaatagctgtatattataattcaggtaataatttaggtgccagagaagctcccagtgccccatgtgttggcagcatatcagcatgaaagatcctatgagccaagagctactagaggctgttgaacaagagaggaacatccgagctaatccttcacgtaatactgttgttttccaccatccaatgctgggtgattttgagatccctgtaggtgcagatgatgcagaacttgaagaacgcattattcagcacttggctgccgcagctgcagtgcgtaggtcacaccgtcatcataatagaagagatgggcaccagagcagatcaggagcaagtagccacccacattttctggtgctctcagcagacgagcgcactatctcaggtcaagaaggggactacgaacaagcacctgctgtagcttctggccgccctttacgtacacttgttgaacaagaacgcactcgagggttagctgatgcttccagtctcctgtgtgtaactattggacataaattgttctctatttttaggaaacgtgcaatacacagcaagaacagtttcaaaca

SEQ ID NO: 136872 - DNA, 2880 bp, Zea Mays
tcaccctccctgccccgtctccacgccacgccacgcggatgtcggcggtcgccgccggggcgcgcttctcctcctcctgctccacccgatgaccccgcggccgcgcctcctcctcctcctcctcccgctgctccagcccctcgccctcctcctcgccattgccgtgccagccgcctgcgccgcgtccacgctcgccgtctcggcgtcctccgcctccccgaccgtctgcggggtcgccgagctcagcggcacagtccactgcgcggcgctccagggcgcctccatctccaacgcctcgagcggccccgtcgcgccgtccgccatcgcgttcgcggagctctccgcggggcggggcttcgtgtgcggcctgcaggcggggggcgccgcgctcttctgctggccgtccacgccggcgccgcgctgggggcagctccgccggctgtacgacgggcccgccccgctcgcggacctcgccgccggcgccgaccacgtcgcggcctacgacgcctccggctccggctccgggaccgtcctgtggtggcgcggcggcggccgcttccccgcgcgtgccgacggcgcgttccgctccctcgtctccggcgacggcttctcctgcgccgtcgaggccagcgcgcccgcggccgtccgctgctggggcccgcggggcggcgcgttgcaggcgggcctcgccaacgcgtccgccgcgccgtgcctcgcggccgggggcgatcgcgcctgcgccgtcctggcctccggcaccgcgctctgctccggtgcccccgcggccaacgcctccgccgccgcgccgccgggggacctcttcggctacggcctcgccgtcggcgactcccacgcttgcgcgctccgtcggccctaccacaccgccgtctgctggagcctcggcgggcccaccaccaccctgtacgagccggccctggggatctccttcgagttcctcgtcgccggcggcaacttcacgtgcggcgtcgcgtccagcgacttcagcgtctactgctggtccgtgggcgccgtggccgcgccggtgccgctgccgaggatccgccccggcgtctgcgtcgccgacgacaccgcctgccgcgggtgcggcttcatgccgcagtcgcagcagttctgcgggggctccggcgggatctgcgacgccctctgtgacggttcgccgccgctgccgcctgctcccccaccccctccgccgcgtacaccgccgccgtcgtcgagtaggcgcgtgtccaaggcctggatcgcgttctgcgtggtcggcgcggcgggaggcttcgcggggctctgctccatcgtctactgcctcgtcttcggcttctgcagcaacaagcgggtgcacaactcggtgcagcccaacatcagcgccgccgccgacaacaaccacaaccacaacagcggcgtcgtgggcgggagcccgtacgggtcgccgaacgggtcgcgggcgcgcggcctgttccggcggcagctgtcgcgcgcgatgacgcggcagcgcagcgggccgtcgtcgttcaaggacgccgcggaggagttcaccttcgcgcagctggaggcggccaccaaggggttcgcgctggaggccaggatcggggaaggcagcttcggcaccgtgtaccggggcaagctctccgacgggcgggaggtggccatcaagcgcggcgagtgtgggccccgcgcgcaccggttccaggagaaggagagcgcgttccggtcggagctggcgttcctgtcccggctccaccacaagcacctcgtcgccctggtggggtactgcgaggagaacgaggagcggctgctggtgtacgagtacatgaagaacggcgcgctctacgaccacctgcaccccaaggcctcggcggcgccgtcgccggtggcgtcgtcgtggaagctgcgcatcaagatcctgctggacgcgtcccgcggcatcgagtacctgcactcgtacgccgtgccgccgatcatccaccgcgacatcaagtcgtccaacatcctgctggacggcgggtggatggcgcgtgtgtcggacttcgggctgtcgctgatggggcctctggagccagcaccgtcggaggatgacgccgccgccgccgcctggaggtcacggtcgcggtcacggtcgcagcacctgacggtggtgaaggccgccggcacggtggggtacatggacccggagtattacgggctgcaccacctgacggtgaagagcgacgtgtacgggttcggcgtggtgatgctggagtcgctgacggggcggcgcgccatcttcaagtcgggggagggcgggagccccgtgagcgtggtggactacgcggtgcccagcatcgcgggcggggagctcgggaaggtgctggacccgcgcgcgccggagcccgcggcgcacgaggccgaggccgtggagctggtggcgtacaccgccgtgcactgcgtccggctggagggcaaggaccgccccgccatggccgacgtcgtggccaacctggagacggcattcgcgctctgcgaggggagcgccggcggcggggtcggggtcgggaacagctcctccagtgctagcctctccgtcacgtccatggaccggtcgggagccctggcctgaccgcttgacaatgactggcgtggcggccaccaccattgttggtaggagcgagcttgtccctcagtccctgctgtgattagcaattattttttagcccgggaacgggaaagaaggaagggtggtcagattcgttgcttagttggatctctgaattcttcttgattcttgttcattcttcatttgggacgggaggactcaggactgtgacccaagttttgttcttggtgcatgtacattgattggtgattcttcttccgttccattcttgc

SEQ ID NO: 136873 - DNA, 124 bp, Zea Mays
ctatgcgcggaaaactggtgtgcgggattggacggctaagattgtagaacggtacaatggacggctgagatcgcagaatggcagaagacaaaaaggcaggctactattgctaacttaataagta

SEQ ID NO: 136874 - DNA, 692 bp, Zea Mays
cccgcctgtccggtgtcgcgtgccgaggctgtgaggccgtcgcgtctcgcgtcactggctccccgctcctcgcagcaccaaaaacgcggcaggccgagaaatgttcccgaccgcgaggaccatgacaccgagcaggagacggaggaaggggagcgggaggcggtggcggttacccgcgcctgcacctggcttcaagcctccgatccgcccaagaattcagtggaatggaagatatgacatatgccagaaccgagaaaatgtttggaaagtgagaaggtgctttgtattgggtgttaaaggactactatgtctgctattaaacatgtagaagaacacatttcagcataatctagtctacataagaatgttgacagcaagctgaaaaaagttcccatgaaactggtatctgtcaagaggatcactgaggcccagaataaaggcttcctttgttcattccaatccttaactggcagtcacttgcactattgagaatgagaatagatcgtctctgagacttggaactctatataggagtcagaggcaagagtctagttacccatttcgatgtatcatcatcactgtagttgagtatttacatggcgcggcgtgacgaggaagatatctgttccgccaacatcagcttggtcgtctttgagctcatcaatcaagcacgcgttgcattcaagcatcat

SEQ ID NO: 136875 - DNA, 172 bp, Zea Mays
aactaacaaatatgaaagtttagaggtacttataagcaaaagagggttaagtagttggtttccatcgtttgtcggtggtacaacgaccacagatcgtcaaagaataaatgccgcacaggatctatattatctttgctcaaaaatgcatcttctggcacaacaaatgtgaagt

SEQ ID NO: 136876 - DNA, 1487 bp, Zea Mays
gaaaaataaaaagatatttgaattcgagtgcgtagagcaacaaagtgaagaatgcagagaaagcaaggcagcagaggcgcctaagatttccagaaaccaagaccgcattattgaagacggcccagcacaaagcaaagccaggattccagggcatatataaataataaaaccctcgaggaggcgcaggcgcgcagcgcatgcacagtcatcaggtccaaaaggcttccaccacccaccagaccgacgaccactctcacaagcggcagtgcagtgcacccaaataaatcagctgggaggaggagcaccagcaccccaagagcagagctgagcagagcagcgtgcgtccaggatgtacccgtaccgcatgagcaacgtggcgatcggctacctgaacctggcgacgctgctggcctcgatcccggtcatcggcgcgggcctctggctggccaagggctcggcaacgcccacgtgctcctccatccttcaagcaccgctcctcgccgtcggcttcgccgtgctgctcgtgtccctcgcgggcttcgtcggcgcctgcttccacgtggcctgggcgctgtggctgtatctcgccgccgtgatgctcctcatcgccttcctcctcggcctcaccgtgttcgggttcgccgtcaccgcaggcggcggcggcgagcaggtgtacggtcggccgtaccgggagtaccgcgtcgccgactactccccgtggctgcagaggcacgtgcgggacgccaggtactggcgccccgcactcgcctgcgtcgtcgggtccagggcgtgccccaagatccacaactggactcccatggactacctccagcacgacctcacgccgatacagtccggctgctgcaagccgccgacggcgtgccagtacagcgggggcgtggccgtcggggcgcaggacgaggactgctaccgctggaacaacgccccgggcgtcctctgctaccagtgcgactcgtgcaaggccggcgtcatggagcaggtgcgccaggactggcacaagatcgccgtgctcaacgtcgtcgtgctcgtcgccctcgtctgcatctgctcctgcggctgctgcgccttcaggaacgcccgccgctccctctccgagtacccgtacggggtaaaccaaatgtccaagattgacccgcgctgggactactactggtggcgatggtggcgtggtagaagagaacagctctactaggctagctctagcttctcaatgcttgtatgatatcttagctcctgtcttccatcgaaaagatgaaataatacttgagagctgtgttagccccctatggtgctctacttgtttctagttgtacagcttcctccatgtctgcataattaagcttctgtacatatctgagttaagaggagactcgtcagcggatgcctagtttttttttcttcgatatggtttaactccaagtaacctatgcacattcatcataaatgcaaactagttacatttctgc

SEQ ID NO: 136877 - DNA, 2414 bp, Zea Mays
aggacccctattcttggctcagcaaatcctctcctcggcgcaaaggcatggagcgaatgctcatcccacctgaccacattttcccccacagagatcacatttaccgcgcacaaagcaccaacaacgatccacagcctgtttgcgagatctttagcacaaggagggaggcaggcatatagactcccacccgtgctctcattgtcagcacaacgaggcctgcggatcggtctgtgcgttctagagagaggggacgaggtttacccactgcgagagcggagaggggcagagaagagatccaaggttctggtacgtacagctgggagaagatgagctgcttcggatgcttcaagcccgacaagaaggtgccacccaggaggacggaatccagggaggtcacggtcgtcaacaaggcccccagccagaacgaagcgcctcccagggaatctgggtccatcaggccaccaccagttgcttcgaagcacaagcacaggccatcatctgaaacagcagcaagcatcgaacctcctaaaggaagttgttctgttgccaaaaccgcaaaagcattcacgttccgtgagctagccacggccacgaaaaacttccgctctgactgccttctcggagaagggggattcggcagggtatacaagggcaggcttgaaaacggacagcttgttgctgtcaagcaactagacctgaatgggtatcaaggcaacagagagttcctagttgaggtcctgatgctcagcctattgcaccatccaaacctagtcaatttggtgggctattgtgcagatggagatcaaaggcttctggtttatgagtacatggcacttggctcacttgcagatcacctgcttgatagcactcctgatcaagtgccactgagttggtatctcaggatgaagatagcttatggaactgcaaaagggcttgaatacctccatgagaaggcgaacccacctgtcatttaccgggatctcaagtcccccaacatccttctcgatgagaagtacaaccctaagctctcagattttgggctcgcaaagcttggcccagttgagggaaagacacacatctccactcgggtgatgggaacgtatgggtactgcgctccggaatacataagaacaggccagctaactgtcaagaccgacgtgtacagttttggggttttcctactggagttgatcacaggaagaagagcagtggatacctccaggccagcaagtgaacagatcctggttaactgggtcaagcccatgctgagagacaggaagagatacaatgagctagtagaccctcatcttagaggtgagtacccagaaaaagacttgagccaggctgtgggtgtggcagcaatgtgcctacaagaggaagcctcagtccggccttacatgagtgatgctgttgtggcactgggattccttgcagaaatgcctgctggctataaacacaaatctggacccatactccaaatgaaacaagttggagatccctcacgaactggtagcactaagcaagataaggatgcgtacaatcgtcaaaaagctgtagctgaggccattgagtggggctcactgaggcagaaacagaaggctcaaaatccagaaaagaaagctctaagtcaaggtatatcccctccagaagccagcagactgtgaaacacctctgctgtgcactaggttaccttctgacttgtaaccctccaattttgtgtaagacttagggccaaattgtcccacatagctgagagtttgtaaatgaaattcgtctctcataaagatgtaaggggtatatagtatttgctgttaacatatatgtgttggatcaggaaggaattcttattccatcttttatacataaagaccaattttgggtctacagttatacttaaccattgcccttctatcaaacatctgtagagaaggaaagaggagcacaatgaggttatactgttacactaattctatccaactacaatagttcatacttcatcgcattaaaaaaactcaggtgggcaagtggcagtaaaagctacagtatctaaaaaactcgacctgaaaagctacagcatctctttgaatctcttttactaccagacaaaaattttaagacttagagcctgtttcgaaaggaagcattactccatgagtttttatcataaacccctcactctaagcaggccctgacctgcagcatcaatataaacacttcagtaatgtccaccaaggtacttagagtcaatagaaccataaatcttgagatagtgatccattatttactatacagcaacaaagtctggacagagtctcttgtagttgtagcttcttatcatggtacatcactgaaaaactagagctgctcagacttcatcagtctttaaagcagtgtgcagttcttctttttcttga

SEQ ID NO: 136878 - DNA, 2807 bp, Zea Mays
gggccggcggggcgcacgtgtcccaccctcctcccctttccttccctctctctctatctgtctgcccagtccagtcccccgccccgcctcacagtcacacttcaccaatctcgcgcacactctccaatgacccaatctccccgagcctgccactgccagcgccagctcctccctggcattccagtcccagctccggatcgcttcacgggccgggaagcagcacccgcgctgcgcgcctgatgcgcgcagccaatgccggcgctcgcgtccaccgccatggcccgagccgccgcgcccatcctcctccacctcctcctccttctgctcctcctcactgaccacggccccggccccgccgccgcggtgcgcttcgactacgcctcgctcaccctcggcagcctgaggctgctgggcgacgcgcacctcaagaacggcaccatccgcctgtcccgggacctgcccgtcccgacctcgggcgccggccgcgcgctctacgccaccgcggtgcccctccgcgggggcttctccacgcagttcgccttcaccgtggccacgctcaacccgtcctccgtcggcggcgggctggccttcgtgctcgccaccgacggggccacgctcggcgacgcgggcgcgtacatcggcgtgtccgtcgccaccgacgccgccgccgtcgagttcgacacgctcatggacgtccagttcggcgaccccaacggcaaccacgtcggcctggatctcggctccatggtctcggcagccgcagccgacctcgggggcgacgatgccggcgtcgacctcgccagcggcaggaccatcaacgcctggatcgactaccgcccctcttcttctccttccggctccgccgccggtatcttggaggtcttcgtgtcctacgcgcccaagcaaccgcccaagcccgtgctctccgcgccgctcgacctcgcggaggccgtcaaggacgccgcgttcgtcggattctccgcctccactcaggggagcacggaggtgcacgccatcgagtggtggagcttctccaccgcgtcgccggccccgtccccgcgttccgccgcgccggcgccggagtcccaggcgctcccgcctcccgtcgccactccggtgctcccgtcgccgctgctcccgggagggacgacgacggcgccagcgccgccatccgggagcgccggcgcgcccgccgcctcgatcgccccgtcgtcaggcgccacggtggggaggaatgccgccggatcggggacgccgcgccctcccgcggccgtggccggcgccgccacggcaggcgccttcgtggccgcctccttcgcgggcgtcgcgctctgggcgctagcgcgccgcgcaagggccaggaagcggcaggccgcgttggcggtgggcaccaggcgcgacagcagcgtggcgtcggcggcggcgctcgcgcggtccccgcgggagttcagctacaaggagctgagcgccgcgacgaggggcttcgacgcgtcgcgcgtcgtcggcaacggtgcgttcggcaccgtgtacaagggcatcgtgccggacacgggcgccatggtcgccgtgaagcgctgcaccacgggcgcgcgcggcggcggcggcggcagcggcgagcaggcgcgttcggagttcctgtcggagctctccatcatcgcggggctccggcaccgcaacctgctccggctgcaggggtggtgctacgagaagggggagatcctgctggtgtacgactacatgcgcaacggcagcctggacagggcgctgttcgacgcgtcggcgcccgtgctgccgtggcggcaccggcgcgagatcctggccggcgtggcgtcggcgctggcctacctccaccacgagtgcgagcggcgcgtgatccaccgggacgtcaagtccagcaacgtgatgctggacgaggcgtaccgcgcgcggctgggcgacttcgggctggcgcggcaggcggagcacggcgagtcccccgacgcgacggcggcggcgggcaccatggggtacctggcgcccgagtacctgctgacgggccgcgccagcgagtgcaccgacgtgttcagcttcggcgcgctggcgctggaggtggcgtgcgggcggcggccgatcggcgccacccctgagggcgtcggcgggtgctgcagcaacctggtggagtgggtgtggagcctgcacgcggaggcccggattctgggcgccgtggacccgcggctgggcggggagttcgaggagggcgaggcccggcgcgccctgctggtggggctggcgtgctccagcccggagccggcgctgcggcccgggatgcgcgccgtggtgcaggtgctgggcggcgaggcggacccgccgttcgtgccggcggcgcggccgtccatgagcctcggcagcgccaaccagcagctgctgctgagcctgcaggacagcgtgtcggactaccacgccatgctggggctcccgctgtcggactcgtcgtcgtccggctcgctcagctcgtcctcgctcaccagcacgctgcgcaggggcggccacgacatccgggtcagcagcaccgccggcgaagccaggtgactgcctgagcctgaccgggggggtattgagtacataggattgtttgtttagtagcagcaatgcagtccagatcacatcatcaaagccagcctccattcgttacattattacacacatttgtctcgataataatacagagctcgcatgattccttcgattagctcagagctcagatcagccaattgtcctcttcctcgaaccgcaggaggatcagagattcaaaaacgccagcttttccc

SEQ ID NO: 136879 - DNA, 2224 bp, Zea Mays
gttgcagttgcagctctagccactcgctacttaaacgcagtgagtgctacctcctagtcgatcaccggtagtcgagaagtagcgaaccatagaatagtaatgtcgacggctttgaccatactgccattgctgctggtggtagcagcggctttcacgatcaaggcttgcgctgcagctctcgaggctctcccaggctgccaggacagctgcggcggcactgccatccgatacccgttcggcatcggcgccggttgctaccgcccgggtttcgagatcatctgcgatggcggcacgccggtgcttttcggcaccacgagggcggtcccgttgagcaacctctccatcagcacggcggaggcgctcgtgatgttgcccgtcgcctggcagtgctacaactcctcggaccaggtgtatgacgtcgactacggcgacgtgcagttcaacaaggccggcgtgtaccgcatctccaacgcccggaaccaggtcgtcgtcgtcggctgcaactccctgggctacaccgagagccagcggagtgaaggcagcgactactcctacgcctactacaccggctgcatgtgcttctgcaacaactctgcgagcgccgtggacggcgtctgctccggcgtcgggtgctgccatgtcgacttcccgtccggcctcaccaacaacaacatgaacttcagatcgtacacccataagaataggctggacttcagcccttgcgactacgccttcttcgtagacaagaactacacctttcacaccacagacctcaagatggatcgcaacaggacgatgccggtgtggctggactgggccatcagggacaaccagacccagacgtgcgaggaggccaagaaggggcaggggcacaactatgcctgtgtcagctccaacagtgactgttacaactctaccaatggacctggctacgtctgcaactgtagcatgggctacgatggcaatccatatgttaccaatggatgtactgatatcaatgagtgcgaacgcccgggatacccatgtttcggcaattgccggaacacggaaggttcatatgaatgcacatgccctagtggtacccacagtggtgatcctttcaaagaaccctgcagctccaattttcccttaccagcacaaatttccataggtgtagtaggtggtcttctcatcatagcagttcccgtgctggtcgccctgattctcaaagagaagagaaagatgaaagagttctttgagaagaacgggggtcccacgctagagaaagtcaacaacatcaagctgttcaggaaggaggacctgaagccgatcttgaaaagcatcaacctcatcggacaaggcggtttcggggaggtttacaaggggcatctccacagcaacagccagccagtcgcggttaaaaagccgaagaatgccgcgccgccgccggcgaagaagaagaagcagaagaccggcgacggcggcggtgccttggcacagaaggacgaccagttcgcgaacgaggtcatcatccagtcccggatcatccacaagaacatcgtcaagctcataggctgctgcctcgaagtcgacacgccgattctggtctacgagttcgtgtccaaaggcagcctcgacgacatcctgcacggcggcggcagcggcagcagcaccgtgcctctccgtctggaccggcgtctggacatcgctgcgcaatccgcggacggtctagcctacatgcactccaagactaccacgtccatcctgcacggcgacgttaagccggccaacatacttctggacgacaactttgtgcccaagatctctgacttcggtatatctaggctgatcgccatggataagcagcacaccaactacgtcattggcgacctcagctacatggacccggagtaccttcggtctggcatactgaccaacaagagtgatgtgtacagctttggagttgtgctcctggagctcatcaccaggaagaaggcctccgcttctgacaacaatggcctgctcaagaacttccttgacgcttacaccaaggacaacaggttggtcactgagctggttgatgcggaaatcgcggcgacggaaaatcttgagctcattcatagcatggcgggaatgatcgtgcagtgcctaaatctcgacattgacaaaaaggccggagatgacagatgtagccgagcgccttcagtacatggctaagagatctcgtggttaaatacatacaaat

SEQ ID NO: 136880 - DNA, 420 bp, Zea Mays
aagcccaagggatacacgtcccggtgcccccaccaccacctcaagttcattatccttggtcttcacctccacctacacctacatcatcatttacttgttacccctccagctaccttgccgacacatgaacgagaagacgggttagactttgtcgaaacgctcttcgctagtggaggtatcgaccatcactcgtcactgtaacccaacggtgatcgacgaccgtgagcttccatgttattgtgttctgatacttgagacttttattatgactatgtatgagatattgtctcttattagtactggatgagatgtcttattatgactatggatgagacttttctgatgtaattgatgagactatggatttaaatattgttatgtgattgtgtgtgagatgttttatctgaaaatatgttgtgt

SEQ ID NO: 136881 - DNA, 1830 bp, Zea Mays
ccccgacagttgttgtgtgtaagaaaaatagggtttcagtggcggcagcctccactcacgccgccgtcgcctccgagccccactgcccgatccagacaaccaccccgcccagatccagatccacctgtactggatctcacagcctccgcttctgctttcctttatgtcgtcgaccgcgatgtcttgggacgggtacggcgggcagatctaccctggaggcggtgttccagcagcctgagacgaccccccttgcaggcgccgacgggggagatggagctgccgagcaacgctggcgacggcgaactcctgcccatggaggagcacaaggagcgcgcgctgcggcacctactccgccgatccaagcgcccgctggaggagttcgtggccgccgtggcagacgtcgcggagcagctggtgagcgcgtatctggacctgggcgtcgagtggcgcggcgcagactggcgggagcggttcctggccagtcgtacgatagcgcgagctcgatggccaggcgtaggtacccaactgtcttcttccccttccttttagattccattgagattcgtcagaacttttatgcgagttccttttttagccgataattatgtcagtatcttgagataagatggatgaattggattcaacacatatatatttgttgtggatgtagccacctttcttgcttcgtgaattatttgttgtggatgtaattccaatggaaaatatatattattgaggttagcttcagctgcgttccagttatatcgcagttactcctgcttttgggattgagctggcgttttggttatttagagtgttaatttgactcttttagttgcattatagggatctgacatcatttaaaataatttaggatgatttcattagtgatatgattctgaaaaatggtaaaggatgctttagtttcgtccagcataatttacctaataattttaggacactaaatttggttgagaattccaaaaatgagcttaaatcatgtgatcggtccgctagcatcacatagttgttgtcttcctgtcgtgcccatgtatgtatcttggaacaagtttgtgtgaccaaataatttgcatcagggcacacgtcacaccgggtggcaactggcagggcaatgcccgatcaggtctccgtcgtcgattcgtctgaacagctatcctcatcatattttaatgtctcgagcataatacggagtacatatctgtatttacgtcagcgttattgcaacgctctctctccgtggtctcttctacatactataatagtagtacattagtactaacaatgtggttggccatggcatgcttgcttcgagatcaacatgaacaatggaagcacaagtacgggaatccatgtagaagcgtgaagattttccggtgccaattgccacggaataatgccttctactcagctcaacctccaaagcatgatggctctgacaaaccactctgtccaggagctcctgtatgccactggtgtggtacctggaaaggtgataaaatatgtagtagctgcaagaaagcaaggtactgttatgagaaacatcagggatttgtttggcttccaaatggtttgttggtcctaaaatagtcagaatcacatgacatctgtgctatagatatggacctcggtggttttctccacattaggaaagctggaagagccttttgaactcagtttttttgctaacagtggtgttatggtgaaacagagttttgtgtgtatgtaccaacagataaaatgtaaacacgacattatcatagttgagtacaggaataattatctcgtatatcttattgcaaaatctgaaac

SEQ ID NO: 136882 - DNA, 1338 bp, Zea Mays
ccccgacagttgttgtgtgtaagaaaaatagggtttcagtggcggcagcctccactcacgccgccgtcgcctccgagccccactgcccgatccagacaaccaccccgcccagatccagatccacctgtactggatctcacagcctccgcttctgctttcctttatgtcgtcgaccgcgatgtcttgggacgggtacggcgggcagatctaccctggaggcggtgttccagcagcctgagacgaccccccttgcaggcgccgacgggggagatggagctgccgagcaacgctggcgacggcgaactcctgcccatggaggagcacaaggagcgcgcgctgcggcacctactccgccgatccaagcgcccgctggaggagttcgtggccgccgtggcagacgtcgcggagcagctgggcacacgtcacaccgggtggcaactggcagggcaatgcccgatcaggtctccgtcgtcgattcgtctgaacagctatcctcatcatattttaatgtctcgagcataatacggagtacatatctgtatttacgtcagcgttattgcaacgctctctctccgtggtctcttctacatactataatagtagtacattagtactaacaatgtggttggccatggcatgcttgcttcgagatcaacatgaacaatggaagcacaagtacgggaatccatgtagaaggtgatgaaaatcttgtatctgtaatggtttttgttcagatatcttctgattttgatggtttgcagtggattgttttccagcgtgaagattttccggtgccaattgccacggaataatgccttctactcagctcaacctccaaagcatgatggctctgacaaaccactctgtccaggagctcctgtatgccactggtgtggtacctggaaaggtgataaaatatgtagtagctgcaagaaagcaaggtactgttatgagaaacatcaggcactgcattggcgtactggtcataaaaatgattgcctccagataataagttctgttgcttcaaattcagttctgccagctgtaggaatagctttgaggcaaattgaacagggatttgtttggcttccaaatggtttgttggtcctaaaatagtcagaatcacatgacatctgtgctatagatatggacctcggtggttttctccacattaggaaagctggaagagccttttgaactcagtttttttgctaacagtggtgttatggtgaaacagagttttgtgtgtatgtaccaacagataaaatgtaaacacgacattatcatagttgagtacaggaataattatctcgtatatcttattgcaaaatctgaaac

SEQ ID NO: 136883 - DNA, 1369 bp, Zea Mays
ccccgacagttgttgtgtgtaagaaaaatagggtttcagtggcggcagcctccactcacgccgccgtcgcctccgagccccactgcccgatccagacaaccaccccgcccagatccagatccacctgtactggatctcacagcctccgcttctgctttcctttatgtcgtcgaccgcgatgtcttgggacgggtacggcgggcagatctaccctggaggcggtgttccagcagcctgagacgaccccccttgcaggcgccgacgggggagatggagctgccgagcaacgctggcgacggcgaactcctgcccatggaggagcacaaggagcgcgcgctgcggcacctactccgccgatccaagcgcccgctggaggagttcgtggccgccgtggcagacgtcgcggagcagctggtgagcgcgtatctggacctgggcgtcgagtggcgcggcgcagactggcgggagcggttcctggccagtcgtacgatagcgcgagctcgatggccaggcgtagggcacacgtcacaccgggtggcaactggcagggcaatgcccgatcaggtctccgtcgtcgattcgtctgaacagctatcctcatcatattttaatgtctcgagcataatacggagtacatatctgtatttacgtcagcgttattgcaacgctctctctccgtggtctcttctacatactataatagtagtacattagtactaacaatgtggttggccatggcatgcttgcttcgagatcaacatgaacaatggaagcacaagtacgggaatccatgtagaagtggattgttttccagcgtgaagattttccggtgccaattgccacggaataatgccttctactcagctcaacctccaaagcatgatggctctgacaaaccactctgtccaggagctcctgtatgccactggtgtggtacctggaaaggtgataaaatatgtagtagctgcaagaaagcaaggtactgttatgagaaacatcaggcactgcattggcgtactggtcataaaaatgattgcctccagataataagttctgttgcttcaaattcagttctgccagctgtaggaataggcaaattgaacagggatttgtttggcttccaaatggtttgttggtcctaaaatagtcagaatcacatgacatctgtgctatagatatggacctcggtggttttctccacattaggaaagctggaagagccttttgaactcagtttttttgctaacagtggtgttatggtgaaacagagttttgtgtgtatgtaccaacagataaaatgtaaacacgacattatcatagttgagtacaggaataattatctcgtatatcttattgcaaaatctgaaac

SEQ ID NO: 136884 - DNA, 1843 bp, Zea Mays
ccccgacagttgttgtgtgtaagaaaaatagggtttcagtggcggcagcctccactcacgccgccgtcgcctccgagccccactgcccgatccagacaaccaccccgcccagatccagatccacctgtactggatctcacagcctccgcttctgctttcctttatgtcgtcgaccgcgatgtcttgggacgggtacggcgggcagatctaccctggaggcggtgttccagcagcctgagacgaccccccttgcaggcgccgacgggggagatggagctgccgagcaacgctggcgacggcgaactcctgcccatggaggagcacaaggagcgcgcgctgcggcacctactccgccgatccaagcgcccgctggaggagttcgtggccgccgtggcagacgtcgcggagcagctggtgagcgcgtatctggacctgggcgtcgagtggcgcggcgcagactggcgggagcggttcctggccagtcgtacgatagcgcgagctcgatggccaggcgtaggtacccaactgtcttcttccccttccttttagattccattgagattcgtcagaacttttatgcgagttccttttttagccgataattatgtcagtatcttgagataagatggatgaattggattcaacacatatatatttgttgtggatgtagccacctttcttgcttcgtgaattatttgttgtggatgtaattccaatggaaaatatatattattgaggttagcttcagctgcgttccagttatatcgcagttactcctgcttttgggattgagctggcgttttggttatttagagtgttaatttgactcttttagttgcattatagggatctgacatcatttaaaataatttaggatgatttcattagtgatatgattctgaaaaatggtaaaggatgctttagtttcgtccagcataatttacctaataattttaggacactaaatttggttgagaattccaaaaatgagcttaaatcatgtgatcggtccgctagcatcacatagttgttgtcttcctgtcgtgcccatgtatgtatcttggaacaagtttgtgtgaccaaataatttgcatcagggcacacgtcacaccgggtggcaactggcagggcaatgcccgatcaggtctccgtcgtcgattcgtctgaacagctatcctcatcatattttaatgtctcgagcataatacggagtacatatctgtatttacgtcagcgttattgcaacgctctctctccgtggtctcttctacatactataatagtagtacattagtactaacaatgtggttggccatggcatgcttgcttcgagatcaacatgaacaatggaagcacaagtacgggaatccatgtagaagcgtgaagattttccggtgccaattgccacggaataatgccttctactcagctcaacctccaaagcatgatggctctgacaaaccactctgtccaggagctcctgtatgccactggtgtggtacctggaaaggtgataaaatatgtagtagctgcaagaaagcaaggtactgttatgagaaacatcagggatttgtttggcttccaaatggtttgttggtcctaaaatagtcagaatcacatgacatctgtgctatagatatggacctcggtggttttctccacattaggaaagctggaagagccttttgaactcagtttttttgctaacagtggtgttatggtgaaacagagttttgtgtgtatgtaccaacagataaaatgtaaacacgacattatcatagttgagtacaggaataattatctcgtatatcttattgcaaaatctgaaacagttctcctgtag

SEQ ID NO: 136885 - DNA, 789 bp, Zea Mays
atggggccgcctggatcggcccattcgcttcctgacagcggctgtgcgcaagaaaaaatagggtttcggtggcggcagttgtacctccctccactcacgccgccgtcgccttcgagcccactccccgatccagacaaccacaccgcccagatccggatccacctagtgcagcacgatcgtggctaccggatctcagcctccgagggtgagagggagttgccgagcaatgggttgccgccggtggtggatgacgccggcaaccaggccgcgaccgtactacggaagcgaccgttccggacggattggcacagcaagatccgcacggcgcagggcgtccacgaccgccggatgcggctctcggtcggggtcgcgcgagagttcttcgcgctgcaggaccgcctcgggttcgacaaggccagcaagaccgtgaactagctcctcgcccagtccaagccggccatcgaccgcctcaatagagcgagactgggttctgaaaggcagttcgtcgcgccgcccaacagaacgcggccggagcagttcatcgcgccgcgcggcctatcaaaatccaggaggaattcgctgggcgcagatgtccttgtgaggcagtccagcagaaactcgctatgtgctgaggctcaagactgtgaactgaggtcccaagtcacctgttcgcctgttgttgccaagccaagggggaagtctgctcaagccggttctgtagaggtgggcgcagttgtccctttgaggcgttccaggagaaattcactgagagctgccgagtctgaagaa

SEQ ID NO: 136886 - DNA, 4398 bp, Zea Mays
atgtgttttccaacccctaccatcccctccctccccggcgcctcacccacaccaccccacagccccacgtcggtgcctactccaggcccggcggccactccctcctcccctttggcgccggaggccacccctgttcctctggccgttggccgttccaaggcccttaggtggcgcgacgatggaagcccggagtcctcttccgtggcttccctaggacttcatcgacgtaggccatcatacaaggaggctcttctccttcccaggcctgctcccttcctaggccgggaggatgactttggagctggctgggtgacagttgaaggaaggcaagctcgtcgacgccgccttcgccacctcaagccccctcctctttcccccagggtcgtgccttccgaccttcgggggaagtgttttaattgcttctctccttcccaccgtgctgctgtgtgtcgtcggcaggtgcggtgcttctgttgccggttgcctgggcaccgtgcttacgtgtgcccgcgtcggcgatcagccgcacccctgccgcagcgaggactggtgtggcggcctgtctccctgtcctctgggatggccggctcaaatgacagtctcgctggaagagtcgtggatggaggtgaagatggcggtggcgtactgaagaggcgcacccgccgtggactgaggaggagaagatctggaaacctgagggatagcgccgatcaagatgcaattgttgcggtgccttcccaacgtccggccgatcagtgccacgatcgtgcattggggaggcccaggaggatcatcaaacactccaggatgattcttcaggcagaagataacctccggcgggccctgatcatcactgtcattgatcaatcgaattctggctgcgccgcggacgtgtctgacgcgctcgctgtgaggtttaacctcgatgcgcagacgctcgacctccgtcgtgctgcgccgaattcattcatcgcgtttctccccaatgaagaggtggcgtgccgggtcttcaatggcggcattccttttgtctctcccaccgttcgtcttcacatcaaacgctggtccagacatgccatggccgtcggcgggagggagctaccagtgccagttgacatcgagttgagaggaatccctgctcacctctgggggttggaaacagcaacacaacttctcgatgaatattgcctcattcgagatgtgcatcctgactccgcggaaggcggcgatctttcagtcttcaagttgagtgcatggtgcgacgagccagagctggtgccggcggaattagatcttctggcggaggagccgcagttgggtgccagtgacttcggcagttttcctcacactctggtgttcccaatcaccgtgcgggtgtgccgttcagatgcgatcttggacaggaggccctcgcctccgccgcagccaccattttccggcgacgatcgcgagcagaaccacggcaagcggcggcgggatcaacattcaatttcttcggtgcctggacgcaggccagtgcacgcgcgtctcgggccatgcgtccggaccgactctgcgcctggggggacatgtgaaacgatcgcgctcccggttcccttgggggcagtgagcaccgcttcggcttctcgaccccgggcgcgcctcgggccttgtggtggtgccggctctgcgcctggatgtacagttgggacgttcagtgccccgggacccttgagcgctgtggttgctgtgggggctgaagaagccgcttcgggctctacaattccgacgccagcccctttggtttctcccccaacggcgctcgtcacttcggttatagtcccaggagccgccaatgctttaacaaccggctctccatctgaagatcctgggcccgcctcattaattggtgcaatttcctctggtctattggattctgagaggccaattctgcatgacaactcatttaatgtggcggcttttgaggaggctggcggttttcagaggttaggacagggcccagaaaatctttgtgctgatgcttcaggacgggcctctgtgccattttctcatgtcccgcatgtcccagatgtccctgctgataatgctgcacaagtcaggaatccctgggatattatcaagtactcactgcaagcaaaaccaccatgctttaaggtgtactctagaagacgagataccgtgcctgtgcaatcccaggaatggcaatgcccaatatgtttaaataattactctctcgagaacttgatgattgatccttatttcaatcggattacttctttgttgcacaattgcagtgaagatgttaatgaacttgatgttaaacctgatgggtcatggcgtgtgatgggtgatgccgctaccagagatttatctcagtggcatatgcctgatggtactctttgtgactcaaaggaagatacaaaccctggtgtcgcaagtgttaatgagttcaagagagagggtgcttctgatgaacatagaactttgaaacttggaattaaaaaaaaccctattggattatggcaggttagcagtaaagcagatgatatgaaacctgtggttagaaatcacatccaaaataacactgggttttcaacaccaaacattgtgcctatgatcagtagccccactgggagttacagagatggcgaagatgtaagtgtgaaccaagaagggggtggtattcaatttgatatatcattgaaccaagagtttgacagttttgcccacaactttggtcagacatacaatacagaggatagaccacaacatccacaccataatgctgcagatgtcattgttcttagtgattctgatgaagaaaatgacccgactgttcagccgccagctgtctatgaaaatactcctacaaatgatgacagttttcctttcgtcactgatgctgccggatctggatatcctgaaaggtaccaggaggatgctagtgttggtacaagtggtcttggtttattgaggcagaacactggtgaatttgaaataaataactggcaaatgctttcttacccacaaccagagcaagggtttcagttttttgtgactgatactgatgttggcaatccttttgttgctccacataattcctttactattgcaccagaagactactctcttggctgtaatgttggaatagaggacccctctgcagctcacgatgtttcaatttgccgaaacagtaatgatgtgcatggaagcttggttgataacccactggcattaacaggtgacgatccatctttgcaaatttttcttccaagtcaaccttccactgttccccttcagcaagaattgagtgagcgttctgatactccaaatggagtccaccctaacgattggaggatatcgcttacgcttgccgctggtggagggggcaatgaagagtctacaagtgttggcggtctaaaatcacaaccaaaagtttcatcgaaagaggcaggagttgaacctttacttgatgctgcctgtcaagcatttccaggatcatcgaggttaacttttgaagcttctgctcttggaagcatgaacaatgacagatgcactggatctaatctaaatcctaaaaggattgaaaatatattttctcatcctcgccaaccgcggtctgttaggcctcgtctgtgtttgtcattagatactgattcagagtagtttggacatcacactgggatagctgaatttgctattaatctggtaaagttggcttccagaatcttgatcgttactgtggagggctatctggttattctggttgatacaaagagatacaccagtgtggatgctttgttgcattaacctggtaagattcaagtgttctatatgatccaagtgggatctgcatagagttcatctaatggttggtacaggatattttctaactgggagtggtttaatgtggctagtggagcaggctgtacattgtccctgacatttactgggtataaaggaatagggggccatcacttggcacaagacaaatacatgtgttgtgtgtaccatcattgtatttagggtttgggtgctaatttagatgtttattaccctgacgtttgatggagaataaattattccttgaagtggtggtcaataaacagagagcccttcggttttgagtcggagctgctgaccgttcatctgttcttgttgcgaagtggtcgctcccgctttggttcagctgcagctttcatggcgggactgaccatgccaaagtcttgtgtagcagagggcaatctccatgatgtcatgcgatacaagtgatctgtattttgccctacaggatgacaagtttctttgtgcaacatgctgtattattggttcgatactctttactatgtgggttcagtgcaggtgcataggacataccggcagtctccggactttgct

SEQ ID NO: 136887 - DNA, 377 bp, Zea Mays
aagaattatccctgaaagggaaaactactaattctattcacacagtgcattattcaccaagttatgctctatttactcttctcttcctccttgacactattattgatgtccaggtattaagcttgatcccaaaggaaggtgaaggggagtcttttgaggatgctcttgctcgtgttcgtcgttgtcttggaggtggaggtgctacagacaatgctgatagtgatagcgatctggaagtggttactgaatctgttacagtcaaccttcgttgccctaatagtggatccagaatgaggattgctggaaggttcaagccttgtgttcacatgggctgttttgatcttgaaacttttgtggaattgaatcaacgctcacgc

SEQ ID NO: 136888 - DNA, 1434 bp, Zea Mays
ccgcggcggcggctgacgggctgagaataggagagagaaacccctctttctcttcctctccttctcgacgaacccgtcccacaagcacgtgcgagccaaggcagacaagagcgaggtggagagagggagagagagtgagtgagagaggaaaaccccgcccccgtccaggcaaccttcgtcgacgcatacggcggaggccacagaggcgccacgcgagggagccccgccgcagcagcggccgcgaattcggcacccccggatctccttgccggcgcccggggccccgatcgcctcctccccatggtcgtgcccctccgggcgttctcctcgcgcgggcgcctgccatgtcggacctcgcttccaccagcaaggataaacttgcgtattttagaataaaggagctcaaagatatcttaaatcagctggggttgccgaagcatggaaagaagcaggaccttgttgacagggtattggcagaattatcagatgagcaaggtcaacgccatcatggatggggaaggaaaaatgctcttacaagggaggcggtggcaaaagttgttgatgacacatacagcaggaaaatgcaagtatgtgctcctgaccttccctctaggagtcacagtgggtcagatttcaatcattttaggcccaaagaggaagccactgacttctactatgtggagactaaggtccgctgcctttgcaatagcacaatgctaaatgacaagattatcaagtgtgaagatggcaaatgccagctgtggcagcattttacctgcgtactcattccagatacacccacggagggtgctggccctgatattccacctcatttttattgtgaactgtgccgactgaaccgggcagatccgttttgggtgactacagcaaatccactactacctgtgaaatttatctcatctggtgttggaaatgatggagcaagcgcacctcaaattgtggagaagaccttccaactttcccgagcagaaagagaaacagtccagaggccagaatacgatctccaggtttggtgcattcttgtaaatgacaaagtccagttcaggatgcaatggcctcaatatgcagaattgcaagtgaacggtattcctgtacgagtaatgaccaggcctggttctcagttactagggataaatggacgtgatgatgggccactggtaaccacatgcagtagagaagggattaataaaattagcttatcaagagttgatgctcgaaccttttgctttggagttcgaattgttaggaggaggactgttcctcaggttttgtttatttggctttctacatatcatgtagttgaaataactaggatcgcatgatttcctgttttgtaaatgatgtctatgtattgtcaactttgagcttgtttcatgttaaatatcatcaagacaacaatattttgtgttgaca

SEQ ID NO: 136889 - DNA, 768 bp, Zea Mays
atgtctctgcccggtgcccagatagcaaaaggattgtggtgtttactaagacaccataggccagtaaaaaatcgctggtgcatgtggatttgcaccactgcaacagaaaacggctgcagcggtgtatgccctgaaaaatttgacaatagcatcagcggtgtatgccctgtcaccggcaaggatcatggtagcaacctcaaggaaagtcgtgatcatggtgaagaaaagggcaaggatcctcatgtggtaccagcaaaacgcccatttggttatgactccaacacttccaagctgggtctgcttagctccattgtttgccagacactgctccatgaaagtagaaaatgtaagttgtgtacccataaattctgcaaggcatgtatatcatgctttaaagacagcccactatgtggtgccgatatagaattcaagctcttgttcaccgattcaatgatggtcatgccagaatcaagcgatcacatgctacaggggatgtggaagcagcaggtggcaagaataaagtcatatatgaggatgttttcatggagagatgggcttttgtggcgcagcaagctgtgagggctttttgtgtctaaaacattggaagtgcaaagtcaaggctcactatgtgtgtagacgatatcaaggagttaaaatgttcagaagatagacctatgttcacaactttgagctgtgttaggaatgcttggggactgttggtatgtctgttggtccttaactatttcccctcaatagttgttttcactt

SEQ ID NO: 136890 - DNA, 2001 bp, Zea Mays
gctcctcctgccgtcctcgctcctccccacctcccgcggcctcccacgcgacatgattgcattgcgggctgccgcggagctcagctctcctgtcctgccaccaccacgccgctgacgatgccttcctctcgcctgcctctgcctgcgcacaaccgaaacggctagcccgcccttcctcccctcccctttgcttccgcaccaagatttgggcgggcgttccttcttccgataaagtgccgagccagggtgactgttccgaggagcgtggcgtggacccatggggaagaagggcaagtggttcggcgccgtcaagaaggtcttcagccccgaatccaaggagaagaaagaggagaggctaaggaggaaatcagcagctagcaacccagcaccggtagatctgaccccatctacctccctggaagtcaatgtttcggtgccaccccctccggctcctcctccagttcctcgccagaccgacgaggtcagggtccccgaagccgagcaggagcagagcaagcatgtcaccctggaggaggcccctgctgctgctgctgccccagcacaggcgtcggtgctgccacctggtgcgccaaccgaagagctcgccgcaatcaagatccagaccgccttccgaggttacctggcaaggagggcactaagagcactacgaggccttgtacgattgaagtcattggttgagggtaattcagttaagcgtcaatctgcaagcactctgcgctgtatgcaaactctatcgcgggtgcagtcacaaatacgatctaggagagcaaagatgtccgaggagaaccaggccctccaacgccagctcctacttaaacaggaactggagaatttcagaatgggtgagaactgggacgacagcactcaatccaaggagcaaatcgaggcaagcctaataagcaggcaagaggcagcgataagaagagaaagagctcttgcatatgcattttcacatcagtggaagagcacatcaagatctgcgaacccaatgtttgtagacccaaataacttgcagtggggctggagctggttggagcgctggatggcagcaaaaccttgggagggacgcaatgggaccgacaaggagagcaacattgatcgcggctccgtcaagaatatgagcttgaaccttggagttggagagggtgagatcacaaaagctttcaaccgccgggactcaaagccagagaagccatcaccaccgactccaaaaccggcccgtccagcttccaggcaatccccttcgacgccctctgctagagtggccccaatacctgcgaggaggaaatccagcacgccaaagaatgggctttcacaggtggacgatgacgtgaggagcgtgctcagtgtgcagtctgagcgaccaaggaggcacagcatagccacgacgtcgaccatgcgggacgatgagagcctcgcgagctccccgtcgctcccgagctacatggttcccacagaatctgcgagggccaaatctcgcacagcaacggccaatggcgcagagacgcctgagaaaggaggctctgctggaccagtcaagaagaggttgtctttccaaggtggagctgcggctgcctcaccgatgcgacggcattctggccctcccaaggtggagagcgctgtgaaggacattgctgcgccaccacagcctgaggccttggtagccaatggtggtggaagcaagtgacttgtattgacaagttccaggatgggggagcgggttatggtcttatggagggacatgtttcatccgtgaacagaagttaagagtggtgccggatctacgaatggtttgaattgttttcccgttacaaccacattgtttgctgtataagattcactgtacctgccagttggttccatttgttgttttctgtaaaacaaacatcaatttgtcactagaatctgtgatgcttgtatgtaaacaggtcctctatttatgtgagccatatatttcattttcagaagattccttgtgct

SEQ ID NO: 136891 - DNA, 1780 bp, Zea Mays
gatccgctgtgtccccagctgtccaaagtcccactcccagcttccctccccctaaaaaactctcacacatcaccgcgagagaggaggctgagccgcggaggagcagcggcgcatcgcaacactaaccaaagaggctaaggaggaaatcagcagctagcaacccagcaccggtagatctgaccccatctacctccctggaagtcaatgtttcggtgccaccccctccggctcctcctccagttcctcgccagaccgacgaggtcagggtccccgaagccgagcaggagcagagcaagcatgtcaccctggaggaggcccctgctgctgctgctgccccagcacaggcgtcggtgctgccacctggtgcgccaaccgaagagctcgccgcaatcaagatccagaccgccttccgaggttacctggcaaggagggcactaagagcactacgaggccttgtacgattgaagtcattggttgagggtaattcagttaagcgtcaatctgcaagcactctgcgctgtatgcaaactctatcgcgggtgcagtcacaaatacgatctaggagagcaaagatgtccgaggagaaccaggccctccaacgccagctcctacttaaacaggaactggagaatttcagaatgggtgagaactgggacgacagcactcaatccaaggagcaaatcgaggcaagcctaataagcaggcaagaggcagcgataagaagagaaagagctcttgcatatgcattttcacatcagtggaagagcacatcaagatctgcgaacccaatgtttgtagacccaaataacttgcagtggggctggagctggttggagcgctggatggcagcaaaaccttgggagggacgcaatgggaccgacaaggagagcaacattgatcgcggctccgtcaagaatatgagcttgaaccttggagttggagagggtgagatcacaaaagctttcaaccgccgggactcaaagccagagaagccatcaccaccgactccaaaaccggcccgtccagcttccaggcaatccccttcgacgccctctgctagagtggccccaatacctgcgaggaggaaatccagcacgccaaagaatgggctttcacaggtggacgatgacgtgaggagcgtgctcagtgtgcagtctgagcgaccaaggaggcacagcatagccacgacgtcgaccatgcgggacgatgagagcctcgcgagctccccgtcgctcccgagctacatggttcccacagaatctgcgagggccaaatctcgcacagcaacggccaatggcgcagagacgcctgagaaaggaggctctgctggaccagtcaagaagaggttgtctttccaaggtggagctgcggctgcctcaccgatgcgacggcattctggccctcccaaggtggagagcgctgtgaaggacattgctgcgccaccacagcctgaggccttggtagccaatggtggtggaagcaagtgacttgtattgacaagttccaggatgggggagcgggttatggtcttatggagggacatgtttcatccgtgaacagaagttaagagtggtgccggatctacgaatggtttgaattgttttcccgttacaaccacattgtttgctgtataagattcactgtacctgccagttggttccatttgttgttttctgtaaaacaaacatcaatttgtcactagaatctgtgatgcttgtatgtaaacaggtcctctatttatgtgagccatatatttcattttcagaagattccttgtgct

SEQ ID NO: 136892 - DNA, 1899 bp, Zea Mays
gatccgctgtgtccccagctgtccaaagtcccactcccagcttccctccccctaaaaaactctcacacatcaccgcgagagaggaggctgagccgcggaggagcagcggcgcatcgcaacactaaccaaaggtgccgagccagggtgactgttccgaggagcgtggcgtggacccatggggaagaagggcaagtggttcggcgccgtcaagaaggtcttcagccccgaatccaaggagaagaaagaggagaggctaaggaggaaatcagcagctagcaacccagcaccggtagatctgaccccatctacctccctggaagtcaatgtttcggtgccaccccctccggctcctcctccagttcctcgccagaccgacgaggtcagggtccccgaagccgagcaggagcagagcaagcatgtcaccctggaggaggcccctgctgctgctgctgccccagcacaggcgtcggtgctgccacctggtgcgccaaccgaagagctcgccgcaatcaagatccagaccgccttccgaggttacctggcaaggagggcactaagagcactacgaggccttgtacgattgaagtcattggttgagggtaattcagttaagcgtcaatctgcaagcactctgcgctgtatgcaaactctatcgcgggtgcagtcacaaatacgatctaggagagcaaagatgtccgaggagaaccaggccctccaacgccagctcctacttaaacaggaactggagaatttcagaatgggtgagaactgggacgacagcactcaatccaaggagcaaatcgaggcaagcctaataagcaggcaagaggcagcgataagaagagaaagagctcttgcatatgcattttcacatcagtggaagagcacatcaagatctgcgaacccaatgtttgtagacccaaataacttgcagtggggctggagctggttggagcgctggatggcagcaaaaccttgggagggacgcaatgggaccgacaaggagagcaacattgatcgcggctccgtcaagaatatgagcttgaaccttggagttggagagggtgagatcacaaaagctttcaaccgccgggactcaaagccagagaagccatcaccaccgactccaaaaccggcccgtccagcttccaggcaatccccttcgacgccctctgctagagtggccccaatacctgcgaggaggaaatccagcacgccaaagaatgggctttcacaggtggacgatgacgtgaggagcgtgctcagtgtgcagtctgagcgaccaaggaggcacagcatagccacgacgtcgaccatgcgggacgatgagagcctcgcgagctccccgtcgctcccgagctacatggttcccacagaatctgcgagggccaaatctcgcacagcaacggccaatggcgcagagacgcctgagaaaggaggctctgctggaccagtcaagaagaggttgtctttccaaggtggagctgcggctgcctcaccgatgcgacggcattctggccctcccaaggtggagagcgctgtgaaggacattgctgcgccaccacagcctgaggccttggtagccaatggtggtggaagcaagtgacttgtattgacaagttccaggatgggggagcgggttatggtcttatggagggacatgtttcatccgtgaacagaagttaagagtggtgccggatctacgaatggtttgaattgttttcccgttacaaccacattgtttgctgtataagattcactgtacctgccagttggttccatttgttgttttctgtaaaacaaacatcaatttgtcactagaatctgtgatgcttgtatgtaaacaggtcctctatttatgtgagccatatatttcattttcagaagattccttgtgct

SEQ ID NO: 136893 - DNA, 1912 bp, Zea Mays
gatccgctgtgtccccagctgtccaaagtcccactcccagcttccctccccctaaaaaactctcacacatcaccgcgagagaggaggctgagccgcggaggagcagcggcgcatcgcaacactaaccaaagtcctcctctccaggtgccgagccagggtgactgttccgaggagcgtggcgtggacccatggggaagaagggcaagtggttcggcgccgtcaagaaggtcttcagccccgaatccaaggagaagaaagaggagaggctaaggaggaaatcagcagctagcaacccagcaccggtagatctgaccccatctacctccctggaagtcaatgtttcggtgccaccccctccggctcctcctccagttcctcgccagaccgacgaggtcagggtccccgaagccgagcaggagcagagcaagcatgtcaccctggaggaggcccctgctgctgctgctgccccagcacaggcgtcggtgctgccacctggtgcgccaaccgaagagctcgccgcaatcaagatccagaccgccttccgaggttacctggcaaggagggcactaagagcactacgaggccttgtacgattgaagtcattggttgagggtaattcagttaagcgtcaatctgcaagcactctgcgctgtatgcaaactctatcgcgggtgcagtcacaaatacgatctaggagagcaaagatgtccgaggagaaccaggccctccaacgccagctcctacttaaacaggaactggagaatttcagaatgggtgagaactgggacgacagcactcaatccaaggagcaaatcgaggcaagcctaataagcaggcaagaggcagcgataagaagagaaagagctcttgcatatgcattttcacatcagtggaagagcacatcaagatctgcgaacccaatgtttgtagacccaaataacttgcagtggggctggagctggttggagcgctggatggcagcaaaaccttgggagggacgcaatgggaccgacaaggagagcaacattgatcgcggctccgtcaagaatatgagcttgaaccttggagttggagagggtgagatcacaaaagctttcaaccgccgggactcaaagccagagaagccatcaccaccgactccaaaaccggcccgtccagcttccaggcaatccccttcgacgccctctgctagagtggccccaatacctgcgaggaggaaatccagcacgccaaagaatgggctttcacaggtggacgatgacgtgaggagcgtgctcagtgtgcagtctgagcgaccaaggaggcacagcatagccacgacgtcgaccatgcgggacgatgagagcctcgcgagctccccgtcgctcccgagctacatggttcccacagaatctgcgagggccaaatctcgcacagcaacggccaatggcgcagagacgcctgagaaaggaggctctgctggaccagtcaagaagaggttgtctttccaaggtggagctgcggctgcctcaccgatgcgacggcattctggccctcccaaggtggagagcgctgtgaaggacattgctgcgccaccacagcctgaggccttggtagccaatggtggtggaagcaagtgacttgtattgacaagttccaggatgggggagcgggttatggtcttatggagggacatgtttcatccgtgaacagaagttaagagtggtgccggatctacgaatggtttgaattgttttcccgttacaaccacattgtttgctgtataagattcactgtacctgccagttggttccatttgttgttttctgtaaaacaaacatcaatttgtcactagaatctgtgatgcttgtatgtaaacaggtcctctatttatgtgagccatatatttcattttcagaagattccttgtgct

SEQ ID NO: 136894 - DNA, 2373 bp, Zea Mays
gatccgctgtgtccccagctgtccaaagtcccactcccagcttccctccccctaaaaaactctcacacatcaccgcgagagaggaggctgagccgcggaggagcagcggcgcatcgcaacactaaccaaaggtacacacacgcttccctcctgcgcttctccctccctccgcgactgctcccacgcagctgttgccctccggaaatccaaagctcccggcctcctgcactgcgtccctgtcaggcctgctaagctccagccaaaaaatcgttggcctcggtctggtgcctgctcctcctgccgtcctcgctcctccccacctcccgcggcctcccacgcgacatgattgcattgcgggctgccgcggagctcagctctcctgtcctgccaccaccacgccgctgacgatgccttcctctcgcctgcctctgcctgcgcacaaccgaaacggctagcccgcccttcctcccctcccctttgcttccgcaccaagatttgggcgggcgttccttcttccgataaagttgacacccgtcgtctcgtcgtgggcctggcagatactgataggtggtctggttcgtgacttgttcagtcctcctctccaggtgccgagccagggtgactgttccgaggagcgtggcgtggacccatggggaagaagggcaagtggttcggcgccgtcaagaaggtcttcagccccgaatccaaggagaagaaagaggagaggctaaggaggaaatcagcagctagcaacccagcaccggtagatctgaccccatctacctccctggaagtcaatgtttcggtgccaccccctccggctcctcctccagttcctcgccagaccgacgaggtcagggtccccgaagccgagcaggagcagagcaagcatgtcaccctggaggaggcccctgctgctgctgctgccccagcacaggcgtcggtgctgccacctggtgcgccaaccgaagagctcgccgcaatcaagatccagaccgccttccgaggttacctggcaaggagggcactaagagcactacgaggccttgtacgattgaagtcattggttgagggtaattcagttaagcgtcaatctgcaagcactctgcgctgtatgcaaactctatcgcgggtgcagtcacaaatacgatctaggagagcaaagatgtccgaggagaaccaggccctccaacgccagctcctacttaaacaggaactggagaatttcagaatgggtgagaactgggacgacagcactcaatccaaggagcaaatcgaggcaagcctaataagcaggcaagaggcagcgataagaagagaaagagctcttgcatatgcattttcacatcagtggaagagcacatcaagatctgcgaacccaatgtttgtagacccaaataacttgcagtggggctggagctggttggagcgctggatggcagcaaaaccttgggagggacgcaatgggaccgacaaggagagcaacattgatcgcggctccgtcaagaatatgagcttgaaccttggagttggagagggtgagatcacaaaagctttcaaccgccgggactcaaagccagagaagccatcaccaccgactccaaaaccggcccgtccagcttccaggcaatccccttcgacgccctctgctagagtggccccaatacctgcgaggaggaaatccagcacgccaaagaatgggctttcacaggtggacgatgacgtgaggagcgtgctcagtgtgcagtctgagcgaccaaggaggcacagcatagccacgacgtcgaccatgcgggacgatgagagcctcgcgagctccccgtcgctcccgagctacatggttcccacagaatctgcgagggccaaatctcgcacagcaacggccaatggcgcagagacgcctgagaaaggaggctctgctggaccagtcaagaagaggttgtctttccaaggtggagctgcggctgcctcaccgatgcgacggcattctggccctcccaaggtggagagcgctgtgaaggacattgctgcgccaccacagcctgaggccttggtagccaatggtggtggaagcaagtgacttgtattgacaagttccaggatgggggagcgggttatggtcttatggagggacatgtttcatccgtgaacagaagttaagagtggtgccggatctacgaatggtttgaattgttttcccgttacaaccacattgtttgctgtataagattcactgtacctgccagttggttccatttgttgttttctgtaaaacaaacatcaatttgtcactagaatctgtgatgcttgtatgtaaacaggtcctctatttatgtgagccatatatttcattttcagaagattccttgtgct

SEQ ID NO: 136895 - DNA, 207 bp, Zea Mays
ggatacttgaggagtgatgtcccattacaaaactgataaatgcactatttcattgtcaagatgattcactttataaaaagaaaataccatagacaaatgcatcaagtatgtgcaaatgtgttatcaggtataaacttagaatatggaaaaaaacaaagacagagggctaaataaatattttacttgtggaggtacagtttcccggcg

SEQ ID NO: 136896 - DNA, 1446 bp, Zea Mays
cctcacccgacgcccaaagaagcagagcaggcaacggcacagcagagagaaggcagcacagttagagagagagagagagagagagaggcgcagagccaaggaagcggagcagagcaacagcagcaggtcgaggaagaggagaagagaaggtccaggagacagcacagcagccaggaagagcaagagcaagatgctgcgcgggggcacgggcatgctgggggttgtcaacttcataaccttcctgatctcgatcccgatccttggcggcggcatctggctggcgtcgcgggccaactccaccgactgcatccgcttcctgcagtggcccatcatcgtggtggggctcgtcctcatggtcgtctccctcatgggcttcgccggcgcctgctaccgccagacctggctgctccgcctctacctcttcgccatgttcttcgtcgtcctcgcgctcctcttcttcgtcgtcttcgccttcgccgtcaccgaccgcggcgccggccaggtcgtcatgagccgccgcttccccgagtaccagctctccgactacggcggatggctccgcgaccgcgtcgccgacccgcagtactgggccaccatcagcgcctgcctccgcgacggccacgcctgcgccggcatgaggcgcctcgcgcgggaccccaacacgggcatgctcgtgccggagacgcccgccatgttctacggccgcaacctctccccgattcagtctggatgctgcaagccaccgacgtcatgcgcattcacctacatgaacgagacgtactgggaacaaaaccccggtgtcccgaccgtgaccaatgaccctgactgcagcaggtggagcaacgaccagcagatgctgtgcttccagtgcgactcgtgcaaggccggcgtcctcgcgggcatcaagaagagctggcgcaaggtggccgtcctgaacatcgtggtgttgatcatccttgtgattgtctatgtcgcgggctgcgccgcgttccgcaacgccaagaggatcgacaacgacgagccggtgggcatggcgcggatgaccaagtcccatccaagcaggttccagttctaggcaggcagctgctgccgtgggttcggaagcttctgccttgtacagatgatggccagtgggtggtgctaaggcttgggctttgctatatctttactgagatgtggattgtactgcatttgggggtgaaaaggggaagttcagtgtggtttgatttagtgtttagggtaggtatgttatgtggtagggggtacaatatgggatctgcaagaaacaagagaagataaatcatctaggaactgttctgtattggagattttttttttaaaaaaaatctgggggatatttgtatgatggtgccagccatgatggaatattttctgaatttctcactgtatgggaatattagggttcttcactttttgtttcttcac

SEQ ID NO: 136897 - DNA, 1554 bp, Zea Mays
ccccttacactctcggtggccagtggcctggtctgttcggctccgagcctccgatttatcgattcgattccatcatccctctcccggcgccctgccgtcctgcgggagggaggtgcaagcggaaccagcccggcaatggcagctgcgcggcggccgggggcgaagcccaggggcggcggcggcgcggggaagaggagcgcgtggttggcggcggacggcagcaagcgctggggggaggccttcttcctgctctacacgcccttctggctcacgctctgcctcggtgtcgtcgtcccattcaagctctacgagaggttcacggagctggagtacctgatccttggcttggtgtccaccgtcccggcgttcgtcatccccctattcctcgtagggaaggcagatagtgttagaaatttcaaagatcgatattgggtcaaggctaatatttggattataatttttagctatgttggtaactacttctggacacattacttcttcacagttcttggcgcgtcatatacttttccatcatggaggatgaataatgtacctcatacgacatttctcctgacccatgcttgtttcctgttctatcatatggcatcaaatatgacacttcgtagattgcgccattctacagctcatttaccacagtctatttgctggttatttgaagctgcatggattttagcactgtcatacttcatagcgtacctggagaccctagccattgcaaatttcccgtactatgaattcgttgaccgggatataatgtacaaagtaggttccttgttctacgcaatatacttcatcgtcagcttcccaatgttttcaaggattgacgagaaagacgagaagtggagcctgtccagggtagccgtcgactctctgggcgcagcaatgctggtgacgataatactggacctatggcgcatatttctggggccaatagttcccgtcccagagtcgaggcagtgtggccaaccagggctcgcatggttccaagcgcagaacggaagcacctgattcagtgaagctgcaagttctgcgtttccacttgaatacttcatcatcacctagcattcaccgaggcggagatcttagagcaataaccctcgagagaaatcatggcctcactccttttgataaatagctgtgccttctgtggccggatgcaattgtgcaaatgccactttcagtagttatatttgtatgttttctccgtttggtgaattacagagagatatgtctgtaacgtgaacaagatcatgctgttctaattcctgaaactctatgtggtgctttgtgatcggattatttttaggtgtcgtttgcttcgttggggtgtaggtgtaaccgatttgattacagcggcatccgattacgttgttgcattgtttgagccacaacttttaatgtgctaccatgtatgtaatcatatacgaactaaaatgcagtgttatctagtatgcctcccaccaaagtgtaatgcgataccagaacttacctgatctgaaccaaacaatataaataatagcttactttcttttc

SEQ ID NO: 136898 - DNA, 1633 bp, Zea Mays
acaacgaaccaaacaaacactactttttgcatgtgtagatgcagctgcaccaccggacaaggcaaccaaacgcccccttacactctcggtggccagtggcctggtctgttcggctccgagcctccgatttatcgattcgattccatcatccctctcccggcgccctgccgtcctgcgggagggaggtgcaagcggaaccagcccggcaatggcaggcgcggctgcgcggcggccgggggcgaagcccaggggcggcggcggcgcggggaagaggagcgcgtggttggcggcggacggcagcaagcgctggggggaggccttcttcctgctctacacgcccttctggctcacgctctgcctcggtgtcgtcgtcccattcaagctctacgagaggttcacggagctggagtacctgatccttggcttggtgtccaccgtcccggcgttcgtcatccccctattcctcgtagggaaggcagatagtgttagaaatttcaaagatcgatattgggtcaaggctaatatttggattataatttttagctatgttggtaactacttctggacacattacttcttcacagttcttggcgcgtcatatacttttccatcatggaggatgaataatgtacctcatacgacatttctcctgacccatgcttgtttcctgttctatcatatggcatcaaatatgacacttcgtagattgcgccattctacagctcatttaccacagtctatttgctggttatttgaagctgcatggattttagcactgtcatacttcatagcgtacctggagaccctagccattgcaaatttcccgtactatgaattcgttgaccgggatataatgtacaaagtaggttccttgttctacgcaatatacttcatcgtcagcttcccaatgttttcaaggattgacgagaaagacgagaagtggagcctgtccagggtagccgtcgactctctgggcgcagcaatgctggtgacgataatactggacctatggcgcatatttctggggccaatagttcccgtcccagagtcgaggcagtgtggccaaccagggctcgcatggttccaagcgcagaacggaagcacctgattcagtgaagctgcaagttctgcgtttccacttgaatacttcatcatcacctagcattcaccgaggcggagatcttagagcaataaccctcgagagaaatcatggcctcactccttttgataaatagctgtgccttctgtggccggatgcaattgtgcaaatgccactttcagtagttatatttgtatgttttctccgtttggtgaattacagagagatatgtctgtaacgtgaacaagatcatgctgttctaattcctgaaactctatgtggtgctttgtgatcggattatttttaggtgtcgtttgcttcgttggggtgtaggtgtaaccgatttgattacagcggcatccgattacgttgttgcattgtttgagccacaacttttaatgtgctaccatgtatgtaatcatatacgaactaaaatgcagtgttatctagtatgcctcccaccaaagtgtaatgcgataccagaacttacctgatctgaaccaaacaatataaataatagcttactttcttttc

SEQ ID NO: 136899 - DNA, 1342 bp, Zea Mays
ggtcccgcgcacgcgcttgtttccaggagcggcccgcgcacgcgtatctgacccgcggggttctcctctcctccctctcgcagctgcgcggcggccgggggcgaagcccaggggcggcggcggcgcggggaagaggagcgcgtggttggcggcggacggcagcaagcgctggggggaggccttcttcctgctctacacgcccttctggctcacgctctgcctcggtgtcgtcgtcccattcaagctctacgagaggttcacggagctggagtacctgatccttggcttggtgtccaccgtcccggcgttcgtcatccccctattcctcgtagggaaggcagatagtgttagaaatttcaaagatcgatattgggtcaaggctaatatttggattataatttttagctatgttggtaactacttctggacacattacttcttcacagttcttggcgcgtcatatacttttccatcatggaggatgaataatgtacctcatacgacatttctcctgacccatgcttgtttcctgttctatcatatggcatcaaatatgacacttcgtagattgcgccattctacagctcatttaccacagtctatttgctggttatttgaagctgcatggattttagcactgtcatacttcatagcgtacctggagaccctagccattgcaaatttcccgtactatgaattcgttgaccgggatataatgtacaaagtaggttccttgttctacgcaatatacttcatcgtcagcttcccaatgttttcaaggtaaaataatgaatccgagcagatgtggccaactagttccataatcatattctactgttttggtttctttgtgtggttcaggattgacgagaaagacgagaagtggagcctgtccagggtagccgtcgactctctgggcgcagcaatgctggtgacgataatactggacctatggcgcatatttctggggccaatagttcccgtcccagagtcgaggcagtgtggccaaccagggctcgcatggttccaagcgcagaacggaagcacctgattcagtgaagctgcaagttctgcgtttccacttgaatacttcatcatcacctagcattcaccgaggcggagatcttagagcaataaccctcgagagaaatcatggcctcactccttttgataaatagctgtgccttctgtggccggatgcaattgtgcaaatgccactttcagtagttatatttgtatgttttctccgtttggtgaattacagagagatatgtctgtaacgtgaacaagatcatgctgttctaattcctgaaactctatgtggtgctttgtgatcggatta

SEQ ID NO: 136900 - DNA, 133 bp, Zea Mays
gtgtttatgagtgcaaaattcttcaaaacatgtcggtttatcttgaggatgtttcttgaaatttttttggaaccttcaaaacatttttcgaatattaaacgtgaaatttaaattttttgatattattttaatc

SEQ ID NO: 136901 - DNA, 396 bp, Zea Mays
atggcgtgcgcgcgcccgtctctgttccgtcttccattttgcagccgccgccgctactctgctcaccgctcaccgctccaccgctcgctgtcgcgcgcgcgccctggcctgctactcactggcccgccacgccgctcgccggctgctcgcccgcctcgcgcccgcccgtcccgctcgccaccgccaccccggactccaccgccgccccggcccgtgcgcccgcctgctactcgttcgccccgccaccgccggctgctcgagcgcctcgccgcagctatctgctcggccgccccgccaccgccgcccgtcgcttcaccgtttcgtcgcttaaggaaattatgtcaattaggctaatcaacttgagaagctaactgttgcatataatataattatgtt

SEQ ID NO: 136902 - DNA, 858 bp, Zea Mays
atggccatctatgtctggctcctcccctccgttgtctccctcctcaagcaccaagccttggtccctgctcccggctccctcatcttcaatcccttgaccgccctccccagcgatgtgcctccaagtctcaagccagctccgcctcctcccacatctcccccacaccgccgtcacctagctccttgctcccatggccgcaccccctccatggattcttccagctggggctcgcaggacgtcgcttcctggatgggctcctctacagagcgccctcaacccttccccaagctcggctcagtgtggaagatagccatcggacgccgcacaccaacctcgccgtttccgagcccaaccccgccatggagctcacggcgcctcctgctgctcaaccttgggctctgggacgctgctccctacttgtcctcgactctctgccatcggacccaccctgctccagctgtcggacatcgccagcccctgcgccgaccatcgcatctcatgggtgtgcagtcgttctcctcaagctccgtcatggcgtcatggtgcttgactgcgctccactatctcatcgcactggctgtcgaccttgttggtcctccccatgtcgaaccagcaagctctgccatcgtcactcagctacacgcctccacctcgccaagtcccacacaaccgtgctactccctcgtcgtcgtccgttcctattttccccccgccatatgccgcctcgccatgatgcgtgtcgtcgtctttgatctcattagctcttccgatacgcgcctcgccgtgcttcgcctcctcgtggtcagcaccatctgggccatgagggcggtagatctcgacactccttcacatatctag

SEQ ID NO: 136903 - DNA, 1499 bp, Zea Mays
gtttttggcttgttctcccactaacgcttggcgactcacgagtcgagggtttctctcctgcgcggcggctacctctctccacggcggcggcgggcgatcctgcagatcccgcggctccctccgcgattcgagtcagactcagatgggggaaggcacagagagcggcggcggggcgaccacagcgccgcctctgaggtatataaggtgctacaagtgcgggttctgcgacgtggtccggtccaagaagtgcttgctccgcgcccacgtgcttgagcaccacaaggatgaggtggatgctttggggggttactgggaaggtggagatgctggtccgcgcaaagagatcagccgtgcgtgcgaacagtgcgggatgagcttcaagaagcaggcgcatctgaagcaacatatgcagagccattcgctcgagaggcccttttcctgcactgttgatggttgcccctttagctatagcaggaaggatcatttgaacagacatttacttactcatgaagggaaactatttgtgtgccctgtcgaaggatgtggccgtaagttcaatatcaagggtaatatgcagagacatgttcaggaaatccacaaagatgtctctccttgtgaaagcaagaaagaattcatctgtccaaaggttaactgtgggaaggctttcaaatatgcttctaagttaaagaagcacgaagaatcacatgtccagctggaatacacagaagttatgtgctgtgagccaggctgcatgaagttcttttcaaacatggaatgcctgaaggcgcataaccaatcttgccatcaatatgttcagtgtgatatctgtggtacgaaacagctaaagaagaatttccagcgccatcatcggatgcatgaaggttcctgcgtcactgagagggttaaatgccacatcgaggactgcaaatgttcgttctcgaagaaatccaatttggacaagcatgttaaggcggtacatgagcagcgtcgtccttttgtgtgccaattctctgggtgtggcaagaggttttcttacaagcacgtaagggacaatcatgagaagtcaagcgctcatgtgcacactgagggtgattttgtcgaggctgatgagcagcggccacgttcagtaggtgggtgcaagaggaaacccgtatctgttgagagtttgatgcgtaagagggtagccgctcctgacgatgggcctgctcatgctgatgcaactgaatatttgagatggcttctgtcggtttgattggacgttcaagtgcactttgtgtagttggaaacatcagcgatttacttggcatgtataggaagatgaatgtctctagtatgttatgtaaatgtttatgtacggtatcagaaatacagatcattggacctcaattataaaggcaatatgctgtattggcaagatcttgaatgtaagagcggttgctcatgatcattagatctatgtgtcttcagcacagcttggcaacatgttttggtatgttcgc

SEQ ID NO: 136904 - DNA, 1495 bp, Zea Mays
gtttttggcttgttctcccactaacgcttggcgactcacgagtcgagggtttctctcctgcgcggcggctacctctctccacggcggcggcgggcgatcctgcagatcccgcggctccctccgcgattcgagactcagatgggggaaggcacagagagcggcggcggggcgaccacagcgccgcctctgaggtatataaggtgctacaagtgcgggttctgcgacgtggtccggtccaagaagtgcttgctccgcgcccacgtgcttgagcaccacaaggatgaggtggatgctttggggggttactgggaaggtggagatgctggtccgcgcaaagagatcagccgtgcgtgcgaacagtgcgggatgagcttcaagaagcaggcgcatctgaagcaacatatgcagagccattcgctcgagaggcccttttcctgcactgttgatggttgcccctttagctatagcaggaaggatcatttgaacagacatttacttactcatgaagggaaactatttgtgtgccctgtcgaaggatgtggccgtaagttcaatatcaagggtaatatgcagagacatgttcaggaaatccacaaagatgtctctccttgtgaaagcaagaaagaattcatctgtccaaaggttaactgtgggaaggctttcaaatatgcttctaagttaaagaagcacgaagaatcacatgtccagctggaatacacagaagttatgtgctgtgagccaggctgcatgaagttcttttcaaacatggaatgcctgaaggcgcataaccaatcttgccatcaatatgttcagtgtgatatctgtggtacgaaacagctaaagaagaatttccagcgccatcatcggatgcatgaaggttcctgcgtcactgagagggttaaatgccacatcgaggactgcaaatgttcgttctcgaagaaatccaatttggacaagcatgttaaggcggtacatgagcagcgtcgtccttttgtgtgccaattctctgggtgtggcaagaggttttcttacaagcacgtaagggacaatcatgagaagtcaagcgctcatgtgcacactgagggtgattttgtcgaggctgatgagcagcggccacgttcagtaggtgggtgcaagaggaaacccgtatctgttgagagtttgatgcgtaagagggtagccgctcctgacgatgggcctgctcatgctgatgcaactgaatatttgagatggcttctgtcggtttgattggacgttcaagtgcactttgtgtagttggaaacatcagcgatttacttggcatgtataggaagatgaatgtctctagtatgttatgtaaatgtttatgtacggtatcagaaatacagatcattggacctcaattataaaggcaatatgctgtattggcaagatcttgaatgtaagagcggttgctcatgatcattagatctatgtgtcttcagcacagcttggcaacatgttttggtatgttcgc

SEQ ID NO: 136905 - DNA, 1775 bp, Zea Mays
gtttttggcttgttctcccactaacgcttggcgactcacgagtcgagggtttctctcctgcgcggcggctacctctctccacggcggcggcgggcgatcctgcagatcccgcggctccctccgcgattcgagtcagactcagatgggggaaggcacagagagcggcggcggggcgaccacagcgccgcctctgaggtatataaggtgctacaagtgcgggttctgcgacgtggtccggtccaagaagtgcttgctccgcgcccacgtgcttgagcaccacaaggatgaggtggatgctttggggggttactgggaaggtggagatgctggtccgcgcaaagagatcagccgtgcgtgcgaacagtgcgggatgagcttcaagaagcaggcgcatctgaagcaacatatgcagagccattcgctcgagatacagatgtgtgaagcattggatctcaaagaactccaaaatgcgagaaggccttgaacggactagtaccaggatggggagaccctcctgagaagctccatcaagagttccttcattcacgctattcttcaggcaatttgttgacatatgaatgcgtgaagcattggatcccaaagaactccaaaatgcgataaggccttgaatggactagtatcaggattgggagaccatcctgagaagctccatcaagcatgccttgttcacgcgtttcttaagaggcccttttcctgcactgttgatggttgcccctttagctatagcaggaaggatcatttgaacagacatttacttactcatgaagggaaactatttgtgtgccctgtcgaaggatgtggccgtaagttcaatatcaagggtaatatgcagagacatgttcaggaaatccacaaagatgtctctccttgtgaaagcaagaaagaattcatctgtccaaaggttaactgtgggaaggctttcaaatatgcttctaagttaaagaagcacgaagaatcacatgtccagctggaatacacagaagttatgtgctgtgagccaggctgcatgaagttcttttcaaacatggaatgcctgaaggcgcataaccaatcttgccatcaatatgttcagtgtgatatctgtggtacgaaacagctaaagaagaatttccagcgccatcatcggatgcatgaaggttcctgcgtcactgagagggttaaatgccacatcgaggactgcaaatgttcgttctcgaagaaatccaatttggacaagcatgttaaggcggtacatgagcagcgtcgtccttttgtgtgccaattctctgggtgtggcaagaggttttcttacaagcacgtaagggacaatcatgagaagtcaagcgctcatgtgcacactgagggtgattttgtcgaggctgatgagcagcggccacgttcagtaggtgggtgcaagaggaaacccgtatctgttgagagtttgatgcgtaagagggtagccgctcctgacgatgggcctgctcatgctgatgcaactgaatatttgagatggcttctgtcggtttgattggacgttcaagtgcactttgtgtagttggaaacatcagcgatttacttggcatgtataggaagatgaatgtctctagtatgttatgtaaatgtttatgtacggtatcagaaatacagatcattggacctcaattataaaggcaatatgctgtattggcaagatcttgaatgtaagagcggttgctcatgatcattagatctatgtgtcttcagcacagcttggcaacatgttttggtatgttcgc

SEQ ID NO: 136906 - DNA, 1771 bp, Zea Mays
gtttttggcttgttctcccactaacgcttggcgactcacgagtcgagggtttctctcctgcgcggcggctacctctctccacggcggcggcgggcgatcctgcagatcccgcggctccctccgcgattcgagactcagatgggggaaggcacagagagcggcggcggggcgaccacagcgccgcctctgaggtatataaggtgctacaagtgcgggttctgcgacgtggtccggtccaagaagtgcttgctccgcgcccacgtgcttgagcaccacaaggatgaggtggatgctttggggggttactgggaaggtggagatgctggtccgcgcaaagagatcagccgtgcgtgcgaacagtgcgggatgagcttcaagaagcaggcgcatctgaagcaacatatgcagagccattcgctcgagatacagatgtgtgaagcattggatctcaaagaactccaaaatgcgagaaggccttgaacggactagtaccaggatggggagaccctcctgagaagctccatcaagagttccttcattcacgctattcttcaggcaatttgttgacatatgaatgcgtgaagcattggatcccaaagaactccaaaatgcgataaggccttgaatggactagtatcaggattgggagaccatcctgagaagctccatcaagcatgccttgttcacgcgtttcttaagaggcccttttcctgcactgttgatggttgcccctttagctatagcaggaaggatcatttgaacagacatttacttactcatgaagggaaactatttgtgtgccctgtcgaaggatgtggccgtaagttcaatatcaagggtaatatgcagagacatgttcaggaaatccacaaagatgtctctccttgtgaaagcaagaaagaattcatctgtccaaaggttaactgtgggaaggctttcaaatatgcttctaagttaaagaagcacgaagaatcacatgtccagctggaatacacagaagttatgtgctgtgagccaggctgcatgaagttcttttcaaacatggaatgcctgaaggcgcataaccaatcttgccatcaatatgttcagtgtgatatctgtggtacgaaacagctaaagaagaatttccagcgccatcatcggatgcatgaaggttcctgcgtcactgagagggttaaatgccacatcgaggactgcaaatgttcgttctcgaagaaatccaatttggacaagcatgttaaggcggtacatgagcagcgtcgtccttttgtgtgccaattctctgggtgtggcaagaggttttcttacaagcacgtaagggacaatcatgagaagtcaagcgctcatgtgcacactgagggtgattttgtcgaggctgatgagcagcggccacgttcagtaggtgggtgcaagaggaaacccgtatctgttgagagtttgatgcgtaagagggtagccgctcctgacgatgggcctgctcatgctgatgcaactgaatatttgagatggcttctgtcggtttgattggacgttcaagtgcactttgtgtagttggaaacatcagcgatttacttggcatgtataggaagatgaatgtctctagtatgttatgtaaatgtttatgtacggtatcagaaatacagatcattggacctcaattataaaggcaatatgctgtattggcaagatcttgaatgtaagagcggttgctcatgatcattagatctatgtgtcttcagcacagcttggcaacatgttttggtatgttcgc

SEQ ID NO: 136907 - DNA, 881 bp, Zea Mays
gtttttggcttgttctcccactaacgcttggcgactcacgagtcgagggtttctctcctgcgcggcggctacctctctccacggcggcggcgggcgatcctgcagatcccgcggctccctccgcgattcgagtcagactcagatgggggaaggcacagagagcggcggcggggcgaccacagcgccgcctctgaggtatataaggtgctacaagtgcgggttctgcgacgtggtccggtccaagaagtgcttgctccgcgcccacgtgcttgagcaccacaaggatgaggtggatgctttggggggttactgggaaggtggagatgctggtccgcgcaaagagatcagccgtgcgtgcgaacagtgcgggatgagcttcaagaagcaggcgcatctgaagcaacatatgcagagccattcgctcgagatacagatgtgtgaagcattggatctcaaagaactccaaaatgcgagaaggccttgaacggactagtaccaggatggggagaccctcctgagaagctccatcaagagttccttcattcacgctattcttcaggttgtgtgttctgagctattctgagctgcttgctgctttttttgttattatgttcctgtcacatgacatatgctaaaggtctagtctgagattgcgatgccacttttttcaacaagttgggcgtctgctgttctagtcatatttgataattgatgaatttacactgcaatgctgtttgagtatatctagctgtcaccgtttgatggccctcattattgacaggatagatttagcaggcatagagagacacaattcctgttctgcatagtttatgtgctcgactttagttatgtgttcactgaaatgattggatcatgatctt

SEQ ID NO: 136908 - DNA, 989 bp, Zea Mays
caagcttgacaagtgttctttgatgtggctgagagaatatccctttcaagctataatgacttttcagagtcccatgtgctctgaaaacaaatatgccctggtgttcatatgttttcttttgtgtggttcacttgtctggccccttctatcatttgggatactgagctgcaatctgacccatctaagttttgcactccagaattgttctctttcctggacctggaatctttttaaatttgttctgttaatgctaatatttagaatttcccctctagaagatcacagagaactaactatatttatcatgttaatcggcgttaataatcacacttaaatcttgcctcatgattttttttacactgatgatttcgctatgaggtgccaatatttttggttccattagtgccactgtacaacttttttgagtgagtacactgtgtgtgcaccatgctattttctgcacttactcttttttttgtagtaataaagatgcacattgttgattctgttcccctttatgtgaaatcaggcttgtctcagccctggctcttgcaatgtcgctgtgggcaactgtcaccgagggtcttcaccgcagcaagaacatccaccacgacatggactaccagtgccctactgccaagaccggcctgttcggcggcgccgctttcctcgcccttgacgctgctctcttctggcttgtttgccagatgctggccctcaatgcaagggctgactaccttgacgaggatgacggcaagggagaatatggccagatttatgctgctcaagtcgatgatggctcgaaggtctgagcctatgtggtcatgctcggcagggttctatgattagtgtcatttggctacattatgccatcaacaaagtcgctttagctctcagtaaatttgtatataagttgcaaagtcttacataaggctggtggttattgcactttcgtgtttcagtgtgatcgataaacagtatctcagtac

SEQ ID NO: 136909 - DNA, 489 bp, Zea Mays
atggctctgtctgcgacgctacggatttctcttagcgtcgcgttctttggggttctggcgttcgtgcttggtgtcatcgccgaaaacaaaaagtataaatttatgcaagaggaggatgggttttggcatagtggtgggaagccttcccattcagccaaaggtcctgcattcgacgcagcctctttgcaaaatgctctctgcaaaatgcttgtctcagccctggctcttgcaatgtcgctgtgggcaactgtcaccgagggtcttcaccgcagcaagaacatccaccacgacatggactaccagtgccctactgccaagaccggcctgttcggcggcgccgctttcctcgcccttgacgctgctctcttctggcttgtttgccagatgctggccctcaatgcaagggctgactaccttgacgaggatgacggcaagggagaatatggccagatttatgctgctcaagtcgatgatggctcgaaggtctga

SEQ ID NO: 136910 - DNA, 144 bp, Zea Mays
atgaccgtggatgggtccctgcgcctcgacgttcgtcgcgcttttcggatcattgcttgggtgcgggcgcgagagatgggcgtgcctgccatggccgccgtcgtgtggtgtgcgcgcgccaccgctctggtgaccgagagatag

SEQ ID NO: 136911 - DNA, 1725 bp, Zea Mays
agagagagacaaacactagtgctttagaatagacatgctgagcacacctgatgtacaccggcatatgtgtgacggcaagtatatatgactcactaatcactatacaaggagaccacctaagaacgaacaaacaatcaaccaagcagcagcagtagttaaccaacaccactatcaacaccaatacgaaaaaggtactctagtagacacatgccttcctcttcttcctcctttttttttcctttttctttctacatggtttcggtaaatctagtttcttcctacgagaggggttcttgaacccacggccggcggcggcgatgatgccggatcctgagccgcctctggcaaatgccctgtgacgtctccattcgccagcttccagctccccctcgcctcccggaacgacttgagaagctcggcgtagcccggggtccgcagctcctctatcgactccacgcccggcaggtcgatccgccttctcctgggcgtcgaacacgacggctcgtccacctgctcggttccaaggcgcagtggcgcgcgaatttcatcagtcagagacaacggagcacacgcatctcatgaaccaccacccctgttggcttttcagtgaccgctcaccagatactcttcctccaggcacttcccggcgctttcgctgatctccacgaccttgtggtgatgctcccccttcagctccctcatctccccgtggcacggcgtgaggaccgccccgatgttcgcgcacgcgtcgcggtcaagcttcagcgagcctggaatggcaggaatggggttgtaaaggggaaaaagaaaaagaagaggaagctgtccatggctccatgctatgctatgctatgctatgcactgcactgcacggcacttaggtgaggccaagtttcagttcagagcgtggtctcactgtcaattgaagaaaggagagcctcgtttgcaacgtcgatatcttcaagagttgccgatgccgcagacgacagtttggaacgcagcaattcgttggcctctgtcccggtcctgtttgtcatacacacaggcgcatcatcagcacacactcgtagccgaccattcatttcaacagagaaattttttactgcccaagatcccatgtcgattcctatcctgatattacctgactatagaatccactgactccacgtttcctttgccgaggctgaacagagaatcctccgcgttcttccattgctgtgcacccacggtggccttcgccttgctgcaacaaatttccgggtgaatgtaaaaaaaaaaaagttaagaacatccgcgtcttcgaaccagaaggaataaccaccatcacatggcatgacgctgaagtgaactgaccattctacaagcacttcggccaggcaagaccttccgctgtcgactgctttggtatcctcagcgtaattcttctcggtctcttccatgtaaaagccccacttctcgcgcacggacgaggtcaagtcctgggccgtcgagatttctttctgcaggtggctcgttctgttcacggcgctctcccggaggctgcccactgctgtttggacctgcaatgcgtgctcatgatgaaacgttggcatagcagagaggtgtgagagcatcacttcttttttatagcacgtcgtttacttggtgtgttttagtcagatgggtacgaaacaagtttaagctgttgaaacaactgaaaaaaaaacgctcaccagcttcttcttc

SEQ ID NO: 136912 - DNA, 1761 bp, Zea Mays
gagctctaagagttggataaataactgatgggtcctagagagagacaaacactagtgctttagaatagacatgctgagcacacctgatgtacaccggcatatgtgtgacggcaagtatatatgactcactaatcactatacaaggagaccacctaagaacgaacaaacaatcaaccaagcagcagcagtagttaaccaacaccactatcaacaccaatacgaaaaaggtactctagtagacacatgccttcctcttcttcctcctttttttttcctttttctttctacatggtttcggtaaatctagtttcttcctacgagaggggttcttgaacccacggccggcggcggcgatgatgccggatcctgagccgcctctggcaaatgccctgtgacgtctccattcgccagcttccagctccccctcgcctcccggaacgacttgagaagctcggcgtagcccggggtccgcagctcctctatcgactccacgcccggcaggtcgatccgccttctcctgggcgtcgaacacgacggctcgtccacctgctcggttccaaggcgcagtggcgcgcgaatttcatcagtcagagacaacggagcacacgcatctcatgaaccaccacccctgttggcttttcagtgaccgctcaccagatactcttcctccaggcacttcccggcgctttcgctgatctccacgaccttgtggtgatgctcccccttcagctccctcatctccccgtggcacggcgtgaggaccgccccgatgttcgcgcacgcgtcgcggtcaagcttcagcgagcctggaatggcaggaatggggttgtaaaggggaaaaagaaaaagaagaggaagctgtccatggctccatgctatgctatgctatgctatgcactgcactgcacggcacttaggtgaggccaagtttcagttcagagcgtggtctcactgtcaattgaagaaaggagagcctcgtttgcaacgtcgatatcttcaagagttgccgatgccgcagacgacagtttggaacgcagcaattcgttggcctctgtcccggtcctgtttgtcatacacacaggcgcatcatcagcacacactcgtagccgaccattcatttcaacagagaaattttttactgcccaagatcccatgtcgattcctatcctgatattacctgactatagaatccactgactccacgtttcctttgccgaggctgaacagagaatcctccgcgttcttccattgctgtgcacccacggtggccttcgccttgctgcaacaaatttccgggtgaatgtaaaaaaaaaaaagttaagaacatccgcgtcttcgaaccagaaggaataaccaccatcacatggcatgacgctgaagtgaactgaccattctacaagcacttcggccaggcaagaccttccgctgtcgactgctttggtatcctcagcgtaattcttctcggtctcttccatgtaaaagccccacttctcgcgcacggacgaggtcaagtcctgggccgtcgagatttctttctgcaggtggctcgttctgttcacggcgctctcccggaggctgcccactgctgtttggacctgcaatgcgtgctcatgatgaaacgttggcatagcagagaggtgtgagagcatcacttcttttttatagcacgtcgtttacttggtgtgttttagtcagatgggtacgaaacaagtttaagctgttgaaacaactgaaaaaaaaacgctcaccagcttcttcttc

SEQ ID NO: 136913 - DNA, 4239 bp, Zea Mays
ctcacaacttgccccccctttttccgttccgttccctcgctcgtcgccgcgcgcgctaggttagggtttcgccgcatcccggccgctccgcccgcttcggatcgttccgggcgtaggtgggaggccatggcgatcgtgaggaccggagccggcaaccgggtccccaggcttgacggcggcagtgaaggctcgccggaggccacggaggacgacgacaacgaggaggagtcgcgggccacgccgtcgcaagagtccgaggccaacggcttctccgtcgacgacgacgatggccagaacggcagcggcggaggaggcaaggatccagaggaggtggtggaggaagaggaggaggaagagggggactcagggatgggttccgatgggctggacgtcgctgagctcggcgagcccagcaccgagatatgccaggtcggggaccagagtgttgccgtgccgctggagctctacgacctcgacggcctcggcgacgtgctctcgctcgtcgcctggaacaccctgctcagcgaggatgagcggctgcgcctcgccgcctttctgcccgacatggaccaggagacctttgcgcgcacgctcgtcgaactcttcgcggggcgaaacttccactttgggagccccctggccgccttcttcaagcgcctcaagggcgggctctgtgacccgagggtcaacctgtaccgccgtggtacccgtttcgcggagcggcgcaagcattgctactggatccagagctaccacaactccatggtgcggggcctccgggagatcaaggattgcttgaagggccacgagagatacagccttgctgagaagatcaggatgttgcacacgttaaaggcacagcagcagcagaggaaggctctagagttggcgaggcgggctgggtcggagactgattccgagagcagagggtctggagaacaggtcttagatcggctcaagcatgataagagtggacagaagaagtcggggaagttagtgaaggagaagtcgaaggggctgctgcgagcgggtatgccgaaaggagtggatgaggattacatgggagggtctggccgcgatgctgtgatgtcactctctgagctttctaggtatgatccacgcacgcatagagggaagcttcccaggagcatagagggccattactcggaggaccttggatatggaagggattcatcaagatcttggtttcagagggctctgcccaagccagtgaagaaggaattaactacgacctatgatggtaatctgtatggaaataactacagtgataaccatactgcctctccttaccactacggcaggaatcccattgctaatcagggagttaccttagcagcagcatatgatcctccttattttgataccagaaggaattcaaggtactcgggtagagactgggcacagggtggaaaaggtgtgcacactaacgctttaatgggtgatgagatgaactggccagctggtatccacactggtacattacatgacaggcagaaggggcagtctgcaggtgattacaggagcaggaaagatcaagctggttatggcctgaaggttaagtcctataaaagtattgaccagcaggttaatgatgcccatgttggttctgaccctagaagcaagatatcacaagcgaagatggcaggtaaatccagtacacaactagataggactggccagaagcactccaggagcaatgctgtctatgctcaaagtgatgagacagaatctgattcctcggaaaagtttgaagatggcggggaagtgcattatcttgaacggaagccagagcgtcaccattctgggtattatagaccagcacatggtgccaaaaagccaaacaagcttgctaaagtggccaaaatgaactatcctactactgatgcagatttagaaccctcccagagcaaaggattcgaagggaagggttcagagactggctatttacgtgatgtggatgtgatggtgacagaacagattagtgatgtcatgaaacctccagcagcaagtggtgaaaggaagcggaaaggggcgggaaatctggacatgcatgtttatcataactctgatctgcatgaaattaatgaagatgcaaatgactcatccaggttggcggagaatgaaaggtttgctagtagatcaggccatgcaggccaagattctaatggtgattatgttggtactgaaagagtcagctctagctccaaaaaagcaaaaggaagagtcgaagttcctagcctggatgagcatggtgagcatttgtcatctggctcaaagcttgttgagaacattggtggatccaagaagaaaaacaaaaaaaagccagagagcagcaccacagatgcagctattatagcagaaccagctgctgctgtacctgaaattaatgtggtagctgcagagcctgagaaggttgagaagcccaagaagaagtatgtaccgataacaccaacaatccatactggtttttcgttctctgttgtacatcttttaactgctgtaaagaaggctatggtcactcctgctgaggatactccagccacagcgaagcaaccagatggagaggagggcaaaatttgtttcaacaatgaagaacacatcaaaacacctcatcaagaacaaagtacaacagatcaaactgaacaggtccttgagggtgcaaatgccagtgctgcagaacaaactgtaccaatcaatgcaccggcgcttactgttcaagagattgtcaatcgaattagagaaaatcctggagaccctaggatacttgaaacacaggagcccctccaagatttagttcgaggagtattgaaagtactttcatctagaacagctcctctaggtgcaaagggctggaaagcattagttgcctatgagaagtcaaacaaaagttggttctgggttggtccagtaccttctgtttcatcatatgatgaccctgatgaagaaacttctgctgaagcatggagtataccgcacaagatgcttgttaagttggttgatgcattttctaattggctgaaaagtggtcaggaaacccttaagcagataggttcccttccaccacctccaccaccaaatcctgcaaacttggatttgaaggaaaggttcaaggagcttaaagcgcaaaaaagtctgaacactataagcccaagctcagatgaagcaagggcatatttccagcgtgaggaatttttgaggtactcaatacctgatagagcattttgctatactgctgttgatggggagaagtctatagttgctcccttgagaagaggaggtggaaagccaacggcgaaagcgaggggtcaccccatgctcttacctgatcggccgccacatgtcactatcctctgtcttgtaagggatgctgcgtccaggttgcctgcaagaactggaactagagcagatgtctgctcactactcagagattcacaatacctaaaccatgaagaagccaataaagaggctgcaatcaatcaagtcgtcagcggagctctcgatcgtttgcattatgaacgcgacccttgcgtgctatatgacaatgacaaaaaactgtggacctatctgcacaggggcagggaggaggaagattttgaggatgatggcacatcatctacaaagaaatggaagagaccaaggagggatctctctgatcctgcagagccaggtgcagcaaatgatgatgttgacgacgagggcactggcacccctccaggaagcaatgcaaaaaaacaaaaggcagaccatggagattctacattgtcaggagaagccaacgatgagggaaatcatccaactcagaatccgtcttctggtggcctggaaggtgatcctgatcttaatgcaagaaattacgaagaatcaggtggagttgtttacatggatgcaagaacagatgttggtgttgggtcgaattcaatagatgcaaaaccaggcagcagggctgatgataatacagcaagctggcagtcactcccagaacagaataaaaccagtacggcgctccctgaggacaccagcatggatggtaccccagggccagcataggtgatttgtgcagaaaccagttggctggtgttaggagaatttgtttcatttttaatgttgcttctcttcccctctaagctgcagatgtaaacttggaatcctaagattggttttcagtacagctcagtccgttttatagtgaaattgccgtgctatactttccgcgggatt

SEQ ID NO: 136914 - DNA, 416 bp, Zea Mays
taagatggtttccaattgtttcctgcagtctccagaatgtcatcgacaagtagcacaagcaataatatacataatatatccaggcagagaggtgacagcagccaaacaaagtcctggcaagagcagttctcgttttaggaaatttgccaggctacttcaaactttagtgaacaaaacaaaattggtttaggtaattttggcacggtgtataaggcgaaactcagggatggatccatcatagctgtaaagagggctactaaggtttgtaggtgaatattccttcaatagaagaaatgttgtacatatttactccaccgagttacttgcagcaatcaaatcaagaaaaagttttgatgcaacatctggatttggcagatgcatggtgggcatctatctgaagagttcagaagtgagat

SEQ ID NO: 136915 - DNA, 1909 bp, Zea Mays
atggcccataatttctatgatgagactgcactcccaaagctggctcagggttctttggatcgtcgaggcgttttttcattggacacacattcaccatcagtctgccttttgattcaattggaaaaggctgctactgaagaagggggagtaacaccttctgtttattctcataaagagcctgtgcacttagctgagaaagagaagcaaaagttgcaagtatggactcgaattatgccttgtaaagagtcatttgcatgggccatgattcctctgtttgaaggtaaccatgcgggtggtcttagtgatgctgcttatcctagcagtcctttagcaacaagtttaccaggatcaacttctcaagatagtattgtggaccctattttaaagcttactttagatggaaaagatccaaaacggaaagtacataaaccagtgaaaggtgtattgagattagaagtggaaaaacttcatggtggccacaatgatgtggataacacttctgaaggcggaagcatggccaatgatttgaatgatgctggcgacatcaataatggcagaagcaacagaaatgctcatcacaatggaatcatttctaatgctaagaatggtgacaataggagatgcactttcttattgcagtttgaagcttttgactttcggatgctgacccgaaacgtgggcttccaggctgttcatcctagggagcggaatatgatgctacagaagtggggccatacacagattgctgttggaacaagaatggcttcctaccatgatgaagttaaaatcagcctacctgctcttttgacaccccaacatcatcttgtgttcacatttttccatgtagatcttcaaatgaaacttgaagcaccgaaaccattttcctaccatgatgaagataaggttccgcatgtgcagcaggccttcacctgggactgcggtctcgcttgcgtgctcatggtgctcaggacgctagggattgattgctgcgacggcattgccgatctcgagaggctctgccacaccacgagcatttggacggttgacttagcatatctgttaaacaagttttcagtcagcttttctttctgtaccgtgacccttcgagcaaatccacaatattctgctgaatccttttataggttacttgttctgacaaacttctactgcacaaggcttctgaagttctcatcaataatgttctaaaaatggtcattacataggagcaattgcaagaagacatcgatcgagtggacgagctatttgggaaggcgctcgatgttggaattagtattcaatgcaggtccatcaccgcatacgacattgcttttctactattatccgggcactgcattgctattgctttagtggacaaatcgaagctaaatttgccttgcatgagtgattatgatgtacaacaacacaacgatgagcctgactacatgggtaagtcgcattgtgcaatttccatgttcttgtgaggcgattgatacgcgtttcggtggtttttcattattttcttatcttatattacaagcagcatggatgttccatcccatcgtattgtagcactgcagaattattgatgaccaacaagcggcttcagtagtttaattctggataacacacatttatgtagcaaaagaagctagcatagtttttttttgcaatggtagctaaataactaatgaacatgtgtacagtacagttcacatgccacgtcttatttttcttgtctggtaaaaatacggagttcaaatctccatgttttcctttttcccacatataaacaactatatatatgacaaaacacattgcaaacgcaaacctttaccactaaagtgttgtgattgtattccccctttgcaggacactatgtcgtaatatttgggtatgatgctgatgattg

SEQ ID NO: 136916 - DNA, 99 bp, Zea Mays
ttttttttaatatggttagaagtacacttcttattggcttgtaaattctctctaacaatgcccgtacaatatttctcttctactactattaatatctag

SEQ ID NO: 136917 - DNA, 1313 bp, Zea Mays
cccttcccctcccacgcacgccggtcgccggcacgcgctcgcgacgcgcaagtcgcaggtcgcagcaaccgtaacgcgccccgagcccgcatggcggcctgactcggcgccacgcgtttgctcctccggccaccatcctggctccttccttgtcgccgtctcctcggctatatagccgccagcctgggggaaggagaacggccaaaccagcacccgccgcccacaggaacatcgccgcccgagatcggctgcatacctgttctgcttctgggcgccggagttcgcgtcgtcggctcgtcgttcggtaaacttgggggagcaatgggaggagggaaagacaagcatgacgagagcgacaaggggctcttctcaaacttgatgcacggcgttgccggtggccatgggtaccccccgcagggataccctccgcagggctacccaccgcaaccaggagcatacccacctcccccaggggcgtatcctcctccacccggcgcatacccaccacaatatgggtaccctcagccgggtggctacccaactcaaggtggatatcctcctgcaggctaccccggctcatctcaccagggttatgggagcagccacgccgggggccacatggggacgggggcaatgctagctggaggtgccgccgccgccgctgccgcttacggagcacacaagctttctcatggccatagcggacacggtggacatgggccctttggaggccatggtcgtggtcgtggtcgtggtggttatggccgtggtcgtggtcaccacggcaagttcaagcatggcaagcacggacacggcatgttcagcggcaagttcaagaagtggaagtgatgtgctctccttggttgatcgtagctagcggtggtaatgaatcacgatctaaatgttttttcacaatatgttagagtccgtaaataattttagtttaaaaatgaataaaaatatagctcgatcctaatcagattcgatccttaaattttgtagtgtaaaatttatggcacattaccatccctaatgatagctgaattcaggcttctaggacatgtgttgccaggaatgccttttcagtatctatctagattgtggcaagtgacatgttgctaataagtgacataaataaccatttgctggtatgctgtatatgttggtctcgtggatggagcgctttaaagattatattctgtgtgttggaatgatatggttgtactgtatcctgaccatgctggcactgaatggtttctgttgccagtaaatcattgttcatgcaagttattatctgaccaatcgatttcgtt

SEQ ID NO: 136918 - DNA, 1146 bp, Zea Mays
gagaatagcctaagggtgttgtggcttttgaaaaagttgtgtggattgtggaaaagcagttgtgggttattagccgaggtcgcgctcggcccaggcagtaaacctgtgctcgaggtcgcgctcggccgaggcagtagacctgtggtggccgagccgcgctcgcctgctgtgtcagattttctcaccttattcttcaacgtgttacaatctacattcatattctctcagtctacacttcagctggctcacagtttgatatatataatctgcatgttctttcttcaggtaacttgcggggtcaatgggaggagggaaagacaagcatgacgagagcgacaaggggctcttctcgaacatgatgcacggcgttgccggtggtcatgggtacccccaccagggataccctccgcagggctacccaccgcaaccaggagcatacccgcctcccccaggggcgtatcctcctcctccaggggcatatcctcctccacctggggcatacccaccacaatatgggtaccctcagccaggtggctacccacctcaaggtggatatcctcctgcaggctaccccggctcatctcaccagggttatgggagcagccacggcgggggccacgggggccacatggggacgggggcaatgctagcgggaggtgctgccgcggccgctgccgcttatggagcacacaagctttctcatggccatagcggacacggtggacatggggcctttggaggctatggtcacggtggttacggccacgggtatggtggccacggcaagttcaagcatggtcacggccaccacggcaagttcaagcacgggcacggcaagttcaagcatggcaagcacgggcacggcatgttcggcggcggcaagttcaagaagtggaagtgatgtgccctccatggttgatcgtagctgaactcaggcttccaggacatgtgttgccagtaataccttttcagcgttactcatccttcatctgtatttccagtaatccagcttgtggcgagtgacataatgctaataagtgacataaataaccatttgctgatatgctgtatatgttggtcttgtggatggagcgctctgaagattatatccattgccagtaataaatcgtggctttatctgaccaa

SEQ ID NO: 136919 - DNA, 1004 bp, Zea Mays
gtcgtctcctcggctatatatccgccagccggggggaaggggaacggccaaaccagcacccgccgccgacagggaacatcgccggccgagatcggctgcacatctgtgctgcttcagggcgccggagttcgcgtcgtcgttcggtaacttgcggggtcaatgggaggagggaaagacaagcatgacgagagcgacaaggggctcttctcgaacatgatgcacggcgttgccggtggtcatgggtacccccaccagggataccctccgcagggctacccaccgcaaccaggagcatacccgcctcccccaggggcgtatcctcctcctccaggggcatatcctcctccacctggggcatacccaccacaatatgggtaccctcagccaggtggctacccacctcaaggtggatatcctcctgcaggctaccccggctcatctcaccagggttatgggagcagccacggcgggggccacgggggccacatggggacgggggcaatgctagcgggaggtgctgccgcggccgctgccgcttatggagcacacaagctttctcatggccatagcggacacggtggacatggggcctttggaggctatggtcacggtggttacggccacgggtatggtggccacggcaagttcaagcatggtcacggccaccacggcaagttcaagcacgggcacggcaagttcaagcatggcaagcacgggcacggcatgttcggcggcggcaagttcaagaagtggaagtgatgtgccctccatggttgatcgtagctgaactcaggcttccaggacatgtgttgccagtaataccttttcagcgttactcatccttcatctgtatttccagtaatccagcttgtggcgagtgacataatgctaataagtgacataaataaccatttgctgatatgctgtatatgttggtcttgtggatggagcgctctgaagattatatccattgccagtaataaatcgtggctttatctgaccaa

SEQ ID NO: 136920 - DNA, 2626 bp, Zea Mays
ctatatatccgccagccggggggaaggggaacggccaaaccagcacccgccgccgacagggaacatcgccggccgagatcggctgcacatctgtgctgcttcagggcgccggagttcgcgtcgtcgttcggtatgcccaactctcctcccaccttttgtctctctatataaatacctgcgcgtaattcggttagatttacttttttgttccacgagtttaggggttcatttgatgcgtgtagatcgttggtttttgcttgtcatcgttgtggtagagttctatggatggtgtgtgatctgccgatctcaagtgcgtgagcgtggctatagttgtgaggatcctccgaattaaccttcccctgtttgatcgatctgggtggtggtggaggggaattttatcgtgcatacatgatcttatgggggtccagctccagcaatgattagggcggaggagttaattgtaaattaaaatgttttagcgctggaatttgggtgaccagtagatcctaccttttgtagggaagaaaggtagcgcttagggtgaactattatatgataacaagcagggtctgttctgcttgccaataggagtataccatatgcaatcagttacgtatggccgatcctagcatgctcaagtgatgtgcagtaggaaattgggatgatactcgaccattatatgggtagcattccagttttctactgtacatcattccaattgcctctgcataaatttttttcattctcattaaatgatgtgccatatcagtgatctggacgatgtggcaaacaatcgatgaagaaagagacaaaatgagtttcatggggtaaaatacctaggcatattgtctattgcttgttacataccaaatcgcacccaacgaaactctctactggggagactattcaacaaagatttcatttctttcttgtttatgtggcatcttagaaacacaaatatgaaacctacccattgagaatagcctaagggtgttgtggcttttgaaaaagttgtgtggattgtggaaaagcagttgtgggttattagccgaggtcgcgctcggcccaggcagtaaacctgtgctcgaggtcgcgctcggccgaggcagtagacctgtggtggccgagccgcgctcgcctgctgtgtcagattttctcaccttattcttcaacgtgttacaatctacattcatattctctcagtctacacttcagctggctcacagtttgatatatataatctgcatgttctttcttcaggtaacttgcggggtcaatgggaggagggaaagacaagcatgacgagagcgacaaggggctcttctcgaacatgatgcacggcgttgccggtggtcatgggtacccccaccagggataccctccgcagggctacccaccgcaaccaggagcatacccgcctcccccaggggcgtatcctcctcctccaggggcatatcctcctccacctggggcatacccaccacaatatgggtaccctcagccaggtggctacccacctcaaggtggatatcctcctgcaggctaccccggctcatctcaccagggtatgatctcctcttcatcagttctatacttagtttgtaacttggagtgagatcagaatagctagcagttgcatcggtactgacacaacatggtatgacttactctgcttagtttgtaacgtagagtgatattagaatagctagcggttgcattggtactgactcaacatggtatgaattactctgcggttatgtgctttaccttggaaatcatggagccttcaccatgataatatctagtagagctttcctttcacaaaagaaatggctatgagaatagctaatttgtctaactccagcaaatactcgtatttgtaagtaataataatacaacagtttatatagtacgtagtttgagattgttttggcttgcttgctttgttatattgcttatatattacattttattgtccagatttagaattgtactaaaccaacatttacatatacattctgtagctgtaatgttggaaattggtatttctgttctgttgatccagtaaaatattgaagctcattccatgctaactgatgcttcttgtgattccaggttatgggagcagccacggcgggggccacgggggccacatggggacgggggcaatgctagcgggaggtgctgccgcggccgctgccgcttatggagcacacaagctttctcatggccatagcggacacggtggacatggggcctttggaggctatggtcacggtggttacggccacgggtatggtggccacggcaagttcaagcatggtcacggccaccacggcaagttcaagcacgggcacggcaagttcaagcatggcaagcacgggcacggcatgttcggcggcggcaagttcaagaagtggaagtgatgtgccctccatggttgatcgtagctgaactcaggcttccaggacatgtgttgccagtaataccttttcagcgttactcatccttcatctgtatttccagtaatccagcttgtggcgagtgacataatgctaataagtgacataaataaccatttgctgatatgctgtatatgttggtcttgtggatggagcgctctgaa

SEQ ID NO: 136921 - DNA, 474 bp, Zea Mays
atggcggtgtgggtgcgggggctaggagtccgtgtcctgctagatccagttgacgctgactcattgaggccctatgtaaacatcatcttcgcctgtcctcggcgggagaagcagcagccgcctctaggacaccggctggcacggatgttctgctcgagcttgctgctctgctccacctgcaacaacaccgatgtcgcatcctcgtcctactacacgtctcctgcaggcaacgaccaaggctcctccagccgcgcactgctggtcgtgaatggcgccattgacagggacctgtttgttgcctccttgcgccgtgacctgtcggccgaaccaagtcgatctccattgttgtcaaccacctcagccatggtggtgtcaacgacggaggagcaggtgcatagagggttcacggtggtaaagcggtcgcgagacccgtacaacaacttccactcctccatggtggcaatgatcatgtag

SEQ ID NO: 136922 - DNA, 519 bp, Zea Mays
atgggcacacggctggggagagcgcgcgccagagggaaagaagatccgggcgcagggcgcgcgtggaagctgcaagtagagctcagaggaacgcgcgacagtgagagggcagagggagagaagcgcgtgctggggaaaaaatgcagcgccgtgagagctccacgtcgagggagaaggagctccggcggccatgggatgcgcgcaaagaggagggagaaaaactggcagccggcgcttggagaaagttgggcgctgtgcgagctgtgcgcagagaaacgcgcgcgccataggagacagaggagcgcgccagtagggagctcgcggttggccacagaaatccgagccagagggcgcggcaggggaggagcgcggcgctgggaggaagatggcagccatggcagggagcttggggaagccgcgacgcaggaagaagctagaacagggacggacagggagctccgagcggatggacgcggctgcgcgcgagcgaacagagggaaggacgcgcgcaggaactag

SEQ ID NO: 136923 - DNA, 114 bp, Zea Mays
agagacaagcaagttttgttacgatgaagacaaccttattacaacaagcataataatctcgtgtctgttgacactaataagttgcaaaaactacatcacttaagttgcaaaaga

SEQ ID NO: 136924 - DNA, 111 bp, Zea Mays
atggctggtgaaggctctgcgcggctgtcagcattgggggaaactcgcgagcaaccaccagggagcgactcggcgagcatcagagggcagcgccggcatggagagggatga

SEQ ID NO: 136925 - DNA, 727 bp, Zea Mays
atctttcatttccgtttgtaagccagcttgtgttaacaatcctcctattacactcagccgatccagatccccatctggatctcccaggggtggacgccgtgaacgtgacgagaggagatctaggagtcttagctacagcaggagcgcaagccccaggcgttctgtctcacctgcaaaggaaaaggagcgcagtcgcacacccaatggcagtaggagcccaaggagccccagcccaagggctgaggtgagcccaccactgaaggataatggtgcacgcaatggctcagaccatgaaggcaaccctggtggtggagagaacagcaagaggagtcggagcccatctgatggctaccgtagccctgtggccaatgggcgcagcccgagcccgagggacgatcggagcccaagccccaagggcaacaacgaagatgacgagcgccgtggttcacctagaggaagtcagtcccccctgaactgagaaattctgatcaaatttgggccgcacgattcggttgtaactgttatattttagtttgagacaacaaactgtatttgctcatttctcatacagtcaggtttatgctttttgagctagaaaacatgtgtaagaatttgttaccttcaagctattcctggtttgtgatatggtaatacttgaactatttagcttgccaaatctgaatacttttaactatcaagtatcttgagttagtttgtctgttttgct

SEQ ID NO: 136926 - DNA, 1402 bp, Zea Mays
gtcagagcaaccctatctcttccccactccgctcctcgctcaccctctcaccaaatccttctcctccgcgccgccacagccgggcgcgcctctcgatcgagatccaggagatatgcctcgttatgatgatcgccatgggaatacacgcttgtatgttggaagattggcccctcgcacccgttcccgcgacctagaatatcttttcagcaaatatggaaggttttcggttttttacccaaccatggaggtctgtggtggaagggtgcccttggtggaattggtggccattgttccgatatttgtggaggactttggtgaagggcgcccttggtaatacgtgaagtggagttgaagcgtgactatgcattcattgaattcagtgacccccgtgatgctgatgatgcgcagtacaacctagatggcagggaagtcgatggaagccgtattattgttgaatttgctaaaggagttcctcgtggttctggtggttcacgtgagtacatgggaagaggacctccaccaggaacaggtcgttgttttaactgtggaatggatggtcactgggcaagggactgcaaggctggtgactggaagaacaaatgctaccgctgtggtgaatcgggccatatagagagaaattgccagaacagtccaaggaatctcaggcgtgataaaagctattcacggtctccatccccacgtggtggacgtggccgcagccggagctacagcagaagccggagctatagccgatccagatccccatctggatctcccaggggtggacgccgtgaacgtgacgagaggagatctaggagtcttagctacagcaggagcgcaagccccaggcgttctgtctcacctgcaaaggaaaaggagcgcagtcgcacacccaatggcagtaggagcccaaggagccccagcccaagggctgaggtgagcccaccactgaaggataatggtgcacgcaatggctcagaccatgaaggcaaccctggtggtggagagaacagcaagaggagtcggagcccatctgatggctaccgtagccctgtggccaatgggcgcagcccgagcccgagggacgatcggagcccaagccccaagggcaacaacgaagatgacgagcgccgtggttcacctagaggaagtcagtcccccctgaactgagaaattctgatcaaatttgggccgcacgattcggttgtaactgttatattttagtttgagacaacaaactgtatttgctcatttctcatacagtcaggtttatgctttttgagctagaaaacatgtgtaagaatttgttaccttcaagctattcctggtttgtgatatggtaatacttgaactatttagcttgccaaatctgaatacttttaactatcaagtatcttgagtt

SEQ ID NO: 136927 - DNA, 1306 bp, Zea Mays
agcgagttggattcagagtcagagcaaccctatctcttccccactccgctcctcgctcaccctctcaccaaatccttctcctccgcgccgccacagccgggcgcgcctctcgatcgagatccaggagatatgcctcgttatgatgatcgccatgggaatacacgcttgtatgttggaagattggcccctcgcacccgttcccgcgacctagaatatcttttcagcaaatatggaagaatacgtgaagtggagttgaagcgtgactatgcattcattgaattcagtgacccccgtgatgctgatgatgcgcagtacaacctagatggcagggaagtcgatggaagccgtattattgttgaatttgctaaaggagttcctcgtggttctggtggttcacgtgagtacatgggaagaggacctccaccaggaacaggtcgttgttttaactgtggaatggatggtcactgggcaagggactgcaaggctggtgactggaagaacaaatgctaccgctgtggtgaatcgggccatatagagagaaattgccagaacagtccaaggaatctcaggcgtgataaaagctattcacggtctccatccccacgtggtggacgtggccgcagccggagctacagcagaagccggagctatagccgatccagatccccatctggatctcccaggggtggacgccgtgaacgtgacgagaggagatctaggagtcttagctacagcaggagcgcaagccccaggcgttctgtctcacctgcaaaggaaaaggagcgcagtcgcacacccaatggcagtaggagcccaaggagccccagcccaagggctgaggtgagcccaccactgaaggataatggtgcacgcaatggctcagaccatgaaggcaaccctggtggtggagagaacagcaagaggagtcggagcccatctgatggctaccgtagccctgtggccaatgggcgcagcccgagcccgagggacgatcggagcccaagccccaagggcaacaacgaagatgacgagcgccgtggttcacctagaggaagtcagtcccccctgaactgagaaattctgatcaaatttgggccgcacgattcggttgtaactgttatattttagtttgagacaacaaactgtatttgctcatttctcatacagtcaggtttatgctttttgagctagaaaacatgtgtaagaatttgttaccttcaagctattcctggtttgtgatatggtaatacttgaactatttagcttgccaaatctgaatacttttaactatcaagtatcttgagtt

SEQ ID NO: 136928 - DNA, 728 bp, Zea Mays
agcgagttggattcagagtcagagcaaccctatctcttccccactccgctcctcgctcaccctctcaccaaatccttctcctccgcgccgccacagccgggcgcgcctctcgatcgagatccaggagatatgcctcgttatgatgatcgccatgggaatacacgcttgtatgttggaagattggcccctcgcacccgttcccgcgacctagaatatcttttcagcaaatatggaaggttttcggttttttacccaaccatggaggtctgtggtggaagggtgcccttggtggaattggtggccattgttccgatatttgtggaggactttggtgaagggcgcccttggtgtaatcttattgactgttgtagatgaagttgcaagttgatgcatttgagtacttgactcatgtcagcagcttactgtttgtggaaactatttgcgcagaatacgtgaagtggagttgaagcgtgactatgcattcattgtatgttctactacactcaggctatctccaaccattccccctcccaatccctccatttgtactttctattcatatttaaatacattcccctcaactattcttccccctattttttctcctctccacccattccccctattcagctccccctttactctttaactgagctatttgccttatatatatatatatatatcactttttggattttttaaataatactaccatatttgtagtaccg

SEQ ID NO: 136929 - DNA, 790 bp, Zea Mays
agcgagttggattcagagtcagagcaaccctatctcttccccactccgctcctcgctcaccctctcaccaaatccttctcctccgcgccgccacagccgggcgcgcctctcgatcgagatccaggagatatgcctcgttatgatgatcgccatgggaatacacgcttgtatgttggaagattggcccctcgcacccgttcccgcgacctagaatatcttttcagcaaatatggaaggtaagagccgcactctgtctgcacagagagttattctgaagttcagagtgtgctaacttttattatgagggtgagacaccagttctgtcctagtatcacgagcagtttgtgctaacactgtggttgaattttgtggtacacagctacacatcaatcctgctaaactacactagcaaatatagggtcctttcctattttgttgatgatatgtggtttatgaaggttttgtgttgcttgaagtcattctgaggtttttgtggatggggtcatacaagtcttttttcttggtgtatgctctgttacatcactaagcacttcatagatgtttgacctccgggcctgtttgacttgaatgatcttgttgaaggttttcggttttttacccaaccatggaggtctgtggtggaagggtgcccttggtggaattggtggccattgttccgatatttgtggaggactttggtgaagggcgcccttggtgtaatcttattgactgttgtagatgaagttgcaagttgatgcatttgagtacttgactcatgtcagcagcttac

SEQ ID NO: 136930 - DNA, 1190 bp, Zea Mays
attaccaaacaaataaataaaacaaacaaaagcacagattgagtacatatatatttgcggtccatgcatgcatgttttactgcctgctactgtacgtactactgcagccggacggaaagaggagtgcagtaatttaatttagttactgttactagtctagtagcaaaatcaggcacacgaaaactggcgaaagctagagcacagcatgcatgcacggcgaagaacacctcgcgttggcagcagcagcatagcacgcacgtctctcccgcctctcctcatcagcgcgcgaggatcggagacggctagctggctagctgcggggcgccgccgcgacgccgtcggcgacgtcgacgctggtggtgcaagcgaggaggcggcggaagatggcgcgcacggcgccgcaggacgcctcgtgcagcctccgcaccacggcgcaccctttcttcttgttcttcttcctccgccgccgcctctgctgctgcttgctgccgcgacggagccccagcacgccgtcgtcctccgtgcggtggctggcgctgccgacggaggcggcgtccgaggcagcggcggcggcggccgacccaccgccgtgccgctgcgggtggaacagcgggaagaccgcggcgccgcggtcccggacgcggccgaggcacgccatggtgcgctcgggcaccgtctccttccgcttggagaaggtgtagctgcggaggtacatctggcggcacgagtagctgtccaccacccgggggctgcagtaccccgccgccagctcgccgctgttattactccgcatgctgccgctgccgttgtagtagtggtggtagtggtacgagtacgacggcgcgctggcgccgccgccggggctctcctgccctcctcctcctcctcctccctggcgccgcgccatggccaccgacctgacgaactcggcgtcggactcgggccacttgtacaggctcacatagctggcccgcaccggcgcgcgcgcgtccacgcacccgatggccgccttgcagttgcacccggcggccattactgattaatggtggcgtcccagtcgaccgtcgtcccagtcgatcgcccagatactctactactgctcggctagcgagcgagctaggcagctagctagcctactggtctctggttgcatctgcatcacccgcgcgcgccggccggacggaccggag

SEQ ID NO: 136931 - DNA, 425 bp, Zea Mays
gtaactgcctacaaaggtattgatatggcgagataatgttacttctaaatacctcactgtgttacttctgaaagccaagtgaggaggaatctatacctcactatgttcccttttttctttgtattttatttggtttttgcaagttgtgcaattgtggtgtcacattttttagttaacggaagaaatctagaatctaattgtgcatacatggactctcaactgtccttgatgatccgaatggtgtttctgttactatgttacaactaaaaaagttaaatcaaggttactccaatttaattctaatctttatatttccatagttatgtgatgtagtgtctataatgtactataatctaactttaagatcttctgatatggttcatcctagagtctgaaccatgagatatgtatatttttttcttaat

SEQ ID NO: 136932 - DNA, 1396 bp, Zea Mays
cgtacgcgatgcgtcctaagcttctccactaataatataaccccgagcatgcacgcacgctgatcatccatctataaatacgccaattagcaaactagagctactagcagcaggccaatggagaaccctccgagcatcctagtgactcccatggctccggccatgtcggcgcagttcacaagaataaccttcagcaacctgtttgtccgtcgggctggcccaggcagcacggagctgaccgtggagggaaggccatccgaccagctgggcaggagaaacctcactgacagccccgtatttgacggccgtggccctgacgccagcctcgtggctcgcgtacagggagtcgctacccagatgggcgacgtgcgccagttgtacaccgtcgtgttccaggagaggccgctcaagggctccacgctcgtcaccgaaggcgcgatgacagaagggtcagacgagtgggcgatctacggtggaactggagtgttcgcgatggcgagaggcgtcataaggagaacgtttcttgccgacacgagcggcgggaactccgacgagcttgccgtggaggttctctgcccggtgttccgcccggcggcgtttggctcatcgtcgtcacagccagcagcaaaggacatcagctccaccgtcgtcgtcaccaaggtcggagtgtggggtggagagggagggtcggcgcaggacatcgcgacgacggagccgccgaggcgtctgcagagcctgaccgtccgcgccggcgttgccgtggactccatcgagttcacctacagtaccgacacaggtggtcagacgcgcaccgctgggcgatggggtggacttggcggcaacgtccggaagctcgatcttggcgacgctgaatacgtcaaggaagtttctggaacgtacggcgcattcgaaggtgcgactacccttacctcgttcaggattgtcaccagcaccgccagagcttgggggccatggggcatcgagagcggcacacgtttctgcatcaccgcgcccatcggcagcagcatcgtgggattctatggacgcgcgacgaccaggctcgtcgctgcgatcggtgtctacctgcgccaactttagtctggtttcagcagcaggacgggtactacagatatgctagataaaggtcttatatatgtcatatgacctatcatggtcttatatgttcgatcgtcgtcgtgtctgtatgtacatacatggttgtcaaataaagctctttgcattttgataaagattgacaccaccatgctattatatgttaactaggtgagtgcccgtgtgttgcaacggaaccgtataataacacgataacttatgtacatatgtgttatattgttataggtatgtgctcgtgtgttacgacggaagtaaaaaaaaa

SEQ ID NO: 136933 - DNA, 1490 bp, Zea Mays
cgtacgcgatgcgtcctaagcttctccactaataatataaccccgagcatgcacgcacgctgatcatccatctataaatacgccaattagcaaactagagctactagcagcaggccaatggagaaccctccgagcatcctagtgactcccatggctccggccatgtcggcgcagttcacaagaataaccttcagcaacctgtttgtccgtcgggctggcccaggcagcacggagctgaccgtggagggaaggccatccgaccagctgggcaggagaaacctcactgacagccccgtatttgacggccgtggccctgacgccagcctcgtggctcgcgtacagggagtcgctacccagatgggcgacgtgcgccagttgtacaccgtcgtgttccaggagaggtatatctgtacatgtgtatatgctcaggcttcttgtgtgtacactatggttttatgctgttgatttcattcatgcatgcgtgcatatcgtcaggccgctcaagggctccacgctcgtcaccgaaggcgcgatgacagaagggtcagacgagtgggcgatctacggtggaactggagtgttcgcgatggcgagaggcgtcataaggagaacgtttcttgccgacacgagcggcgggaactccgacgagcttgccgtggaggttctctgcccggtgttccgcccggcggcgtttggctcatcgtcgtcacagccagcagcaaaggacatcagctccaccgtcgtcgtcaccaaggtcggagtgtggggtggagagggagggtcggcgcaggacatcgcgacgacggagccgccgaggcgtctgcagagcctgaccgtccgcgccggcgttgccgtggactccatcgagttcacctacagtaccgacacaggtggtcagacgcgcaccgctgggcgatggggtggacttggcggcaacgtccggaagctcgatcttggcgacgctgaatacgtcaaggaagtttctggaacgtacggcgcattcgaaggtgcgactacccttacctcgttcaggattgtcaccagcaccgccagagcttgggggccatggggcatcgagagcggcacacgtttctgcatcaccgcgcccatcggcagcagcatcgtgggattctatggacgcgcgacgaccaggctcgtcgctgcgatcggtgtctacctgcgccaactttagtctggtttcagcagcaggacgggtactacagatatgctagataaaggtcttatatatgtcatatgacctatcatggtcttatatgttcgatcgtcgtcgtgtctgtatgtacatacatggttgtcaaataaagctctttgcattttgataaagattgacaccaccatgctattatatgttaactaggtgagtgcccgtgtgttgcaacggaaccgtataataacacgataacttatgtacatatgtgttatattgttataggtatgtgctcgtgtgttacgacggaagtaaaaaaaaa

SEQ ID NO: 136934 - DNA, 1491 bp, Zea Mays
atcctaccctgctgccgatgaacttgtgttctttcttctcaaactttcgttcttttcctattttctttatcctgccctgcgcacacgaaacatgctaattaaagacgtacgcgatgcgtcctaagcttctccactaataatataaccccgagcatgcacgcacgctgatcatccatctataaatacgccaattagcaaactagagctactagcagcaggccaatggagaaccctccgagcatcctagtgactcccatggctccggccatgtcggcgcagttcacaagaataaccttcagcaacctgtttgtccgtcgggctggcccaggcagcacggagctgaccgtggagggaaggccatccgaccagctgggcaggagaaacctcactgacagccccgtatttgacggccgtggccctgacgccagcctcgtggctcgcgtacagggagtcgctacccagatgggcgacgtgcgccagttgtacaccgtcgtgttccaggagaggccgctcaagggctccacgctcgtcaccgaaggcgcgatgacagaagggtcagacgagtgggcgatctacggtggaactggagtgttcgcgatggcgagaggcgtcataaggagaacgtttcttgccgacacgagcggcgggaactccgacgagcttgccgtggaggttctctgcccggtgttccgcccggcggcgtttggctcatcgtcgtcacagccagcagcaaaggacatcagctccaccgtcgtcgtcaccaaggtcggagtgtggggtggagagggagggtcggcgcaggacatcgcgacgacggagccgccgaggcgtctgcagagcctgaccgtccgcgccggcgttgccgtggactccatcgagttcacctacagtaccgacacaggtggtcagacgcgcaccgctgggcgatggggtggacttggcggcaacgtccggaaggtgagtgatctgatcgggtttccgtgtacggttccatcaacggcgtctctagctatgaacttgtgcagcagggacgacgatagagaactactgatgaacatatatatatatgagcacaaacatgcgtgcgtgcgtgcagctcgatcttggcgacgctgaatacgtcaaggaagtttctggaacgtacggcgcattcgaaggtgcgactacccttacctcgttcaggattgtcaccagcaccgccagagcttgggggccatggggcatcgagagcggcacacgtttctgcatcaccgcgcccatcggcagcagcatcgtgggattctatggacgcgcgacgaccaggctcgtcgctgcgatcggtgtctacctgcgccaactttagtctggtttcagcagcaggacgggtactacagatatgctagataaaggtcttatatatgtcatatgacctatcatggtcttatatgttcgatcgtcgtcgtgtctgtatgtacatacatggttgtcaaataaagctctttgcattttgat

SEQ ID NO: 136935 - DNA, 1221 bp, Zea Mays
acacaaacaagaagcttgcattgttcgttgctcgatcgttgcaggtaatggagaaccctgctccgagtatcgtagtgccccccatcgccgcacctgtatcagcgaacttcagcagactcgccttccgcaacctgtacatccgacggacgggtccagacagcagggagatggtgactgtggagggaagaagaggctctagtgatcagacaggcgacatgaggtacgtgagtgacttccccgtctacgatggccgtggctccgacgccgtcctggtggctcgcgtgcagggcgtcacaaccacgttcgggaactccaaccagttcttcaccgtcgccttcgaggctggcaggctaaagggctccacgctccttaccgaaggagtggtgacggatggatccgatgaatgggcaatctacggcgggaccggagagtttgctatggcgagaggtgtcgtcaaaagaaggtaccttgccgatagggacggcgccgggaacactgacgagctcagcatgcaggttttctgcccggtgtttggctcatcacagcaaccaaacaagcaggactccaccatctctgtcaccaagattgggttatggggtggcgaaggagggtcggcgcaggacatcacgacgacggagccaccgcagcgcctgcacagcctcaccgttcgtgccagtgccgccgtcgactccatcgagttcacgtatactgacagaggtggccagaggcgcgccgctgggcgatggggtggacttggcggcaaccttcgaacgatcgatcttggcgacgccgaggatgtcagggaggtctcaggaacgtacggcacatttgaaggagccaccacgctgacctcgttcagaattctcaccagcagcaggacatgggggccatggggcgtcgagaacgggacgcgtttctgcatcaccgcgccggtcggcagcagcatcgtggggttctatggacgcgcgaccagcaggctcgtcgctgcgcttggtgtttacctgcgccgactttgatttgatctgaacagagcaggctacctactagcaattgcctgctcgatcaattatctttcgcaccctttattattaatataatctcgatcggtcatcgtactcctatgtcaatgtcaaataaaggtcatatgtagtcatcgatattgttggatttattggcatggtctaattaagaaattcatttaattcctgaaaaatcataaaa

SEQ ID NO: 136936 - DNA, 1092 bp, Zea Mays
acacaaacaagaagcttgcattgttcgttgctcgatcgttgcaggtaatggagaaccctgctccgagtatcgtagtgccccccatcgccgcacctgtatcagcgaacttcagcagactcgccttccgcaacctgtacatccgacggacgggtccagacagcagggagatggtgactgtggagggaagaagaggctctagtgatcagacaggcgacatgaggctaaagggctccacgctccttaccgaaggagtggtgacggatggatccgatgaatgggcaatctacggcgggaccggagagtttgctatggcgagaggtgtcgtcaaaagaaggtaccttgccgatagggacggcgccgggaacactgacgagctcagcatgcaggttttctgcccggtgtttggctcatcacagcaaccaaacaagcaggactccaccatctctgtcaccaagattgggttatggggtggcgaaggagggtcggcgcaggacatcacgacgacggagccaccgcagcgcctgcacagcctcaccgttcgtgccagtgccgccgtcgactccatcgagttcacgtatactgacagaggtggccagaggcgcgccgctgggcgatggggtggacttggcggcaaccttcgaacgatcgatcttggcgacgccgaggatgtcagggaggtctcaggaacgtacggcacatttgaaggagccaccacgctgacctcgttcagaattctcaccagcagcaggacatgggggccatggggcgtcgagaacgggacgcgtttctgcatcaccgcgccggtcggcagcagcatcgtggggttctatggacgcgcgaccagcaggctcgtcgctgcgcttggtgtttacctgcgccgactttgatttgatctgaacagagcaggctacctactagcaattgcctgctcgatcaattatctttcgcaccctttattattaatataatctcgatcggtcatcgtactcctatgtcaatgtcaaataaaggtcatatgtagtcatcgatattgttggatttattggcatggtctaattaagaaattcatttaattcctgaaaaatcataaaa

SEQ ID NO: 136937 - DNA, 1211 bp, Zea Mays
acacaaacaagaagcttgcattgttcgttgctcgatcgttgcaggtaatggagaaccctgctccgagtatcgtagtgccccccatcgccgcacctgtatcagcgaacttcagcagactcgccttccgcaacctgtacatccgacggacgggtccagacagcagggagatggtgactgtggagggaagaagaggctctagtgatcagacaggcgacatgaggtacgtgagtgacttccccgtctacgatggccgtggctccgacgccgtcctggtggctcgcgtgcagggcgtcacaaccacgttcgggaactccaaccagttcttcaccgtcgccttcgaggctggcagcaggctaaagggctccacgctccttaccgaaggagtggtgacggatggatccgatgaatgggcaatctacggcgggaccggagagtttgctatggcgagaggtgtcgtcaaaagaaggtaccttgccgatagggacggcgccgggaacactgacgagctcagcatgcaggttttctgcccggtgtttggctcatcacagcaaccaaacaagcaggactccaccatctctgtcaccaagattgggttatggggtggcgaaggagggtcggcgcaggacatcacgacgacggagccaccgcagcgcctgcacagcctcaccgttcgtgccagtgccgccgtcgactccatcgagttcacgtatactgacagaggtggccagaggcgcgccgctgggcgatggggtggacttggcggcaaccttcgaacgatcgatcttggcgacgccgaggatgtcagggaggtctcaggaacgtacggcacatttgaaggagccaccacgctgacctcgttcagaattctcaccagcagcaggacatgggggccatggggcgtcgagaacgggacgcgtttctgcatcaccgcgccggtcggcagcagcatcgtggggttctatggacgcgcgaccagcaggctcgtcgctgcgcttggtgtttacctgcgccgactttgatttgatctgaacagagcaggctacctactagcaattgcctgctcgatcaattatctttcgcaccctttattattaatataatctcgatcggtcatcgtactcctatgtcaatgtcaaataaaggtcatatgtagtcatcgatattgttggatttattggcatggtctaattaagaaattcatttaattcctg

SEQ ID NO: 136938 - DNA, 1102 bp, Zea Mays
acacaaacaagaagcttgcattgttcgttgctcgatcgttgcaggtaatggagaaccctgctccgagtatcgtagtgccccccatcgccgcacctgtatcagcgaacttcagcagactcgccttccgcaacctgtacatccgacggacgggtccagacagcagggagatggtgactgtggagggaagaagaggctctagtgatcagacaggcgacatgaggtacgtgagtgacttccccgtctacgatggccgtggctccgacgccgtcctggtggctcgcgtgcagggcgtcacaaccacgttcgggaactccaaccagttcttcaccgtcgccttcgaggctggcaggctaaagggctccacgctccttaccgaaggagtggtgacggatggatccgatgaatgggcaatctacggcgggaccggagagtttgctatggcgagaggtgtcgtcaaaagaaggtaccttgccgatagggacggcgccgggaacactgacgagctcagcatgcaggttttctgcccggtgtttggctcatcacagcaaccaaacaagcaggcacgtgctgtactgtatatatgtccgagagagagaaacagacagtagaatcctcatcagtagtataatcagctgcatgtatgtaggactccaccatctctgtcaccaagattgggttatggggtggcgaaggagggtcggcgcaggacatcacgacgacggagccaccgcagcgcctgcacagcctcaccgttcgtgccagtgccgccgtcgactccatcgagttcacgtatactgacagaggtggccagaggcgcgccgctgggcgatggggtggacttggcggcaaccttcgaacgatcgatcttggcgacgccgaggatgtcagggaggtctcaggaacgtacggcacatttgaaggagccaccacgctgacctcgttcagaattctcaccagcagcaggacatgggggccatggggcgtcgagaacgggacgcgtttctgcatcaccgcgccggtcggcagcagcatcgtggggttctatggacgcgcgaccagcaggctcgtcgctgcgcttggtgtttacctgcgccgactttga

SEQ ID NO: 136939 - DNA, 1367 bp, Zea Mays
attcattgggggcatttgctacaccaccacacccacaccccatcccagcacacaacaagcagcctggtttacggtagctgctagcaaaacaatggagaaccctgctccgagcatcgtagtggccatcgccgcacccgtggcggcggagttcgtgaaactcaccttccgtgccctgtatatgcgccgggctggtcctggcagcagggagatgactgtgccgggaaggccatccgaccagctgggcaggagagtcgtcactgacagccccgtgtacgacggccgtggcgccgacgcccgcctcgtggctcgcatacagggagtcacggtcctggtcggtaacgcagacgccttgttcaccatggtgttcgaaaccgacaggctaaagggctccacgctcgtcatcaacggaatggtcacggatgggtcagacgaatgggcgatctacggcggaaccggggtgttcgccatggccaccggtgtcatgaagagaagaaaccttgccggcggtagcaacgacgggaactctgacgagcttgccctggaagttttctgcccggtgtttggcgcatcacagcaaccaattagcaagcagcaggagtccatctcctccgtcaccaagatcggactatggggcggacagggagggtcggcacaggacatcacggcagagcagccaccacggcgtctgcacagcatcaccgtccgcgctggcgttgccgtcgactccatcgagttcacctacaccgacgacgctgggcagaggcgcactgctgggcggtggggtggacttggcggcaatgttcgaacgatcgaccttggcgacgcagaggatgtcagggaagtctcgggaacatacggcgcatttgaaggtgccattacgctgacctcgctcaggctcgtcaccagcagcagaacctggggcccctggggggtcgagaacgggacgcgtttctccatcacggcgcccaacggcagcagcatcgcgggattctatgcgcgggcgggaaccaggctcgtcgacgctatcggtgtttacatacgtccagtggtgccaggcaggcctcggtgaacaagcgagccgagctcgctcgtattacgagctgtaggattatggttcggcttgacttgatgtaggctacctgctacatcatgctcgattcactatcctttaattcggtcatcgtcgtcgtcttgtctcgtgtcaaataaagctctcttgtgcctatatacggctctcatggttgtgccgtgtctctatatgttagtgtttatgtatatgtggagatcaaataatggccttgcaataatgatcaaagactcgctatgttaatgataatttcattttatatattggttttttttgtttc

SEQ ID NO: 136940 - DNA, 1451 bp, Zea Mays
attcattgggggcatttgctacaccaccacacccacaccccatcccagcacacaacaagcagcctggtttacggtagctgctagcaaaacaatggagaaccctgctccgagcatcgtagtggccatcgccgcacccgtggcggcggagttcgtgaaactcaccttccgtgccctgtatatgcgccgggctggtcctggcagcagggagatgactgtgccgggaaggccatccgaccagctgggcaggagagtcgtcactgacagccccgtgtacgacggccgtggcgccgacgcccgcctcgtggctcgcatacagggagtcacggtcctggtcggtaacgcagacgccttgttcaccatggtgttcgaaaccgacaggctaaagggctccacgctcgtcatcaacggaatggtcacggatgggtcagacgaatgggcgatctacggcggaaccggggtgttcgccatggccaccggtgtcatgaagagaagaaaccttgccggcggtagcaacgacgggaactctgacgagcttgccctggaagttttctgcccggtgtttggcgcatcacagcaaccaattagcaagcagcaggagtccatctcctccgtcaccaagatcggactatggggcggacagggagggtcggcacaggacatcacggcagagcagccaccacggcgtctgcacagcatcaccgtccgcgctggcgttgccgtcgactccatcgagttcacctacaccgacgacgctgggcagaggcgcactgctgggcggtggggtggacttggcggcaatgttcgaacggtgagcaacatgcagtagtcctccatcgtatcatccatcaacctcttcatgaagcataatgcatgtccatcatcactcgaactctgcatgcgtacgtgcagatcgaccttggcgacgcagaggatgtcagggaagtctcgggaacatacggcgcatttgaaggtgccattacgctgacctcgctcaggctcgtcaccagcagcagaacctggggcccctggggggtcgagaacgggacgcgtttctccatcacggcgcccaacggcagcagcatcgcgggattctatgcgcgggcgggaaccaggctcgtcgacgctatcggtgtttacatacgtccagtggtgccaggcaggcctcggtgaacaagcgagccgagctcgctcgtattacgagctgtaggattatggttcggcttgacttgatgtaggctacctgctacatcatgctcgattcactatcctttaattcggtcatcgtcgtcgtcttgtctcgtgtcaaataaagctctcttgtgcctatatacggctctcatggttgtgccgtgtctctatatgttagtgtttatgtatatgtggagatcaaataatggccttgcaataatgatcaaagactcgctatgttaatgataatttcattttatata

SEQ ID NO: 136941 - DNA, 1429 bp, Zea Mays
attcattgggggcatttgctacaccaccacacccacaccccatcccagcacacaacaagcagcctggtttacggtagctgctagcaaaacaatggagaaccctgctccgagcatcgtagtggccatcgccgcacccgtggcggcggagttcgtgaaactcaccttccgtgccctgtatatgcgccgggctggtcctggcagcagggagatgactgtgccgggaaggccatccgaccagctgggcaggagagtcgtcactgacagccccgtgtacgacggccgtggcgccgacgcccgcctcgtggctcgcatacagggagtcacggtcctggtcggtaacgcagacgccttgttcaccatggtgttcgaaaccgacaggtgtgtgttcatcttcaattcacgtgcaagctgtaatactgattcattcaattcaccatcgtctgttggtcatcaatcaggctaaagggctccacgctcgtcatcaacggaatggtcacggatgggtcagacgaatgggcgatctacggcggaaccggggtgttcgccatggccaccggtgtcatgaagagaagaaaccttgccggcggtagcaacgacgggaactctgacgagcttgccctggaagttttctgcccggtgtttggcgcatcacagcaaccaattagcaagcagcaggagtccatctcctccgtcaccaagatcggactatggggcggacagggagggtcggcacaggacatcacggcagagcagccaccacggcgtctgcacagcatcaccgtccgcgctggcgttgccgtcgactccatcgagttcacctacaccgacgacgctgggcagaggcgcactgctgggcggtggggtggacttggcggcaatgttcgaacgatcgaccttggcgacgcagaggatgtcagggaagtctcgggaacatacggcgcatttgaaggtgccattacgctgacctcgctcaggctcgtcaccagcagcagaacctggggcccctggggggtcgagaacgggacgcgtttctccatcacggcgcccaacggcagcagcatcgcgggattctatgcgcgggcgggaaccaggctcgtcgacgctatcggtgtttacatacgtccagtggtgccaggcaggcctcggtgaacaagcgagccgagctcgctcgtattacgagctgtaggattatggttcggcttgacttgatgtaggctacctgctacatcatgctcgattcactatcctttaattcggtcatcgtcgtcgtcttgtctcgtgtcaaataaagctctcttgtgcctatatacggctctcatggttgtgccgtgtctctatatgttagtgtttatgtatatgtggagatcaaataatggccttgcaataatgatcaaagactcgctatgttaatgataatttcattttatat

SEQ ID NO: 136942 - DNA, 651 bp, Zea Mays
gataaccgaggagggcaggtgcgacctggacaagagatacgtgagtgacttccccgtctacgacggccgcggccccgacgccagccttgtggcccgccgcagcgtctgcacagcgtcaccgttcgtgctggcgtcgccgtcgactccatcgagttcacctatactgacagcgctgggcagaggcgcgccgctgggcgatggggtggactcgggggcaatgttcgaacgatcgaccttggcgacgccgaggatgtcagggaagtctcgggaacatacggcgcatttgaaggtgccactacgctgacctcgctcaggctcgtcaccagcagcagaacctggggcccctggggtgtcgagaacgggacgcgtttctccgtcacggcgcccatcggcagcagcatcgtgggattctatgcgcgggcgggaaccaggctcgtcgatgctatcggtgtttacttgcgtcagatttaattcgaataatagcaggggagctactgctagctacgtacctgctccatcctccattatcctttatttcaattcgctcatcatcgtcgtgtgtaaattaaataaataaagctcttgtgcccatattatatatagttgtcatggccgtgccgtgtctatgtgcgtatacaagtttggctcata

SEQ ID NO: 136943 - DNA, 1346 bp, Zea Mays
ctaacacaacggaggcaataggatgggatggtcatctataaataagtagcccggcgcagccttctttggagcagggagaagaacacagggcacacgcactacacgcacggcacgcagatacatatagagagaggttagctatagcttgcacatctatttaactaactaactaactggctagctagctcgatccgcagagcaaagcgaaagcagcaagaagcaaagcaatggagaaccctgcgagtgtgctagttctaccagcgcagttcaccaaactcaccttcggaaacctgtacatccgccgggccgggccgggcagcagggagataaccgaggagggcaggtgcgacctggacaagagatacgtgagtgacttccccgtctacgacggccgcggccccgacgccagccttgtggcccgcgtgcaggggatcaccagcgaaatcgggaacgcgcaccaactgttcgtcgttgttttcgacaccgacaggctcaagggctccacgctcgtcaccaatggcgtgataacggccgggtctgacgagtgggcgatctacggcggaaccggggtgtttgccatggcgaggggcgtcataaggagaaggtatctcgccgacagggccggcgggaacactgatgagctcaacatggatgtcttctgccggccgtttggctcacagtcagagctgcaagataagatgcaggtgcaggggcagggctctagcgtcaccaagattggactatggggtggaccgggagggtcggcacaggacatcacggcggagcggccgccgcagcgtctgcacagcgtcaccgttcgtgctggcgtcgccgtcgactccatcgagttcacctatactgacagcgctgggcagaggcgcgccgctgggcgatggggtggactcgggggcaatgttcgaacgatcgaccttggcgacgccgaggatgtcagggaagtctcgggaacatacggcgcatttgaaggtgccactacgctgacctcgctcaggctcgtcaccagcagcagaacctggggcccctggggtgtcgagaacgggacgcgtttctccgtcacggcgcccatcggcagcagcatcgtgggattctatgcgcgggcgggaaccaggctcgtcgatgctatcggtgtttacttgcgtcagatttaattcgaataatagcaggggagctactgctagctacgtacctgctccatcctccattatcctttatttcaattcgctcatcatcgtcgtgtgtaaattaaataaataaagctcttgtgcccatattatatatagttgtcatggccgtgccgtgtctatgtgcgtatacaagtttggctcata

SEQ ID NO: 136944 - DNA, 1461 bp, Zea Mays
ctaacacaacggaggcaataggatgggatggtcatctataaataagtagcccggcgcagccttctttggagcagggagaagaacacagggcacacgcactacacgcacggcacgcagatacatatagagagaggttagctatagcttgcacatctatttaactaactaactaactggctagctagctcgatccgcagagcaaagcgaaagcagcaagaagcaaagcaatggagaaccctgcgagtgtgctagttctaccagcgcagttcaccaaactcaccttcggaaacctgtacatccgccgggccgggccgggcagcagggagataaccgaggagggcaggtgcgacctggacaagagatacgtgagtgacttccccgtctacgacggccgcggccccgacgccagccttgtggcccgcgtgcaggggatcaccagcgaaatcgggaacgcgcaccaactgttcgtcgttgttttcgacaccgacaggtatactgctcgaacggattgcttgcttgcatgtgtttgtggcgacgcgcgcgttctagctaattgcttttccagctgttcgtctcgccctgcatatgcgtctctctgctgccaggctcaagggctccacgctcgtcaccaatggcgtgataacggccgggtctgacgagtgggcgatctacggcggaaccggggtgtttgccatggcgaggggcgtcataaggagaaggtatctcgccgacagggccggcgggaacactgatgagctcaacatggatgtcttctgccggccgtttggctcacagtcagagctgcaagataagatgcaggtgcaggggcagggctctagcgtcaccaagattggactatggggtggaccgggagggtcggcacaggacatcacggcggagcggccgccgcagcgtctgcacagcgtcaccgttcgtgctggcgtcgccgtcgactccatcgagttcacctatactgacagcgctgggcagaggcgcgccgctgggcgatggggtggactcgggggcaatgttcgaacgatcgaccttggcgacgccgaggatgtcagggaagtctcgggaacatacggcgcatttgaaggtgccactacgctgacctcgctcaggctcgtcaccagcagcagaacctggggcccctggggtgtcgagaacgggacgcgtttctccgtcacggcgcccatcggcagcagcatcgtgggattctatgcgcgggcgggaaccaggctcgtcgatgctatcggtgtttacttgcgtcagatttaattcgaataatagcaggggagctactgctagctacgtacctgctccatcctccattatcctttatttcaattcgctcatcatcgtcgtgtgtaaattaaataaataaagctcttgtgcccatattatatatagttgtcatggccgtgccgtgtctatgtgcgtatacaagtttggctcata

SEQ ID NO: 136945 - DNA, 1455 bp, Zea Mays
ctaacacaacggaggcaataggatgggatggtcatctataaataagtagcccggcgcagccttctttggagcagggagaagaacacagggcacacgcactacacgcacggcacgcagatacatatagagagaggttagctatagcttgcacatctatttaactaactaactaactggctagctagctcgatccgcagagcaaagcgaaagcagcaagaagcaaagcaatggagaaccctgcgagtgtgctagttctaccagcgcagttcaccaaactcaccttcggaaacctgtacatccgccgggccgggccgggcagcagggagataaccgaggagggcaggtgcgacctggacaagagatacgtgagtgacttccccgtctacgacggccgcggccccgacgccagccttgtggcccgcgtgcaggggatcaccagcgaaatcgggaacgcgcaccaactgttcgtcgttgttttcgacaccgacaggtatactgctcgaacggattgcttgcttgcatgtgtttgtggcgacgcgcgcgttctagctaattgcttttccagctgttcgtctcgccctgcatatgcgtctctctgctgccaggctcaagggctccacgctcgtcaccaatggcgtgataacggccgggtctgacgagtgggcgatctacggcggaaccggggtgtttgccatggcgaggggcgtcataaggagaaggtatctcgccgacagggccggcgggaacactgatgagctcaacatggatgtcttctgccggccgtttggctcacagtcagagctgcaagataaggtgcaggggcagggctctagcgtcaccaagattggactatggggtggaccgggagggtcggcacaggacatcacggcggagcggccgccgcagcgtctgcacagcgtcaccgttcgtgctggcgtcgccgtcgactccatcgagttcacctatactgacagcgctgggcagaggcgcgccgctgggcgatggggtggactcgggggcaatgttcgaacgatcgaccttggcgacgccgaggatgtcagggaagtctcgggaacatacggcgcatttgaaggtgccactacgctgacctcgctcaggctcgtcaccagcagcagaacctggggcccctggggtgtcgagaacgggacgcgtttctccgtcacggcgcccatcggcagcagcatcgtgggattctatgcgcgggcgggaaccaggctcgtcgatgctatcggtgtttacttgcgtcagatttaattcgaataatagcaggggagctactgctagctacgtacctgctccatcctccattatcctttatttcaattcgctcatcatcgtcgtgtgtaaattaaataaataaagctcttgtgcccatattatatatagttgtcatggccgtgccgtgtctatgtgcgtatacaagtttggctcata

SEQ ID NO: 136946 - DNA, 1406 bp, Zea Mays
ctaacacaacggaggcaataggatgggatggtcatctataaataagtagcccggcgcagccttctttggagcagggagaagaacacagggcacacgcactacacgcacggcacgcagatacatatagagagaggttagctatagcttgcacatctatttaactaactaactaactggctagctagctcgatccgcagagcaaagcgaaagcagcaagaagcaaagcaatggagaaccctgcgagtgtgctagttctaccagcgcagttcaccaaactcaccttcggaaacctgtacatccgccgggccgggccgggcagcagggagataaccgaggagggcaggtgcgacctggacaagagatacgtgagtgacttccccgtctacgacggccgcggccccgacgccagccttgtggcccgcgtgcaggggatcaccagcgaaatcgggaacgcgcaccaactgttcgtcgttgttttcgacaccgacaggctcaagggctccacgctcgtcaccaatggcgtgataacggccgggtctgacgagtgggcgatctacggcggaaccggggtgtttgccatggcgaggggcgtcataaggagaaggtatctcgccgacagggccggcgggaacactgatgagctcaacatggatgtcttctgccggccgtttggctcacagtcagagctgcaagataagatgcaggtgcaggggcagggctctagcgtcaccaagattggactatggggtggaccgggagggtcggcacaggacatcacggcggagcggccgccgcagcgtctgcacagcgtcaccgttcgtgctggcgtcgccgtcgactccatcgagttcacctatactgacagcgctgggcagaggcgcgccgctgggcgatggggtggactcgggggcaatgttcgaacggtgagcagcatgcagtagtcctccatcgtatcatccatcaacctcttcatgaagcataataatgcatgtccatcatcattcaattcgaactctgcatgcgtacgtgcagatcgaccttggcgacgccgaggatgtcagggaagtctcgggaacatacggcgcatttgaaggtgccactacgctgacctcgctcaggctcgtcaccagcagcagaacctggggcccctggggtgtcgagaacgggacgcgtttctccgtcacggcgcccatcggcagcagcatcgtgggattctatgcgcgggcgggaaccaggctcgtcgatgctatcggtgtttacttgcgtcagatttaattcgaataatagcaggggagctactgctagctacgtacctgctccatcctccattatcctttatttcaattcgctcatcatcgtcgtgtgtaaattaaataaataaagctcttgtgcccatattatatata

SEQ ID NO: 136947 - DNA, 1397 bp, Zea Mays
ctaacacaacggaggcaataggatgggatggtcatctataaataagtagcccggcgcagccttctttggagcagggagaagaacacagggcacacgcactacacgcacggcacgcagatacatatagagagaggttagctatagcttgcacatctatttaactaactaactaactggctagctagctcgatccgcagagcaaagcgaaagcagcaagaagcaaagcaatggagaaccctgcgagtgtgctagttctaccagcgcagttcaccaaactcaccttcggaaacctgtacatccgccgggccgggccgggcagcagggagataaccgaggagggcaggtgcgacctggacaagagatacgtgagtgacttccccgtctacgacggccgcggccccgacgccagccttgtggcccgcgtgcaggggatcaccagcgaaatcgggaacgcgcaccaactgttcgtcgttgttttcgacaccgacaggctcaagggctccacgctcgtcaccaatggcgtgataacggccgggtctgacgagtgggcgatctacggcggaaccggggtgtttgccatggcgaggggcgtcataaggagaaggtatctcgccgacagggccggcgggaacactgatgagctcaacatggatgtcttctgccggccgtttggctcacagtcagagctgcaagataaggttgttcatcatactaataaccagcggcggccgttctgccgtttggagctgaatatgttttgttggatatataacatactcctatatgaatctttgcgcatatagatgcaggtgcaggggcagggctctagcgtcaccaagattggactatggggtggaccgggagggtcggcacaggacatcacggcggagcggccgccgcagcgtctgcacagcgtcaccgttcgtgctggcgtcgccgtcgactccatcgagttcacctatactgacagcgctgggcagaggcgcgccgctgggcgatggggtggactcgggggcaatgttcgaacgatcgaccttggcgacgccgaggatgtcagggaagtctcgggaacatacggcgcatttgaaggtgccactacgctgacctcgctcaggctcgtcaccagcagcagaacctggggcccctggggtgtcgagaacgggacgcgtttctccgtcacggcgcccatcggcagcagcatcgtgggattctatgcgcgggcgggaaccaggctcgtcgatgctatcggtgtttacttgcgtcagatttaattcgaataatagcaggggagctactgctagctacgtacctgctccatcctccattatcctttatttcaattcgctcatcatcgtcgtgtgtaaattaaataaataaagctcttgtgcccatattat

SEQ ID NO: 136948 - DNA, 1004 bp, Zea Mays
ctaacacaacggaggcaataggatgggatggtcatctataaataagtagcccggcgcagccttctttggagcagggagaagaacacagggcacacgcactacacgcacggcacgcagatacatatagagagaggttagctatagcttgcacatctatttaactaactaactaactggctagctagctcgatccgcagagcaaagcgaaagcagcaagaagcaaagcaatggagaaccctgcgagtgtgctagttctaccagcgcagttcaccaaactcaccttcggaaacctgtacatccgccgggccgggccgggcagcagggagataaccgaggagggcaggtgcgacctggacaagagatacgtgagtgacttccccgtctacgacggccgcggccccgacgccagccttgtggcccgcgtgcaggggatcaccagcgaaatcgggaacgcgcaccaactgttcgtcgttgttttcgacaccgacaggtatactgctcgaacggattgcttgcttgcatgtgtttgtggcgacgcgcgcgttctagctaattgcttttccagctgttcgtctcgccctgcatatgcgtctctctgctgccaggctcaagggctccacgctcgtcaccaatggcgtgataacggccgggtctgacgagtgggcgatctacggcggaaccggggtgtttgccatggcgaggggcgtcataaggagaaggtatctcgccgacagggccggcgggaacactgatgagctcaacatggatgtcttctgccggccgtttggctcacagtcagagctgcaagataaggttgttcatcatactaataaccagcggcggccgttctgccgtttggagctgaatatgttttgttggatatataacatactcctatatgaatctttgcgcatatagatgcaggtgcaggggcagggctctagcgtcaccaagattggactatggggtggaccgggagggtcggcacaggacatcacggcgga

SEQ ID NO: 136949 - DNA, 287 bp, Zea Mays
gatgcaggcacctgatctttgctttgggagaagggatgtagcagcacggccaccacacttttaaataaaggaataactgattattaatgatgttaaacaggaagggtcaagtctagggaattattacattctaatctttcatggtagttgaactgtttagtttggtgggctgagatgactatcttttgtctggtcatgaatgttcttttctactgctgcatttcgattatactatgtcaattatctttcttttatatcctgtataaactatatgctttccttgttat

SEQ ID NO: 136950 - DNA, 110 bp, Zea Mays
cagagtacttttgagttccggcaaccatgctgatgcagctccacaatgtgacaacctgcacgtgactggcctaagcctgagaggaactcttggtgctttggttgaagaac

SEQ ID NO: 136951 - DNA, 231 bp, Zea Mays
ggcaaactagagagtcgtgctgagaaaagtagtccagcatgcctggtgttgcaagctacatatgggccccttccctgtttgatctagctcaactttggctgttgtatttagttctctaccgaggcttgcttgtcctgttatgcatgtctcctaattccccatgaacacacacacactgaagagcaaaaagtatgctaactgctaacctcatttgggtttctggtttcctat

SEQ ID NO: 136952 - DNA, 980 bp, Zea Mays
aatgaacccctgtccgccgccgcctcgtgtggccgttcccgttccgtctcccaggagcgagacccgaagtttctagagccttcgggccgagatggtcgtgttgcacgtgaagttggcgccacccgctgccgccgccgccaccgccgccgcctcctctcccatgcaggacgtggacgaggagacggagttcctgtacgagtgcgccgcctctgcggtcgtcgcggacgtcgcggccgccctcggcgcgctagcgggcctccaggccgccatcctctccctctgccgccgccttcgagcgaggtgtgctggtgcgatgggcgagctcgagagggcgctggacgaggccgaggcctacgcttctaaggagcaggtgcagcgcaacagattcctgtctcctcgtgctctaagggaacatatcaagaacatcgagaagaaatgcgctaatactctacaagaacctctggaggcattgtctctgcaagagtcatcatcagacaacaagcatgagagaatacagatttggtgggctgggaaagagctagccatggaccagaagctatccgactatatcggtgttaatgataaaaccaagattgtcgtcaggctaattgaagctcgtgatgagtgttgattgtgctcctacctcttcattgatatcgcagagttggtttcctcttcgataatattagtatatggatactggtcctcagtccctgtaagatagttttaattcccttgaacaacattcttgtcaactgtattatctgacaataggtataagtggtttgacttcttgtaccagttgcttgtacaatatatcctcagtcatcacagaggcttacttttggggtgttatgtgccagttatcccctttcaataaggtggtataaattttaagctatcatcctgtttatctgtaacactgccaagtttacaggctgacaacctgtataaaaaccagaatacttatataggtcctt

SEQ ID NO: 136953 - DNA, 558 bp, Zea Mays
atggcatgtctaaaaattttggcatcaaaatacctcaaaagtcctactctagagcccataatgttccggtttcctctcatagaggaaaactacaccagacatgacagaactgaggaactgaggaagtgtcgatggtttcgggaacacctcaatcggaggtgtgaggtgtggcccaagggcctgagtattaccgcctctttgagatccggctcgtcgcggatggcagtcgtgaccaatgacaggcttaccctgttggagcgtgaggacgacgacctgggagctggacatcgcaccacctccttcagcatgaaccccgcggctccgatcttctcggccactacccacgagcactgtgggcttccccaggacggcgcccacggcgggaaagtcgggggaggtcgtcgacgccgccacggccgcggctgcgacgggggtggtgaggcgcaagcgctcggcgtgggcatggggatgtgcgcagagcgagaggcggagggaggagaacgtggggacggtgatggagatgatggaagcagttgccagggaggagagaagatgtga

SEQ ID NO: 136954 - DNA, 101 bp, Zea Mays
gtcgtattagcagaagggctattgttctcttctgagtacacacttctttctatgaatgaaaccagttcatctacatttttgtattattttacgtcatgtac

SEQ ID NO: 136955 - DNA, 301 bp, Zea Mays
gcgaaagggcctctagcgtaatggttaaggcttccgagtagcacctccaggtcctgggttcgatccccctcgggggcgaatttctggcttggttaaaaaaatcccctcgctgtgccccgcccgctcccgggttacgtcctgcgcgccaccctccggctgggccgttgcagagtgggcggtgacggcccgctagtgatggggggccagggttcggggattttctcggccgggaccatgtttcggtctcttcttaatataataccgggagggcggtctttccctccccggccgagttttttga

SEQ ID NO: 136956 - DNA, 1115 bp, Zea Mays
gttttcgcccatgcccaaaaggagagtgttgatgcttttttctcacaaactcttacattgggtacgacgtgcttcagaaacttgcaattcctcaacctaaacagttcttggaggcccgatatccagatggtattgcattggatgctgtctttgttcatacttctgtggttgatatgctcgatactgcggttggtgatgcaattgagaatggacactggattgattctctttcagttcttccatcatatattagtggaccagatgcaaccaaaattttatctatctgtccatctctgcagaaggctatcaagtcttctaaagcagtggtatttggagagtcatgtgtcttcagtaacatgtttattaagggtatttttgaccgacttgagaaagatatggactcgtttggtattagacttagtgttggtcaaggaagacctgtgaatacgaatctgggtagtgagcacaagacagggtctggtcagcactcggacacaaaagatcttggtggtaatggcactagcagtaccggtgcttcatcagacagagggtcaaagaagaaaagggggaaagggacagggtctaccaaaggtggatcacttgaaaaggatgatgacaatgaagaaagcattcctgttaagggcaagaaatctcacaggaaaaacaaggatgctggtgcatctggtgacataaaacatggtggtaaaaaaacgtcagagaaaatgatagaggagaatgcaaatatctttcctgatgaattgatagaagaaaaggttttggctgttgctccagagttagaagagttgggaggctctgatgactcaaatgccccccttaaattgttgtcttctcacctgaggccaatgcttgttgactcatgggcaaagaaacggaacaccatgctgtcaggaaatgctgaaagaaggcgacgcttgctcgataatctgcagaagcagatagatgaggctgtcctggagatacaactctatgaaaaagctttggatgtatttgaggaagatcctactacttctggtatactacacaagcatcttctaagaagtatgggcactccaatagttgacaaagttttgattacattggataaggacaacaaa

SEQ ID NO: 136957 - DNA, 2943 bp, Zea Mays
aacccacctcctcgtcctcccgccgccggcgctttccgattttgtgcactccaaccttcacgtgtctccgccgcccgtccaaagcaggaaggagctccgccccggaccgatcgagaagcgagcgacaaataagggttcctcgggccgccgactgaccacctgacgcctccagctctatcatcgtccctccaacgacccgcgcagcaaagcagccggtcctcccgccgccgccgccgacatgggcgggggccgcgcgcaggtgaacaaggcccacaagagccgcttcgcgtccaaggcttcccgccacacgcacaagatcgacaaggtcaggagcgggaagtcagaaaccagccaccgcgccgctgtaaagggggcccgcgccgcccgcatccagcagagcaaggcgatccgtgataaaaaacgtgctgctttgctgaaggagaagcgctcgtcaactggaccttcaagcgcaccgcgcgtcattgttctcgttggcctttcttcatcagcaaatgtcggatcacttgccaaggatcttttggcatttgcagaaggagatgatcggaaactgaaattatctaccattgcttctcctacttataagcttcgaaccacagtactgcaagcaccatatggtgatcttaccacatgcatggaactggcgaaggttgctgatttgttagcgttcgtactgccagccaattcattctacagtggtgatttgaatagcccaattgatgagtttggatctcaatgcctgtctgtatttagggccatgggcttacctagtacagctgtttttattcgtgatcttccagcggataataaaagtaggcaggaattgaagaaagcagcaacttctttcctttctgcagagctgcctgaggactgcaagttttacttggcagacacaaaggatgatttgcataagttcatgtggcttttcaaggagcagcatctttcctcgccacattggagaaaccagagatcttatgttatgtctgagcaggtctgcataaatcctgatgaaaatacgggattgtgcacattgctcgtgtctggatatttgcgggcccacaatctttcagtgaatcagcttgtccatgtttcaggtgctggtgattttcagttaggccaaattgatgtcctcaaggatccatgtcctcttagtgagcggaaaagctctgatgtaatggaaacagaagataatggaattcagattgttaacacttttgttccagacccttcaagtcaggaacccttacttgttgaaaatgtgccagatcctcttgccggggagcagacttggccaacggaagaagacatggaggaggtcgacataaacaacaaacagagaaaattggaaaagaggaagcttccccaaggcacttcagagtaccaggctgcttggattgttgaggacacagatgatgaagataacgactctgatgatgacaaccagactgaatctggaatggtcattgatgagcaaggtcactcagaccaaggaagtgatggttcagatatagatgcagtgtctcactttacggagaagtttgatggagaaactattggggatactgagatggcagatgaagaaaatttgacgaaagaccagatagaggcagagattaagaaaatcaaagaagctaatgctgatgatgaagaatttcctgatgaggtggagacaccattagatgtcccagcaaagaagcggtttgcaaaatacagaggactaaagtcatttaggacatcatcctgggatcctaaggaatcgttgccactggactatgcaagaatatttgcatttgataactttacaagaactcaaaagcatgtctttgctaaaattgctgagttagatggaggcatgaagaattgtgctcaagtgggatcatatgtaaggctttatgtgaaaaatgttcccactgatatagcctccaaactctgtcatccatcaagaagaatacctgtggttgtttctggtcttcttcaacatgagtccaaaatgtcagttcttcacttcagcataaagaaacacgactcttacgaagctcctatcaaatctaaggagcctttgattttcaatgttggattccgacaatttactgcaaggccactgttttcatccgacaacatcaactgcaataaacacaagatggagagatttctgcaccatggccgattttcggttgcatctgtatatgctccaatttccttccctccacttcctctaatagttttgaagaacagagatggcgagcaacctgccattgctgctgtaggttcgctaaaaagtgtggatccagaccggatcattctgaagaaaattgttctgaccgggtatccacagagagtctcgaaactgaaatcgatcgtgcggtatatgttccacaatcccgacgacgtaaaatggttcaagcctgttgagttgtggacaaaacatggtcgtcgtggccgcatcaaggagactgttggtactcatggtgccatgaaatgcttattcaatagcagcattcagcagcatgatactgtgtgcatgagcttgtacaagcgcgcgtatccaaaatggcctgaacagctctaccacgtataagattgcttgacgtttggctggatatgtaccagcaggcagaagcagaacgacgggaatgaaacagccttggagcttgcgtgccgtttagcttaaactaaatattttaggattaggaaaatgttttgttggtcgcctgagctaggaggccgaattttgtattggtccttcatatacttttgaacattctccttggacgtcctttattttagtatcaaatttaaattcaagtttaattgcacgttgagataggatattgccaacttaagctttaacatgttggcatatgtgctacacgcaatcatcggagggtcttctttatcataagaaatagtaggaggtggaatagg

SEQ ID NO: 136958 - DNA, 389 bp, Zea Mays
aacgttctctaacaagaagcacagatagcaacaacaataacaacaatggtcgcgttcgagcgtagtaggagcacaaccacagtggtgctcctcgtccttttgatgccgctactgctgtcatcatccaccgcgtcggaggcacacatccagaagaaatggagacccccaataatctatccatggatgcccccgataatctatccatcgccgataccacctccacaccatgggcgcgacttggacttgcccttcatgaacaacaagcacaccccaccggcgtcacagcaagatgaccaagctgttgtcggctcgttgcagccttagctttgaatgtgttgcatgggttgttatatttatggtgaggaataaatttaattaactttgaataa

SEQ ID NO: 136959 - DNA, 500 bp, Zea Mays
attcctccttcctggcgccgtcctgctcccttctccttccccttctctagtagctaacagttggtatcaaagacatcgatcctcggatctggagccgatccagtacacccgccgagccaaaaccctaggcgctatggatccccaaatcaagctcgctttggaggcacaaactcgttccttcctcaacgagctcgacaagaagttcgccgcgcatgacaccaaatgggagtcacgcgtcggtgatctggagcggtcggcagcggcggccgccgatcagttctacgacctcaaggcggacatccataccgatgtcactgctcagttggaattcttcgtctcttccgcgacggagcgcacagatcgggcagccgcggccacgatttcgcgcgtctcggcgctcaaatccactacctcgacctttgaggcgtggcgccccaccatggagtcgatggtcactgacttcaaactcagtgtcaaagctgtacaagccattgtcgaca

SEQ ID NO: 136960 - DNA, 476 bp, Zea Mays
atccaaatcttccatctccctcacaacagccaccctcccattttctcatctcggccacaaccatagcttggtggtcgatgtgccctgctccagcctggccgcccaccttgggtcctcatctccatctctcagctgctcagctccctggtgctcgccctcccctgctctcaggacagcagggagccgacgacctctccaactcggccggccatggcaccgcttccccaagcgtcacattggagctcgcccaaccctctcccatctccttccccaagcacaagtcccatggtcgagctcacccctgcaggagctccctatggcgcctagattttcaatttcctatgagttctttttcccccacatgcaatctcggcatcgtcgtcgtgtttagtcacgaggaactccaggtttttgcgtagagaggaaagtcgtgtggcgcgtgctaggtgtttgatggaatggatgaatcggagatc

SEQ ID NO: 136961 - DNA, 402 bp, Zea Mays
gcaacgttctctaacaagaagcacagatagcaacaacaataacaacaatggtcgcgttcgagcgtagcaggagcacaaccactgtggtgctcctcgtccttttgatgccgctattgctgtcaacatccaccgcgtcggaggcacacatccagaagaaatggagacccccaataatctatccatggatgccccctataatctatccatcgccgataccacctccacaccatgggcgcgacttggacttgccctccatgaacaacaagcacaccccaccggcgtcacagcaagacgaccaagctgctgtcggctcattgcagccttagcttggaatgtgttgcatgggttgttatatttatgatgaggaataaatttaattaactttgcataatttccaatgta

SEQ ID NO: 136962 - DNA, 2963 bp, Zea Mays
ctgcatgcatatctattgccggtgtgtgtgctcgctgctactcgtatgtcgtatccaccatcatcgtctccaaacttgcctctcgtgctccggcctccggctccggccatgccgcctcccaataaccgtctctgcgtagcactagctattgcgctcgtcgtcttctcttcgctgcacactccagctgctgcttctgctgctgacggcgacactcttgcggcaggccaggcgctcgccgccggcgacaagctcgtctcccgcaacggcaagttcgcgctcggcttcttccagttccggcaagccctgccaggcggcggcggcaccggtacgtccgcatccgtcgtcgtcccttcccccggctggtacctcggcgtatggttcaacaagatcccggtctgcactccggtctggatcgccaaccgagacaggcccatcaccgagtccgagctcaaggtagcccaattcagagtcgcatcgacagacggcaacaacaagctgctcgtcgtcgccaccagtaacactaacaccagcgccgacaattccatcataatcgtcgccaacaccaccacgaacggtagcagcgtccatgtcgtgctcatggacaccggcaaccttgtcctcctgccgcaaactgaagccctactatcctctgcttcagcgcccgccgccagctcctcctcctcctcctcctcctcctcctcctcctcctcctcctccctgtggcaaagcttcgactacccgaccgacgtcgggctccccggcgccaagatcggctggaccaagctcgccggcggccgctacttcagccgccagttcatctcgaagaagagcctggtggacccgagccccggctcctactccatcagcatcgacaccaacggattcatgcagctgactcgcaacgccccgagcgtgcagtactggtcgtggacgtcggggagcctgggaaacctcgtgacggcgctgactgccctgatcgacatggatcccaggaccaaggggctgctgaaaccgggctacgtggccaccgccgacgaggtgtacttcacctacagcatcaccgacgagtcggcctccgtgttcgtccccgtcgacgtcaccggccagctcaagctcatgctctggtccgactccaagcgggcctgggagaccatctacgcccagccttctgatttctgcgtcacctctgccgtctgcggccctttcaccgtctgcaacggcaactccggcccgtcgccgtcgtccttctgtacctgcatggacaccttctctatcaggtcccctcggcattgggagcttggtgatctcacagaagggtgtgcgaggacaacccccttggactgcgaagctgctaacagaagcagcaatggtagtcccgctcctgcaggctccacggacgtgttccaccccatagctcaagtggctttgcctttgccctacaattcccggccaatagaggacgccactacgcaaaacggctgcgaggcggcttgtctcggcgactgcaactgcacggcctactccttcagcaccgatggcaaatgctctgtctggaatggggacctgctcaacgtggaccaggccgacagcaccataagctcccaaggtgttctttaccttcgtctcgccaagagtgatttccagggtttgagcagaggcaacaagaggacaccgacggcggcgatcgctgcaggcgctgttggttctggaatactagtgctcgccgtgctagcgctcgtaatctggaggtgcaacaatgtgccgccgccgctacacgccggcgtcggagacggtggcggaatcatggcgttcaaacacaccgatctatgccgcgctactaagaacttcagcgacaggctcgggggaggtggtttcggctccgtgttcaagggactgttgggtgactcgaccgctgtggcggtgaaaaggctcgacgatgcccggcaaggcgagaagcagttccgggctgaggtgagctcggtcgggatgatccagcacatcaacctggtcagactgatcggcttctgctgcgaaggcgacaagaggctgcttgtgtacgagcacgtggtgaacgggtccctcgacgcgcatctgttccagcagagcagtgccgccgtcgtcgccactgcgctggattggagcaagaggtacaggatcgccgtcggggtcgcaagaggattgtgctacctgcaccagagctgccgcgagtgcatcatccactgcgacatcaaaccggagaacatcctcctcgacgcgtccttcgcgcccaagatcgcggacttcgggatggcggcgttcgtcggccgagacttcagccgggtcctgaccacgttccgagggacagcagggtacctcgccccggagtggctgagcggggtccccatcacgcccaaggtggacgtctacagcttcggcatggtggtcctggagatcgtgtccgggcagaggaacacgccgccgcaggctctcagcaggagcggttactaccacgccgcggcgtatttcccggtgcaggccatcacgaagcttcacgagggagacctgcagggcttggtggacccgcgcctacagggagacctcagcctggaggaggcggagaggctgtttaaagtcgcgttctggtgcatccaagacgacgagtgcgaccggccgaccatggctgacgttgtccgcgttctcgagggcctccaggagctcgatatgcccccagtgccaagactacttgcagctattacagcacgcgccaatgcggatttcatgtgatagatagttcatagctagactgctagactagataattccatctccgtcgtgacgacgcaaggcctcatgatgattgagctcgagcatggctggcatggcagcacttcctgcttgactgcgtctgcgtggtcagattaagcctttgataattgtaagacgatctgaaaatctgagtggttctatggcgttgacaatcatta

SEQ ID NO: 136963 - DNA, 465 bp, Zea Mays
atgggagcagcagaggaatggaaaaatggcacagggccagggcgagcagaagagcagggggagctcgccaggaaccaagcagagaagatgatggagagagggacgctggcctgctgcaggaatgggagggctccgccgtccaaggaagaagctggagccaggacgagctcgactggggcgctcggcatggagtcaagggaagaagaccaggcgccatgggagggaaacccctgcacgcagatcagagaggaggggcaaggacgatcgtccagggcgagctccacatcgcagctagggagaacgagcagggcggccggttgtaggagatggggagggactcgatcggcggccatggacgaggtggagtgcgcgtgggagctggaggctgagcgctggaagccgcggcgcagtgaaaatatcagggagatgagcgccacggagaagataacgctgagcacgagatag

SEQ ID NO: 136964 - DNA, 111 bp, Zea Mays
ctttatctatcgtatgttcttctacacaattccaccttcagctgccttagcgccacatcatatttttcttttacaaattttgttgtaactaaaatacgacgtttcagttat

SEQ ID NO: 136965 - DNA, 288 bp, Zea Mays
cgattgactagaacgtcatgtttgatgtagaatttaatatatctagttgttacacctaagagttgtgatgttttgctttaagtttgtatcctccttagtataacttatctatcttgtgctatttatgctcctactcactcatatgcattatgaatgtcatttaggtacgttaattgatcacgtgatgttgaagacaaggtttggattgatctcaagataatgctgatggacgaagctaaagtgggtgaatcgaacaagtatcaggatgagagatgctcaccaagcgtt

SEQ ID NO: 136966 - DNA, 2024 bp, Zea Mays
gtcgtcactggtagctagcgactagcgagtccacacggagacaagatgtctgggaatgtgaatgtcgtcactcgggtgagtccacttccactcaacactccacagagtcaagaagatgactgggaacgagaacctcgtcgacggagtcgagaacgagagccaacaagacgcccacgtcgctgagcatgctgccggtggtactgctagtatacgtcgccatgaagtacacgaagctccgccgcctcgccgttaccgtcttcctaaggtgcggcgtgccttcggcggaccaccaccccctcctcctcatatcagcttccagtacaacagcgccgccaccatcgagaggatcccctacaaccttcagttcatcgtccctcgaaaccgcaacgtcatcgcgcccactgcagtggccataggtccctaccaccgtgccttaccccagctctcggggatgcaggaggccaaggccgcagccgtggcggagttctgccgcgcggcgggccagccgctcgcggcggtcagaggaaagatgctctcggtggcgggagccgctcgcgggagctacgccgccgacggcacgctcgtggacttggacaacggcgagttcgcggagatgatgttgctggacggatgcttcctgctgcagttcatggcctccgtgtgccggcgccgcgacgacgatccactcatctcgagaggcgaggtgcggagaagcatcaacgccatcgtgcgggacgtgatgctgctggagaaccagatcccctggcttgtgctcagctccctcatgcagttgatgccgccgcccgccgggtctgtcgtcaatgacttccttcttctcatggcctccgccttccacatcgtcggcgacatcagcaatgccaacagccaaaccggcctgccggccgccggagaattagataagccgccgccaccgcatctccttggcctcttccatcgccgtcaaatggatatgggcgcggtgcgcacccagcagcaccagggcagcctcctccgcgtccccttccagctggcttccctgtccagcaccgcggtggagctcgctgagatgggcgtcaagctcgccccaagcaagacgaagacatttggggacatggccatgtccaagcgggggcgccgctggcccctcggcctcttcggcgagctctccctggcgccgctggtcttgaaccgactcaccgagtgctggctcctgaacatggcggcctatgagttgtgccagccgcaaggcgacgctaccgatagcttccctgtcagctcttacgtcacgctcgtgtcgctccttgtgaaccggccggaggacgtgcaggagatgcgcgccaagggcctcgtcgtcagcgtcttcgacgacgcggaaacactcggcttcttcaaggcgctagcgccgcacctgagcgtcggttaccgctactacgaggtcttccagtgcctgcaggagtacaggcaggagaggtggctgtggatcgccgtccacaggttcttgtacaacaacatcaagaccatcgccactgtcttctccatcgtcggcgtgctcgcgggactcttcaagaccatcctttctgtgaagcagccccatggcccgtaagacgaccagcacattgagggagctggtgtttggttgactgtatttgttgatgcttgcatcgcgagatgcaatgagctggtatttggttgttctcaaccaagctctacgcgtgcgagatgtgtgtttagttacctgtgtgtagatatgaagtcaggctcgcacgatacttaaagcactctgggccagagtctgtagacacgagcaaattggtcgcatctctggagccacgctcccgccggcctatctcatgcagccgggctaccgaaaaaaaccaaccaaacaggcggaatttgtatcagcccagtatgtgtatccatatatgtactatctacctccctatttggaacatagaatagaaccatgctatttttgtgtttggttcagaagtgtagttagaatataaccgctctatcatatgttt

SEQ ID NO: 136967 - DNA, 212 bp, Zea Mays
tttttttttgatttggctaactgatgttattgtttactccatccaatatgtcttggtacaacacgaccaatggagtgagcgattagaagagagttcacaacgactgactgaacgaacatagattatagaatgacataattccaccatatagagaccaaataagagaaagtttgagagctcaagtttctaaaataagtcacatgaactcaaac

SEQ ID NO: 136968 - DNA, 3516 bp, Zea Mays
atgccccgcttcgcgttgtggcccaagtgcagagaggtggacgtggcggccctcgcggggcccgcaccgtcgctgcttccacgtgggcccccacctccccggtaccccacagttcaagatctgaattcgtcaggggagagtgagacgcaaggtctccggcagagcctagaggagcagacaggagaagcggaggcggaagcgatgctgcacggcggtgggtcgcgagcaccggcgaagccacggcgccccagctcccactctcactcccgccagcgggcgccgtccccgcccactccgtcgcgccgagcgagcggggctgtcgcttcggcttcccacgaatcgaaggagcagtcggcgttggaagctccggtgatgtcttccgtggaagagacatcgttcacgtttgagttcaaaagggcaaagaaggcaatgacgccgccgtcgctgctgccggtggatgagccgaggggcgaaaacaattcaagagagggcctctccaacaagccaagcgctgtccctgcgaagaaagacacgccgaagcaggtggagttcacccattgctcgcctggtattgttggcaggctgatgggcctagacaccgtgcctcgccccaagaaatctcttgaccgctgccagagtgacacccggggtaaccggcgacacttgtcaggagttgctcgaggcgtggacagcgcttcgtctggggatcaggcatgtaacaccagttctgatgagctgccagcatttaacgatgttttcgaggtaacagagatggagaacatggcgatgcatgggccgctgcagcctggaaatcaggagccatatctgacaaacattgaagctgatcttgaatttgtgaggcaaaagttcttggatgttaagcgccttgccactggcgaagggaatatgaactctaaggagttcagcgaagcactcgaggtactgcactccaaaagggatgttttccttgaaatccttcaggagaacaggactgcagtgtcaggattctcaggacacatccttagccacagtgggttgcagtgctcttcttataccagcaatgctgctgctgctgctgctgcacaaccgtttgagaaagaaatcccttgtggcatggaaggtgtgtgtgacgggatgcatgtcataccaaaagagtttgaggaacccgttcctagcatgccgcccagagaaacttcagttacaccagtggcgcccttggcaccaaatgagggcaagagtaaaggctcatgccgtcgctctgaaatcgttgttctgaagccaaaccttcagaggaaaagtttcacacctgttctctctcaaattgttgttctgaagccaaaccttcagaggaaaagtttcacacatgttctatcaagccaagaagcatcacaatataaacagaagagagatacacaacatttgaagcctccacaccatagtaaacaattttctgtggcacgaaacgatgaagttctcgaaggagaaaggggttttgcactacagaaggctagaaagcaagcacataggagtggtagcaggaggagatcatcccaggaagaatataaccttgaagcagatactgagaaggcaagagttagttctacttctacctctcatgaagacaccgtgcccatttattcaagcatccattcttcgggaccatcagtaagtagaaaggctagaaagcacctctcgaaaagatggcaaatgacctgccaatctgattcagaagattcaattcctaaaggcataaaaacactaggtgaaatgctcggactgtctgatagagatgcaccaagagaaaccacccacatggtaggatcagatccaaacttcagtccctataatgtgagagaggtgccagacagccctcttggcattagcagtaaagatgggtggaagacagggatttactgtgaagatgattcaagagctggtatatcaaggaattttctcaggtccaaatctcttccagcctcatctaccacttctacaaaattatcatgcaggagacagtctgcaccaacctgtaggttgcccattctgaaagatatattgaatgcacccactgatgaatctgaaaatgcacatatcaggaagagatcaccaatcagaaatgcaaaacagagaaatgaaaaagcaactgcccatctaggaagggaaaatatgctacctgaaaaagaaattcatgtaacctcggaaatagccaggcacagcatctgcgtttctgatatttctcgggcaagcaatatacatactgaaaagtgccctgatgatgctatcaaaactgaggatcaggaagagtctgattctgctcttcaacatgattacaagaaaaaaacacaaggttttatgggatgctaccagacaatagcaacatcatctccggagacaaaagaagttatatcaattcagaatcaggattgcatagaattgaaggaggaaaggaacccatcagtggagattgaagctgatcaagtctacactcgaacagcagaatcagcaagtattgcaagtgctgaatgttgtgactgctcaagtccatctgctttatcgcaacaaagttctggtgaagagacttattctggaatctttaaaagcatcaacgtcggtattcaagaactcaaagagcaactgaagatgctgaagatggaagaccaaaatgacatttgtggagactattctgatacattgtcaagcgacgagttcgataatatgaacatctcaatatatcgaaccatggaagagcagttgtctatgtttaaggatggggaggacagagatttctcttatgtacaggacatgcttgctagcgcgtgcgacttgccagagcacctagaagattggcaagtgagctcagatgtgttcctttgtcttgaaaacaagtacagcaagctggttctgtggtcaaaatccgacaggaaacttctgtttgatcttgtgaactcaattttggctgacatgaccattccagacattggcttgtgttcaaagctcatgatgaagcgctggcctgaaatagatcacggacagttaactgaaatcgtcaggcaaatggtgcagaagcgaagtaactgtgggcactttttcttggaggatgttcagcctttgccattggaccatggttctgaggtagagctggttggaacgaagattgccatgatgatccatgatgacattatgacagattttatcgtcggaatcatgtcccaggagaacctccttgttatcagctaatgtttagggctgtagtggtttagctagattgttaggcagatgagtcacaacctgcaaaccagtagtttgcgaatactagtctactatatataaaaggcttggttaagctgctgtctaattgacgttgctgcaaatcactggtttgctctctgattgtagtgctgaaatagtgacgggcggattgcattggcagggcaggtgtatgtatgtgtacatcctactacaattactgctgtgtcctaatcagcagtctgaacatgtttatcctactacactttt

SEQ ID NO: 136969 - DNA, 258 bp, Zea Mays
atggagacgctggccagcgccatgctgcgagaaaaccgtcgatccaatgtcccggcctcctctgatgtttcagccctcctcctccgatgccttcgccctcgcctcgggcagggtccctcttgccatggctttcctcgcctgtcacgcctgtctctacgtcaccggacggtcctcaaggttctctcggtggaggacaagattaggaacattggatgcaaggcgattagaaggaaaattgttgaggtggagatgacctga

SEQ ID NO: 136970 - DNA, 744 bp, Zea Mays
atggcctccagctggctccacagacgctctgcagtgcagcaaccacccggcggcggcggcggcgacagggtgagggtgagtccttgtggaaagggaactcggttgcgggagagtgtggtggctcgtagtcgtacctgccgctgcggcggctcggggccagattgtctgcaggacgtcggacgtgtcggccgtctcgccccacatgcagacctccccgccgagcaccagcttctgctgctctctgtcgctgatcccggcgagcggctcgccgctgtagacgtcctcccaggggacgtcgaggtggtccaggtaccagacgccttggttgctcattatgcatctgaaacccttggccacaacctttgggcagactccgggccccagcctggcggtgcgtttcacaggtcagactgtcttttcagtaccatgcatcgacaaatggaagattcacggttgccgaggaatgagaggaacaggctgattttcgcggtttaccagttgtgcacaaccgtcagtggattgaggttttcttcgaacgagttgaaggtttcttccctgcaggcggggcgcagagtcaagagtgaacgaaagaacaaggatgccaggaacggaccagttcacgggagtccagttcagcttgatcgccagctcctgggccttcagaacgaagtatttgtaagcgtccttcgtggtcattttgcgctcgtccatcctgggattgtgattgggattggggggtgttaa

SEQ ID NO: 136971 - DNA, 931 bp, Zea Mays
tgcgcacatcagtggaacttcttcgacttgtcatagatttgccatgtgtcactccaggctccaagtaatcatactgctagtaatagcgattttgtttgggatttcttgtggaatctcttgctcacaccagaaagcatgctctagcttgctgccgtcatgggctcatggcaatgattggattcagatccacagccttgtcttccatcttgaatcctgcaatcctgcttggtacttattgttcttgacttatttggagatacttggctaaaattgtgactgtttttatgcggatgcgggcctgtgtaacatgttctttttgttttcttgaacactataaactacatatctgaatgttcccatgtgccatgcaatattactttgtgctatttctctcctttgttctgtttgaattttattattactaattctcgttggattttaacgatgcaggttttcaaggagcatgaaacagagaatcttttggaactactgaattttagttaacattaggcggtagctatcaggatattgtagttgcttaacaaactcacccaccccacaaattgtcattcaacgaaggcatgccctccagcatcagtcggtaccgatgattgtcagcgaggtataaagcctctaccatccccttcccttgaacataacaggccctacagacagattccattttagtagaagcggtggatcgacaactgcgcctcgttggtctatcttttgtccaaatggcaggatgctgccaatgggcgttgtaagcgcaatcagccaattgggtggtaatgtaagctttagctttagatactgggagatggtctgtcaacagttacttttagcctaaacattcttgtacatctttgaaagtgaacagatttgtaatccttgtggcatataaatggtaacattgttcataacttttaaa

SEQ ID NO: 136972 - DNA, 861 bp, Zea Mays
tattcgtatatgtgtagatcatacagacaactagtggccgataaactcacagttttgatgggttcacaagcacgttccaagataaactcttcaaagggtatgacatggaaatacacaaccaaatattctacacgacagtgtgctcttgtcttcttagtttaagtgggctgattctccagaatcatctgattccagctgtggattttatgtttcatcacccagattgcttctctgatgttctaatcctgtccagcgttgcaacagctagtcagttctttatatcctacaccattcgaacatttggggctctcacatttgctaccataatgacaactagacagctggtaagtatattgctgtcctgcatctggtttgcacatcctctcagctggatgcagtgggttggcgcagccattgttttcggagctatatacgcaaagagcttcttgaggagtaaaccgcagaagacagcagtggcaagcctgccgcatggctctagcccgaaccctgctaacagtagttgacgattgatgacatgataacattaggaaacaatggacttgttgcggtaccgggacgaagatcaatggcgccatagcgccatggtgaggtaactggacaaatgggttccagatgtagctgtgtaaactgctcctgacctggaggtgatggaggtgatctccctttttagtggaaaaaaaccaaggtagtcctgatgttagtttagtatccactatccagagaccaatttttcagccatcccaggctgtgctatgttttttttctcgaactcgcaagagaattaagtgtcaaaataataagagaaggaaaagagtacaaaaaacaggggtaaaccctgcc

SEQ ID NO: 136973 - DNA, 1595 bp, Zea Mays
cgcgtgcgccccatccaccaccgaccgggcccgtcgctgcaacaaaggcgttcagtttcgttccgtttgggttggtctgtttagtgcggcggcgacagcgacagcggaggagagcggggacgggaggggccatggcggacgcggcggcggacagggagagggacaagggcaaggacgaccgccgccgctgggcggctcgctgcggtttcgccgtcctcggcatcatgagcaccctcctcgtctacggcgtcctgcaggagaagatcatgagggttccgtacggagcggacaaggagttcttcagatactcgctattccttgttttctgcaaccgtatcaccacatccatggtgtctgcaatggtgttactggcaagtaagaaatccttggaccctgtggctcctctacacaaatatggcgttgtctccatatcaaacatactgaccacaacctgccagtatgaggttggactggtctctgcccttttggttcttctgccattgtgttgtttcgtgttactatgtaaagtacctttttccaggccctcaagtatgtcagcttccctgtccaaacacttgctaaatgtgccaagatgatacctgtcatgatctggggcacaataataatgagaaagaagtatggtggaaaagattacttctttgctgtcatcgtgactctgggctgcgcattgttcattctatatccggcaatgatggatgtgagcccatttaataaaggcagagaaagcactatttggggtgtttcactcatgtttggttatcttggttttgatgggttcacaagcacgttccaagataaactcttcaaagggtatgacatggaaatacacaaccaaatattctacacgacagtgtgctcttgtcttcttagtttaagtgggctgattctccagaatcatctgattccagctgtggattttatgtttcatcacccagattgcttctctgatgttctaatcctgtccagcgttgcaacagctagtcagttctttatatcctacaccattcgaacatttggggctctcacatttgctaccataatgacaactagacagctggtaagtatattgctgtcctgcatctggtttgcacatcctctcagctggatgcagtgggttggcgcagccattgttttcggagctatatacgcaaagagcttcttgaggagtaaaccgcagaagacagcagtggcaagcctgccgcatggctctagcccgaaccctgctaacagtagttgacgattgatgacatgataacattaggaaacaatggacttgttgcggtaccgggacgaagatcaatggcgccatagcgccatggtgaggtaactggacaaatgggttccagatgtagctgtgtaaactgctcctgacctggaggtgatggaggtgatctccctttttagtggaaaaaaaccaaggtagtcctgatgttagtttagtatccactatccagagaccaatttttcagccatcccaggctgtgctatgttttttttctcgaactcgcaagagaattaagtgtcaaaataataagagaaggaaaagagtacaaaaaacaggggtaaaccctgcc

SEQ ID NO: 136974 - DNA, 1452 bp, Zea Mays
cgcgtgcgccccatccaccaccgaccgggcccgtcgctgcaacaaaggcgttcagtttcgttccgtttgggttggtctgtttagtgcggcggcgacagcgacagcggaggagagcggggacgggaggggccatggcggacgcggcggcggacagggagagggacaagggcaaggacgaccgccgccgctgggcggctcgctgcggtttcgccgtcctcggcatcatgagcaccctcctcgtctacggcgtcctgcaggagaagatcatgagggttccgtacggagcggacaaggagttcttcagatactcgctattccttgttttctgcaaccgtatcaccacatccatggtgtctgcaatggtgttactggcaagtaagaaatccttggaccctgtggctcctctacacaaatatggcgttgtctccatatcaaacatactgaccacaacctgccagtatgagatctggggcacaataataatgagaaagaagtatggtggaaaagattacttctttgctgtcatcgtgactctgggctgcgcattgttcattctatatccggcaatgatggatgtgagcccatttaataaaggcagagaaagcactatttggggtgtttcactcatgtttggttatcttggttttgatgggttcacaagcacgttccaagataaactcttcaaagggtatgacatggaaatacacaaccaaatattctacacgacagtgtgctcttgtcttcttagtttaagtgggctgattctccagaatcatctgattccagctgtggattttatgtttcatcacccagattgcttctctgatgttctaatcctgtccagcgttgcaacagctagtcagttctttatatcctacaccattcgaacatttggggctctcacatttgctaccataatgacaactagacagctggtaagtatattgctgtcctgcatctggtttgcacatcctctcagctggatgcagtgggttggcgcagccattgttttcggagctatatacgcaaagagcttcttgaggagtaaaccgcagaagacagcagtggcaagcctgccgcatggctctagcccgaaccctgctaacagtagttgacgattgatgacatgataacattaggaaacaatggacttgttgcggtaccgggacgaagatcaatggcgccatagcgccatggtgaggtaactggacaaatgggttccagatgtagctgtgtaaactgctcctgacctggaggtgatggaggtgatctccctttttagtggaaaaaaaccaaggtagtcctgatgttagtttagtatccactatccagagaccaatttttcagccatcccaggctgtgctatgttttttttctcgaactcgcaagagaattaagtgtcaaaataataagagaaggaaaagagtacaaaaaacaggggtaaaccctgcc

SEQ ID NO: 136975 - DNA, 1589 bp, Zea Mays
aaaaccgcgtcttcttcctcctctgacttgtccttccgtctggttcgtttcacatttactctgttgtttttttttcttttccaaccgaaagaaaaagaaaagagggagagaaagaaacaaaaagcttggcactggtgttcaatgatggtgtgtgttctgccttgggcccccgcgtgtgattgtgattcgagacgttattttttcctccttttttgagcgaagcatgcctgttttgctacaaaagaaaaggttatgttttttttggggggtaagggtggagaagaggatgaggagcccagcaccagcatggggcagcatggccgcatggggtggatttggactcccacaagtctccaacggacttgagtagccgtggtggttgtatggcgcaatcatttgcaggaatccaaatcattcgatcgtgctgccatgtagtatgtctctgttcaccccaccaccttgtgttccgcgacgcctcgttccctctgttggcaatctccaagcggccatggagacactactagattttcgattgtttttttaacgctgcaaactgtttgtgcactcgcagcagagcgtggcggagctgaagcaggcgctgctggcgacgacgctggagctggaggcggcgagggaggagctgaggcgcaaggagcagagcatcgccaagctggccggcctggtccgcgaggtggccagggagcgcgacgacgcgcgggaccagctgcagagcctccgcctcctggccgcgcaggcggcggcggcggcgccgccgctcgtcacgtccagcgtcaccgactccgacggcagcctcgcctcgtcccccgccgaccccttcttcgaccccgtcacctccgccgaccggcgctgcaagctcagccccgccacgccccccgcgccgccgcccaagccggtgcagcagcgccactgccagcccggagcctgcggccgcgggtcggcgccggcggcagacgccgtgctcgagacgctcgccagcaagcggccccttccgcagaggggccgcctgctggccgccgtcatggaggcggggcccctgctgcagaatctgctcgtcgccgggcagctaccgcggtggcgcaacccgcccacggttcgcgccccggacacgacgctgccgctaggcgccgccacgctggcctccaccgcctgcatgaagcggccggtggcggcggcggccatgtccgtgctgcccgccgccagctgcccgccggctttcatagccaagcggcagaggctgctgcactgacagcccctggcccactcggcagtgacggcgggatcgaccgccgttgatgatgatggtgatgagtgcaacgtttcgacgagaaagccatggtggaggtttggctgctaactgcacagttgcgttgctaagtatagtcagtcaggcgctgaattacgataatgtgatccatgtgaatagtagcagggttcgttttatcacacttgctcgttttcttcttcttcttcctcccctattctcttccattttacatttttgggcgtgtcggtgtggtctttaaaggctgtgttgatagcttgacatgagagtatgattagagccagca

SEQ ID NO: 136976 - DNA, 1270 bp, Zea Mays
ctatatatatatatatatatataactctctctcgtcttcgccgctgctcccccctggcttcctcattccctccctagctagtctctctcttccgctcctcttcccgcaggccgcgtacggacgccagcggcgatcaagtgcgcgcgcgcgatggccatggagctccctctcttcctcggggacggcccggacgccgcgctcttctcctccctctggccctccttcctcgacgacctgcagcagcccccgcaagagagcgtggcggagctgaagcaggcgctgctggcgacgacgctggagctggaggcggcgagggaggagctgaggcgcaaggagcagagcatcgccaagctggccggcctggtccgcgaggtggccagggagcgcgacgacgcgcgggaccagctgcagagcctccgcctcctggccgcgcaggcggcggcggcggcgccgccgctcgtcacgtccagcgtcaccgactccgacggcagcctcgcctcgtcccccgccgaccccttcttcgaccccgtcacctccgccgaccggcgctgcaagctcagccccgccacgccccccgcgccgccgcccaagccggtgcagcagcgccactgccagcccggagcctgcggccgcgggtcggcgccggcggcagacgccgtgctcgagacgctcgccagcaagcggccccttccgcagaggggccgcctgctggccgccgtcatggaggcggggcccctgctgcagaatctgctcgtcgccgggcagctaccgcggtggcgcaacccgcccacggttcgcgccccggacacgacgctgccgctaggcgccgccacgctggcctccaccgcctgcatgaagcggccggtggcggcggcggccatgtccgtgctgcccgccgccagctgcccgccggctttcatagccaagcggcagaggctgctgcactgacagcccctggcccactcggcagtgacggcgggatcgaccgccgttgatgatgatggtgatgagtgcaacgtttcgacgagaaagccatggtggaggtttggctgctaactgcacagttgcgttgctaagtatagtcagtcaggcgctgaattacgataatgtgatccatgtgaatagtagcagggttcgttttatcacacttgctcgttttcttcttcttcttcctcccctattctcttccattttacatttttgggcgtgtcggtgtggtctttaaaggctgtgttgatagcttgacatgagagtatgattagagccagca

SEQ ID NO: 136977 - DNA, 1164 bp, Zea Mays
atggacgatcgttatcctcatcatcagtcgtcgatggcgacaccggcagcagcgagcaagatgagcaagaagctgcagggcggtggtgaccgtagtagtggcagtagtagtaggggcagcggcaacagtgataagcagcaggtgccggcggcggcgatgaggaagggcccgtggacagaggaggaagacgctcagctggtatggttcgtccgcttgtttggtgaacgccggtgggatttcttagcaaaggtctcaggtctgaggcgcaccggcaagagctgccgcctccgctgggtcaactacctccacccggggctccggcgcggccgcatcaccgccgacgaggagcgactcatcctccagctccacgcgcagtggggcagccgctggtcgcgcatcgccaggagcctccccggccgcaccgacaacgagatcaagaacttctggaggacgcgcgccaggaagcagaaggcggcggcgcagcagcagcagcagcagcaggacagccggagcagcaagacggcgacggcgtcggcgttctcagggtcagcgtcgtccgtgactaccaccacgtccagctgctctggctctcctagtccgaccagccgcggctgtggcacggccacgtcatcgtccgctctgaccgagtccgcgctgcggcaaagcggcggcgaagacgaggacgccgagctcgacgaggcgtccaccaccaccaccaccacggcaagccagcgtcaacaccaagacgacgaccaccagcagcagcaccaggagtgctacgcctcggaccacttctggaacgacatcgcggcggcggaggcggccatctacatgttgatcgacggcggctggacagggtccggccccggccatcccgccgccgatccgccttcgtcgccggcgtgggagtactgctctgattactcgctctggaggatcgacgacgacgagtactacgagaagatgctcgactcctcctcctgattcgattatccagccatcacacgcatatgcatatctatcattagcttatttctttcttttttttgtgctgattagtctagcatacagcagctatgagaatccaaagcttcggttcggctttcgttgcatctctttgtataatactgtaacatatctatatatatatatgtatgatatgat

SEQ ID NO: 136978 - DNA, 1952 bp, Zea Mays
cccaccgctagtagttgttgtagtactatactacactcctctccttcttggctagctagcaattcaaccagctctctctctctctctcttttgtatgtatgtatatgtgtatataaataaccgtgcacgcagtgtgactagcaagcagtacacagaggatctggtaagcaactaagcaagtgtactgaggacggaggcatcgatccagcgttccagctagcacgcacgcagccagcacccagcacccagcagtagaatctatatatcgtacgcaagtagtggatcgaggcatctatctgcagtccctttcttcttcttcctcttgattgataggtgcgccgaagcttgttttgttgggtggcctttgtctctgtcgtctcgtctcgtctcgtcttccgcccggccgccaccacctgcaggctatactagctagctattaagtccggccaaccaagcagctcgatcaggtcggtcgacggcggggacagttcggagggaggaggcggccggagaccgaaggacgcctaccatcaactcgcggtcctggccgcgctgccgaaaaattaaaggaagaggacgaaggctgaccgatggacgatcgttatcctcatcatcagtcgtcgatggcgacaccggcagcagcgagcaagatgagcaagaagctgcagggcggtggtgaccgtagtagtggcagtagtagtaggggcagcggcaacagtgataagcagcaggtgccggcggcggcgatgaggaagggcccgtggacagaggaggaagacgctcagctggtatggttcgtccgcttgtttggtgaacgccggtgggatttcttagcaaaggtctcaggtttgcgcggtggcgggtgcatccgatccccaagcatgcatgcatgcatgcatatgtagatgcatgcgtgcgtggggatggattgatgtaggatgggctatggcgatgggtgttgattaaccatttcttttctctctctcttgtgcgtgccctgcttcttctctgtgcatgcgcatgtgtcggcggcgtactcgtgcaggtctgaggcgcaccggcaagagctgccgcctccgctgggtcaactacctccacccggggctccggcgcggccgcatcaccgccgacgaggagcgactcatcctccagctccacgcgcagtggggcagccgctggtcgcgcatcgccaggagcctccccggccgcaccgacaacgagatcaagaacttctggaggacgcgcgccaggaagcagaaggcggcggcgcagcagcagcagcagcagcaggacagccggagcagcaagacggcgacggcgtcggcgttctcagggtcagcgtcgtccgtgactaccaccacgtccagctgctctggctctcctagtccgaccagccgcggctgtggcacggccacgtcatcgtccgctctgaccgagtccgcgctgcggcaaagcggcggcgaagacgaggacgccgagctcgacgaggcgtccaccaccaccaccaccacggcaagccagcgtcaacaccaagacgacgaccaccagcagcagcaccaggagtgctacgcctcggaccacttctggaacgacatcgcggcggcggaggcggccatctacatgttgatcgacggcggctggacagggtccggccccggccatcccgccgccgatccgccttcgtcgccggcgtgggagtactgctctgattactcgctctggaggatcgacgacgacgagtactacgagaagatgctcgactcctcctcctgattcgattatccagccatcacacgcatatgcatatctatcattagcttatttctttcttttttttgtgctgattagtctagcatacagcagctatgagaatccaaagcttcggttcggctttcgttgcatctctttgtataatactgtaacatatctatatatatatatgtatgatatga

SEQ ID NO: 136979 - DNA, 828 bp, Zea Mays
atggcgttggcaaatcttccatccggatggcgcgcacggcgtaccttccatcgatggcctgctcatgacgccacctcgcagtccgagaccgtcctggaggcctaccgccgcgacctcgccgagtttggtaccggcctgtgccgtgagaccgaggtgctccgcgaggccgtcgcctgggccgtgcgggacctgccgtcctccgcgcacgcgctagacggactcgccgacatcgtcgcgcagggcaaggaggcgctctccatcaatccatcgtcgcgcacggcaagaaggcccttaccccctccgcctccaggacccacgtccggtacacggcgtaccacgaaatctgaggataaggaggcgctctcccaggccgccgccgccggtggcggcccccaggcctctgacggcggcgactccgaccccaactgcaatttcaccctcgctctgcaagttttgccgcccatggcgcccgcctcaaactgcggtgtcatcctccccgctaaactgatcttcctcctacgtgcttgcaggcactggcaacctggcgatatcgccaacgagatcatgcaacgcgcgtccatcacctcgtcccctctgcgccccgaccccttcgcctcctccgccccctcctcctcatcccctccctacctccaaaccctcgccgcaagtcccgcttccgcgacgcccctactcccgattctcctcatggtcgcgccacctccatctcgcccatctctggcattcactctcgccaccgctgccacacctccgcgtcctcgaccccgctttcgccgccgatggatccagcgacggtgtcgcccgccttaa

SEQ ID NO: 136980 - DNA, 136 bp, Zea Mays
ctattttatttcctgttttctatttcaattcaaatccaggtttaaatttcaaatttttaaattagatgcacaaacagactccaacatgatgcaggtataatttatattaattaatttattcatttattcatgcaag

SEQ ID NO: 136981 - DNA, 706 bp, Zea Mays
caacaagatccgctatagcctccggtaaaatttagggtgtgttcgtcgtccgctatctgtagcgtgctagctttcgctcgctatctactgttcactcccgcgctgccgtcgtccgtcgtctcccgcgctggctcgaaaccctctcgtcgtcgcgcccactatgcagcacatcccctccgatgtacggctccaacgacgacaaggtgttctacccgctccggcccagcttcccctcccttggccgcacacgctcccccggctccccaaccaatctgcccacacaaagtcgcagtagctgatgctgtcggggctcaagatgatgcgtgtggagccggatgaagcggcttcgcatgctggaggtgggcggcgacatgcctgaaaggttggcggcgctgtgcttgaagttgaagacgttgtggtcaaccacgtcgtcgcttccagacccaatctgattttgggcacgcaggcaagcaatttgtctttggttgcttccagacctaatctgaatccctcatcacactttctcctcacggcaaaacaagattcatcatttacctgcacatgtaatggaatagatttatccatttcctaagtgagatttaaccatttctcaagtgttcctagccattgttcagattatgtctattctgtacatgtgcgacgagggattcagtaaagtgttcctagccatttttgtggatgaaaa

SEQ ID NO: 136982 - DNA, 2299 bp, Zea Mays
tcgacgccttggctactacgagcgacctccttcgtccttggatcccatgcatctccgccgcagagcgcgcgcctcctccctccctgccggcatagctagcagcacgtacggaccgaggccatgcatggacgacagtcgtcgtggcccaaggccaagacggcggtgaagagatggctgaacctcaagtcccattccgactgcatcgataggagctttgggcttgggctggtggagagctctgctgacgggtatggcggctccccgtccccgccggggccgacctcgtcgcggcggcatcccaaggaactcagcatcttcgttgggacatggaacgttggagggcgagcggcgcacggagggctggatctctcggactggctcgctgacgacggccttggtggtggttcctcctctcctcacatctacgttctcgggttccaggagatcgtgccgctgaacgccgggaacgtgctcggtgccgaggacaagggcccggcgcgcaagtggctggacctcatccgacgagcgctgaaccaccatccagcagcgtcgccgtcgagcagcagcagcagatggcgcaggtctccgtcgcgtgacatgcacttgctccggaaaggcggccgggtgagcttctcggacctgctggcggcggaggaggacggcagccgcaggccgagcacggcgtcgtcggagccggacgacggcagcgaagcgtcgagcccgtcgtctagcagcgaggaggagccggcgtgcgcgccggcgccggccccgctgccccgcggaggacgacaccgccaccacgaccgctaccgcctggcggccagcaagcagatggtgggcatcctgctgtgcgtctgggtccgcgccgacctcctcccacgcgtcgcccgcgtcagggcgtcgtgcgtcggcaggggcgtcatgggctacatgggcaacaagggctccgtgtccgtcagcctcacgctgcgccccggcgttggcgggggacggggcgcgtcgctgtgcttcgtgtgcacgcatctcgcatccggtgacagggacagcgacggcgctaggcgcaacggcgacgtggcggagatcctcaggcggacgaggttcgcgcggtgggccacgctggaccgcgccgcctgcgagacgagggcggcgccggtgaccatcttggagcacgacaacgtgatatggctgggcgacctcaactaccggctggtggcgccggcgggcggaggaagaggaggcacgcggacgcaggagctggtggaacgacacgattgggcggcgctgctggagcgggaccagctgcgggcggagcagaaggctgggcgcgtgttcgccgggtgggaggaaggccgcatcgggttcccgcccacgtacaagttcgtggccggctccgacgcctatgccatgacgagcctcgtcgacgacggctccctgtctcgggagaggaagaagcgcacgccggcatggtgcgaccgcatcttgtggcgcggcgagggggtggagcagcggtggtacgcgcgcggcgagtcgtgcttctcggaccaccgccccgtcgccgcgttcttcttcgcgcgcctgggcggcggggactacgacggagcagagcgcgcggtgggggctggcagacgagacgacgacgactacgacattctccttgggaactctgatccaacgcgcaagctttctttctgaggtttgggaacaaaaacagctgatggtagcctcggcctcgatcgtgggcctgctgcctgcctgtctgcctccaagttccagtggtatctagagatgatggagatgaactcttgaacctatggacgaagatgatggtctactagctaggaggaggagaagagaacgagttgcgaagggagaagatgagcttttcgtgctccgattctggtggtagcaaaacctgggccacaacatggaaggcccagcaggccctcgtaccttctttttgggccgaccaagatgcaagccagggcaatggtctgaatggaagaaaggaagagaacgtcgcaactaatgctgctgcacatggccagttcagcaaaaagttggaccgtttgcttcagattaaagtcaaatgtttagactattgtagctataatttataaagacaaagatattataaaaacaatagaagccggtattgattaaagccagtttggcacaaaagactgggataatagagtcctctcacaagttccaattggtaggaaataattaaaacaacataaaatttcatttccattcattcatatctagatgcaaagttgcaaaccatgatatgtcctcg

SEQ ID NO: 136983 - DNA, 249 bp, Zea Mays
aaaaatgtgaatgctgatgcgcgccacaacaagaagacccgcatcatcccgcgccacctcctcctcgctatccgcaacaacgaggagctcggcaagctgctgggcggggtcaccatcgcgcacggcggtgtgctgcccaacatcaaccccgtcctcctccccaagaaggccgccgagagggccgagaaggccgctgccgctggccccaagtcccccaagaaggccgccgccaagtcgcctaagaagtag

SEQ ID NO: 136984 - DNA, 435 bp, Zea Mays
ggccacccattgcgctcggcatccagtgcccttgctcctcttcattggcggttgaggggaactccctccatggacgagcctccttccatgtcaaaactccttccaccgctgctccgccaccatggacgcgtcgtcttctgccatgctcttctactcagtctctagctctccgatcgtgctccctccctcgtgtgtctccatgtccatctggaacccgtcaaccgaagcagtgacatactactcgattaatgctccaaccaggttcggctgccgcccgcctcatcgacgcggcatggccctccacctccatcctcaagcacgccgacgtctaggcgttcttacctgcctccttcacgatccactcttgttgcagcgacaacagtctgtggtggcgttctgctgcaacggcttagctcgtcactgccccggtcacgg

SEQ ID NO: 136985 - DNA, 110 bp, Zea Mays
ttttttttcaaggttcattcgtatatcaggccgcctcaaccctcaagcaatcatcaatcaccgttgtaacttatgaaccacagttgatgttaatttccagcttcataaag

SEQ ID NO: 136986 - DNA, 1581 bp, Zea Mays
gggtggggtggtggcgcgtccatcccacgcgactctcccacacaaataccatcaccttcgctaccattgcttcaccatcaccaccaccccgcggctgcagctcagcagctccagacctcaccagaggcacctaccacaccgcccgccgccgatcccgtcacccgtctcctccccgctgcggagcgtctccagccctgcccggtgcccgcccagatggcaaacgcggcgtcagggatggccgtggacgacgactgcaagcgccggttcctggagctcaaggccaagaggacgcaccgcttcatcatctacaggatcgacgagaagaagaagatggtggtggtggagcaggtgggcaagcccgtgctcggctacgacgacttcgccgccagcctccccgccaacgagtgcaggtacgccatcttcgactacgacttcgtcaccgaggagaactgccagaagagcaagatcttcttcatcgcctgttgcatgatgtgtgtgaatgaaggtctcctgacacggcgcgcgtgaggagcaagatgatctacgccagctccaaggagaggttcaagcgggagctggacggcattcaggtggatctccaggccaccgactccgccgaggttggccttgacgtcatccagggccgtgcaagctgaggatgcccagcgatgaactgcccatgccagaggatgtatgagcatcatcagttcagatgagaacttgactgggcgggctatgtaaaaactgcatccaccgcagtgatgaaatcaatctaatcaatctaccacccccttcagcgtgcgtgttcttgctacatatcaacaacagcattatgatggtggaattctggtaatcagaatttcttgatgatccatggcactttttgccttgtgcgacctcaggacctggttgaaggatatgcagaggttgaagtttgagcatgacttctcagcggttgaaaaagacacaaagtccagaacataaaattccagcaaatcaaacatcattaggcagtgtataacttgagttcagaacatccataacttctcagaagagtccaggttaaaccgttaagcaaagccatggactgaggatagatatgtctgacgaccaaaacatacagaacacatagtctgtccaaaaattattgttccaaaacactaggcgagctctcaaacgcacacaacgacgacgaaaaaaaacagcatgctgggtttatttatacacatcccgtccatcatatttacagaactgaggcacgcctctcaggaagcttcggcggtcgagaagtgcatcttagcaacagactcgcgcaagaagctgcttccacagttggcttcctggctacccatgctgtagtccatgatcccggcctcatgttcgctgagatcgtctgctggagactggccaccagtggtgctaacgcctttcggcctaacaagttcacagtgtgtaaaatcaacggaatgcgtcacatgctcacagagacaaaatagcagtaaaaaatacgctagcaaaacatacccgataccaggaacctgcggtgcagatggattctgggcagaactctgttgttggttc

SEQ ID NO: 136987 - DNA, 1409 bp, Zea Mays
acacaaataccatcaccttcgctaccattgcttcaccatcaccaccaccccgcggctgcagctcagcagctccagacctcaccagaggcacctaccacaccgcccgccgccgatcccgtcacccgtctcctccccgctgcggagcgtctccagccctgcccggtgcccgcccagatggcaaacgcggcgtcagggatggccgtggacgacgactgcaagcgccggttcctggagctcaaggccaagaggacgcaccgcttcatcatctacaggatcgacgagaagaagaagatggtggtggtggagcaggtgggcaagcccgtgctcggctacgacgacttcgccgccagcctccccgccaacgagtgcaggtacgccatcttcgactacgacttcgtcaccgaggagaactgccagaagagcaagatcttcttcatcgcctggtctcctgacacggcgcgcgtgaggagcaagatgatctacgccagctccaaggagaggttcaagcgggagctggacggcattcaggtggatctccaggccaccgactccgccgaggttggccttgacgtcatccagggccgtgcaagctgaggatgcccagcgatgaactgcccatgccagaggatgtatgagcatcatcagttcagatgagaacttgactgggcgggctatgtaaaaactgcatccaccgcagtgatgaaatcaatctaatcaatctaccacccccttcagcgtgcgtgttcttgctacatatcaacaacagcattatgatggtggaattctggtaatcagaatttcttgatgatccatggcactttttgccttgtgcgacctcaggacctggttgaaggatatgcagaggttgaagtttgagcatgacttctcagcggttgaaaaagacacaaagtccagaacataaaattccagcaaatcaaacatcattaggcagtgtataacttgagttcagaacatccataacttctcagaagagtccaggttaaaccgttaagcaaagccatggactgaggatagatatgtctgacgaccaaaacatacagaacacatagtctgtccaaaaattattgttccaaaacactaggcgagctctcaaacgcacacaacgacgacgaaaaaaaacagcatgctgggtttatttatacacatcccgtccatcatatttacagaactgaggcacgcctctcaggaagcttcggcggtcgagaagtgcatcttagcaacagactcgcgcaagaagctgcttccacagttggcttcctggctacccatgctgtagtccatgatcccggcctcatgttcgctgagatcgtctgctggagactggccaccagtggtgctaacgcctttcggcctaacaagttcacagtgtgtaaaatcaacggaatgcg

SEQ ID NO: 136988 - DNA, 799 bp, Zea Mays
accatcaccaccaccccgcggctgcagctcagcagctccagacctcaccagaggcacctaccacaccgcccgccgccgatcccgtcacccgtctcctccccgctgcggagcgtctccagccctgcccggtgcccgcccagatggcaaacgcggcgtcagggatggccgtggacgacgactgcaagcgccggttcctggagctcaaggccaagaggacgcaccgcttcatcatctacaggatcgacgagaagaagaagatggtggtggtggagcaggtgggcaagcccgtgctcggctacgacgacttcgccgccagcctccccgccaacgagtgcaggtacgccatcttcgactacgacttcgtcaccgaggagaactgccagaagagcaagatcttcttcatcgcctgttgcatgatgtgtgtgaatgaaggtctcctgacacggcgcgcgtgaggagcaagatgatctacgccagctccaaggagaggttcaagcgggagctggacggcattcaggtggatctccaggccaccgactccgccgaggttggccttgacgtcatccagggccgtgcaagctgaggatgcccagcgatgaactgcccatgccagaggatgtatgagcatcatcagttcagatgagaacttgactgggcgggctatgtaaaaactgcatccaccgcagtgatgaaatcaatctaatcaatctaccacccccttcagcgtgcgtgttcttgctacatatcaacaacagcattatgatggtggaattctggtaatcagaatttcttgatgatc

SEQ ID NO: 136989 - DNA, 795 bp, Zea Mays
accatcaccaccaccccgcggctgcagctcagcagctccagacctcaccagaggcacctaccacaccgcccgccgccgatcccgtcacccgtctcctccccgctgcggagcgtctccagccctgcccggtgcccgcccagatggcaaacgcggcgtcagggatggccgtggacgacgactgcaagcgccggttcctggagctcaaggccaagaggacgcaccgcttcatcatctacaggatcgacgagaagaagaagatggtggtggtggagcaggtgggcaagcccgtgctcggctacgacgacttcgccgccagcctccccgccaacgagtgcaggtacgccatcttcgactacgacttcgtcaccgaggagaactgccagaagagcaagatcttcttcatcgcctggtacgccacgtcgttcctcgccgctgtccagtccaccctggcttttgaagtgctcgccactcacggacgcagttgcatgatgtgtgtgaatgaaggtctcctgacacggcgcgcgtgaggagcaagatgatctacgccagctccaaggagaggttcaagcgggagctggacggcattcaggtggatctccaggccaccgactccgccgaggttggccttgacgtcatccagggccgtgcaagctgaggatgcccagcgatgaactgcccatgccagaggatgtatgagcatcatcagttcagatgagaacttgactgggcgggctatgtaaaaactgcatccaccgcagtgatgaaatcaatctaatcaatctaccacccccttca

SEQ ID NO: 136990 - DNA, 116 bp, Zea Mays
tagcaggcgaagtttgtttaggttcaattgaatcaaactatgtcgcaagtactgtcgacctttttgttatcgctagaaatcgtgatcgaaatatctgtaattctctgtaaaaaaaa

SEQ ID NO: 136991 - DNA, 490 bp, Zea Mays
aaaacaagccgttcatttataaatcagaccagacagcagtcacaaacagaacatcaatcagagaatgaaccaggatctgctacattattgtttcctcttattctacctgtgtgcttgttttttacttatatatgtagttaccatgcaagcgctccgaactgctccgccagacatgcaactaaaggacaagtttttggtacagaccacaattgttccttatggtacatctgacgaggaactcgttcatgcctttttctccaaagaaactggcagatacattgaggaaagcaaattgagagttgttcttgttagtgcataccaatcccttgaagagcaaccgactaataaaattcatgacactgagccagttgttgaagttcctgtactgaaagaggtgccaaatatatatagagaacgaagtgccagatgctgcaaaagaagttcctgcccctctagtacaagctccagcgattgtgaccagcatcgtgcc

SEQ ID NO: 136992 - DNA, 613 bp, Zea Mays
gtcgcagcgccgctacgagggggaggggatcgaactcgaaggagaatttccattcgaccccatccacttctcacctcaatctcgcgagaagcgaagccggaggaggagggtgcgaggagatcgcgagcagccggagccggagccggagccggaggcctagtagatgaagacgttcgatccgtggccggtcttcttccgccgggagtggaagcgcaattggcccttcctcacggggttcgccatcaccggcttcatcatcactaagatgacggccaacttcaccgaggaggacctcaagaactccaagttcgtccaggagcacaagaagcgctgaccaaccagtaatctatgacatggacgccggatggcactggcagagggatggtgtacggtgagtggcttcaatctatcgctgatgcaatctgccattggtgctggcgtgctgtaggtctgttttgcgtatatttcatttgacatgctacataaaaatttccaacaattcctggtcggttgttgacaccactgctaggaggtgggcattttttttaccataaaccaaaaaccaaaccgagccaaaattgtcgtttttaccataaacaattcttgattataa

SEQ ID NO: 136993 - DNA, 411 bp, Zea Mays
gcgtcactacgtcagcgccctctgcctctgcccccacgcgcacctccaccatccatggccgacaacgccaacctccctccgacctgggccaccacagccggcctcggcttcttgaccctcaactccagggtcgccatctaccgcgtgtggggcgacctcgtctccatcctactggtaacaggctcgtacgccgctctgctactccttttccgctgcctccgtgactacgagcgcgcggcgcccgggtcccagccagagcgcgggcgaggcgctgtgtggctgctcaccgtggccttcgcctggaaggtggcggcggctatgccgtcggccgccgcttcggccgtcatctgggcgcttgccgttggtgctcttcgtccttggattggcatgcgcatggactgtaacattcca

SEQ ID NO: 136994 - DNA, 787 bp, Zea Mays
atcctcattgccatgttccttctgctcctgatgatgataacgaccaccaccaccaccaccttctccgccatgagccttctcctgcagctggtccttgagcccctcctggtacgtctccacgaaattcttcatcgcgtcggtgtacgtggacgcgcgggccatgtaaatccgccgcagggcaggcttcagcgtctctgcgccacccctagcggcgacagcgaggtcctccagcacagttggctcgctgctcgccttccccttcctgtcactaccagagctggggtggctgccattggacgactgctcctccacgtcctcggctgccttcttgtagtcgttgggcctcagctcagggccgatgtcccggacccatgacgcgccgtacagccgggtggcctccttgaggatgcaccagcgttcatgccatgagagcttgggccgcttcttgatgtgaggagggtccggcagtgacgacgggaaggctatctccttgaggtcataccgcacatagtcatacagcttcctgcacacgactctgagcttcatctccctttgtttgctcccttctgcagcgacttggatctgatagcaagttagtagggggcaccgtgctgaattaatctgtcgacaacaaaggagcaactaaaatgtcatcagtgagtatgccagcgactaaaccctttgcacccaggtcaggatgaagctgctgataaaatagagaagaaaataatgccaaccgaaaactgtaaaatgacagcaaaactagctaatgatctgcttgcttgaa

SEQ ID NO: 136995 - DNA, 97 bp, Zea Mays
atcgtattggtaaagatgtatacccgcttaggtatataatgtcacacccggatttaagggataaagctgggtgcatctcatatatgcgtcaaagaag

SEQ ID NO: 136996 - DNA, 675 bp, Zea Mays
atggcctggctgcatacgctgattatggtgggcggtggcctgtatctctgctggatgggttaccagatgctacgtggtgcactgaaaaaagaggcggtttctgcacctgcgccacaggtcgagctggcgaaaagtgggcgcagtttcctgaaaggtttactgaccaatctcgctaatccgaaagcgattatctactttggctcggtgttctcattgtttgtcggtgataacgttggcactaccgcgcgctggggcatttttgcgctgatcattgtcgaaacgctggcgtggtttaccgtcgttgccagcctgtttgccctgccgcaaatgcgccgtggttatcaacgtctggcgaagtggattgatgcacctatcatcatggcatccttgatgggagaaaacatgaaggctttgctcaaagagcttgttgactataccgaggatgccaccaaatcactggagatcgtagctaggaccttgtttgccatcaaagaaagactagaattgcaacaacaacatgccttagaggcaaaagtgcaagcacttccacaaattgctaagtacgagggggatgacataagtgttgaaccaacaactctatcgatccctccaacactatctcatggatctgatgaagacgagttctactgccccgatgtcagtgatgagtggtag

SEQ ID NO: 136997 - DNA, 156 bp, Zea Mays
atgcaagaacgggaagctctgcatctgctgcaccctccactgctccagcccgccgaccgagtgcgggtagcaggccgcgccgatggagccgggcttccccatggacgatatgccggagaagctggagccgaggctcattgcgtcgaagtcggctag

SEQ ID NO: 136998 - DNA, 102 bp, Zea Mays
atggcggttgccccagagcgtgcgcggcggtggacccccaaccggtggccacaactccatgatctcgacacgcggtggcagaggttcctcgatccggagtag

SEQ ID NO: 136999 - DNA, 2302 bp, Zea Mays
caaagcaagcaggcaagcatgcgcccgtacatccccaaacccaccttcgcattctgccactccctactcgcctcccgcctcctcccctctgccgcctccccaaccgcaccgctcctccccatccaagccctcctcgtcaccgccggcctgctcccgcgccacccggacctcgctctgctcgcgctcaactcgctgctccacgcgctctcccgccgcgccgcgcgcccggcccacccgcgcctcgcgctccgcctcctccgcctcatgctctctcccgccacgcccccggcgctccccgctccggaccacctctccttccctttcgcgctctccgccgccgccgcgctcgacgccaacccgtcctcctccgccgccgccgggaccgcacctgggccgcagctccacgcgctgctcgtcaggaacgcgctgttcccggccgaccactacgtcactacggcgctgctccagctgtactcgccccgcccggacctcgcgcggagggtgttcgacgagctgccgcggcgggaggcgatccactacgacctgctcatcggctcgtacgcgcgcgcgggggcgcccgccgagggtctctcggtgttccggaccatgctcgacgacgacggggtgaccccggacgcggtcgtgctgacgacggccgtggcggcgtgcgcgcaggcgggggcgctggacctcggcgcgtgggtgcatcgttacgtggagcgcgccgcgccggggctcctcgccgacgccttcctcgggtccgcgctcatcggcatgtacgccaagtgcgggtgcctggaggaggccgtgcgggtgttcgacggcatgcccgagcggaacgcgtacgtatgggcgaccatggtaggcgcgctcgcggtgcacgggatggcagcggaagctgtcgcgtgcctggagaggatggcgcgggaggacggggtgcggcccgacggcgtggcggtgctcggggcgctgtccgcgtgcgcgcacgccggggacgtcgaggaagggctgcggcttcttggggagatgcggccccggtacggcgtcgtgcccgggcacgagcactacagctgcgcggtcgacatgctctgccgggtcgggcggctggaggacgcggtggggctcgtcaagatcatgccgatggccccgctcgcgtccgtgtggggatccgtgctcgccggctgccggagccacggcaacgtcgagctggcggaggtggcggcgcgcgagctcgagaggctaggtggctccgccgatgagggcgtgtacgtgcagctgtccaacatctacctcgacgccaaccgcaaggatgacgcgcgtcgggtgcggaagctgatcggcggccgggggatcaagaagctccccgcgtatagcgcgttagaggtggacggcgaggtgagctcgttcgtcgccgacgaccaagcgcacccgcggcgcttcgagatctgggaggtgctccggctgctagccgaccagatggcgcagaaaccaaacgaagaagaatctgtcgagctcatttgcgtgctcgcagggatgtaaacggagaaagctgctgatactttgcctatgtgccgtttatattcaagaaatcaggacattacaattcattgtcatttggtccgggcttcggcggtagcaacccggcgctggtcgcgacgccgcccctgcaacatggtgccatggcattgtattgtggtttggcatggggtttcccgacagattctgcaagctccctttttcacacctactcaatggtcacaaacaatcttcgaagagctcatcacaatggtgaacatggaatgaattattggttcatcctgcatccgtttgcacagacgagagtggctggctacgatgctcaggttccgtataaggatcgtggtataaggatcgtggcatggacataccgttgacgccgatccgagcgccaaacactacgatgagaaccggcagcggtgctctctgcacaagcacggacggtccgcggaaggggtcggacgttctgcgacctagagcagggcttaggtttcctacctgacaagccggacagtccgcgcctataggctggacggtccgcgcgtgcgcaggggcgacgaggttcgccggcggcgtctggatctcgctcctgggagggaccccgtcggggaggagagatcataggtgttgtctaggctcggcagaccgacctagacaactctaatcaatatagagtcgaagagaagcggagaatctggggattgaaagactaaactagaactactcctaaatttacaagataaaatgtgaattatattgattgtag

SEQ ID NO: 137000 - DNA, 1223 bp, Zea Mays
accctgccatcctctcatcacaagcaaaagcaacaaggcagcagcacaagcaagaaccacacctcctcccttcgcctgtgatcatgtcgtcttgctgcggcggcaagtgcgggtgcggctccagctgctcctgcggcagcggatgcaacggctgcggtatgtaccctgacgtggagaccgccgccaccagcagcgtcaagaccacggtcctcgccgcgccgaccaccaaggccagcgccggcggcttcgaggcggccaccgagggcggcggctgcgactgcaacacctgcaagtgcggcaccagctgcggctgctcctgctgcagctgcaactgagctggcccggcccggcgatggcgcacgagagtcgagaggaggaggacgacgacgaggcgtataaatataatagcggcgtccagtaaataagatcctgtcaactgcacccgccattatccatggtcgctcgctcctcgcctgcgtctcctggtcctggggttcgtctgaacgtcctcgcggcttcacgacggcgatgccgcctccgtcgatcctgtccgtctcgtgccggatttaatattagatctatatgcgtgtttttctgcgttattactacatctacatgtgtctgtctgtggtgtgtctctctgacggccccatgcgtcagcgtcactgcttgcttcagttctgcatctcactctgttgaggtgaaaaactgataacatctttgcagtgctagaaaacctgagaacctcatgatatctaagtaactgagccaagagagagagagagagagagagtatctaagtaccttgatccacttggacagcacagttagactctgaaacgatcgttgcataatgcagagtaccctgaaattcgaagcatcgacatgaccagctacagttccggctactgttatgggtttttctcttcgcccctttagataacagaatatcgatatctttataaaggaaataatggaatagtaatgggcaatgctacggcaatttccctactagaacgcaatttcttaaataaatttgaacagttattttttttagtttttaaattgattatttcattaacctacaaaataaaaaaaaacacagcaaagccctgtagtgatatctaactagcccaaaaagaacaaatgtatgagtatcttaatgtgcttggaaatatttttcggcgagagagagagtgagagagctcttaatgtgattttaa

SEQ ID NO: 137001 - DNA, 558 bp, Zea Mays
atcctcatcacaggcaacaaggcaccacacctcttcttcttcttcctcctcctcctagcacagctagcgcctgctccccttcgcctgtgatcatgtcttgcagcagcggcaagtgcgactgtggctccagctgctcctgcggcagctcatgcaactgcagcatcaagaccacggtcctcgccgcgccgaccaccaaggccagcgccggcggcttcgaggcggccaccgagggcggcggctgcgactgcaacacctgcaactgcggcaccagctgcggctgctcctgctgcagctgcaactgagccggtcaggcgatggcgcacgagagtcgagaggacgacgacgagtcgtataaatataatagcggcgtctaaataagatcctgtcaactgcacccgccattatcgatccatggtcgctcctggggttcatgttcatctgtaacgtgctcgcggtcatgtccgtctcgtgccggatttaatatttatatgcatgtatttgtgttttttctgcgttattacatgtgccggtttcttgcgtgtcttctctgcgcgcgtc

SEQ ID NO: 137002 - DNA, 591 bp, Zea Mays
atcctcatcacaggcaacaaggcaccacacctcttcttcttcttcctcctcctcctagcacagctagcgcctgctccccttcgcctgtgatcatgtcttgcagcagcggcaagtgcgactgtggctccagctgctcctgcggcagctcatgcaactgcatgtcccctaacgtggagaccgccgccgccagcagcatcaagaccacggtcctcgccgcgccgaccaccaaggccagcgccggcggcttcgaggcggccaccgagggcggcggctgcgactgcaacacctgcaactgcggcaccagctgcggctgctcctgctgcagctgcaactgagccggtcaggcgatggcgcacgagagtcgagaggacgacgacgagtcgtataaatataatagcggcgtctaaataagatcctgtcaactgcacccgccattatcgatccatggtcgctcctggggttcatgttcatctgtaacgtgctcgcggtcatgtccgtctcgtgccggatttaatatttatatgcatgtatttgtgttttttctgcgttattacatgtgccggtttcttgcgtgtcttctctgcgcgcgtc

SEQ ID NO: 137003 - DNA, 675 bp, Zea Mays
atcctcatcacaggcaacaaggcaccacacctcttcttcttcttcctcctcctcctagcacagctagcgcctgctccccttcgcctgtgatcatgtcttgcagcagcggcaagtgcgactgtggctccagctgctcctgcggcagctcatgcaactggtaataacagatacctcacatgacgagtactacatgctttcatgacgatcgagtagacgcttccatgacgagtattacatccgatcctcatgcatgcagcatgtcccctaacgtggagaccgccgccgccagcagcatcaagaccacggtcctcgccgcgccgaccaccaaggccagcgccggcggcttcgaggcggccaccgagggcggcggctgcgactgcaacacctgcaactgcggcaccagctgcggctgctcctgctgcagctgcaactgagccggtcaggcgatggcgcacgagagtcgagaggacgacgacgagtcgtataaatataatagcggcgtctaaataagatcctgtcaactgcacccgccattatcgatccatggtcgctcctggggttcatgttcatctgtaacgtgctcgcggtcatgtccgtctcgtgccggatttaatatttatatgcatgtatttgtgttttttctgcgttattacatgtgccggtttcttgcgtgtc

SEQ ID NO: 137004 - DNA, 491 bp, Zea Mays
ggcagcagcacgcctcctcctctttcagcaaacacagctagctagcagcacctgctcccttcgcctgtaatcatggcgtattgctgcgacgacggctgcaactgcccccctgactgcgggtgcccatgcgactgctgcaatttgtaccctgaagtggagaccgccgccgccagcggcatcctcgctgcgccgaccaccaaggccagcgccggcggctgcaacacctgcaagtgcggcggcaccagctgcaactgcaactgcagctgagccggcccaatggtggcgcacgagaggacgacgacgacgaggcgtagtatatatgtatgtagcagcgtctaaataagatcctgtcaagagtcaactgcacccgccattgtatggtcgcctgcctcgccttcgtctcctggtcctggggttcgttcatctgaacgttctcgcggtcctgtcagcctcgtgccggattcaatatttatatatacacatacacacgt

SEQ ID NO: 137005 - DNA, 459 bp, Zea Mays
caaaacctcttttgcctcattgcaggggatgtttcgaagcacaaggttgagcatgccctgaggaagatgtgcaaggagggcgcatattggggcactgttgctggagtttatgtgggcatggtgtacggcgtggaaagggtccgtggccgcagtgactggaagaacgcgatgatcgggggcgccttgtccggcgccctgatctccggcgccagcaacagcgacagaggcaaggtcgtcaaggacgccatcaccgccggcgcggtcgccacagccgtcgagttcatcaactgcattacctagccgagcaaggagcaactgcatttgcagtgccattgtcgtgcaaaatatgaataaagtacttgccatgtccagctcataaaccactccacaccttcagtcttcgtttctgaccggcggttttgctttgtgtgaatgccctgtgagtgagagcaagaattc

SEQ ID NO: 137006 - DNA, 755 bp, Zea Mays
aacctttgtatctctggtttctcacctattctggcttcacaccttcctttttcacttggatgcatcttatatatcatggtcaactgtccagtcacctaggcattgccagttaggtgattctgcttctacagctcgcagttcctaaatgtggattccaaaaacgcatgccattacttacgaatactgcggatctgtagttgtagtcccaatcagtgagcagcttctggtttacacatcaaactgatacactttctcaatacgtatgcagctgaggaagatgtgcaaggagggcgcatattggggtagctaactgaccgatccgtgcccctcttgtcgctgcagacgcaaatgatctgttgcgttggcttctttttccttcttcgtttgattgcacgctctggctaatccagacgcttatttgtctggcatgcaggcactgttgctggagtttatgtgggcatggtgtacggcgtggaaagggtccgtggccgcagtgactggaagaacgcgatgatcgggggcgccttgtccggcgccctgatctccggcgccagcaacagcgacagaggcaaggtcgtcaaggacgccatcaccgccggcgcggtcgccacagccgtcgagttcatcaactgcattacctagccgagcaaggagcaactgcatttgcagtgccattgtcgtgcaaaatatgaataaagtacttgccatgtccagctcataaaccactccacaccttcagtcttcgtttctgaccg

SEQ ID NO: 137007 - DNA, 238 bp, Zea Mays
caaaacctcttttgcctcattgcaggggatgtttcgaagcacaaggttgagcatgccctgaggaagatgtgcaaggagggcgcatattggggcactgttgctggagtttatgtgggcatggtgtacggcgtggaaagggtccgtggccgcagtgactgggtaagaattacatcacacgagtataaatatgccagattttgctgtggtttgaaaccagtaaccagccacagctgcatca

SEQ ID NO: 137008 - DNA, 424 bp, Zea Mays
agccgatttcgtgtccctgcagccacggccaccgcccaatctccacttctttatcttctccgaggtgagagagcccaggcgatccaattccaccctcgttctcaggcactgtcacacagacacagctgacctgccactgccaggaaagtaggtcgaggatgccccgcagcggcttctcggggtccttcaggtcgcccaagatcgacgtcgtcatcgacatgggaaaaccccttcctcaaccgcaccggtcgacggcttcctcaagatcggcgcccgtcggcgcctgcaaggtgctgccgagagaccttcgagtgcctccacagggtgcgttcgtcgtcgcccgcccgctctcccgtcccttcatcgtatccagttcagtcatgctgctgcatcaagatccctactagacgggggaaagtttcga

SEQ ID NO: 137009 - DNA, 1038 bp, Zea Mays
ccgggcccaacccagcgccactctgtaaaatcgcttccagtttgtcttcctccagaaaaaccctacagttcatccctctcgacgcgccgccgccgtctcgccgctgcccacccagattgacggctccaattggcgcccatggcggaagaaaccaacataaaaaaggaggaagaggagttcagcaccggtcctctctcggtgctcatgatgagcgtcaagaataatacccaggttcttatcaactgccggaacaacaagaagttgcttggtcgcgtgcgagccttcgatcggcactgcaacatggttcttgagaatgttcgtgagatgtggaccgaggtaccgaagaccggtaaaggcaagaagaaggctctcccggtgaacaaggacaggttcataagcaagatgttcctccgcggggattcggtcatcatcgtcctcaggaacccgaaatgagtaccctgtacacgtagagagtctgtttgctagcagtacgttgtgctattgggtgtaaggtgtatgccaaatgctcaaagcatgggagtgtaagtcgcggcagaattcgctatgtgtgttgatggtgggggattcagcttaaggcaggatgctagggctggattttgcttcttgtagcagacttgaacaggatgcttctttgatgtatcgacagaccccactgcttgaatcaccggttccgatccgtgtatcgcatacatagtgtatgaatggcatggcatagtgtatggaggtgtttgtttgggattatataatctacctagattatataatccaacaaatttagttgttggattatattccctctgttcttttttatttgtcgccgtttagtttaaaaataaaaaataaattagtgagcgacaaataataaagaatggtataatgtgagtgagcatattataatcccaacacacactccttatggcgtgaattgcaacaccaggacaggagtatgtgtctaacatgagtttcggtggtcgagtacctcctcagcacggcaatctctccacatccattgtttta

SEQ ID NO: 137010 - DNA, 817 bp, Zea Mays
acagttcatccctctcgacgcgccgccgccgtctcgccgctgcccacccagtttcgtccgtatgcagattgacggctccaattggcgcccatggcggaagaaaccaacataaaaaaggaggaagaggagttcagcaccggtcctctctcggtgctcatgatgagcgtcaagaataatacccaggttcttatcaactgccggaacaacaagaagttgcttggtcgcgtgcgagccttcgatcggcactgcaacatggttcttgagaatgttcgtgagatgtggaccgaggtaccgaagaccggtaaaggcaagaagaaggctctcccggtgaacaaggacaggttcataagcaagatgttcctccgcggggattcggtcatcatcgtcctcaggaacccgaaatgagtaccctgtacacgtagagagtctgtttgctagcagtacgttgtgctattgggtgtaaggtgtatgccaaatgctcaaagcatgggagtgtaagtcgcggcagaattcgctatgtgtgttgatggtgggggattcagcttaaggcaggatgctagggctggattttgcttcttgtagcagacttgaacaggatgcttctttgatgtatcgacagaccccactgcttgaatcaccggttccgatccgtgtatcgcatacatagtgtatgaatggcatggcatagtgtatggaggtgtttgtttgggattatataatctacctagattatataatccaacaaatttagttgttggattatattccctctgttcttttttatttgtcgccgtttagtttaaaaataaaaaataaa

SEQ ID NO: 137011 - DNA, 760 bp, Zea Mays
ccgggcccaacccagcgccactctgtaaaatcgcttccagtttgtcttcctccagaaaaaccctacagttcatccctctcgacgcgccgccgccgtctcgccgctgcccacccagattgacggctccaattggcgcccatggcggaagaaaccaacataaaaaaggaggaagaggagttcagcaccggtcctctctcggtgctcatgatgagcgtcaagaataatacccaggttcttatcaactgccggaacaacaagaagttgcttggtcgcgtgcgagccttcgatcggcactgcaacatggttcttgagaatgttcgtgagatgtggaccgaggtaggccgaaccgaacggtctcttaagcttctgtccagtctccctcctggcttgaacttgccgtgtccacgaaccgtttctgaacacctgtttgactcgcgctgttacaggtaccgaagaccggtaaaggcaagaagaaggctctcccggtgaacaaggacaggttcataagcaagatgttcctccgcggggattcggtcatcatcgtcctcaggaacccgaaatgagtaccctgtacacgtagagagtctgtttgctagcagtacgttgtgctattgggtgtaaggtgtatgccaaatgctcaaagcatgggagtgtaagtcgcggcagaattcgctatgtgtgttgatggtgggggattcagcttaaggcaggatgctagggctggattttgcttcttgtagcagacttgaacaggatgctt

SEQ ID NO: 137012 - DNA, 544 bp, Zea Mays
ccgggcccaacccagcgccactctgtaaaatcgcttccagtttgtcttcctccagaaaaaccctacagttcatccctctcgacgcgccgccgccgtctcgccgctgcccacccaggtaatttccgggtttcggagtatagatccttccgggcgacccattttttttaacctgctgatggtaaagtttcgtccgtatgcagattgacggctccaattggcgcccatggcggaagaaaccaacataaaaaaggaggaagaggagttcagcaccggtcctctctcggtgctcatgatgagcgtcaagaataatacccaggttcttatcaactgccggaacaacaagaagttgcttggtcgcgtgcgagccttcgatcggcactgcaacatggttcttgagaatgttcgtgagatgtggaccgaggtaccgaagaccggtaaaggcaagaagaaggctctcccggtgaacaaggacaggttcataagcaagatgttcctccgcggggattcggtcatcatcgtcctcaggaacccgaaatgagtaccc

SEQ ID NO: 137013 - DNA, 3058 bp, Zea Mays
atccaattttctctctctctcccgcctcctgttcagtttcccactcgccggaaccgccgcctctccaatccccgctaaccctcgctccgttttatcgcccccctctgcttccaaatcgaatcgcgtcctctccattctgccgtctcctctcctactcctcccccctgccgccgcaagatccaccagggctctcgaccgcaatggagccgcagctgacgcccggcgcggtggcggcggtctccgcccacgccgacggcaacggcacgctgcagccggtgctgcaggtggtggacgtgcggatggtcaacaacgccaagaacccctccgccgagcgcttccggatggtgctctccgacggcgaacacaccatgcagtccatgctcgccaccgccgagaacgcgcgcgtccgggacggctccatccagaagggctccatcgtccacctcctggagtgcacctgcagcaccatccagtctcgcaggatcattatcgttatcaaacttgatgttctgcaaagtgagtgtgccataattggaaaccccaggccctatgaaatgagaaaccaacctaatgagcagggcaccaacataccggccaatgctgctcaagctaatactggaacgtattccagtggccctggtttgctgggatcacctgctgcttcaaggccagcacaagttgctaataatgtaccatacagtggatcctatggtggttatcatggtacggtggtccctccgattgcccctgcagtagaatctgttcccaatgtggcatcgggtgtcacttatggtacaacttcagcgcataatacaatgaatgcgggcatgacacagtcaaacttgcagcagcgttcactgaactctcacccgaaccaaaggtttgcagttccttccatggctggtggcagtggtgctcctgggaatacatatggacaacctgcacagtcgttttatcagcaaccgcctccagggcatatgaatagaactcctgtgtctaagaacgatgcatatcgtcttgtcccattggctcaattgaacccttatctagataaatggacaatcaaggtcagggtaactgcaaagactgatctcaggttctacaacaatgctagaggtgctggaaaagtcttttcctttgatctccttgatgaacagcgtggagaaatccgtgcaacatgcttcaatacgcaggctgatcagttttttaacctcattgaggttgataaggtgtacctgatatctaaagggtcgttgaaaccagcacagaagaagtttaactccttgaatcacgagtatgagataagtctggattccagaacatctattgaagtttgtgctgatgatgatagcaacatccctaggcagcagtataatttccggaagataagtgaaattgagaacattgagaaagatgctattttggacttgattggaattgtcacatcagttggcccttctgtcacgtttatccgaaaggatggcgtggaaacccagagaagaacacttgaactgaaagacatgtctggtcgaagtgtacaacttaccttatgggggaagttgtgtgttgctgaaggcaaccagctgcagtcgctgtgcgattctggtttgaatcctgttctagctttgaaaggtgcccgcgttactgactacagtggtagatctgtgtcctcagctggctcaactcagttaaaaatagacccagaaattcctgaggctgagagtctgcggcgctggtacgcaactggaggaaagacagctgcttgtgtttctctgtcagtggtaagtatgggtggtacttgtgtccggaaatcaatcgctcagatcaaggatgaaaatctggggcagttagagaagccagactttatcactgttaaagctgcaatttcacatctgatagcagataatttttgttatcctgcttgcaccattgacgtgaatggtaggatgtgcaacaaaaaggtaacagataatggtgatgggacatggcgttgtgacaaatgcgaccagagcttaccaaattgtgagtacagatacgtgctgaatggccagatccaggaccacagtggggtcaccaattttactgcattcgaagatgctgctaaggtgatgattggccacagtggccacgagctcaacaacattagtgtagaagactcggaacgatttgcagagatcttgcaggcggctcgttggcagcagtttctgttcacgctgaaagtcaaggaggagatctataatgatgcgccgcaagtcaagtgcaacattactaaagcagagaagctggatccggcaatagagagttcttaccttctaggggtaatcaatggcctgttgcaggatgacactggctcaccttctggggcgcaaggtgccatggcctacaatgctggtatcagcaacactggcgctggacgaagtgtgccaacctccaacagtgcctacaccaccaatttgagtggtccaaggtatggcgagtctgcaaaccagctcgcgcagcaggaaagcacgtacaccggggtgaccactccagtgtcggcggcacggaatgtgcagcagacctgcgtgtcctgcgggtcaagtgggcacaacgtgcagaactgccctgcaggaacatacaggcagcaggcggctgcaagcgcagcaagctcctacggtacttcgcagcctcgcaatggactgtgcttcaaatgcaatcagcctggacactttgccaactcttgtccactactggctcctgctccccagcagcagcagcagtatcggagcggcggcgctccctcaggcggttatggtaggcagcagccctatgttggggctaccaactactgaaagtcattatctctgtcgagtcagtcgtgatgttggttttgcttagatgcctgtcctgaatggcatcgctgcgtccatgtgaagtagatgcaaaccattcctttttatgtttgtgtgtgaagttagaactatgtatcagtactttatgttttcgtcttataaatcctcgttgccgtgtcagttctgttgaattcgtggtttgtctccctgaataactcactgtatgg

SEQ ID NO: 137014 - DNA, 219 bp, Zea Mays
gtgagaacaaatggtgttaatgttaacacaaatattaagggcacactgacaaagaagaggaaagtggcacataatgctacgaagaaaggaaaagaaatcggtagtggctcttggccccttcatttgcaggtcaggacaacacttagagggctaatactgatgtgtgcattatattggaagaggttttggaggcaccgaaatggaaagtgttatgggtca

SEQ ID NO: 137015 - DNA, 177 bp, Zea Mays
ttcttaaaggcctgtgggctctgcaagcgccacctcggccccggccgtgacaccatctacatgggtgagatggccttctgtagcttggagtgtaggcagcagcagatgaacctcgacgagctcttggggaagaagtgctccattctagctagcagcggcggtggtggctcagattag

SEQ ID NO: 137016 - DNA, 162 bp, Zea Mays
gcaacattgttattcagccagaatgggtttttttttgcccagatgccttggaacgtgaagatatagaaagctgtcatagaaatattttctttgtagcttggttgattataattataaattaaactaaatcagaataaatttgtatacgtgtgtatctgttat

SEQ ID NO: 137017 - DNA, 453 bp, Zea Mays
atgaaaatcttatattccctgaggaggttctaccacgtggaaacgctctttaatggaactttcgttttagctggtcgtgaccaagaaaccactggctttgcttggtgggctgggaatgccagacttatcaatttgtccggtaaactacttggagctcatgtagcccatgccggattaatcgtattctgggccggagcaatgaacctatttgaagtggcccatttcgtaccagaaaagcccatgtatgaacaagggttgattttacttccgcacttagctactctaggttggggagtagggccggggggagaagttctagatacttttccttactttgtatccggagtacttcacttaatttcctccgcagtcttaggcttcggtggcatttatcatgcgcttctgggacccgagactcttgaagaatcttttccattctttggtcgcccctgc

SEQ ID NO: 137018 - DNA, 566 bp, Zea Mays
cccatatacatatagatgaacaccagatttttaatgtagtgatacaactttattttctagcaaggagatgatgaacatatactgcaattgtacaacattctagtcaggcattgtccttcaccatgctaccatctccctcatcatcttccataaaaatagtcgaggatggatcactctttgacattttctcctggccttctttaaaaccagggagcatatctgcaattcaggttaagcaaaaatacatgctttacaaacaaagcaatgaagaaccatttgttatgaactatgttactgtacacactcatgaccatgataaagacaaacacatatgtcccaaaaaattagaggtaaaaaatagaacaagataacgatcactaatcaggatagaatgtgaaagaataattgcagtactccctagctagcacattgaccttccttcggaccatcctcaattggcatatggcatcctacaaaagctaagaataatgaaacctatttgtgcacaaaattcttgtttcaaggttgaaggtgcataccattgagatatcaaaagcatttgagtc

SEQ ID NO: 137019 - DNA, 95 bp, Zea Mays
attgacacaacctacttggaggatgctttcataatatttcatttaaatgctttagcaccgttcgtatctaaaatgccttttaaattgttatttcg

SEQ ID NO: 137020 - DNA, 263 bp, Zea Mays
gaacgccgccgcacgctcacctcgcttacggtactgctgctagccattagcgtggtctgtcggtttcgcctggtcgtcgtaaacctgcgcggggcttcgacgggcggggcttgggtcaggggatctccaattggtcaccagcgaccaatttccgcctctgggccgcgccgcgatgtggccggggtaactgcactcttgatcctcgcagtgaggtcacgagtcatctgaagagcaagttggtacctggaatctcaagtcccagg

SEQ ID NO: 137021 - DNA, 115 bp, Zea Mays
ctctaaaagatttccacaagttaagattttgggtgttacattaaccaaacttatacatcaacatgtagtctttcactttggtatagaaactttaaccaatcactgtatagatcag

SEQ ID NO: 137022 - DNA, 243 bp, Zea Mays
gccgatgtggggtgcctccgcgacggtgtcgacgaagatgcggacgcggttggggcggaaatccatggtcaccggcgtgccgacgggcagcacgacgatgtcggcgtcgggcttgtcgcacaggatcaccctcttggcttcttccaggctgagcccgaccacttccggccaagacttcttggcgccatcgtcgccgccgcctgtggagctcatggtgctcggctgccgatggcgaactgaaac

SEQ ID NO: 137023 - DNA, 314 bp, Zea Mays
gtgtacgatgtgaccaagtttctggaagaccacccaggaggcgacgatgttctgctgtcctcaactggcaaggatgcgaccgacgatttcgaggacgtcggcgggcacagcaatactgcccgcgcgatgatggacgagtacctggtgggtgaagtcgacgatcccttctaggaccaagtatgtgccccccaagcaaccgcactacaaccaggacaataccccccgagtttgtcatcaagatcctccagtttttagttcccctggcaatcctggccttggctgttgccgttaggatgtacaccaagtcagagtct

SEQ ID NO: 137024 - DNA, 246 bp, Zea Mays
atggcgagggttcgggacaggatggagcacttcaaagaggtcgtaacgctctcagatggatatactgaggtggttggatcaccatttggccgaattgtgaagtgtgaggagttcctgaaggttgcaggacctactgtgtactggagaatgtttgtaaagtccaagaaggcaacatttgctttggctcaagcttatgatgccttcgagattaaggagaagcctggagggcaaccatctttagagtag

SEQ ID NO: 137025 - DNA, 1567 bp, Zea Mays
tggcatcattccccttttgcgcaggtgcgcgccttggctttgcttccaagcaatgcccatgcagcagctagcagaacacgatcgatgcgtatatatatacgtgcatgcattgtgtttgtttcatccatcccgagcaagcaagtaatatggcttggtcttgtgctcgtccgatgagcatcgccctcgctgccgtcctcctgctgtgcggcggcgcgtggctgcagcaggcggcggaggcgcgcccccaccacatggacgacgacagcagcatcgacatggaccgcggcagcgacgacttcttctccatcgtggggtactcgccggaggacctgacgcagcacgaccggctcgtcaggctgttcgaggagtgggtggccaagtaccgcaaggcgtacggcagcttcgaggagaagctgcgccggttcgaggtgttcaaggacaacctgcaccacatcgacgaggccaacaggaaggaggtcaccagctactggctgggcctcaacgccttcgccgacctcacgcacgacgagttcaaggccacctacctgggcctcctgccgaagaggaccagcggtggccggttcaggtacggcggcgtgggcgacggcggcgacgaggtgcccgcgtccgtggactggcggaagaagggcgccgtgacggaggtcaagaaccaggggcagtgcggcagctgctgggccttctccacggtggcggccgtggaagggatcaaccagatcgtgacgggcaacctcacgtcgctgtcggagcagcagctggtcgactgcagcaccgacgggaacaacgggtgcagcggcggcgtcatggacaacgccttctcgttcatcgccaccggcgccgggctccgctccgaggaggcgtacccgtacctcatggaggaaggggactgcgacgacagggcccgcgacggcgaggtgctcgtcactatatccgggtacgaggacgtgccggccaacgacgagcaggcgctcgtcaaggccctcgcccaccagcccgtcagcgtcgccatcgaggcgtccgggaggcacttccagttctacagcgggggcgtgttcgatggaccgtgcgggtcggagctggaccacggcgtggcggcggtgggctacggcagcagcaaggggcaggactacatcatcgtcaagaactcgtggggcacccactggggcgagaagggctacatccgcatgaagaggggcaccggcaagccggagggcctctgcggcatcaacaagatggcatcctacccgaccaaggaccattgatggatcatggacgacggagatcatatctatcttcccttccctttcatccgactctttcgatttccatcgtttgcccccttttcctgaatgtgtgtgtttttttttatatattactgtgtcaagtaatttctcgatggatcgatcgaggaagaacgacaaacatgcactcaagcacgagcgcagcaatgtcatctttctcttcatttggtgcgttgaaatgacgaatatcaaataaagtggtttattttttgtcttgctggtgcaaatacatatgcattttttctata

SEQ ID NO: 137026 - DNA, 1244 bp, Zea Mays
ataagcatctcttgttcctcccctgcgccttcctctctctctttccttttcctcccgtcccatctctctctctctcccccttctacatgacgttgtcgatgctgtagcggcagccggcagtgtatagagctagccatgctggaccacctcgtgtcgtcctacacgcaccgcagtggcggcgaccagcccgcggcgccctcgccctgcgacctcgcgtccgtggacgacgtcccgggcaacggcggccacaagcctggcaaggccgtgaccgcgtccgtgtaccgcgccaagatcgcggggcactcgcgggtggtgacggtgtcgtggtcccgcgacctcctgtcgcacgcgttctccgtggccatctccggcgcggacggcgcgtccgcggagtgcagggtggagctgcggccgtggcagttctggcgccgcgcgggctcgcggcgcgtggagctggtgggcggcggctcggcgtcggcggccgtgcgcgtgctgtgggacctccggcgggcgcggttctgcggcggggtgcccgagccccggtgcgggtacttcgtggcgctggaggccgcgggcgaggtggtgctggtgcagggcgacatgcggcggcggcgcgcggaggccgaggccgtgcccgtggcgcggcgggagcacgtgttcgggcggcggcggttcgcggccaaggcgcggttcgatgagcagggcgacgtgcacgacatcgccatcgagtgcggcggggagggcggcggcggcgacggcgacgtggagatgaccatcgccatcgacggcgaggaggcggtgcaggtgaagcacctgcagtggaagttcaggggcaaccagtcgctgaccttcagccgggccaaggtggaggtgttctgggacgtgcacgactggctcttcagcgccggcaccaggccggcgctcttcatcttccgccccatcgtgctgtccagcgcgtcggcgccggcggggatgctcgacggcggcgcggtggtgcccgccgccaccacgggcttctgcttgtacctctacgcgtggaagctcgactaaagctgctggctagctagctagctacgccgatcgacattgcagtgtctgctgtctctcccctgccgccgccgccgccatgcatgttgtcggtcgatcgatgggactgctgtctgtgtcaccagacaatgcaaaaatgcattcctgtgaactcaagattatgagtaaggaactttttttttcttttcgttttgtaa

SEQ ID NO: 137027 - DNA, 2569 bp, Zea Mays
gatctcacacacgcaactctctcaagactcaagagaggaaaggttgctttccggccggaaagggaggcgagcgcgagacccctgtgatcccaattaagcgcccagccgcgacggccccaaaacggcaaacctccccagcccgcccgcccgcgccgcccgaccgcgatgccacccacgccgccggagacggagacggagccggaattcgccgaggtcgaccccaccggccgctacgggcggtacacggaggttctcggcaagggcgccttcaagacggtatacaaagcttttgatcaacttgaaggactagaagttgcttggaaccagatcaaagttggagatttacttcggaacaatgatgatttggagaggctgagatcagaagtgcggttgcttaaaaccctcaagcataaaaacataataaagttctacaattcatggcttgacaaaagaagcaacaatataaatttcatcacggaggttttcacatcagggacgttgcgccagtaccggattaagcacaagaaggtagacattagagctttaaagaaatggtcaaggcaaatcttgagtggtcttgtctacctgcacagccatgatccaccagtgatccatagagacttaaaatgtgacaatatattcgtgaatggaaaccagggtgaagtaaagattggagaccttggtttagcgactatcctggataatgcacgttcagctcatagtatcattggtacaccggaattcatggcaccggaactctatgacgaggaatataatgagcttgtagacatctatgcttttgggatgtgtttactggagcttgttacatttgagtacccatattgtgaatgttcaaatgcagcacagatatatagaaaagtatctgatggtgaaaagccaggttcactggctaagattggtgatcctgaagtaaaattatttatagagaaatgcattgctaaagtcactgaaagactttcggcaaatgaactcttaatggatccttttctcctagatgttagtgatgaaaaaatattctatccagtgcatccaaatattaatacaacagtcgagagtcaacggaaggatttgaatacaatatttttgaagctgcgcattgctgatccaacaggtcatgcccaaaacatccacttcccctttgatattgaagcggacacttcaatcagtgttgcaactgagatggttgtgcagctcgatctcacagatcaagatgtaacggcaattgcagaaatgatagatgctgaaatacgttcgcatattcctgattgggcagcagaggagtcaattgacaaccaaggggatgaagctgctcactctgagacccatagttcagaaggtgatgagggaacttctgaactgcgtgatgagatcggtgcctcacataacggttttgttcaagaacagcttccctctggacggaagtactggtcagactcacccaggagagacggtgaaatatctcaatcggtggtggaacatcaaattggtgatagtagtgccaatggaataccaaagaggaacaaagtagatgccatgtttgaacgaatatcatcatctgtggacttgtcgaacccatctgcggtcgacagcatgtctagggatgcttctgttggtggcagccctcactctttagacggtgaggaggagcacaattctgatcagcatctggcagcaggtgtcactgagaggttaatagacctgttggctcagcagcaagaggagcttcgtgcgctgcaaaggaagcacaaggcggacatagaggagatgctgaaaatcgtacctgcggaggatcgggaagagaccttaactctatgccacttgaaggcggaacagaaaaacagagccgccgaaccttagataaactgtctcatgtgcatgttcctctgtgtgctgttagatttatacatactcacaccaaggagttgttgtttacactttacagccgttgttgtgcaaaagttggacctctgttgtgcagaagataagtctgaagcctttttcattgttcttttttgacataatggagaagctgggggagtgcttgtctctggaggacctccaattcagtgaccgagcactaaatagtaatcaggttctttttgacataatggagaagctgagtttttgacggcaaagatgaagttcctgcccaccaaatgaaatctgcagatgccactttgatgccgctgcgtgcctgaattaacggttcataaggagtgcctcccttcctttttcttttcttttcttatttgtttcttctgtactttgacttgccaaggatatacatcagtgtttgagctgttccaaacttgcaatgacagactttaaagtgcaattattttccggatcacatggctgcccaagttctcagagctgtgcgcacacacacacacacatatacagatagataaatatatatttctctgaatgcaaacaggcaggatatgcatacagatagatgtatgtatgtatttgttaattgcaagtgtggcgtggaggctgctgaggaagtctccatgcactcccagtgatgaggtagcagcagatc

SEQ ID NO: 137028 - DNA, 2315 bp, Zea Mays
catttatcacttggagcactagtttctagctgccggtaattgaacggttttccatccatcacaaacagtgcagttctagaaattgtttatttctagtaagaccaagatcatgtgtgtatgcacttcatttgagagattctcttagtcaatcttgataagaaggcaaatccaacattttctttagacgccttgacttttgcgttatgtccacaactgtttttagcgataatctataatgttaattaacacttatatctgcttcaatgctatccagttgggttccttgatttatattttattggcatagatacaaagcttttgatcaacttgaaggactagaagttgcttggaaccagatcaaagttggagatttacttcggaacaatgatgatttggagaggctgagatcagaagtgcggttgcttaaaaccctcaagcataaaaacataataaagttctacaattcatggcttgacaaaagaagcaacaatataaatttcatcacggaggttttcacatcagggacgttgcgccagtaccggattaagcacaagaaggtagacattagagctttaaagaaatggtcaaggcaaatcttgagtggtcttgtctacctgcacagccatgatccaccagtgatccatagagacttaaaatgtgacaatatattcgtgaatggaaaccagggtgaagtaaagattggagaccttggtttagcgactatcctggataatgcacgttcagctcatagtatcattggtacaccggaattcatggcaccggaactctatgacgaggaatataatgagcttgtagacatctatgcttttgggatgtgtttactggagcttgttacatttgagtacccatattgtgaatgttcaaatgcagcacagatatatagaaaagtatctgatggtgaaaagccaggttcactggctaagattggtgatcctgaagtaaaattatttatagagaaatgcattgctaaagtcactgaaagactttcggcaaatgaactcttaatggatccttttctcctagatgttagtgatgaaaaaatattctatccagtgcatccaaatattaatacaacagtcgagagtcaacggaaggatttgaatacaatatttttgaagctgcgcattgctgatccaacaggtcatgcccaaaacatccacttcccctttgatattgaagcggacacttcaatcagtgttgcaactgagatggttgtgcagctcgatctcacagatcaagatgtaacggcaattgcagaaatgatagatgctgaaatacgttcgcatattcctgattgggcagcagaggagtcaattgacaaccaaggggatgaagctgctcactctgagacccatagttcagaaggtgatgagggaacttctgaactgcgtgatgagatcggtgcctcacataacggttttgttcaagaacagcttccctctggacggaagtactggtcagactcacccaggagagacggtgaaatatctcaatcggtggtggaacatcaaattggtgatagtagtgccaatggaataccaaagaggaacaaagtagatgccatgtttgaacgaatatcatcatctgtggacttgtcgaacccatctgcggtcgacagcatgtctagggatgcttctgttggtggcagccctcactctttagacggtgaggaggagcacaattctgatcagcatctggcagcaggtgtcactgagaggttaatagacctgttggctcagcagcaagaggagcttcgtgcgctgcaaaggaagcacaaggcggacatagaggagatgctgaaaatcgtacctgcggaggatcgggaagagaccttaactctatgccacttgaaggcggaacagaaaaacagagccgccgaaccttagataaactgtctcatgtgcatgttcctctgtgtgctgttagatttatacatactcacaccaaggagttgttgtttacactttacagccgttgttgtgcaaaagttggacctctgttgtgcagaagataagtctgaagcctttttcattgttcttttttgacataatggagaagctgggggagtgcttgtctctggaggacctccaattcagtgaccgagcactaaatagtaatcaggttctttttgacataatggagaagctgagtttttgacggcaaagatgaagttcctgcccaccaaatgaaatctgcagatgccactttgatgccgctgcgtgcctgaattaacggttcataaggagtgcctcccttcctttttcttttcttttcttatttgtttcttctgtact

SEQ ID NO: 137029 - DNA, 2508 bp, Zea Mays
aggaaaggttgctttccggccggaaagggaggcgagcgcgagacccctgtgatcccaattaagcgcccagccgcgacggccccaaaacggcaaacctccccagcccgcccgcccgcgccgcccgaccgcgatgccacccacgccgccggagacggagacggagccggaattcgccgaggtcgaccccaccggccgctacgggcggtacacggaggttctcggcaagggcgccttcaagacggtatacaaagcttttgatcaacttgaaggactagaagttgcttggaaccagatcaaagttggagatttacttcggaacaatgatgatttggagaggctgagatcagaagtgcggttgcttaaaaccctcaagcataaaaacataataaagttctacaattcatggcttgacaaaagaagcaacaatataaatttcatcacggaggttttcacatcagggacgttgcgccagtaccggattaagcacaagaaggtagacattagagctttaaagaaatggtcaaggcaaatcttgagtggtcttgtctacctgcacagccatgatccaccagtgatccatagagacttaaaatgtgacaatatattcgtgaatggaaaccagggtgaagtaaagattggagaccttggtttagcgactatcctggataatgcacgttcagctcatagtatcattggtacaccggaattcatggcaccggaactctatgacgaggaatataatgagcttgtagacatctatgcttttgggatgtgtttactggagcttgttacatttgagtacccatattgtgaatgttcaaatgcagcacagatatatagaaaagtatctgatggtgaaaagccaggttcactggctaagattggtgatcctgaagtaaaattatttatagagaaatgcattgctaaagtcactgaaagactttcggcaaatgaactcttaatggatccttttctcctagatgttagtgatgaaaaaatattctatccagtgcatccaaatattaatacaacaggtacgtgactgaattggagatatctcatgttatagatgtagttgcagtaaactttctcgttcccacataactttactttagaataaacatggcagatactggtagtccaaaaccaagctctagtttcagatatgacggagtagcatcatctgccggtcgccatgatcgctcaggtagcatgtcagattcacatccttctgataactatgtacatgacactgtggatccacatgctgcaattggtcgaagtatcacagtcgagagtcaacggaaggatttgaatacaatatttttgaagctgcgcattgctgatccaacaggtcatgcccaaaacatccacttcccctttgatattgaagcggacacttcaatcagtgttgcaactgagatggttgtgcagctcgatctcacagatcaagatgtaacggcaattgcagaaatgatagatgctgaaatacgttcgcatattcctgattgggcagcagaggagtcaattgacaaccaaggggatgaagctgctcactctgagacccatagttcagaaggtgatgagggaacttctgaactgcgtgatgagatcggtgcctcacataacggttttgttcaagaacagcttccctctggacggaagtactggtcagactcacccaggagagacggtgaaatatctcaatcggtggtggaacatcaaattggtgatagtagtgccaatggaataccaaagaggaacaaagtagatgccatgtttgaacgaatatcatcatctgtggacttgtcgaacccatctgcggtcgacagcatgtctagggatgcttctgttggtggcagccctcactctttagacggtgaggaggagcacaattctgatcagcatctggcagcaggtgtcactgagaggttaatagacctgttggctcagcagcaagaggagcttcgtgcgctgcaaaggaagcacaaggcggacatagaggagatgctgaaaatcgtacctgcggaggatcgggaagagaccttaactctatgccacttgaaggcggaacagaaaaacagagccgccgaaccttagataaactgtctcatgtgcatgttcctctgtgtgctgttagatttatacatactcacaccaaggagttgttgtttacactttacagccgttgttgtgcaaaagttggacctctgttgtgcagaagataagtctgaagcctttttcattgttcttttttgacataatggagaagctgggggagtgcttgtctctggaggacctccaattcagtgaccgagcactaaatagtaatcaggttctttttgacataatggagaagctgagtttttgacggcaaagatgaagttcctgcccaccaaatgaaatctgcagatgccactttgatgccgctgcgtgcctgaattaacggttcataaggagtgcctcccttcctttttcttttcttttcttatttgtttcttctgtact

SEQ ID NO: 137030 - DNA, 1909 bp, Zea Mays
aggaaaggttgctttccggccggaaagggaggcgagcgcgagacccctgtgatcccaattaagcgcccagccgcgacggccccaaaacggcaaacctccccagcccgcccgcccgcgccgcccgaccgcgatgccacccacgccgccggagacggagacggagccggaattcgccgaggtcgaccccaccggccgctacgggcggtacacggaggttctcggcaagggcgccttcaagacggtatacaaagcttttgatcaacttgaaggactagaagttgcttggaaccagatcaaagttggagatttacttcggaacaatgatgatttggagaggctgagatcagaagtgcggttgcttaaaaccctcaagcataaaaacataataaagttctacaattcatggcttgacaaaagaagcaacaatataaatttcatcacggaggttttcacatcagggacgttgcgccagtaccggattaagcacaagaaggtagacattagagctttaaagaaatggtcaaggcaaatcttgagtggtcttgtctacctgcacagccatgatccaccagtgatccatagagacttaaaatgtgacaatatattcgtgaatggaaaccagggtgaagtaaagattggagaccttggtttagcgactatcctggataatgcacgttcagctcatagtatcattggtacaccggaattcatggcaccggaactctatgacgaggaatataatgagcttgtagacatctatgcttttgggatgtgtttactggagcttgttacatttgagtacccatattgtgaatgttcaaatgcagcacagatatatagaaaagtatctgatggtgaaaagccaggttcactggctaagattggtgatcctgaagtaaaattatttatagagaaatgcattgctaaagtcactgaaagactttcggcaaatgaactcttaatggatccttttctcctagatgttagtgatgaaaaaatattctatccagtgcatccaaatattaatacaacagtcgagagtcaacggaaggatttgaatacaatatttttgaagctgcgcattgctgatccaacaggtcatgcccaaaacatccacttcccctttgatattgaagcggacacttcaatcagtgttgcaactgagatggttgtgcagctcgatctcacagatcaagatgtaacggcaattgcagaaatgatagatgctgaaatacgttcgcatattcctgattgggcagcagaggagtcaattgacaaccaaggggatgaagctgctcactctgagacccatagttcagaaggtgatgagggaacttctgaactgcgtgatgagatcggtgcctcacataacggttttgttcaagaacagcttccctctggacggaagtactggtcagactcacccaggagagacggtgaaatatctcaatcggtggtggaacatcaaattggtgatagtagtgccaatggaataccaaagaggaacaaagtagatggcattgtgatctgtgcacgagatgaggaggatcaatccttcggctcttccatccatcccgctgaagccatgtttgaacgaatatcatcatctgtggacttgtcgaacccatctgcggtcgacagcatgtctagggatgcttctgttggtggcagccctcactctttagacggtgaggaggagcacaattctgatcagcatctggcagcaggtgtcactgagaggttaatagacctgttggctcagcagcaagaggagcttcgtgcgctgcaaaggaagcacaaggcggacatagaggagatgctgaaaatcgtacctgcggaggatcgggaagagaccttaactctatgccacttgaaggcggaacagaaaaacagagccgccgaaccttag

SEQ ID NO: 137031 - DNA, 1970 bp, Zea Mays
ctgccttcctggcctggcctagctcctctcctctcctccggcttgattgatcgatcgatcgatcgatccagccagccatccacccatcccttccaagtttccaactgacattgccgcgccgcgcaggcgcagcgcacgacttccgccctcccccaccctccgcctcacgcatataaacgcgcgcgcctgcctcccctgcccccgcctgcctgcccacgcgctccgctcctcgccccctcctcttcccacgccgccgccgtacccacgggcagggggcacggctggtggctcatcgctcggcccgctccccctccgtcgcaaccggaacataccagcaccggcgctgcggtattattcagctccgtccgccggccggcgcggacggacgccaggcttccttcctgtctgcataacaaagccgccgccattatgatctccacatatgatgcttagcatttgtcgctcgcagctgtattgctcctctagctgcatccttgtactagagcatggcgaagctcgcatctattgctcgcagtatgcttagattcccaaacggaagcatgaggcttgttatggtaacggttattggagcagtccttggctttttcattgggatttcattcccttcggtcagcataacaaagcttcactttccagatagctttatttcgtacattgaagacaaagacgctggactcacgacccaagctatactcaatcatgcttggacttctgccagaaacgcaaggggaaatggtaccgaaccgacttcaaacagtaccttaaagatttatgtcccaacgaaccccaagggtgcagaggggctagcaccaggtatcgttgtatcagagtctgacttccatttgcgcaggttatggggagacccaagtgaggacctgcctttcaaaccaaagtaccttgttacctttactgttggagttgagcagaaagcaaatataaacagagctgtgaagaagttttctgacaattttgctattctgttattccactatgatggccgggtgagtgagtgggatgaatttgagtggtcccagcgagctatccatattagtgtcaggaaacaaactaaatggtggtatgccaagagattcctgcatcctgatattgtggcagcttatgagtacatattcatttgggatgaggaccttggggttgaacattttaatgcagaggagtacatcaaacttgttaagaagcataacttggacatctctcaacctggattagagcctgatcgggggttaacatggcagatgaccaaaagaagaggtgacagtgaggttcacaaggacacagaggagaggcctggctggtgctctgaccctcatcttccaccgtgtgctgcttttgttgaaataatggctccagtcttctcaagagatgcatggagatgtgtgtggcatatgattcagaacgacttggttcatggttggggcttggattttgcgctcaggaaatgtgtggagcctgctcatgaaaagattggagttgtcgattcgcagtggatcgttcaccaagtggttccttctctggggaaccaggggcagtcagaaaacggaagggcgccatgggaaggggtgagggcgcggtgcaggaaggaatggggcatgttccagaccaggatggcggaggcggagaaggcgtattacaagatgatgggcatcacccctccaaactccacgcgtgtctagccgcgcctctcttcttggttttccatccccgccaccctgacctttgtggtggcgggtgagctgatgatactatactatagcactacttgattatagggagttagagatggtgggtgtagctgcttttgatggagaggtccttctgtaagtaaatgcgaggcgaaactgtgatgagaaaacatgtacacgaggatgattacctgatgatgatgatgatgatctatctattataaaaaacatatataccgttaccgagca

SEQ ID NO: 137032 - DNA, 465 bp, Zea Mays
atggaaggggatcctgcaggggggagctcaaccatggagatccagggcgaccatgggagggctagggatgacttctgcgtggggagagatggagggagcggctggggagggaggagatggctgggcgagcagagagggcgcgaccatgggagagggcaccggccagggagcgtccatggatcgagaggtgaaagggaaaaggctggcaccgaccgttctgagccaccacaacgtgagacggcctccagcggcggcgattcttggggttcggagtccatgattattgggcggcagcagtcgttcccgagggaggcattgggtgtgtatggtgagaaggcgtcgcgggatggaaacaaaatgatagcgatttgtatatatcatcaactcaaggtgatttcactatttgctacatttttcatatacgtcttgtcagaatatcatgtgaagacagttccatatttataa

SEQ ID NO: 137033 - DNA, 798 bp, Zea Mays
tatctctacaattctgcttagataacaataatgcttaccatacttctatgatcagattatccagagggaaccatgggaacacatcaaagatgaaaatattagaaaggcagcagcatcattcatgggttggcggtgaaaagatgtatgacaaagcaaggaagggtgaaacagtagagctttcaccaagacgtatatcgatataccaatttgatattgagcgcagtttggaagacagacagaatttgatatttcgagttacttgctcaaaaggaacatacattcggtccctatgtgcggacttgggtaaagcacttggaagctgtgctcatttaactgccttgcggagagactcgataggtgaatactcggtcaatgatgcttggaacttcgatgagcttgaagaacaaatcaccaaggggtatttatgagcatgccagtgagccgagctaggttatatgcggcttgcaaccagtggcatccatgctgccatgtcagtcccaaagctgtcaacgtgggcttcagcgaagagttgcaaatccagttcagttcatcctcaaccttttgtcatatagaggaacacgaagctccgttagttgtatgtgtgttgtgggtttcaattgatctcagtattgaatcgattttggcagtattgatgtataccattgttggtcaggtcttttgattgccttgccatgtaattttgctgggagcatattaaatttataatctaaagactgtgttaaaagtagcgaaatttataatctaatgacgaacacaagctggcgttaagtccacccc

SEQ ID NO: 137034 - DNA, 1891 bp, Zea Mays
cccgcccgtgcagacgcagagacacgaatgcctcctcgagcgggagccatggcggcggcggcggcgagggcaagggcggcgctgctgccctcctccccctccccatcgccgctgttccgcctcccgcgccgcttcctttcactcaccgcgactcgctaccctctctactacgacctcatcgtgcatcgccccgcggaccccaatccccccaaatcctccgccgccggggccgaccggcagccgcagccagcccccgaagagcagacgctcgaccgcgcaaagcgccggtacctccgcaagcgccgcagccgcctactccccgaccctgacgccaccaccaccactaagccctcctccttgtcgtcggagttcgtcgagctcaggccggaggtggtggacttcccgcgcctgcacgcgcgcgaggaggcgctctacttccacgacaccttcgcaatgccgtgggagaaggacaagcactaccgcatgctctaccgcctcgagaagaagtacttcccccaccagtcgctcgacaacgcgttcgtctccgccgacgccgccccggcctccgacgccgacagggggctcgtattctttgacgacgagaagaaggaaaacgagggagaggagcgggcggtcagtgacaagggcgccaacaaaggggaggtgctggagaggaaggtggaggatttcttcaggtctctcaagaagggtcccggccaagtcgacaccaaagccaagagaccgggaacggagccgcagcagcaggtgaagcgcgaagtgcggagggaggaggagcggccgcagccgtacctcgtcactaggaccacggagctgccgccgaggtgggacggccctgctgggaccgtcgtgctcatcgacaagcccaaaggatggacttcgtttactgtctgtggaaagttacggcgcttggtgaaagtacaaaaggttggacatgctggaactctggacccaatggcaactggattgttgattgtttgtgtaggaaaagcaaccaaaatagttgacagctaccaaggaatggttaagggctatagcggtgttttccgacttggagaagccacatcaacctgggatgcagattcaccaattatccagagggaaccatgggaacacatcaaagatgaaaatattagaaaggcagcagcatcattcatgggtgagatatggcaagttcctccaatgttttctgccattaaggttggcggtgaaaagatgtatgacaaagcaaggaagggtgaaacagtagagctttcaccaagacgtatatcgatataccaatttgatattgagcgcagtttggaagacagacagaatttgatatttcgagttacttgctcaaaaggaacatacattcggtccctatgtgcggacttgggtaaagcacttggaagctgtgctcatttaactgccttgcggagagactcgataggtgaatactcggtcaatgatgcttggaacttcgatgagcttgaagaacaaatcaccaaggggtatttatgagcatgccagtgagccgagctaggttatatgcggcttgcaaccagtggcatccatgctgccatgtcagtcccaaagctgtcaacgtgggcttcagcgaagagttgcaaatccagttcagttcatcctcaaccttttgtcatatagaggaacacgaagctccgttagttgtatgtgtgttgtgggtttcaattgatctcagtattgaatcgattttggcagtattgatgtataccattgttggtcaggtcttttgattgccttgccatgtaattttgctgggagcatattaaatttataatctaaagactgtgttaaaagtagcgaaatttataatctaatgacgaacacaagctggcgttaagtccacccc

SEQ ID NO: 137035 - DNA, 1850 bp, Zea Mays
cccgcccgtgcagacgcagagacacgaatgcctcctcgagcgggagccatggcggcggcggcggcgagggcaagggcggcgctgctgccctcctccccctccccatcgccgctgttccgcctcccgcgccgcttcctttcactcaccgcgactcgctaccctctctactacgacctcatcgtgcatcgccccgcggaccccaatccccccaaatcctccgccgccggggccgaccggcagccgcagccagcccccgaagagcagacgctcgaccgcgcaaagcgccggtacctccgcaagcgccgcagccgcctactccccgaccctgacgccaccaccaccactaagccctcctccttgtcgtcggagttcgtcgagctcaggccggaggtggtggacttcccgcgcctgcacgcgcgcgaggaggcgctctacttccacgacaccttcgcaatgccgtgggagaaggacaagcactaccgcatgctctaccgcctcgagaagaagtacttcccccaccagtcgctcgacaacgcgttcgtctccgccgacgccgccccggcctccgacgccgacagggggctcgtattctttgacgacgagaagaaggaaaacgagggagaggagcgggcggtcagtgacaagggcgccaacaaaggggaggtgctggagaggaaggtggaggatttcttcaggtctctcaagaagggtcccggccaagtcgacaccaaagccaagagaccgggaacggagccgcagcagcaggtgaagcgcgaagtgcggagggaggaggagcggccgcagccgtacctcgtcactaggaccacggagctgccgccgaggtgggacggccctgctgggaccgtcgtgctcatcgacaagcccaaaggatggacttcgtttactgtctgtggaaagttacggcgcttggtgaaagtacaaaaggttggacatgctggaactctggacccaatggcaactggattgttgattgtttgtgtaggaaaagcaaccaaaatagttgacagctaccaaggaatggttaagggctatagcggtgttttccgacttggagaagccacatcaacctgggatgcagattcaccaattatccagagggaaccatgggaacacatcaaagatgaaaatattagaaaggcagcagcatcattcatgggttggcggtgaaaagatgtatgacaaagcaaggaagggtgaaacagtagagctttcaccaagacgtatatcgatataccaatttgatattgagcgcagtttggaagacagacagaatttgatatttcgagttacttgctcaaaaggaacatacattcggtccctatgtgcggacttgggtaaagcacttggaagctgtgctcatttaactgccttgcggagagactcgataggtgaatactcggtcaatgatgcttggaacttcgatgagcttgaagaacaaatcaccaaggggtatttatgagcatgccagtgagccgagctaggttatatgcggcttgcaaccagtggcatccatgctgccatgtcagtcccaaagctgtcaacgtgggcttcagcgaagagttgcaaatccagttcagttcatcctcaaccttttgtcatatagaggaacacgaagctccgttagttgtatgtgtgttgtgggtttcaattgatctcagtattgaatcgattttggcagtattgatgtataccattgttggtcaggtcttttgattgccttgccatgtaattttgctgggagcatattaaatttataatctaaagactgtgttaaaagtagcgaaatttataatctaatgacgaacacaagctggcgttaagtccacccc

SEQ ID NO: 137036 - DNA, 1062 bp, Zea Mays
cccgcccgtgcagacgcagagacacgaatgcctcctcgagcgggagccatggcggcggcggcggcgagggcaagggcggcgctgctgccctcctccccctccccatcgccgctgttccgcctcccgcgccgcttcctttcactcaccgcgactcgctaccctctctactacgacctcatcgtgcatcgccccgcggaccccaatccccccaaatcctccgccgccggggccgaccggcagccgcagccagcccccgaagagcagacgctcgaccgcgcaaagcgccggtacctccgcaagcgccgcagccgcctactccccgaccctgacgccaccaccaccactaagccctcctccttgtcgtcggagttcgtcgagctcaggccggaggtggtggacttcccgcgcctgcacgcgcgcgaggaggcgctctacttccacgacaccttcgcaatgccgtgggagaaggacaagcactaccgcatgctctaccgcctcgagaagaagtacttcccccaccagtcgctcgacaacgcgttcgtctccgccgacgccgccccggcctccgacgccgacagggggctcgtattctttgacgacgagaagaaggaaaacgagggagaggagcgggcggtcagtgacaagggcgccaacaaaggggaggtgctggagaggaaggtggaggatttcttcaggtctctcaagaagggtcccggccaagtcgacaccaaagccaagagaccgggaacggagccgcagcagcaggtgaagcgcgaagtgcggagggaggaggagcggccgcagccgtacctcgtcactaggaccacggagctgccgccgaggtgggacggccctgctgggaccgtcgtgctcatcgacaagcccaaaggatggacttcgtttactgtctgtggaaagttacggcgcttggtgaaagtacaaaaggtgatatcagggccttttcactgtatctgaatgtagcattagcccttagcattaagtacatgttttgcaatatttgtgtggtctcaggttggacatgctggaactctggacccaatg

SEQ ID NO: 137037 - DNA, 976 bp, Zea Mays
tttagccataacaaacatgttttgcttacaacaatctgctcatttttttcctggcaaatcactcggtgtatcaaaaactttagagctatgtagttgaaagactaatcaacacgcagtttaaccatgagcaagctttgtttaattattacagtctacgagtacttattcaggcagatcactctgaggttgtgcctactgttgggcgctgccagcttgaccttgttggtagctgccactgccagcaggagtaagcacagccagctcatgcttcctaccgttcttgagctctgcagcttcctccatggagatggcatacgagctggcgatgacggcggccggcaagtcgctcaggacggagttcttcccggcgacgtggctgaccatggtgtcagggttcgtctcgaaggcgatgtactggaagccttctccctgcgccttggtggcgacgaggtagccctggggtacgatgagcagctgccccgcacggagcacgtcgtcgaacaccgtggtcccgttgtcgctggcgacctggacccttgcactgcccctgatgccgtacatggcgctgtgggcgttgaagttccagaacggcgacatgatggcgtcctggtacaggtctacccgcaccgcgctcatctgtacgaggttgaggacggggaacttgtggctggtgaggcgtgtgatcctcccagccccagggctgtagacgtcggcctggtccagccgttcgacgctgtgcctcacctccatggcgcagacgttgtgcctgtcgacgtcgcgctggcacgtttggtactggacttgtgacgatgggaacgaaaacgacgacgacgacggcgacggattcagctggtgaaagccgtgctccggctccacgcggacgatctcgcctcgctggtcacgccggctctgcagcttctcggcgacgtgcatgctgacgcccagggcttcgctcaggaaccgggcgtcgatccct

SEQ ID NO: 137038 - DNA, 1582 bp, Zea Mays
agggcattctccggcgccgtcaaccccgcgacgcgcaaaggtgagcttcgacccgaagccgaaccgatcgagaggcccagccgccgcaaccggaggagagagagaggcggatacacaaacacgaaaccctagcaagcaagccctccacgcacagtcaagaagggagggggaggcgatggagtacccggcgacggccgccggatcggggagccacaagtactactacccgcagcagcactcgcactcacagccgcaggcgcttcgccgcccgccgcgccccgccgctcggtgggtcaagcaatggatcccgcaggatctcgcgtcctccggcggcaaatgctcgctcttcaagtgggtcagagaggatgggtacagaaactccaaggacaaccccagagtgttagatgtagaagcccccaagcctgaacccaccacggagatcctcttcctctgcagctacgagaactgcggcaagacctttgttgatgtcagcgcgctccgcaagcatgctagcgtgcacaacgagaagcagtatatatgcaacgagcccaactgtgggaagaaatttgttgatagctccaagttgaagaggcattatcttacccacacaggacaaaaggattttgtctgtccacatccaggctgtggtaaggccttctcattggattttaacctacggtcacacctaaaaacacatgcattggagaattatcacatatgccctttcccagcatgtggcaaaagatttacaagtgacttcaaactaggagcacatgtcaagtcacatgaaaagactggaactcctattgcagtgcagcatgcgccagcgccaccagcagaaaaaccgcgtgtcgccccaaagcctccgactccagcaaccacaagctatgctgatcggccatatgtctgcccctatgaaggttgtgacaaagcatacattcacagttacaaattgaaccttcatctaaaaactcagcaccctgaacacggtcaagaggaaaacggtaaggtcggtgcttctggtgggcagcatgctgcgaacgaacacacttaccagtataactatgccgaggttggcgagattgcaccaaaccccaaaaggagcaagacgaatcatgggcacaaggtccactcatccaaagcctacaatgccaaggtttcgagagcaatgccttctgacattggcgtcaggaaccagtggccaggtaaagctacgtaccaagatgatagtgaagagacggaagaagatggaggcaacaacattgaagatggctggagatatggcaacaatgatgacgatgaggaaacaccagatgaagattgacctttatttaggtttggatatgtagatatatgagggtgatctgttgtcctttagtttcaatgcagtcatggggaagttcaagctttaaccttaggtagtagttcattcagatggtgcatggatatattgtactcagttacctgctcctaaatgctttcactcccctatcttccagagccacatgtattttagatagtttggatatgtttgccttggaataaattttcatttgaaatgttagtatgttactcaactaaa

SEQ ID NO: 137039 - DNA, 1106 bp, Zea Mays
agggcattctccggcgccgtcaaccccgcgacgcgcaaaggtgagcttcgacccgaagccgaaccgatcgagaggcccagccgccgcaaccggaggagagagagaggcggatacacaaacacgaaaccctagcaagcaagccctccacgcacagtcaagaagggagggggaggcgatggagtacccggcgacggccgccggatcggggagccacaagtactactacccgcagcagcactcgcactcacagccgcaggcgcttcgccgcccgccgcgccccgccgctcggtgggtcaagcaatggtgcgttcttaacttccctccctctccctgaaataagataatttccgcttcttctgactggaattaacctgagctaatccattgcgtgcggtggccattggtttcgggtgcgcttcgtttcccaggatcccgcaggatctcgcgtcctccggcggcaaatgctcgctcttcaagtgggtcagagaggatgggtacagaaactccaaggacaaccccagagtgttagatgtagaagcccccaagcctgaacccaccacggagatcctcttcctctgcagctacgagaactgcggcaagacctttgttgatgtcagcgcgctccgcaagcatgctagcgtgcacaacgagaagcagtatatatgcaacgagcccaactgtgggaagaaatttgttgatagctccaagttgaagaggcattatcttacccacacaggacaaaaggattttgtctgtccacatccaggctgtggtaaggccttctcattggattttaacctacggtcacacctaaaaacacatgcattggagaattatcacatatgccctttcccagcatgtggcaaaagatttacaagtgacttcaaactaggagcacatgtcaagtcacatgaaaaggtatgctgctattgtgcttaaacttatgtaatcatcattcaagatgcatttacccttgtggttgattgttaatatcgatattactgttcttctatacgataactaaattacatcctcagtcctagatctccgtgagaaacatgtaaaacattgacaaataactaaactacatcctcaatcctagatcc

SEQ ID NO: 137040 - DNA, 889 bp, Zea Mays
cgcagatccaagcggagaagctgcgtcgtggcctgaccctgtccgtcctctccggtcggcgagagcaagaagagatcccgcgccgtcctcttctccacctccacctccacccatggcggcctccaccttcagcggcgacgagacggcgcccttcttcggcttcctcggcgccgccgccgcgctcgtcttctcctgcatgggcgccgcctacgggacggccaagagcggcgtcggcgtcgcctccatgggcgtcatgcgccccgagctcgtcatgaagtccatcgtccccgtcgtcatggcgggagtactcggcatctacggcctcatcatcgccgtcatcatctccaccgggatcaaccccaaggccaagccctacttcctcttcgacggctacgcgcacctctcctccggactcgcctgcggcctcgctggcctcgctgccggcatggccatcggcatcgtcggagacgccggagttagggcgaatgcacagcagccaaagttgtttgtgggcatgattctgatccttatcttcgcagaagctcttgctctgtacggtctcatcgtcggtatcattctctcatcccgtgcaggccaatctcgcgccgattagaaggcttgatatacgccacactgagtcatctgccattgtattcaaagtgttcttttctcggtgaacaatgtgagggatcatgttgagcctgttccacctttgtaacattatattgctattatgtgaagacaaacctagctagctgttgcagttatgctgttgtacttgtatttgtttgaaaataataggcagcgagccccggatgtgatgaataataagcaagctggactagttgttaatgttttttctttaatgtggattggttttgttatgtgt

SEQ ID NO: 137041 - DNA, 435 bp, Zea Mays
atggcgttcgggctgggcgagcggcgctcggcaagagaaacagagcgcgcagtcagggagagctccgggctgcggcgagctgtagaagaagaaactcggcatggagaacaggagctgggcgcgctagctcacagagggagaaggacgcgcggtcggccgaaggagcagaggagacgcgcggtggaagaaaggtccgagccaggggcgagccgcgtccagcagctagaagaagacggctggcaaagaaacagagaacgagatgagaaatatcaggggataaaaacagaagctaagtacgatggaatgaaagatccggctgaggatatttccaggaaaaataacgcgctaagaatatcccaggaagctgacatgatgagctctagcggcaaaaatctcgtcgtaggaaagtttctagcgtctaggagatgtacgtga

SEQ ID NO: 137042 - DNA, 1561 bp, Zea Mays
attcagtgtagccagcaggtagctgcatcagctagctagctagatagacacttagacaggcataaaaccatctcgggcactcgttccctgcacaagtgtaggagagagctgaggcctgctggccatggacaccaccagcaagaaagcctacggggttgccgtcgtcatacagctcatctacaccggcatgtacgtcgtctccaaggcggcattcgaccatggcatgagcacctacgtgttcatcttctaccgccaggcggccgccactgcgctgttgctccccatagccattgtgcttgaaaggaagaatgcaccacccatgtcattcaggctgtttttgaagctgttcttctatgcattgcttggcaacacattgagcatgaatctgtacaacataagcctcaagtacacctctgcaacagtggcatcggcaacgagcaactctgtccctgtggtcaccttcttcctggcagtcctgttaaggctggaagtggttcggctgagaagcccgtcaggcatggcgaaggcggcgggcgtggcgctgtgcctggccggggtcctgaccatcgcgctgtacactgggccgtcgatgagcccggtgaaccaccaccgcgccttcgcggcgcaccagcagcacccccatccccatgccgatggcggcggcggcggcaaggggacgtggatcaagggcacgttcctgatgctgctgtccaacacgacgtggtccctctggatcgtgctgcaggcgtcgctgctcaaggagtaccccaacaagctgctgtccacgctggtgcagtgcgcgctcagcaccgcccagtccttcctcctcgccgtcgccgtcgagcgggaccccgccgcctggaagctgcagctcgacgtcggcctcctcgccgtcgcctactccggtctggtggtgacgggcgtgtcgttctacctgcaggcgtggtgcatcgagaagcgcgggcccgtgttcctggccatgtccaacccgctgggcctgctgctcaccatcttctgctcctccttcttcctcggcgagatcgtgcgcctgggcagcctcctcggcagcggcctcctcgtcggagggctctacagcgtcctctggggcaagagcaaggaccacctccaccaggagcatcaagacgacgaagagaagcagcagcagcagccgagcgcagcaggcggagacaaccagaagcagctcaaggagcagttcgcaatggagccatcatcgccactgcgccatcagtccggatgatgaggaatggtctacgcgtgtatgtgtgtgagtaggttctacgtacgtgcctatgtcttaatgtctatgtggtgggtctgggcgtatccaactccgatgcacatggatggtctcttgttcgcccgatgacgatcgtcctctcctctcttctggacatgcatattgcttttctaattgggccaaaattgtagcagctagctagcccactggccgagcacatagcccatctgggacgtatcgatgccgcgtcgcttgtatgtgccggtacattatcacaatagtcaaaaattaatataaaacaaa

SEQ ID NO: 137043 - DNA, 85 bp, Zea Mays
ccccagtgtcacctagggtttctctcaaaatgccaaaccaagaaccatcattttatgtgaaccaaattaagcatgagcatcaaat

SEQ ID NO: 137044 - DNA, 1782 bp, Zea Mays
agatcccttctcaatcgcatctgggtctggcagtcttctcgcggttgcaggccacaaacaactgctcctcctgcattccccctttccccttccgtccgctgcattcctgctctcttgctctcctcgctctcagaccacagttgccgccgccgccgccctaagccagggtgctgaggctttcgttggcctcttcgccggcagcgagcacccaccagttctgtagaaatggctgatggtgaggacatccagcctcttgtctgcgacaatggcaccggaatggtcaaggctggttttgccggcgatgatgcaccaagggctgtattccctagcatcgttgggcgtcctcgtcacaccggtgtcatggtagggatggggcagaaggatgcatatgttggtgatgaggcacagtccaagagaggtattctcacgctcaagtacccgattgagcacggtattgtaagcaactgggatgacatggagaaaatctggcatcacactttctacaatgagctccgtgttgccccggaggagcaccctgtgttgcttactgaggctcctttgaacccaaaggccaacagggagaagatgacccagattatgttcgagactttcaatgttcctgccatgtacgttgcaattcaagcagtcctgtcactctatgctagtggccgtactactggtattgttctcgattctggtgatggtgtgagccatactgtgcccatttatgaaggatatgcccttcctcatgctattctacgtctggatcttgctggtcgggacctcaccgactcgctcatgaaaattctcactgagaggggttattccttcacaacctccgccgagcgagaaattgtaagggacatcaaggagaagcttgcgtatatagctcttgactacgagcaagagttggagactgccaagaacagctcctcagttgaaaagagctatgagctacctgatggccaagtaatcaccatcggtgcagagagattcaggtgccccgaggtcctcttccagccatccatgattggtatggaggctgctggaatccatgagacaacatacaattcaatcatgaagtgtgatgtggatatcaggaaggacctctacggcaacattgtgctcagtggaggttcgactatgttccccggtatcgctgatcgtatgagcaaggagatcacttcccttgcaccaagcagcatgaagatcaaggtcgtcgcaccacctgagaggaagtacagtgtctggataggagggtcgatcctagcctcgctcagcactttccaacagatgtggatatccaaggaggagtatgatgagtctggcccggcaatcgtccacaggaagtgcttctaggttccgcaagttcctcattgttatctagtctcaagttatgcccccgtcatttctcgagatatgtgtggcagatttgcctgcgacgtttattttcatcggacctgagtcttctcggggttagcagctacctttgaatgttgtggctccctgtgcgagcgtgctgtgtcgtatcacctggtttgtgagattagttgttgtcaaacttgcttggtttgattggttgtgcgtttaagagctgatagttatatacatatattgctttgctataccgccgctatatctatgtagcctttatgtatgtatctggattctgaaatgcaagaatgaacttcgagcagcctttgtgttgccgatattttgtggtgccgttattgaacagtgtgccaactgaagattatacgaccgtggaagcctggtttggat

SEQ ID NO: 137045 - DNA, 1786 bp, Zea Mays
cagatcccttctcaatcgcatctgggtctggcagtcttctcgcggttgcaggccacaaacaactgctcctcctgcattccccctttccccttccgtccgctgcattcctgctctcttgctctcctcgctctcagaccacagttgccgccgccgccgccctaagccagggtgctgaggctttcgttggcctcttcgccggcagcgagcacccaccagcagttctgtagaaatggctgatggtgaggacatccagcctcttgtctgcgacaatggcaccggaatggtcaaggctggttttgccggcgatgatgcaccaagggctgtattccctagcatcgttgggcgtcctcgtcacaccggtgtcatggtagggatggggcagaaggatgcatatgttggtgatgaggcacagtccaagagaggtattctcacgctcaagtacccgattgagcacggtattgtaagcaactgggatgacatggagaaaatctggcatcacactttctacaatgagctccgtgttgccccggaggagcaccctgtgttgcttactgaggctcctttgaacccaaaggccaacagggagaagatgacccagattatgttcgagactttcaatgttcctgccatgtacgttgcaattcaagcagtcctgtcactctatgctagtggccgtactactggtattgttctcgattctggtgatggtgtgagccatactgtgcccatttatgaaggatatgcccttcctcatgctattctacgtctggatcttgctggtcgggacctcaccgactcgctcatgaaaattctcactgagaggggttattccttcacaacctccgccgagcgagaaattgtaagggacatcaaggagaagcttgcgtatatagctcttgactacgagcaagagttggagactgccaagaacagctcctcagttgaaaagagctatgagctacctgatggccaagtaatcaccatcggtgcagagagattcaggtgccccgaggtcctcttccagccatccatgattggtatggaggctgctggaatccatgagacaacatacaattcaatcatgaagtgtgatgtggatatcaggaaggacctctacggcaacattgtgctcagtggaggttcgactatgttccccggtatcgctgatcgtatgagcaaggagatcacttcccttgcaccaagcagcatgaagatcaaggtcgtcgcaccacctgagaggaagtacagtgtctggataggagggtcgatcctagcctcgctcagcactttccaacagatgtggatatccaaggaggagtatgatgagtctggcccggcaatcgtccacaggaagtgcttctaggttccgcaagttcctcattgttatctagtctcaagttatgcccccgtcatttctcgagatatgtgtggcagatttgcctgcgacgtttattttcatcggacctgagtcttctcggggttagcagctacctttgaatgttgtggctccctgtgcgagcgtgctgtgtcgtatcacctggtttgtgagattagttgttgtcaaacttgcttggtttgattggttgtgcgtttaagagctgatagttatatacatatattgctttgctataccgccgctatatctatgtagcctttatgtatgtatctggattctgaaatgcaagaatgaacttcgagcagcctttgtgttgccgatattttgtggtgccgttattgaacagtgtgccaactgaagattatacgaccgtggaagcctggtttggat

SEQ ID NO: 137046 - DNA, 1635 bp, Zea Mays
cccctcccctctcggctgcttgctgcggcggcgcgtcggcccacgggtgaagaggggagagaaatggctgatggtgaggacatccagcctcttgtctgcgacaatggcaccggaatggtcaaggctggttttgccggcgatgatgcaccaagggctgtattccctagcatcgttgggcgtcctcgtcacaccggtgtcatggtagggatggggcagaaggatgcatatgttggtgatgaggcacagtccaagagaggtattctcacgctcaagtacccgattgagcacggtattgtaagcaactgggatgacatggagaaaatctggcatcacactttctacaatgagctccgtgttgccccggaggagcaccctgtgttgcttactgaggctcctttgaacccaaaggccaacagggagaagatgacccagattatgttcgagactttcaatgttcctgccatgtacgttgcaattcaagcagtcctgtcactctatgctagtggccgtactactggtattgttctcgattctggtgatggtgtgagccatactgtgcccatttatgaaggatatgcccttcctcatgctattctacgtctggatcttgctggtcgggacctcaccgactcgctcatgaaaattctcactgagaggggttattccttcacaacctccgccgagcgagaaattgtaagggacatcaaggagaagcttgcgtatatagctcttgactacgagcaagagttggagactgccaagaacagctcctcagttgaaaagagctatgagctacctgatggccaagtaatcaccatcggtgcagagagattcaggtgccccgaggtcctcttccagccatccatgattggtatggaggctgctggaatccatgagacaacatacaattcaatcatgaagtgtgatgtggatatcaggaaggacctctacggcaacattgtgctcagtggaggttcgactatgttccccggtatcgctgatcgtatgagcaaggagatcacttcccttgcaccaagcagcatgaagatcaaggtcgtcgcaccacctgagaggaagtacagtgtctggataggagggtcgatcctagcctcgctcagcactttccaacaggtatgcggttgtttatatctactttcagctgctgcacttcatttgttttaactcagtaacatggttgaaatgataacacttccgaattctgttgtgatgtggcattgatgtaccagatgtggatatccaaggaggagtatgatgagtctggcccggcaatcgtccacaggaagtgcttctaggttccgcaagttcctcattgttatctagtctcaagttatgcccccgtcatttctcgagatatgtgtggcagatttgcctgcgacgtttattttcatcggacctgagtcttctcggggttagcagctacctttgaatgttgtggctccctgtgcgagcgtgctgtgtcgtatcacctggtttgtgagattagttgttgtcaaacttgcttggtttgattggttgtgcgtttaagagctgatagttatatacatatattgctttgctataccgccgctatatctatgtagcctttatgtatgtatctggattctgaaatgcaag

SEQ ID NO: 137047 - DNA, 1482 bp, Zea Mays
cccctcccctctcggctgcttgctgcggcggcgcgtcggcccacgggtgaagaggggagagaaatggctgatggtgaggacatccagcctcttgtctgcgacaatggcaccggaatggtcaaggctggttttgccggcgatgatgcaccaagggctgtattccctagcatcgttgggcgtcctcgtcacaccggtgtcatggtagggatggggcagaaggatgcatatgttggtgatgaggcacagtccaagagaggtattctcacgctcaagtacccgattgagcacggtattgtaagcaactgggatgacatggagaaaatctggcatcacactttctacaatgagctccgtgttgccccggaggagcaccctgtgttgcttactgaggctcctttgaacccaaaggccaacagggagaagatgacccagattatgttcgagactttcaatgttcctgccatgtacgttgcaattcaagcagtcctgtcactctatgctagtggccgtactactggtattgttctcgattctggtgatggtgtgagccatactgtgcccatttatgaaggatatgcccttcctcatgctattctacgtctggatcttgctggtcgggacctcaccgactcgctcatgaaaattctcactgagaggggttattccttcacaacctccgccgagcgagaaattgtaagggacatcaaggagaagcttgcgtatatagctcttgactacgagcaagagttggagactgccaagaacagctcctcagttgaaaagagctatgagctacctgatggccaagtaatcaccatcggtgcagagagattcaggtgccccgaggtcctcttccagccatccatgattggtatggaggctgctggaatccatgagacaacatacaattcaatcatgaagtgtgatgtggatatcaggaaggacctctacggcaacattgtgctcagtggaggttcgactatgttccccggtatcgctgatcgtatgagcaaggagatcacttcccttgcaccaagcagcatgaagatcaaggtcgtcgcaccacctgagaggaagtacagtgtctggataggagggtcgatcctagcctcgctcagcactttccaacagatgtggatatccaaggaggagtatgatgagtctggcccggcaatcgtccacaggaagtgcttctaggttccgcaagttcctcattgttatctagtctcaagttatgcccccgtcatttctcgagatatgtgtggcagatttgcctgcgacgtttattttcatcggacctgagtcttctcggggttagcagctacctttgaatgttgtggctccctgtgcgagcgtgctgtgtcgtatcacctggtttgtgagattagttgttgtcaaacttgcttggtttgattggttgtgcgtttaagagctgatagttatatacatatattgctttgctataccgccgctatatctatg

SEQ ID NO: 137048 - DNA, 1579 bp, Zea Mays
tctcgtcgcgacgactgggcgagaccgccgccgccgccgccgcctgagaaatggctgatggtgaggacatccagcctcttgtctgcgacaatggcactggaatggtcaaggctggttttgctggcgacgatgcaccaagggctgttttccctagtattgttggccgtcctcgccacactggtgttatggtagggatgggacagaaggatgcgtatgttggcgacgaggcacagtccaagagaggtattctcacgctcaagtatccgatcgagcatggtattgtgagcaactgggatgacatggagaaaatctggcatcacactttctacaacgagcttcgtgttgccccagaggagcaccctgtgttgctcactgaggctcctttgaacccaaaggccaacagggagaagatgacccagattatgttcgagactttcaatgttcctgccatgtacgttgcaattcaagcagtgctgtcactctatgccagtggacgtactactggtattgttctcgactctggtgatggtgtgagtcacactgtgcccatttatgaaggatatgcccttccccatgccattcttcgtctggatcttgctggtcgggacctcacagactccctcatgaaaattctcactgagaggggttattccttcacaacctctgccgagcgagaaattgtgagggacatcaaggagaagcttgcatatatagctcttgactatgagcaagagttggagactgccaagaacagctcctcagttgaaaagagctatgagctgcctgatggccaagtaatcaccatcggcgcagagagattcaggtgccccgaggtcctcttccagccatccatgattggtatggaggctgctggaatccatgagacaacatacaattcaatcatgaagtgtgatgtggatatcaggaaggacctctacggcaacattgtgctcagtggaggttcgactatgttccccggtatcgctgatcggatgagcaaggagatcacttcccttgcaccaagcagcatgaagatcaaggtcgtcgcgccacctgagaggaagtacagtgtctggataggagggtcgatcctagcctcgctcagcactttccaacagatgtggatatcaaaggaggagtacgatgagtctggcccggcaattgttcacaggaagtgcttctaggtttctgccaagttcgtcaagtgcttttagggttcgccatgttcatcatcgctacctagtcttaagttatgcccccttcatttgctgagatatgtgtggcagatttgcatcgttttggtatttcgtggctccatgtgtgagcatgctgtgtcctataacctggtttatgagatgagttgttaaacttgcttggcttgattggttttacctgtaagagctgatagttatataaattgcttgtacttgtttgcatccagaacatccgtgcaagtatgaatggccctgtacatgggctgggttttctggcttatatatactatacggcgtttgtcaactgtgataggaatggtgtacagtgaaccctagctgctacagtaccgggtgaaataggaacc

SEQ ID NO: 137049 - DNA, 1599 bp, Zea Mays
agtcaaggagaccgtgcctacgcttttcttctccctccattcattcacacaccacacctcccgaactccgaactacaagtttcgcttctcgtcgcgacgactgggcgagaccgccgccgccgccgccgcctgagttctttagaaatggctgatggtgaggacatccagcctcttgtctgcgacaatggcactggaatggtcaaggctggttttgctggcgacgatgcaccaagggctgttttccctagtattgttggccgtcctcgccacactggtgttatggtagggatgggacagaaggatgcgtatgttggcgacgaggcacagtccaagagaggtattctcacgctcaagtatccgatcgagcatggtattgtgagcaactgggatgacatggagaaaatctggcatcacactttctacaacgagcttcgtgttgccccagaggagcaccctgtgttgctcactgaggctcctttgaacccaaaggccaacagggagaagatgacccagattatgttcgagactttcaatgttcctgccatgtacgttgcaattcaagcagtgctgtcactctatgccagtggacgtactactggtattgttctcgactctggtgatggtgtgagtcacactgtgcccatttatgaaggatatgcccttccccatgccattcttcgtctggatcttgctggtcgggacctcacagactccctcatgaaaattctcactgagaggggttattccttcacaacctctgccgagcgagaaattgtgagggacatcaaggagaagcttgcatatatagctcttgactatgagcaagagttggagactgccaagaacagctcctcagttgaaaagagctatgagctgcctgatggccaagtaatcaccatcggcgcagagagattcaggtgccccgaggtcctcttccagccatccatgattggtatggaggctgctggaatccatgagacaacatacaattcaatcatgaagtgtgatgtggatatcaggaaggacctctacggcaacattgtgctcagtggaggttcgactatgttccccggtatcgctgatcggatgagcaaggagatcacttcccttgcaccaagcagcatgaagatcaaggtcgtcgcgccacctgagaggaagtacagtgtctggataggagggtcgatcctagcctcgctcagcactttccaacagatgtggatatcaaaggaggagtacgatgagtctggcccggcaattgttcacaggaagtgcttctaggtttctgccaagttcgtcaagtgcttttagggttcgccatgttcatcatcgctacctagtcttaagttatgcccccttcatttgctgagatatgtgtggcagatttgcatcgttttggtatttcgtggctccatgtgtgagcatgctgtgtcctataacctggtttatgagatgagttgttaaacttgcttggcttgattggttttacctgtaagagctgatagttatataaattgcttgtacttgtttgcatccagaacatccgtgcaagtatgaatggccctgtacatgggctgggttttctggcttatatatactata

SEQ ID NO: 137050 - DNA, 1834 bp, Zea Mays
aaggagaccgtgcctacgcttttcttctccctccattcattcacacaccacacctcccgaactccgaactacaagtttcgcttctcgtcgcgacgactgggcgagaccgccgccgccgccgccgcctgagcggcgtcgctcctctgcggggcgacacgtgcggaaccagcgccgccgccgcaagagttggcccgcctcgttctttacaatatcgccttcgcctgagcacgcggccggaggcccgcgtcggtgcgaggatggcggcggcgaggtctctcagcttttctcgcccgttctcttaagcgtacttgcctcgtgcctgcgccagctaggacggttccctggagaagctgacatcgtcgtcgctgtcgctggcggggaggttgtctggccggacgggggccccgcggcggcgccggcctcgatctgttctttagaaatggctgatggtgaggacatccagcctcttgtctgcgacaatggcactggaatggtcaaggctggttttgctggcgacgatgcaccaagggctgttttccctagtattgttggccgtcctcgccacactggtgttatggtagggatgggacagaaggatgcgtatgttggcgacgaggcacagtccaagagaggtattctcacgctcaagtatccgatcgagcatggtattgtgagcaactgggatgacatggagaaaatctggcatcacactttctacaacgagcttcgtgttgccccagaggagcaccctgtgttgctcactgaggctcctttgaacccaaaggccaacagggagaagatgacccagattatgttcgagactttcaatgttcctgccatgtacgttgcaattcaagcagtgctgtcactctatgccagtggacgtactactggtattgttctcgactctggtgatggtgtgagtcacactgtgcccatttatgaaggatatgcccttccccatgccattcttcgtctggatcttgctggtcgggacctcacagactccctcatgaaaattctcactgagaggggttattccttcacaacctctgccgagcgagaaattgtgagggacatcaaggagaagcttgcatatatagctcttgactatgagcaagagttggagactgccaagaacagctcctcagttgaaaagagctatgagctgcctgatggccaagtaatcaccatcggcgcagagagattcaggtgccccgaggtcctcttccagccatccatgattggtatggaggctgctggaatccatgagacaacatacaattcaatcatgaagtgtgatgtggatatcaggaaggacctctacggcaacattgtgctcagtggaggttcgactatgttccccggtatcgctgatcggatgagcaaggagatcacttcccttgcaccaagcagcatgaagatcaaggtcgtcgcgccacctgagaggaagtacagtgtctggataggagggtcgatcctagcctcgctcagcactttccaacagatgtggatatcaaaggaggagtacgatgagtctggcccggcaattgttcacaggaagtgcttctaggtttctgccaagttcgtcaagtgcttttagggttcgccatgttcatcatcgctacctagtcttaagttatgcccccttcatttgctgagatatgtgtggcagatttgcatcgttttggtatttcgtggctccatgtgtgagcatgctgtgtcctataacctggtttatgagatgagttgttaaacttgcttggcttgattggttttacctgtaagagctgatagttatataaattgcttgtacttgtttgcatccagaaca

SEQ ID NO: 137051 - DNA, 1173 bp, Zea Mays
ggcgtcgctcctctgcggggcgacacttctttagaaatggctgatggtgaggacatccagcctcttgtctgcgacaatggcactggaatggtcaaggctggttttgctggcgacgatgcaccaagggctgttttccctagtattgttggccgtcctcgccacactggtgttatggtagggatgggacagaaggatgcgtatgttggcgacgaggcacagtccaagagaggtattctcacgctcaagtatccgatcgagcatggtattgtgagcaactgggatgacatggagaaaatctggcatcacactttctacaacgagcttcgtgttgccccagaggagcaccctgtgttgctcactgaggctcctttgaacccaaaggccaacagggagaagatgacccagattatgttcgagactttcaatgttcctgccatgtacgttgcaattcaagcagtgctgtcactctatgccagtggacgtactactggtattgttctcgactctggtgatggtgtgagtcacactgtgcccatttatgaaggatatgcccttccccatgccattcttcgtctggatcttgctggtcgggacctcacagactccctcatgaaaattctcactgagaggggttattccttcacaacctctgccgagcgagaaattgtgagggacatcaaggagaagcttgcatatatagctcttgactatgagcaagagttggagactgccaagaacagctcctcagttgaaaagagctatgagctgcctgatggccaagtaatcaccatcggcgcagagagattcaggtgccccgaggtcctcttccagccatccatgattggtatggaggctgctggaatccatgagacaacatacaattcaatcatgaagtgtgatgtggatatcaggaaggacctctacggcaacattgtgctcagtggaggttcgactatgttccccggtatcgctgatcggatgagcaaggagatcacttcccttgcaccaagcagcatgaagatcaaggtcgtcgcgccacctgagaggaagtacagtgtctggataggagggtcgatcctagcctcgctcagcactttccaacagatgtggatatcaaaggaggagtacgatgagtctggcccggcaattgttcacaggaagtgcttctaggtt

SEQ ID NO: 137052 - DNA, 761 bp, Zea Mays
agtcaaggagaccgtgcctacgcttttcttctccctccattcattcacacaccacacctcccgaactccgaactacaagtttcgcttctcgtcgcgacgactgggcgagaccgccgccgccgccgccgcctgaggtattgccaccccttctttcccctcccttcctttcatgctgtgcgaagctgagcatcggaaccctgacctaaagctatttagcggcgtcgctcctctgcggggcgacacgtgcggaaccagcgccgccgccgcaagagttggcccgcctcgttctttacaatatcgccttcgcctgagcacgcggccggaggcccgcgtcggtgcgaggatggcggcggcgaggtctctcagcttttctcgcccgttctcttaagcgtacttgcctcgtgcctgcgccagctaggacggttccctggagaagctgacatcgtcgtcgctgtcgctggcggggaggttgtctggccggacgggggccccgcggcggcgccggcctcgatctggtgcgctatggccggatccgtggtgtgttgtggtgtgggtggagattcatttgtgggggcacggatccgccgcgctccatgagtccggatctgcactccttcgagagttttttgcagaaaaatattgggtgtacatccatgtcccttttactggatccgaaccctgagtgtgatgtcagaaactgttgtctttgtgttgtctttgtgtgaacttctctgtataaattgaatttactgctttcagtt

SEQ ID NO: 137053 - DNA, 976 bp, Zea Mays
atacgacattcaggccgccaaaacaaaagctatagtacgcttttgttcagcacttcagctgcaaggaaaagaaaagggcatcgcccttgctcactcttgcagccagccagaggccagagccaccgccggccatggccgggcaatggcacccccatacatgcatgcatgagtggtcgagctgtgagtagtataagttaccccgccctctccatccaggcatccatccgtcaccataccatcgagccaattattaagagatcgagctccatccatccatcgtcataacagtgagtagtaagctcgcttgcattgcataatggcgcggtggtcgtcggcagcgtcggccgccttgctgggcgcgaccctgctttacagcgtgatggctctgacgacggcgttggcgcagcagccgggcaacaacatgcaagtgatcaacatggacggccgccgcaacagcaagttcacctgcgccgacaccaagaaggactcgaagcggcccgggtgcagggccacctgccccacccgctgccccaagaagtgcctcgtcctctgcccaacatgcaagaccttctgcttgtgcgacttctaccccggcgtgtcgtgcggcgacccgcgcttcacgggcgccgacggcaacaccttctacttccacggcaagaagggccaggacttctgcatcctcagcgacgccggcctgcacatcaacgcgcacttcatcggcagccacaactcggccctgaaccgcgacttcacctggatccaggcgctgggcatccgcttcgcgcaccacagcctctacgtcggcgccgccagggccgccgcgctcaacgtcaccgccaacatgcccctcatgggaggcgccgacaccttccgctcctcgggactctttgaggccgactgcgcggtagcaaggttcggtcgaaacaccgccggcaccggcatcgccatggtcactgacggcgccaagtacctgtag

SEQ ID NO: 137054 - DNA, 109 bp, Zea Mays
agggtttttatgatgatgaatacgatgtctctcacgtggcttcgggtttttatggtaaccacctagattcacgcacatttgttacggggatgtcaaacgtgatatcacg

SEQ ID NO: 137055 - DNA, 208 bp, Zea Mays
tatttttatttcttatttcaaatccaattcaaaccatgtttaaattctaaatttcaaatttatgcacaagaaaaactctacatgatgcacaatttctacataatatttatttattcagttattttatttaggcttggttttcaacatgaagtacacacaccacattattattttgagtgttaagttggattaaaggtatattaaaaaa

SEQ ID NO: 137056 - DNA, 162 bp, Zea Mays
ctctctcgctgccccagattcgctgcttcgtgtgactctgcctgtgccgtcactcatcgtcgtgccttgcctgctgcctgtgtgctcagctcgcatagagcacatcccttgattccctatcgacgctttcgttttccccttcctagccgcaatccggagccc

SEQ ID NO: 137057 - DNA, 1225 bp, Zea Mays
atcaatgttaactgtcataatctctattatgttttggaaccttggttgtgtgaaccagaagaaatgcagattacataagctagataaatcaattcaagatacaaagaatattgaggagaggagcttggagcaacatgctatgaacaaattggttgaaagagcatacagaaaactcaagggtgggcggattggctctagtcacaaggctggtgtcagtaaatctgccaacaaagctgcaaaacagctagccttggcttttgccaaacgcactcttgttcgatgccacaaatttgatgaaacagggaaaagctgcttcagcgagccttctctttggagtatcctgtctgcacccttgccaagcagtgattcaaaatgcacagagggtgtagagaggctgaagcatcaaaagcttgacagaactccattcgaccaaggtggtgcaaaatggaaaaaggtcgacagggaacgggaccacaacagggatgcatccgcgaagggctccggattgaaatcgggacgtcattcatcaggtggtagcggcaggagcggcgagcgcaaaaacaagacaaagccaaagcaaaagcttgcacagctatcaacctcggggaacgtgctgggtagagtcgttgagccattttcgtctccaacagtgcaggagccccctgaacctgcaagcgagaaaaagacccagcatccaactaggggtgcttccagcagcgctgcccagcggcttaccgtggacgctggactgccagtgttgcctgggttagatgacatattggacgtcccggaagggcttgacgggcagggcaacgatatcagctcgtggtttacggatggccttgacgactcgttgcaagacattgatctttctggcgccctggaaatcccagacgatgacctcacccagctgggatttatgtaaggagaaggaagcaatcgttgtttgtcctgtgcatatacatgtctttccttcacctaatgtatggtagcgctgatccattgatctccctgccacaacctggtaggtcagaggttgtaatctgtaattaggctgttggattcgtgtcgatattcagtgtctgctggcatggactggatagttgcagatgaggcgaggtagcagcaacaagaacatgctgagatttgttaatgttatcctgtagtttgtgcttctgcttcctggattatcctgtcggaatccgacagtacgtgtctttgaaaa

SEQ ID NO: 137058 - DNA, 3071 bp, Zea Mays
tcatctaatcgccctcctcttcttcccctttttgcttcctctccacgagcgcgcgagcgcgacgacgtcagcaacaacgcagactaccccgcagtcgccgagggagcaattccgcccccaattggccgccggaacccttcttccttcccctcccacggagtcgctgccgcgctcagatagcccagccgagccggcgacgacgaggacaggaccctagccctaataatccggtcccccacatggcggggaccttccgcgagggcgcggggccgggggacgcccatgcgcccccgcccacgcctacgccgcccctctcgcagttcctcgcgctggatgcgctcccgtcctggggctccgaccccaagcagccgcactggcgccaccccgagctccgccgggcgctcgcctccgacgaccaagccgacgagctcaggcggatccgtgccagcgtccaggactccgcgggcaaggccaaggagaaggtcaggtcgctgcacgaggcaatccagaagctcgacaagtacaagaacattgtcacccgcaaacgccagcgcgccacagaggcgtcggccgcgcccgacaagctgggccctgccggcgcctcctcctccggcgcgctcaggatgggcgcacagaacaactctgctgtccttagcaagcgcgtgcgctcgtcgctcgccgatgcccgggtggaagggcgtggtagtgttcctacaaggcaaggccctttgattagtactgagaaaaattcacctctagagaaggaaaagagcagcgcaagaatatctgctacagtttctggcctttctgatgacaaattgcggggtctatctactggcagtgaagggtgggaaaaaaagatgaagcgtaagcgctctgttggaacaatgctcagcagaggcagtgatgtggatcgagatgtcaaatccgcgggccagcatagaccagccaatgaagtacgcccacggtctagtgatggccttgggtatagacatggagtttcggccggagcactagtaggtaacaagttggatggcacttctcagcagaataacattgtatcccgcattctgtccaagtcagatgccgattatgtggctcagccaaatgaaagaagagaacgtcatcctggagttgaaaaagaaaggaccacattaaaaggaaacaaggcaaattcttctgatgatatgcaaaacgtaagcttaaacccattgcccaaggctaaagcatgcagggcaccaagaactagttcacttgctatgaactcgtcttctaatttccaacgttcaactggaggaagtgatgagtgggaagaaacaccttacccaaataaagcctcgcctttgggaggcatgacaaatcgcaaacgttccacacattcaaatgcttcctcacctcctattgcctgggttgggcaacgcccacagaagatgtcaaggacaagaagagcaaatgttgtttctccagtgtcaaattttgatgaagcgttatctgaaggatcaccacttgacactgccactagatcggcacctatagagtctggcagtgtcttgctgacaaagaacacatcaacaaccaaaatggataacatctcatctcctgctgggttgtcagaaagtgagggatcggctgtgaatgaaagcaagtccaaggagaaagccatgcatagtggtgaagtcgggaacgagggtgcaaatgcagcccataatgcaatgggattgatattttcatcaaataaaaataggattcctttgaaagaggagcttgaagatggcagtattcgtcgtcaagggaggagtggaaggggagctatgcatgtcaaggggtgttctcccataccaaaagaaaaactggacactgcagaaacaagaaagccaacaaaaggtggaagacctggatctgaaaagaacgagagtaagttggggcggccaccaatgaaaaaagcctctgaccgtaaagcttcatcctggcattcacaagctctaaatagtgatattacagacataacaggtgaaccagaagatgaccaagaggagcttttagctgctgttaatgctgctcgcagcgctattgttagtgcctattctggtcctttttggaagaaaatggagcccatgctaacttttatgagctcagaaaatttatctttcttaaaaaaccagatcaaccttgttgaagagcttgaagtgagcatgtcctgcatgtctgacggtgaacatgatattatagcatcagttggtcacagaagaatgtcaaagatggaggagcattcatctcagggactggttccatctaatttttctccctcatctcagcaaagtaaaactaatggagtcggagaaaaaggattagtcggctgtttctctcatggtgacgaaagtcgtactggaccacaaaagctggaagctgataaatggtttaatgaaatggctccaatgacacacagactcctttcggctttaattatggaagatgacctacctgattccaatggggtgcaaagagatatacttgttgaatttccaaatagccacaatccttacactgtcaacagatacttagaaaatgaacttcaagctagtgccataacatctaattttgggctgagcgtggatttcgtgcactcaaacagtacttctgtggtacatcagagcatgtgcaatggttttacagcttcaagcaatttcattaattcaaacagtgaaaattcagttcatagtgagaatttatcagacggactaaattttacagtatacccagaaagtggccctttgcatgacttgataccactgactccacggcaatgtcaaaatccagggaaagatttccctttgtctccatatgagtatcaatatgggcagatgtctatggaagataagattttaattgagctgcaaagtattggcatttgtccagagacagtgccaaagctagatgacggagaagatgaggacattaataaaatgatttcagagctgaggaaaaggctgcatgatcaggtgaaccagaagaaatgcagattacataagctagataaatcaattcaagatacaaagaatattgaggagaga

SEQ ID NO: 137059 - DNA, 168 bp, Zea Mays
ttttttttcttttctatttctattttcctttcttatttcaaatacaaatcaaaccaagtttaaattctaaatttcaaatttatgcacaagcaaaactccagcatgggatgtaagtataattttatatattggtacccaacttatttaaataaatgctcacatgcgtga

SEQ ID NO: 137060 - DNA, 99 bp, Zea Mays
ctagtctgctagttgccttgctgtgttgccttgttgggcttggacttggggcctggtgcactaccgtgctgggcttagtggccggctcggcctcaactt

SEQ ID NO: 137061 - DNA, 621 bp, Zea Mays
ttttgtttttgtgatccactgcccatgtatcaagaaggcaaactagattctgatgtatgcatattaaaattgccgatatcaaataaatcatccatgagttgtcctagagtttccagtgtgaaggatatgcattgaatcaattttctatgtttttcagaatgatggacaaggtacaccaccacgacaataggatttttttacaccctggctatcttgttttaattcatcctttctgcgctccaattattttggtgaatcttagcatagaacttgaccttatattattttgtatgtttggttaacatgggataatatggcatgagatgtatttatgaacattgatatcgttttttatgcttactgacagaatgcatatggtctgcaaatggagaatttgctattgctcaatgaagtggcggcatgctccaaaatcctagtgagacctctgcacctttggtcagatcccaggcctaggatgtccatgttgtgtgtatgtaccaacagctaaaatgtaaacacgacattatcatagttgagtacatgaataattatctattatatcttattgtaaaatctgaaatagttcttctgtagatggttagcttgcattttatgctacaa

SEQ ID NO: 137062 - DNA, 2673 bp, Zea Mays
acagcaagtagatggacacgcagcacggcaacttttattgcttgtcccgtcgtgcctgcctgccgcgccctcctcatcctcctcctccctcttcctcttgcgcgtcgccaccaccaaattctaaaccgcaatcccgccgcaatccgctccccgcgcgcgaaatcggctcacgcgtcctccgcttttcggctcacgggtcgctgaattgctctttctgctcgctcgctcgctgacttccactcaactgctcgcctggccgcctcctgctagtgcttcaatcgcccggcccccactcgcttgaaggcttccggaagctcgatcccttccgctcgctagctggctgcacagatcttcctcccgaggttcctctttctaccgtcgagtcgaatcggatcaccggagctatcggattcctcaaaatccgagactttggccgcccgccaccccgtctcagtggcggagctgctccgtctggtccgcctctgcctctctggcttgggggcgctctagggttcccgcgcgcgcgccccgtgatgctcgggaatggcgcttaaggccacggcgcagggcgccgcggaggcggccgtagcggccatcggccggggctacgacgttgtttccgacgtccgcctcaagtactgcaagggcaagctcgcggacccggacgcgcgactcattgacgtttcccgcgatggggtccaggacgtcctgctccccggcgggatcaaggtcgctgccgtccccaagtccgtcacgtgtgacaagggcgagcgcacgcggttccgctccgacgtcctctcctttcagcagatgtcagagctgttcaaccgggagctatcgttgaccgggaaaattccctccggcatgttcaatagcatgtttgatttttccgggtgctggcagaaagatgcagctaacaccaagtcacttgcttttgatggttggtacatttcgctatatacgctcgcactgtcaaaatctcgtattctactccgggatcatgttactcaggcagttccttcaacctgggaccctgctgctttggcaaggtttattgataagtttggaacacacatagttgtcggtgtaaaaatgggagggaaagatgttatatatttgaaacaacaacattcgtcaagcttgcaaccagctgctgtgcagaaacgactcaaggacatgtcggacatgagatttctggatggaaatggacagtatgacatgaacaacaagcatgtgcacgggaaggacaagcatgatgcaagagatcaacggctaagatttgtggaatcaagtccgtcaagttcatactgttcaaaggaggacttggtgatggtggttaagcggagaggtggaaaggaatgggacaaagatatgcctcacagtgaatggataaacactgttcaatcagaacctgatgttatctcaatgtcctttttacctattacttcattgttgagcggagtacctggctgtgggtttctgaatcatgcaattaatctatacctgcgctataagcctccgattgaagaactacatcaatttttggagttccaactaccaagacaatgggcacctgtgtacagtgaccaccctcttggtcctcagaggaggaaacagagcagtgcatctttgcccttaagttttatgggaccaaggctctatgtctgcactaatatggttgatgtgggtgaaagacctgttactgggatccgattgtatcttgaggggaagaagagcaacatgctggcaatccaccttcagcatctatgctcgcttcctcagatcctgcagctccaggatgatccatacaaccaccggtatccagaaccagaaccagaaccatatgaccgcaagtatgtggaaccatttggatcctggaagcgtttctcacatgtttacacggcaccagtggagtcggatgacgacgactccatcgtgacaggggcgcagttacatgtgagcagccatgggttgacgaaggtcctcttcctccgcctccaattcgccagagtcagcaatgctgcgctcgtcaagaatcccgagtgggaagggtcaccgaatttggggcagaaatctggcctcatctcgacgcttatcagcacgcatttctccatggcggctcagaagcctgcccctcgccctgctgatgtgaacatcaactcggctgtgtaccctggcggtccgccaacgccagtgcaggcaccaaagctcctcaagtatgtggacacggcagagatggtgcgcggaccacaggacacgccgggatactgggtggtctctggtgccaagctgcagctggagaggggcaagatatcactgcgggtgaagtattcgctcttgacagccatggtacctgacgaggagtatgaagaatgaacaagggtgggaggaactcagtctcaaaagggggaagatgggggctagctaatgtgcatttgtgcattgcaagtaaagagtttcagcatgcttctttggaaacctgacttatgtgcatcgcctcatctttcgattataaccattttctcggctgatcggcggctgtccgtagaatctttgaaattaaattcgttttgcagaaaagggagacagtacattctacacatatatccgtaatgcagcgaggtgaaaacgatgatcgccttgctttgcttgctctggcattcttttaaacaa

SEQ ID NO: 137063 - DNA, 2837 bp, Zea Mays
acagcaagtagatggacacgcagcacggcaacttttattgcttgtcccgtcgtgcctgcctgccgcgccctcctcatcctcctcctccctcttcctcttgcgcgtcgccaccaccaaattctaaaccgcaatcccgccgcaatccgctccccgcgcgcgaaatcggctcacgcgtcctccgcttttcggctcacgggtcgctgaattgctctttctgctcgctcgctcgctgacttccactcaactgctcgcctggccgcctcctgctagtgcttcaatcgcccggcccccactcgcttgaaggcttccggaagctcgatcccttccgctcgctagctggctgcacagatcttcctcccgaggttcctctttctaccgtcgagtcgaatcggatcaccggagctatcggattcctcaaaatccgagactttggccgcccgccaccccgtctcagtggcggagctgctccgtctggtccgcctctgcctctctggcttgggggcgctctagggttcccgcgcgcgcgccccgtgatgctcgggaatggcgcttaaggccacggcgcagggcgccgcggaggcggccgtagcggccatcggccggggctacgacgttgtttccgacgtccgcctcaagtactgcaagggcaagctcgcggacccggacgcgcgactcattgacgtttcccgcgatggggtccaggacgtcctgctccccggcgggatcaaggtcgctgccgtccccaagtccgtcacgtgtgacaagggcgagcgcacgcggttccgctccgacgtcctctcctttcagcagatgtcagagctgttcaaccgggagctatcgttgaccgggaaaattccctccggcatgttcaatagcatgtttgatttttccgggtgctggcagaaagatgcagctaacaccaagtcacttgcttttgatggttggtacatttcgctatatacgctcgcactgtcaaaatctcgtattctactccgggatcatgttactcaggcagttccttcaacctgggaccctgctgctttggcaaggtttattgataagtttggaacacacatagttgtcggtgtaaaaatgggagggaaagatgttatatatttgaaacaacaacattcgtcaagcttgcaaccagctgctgtgcagaaacgactcaaggacatgtcggacatgagatttctggatggaaatggacagtatgacatgaacaacaagcatgtgcacgggaaggacaagcatgatgcaagagatcaacggctaagatttgtggaatcaagtccgtcaagttcatactgttcaaaggaggacttggtgatggtggttaagcggagaggtggaaaggaatgggacaaagatatgcctcacagtgaatggataaacactgttcaatcagaacctgatgttatctcaatgtcctttttacctattacttcattgttgagcggagtacctggctgtgggtttctgaatcatgcaattaatctatacctgcgctataagcctccgattgaagaactacatcaatttttggagttccaactaccaagacaatgggcacctgtgtacagtgaccaccctcttggtcctcagaggaggaaacagagcagtgcatctttgcccttaagttttatgggaccaaggctctatgtctgcactaatatggtaccgttattgttgttgtttaatcagtttatacttcatacatagtcactctgcatgatgagtgactccacattgtcagtctgcacgcagatttgtttaagaagctttgttgtctggagagaagttgtattcctgctgcttacttgcatgtttcgtggcatttgatacaggttgatgtgggtgaaagacctgttactgggatccgattgtatcttgaggggaagaagagcaacatgctggcaatccaccttcagcatctatgctcgcttcctcagatcctgcagctccaggatgatccatacaaccaccggtatccagaaccagaaccagaaccatatgaccgcaagtatgtggaaccatttggatcctggaagcgtttctcacatgtttacacggcaccagtggagtcggatgacgacgactccatcgtgacaggggcgcagttacatgtgagcagccatgggttgacgaaggtcctcttcctccgcctccaattcgccagagtcagcaatgctgcgctcgtcaagaatcccgagtgggaagggtcaccgaatttggggcagaaatctggcctcatctcgacgcttatcagcacgcatttctccatggcggctcagaagcctgcccctcgccctgctgatgtgaacatcaactcggctgtgtaccctggcggtccgccaacgccagtgcaggcaccaaagctcctcaagtatgtggacacggcagagatggtgcgcggaccacaggacacgccgggatactgggtggtctctggtgccaagctgcagctggagaggggcaagatatcactgcgggtgaagtattcgctcttgacagccatggtacctgacgaggagtatgaagaatgaacaagggtgggaggaactcagtctcaaaagggggaagatgggggctagctaatgtgcatttgtgcattgcaagtaaagagtttcagcatgcttctttggaaacctgacttatgtgcatcgcctcatctttcgattataaccattttctcggctgatcggcggctgtccgtagaatctttgaaattaaattcgttttgcagaaaagggagacagtacattctacacatatatccgtaatgcagcgaggtgaaaacgatgatcgccttgctttgcttgctctggcattctttt

SEQ ID NO: 137064 - DNA, 1596 bp, Zea Mays
aaccacataccaaccattgaacatcttctgtggccagccggcatccgtgcagccgccagcaccagcaggccatgacatggcaccatgtttgagctgacagctgactagctgagcgtgccgccttgccgtgtcggggagctgagctgagcctagagacgccaaacggaatggcgaaagcgaccggccgcgcggcgggcagcaggagctgcatcgagaggctgcctgcgccccgcgcccaatcctcttcctaaatcctaatcccctccgcctcatccccttcaaccccacgtctctctcgccgaaggctccggcctcgtcgggatccggtgctggattgacgcaatggcgccgctccacgccgcgctgccgccgccctcctccgccgccgctcaccaccacgcggcagccccgcctgtcttcctcgcccgctcgccgtaccacccccgcagggcggcggcctcctgcccgctcgccgtcgctgccgctccctcgtcgagaaaagcgttcttgtcgtgcccgctgctgggccactggaccacggccgcgcctcttccgcctcaacgagctccagctgtcggacgccgagaaggcccggatataccacttctacatccccgtcttcctctggtgcgaggacgaggtcatggtgcacagagccaggtacaacgacggcgatgacatcccgccattggtgatcggggtcagcgctccccaaggaagtgggaagacgactcttgtgttcgcacttgattatctttttcgggttgctggtaggaattctgccacattgtctatagacgacttctatctgacagcaaaagaacagaatgaattgagggacagaaatcctgcaaatgctcttttagagttccgcgggaatgctggaagccacgatctccaactctcagtggaaacactcgagtcactgatcaagctaacgaaggaaggtatgaagatgaaggttccacggtatgacaagtctgcgtttgggggaaggggtgaccgggctgatccttctgtatggccagaggttgaagggcccttagaggttgttctgttcgaaggatggatgcttggatttaaacctcttccaaatgaagttgtgaaagaagtggatccacagctggaggtggttaacaagaaccttgaagcatactctgatgcttgggacaggttcatccagtcatggattgttattaaaataagagaacccggtagcgtttaccagtggagactgcaggcagaggtcgctatgagagcagatggaaagcctggaatgtctgatgaggaggttatggattttgtatcacgctacctaccggcataccatgcatatctgccaacactgtacaaagaggggccgaatggttcgaatccagatcatctgctggtcatcgacatagacgaaaataggaaccctatctgtggtggatcatgggacatctcatgtttgtgaaactacttttatgatgggccgtcaaacaccactggcctcttgttgccctacactctggtagtgtaaatctgtgaattccatgtaaatatgaatttcgcttcttaaggcactttttaatctggcatggtctttagcttgaa

SEQ ID NO: 137065 - DNA, 1769 bp, Zea Mays
aaccacataccaaccattgaacatcttctgtggccagccggcatccgtgcagccgccagcaccagcaggccatgacatggcaccatgtttgagctgacagctgactagctgagcgtgccgccttgccgtgtcggggagctgagctgagcctagagacgccaaacggaatggcgaaagcgaccggccgcgcggcgggcagcaggagctgcatcgagaggctgcctgcgccccgcgcccaatcctcttcctaaatcctaatcccctccgcctcatccccttcaaccccacgtctctctcgccgaaggctccggcctcgtcgggatccggtgctggattgacgcaatggcgccgctccacgccgcgctgccgccgccctcctccgccgccgctcaccaccacgcggcagccccgcctgtcttcctcgcccgctcgccgtaccacccccgcagggcggcggcctcctgcccgctcgccgtcgctgccgctccctcgtcgagaaaagcgttcttgtcgtgcccgctgctgggccactggaccacggccgcgccgccgcgcgccatcccctcctcgtcgtcgtcgtcgaccccggcgctcatcgcgtccgtgcaggacctgtatgacttcatctgctgcggcccgctggtggacaggatcggctacaccagtgagaagatcaccgagtccatcgaccgctggcttctcgccggggctagggtggcgcgcctcttccgcctcaacgagctccagctgtcggacgccgagaaggcccggatataccacttctacatccccgtcttcctctggtgcgaggacgaggtcatggtgcacagagccaggtacaacgacggcgatgacatcccgccattgatcggggtcagcgctccccaaggaagtgggaagacgactcttgtgttcgcacttgattatctttttcgggttgctggtaggaattctgccacattgtctatagacgacttctatctgacagcaaaagaacagaatgaattgagggacagaaatcctgcaaatgctcttttagagttccgcgggaatgctggaagccacgatctccaactctcagtggaaacactcgagtcactgatcaagctaacgaaggaaggtatgaagatgaaggttccacggtatgacaagtctgcgtttgggggaaggggtgaccgggctgatccttctgtatggccagaggttgaagggcccttagaggttgttctgttcgaaggatggatgcttggatttaaacctcttccaaatgaagttgtgaaagaagtggatccacagctggaggtggttaacaagaaccttgaagcatactctgatgcttgggacaggttcatccagtcatggattgttattaaaataagagaacccggtagcgtttaccagtggagactgcaggcagaggtcgctatgagagcagatggaaagcctggaatgtctgatgaggaggttatggattttgtatcacgctacctaccggcataccatgcatatctgccaacactgtacaaagaggggccgaatggttcgaatccagatcatctgctggtcatcgacatagacgaaaataggaaccctatctgtggtggatcatgggacatctcatgtttgtgaaactacttttatgatgggccgtcaaacaccactggcctcttgttgccctacactctggtagtgtaaatctgtgaattccatgtaaatatgaatttcgcttcttaaggcactttttaatctggcatggtctttagcttgaa

SEQ ID NO: 137066 - DNA, 1772 bp, Zea Mays
aaccacataccaaccattgaacatcttctgtggccagccggcatccgtgcagccgccagcaccagcaggccatgacatggcaccatgtttgagctgacagctgactagctgagcgtgccgccttgccgtgtcggggagctgagctgagcctagagacgccaaacggaatggcgaaagcgaccggccgcgcggcgggcagcaggagctgcatcgagaggctgcctgcgccccgcgcccaatcctcttcctaaatcctaatcccctccgcctcatccccttcaaccccacgtctctctcgccgaaggctccggcctcgtcgggatccggtgctggattgacgcaatggcgccgctccacgccgcgctgccgccgccctcctccgccgccgctcaccaccacgcggcagccccgcctgtcttcctcgcccgctcgccgtaccacccccgcagggcggcggcctcctgcccgctcgccgtcgctgccgctccctcgtcgagaaaagcgttcttgtcgtgcccgctgctgggccactggaccacggccgcgccgccgcgcgccatcccctcctcgtcgtcgtcgtcgaccccggcgctcatcgcgtccgtgcaggacctgtatgacttcatctgctgcggcccgctggtggacaggatcggctacaccagtgagaagatcaccgagtccatcgaccgctggcttctcgccggggctagggtggcgcgcctcttccgcctcaacgagctccagctgtcggacgccgagaaggcccggatataccacttctacatccccgtcttcctctggtgcgaggacgaggtcatggtgcacagagccaggtacaacgacggcgatgacatcccgccattggtgatcggggtcagcgctccccaaggaagtgggaagacgactcttgtgttcgcacttgattatctttttcgggttgctggtaggaattctgccacattgtctatagacgacttctatctgacagcaaaagaacagaatgaattgagggacagaaatcctgcaaatgctcttttagagttccgcgggaatgctggaagccacgatctccaactctcagtggaaacactcgagtcactgatcaagctaacgaaggaaggtatgaagatgaaggttccacggtatgacaagtctgcgtttgggggaaggggtgaccgggctgatccttctgtatggccagaggttgaagggcccttagaggttgttctgttcgaaggatggatgcttggatttaaacctcttccaaatgaagttgtgaaagaagtggatccacagctggaggtggttaacaagaaccttgaagcatactctgatgcttgggacaggttcatccagtcatggattgttattaaaataagagaacccggtagcgtttaccagtggagactgcaggcagaggtcgctatgagagcagatggaaagcctggaatgtctgatgaggaggttatggattttgtatcacgctacctaccggcataccatgcatatctgccaacactgtacaaagaggggccgaatggttcgaatccagatcatctgctggtcatcgacatagacgaaaataggaaccctatctgtggtggatcatgggacatctcatgtttgtgaaactacttttatgatgggccgtcaaacaccactggcctcttgttgccctacactctggtagtgtaaatctgtgaattccatgtaaatatgaatttcgcttcttaaggcactttttaatctggcatggtctttagcttgaa

SEQ ID NO: 137067 - DNA, 1872 bp, Zea Mays
aaccacataccaaccattgaacatcttctgtggccagccggcatccgtgcagccgccagcaccagcaggccatgacatggcaccatgtttgagctgacagctgactagctgagcgtgccgccttgccgtgtcggggagctgagctgagcctagagacgccaaacggaatggcgaaagcgaccggccgcgcggcgggcagcaggagctgcatcgagaggctgcctgcgccccgcgcccaatcctcttcctaaatcctaatcccctccgcctcatccccttcaaccccacgtctctctcgccgaaggctccggcctcgtcgggatccggtgctggattgacgcaatggcgccgctccacgccgcgctgccgccgccctcctccgccgccgctcaccaccacgcggcagccccgcctgtcttcctcgcccgctcgccgtaccacccccgcagggcggcggcctcctgcccgctcgccgtcgctgccgctccctcgtcgagaaaagcgttcttgtcgtgcccgctgctgggccactggaccacggccgcgccgccgcgcgccatcccctcctcgtcgtcgtcgtcgaccccggcgctcatcgcgtccgtgcaggacctgtatgacttcatctgctgcggcccgctggtggacaggatcggctacaccagtgagaagatcaccgagtccatcgaccgctggcttctcgccggggctagggtggcgcgcctcttccgcctcaacgagctccagctgtcggacgccgagaaggcccggatataccacttctacatccccgtcttcctctggtgcgaggacgaggtcatggtgcacagagccaggtacaacgacggcgatgacatcccgccattggtgatcggggtcagcgctccccaaggaagtgggaagacgactcttgtgttcgcacttgattatctttttcgggttgctggtaggaattctgccacattgtctatagacgacttctatctgacagcaaaagaacagaatgaattgagggacagaaatcctgcaaatgctcttttagagttccgcgggaatgctggaagccacgatctccaactctcagtggaaacactcgagtcactgatcaagctaacgaaggaaggtatgaagatgaaggttccacggtatgacaagtctgcgtttgggggaaggggtgaccgggctgatccttctgtatggccagaggttgaagggcccttagaggttgttctgttcgaaggatggatgcttggatttaaacctcttccaaatgaagttgtgaaagaagtggatccacagctggaggtggttaacaagaaccttgaagcatactctgatgcttgggacaggttcatccagtcatggattgttattaaaataagagaacccggtagcgtttaccagtggagactgcaggcagaggtcgctatgagagcagatggaaagcctggaatgtctgatgaggaggtgtgttctctgacaaagctactcactattttagaacaatccctctgttatcctagtaaccttggagccttactgatggttctgtcatgtggtttcttcggttatggattttgtatcacgctacctaccggcataccatgcatatctgccaacactgtacaaagaggggccgaatggttcgaatccagatcatctgctggtcatcgacatagacgaaaataggaaccctatctgtggtggatcatgggacatctcatgtttgtgaaactacttttatgatgggccgtcaaacaccactggcctcttgttgccctacactctggtagtgtaaatctgtgaattccatgtaaatatgaatttcgcttcttaaggcactttttaatctggcatggtctttagcttgaa

SEQ ID NO: 137068 - DNA, 129 bp, Zea Mays
atggctgagagggccgagcacgaccaggacatggtcacgggaggaggcgtcggccatggagaacaggaagggaaggctttgcgtgctgctggatggagaggaccaggggaggtcgacgccatgtgctaa

SEQ ID NO: 137069 - DNA, 601 bp, Zea Mays
atgtcggacaaagctaataaaatatgtaccttctgcaggcctgatgaccttcgtagaccatttggaaaatttggccccgttaaagacatatatctgccaaaggattactacactcgcgaacctagaggatttgggttcatccaatactttgatcctgaggatgcttctgatgaactaggaagcggaatgcttgaaatacaaggggcaagaggcacgacaaggatactttctggccagagtttgacatgcacaaccgtttcatggactttccgtaacttctatgagaaggtcaccaccaagagctcattcaaggaccccacccaggagaaggcactgatgttttcccagcacctcgtgaattacttgctatgtgtgatgtacaacaagaagtctaaggattcgaaatattaccttggtgtatgtggatcacctgatttcgatggtggttattaaattgcctgttgtttccttatttgggactccaaatattaactttgaactctggtttaagttgatgagacatggaggtgcacttagacccttaccgttatgtttggcatgtcagttggagatgattgtaagtcagtccacgtcacgtccg

SEQ ID NO: 137070 - DNA, 1116 bp, Zea Mays
gcacaggaaagagcaagatgaagacaacgacgacggcgatgcgctccttgtccgtcgccgtcctcctcctcgtcgccgccgccgcttcagcatccgccgccaaggatcgctgccactcgggcgacaaggcggcgctgctggccatcaaggcggcgctcggcaacccgtaccacttcgcgtcgtggacgcccgacaacccctgctgcgactggtacgacgtggactgcgacgccaccaccggccgcgtcgtcggcctcgccgtgttccaggacgccaacctgacgggcaccatccccgacgccgtcgcgggcctcgtccacctccagaacctcatgctgcaccacctcccgggcatctccgggcccatcccgccggccatcggcaggctctccaacctctccttcctcaccatctcctggacgggcgtctccggccccgtgccgtcgttcctgggcacgctcaccaggctcaaccagctggacctctccttcaacgccctcaccggcgccgtcccggcctcgctcgccgcgctccccagcctttacagcatcgacatcagccgcaaccgcctcacgggctccctgccgccgctgctcttcagcaggctcgataaggcgcagcaggaggcgtacctccggctgtcgcacaacaacctcaccggcagcgttccgcctgagttctccgcggtggccttcgcgcaggtcgacctgtcccgcaacgccttcgccggcgacgcgtcgggcctgttcggcagggcgaagccggtgcagcagatggacctctcgcgcaacgccttcagcttcaacctgtccgccgtggagctgccggagcagctcaactcgctggaccttagccacaacgccatctacggcggcatccccgcgcaggtggtgaacctgaccaacctgcagttgttcaacgtcagctacaaccggctgtgcggcgcggtgcccaccggcggcaacatggcgagcttcgatgcctacagctaccagcacaacaggtgcttgtgtggacctccgcttgctgatccctgcaaatgaagtgacagtcgtgtaactcttgtgatcaaactattgttctaataaaggaataaaatctattattgcctctgtc

SEQ ID NO: 137071 - DNA, 161 bp, Zea Mays
tttttttttatttatgttttcttttctttttttttgatttttgttctaaattaaactcgaattcaactaacatttgaattcaaatggaatgcataaacaagaaaatttcagcatggatgaattattatcatactaatcccttaatctttccattttacata

SEQ ID NO: 137072 - DNA, 893 bp, Zea Mays
cttaatttatcttttgatgttctgcgtgaagtaatgtatgaaaaatccgcagcaacattgtggaaaaaattagaggagctgtatatgaacaagagtcttgcaaataagctacgtctcaaggaacgtctttacactattcacatgtcagaaggtacatctatgcagtcacatcttaatgaatttaattcaattattgtggaccttgagagtcttgatgtgaagatagatgatgaagataagacaattttgttggtagtctcattgcccccttcttttaagcattttaaggaaattatgctttatggtgaaggtttaattgttcggagatctggagatcctaaatccaacctttattgtcgttattgcagaaaaaatactcatcatatttctcagtgccccaaagtgagaaataaagaggagagaaagaaaaaaagaattgaataagtcttttgctgaagccagttttgttgaaaatttggatagtggagaagctctgtttgttgcctctattgaaaagtgctcttcttaggttctcgattttgcttgcacttttcatattagttcgcatagatattggttttctgattatgttcagtctcatgctggtgaggttgttattggagatggatccacatgtgatattattggaatcggctctatttatatccaagtttatgatggcagtattaagaaacttatcgatgtccgttttgttccaaagttgaagagaaatattatttctttgagcactttagaagcaatggtattcaattttgttgctattgatggtgttcttaaggtttctcgtggcaatcgtattatcttgaagggcaaccgtttgaataatctctattatttgcaatattcaacagttgatgctgaagctgtttcta

SEQ ID NO: 137073 - DNA, 1239 bp, Zea Mays
cgctcacagcaaccggcgacatcactctcactactgcagctcagctcagctcagctcagcaagcaaattgttcgatcgatcgtcgtcgactatggccgccgcctcctcctcgcagcaaccaccgcgcctgctagtactcgtggcggtctcgtgtctcctcctgcagagtgccatcaccagcagctcggcggagtcgtcgatgcagtgccacgaggaggaccaggaggcgctgctggccgtgaactccgcgctgggcagcccctaccacttcgcgtcgtggacgcccgacaccttttgctgcgactggtacgacgtggactgcgacaacgtcacgggccgcgtcgtcggcctcaccgtgttcggcgacggcaacctgacgggcgccatcccggacgccatcgccaacctgaccaacctccgcacgttggtcctgcgccacctcccgggcatctccggcggcatcccggtctcgctcgcgcagctcgccaacctcacccagctcaccatctcctccaccggcgtctccggcccggtgccgtcgttcctgtcgcagctaacggagctcaccctcctagacctctccttcaactccctcgacggcgccatcccggagacgctcgccgacctccccgccctctccagcatcgacctcagccgcaaccgcctctcgggccccgtcccgccgctgctcctaagcaagtacgtcgacgaccaggcggcgtacctcatgctgtcgcacaacaacctctccggcagcatccccgccgggttcgcctccgtcagcttcgcgtacctggacctgtcgcgcaacgccttcgccggcgacgcgtcgggcgtgttcggcaaggggaagccgctgcagcacttggacctctcccgcaacggcttcgccttcagcctcacggccgtggacctgccggagcagctggcgtacctggacctgagccacaacgccatccgcggccgcatcccggcgcaggtggccgacctcgccgggctgcagctgttcaacgtcagctacaacaagatgtgcggcgtggtgcccacgggagggagcatggccaagttcgacgcctacagctaccagcacaacaagtgcctctgcggcacgccgctgccggcatgcggccaccgttactattgatcgatcgatccatccatctatcgatcatgaaagtgtcatgcttgttcttgtgtacgttccagcaaggtaaagtacagttccaggcaaggtaaagt

SEQ ID NO: 137074 - DNA, 1522 bp, Zea Mays
ttgacagagcacaatggtctcatcctaatgttttcatcacatttgaatgaacactaaagaaagctgcttgatgcgtggtgcaggatgaactggaatcccttttggatgactctggacatttgcggacacttgctttcttgtatggcagcaaaggaatgtgctccaaagccctttctatatggcgtgtactggcaaggaattatagtgcaggtttgtggaaggatctgtctgagaatgattcttgtggaactttggttactaaaaggtctggcgaggaaattgccgctgtagaagcagccaagatcctcaaagcattatctgatgaggaccttgttctggaacatcttggatgggtggcagacattgatcaagatctagcgattgcagttttaacatctgagacgagggaaaatcaactctcaccagaaaaggttgttgcttctgttgatgcagaaaaggttgtgattcatcaaagatatttgcagtggttgattgagggtcagggctgcgatgatcctcactatcacacatcatatgctctttcactggccaaatctgcaattgaagcagttgatatggagtctaaatatagagggaaagatgatagtgaaattgattctgatgcacagtttgtttattcagtaagagaaagcttgcaattgtttctgcaagcttcagacctgtatgacccagaagatgtgctcgatgtgatagcagaatcagagctatggctggaaaaggcaatattgtataggaagatgggccaagagaatattgtacttcagatactagcattgaagctggaggatagtgaagctgctgagcagtattgcgcagagattggtcgagatgatgcttatattcagcttttgggcttgtatttggaccctcaaaacgggaaggagcctatgtttacagcagctgtacgacttcttcataatcatggtgaatcgttggaccccatacaagtattggagaaattatctcctgatatgcctctccagctggcatcagacacaattttacggacactgagggcccgagtgcaccatcatcgtcaaggacagatagtccataatctatcacgtgcgacaaacctggacgtgcggttgacaagactggaggagagatcgaggcatgtgcagctaaccgatgagagtatctgcgactcctgtcgagctcgcctcggcaccaagctatttgctatgtacccaaatgactcggttgtttgctacaggtgctatcgatcccagcaaggtgaatcttcatcagggcatggtcgtagcatgaggaaagatgttatattcaaacagagctggcttgtaagtagatagatagcgaggaaggaatgaagagtggtgatcttgaggccagcatttggctgtggctgctctgaaatgggcaccaagtttttttgtctggatgggctctctggaaacttgaacagggtgttgtatattctttttgaggccaatgaatgaatatatacaaatacaagcatacagcataccggaggatgtct

SEQ ID NO: 137075 - DNA, 744 bp, Zea Mays
gtattactgttgcacatgatcctatggtatgtgaggaatctcaaaaaagttactgcattgttgattcctaagtacaaggtactcattgcatctttaatgcacaattggtacatcctgtaacagctgctgtgctgcaatgtgcatttttgcctttatgttgtgccatacactagtttctggaaaaaagaatctaaaccataatgttgtgccagaaattatctcctgatatgcctctccagctggcatcagacacaattttacggacactgagggcccgagtgcaccatcatcgtcaaggacagatagtccataatctatcacgtgcgacaaacctggacgtgcggttgacaagactggaggagagatcgaggcatgtgcagctaaccgatgagagtatctgcgactcctgtcgagctcgcctcggcaccaagctatttgctatgtacccaaatgactcggttgtttgctacaggtgctatcgatcccagcaaggtgaatcttcatcagggcatggtcgtagcatgaggaaagatgttatattcaaacagagctggcttgtaagtagatagatagcgaggaaggaatgaagagtggtgatcttgaggccagcatttggctgtggctgctctgaaatgggcaccaagtttttttgtctggatgggctctctggaaacttgaacagggtgttgtatattctttttgaggccaatgaatgaatatatacaaatacaagcatacagcata

SEQ ID NO: 137076 - DNA, 1592 bp, Zea Mays
gcagtgcgaagttagtcgccggccggcagcgtccccctcgccccccaagtccctagtggttgacactgacagaggtctgcagagactagcggcgatggcgccaccctgccccgaaccctaaccccactccaccaccggccatgggatcccagccgccggcctcccgcgcggccctggagcacctcgctacgcttgaccccgccgcactcgccggcctccctgtctcctccccgctcaccgtccgctccgccgccgtctccgcccacctgctctatctcggcaccggcggcggcaagctgctcctcttctccctgcaggatccctccactcctgagttcctccgcctcctccccatcggcgccaccctacccgtctctgctatcgtcccgctcccctccgtcgcccgcctcctcgtcctcgctgacggcctcctcctcctcgccgacccgctcctctcgcgccccgtccgccgcctcggctccctgcgcagcgtcaccgccgtcgccgcccgccgcgtcgtcctcgcggacccatcatcatgctccgtcgccatctccgtcgggaagaagctgctccgtgtcgacttcacgctgcacgacgccgacgagctggatgtacagacgcgcgagatcgcctcagtcgagggggtcaaggcgctcgcttgggtcgacgattctgtcttcgttgccactgccactgggtactccctctactcgagcaccaatggtcagggtgtggatatattctcgctcccagaatccgccggtcacccaagggtgaagccgctctctggaggtgacgaggtgatgctcctggtcgacaatgtcggtgttgtggtcgatagatttggccagcccgttggaagcagcttggtgttcagcaccacgcccgactacatagctgaggtattcccctatgtgattgttgctggggactccaaggtcgatgtgtacaggaggaggaacgctgcacacctacagaccattccggttgccaggactggtcaaggcgttctgattgtggctggggatgatgatgggatagacacggagctagttgtgatcgctacaacttataaggtaacgtaggtcttttgctaccgtaaagtatctgcattggagcagattaaggcatctttacgaagaaagaactacaaggaagctatttctttgctagaagagtttgagtcggacggtgaaatctcaaaggatatgatctcctttgtccatgctcaacttggttttttattgtttttcgacttgcgtttcgaggatgctgtgaatcatttcttgctatcggagactatgcagccatcagaagtatttccattcattatgcgggatcctaaccgttggtcagatctggtgccaagaaagcggtattggggtttgcaccctccccctaagccccttgaagaatttattgatgatggactggtaacagttcaacaggcattgtttctgaaaaaggcaggtgtggatacagttgtggatgaagatttcctttcaaacccaccaagtagagctgatcttttggaactagcgatcagaaatattatcaggtacctttgtgcatcgcggatgaagaatcta

SEQ ID NO: 137077 - DNA, 1383 bp, Zea Mays
atggcaaacaagatcaaggggatattaccatggatggtcgttcgggtgacgtcggccacggcgaggagcggattcatggtgtcgctgcgcgacggcgagaaattccccgccactaggttggccatcgactccggcaccgcatcgaacacgccccatggtaatgtacatggtttgggagtggaagccttgcagatgctcactcagatggtgctcagcaatgaagaagagctcaagatcaaatatttcaaggatgactccctgaacagactttgcccagttgatgtttttttgaaggcaatgctggatgttccatttgtgttcaagagagtagatgccatgctttacattgccagcttctatttggagatcaatcggctgagaatgtcgtatgctactcttgagggggcttgccaggagatgagaagcagcaggctgttccacaaagtccttgaggctgttgtgaatttcggcaatttcatgagcaccaattcggggtctccaagttcaaaaggcttggagccaaacactgttctgaagatagctgatgtgaaaggagctgatgggaaggctgctctcatgcagttcattgtccaggaaattgtgaaacctgaaggatatgatgtgatgcagcatggttcaggtgcatgcaagatgagcacaaacactctgcagtgtgatgccgagtgcaggaagcatggccttgaggttgttgccaaacttgcagcccagctgagcaacaccaagaaagccgcctccattgacataaaaaggctgagccaaagcgtgtcagagcttggaatggggcttgggaaggtccacgacgtggtgaggctgaacagcatggttacatctgttgatagcgctcggcgtttccacaatagcatgagcacatttctaaggcacgcccgaggaggagatcctgaagctccagtcccaggagagcatctgcttgtcatcagtgaaggagatggcggagtggttttattggggagtcagtcaacgatgaagctcacatgttcagaatctttgctggagtgaaggagttcctagctatgctcgatcatatctgcaaggaggctggggaggtgagcagcaacaattgggtcggcgcgacaacggcgagctggatggctgcacccatggggatgatgccttaagccgctggagctgtcttggcaaaatctgtagctaccctttttgtagaatatttcatatcaagctatttggactagtatggttcctagtattagcagtagatgagaacgatgttatggtatgttaagccgaagcctctctctatataaatatatctggataatgtatgctggacacccgtctattgtaaagtttactgttactggtaatggggttttgccgtccttt

SEQ ID NO: 137078 - DNA, 390 bp, Zea Mays
atggaggcaaactgggacgagctcgacagggatcttggcgagaccacggcgctggaagtcgagcgcaatccgagctgggcgagctgcaccaaggagcagcagccggccatgggaggtggtggccaagcaagctggggatggccgacggcgctggggctggacgcgctggataccgagcgcgaacaggaagaagcggaggccgagctgggcaccgggcgcgcgtcatgggagagagcagagcgagatccggccaggaaattggcgagctgggagatggagccgagagggctgcgcagcggtcaggcgagctgggcaagacctcggctgggcggaccatggcggacagaaacaacgaggcagctcgacgtgctcagctgccgtgggagataa

SEQ ID NO: 137079 - DNA, 258 bp, Zea Mays
atggaatcggagaacgaaaagctccgaaaagcactggctactttgctcagagttgttcaaaagcgtagttgtgacatcgttgatgtcgtgaaatcaaccttccagcctttcaactcaccattgttggatgaaatgaaccgagcattagttgagattgatgacctcgccaaggatcttgaagacgtagcagtgcaaaccctgtgggaggttgacaatatgcataactgtcaagtaaacgaaatttcgcgacaagagtag

SEQ ID NO: 137080 - DNA, 762 bp, Zea Mays
gcgagcaccagcaaaccaaacaagcagaccaccttctccacccggccggccttcgtcttcctccgatccccaggccccagccactccccgtacaagccaaagagaccagtaggtaggcaggcagttcatcgtcgatcgagcaagatgtcggactggggccccgtggtgatcgggctggtgctgttcgtgctgctctcgccggggctgctcgtccagctccccggccgccaccacttggtggagttcggcaacctgaagaccagcgccgtctccatcgtcgtccactccatcatctacttcgcgctcatcaccctcttcgtcatcgtcatcggagtgcacatcaccaccggcgactagctcgatcgatcacacgtctctgtcgattaatttcctgatcgatcggtctgcttggcttctttctttttcatctcgtgcatctgtgttactatatatactacaccataccatacacgtctttcccacctccgacccctctctgtccttcccatcagcatatatactagaatgtcgtgcgtcagcgcgtgtatgatgctgtcgaccatggcaatcgaacttaattaatttctcagcatccatctggaatagaaagaaggaaaagaatgttgtctgtaatgtttcagttcatgcagggaagtcgtgccctggagtttaggcgtcatggggtgaactcggtcctgggatgagcattgagcattgagcagtagttagccacacactcagatattgtttgtttgtttatat

SEQ ID NO: 137081 - DNA, 950 bp, Zea Mays
gtttccacgtcatgcaacgcaacattccaaaaccatgggttgcaagatgctgcagaatgcaagccatggatcatctataaatggctagctcccacatatgaactagtctctatcatcatccaatccagatcagcaaagcggcagtgcgtagagaggatcgtcgaacagaacagcatgaagatggtcatcgttctcgtcgtgtgcctggctctgtcagctgccagcgcctctgcaatgcagatgccctgcccctgcgcggggctgcagggcttgtacggcgctggcgccggcctgacgacgatgatgggcgccggcgggctgtacccctacgcggagtacctgaggcagccgcagtgcagcccgctggcggcggcgccctactacgccgggtgtgggcagccgagcgccatgttccagccgctccggcaacagtgctgccagcagcagatgaggatgatggacgtgcagtccgtcgcgcagcagctgcagatgatgatgcagcttgagcgtgccgctgccgccagcagcagcctgtacgagccagctctgatgcagcagcagcagcagctgctggcagcccagggtctcaaccccatggccatgatgatggcgcagaacatgccggccatgggtggactctaccagtaccagctgcccagctaccgcaccaacccctgtggcgtctccgctgccattccgccctactactgattcatgatatttgggaaatctcctctatccatctctctctatctatatatgtaataatgcagtaagacgacacacattatcatgtgtggtatgaccaataatatatgcatggtcataataaagttttggttttaatgaatctatcggccgcttgatgtctatgatggacaaatcaaaacttctcctgtcaggcatgtaaatatttcaaaatctctattcaggctcaaattcatagcata

SEQ ID NO: 137082 - DNA, 576 bp, Zea Mays
atgaagatggtcatcgttctcgtcgtgtgcctggctctgtcagctgccagcgcctctgcaatgcagatgccctgcccctgcgcggggctgcagggcttgtacggcgctggcgccggcctgacgacgatgatgggcgccggcgggctgtacccctacgcggagtacctgaggcagccgcagtgcagcccgctggcggcggcgccctactacgccgggtgtgggcagccgagcgccatgttccagccgctccggcaacagtgctgccagcagcagatgaggatgatggacgtgcagtccgtcgcgcagcagctgcagatgatgatgcagcagcctgtacgagccagctctgatgcagcagcagcagcagctgctggcagcccagggtctcaaccccatggccatgatgatggcgcagaacatgccggccatgggtggactctaccagtaccagctgcccagctaccgcaccaacccctgtggcgtctccgctgccattccgccctactactgattcatgatatttgggaaatctcctctatccatctctctctatctatatatgtaataatgcagtaa

SEQ ID NO: 137083 - DNA, 1114 bp, Zea Mays
accccattctccagcaacgagacaacaaatctcctcctcttcctctccgtatccgcatcagtccatcaccttcaatggcggcggcggcggctgctgccacctccttcaccaccctcgccgtcgcgcgttcggcggggcagcggtccctccttgcctccaaggccgcaccttcgccgctcctctccctccgtggcgcccgcatcccctcgcaggccgtctccttctccgggggccttgcggcgtcgccctctcacagccgcgcgcgcttcgctacatccgccagcgccgagcccaaggaagcagatcttcagtctaaaatcaccaataaggtgtattttgacataagcattgggaaccctgtggggaagaatgttgggaggattgtcatcggcttgtatggggatgatgttccacaaacagcagagaactttcgtgctctttgcactggagagaaagggtttggatacaagggatccagtttccaccgtgtcatcagcgactttatgatccagggcggagattttgacaagggcaatggtaccggtgggaaaagcatatatggacgcactttcaaagatgagaacttcaaattggttcacactggacctggagtggtcagcatggctaatgctggaccgaacaccaacggcagccagtttttcatttgcactgtcaagacgccttggttggatggaaggcatgtcgtgtttggccaggtcgtggaagggatggatattgtaaggctgatcgagtcacaggagactgacagaggtgaccgtccgaagaagaaagtagtcatcagcgagtgcggggagcttccagtggtctaagcgttactcatctgttgtccgtttcacttctgacggatgacgatatccccccccccccccccccccccccccatcccatgtgctaattatagagaatatttcgaattcaagtaaggtcccaaatctgaggcatactgttgctgccctgctggaataaatgtgctactttcccctgccttgttaagggaaagggttttgttcacgatgttaccttgtaaccttgtacttatgtttcatacttggaatgaaggttcatggaacaaaaatattctgctgcattgcat

SEQ ID NO: 137084 - DNA, 1250 bp, Zea Mays
ttgtgtgtggcctggccgagtcaagacgaggagactttttaactttcacggaaatttcccctctcttggtctcttctcttgcgcgttcctcttcttcctagtcctaggctactttcttcgatcccaactccgagtcgcctgtcatctctctctaccagattagattggggatctcatctcatccgaatccttcatagtattacacaaccagcaaggccgcccgcttgccggcaacatgaagaagatcttcggcgccaagaagaacaaggatccgccgcccacaatccaggacgcaaccgacagaatcaccaagcgcggcgacaccgtcgatgaaaagatcaagaagctcgacgccgagctcgcgcgctacaaggagcagatcaagaagacgcgcccaggccccgctcaggaggccgtcaaggcacgagccatgagggtcctcaagcagcgcaggatgtacgaagggcagcgtgacatgctctacaaccaaacatataaccttgaccaagttgcttttgcggcagagggacttaaagatgctcagcaaactatgactgcgatgaaggctgccaataaagagctcaaagggatgatgaaaactgtcaagctcgaagatattgatagtatgcaagatgagatgatggatcttatggatgtgagcactgaaatacaagaaactcttggcagaagctacaacgtcccagatgacatcgatgaggaagaacttatgggggagctcgatgctttggaagccgacatggacttcgaatcagagtcagtcccatcttacctccaaccagaccaagaacctgaactcagcttacctgctgcaccaactggccatgcagcagtcccggcaaaccagcagcaggaggatgagctaggattgcctacagtgccacaagcatccattcgtacataatcaagcagaatcacgtttcttgcagtcaacgatataaaggaagtcgtattatatatctacagctgggtgtaaaaatgctgttatgtaccgcaccacttcgattttttttgtcactccacttgtggatggtgtaaatctgattgaattgaattagttgggagttgggacattttaagatcctcttgtatttgctgtatggttgtacagaaagcagcaaggccagagcagcacgtttataccgtactgtgagaaaaaatggtgatacgtggctaatgtgctaaatagctcttccttaaacatctcttctagaagagctttagttggggat

SEQ ID NO: 137085 - DNA, 966 bp, Zea Mays
ttgtgtgtggcctggccgagtcaagacgaggagactttttaactttcacggaaatttcccctctcttggtctcttctcttgcgcgttcctcttcttcctagtcctaggctactttcttcgatcccaactccgagtcgcctgtcatctctctctaccagattagattggggatctcatctcatccgaatccttcatagtattacacaaccagcaaggccgcccgcttgccggcaacatgaagaagatcttcggcgccaagaagaacaaggatccgccgcccacaatccaggacgcaaccgacagaatcaccaagcgcggcgacaccgtcgatgaaaagatcaagaagctcgacgccgagctcgcgcgctacaaggagcagatcaagaagacgcgcccaggccccgctcaggaggccgtcaaggcacgagccatgagggtcctcaagcagcgcaggatgtacgaagggcagcgtgacatgctctacaaccaaacatataaccttgaccaagttgcttttgcggcagagggacttaaagatgctcagcaaactatgactgcgatgaaggctgccaataaagagctcaaagggatgatgaaaactgtcaagctcgaagatattgatagtatgcaagatgagatgatggatcttatggatgtgagcactgaaatacaagaaactcttggcagaagctacaacgtcccagatgacatcgatgaggaagaacttatgggggagctcgatgctttggaagccgacatggacttcgaatcagagtcagtcccatcttacctccaaccagaccaagaacctgaactcagcttacctgctgcaccaactggccatgcagcagtcccggcaaaccagcagcaggtagtgaaactgttgtgagagaatgacgttagatgttgcgtactttttagtgttgcttttgtttatacccaacatcatggtagttatttggtttc

SEQ ID NO: 137086 - DNA, 2247 bp, Zea Mays
cattcccccgctcggcccgcgaaaccgtaccctgagaccactccctccgccgccatgccggacctcccctgcgacggcgatggcgtctgcatggtctgccgcgtcacctccccgccggaggtcgacctcctccattgctccacctgcgccacgccctggcactccccgtgcctctccaaggctcccgccctggccgacgccgccagctggagctgccccgactgctccctggtattgccggccagtctacgcatggggctcaatcagtagccctctccggagggtatgaagatgatgaagaccatggggagtggtttctttacactggaagcggcgggagggacctaagtggtaacaagcgaacaaacaaggagcagtcatctgatcagaaatttgagaagctgaatgctgctttacgcattagttgcttgaagggctaccctgttagggttgtacggtcgcacaaagagaagcgatcctcgtatgctcctgaatctggtgtgaggtatgatggggtttacagaattgagaagtgttggaggaagattggtattcagggtaagttcaaggtctgcaggtatctctttgtacgctgtgacaatgaaccagctccttggaccagcgatgatcatggtgaccgtccgagacccttgccaaagataaaggagctacaaggtgcaactgatataacagagaggaaagggcgtccttcatgggattatgatgagaaagatggctggaaatggatggtgcctccgccagtcagcaagaggcctgttctctctggtgatcctgagaccgacaagctaatccggaaagcaacaaagcgtgctcatttatctgttgctgaaaggctgcttaaagagtttggttgttctatctgccgggcggtgattaaagagccacttacaacaccatgtgctcacaacttctgcaagacttgtttgcttggtgcatatgatagccagtcctctatgagggaaagaagccgtggtggtcggactctaagggcacagaagattgtgaagacgtgcccttcctgccctactgacatctgcgacttcttagaaaatccccagatcaaccgagaaatgatggagttgattgagtccttgcaacgcaaggctgttgaagaaggcaagatggctgcaggtgatgccgaggaatctggtgatggtgactcggaggaaaatggtggtgctttggtgaagggagaagatgatagcaatttgaacgaggaaggtcaagacggtgtagacgctgatggttctgtgaagattgtggttgaaatggagggtgcaaaagatgataaaaagtcaaagatgggcgcggctgaagtggtggatgtgttagttgaagatgctgctgcgaaacagccgaagaagcgcacggctgatgaagatgctgctgcgaaacagacgaagcacaaggctgatgctgagactggtggcaagagggtgaagagcagtgctgcagtggaagaggttgatgtgtgcgtcactcctatgaaacggaccaggaagagtggtgatatgcatgatgacggcaacggcagccctgctgtgagcagcggccgcagggtgactcggagcagtgtgaatgccacgggagctgatgacagtccagcgaggaggaccagaagccgtggcagagcatgctgaaggtagtgggtgctgggcgccctcttttttgggtgtggaacctttgctgtgcgcagtgttgcagccatttcttttggtttgggggagaccgacctgctacaggtattccccatgcttctttcttccaggatgcaattcctatttaatttcaaggtagctgctgcactcgatctgcgagatgcaattttgttaactggcagccaggtgttggcttacgccatgattttggcacaacaggttcctagagagaaacaagatagctgatgttcttgcaaaaaaaaagcaagacgggcaactaccccaaatccatgccttttctctaggggcttcattctccaacctgtaatatctagcatgtgttttgaaacttggattgttcggggcaacatgaccccccatctttgtaacatgtttatgatgtaataaatcttgaatttgaaaaacaaaagaggacatggaatgaaccagcacaccagaatctgaggtttgagagaaattgcacaaagacaaggcattcaaacatttgggctcacaccgtggacacatgacacgcacataaacgagatcaaacatagcaagaagaacc

SEQ ID NO: 137087 - DNA, 2819 bp, Zea Mays
cacctccgcctctcgctccacttcctctccccaccactccgccatcattcccccgctcggcccgcgaaaccgtaccctgagaccactccctccgccgccatgccggacctcccctgcgacggcgatggcgtctgcatggtctgccgcgtcacctccccgccggaggtcgacctcctccattgctccacctgcgccacgccctggcactccccgtgcctctccaaggctcccgccctggccgacgccgccagctggagctgccccgactgctccctggactccgccaccgtcgccgctccctcggcccctgctaacaccctcgttgccgccatccgcgccatcgagtccgacaacaccctctccgaccaggagaaggcgcgccgccgccaggccctcctcgccggcgacgcccccgacgtcgcggacgacgacgacgcggccgacgataccctcgaaatcgtcggcaaaaacttcagctgcgttttctgcatgaagctccctgaacgacccgtcaccacaccatgtgggcataacttctgcttgaaatgcttccagaagtggattcaaagcaagaagagaacctgtgggaaatgtcgggcaccgatccctgccaaaatggccgagcagccaagaatcaactctgcgctagttgaagttatcaggatggctaagatttcaaagaatcataactctgctggctcagctgttccataccactatatgcgaaatgatgataggcctgataaggcatttacaactgacagagctaagaaggctggaaaagcaaacgcatcgagtggccagatctttgtgaccattgcacctgatcattttggccctatacttgcagaaaatgacccccgcaggaatatgggtgttcgagtcggggaaacgtgggaggacaggcttgagtgcaggcaatggggtgctcactttcctcatgtggctggtattgccggccagtctacgcatggggctcaatcagtagccctctccggagggtatgaagatgatgaagaccatggggagtggtttctttacactggaagcggcgggagggacctaagtggtaacaagcgaacaaacaaggagcagtcatctgatcagaaatttgagaagctgaatgctgctttacgcattagttgcttgaagggctaccctgttagggttgtacggtcgcacaaagagaagcgatcctcgtatgctcctgaatctggtgtgaggtatgatggggtttacagaattgagaagtgttggaggaagattggtattcagggtaagttcaaggtctgcaggtatctctttgtacgctgtgacaatgaaccagctccttggaccagcgatgatcatggtgaccgtccgagacccttgccaaagataaaggagctacaaggtgcaactgatataacagagaggaaagggcgtccttcatgggattatgatgagaaagatggctggaaatggatggtgcctccgccagtcagcaagaggcctgttctctctggtgatcctgagaccgacaagctaatccggaaagcaacaaagcgtgctcatttatctgttgctgaaaggctgcttaaagagtttggttgttctatctgccgggcggtgattaaagagccacttacaacaccatgtgctcacaacttctgcaagacttgtttgcttggtgcatatgatagccagtcctctatgagggaaagaagccgtggtggtcggactctaagggcacagaagattgtgaagacgtgcccttcctgccctactgacatctgcgacttcttagaaaatccccagatcaaccgagaaatgatggagttgattgagtccttgcaacgcaaggctgttgaagaaggcaagatggctgcaggtgatgccgaggaatctggtgatggtgactcggaggaaaatggtggtgctttggtgaagggagaagatgatagcaatttgaacgaggaaggtcaagacggtgtagacgctgatggttctgtgaagattgtggttgaaatggagggtgcaaaagatgataaaaagtcaaagatgggcgcggctgaagtggtggatgtgttagttgaagatgctgctgcgaaacagccgaagaagcgcacggctgatgaagatgctgctgcgaaacagacgaagcacaaggctgatgctgagactggtggcaagagggtgaagagcagtgctgcagtggaagaggttgatgtgtgcgtcactcctatgaaacggaccaggaagagtggtgatatgcatgatgacggcaacggcagccctgctgtgagcagcggccgcagggtgactcggagcagtgtgaatgccacgggagctgatgacagtccagcgaggaggaccagaagccgtggcagagcatgctgaaggtagtgggtgctgggcgccctcttttttgggtgtggaacctttgctgtgcgcagtgttgcagccatttcttttggtttgggggagaccgacctgctacaggtattccccatgcttctttcttccaggatgcaattcctatttaatttcaaggtagctgctgcactcgatctgcgagatgcaattttgttaactggcagccaggtgttggcttacgccatgattttggcacaacaggttcctagagagaaacaagatagctgatgttcttgcaaaaaaaaagcaagacgggcaactaccccaaatccatgccttttctctaggggcttcattctccaacctgtaatatctagcatgtgttttgaaacttggattgttcggggcaacatgaccccccatctttgtaacatgtttatgatgtaataaatcttgaatttgaa

SEQ ID NO: 137088 - DNA, 927 bp, Zea Mays
atgacgacgacgtcgagagatgagatagtcttcttggacgtggagacgacggctccgacgtcggcgggacggtggtggctgctagagttcggcgccatcctggtgtgccccaggaagctggtggaggtgggcagctacgacaccctcatccgcccgggcgacctctccgccgtctccaggcggttcacggacggcgtcgaggccatcgcgtcggcgccacctttcaaggacgtggccgacaagatattcggcatcctggacggccgcgtatgggctggccacaacatccagcgcttcgactgcccccgcatccgcgaggccttcgccgacatcggccgccccgccccggagcccgccggcgtcatcgactccctcaacgtcctggccgcggagttcggccgccgcgccggggacctcaagatggccacgctcgccacctacttcggcatcggcaagcagaagcacaggagcctcgacgacgcgcgcatgaacctggaggtgctcaagcactgcgccaccgtcctgctgctcgagtccagcctgccacacgtcctctgcggcaggcaccagtctcgccaagccgacggcgccgtggtcaccaccaggaggatggcggcgcagcagacgcctccgcctaaacatgaagtacaccaacaccggcccggcgtcttgaccaagctgccgccgtttacccctgtgcacgaccgagcagctacagctacagctgcacctgcacatgcggccacccccacccccaccactccatgcggcaagaggaatagcctgggcaaggtggtggcgagggccgtgacggcgaccactgctccattgagtagcagtaatagcacaagcacaaacaggcgccccgtgacggcgaccacgcccttccacatgatcctcaggcactcaagggccatcctcagatga

SEQ ID NO: 137089 - DNA, 285 bp, Zea Mays
atgtcgagctccggtgaccccttcccacagcacagcaggccgacgcccctgcatatgctcctccaccggggttctcctccagcagcacttccccgtagcgtgagcttcgtcgagccgttgctcccttcgtccccagcttcggcagccgagctccaaccagggacgtctagcgcccaggacgtacggccccctgctcctctatccacgacgcagagcccctccatcctgttcctggcagcgaaagcccagcccctgcggcaagctacctgctcaatagagtgctaa

SEQ ID NO: 137090 - DNA, 306 bp, Zea Mays
gtgactgtgttgattggtggtcacacctgtacatcaagtgcaagaaggaaaaccactacacccactagtgcttgggtagcttctaaagctgttcatatcctacaaaagaaaccagccatgaagactgttgagctgagggacaagttacaggaggacttttattgtgagattcactatgacactgtatggaaaggaagacagaaggcattacgagaactgcatggcagctgggaacagagttttcaattgttgttcaattggagagcagagggggcttgctatgttgcttggggagagcacaagtga

SEQ ID NO: 137091 - DNA, 125 bp, Zea Mays
ccaattatttgtgttgggcaattcaaccaccaaaattaattaggaaaaggtgtaagcctatttccctttcacgaagtcacacgccagggccaccattggatccaaatccgatgaacggatttccc

SEQ ID NO: 137092 - DNA, 1397 bp, Zea Mays
ccagtatcatctaaagtttgagaacttcattttcgcaagtaaattttatttctcttgggaaaatgatttttttaaaataaggttgtcaaactcgtcctaatatgttgcgtttccgtttttcctttcttgtatttggaagtgaagtggaatgaggcagcacagcctgctcctacagccgatgagatgaggtgattgaggtccgtccaggacaaaaaagcgaaacgactccttcagttccgtcccgttcgtgacgacctccggtcccgggagggggagggggagggggagggagaggcgaggtcatggcctccggcaccggctccggccagccgcaacccgcagcagctgatgctgacccgggagccggcgacaacaagctcgtcttcgagacgccgctgcagccgcagcccgtgagggaggactacgtcgagaacgccgtcaagttcctctcccacccaaaggtcaggggctcccccgtcgtctacagacgatccttcctcgagaagaagggcctcaccacacaggagatcgacgaggccctacgaagagtccctgatcctgaacccatcactacggctaccgcttctccacagcagcaggttggcagccagaatcaatcagctggggcgcaaacttatgcgccagcgcgatctatgcacccagcaaccgctggccctgtcgtccgaccccggttcagctggtaccaagcattcctcgctgcagggctcttgcttggttttggtgctagcacggctgtctttatcaagaaactgttccttcctaggctcaagtcttggatccgcaacgtcgtagcacaaggtgatggcgctgaaggcaaccaacttaagcacaggattgatgaggaaacggctgaggctgtaaaggcttctgcttcagctgtttctgctattgccaaaacaaaccagcagctgcttgcttcaaaggatgaagaaaagaagatactcgtgacattaacacaagctctagattcccaagccaaggagttaaaatccttgaccgagtcaatcaatcgtaccagggaacccataaacattaccagagacgataggttttctcagcaccgcccactggaagaccatgtccctcctgttacgaggaatggggcaattaacagttcatggagatcttctcagcaaactaacatgtatggtgtgtcacatggtgactttggttccgcaaggtctgcttcattcgtgccagcacctgctgaacctacagctggatcattttcaagatcttgtgccgagtgtggccattggaagaacaggaactcttatagcgtgctacggttgctcgtcacctctatcagctaccctggaggctttcctgttcttgctcttggtcgtgttgctagtgtcttgcatagtgtataatct

SEQ ID NO: 137093 - DNA, 1316 bp, Zea Mays
ccagtatcatctaaagtttgagaacttcattttcgcaagtaaattttatttctcttgggaaaatgatttttttaaaataaggttgtcaaactcgtcctaatatgttgcgtttccgtttttcctttcttgtatttggaagtgaagtggaatgaggcagcacagcctgctcctacagccgatgagatgaggtgattgaggtccgtccaggacaaaaaagcgaaacgactccttcagttccgtcccgttcgtgacgacctccggtcccgggagggggagggggagggggagggagaggcgaggtcatggcctccggcaccggctccggccagccgcaacccgcagcagctgatgctgacccgggagccggcgacaacaagctcgtcttcgagacgccgctgcagccgcagcccgtgagggaggactacgtcgagaacgccgtcaagttcctctcccacccaaaggtcaggggctcccccgtcgtctacagacgatccttcctcgagaagaagggcctcaccacacaggagatcgacgaggccctacgaagagtccctgatcctgaacccatcactacggctaccgcttctccacagcagcaggttggcagccagaatcaatcagctggggcgcaaacttatgcgccagcgcgatctatgcacccagcaaccgctggccctgtcgtccgaccccggttcagctggctcaagtcttggatccgcaacgtcgtagcacaaggtgatggcgctgaaggcaaccaacttaagcacaggattgatgaggaaacggctgaggctgtaaaggcttctgcttcagctgtttctgctattgccaaaacaaaccagcagctgcttgcttcaaaggatgaagaaaagaagatactcgtgacattaacacaagctctagattcccaagccaaggagttaaaatccttgaccgagtcaatcaatcgtaccagggaacccataaacattaccagagacgataggttttctcagcaccgcccactggaagaccatgtccctcctgttacgaggaatggggcaattaacagttcatggagatcttctcagcaaactaacatgtatggtgtgtcacatggtgactttggttccgcagcaaggtctgcttcattcgtgccagcacctgctgaacctacagctggatcattttcaagatcttgtgccgagtgtggccattggaagaacaggaactcttatagcgtgctacggttgctcgtcacctctatcagctaccctggaggctttcctgttcttgctcttggtcgtgttgctagtgtcttgcatagtgtataatct

SEQ ID NO: 137094 - DNA, 825 bp, Zea Mays
ctctgctcgtatttttgtccgtaccgagctccctcgccttcaatcccctggccgtcgcgcccctcaaatcgcccggccgtgcgcttgccttcaagctcactctccggtgtcgtgcagcgcggctcggctcgacgacatggagagtctcgtcctcgcctcctcctcctactccccttcgcgagctcagcgccctccctagccatgccgagctccttgcatgcagccgcgcgctcctctactcggccttgtccttgtcttcttccctgcgcgacctaccgatgctccctccccagctgcgtttgtagtcgtcgagcatgtcagctgtcgtgggcttgcctcaccggctgtagtctccaatcttcgcctcgacatcgtcgttccttgtactcaacacggggtttgccgttggtctctgctacaacatcggctcgtcgtggcctggtcgagttttcctcagcgttgcgccagtcgtgcaaatcttttcatcgcgtgaggacctcgccatcgtcccacccgctctcgtcgtcgtgaagattattcagcatcgcttggtctcgatggtcagttgatctgcataggtggtggtttggttatgagtggagttcgatagaagcagaaaatgaagtttgtgtgaggctctcctggtgctcgatgaaacgcctcacccacaaaagcatcatcgttttcggaaacctttgcattgattggtaataatgtgctggctcgccactcctattaattaatctaatggattggataatataatattcgcaatgattctcttgtatgtcatatagtaatgtgatagagtataatatttttaaa

SEQ ID NO: 137095 - DNA, 628 bp, Zea Mays
ccggtcattccgccaccgccttggttgttggatcgaccgagtttcttgccaccaaattctgtgaaatccactgctccagtgaataactaccgtgtcggctgccttccccagttcccctcctctccatttctccccttctgaccacccatggcgctcggcacccagtgtctctgctcacccttggcgaccgaacaggtgaaccacccactcctttccgccgtcctctaagggccatccagttgcacctacgcgtgagctctcccttcaacactccagtgcccgagctccctcccctgtggcctccgctcggtgcgcccctctctgctcctctgccgtgtccctgctagcgcctgccgtcaaccacccgccgtccgagcagacaccgggcgccagcaaactacgtggaggctagctagaggtgccggggatccagccgcacgcatcgcgtccctcggctggcgtgattcaccaccggagggccggtgatttcacgacattggtggtcgtcgccgcgggtccgcgcttcaacgtgagcccgtgctctctcacggccatctgataagaacccgttgctgaggaatcctggtgagcagcaggttgaagtagctgagcaggagctcattgaagg

SEQ ID NO: 137096 - DNA, 282 bp, Zea Mays
atgaaccgcgaaaacataggtaacagatacagtcaacctgccatgacactacgtagtaatactgctacaactacaaactacttgaagaagatgccctttctttttcccttgctcttctcaacagccttcatcctgaatagccttagtattagaacaatggcatctcgtgatggggcattctctgcaggctttaaattgtactcagcaccatcagcagacaaaattgaaaactcagtaggacgcccaaatgggatattgatctgcaaagtttgtacacgataa

SEQ ID NO: 137097 - DNA, 2491 bp, Zea Mays
ggcagtggtccaagtccaacgaccggaccggacggaccccggcggccggcacccagcggcagcggaaggggaatcatcgtccactcgcaactccttcctggcccctcccactcaccgctggacacttccatcaatctctttcccccttcccttggattcgtttcagctactgaaactgaacgcgggcagtggcaggcaggatcagccgagccgagttccatttccgccaccgtcccttccccctctgcccctcgttcctcgtcttctcgtccgcaagtcaagtcccttcccccttccgcccctccagcagcatccaccggatggccatgtccagcgacaccgccgccacgacggggacatgcaccaagcccaaccccaaccaccgcctcccactctcaatagcctgattgattcatggcctccgcccccaccaccgcctcttctccgctaccggcgtcctcgcggcccactgccacaccgcccgacaccgctgccacgcccccgcccctcacctctcccgcacccgccgctcctccaccctcctcccactcccactcccactcccagccgtcgcctgggcctcctcaacacacagcctcgccgccgccgcgggcggctgctgctcctccaaggccgccgctgctctcgccccctccaacgtccccgacgccgtctgccgctccgacgccctcgccatctccgccagcgtccccggcccctgcaccacctccttttagcgctcctccgccgtcagcacgaccactgcctacgcctgccatcgcagtcgacccggccaggggcaagaacccaagttggaacaagtcgtccagcccgggtgcgccgtccaggagcccatccgccccctttggcggccttggtaatggtgttgtagccatcgccgctgcggtggtcgccctgctccttcttagcctcctagtcacagcagtttggttcaaccgcaagcgcaagaggaagcagatgagtggttacagagctggtctcatgtcgcctttttcttcgcagcaaccttcgggtgaatctgcaaatgtaggatggtcagctgatccttctgtccacaccaactatagcgccgggagccccaggctgaaacaatgcttgtctgatatcagcatgggcaactccaggttcttctcatatgatgagctgtatcagatcactgatggtttctcagctcagaggctgctaggggaaggaggctttgggtcggtgtacaagggccgcctgccagattataaagatgtcgccgttaaacgactaaaggatggcggcggacaaggggagcgcgagttccaggccgaagtggagataattagtcgcgtgcaccaccgccatttggtttctcttgtgggatactgcatttccaatgaccaaaggttacttgtatacgactttgtttctaataacacgctgcattatcatcttcacggacacggaatgcctgtgttagaatggtccgcacgggttaaaattgctgcaggtgctgctcgtggaattgcttacctacacgaagattgccatccgaggataattcatcgagacatcaagtcctcaaacattttgttggataacaatttcgaagcaaaggttgctgactttggtcttgcgaggctggctttggatgctgtaacccatgtgacaacccgtgttatgggaacatttgggtacatggctccagagtatgcatcgagtggcaaactgactgagagatcagatgtgttctcttttggtgtagttttgttagagcttattactggccggaaacctgttgatgcatcaagaccaatgggtgacgagagcctcgtcgagtgggctcggccattgctctctcgagccctggacacaggcgatttggaagggttggttgaccccaggctcgagatgaagttggacgaggtggagatgttccgcatggtcgaggccgctgcagcctgcatccggcactcggcgtcaaggaggcccaggatgagccaggttgtgcgggttctcgagagctcagcggacatcgacctgaccaatggtgttcagcctgggcaaagccagctcttcaacgtggccaacgcggcggagatacggatgttccgccggatggtagccggcgcgcaagacgacgacagctctgacttgacacagtacgattggagcaggggtagcgacgctgccccgggctccaggatcttgtaacgatgaccacattgtggtttctgaattctgactctgcctgcagtacttgttctgtagggagagggatggaattcagttcaaagtttgttccctgaccggccgggtcttattctttaggaaaaaacaaagtgatgtgttgtgttgtgtgtagagaagattgcactcctaggtttggtgtgaaggaagaggtttgcagttcattcagatttttaggcagtcaaggacaaggacgtggaaattgaagcaattgttgttacttgaatgaaacacgtgacatgcaaggttcacc

SEQ ID NO: 137098 - DNA, 2573 bp, Zea Mays
ggcagtggtccaagtccaacgaccggaccggacggaccccggcggccggcacccagcggcagcggaaggggaatcatcgtccactcgcaactccttcctggcccctcccactcaccgctggacacttccatcaatctctttcccccttcccttggattcgtttcagctactgaaactgaacgcgggcagtggcaggcaggatcagccgagccgagttccatttccgccaccgtcccttccccctctgcccctcgttcctcgtcttctctatttgcttggcttggcttgcttttggttcaacttccacaccattcattcatttcttggatttctttggtggcgtccgcaagtcaagtcccttcccccttccgcccctcgtcaaagcaagcaagcaaaagtggtgcggtgccatcagagtaagcaagctccccattttccctattcctatactactactagtagctgcagcagcatccaccggatggccatgtccagcgacaccgccgccacgacggggacatgcaccaagcccaaccccaaccaccgcctcccactctcaatagcctgattgattcatggcctccgcccccaccaccgcctcttctccgctaccggcgtcctcgcggcccactgccacaccgcccgacaccgctgccacgcccccgcccctcacctctcccgcacccgccgctcctccaccctcctcccactcccactcccactcccagccgtcgcctgggcctcctcaacacacagcctcgccgccgccgcgggcggctgctgctcctccaaggccgccgctgctctcgccccctccaacgtccccgacgccgtctgccgctccgacgccctcgccatctccgccagcgtccccggcccctgcaccacctccttttagcgctcctccgccgtcagcacgaccactgcctacgcctgccatcgcagtcgacccggccaggggcaagaacccaagttggaacaagtcgtccagcccgggtgcgccgtccaggagcccatccgccccctttggcggccttggtaatggtgttgtagccatcgccgctgcggtggtcgccctgctccttcttagcctcctagtcacagcagtttggttcaaccgcaagcgcaagaggaagcagatgagtggttacagagctggtctcatgtcgcctttttcttcgcagcaaccttcgggtgaatctgcaaatgtaggatggtcagctgatccttctgtccacaccaactatagcgccgggagccccaggctgaaacaatgcttgtctgatatcagcatgggcaactccaggttcttctcatatgatgagctgtatcagatcactgatggtttctcagctcagaggctgctaggggaaggaggctttgggtcggtgtacaagggccgcctgccagattataaagatgtcgccgttaaacgactaaaggatggcggcggacaaggggagcgcgagttccaggccgaagtggagataattagtcgcgtgcaccaccgccatttggtttctcttgtgggatactgcatttccaatgaccaaaggttacttgtatacgactttgtttctaataacacgctgcattatcatcttcacggacacggaatgcctgtgttagaatggtccgcacgggttaaaattgctgcaggtgctgctcgtggaattgcttacctacacgaagattgccatccgaggataattcatcgagacatcaagtcctcaaacattttgttggataacaatttcgaagcaaaggttgctgactttggtcttgcgaggctggctttggatgctgtaacccatgtgacaacccgtgttatgggaacatttgggtacatggctccagagtatgcatcgagtggcaaactgactgagagatcagatgtgttctcttttggtgtagttttgttagagcttattactggccggaaacctgttgatgcatcaagaccaatgggtgacgagagcctcgtcgagtgggctcggccattgctctctcgagccctggacacaggcgatttggaagggttggttgaccccaggctcgagatgaagttggacgaggtggagatgttccgcatggtcgaggccgctgcagcctgcatccggcactcggcgtcaaggaggcccaggatgagccaggttgtgcgggttctcgagagctcagcggacatcgacctgaccaatggtgttcagcctgggcaaagccagctcttcaacgtggccaacgcggcggagatacggatgttccgccggatggtagccggcgcgcaagacgacgacagctctgacttgacacagtacgattggagcaggggtagcgacgctgccccgggctccaggatcttgtaacgatgaccacattgtggtttctgaattctgactctgcctgcagtacttgttctgtagggagagggatggaattcagttcaaagtttgttccctgaccggtttggtgtgaaggaagaggtttgcagttcattcagatttttaggcagtcaaggacaaggacgtggaaattgaagcaattgttgttacttgaatgaaacacgtgacatgcaa

SEQ ID NO: 137099 - DNA, 434 bp, Zea Mays
tgcacggcgtcgctgcagcaccaggcgttccgcagcggcggggaggtggcggacatggcgacgctgggcgccaccgcgtacacgtgcatcgtgtgggccgtgaacctgcagatgtacatcacggtgagctacttcacgctggtgcagcacgtgtgcatctggctcagcgtcggcctctggtacgtgttcctcccggtgtacggcgccatcgcgcccagcttctcgaccacctactacatggtgttcgtggaggcgctggcgggggcgccgtcctactgggtggtcaccctgctggtgtccgccgcctccctcgtcccctacttcacctacgccgtcgtcaagtcgtggttcttcccggactaccacaacaggatccagtggctgcggcacagggagagggcccaaggcccacccggacccggagaccagcgccg

SEQ ID NO: 137100 - DNA, 855 bp, Zea Mays
atgacagtgagagggccggagttgccggcggccggcttcgtgggtgcgtccggcgggggctggacctcgacgattggcccggcgccgtctctgttggcattgccgtggccacctttcttgcctttcttcttgccgccgccgccgccaccaccaccaccaccattgctgttggtggcagccgcgatgggctgcgggccgtgcggcgtcatggcggaaggggccaccttgccgccctcgttggcttctccggcgtcaggggagccgttgccgccgccaccgccagcctcaggcttatcctgctcaccatccgatgcctcatcgcacgaggcgccgccgtcagccttgtcgtgctgctccggggggttgggtccgccgttgccctccgccggcgcgggcgcgggcgctggcgccggatcggcgggcttgttgttcgccgcctcggggctcttgttgcccttcttctttttcttcttcttgcctgcgctgccgggagatccgtcgggcccgggcgggctgtcggcggccggtggggctggagcaggctccggccacggctccgcgtgcttcccggacttgaggagcttcttgacgagcgcgtctgcagagacgttgcctatgaccaccaccttctgctgctgcgtgtctatgtccgtcttgtacaccccttctatgctgtggagcaccttcttcaccttcttcttgcaaccctcgcagtggatgctcaccctcagggccagagtctggcaacagagaacaagaaaagaagatcacagccattttaaccaaaggaagcatcagtcagaatatgagtaccggcaagtcttggatagggcgggctccgagcttctcacctga

SEQ ID NO: 137101 - DNA, 2693 bp, Zea Mays
ctcactatgaagctatgcgggtcccacttgtaagctgtcaggtccacctgtaagaggcttttgacggatggaatagcgccgtgaggggatttttgagtgggttgtgaagataggaggacaaaactgagtagagaatttgggcgggggtaaatctgagcaagacgtcgagactagtgggtgaaatgtaaatgtcccttgaatcaacgccacgagcacctaatcttatctccttccaccgcttcctcaatcctcatcctgagccgcatcgttctggaggatttccaaagcgccttctccctgctcgctctattccccatcgtgccccttgagcttggagctcgagcgccaccagggtcacgccccttccttatccctcgtcggacccgtcgagcagagcccgacgccctggctgagctggtctagctcgcgccctcttccaatttgaccttccctgctcggtctggcatggaggtcagccaccagaaatcgtgcgccaaccttgcccttctcaaccgtcgaccatgtgaagccatggagccgtcgttcttagccccggctccccaagtccggccaggaacttcccagcgcctccctctctgctcctgtgctcggagcccagtactccacctcgccggggtcgacctcccctcgcccttatcctctggccgtcatcctggtcgccggttgagtcccctcatggatgtcgttgcccaggtgctgagtctcctcccctcgacatgcttaacagcgtcgttgtatcggactccgctatcgaaccgcgccactgattcaactcgccatcgacacagcgccgaacctttgcctctgccccatcgtcattctgctcgacgctggttcctcctccgattcccattccctgcttggtttcttgccattcgtgccactcggccaacgtgccagaatgtgttgcctccctccgttcgttgccatgatggccatcctcgttgcgacaggctggtcaccccggcgctgccatccctactcgaaatcctccctcttcgaagcttgctggtcgctgttccatgctgttcctaatagctcagattctgctcagctcgcccccatggcacatcagtcctgcttgattagtgttggctggtcctccttggcgttgttccgtgtagatccttgaccccgttcaccttcagccccaccgtgttcacctccctgcgttgtcgcgaactcgccgttgccattcgcctagggtgaagtccatgtcatctccctgccctggtgcacaccgtcgcgcttctgtgatctgggccaacacacctagccaatggagcccgtccgcatgtcactgttccgcttcccacgccgaggtgggttatcctggaagtttagatgaaggaagtgaagatcaacacgacattactagatgtttgatgaattgtgtggatcggatccgtcattagtttggtgagctattgtctaaaaatgagtagtatcgttaagctgatttcaactaaaacaaatgctaggctatttgataatgctttattcgtagaccaaatagtgtgatgtcttatttagttggcgtgctatgtatagtaaccaaggataattgtttagatagtgactttgtttctatccatatgttagtcttaggtgttcgatagtggtgaatctaattgagtgaatcttttcgtattatactttagctaaggaagacatggcctatatatagtctattgttgttggatgatttagttaggtatgattaactaaaaggtcatgattattgtagagctagcagtatctagtgcctgcacatatgagttgtgatgccttgttttaagtgtttaattctcttttatgtagtattatgttaaagtgtgctattcctctgtatgctcattcatgtgcatctcacatatcatataggtacgctaatgatcaaaatgcgaaggccagggtctaggttgatcccaaatggtgcaaaggatggtctactctgagaggcgatgtcggcggaccaatctagcagatgaatcaagtaccaggatggcagatgctcaccaagtgatcgtcatctaacaacactgacttagtgtttattccagacaagccccggtgcatttgccacctctttgctgttttaaaacttttatcactaatatgttgcattaggcggtaggagttaaatgattaaacctttgttacataacttccttgaactattgattatcatccttgataccagatttgaaaagcaagatgtgcttagtatgcttatagacaaggaacaaaatgttttgatacatgaatcatgtttttacaaagaaaaagaggttggaatgatgaaggtatcaaaggccttgatgacttcatcatttcagaaggctacctctgacaggtaccaggttttcagaaatagtttaatttgagaccagacgttgagcaggaaagatcgcccgtctttgtcgcttaaggaccgcatgattgttggcctgctgatctaggaccttttaactgaccacatgcctcatcatgggtaagcttagcctcggctggaccaataccagaaaggtcggcccgcaatgggagtggagagatggcaagagtatcgtgtgtccacctggcaagaggctggaaggtggggtactgagctctcggttggcggggacccgttctggtcttgagaaacccagtggcgagttgacatatgccag

SEQ ID NO: 137102 - DNA, 1849 bp, Zea Mays
ctcactatgaagctatgcgggtcccacttgtaagctgtcaggtccacctgtaagaggcttttgacggatggaatagcgccgtgaggggatttttgagtgggttgtgaagataggaggacaaaactgagtagagaatttgggcgggggtaaatctgagcaagacgtcgagactagtgggtgaaatgtaaatgtcccttgaatcaacgccacgagcacctaatcttatctccttccaccgcttcctcaatcctcatcctgagccgcatcgttctggaggatttccaaagcgccttctccctgctcgctctattccccatcgtgccccttgagcttggagctcgagcgccaccagggtcacgccccttccttatccctcgtcggacccgtcgagcagagcccgacgccctggctgagctggtctagctcgcgccctcttccaatttgaccttccctgctcggtctggcatggaggtcagccaccagaaatcgtgcgccaaccttgcccttctcaaccgtcgaccatgtgaagccatggagccgtcgttcttagccccggctccccaagtccggccaggaacttcccagcgcctccctctctgctcctgtgctcggagcccagtactccacctcgccggggtcgacctcccctcgcccttatcctctggccgtcatcctggtcgccggttgagtcccctcatggatgtcgttgcccaggtgctgagtctcctcccctcgacatgcttaacagcgtcgttgtatcggactccgctatcgaaccgcgccactgattcaactcgccatcgacacagcgccgaacctttgcctctgccccatcgtcattctgctcgacgctggttcctcctccgattcccattccctgcttggtttcttgccattcgtgccactcggccaacgtgccagaatgtgttgcctccctccgttcgttgccatgatggccatcctcgttgcgacaggctggtcaccccggcgctgccatccctactcgaaatcctccctcttcgaagcttgctggtcgctgttccatgctgttcctaatagctcagattctgctcagctcgcccccatggcacatcagtcctgcttgattagtgttggctggtcctccttggcgttgttccgtgtagatccttgaccccgttcaccttcagccccaccgtgttcacctccctgcgttgtcgcgaactcgccgttgccattcgcctagggtgaagtccatgtcatctccctgccctggtgcacaccgtcgcgcttctgtgatctgggccaacacacctagccaatggagcccgtccgcatgtcactgttccgcttcccacgccgaggtgggttatcctggaagtttagatgaaggaagtgaagatcaacacgacattactagatgtttgatgaattgtgtggatcggatccgtcattagtttggtgagctattgtctaaaaatgagtagtatcgttaagctgatttcaactaaaacaaatgctaggctatttgataatgctttattcgtagaccaaatagtgtgatgtcttatttagttggcgtgctatgtatagtaaccaaggataattgtttagatagtgactttgtttctatccatatgttagtcttaggtgttcgatagtggtgaatctaattgagtgaatcttttcgtattatactttagctaaggaagacatggcctatatatagtctattgttgttggatgatttagttaggtatgattaactaaaaggtcatgattattgtagagctagcagtatctagtgcctgcacatatgagttgtgatgccttgttttaagtgtttaattctcttttatgtagtattatg

SEQ ID NO: 137103 - DNA, 3152 bp, Zea Mays
cgtccatcggatcagatcgtcttctcccgcgctagggtttagcatcggtccccaatggcgtcctcagccgccgccgccgccgccaccgtcatgctcggcggcaagggctccgccctgtccccggccgccgtttacgcgttctccctcggcctcgccgccccgggcatcgacccttccgcgcacaagtcgctctctacccgcgcgccctcgccgcaggagacccccgcgcggctcgccgccgccctcgcggcgctggcgccggccgagtcccgcgccgccgcggcggtgctgcttaacaagctggtcctcacgtcgtccgactccgcctccgcgctcgtcaccgccgccacggtcgcccgcctcgcggactcgctcgacctcgccgccgcgctgccgctggcctcccgcgacgaggccgcggtggccgcggcgaccgcgcccgtcgccgtcgcgctagcggcgctgatcgattgctgcgccgcgccgctggctcgcgtcgccgacgccgtcgccgcgctgtcgtgcgaggccgcgcgcggggacgccgcggccttcgacgtgccggcctccggcgacgggctctgcgccaaggacgaggccgacgtcgccgccgacatcaaggtgctcgtcttcggctccaagcttgtcggcgctgctgggggcgtccccgccgccgccacgttcgccaaggtgcccgcgctgaacgggatcttccgccaggcggtgcgggcgctgcatgtcttagtgcgcatcgagctcaacgcacccgtcaaattggggaagagggatgctggtgaaaccggtgaggggaaggaggaggcactggtggtgctggccacacagctcgctagagcagtgcaggcactcagcaagctgagcattgcccgggcacggctctgtgcggagagtattgctgatgctgagcttcgggagaagcttactggtggcgttagcgttgatgatttgaaggggatgcttgacaatgttttgattgattcagatgccgtatcagtcttgaagggggtgtacaaccacttgctcaagttcagggactttcttgcctgggaagcagctgtggccatggcagtaattgaagcagacagttcaattgagaagccacaagctgctgttgagaatgaagcagccagtgtaactgagaagccactggctggtggggacaaagcaaagggtgacaagaagagcaagaagaagaaaactttgggtaagggtacttctgctgtgctcatgctgcttagggaccatgtgacaaatggaagtactgttgctgccatgaattctgcgtcggttgcagagtgggcaacctctctgtcattgctatttgatcccaaatgtccaggattggagtcacttgtggagaaggtgaaggagattgttgagagcaatgaagtgaggagattgcctaaaattccaaagggtacacgcgactttggtaaagagcaaatggcgataagggagcgagcattttcaattataactagtgtattcaagatgcatggtgctactgcgcttgatacacccgtatttgagctgagagaaacccttatgggaaaatatggtgaagactcaaagttgatatatgacttagctgatcagggtggtgagctttgctctttgcggtatgatctgactgttccatttgcccgttatgttgccatgaatagcattagtgcattaaagagataccaaatagcgaaagtatataggagagataatccatctaagggaagataccgagaattctaccaatgtgactttgacattgctggtgtatatgaacctatggaaccggattttgaggtcataaaagttctgactgaattgctgaatcagctggatataggcacatatgagataaaattaaatcacagaaagttgcttgatggtatgttggagatttgtggtgtgccccctcaaaagttcagaacagtttgctcgagtattgacaaactggacaagcaaacattcgaacaggtgaagaaggaactggttgatgagaaaggtatatcaaatgaaactgcggatgaaattggcaatttagtgaagactaggggccccccgttggaagttttgatggagttgagaaaggagggcagcaagtttatgaataatgtagggtctgttgctgcactgaatgagctggagatattattcaaagctctggataaagcaaatgcaataagcaagataacttttgatttaagtttggccaggggccttgattactacactggtgtcatatatgaagccgttttcaagggtgcagctcaggttggctccatagcggctggtggtcggtacgacaaccttgtgggtatgtttagtgggaagcaaatccctgctgttggtgtgagccttggaattgagagagtctttgcaatcatggagcagcaggagaaagaaagaaatgaggtagttgagcgttctatcattttatctttctcctttcaaggggacttgtggcaacttaatagatttgccttgaactgtagaagatccggcctacagagacagaggtgctggtgtcaattctgggaaaggaccttaccctagctgccgagctcgtgagcgagctgtggaatgctgggataaaggcagagttcaagctcactaccagggtggcgaaccacatcaagtatgccttgcaatcaagcattccgtggatggtgctagtcggcgagtctgagctgcagaaaggaactgtaaagttgaaggacgttgaagccaaccaggaagaagaggttgataggaaggattttgttcgagagttgaagaagagattgagtaaatcctaagaggaaaattttaggcgttgatatcatcttttgacacccatttgacgcaaactcaattagggggagaatgacattacatcattataatttaaactgacgtgaatgtttcagtccggttggcatagggccacttgttatgttcataaggtcattcgaatcccctgagtcccaatgcattatgctgatgaatcaggctgcagacatattgtgaattatattctttttgtactaccttgaggaatgaaaagtttttgtcctcacatgtaatttggaacaaagccagcaacctgtatttttattgcatttattattttaaaataaaaaaccgacattgaatct

SEQ ID NO: 137104 - DNA, 3003 bp, Zea Mays
atccatgccgtccatcggatcagatcgtcttctcccgcgctagggtttagcatcggtccccaatggcgtcctcagccgccgccgccgccgccaccgtcatgctcggcggcaagggctccgccctgtccccggccgccgtttacgcgttctccctcggcctcgccgccccgggcatcgacccttccgcgcacaagtcgctctctacccgcgcgccctcgccgcaggagacccccgcgcggctcgccgccgccctcgcggcgctggcgccggccgagtcccgcgccgccgcggcggtgctgcttaacaagctggtcctcacgtcgtccgactccgcctccgcgctcgtcaccgccgccacggtcgcccgcctcgcggactcgctcgacctcgccgccgcgctgccgctggcctcccgcgacgaggccgcggtggccgcggcgaccgcgcccgtcgccgtcgcgctagcggcgctgatcgattgctgcgccgcgccgctggctcgcgtcgccgacgccgtcgccgcgctgtcgtgcgaggccgcgcgcggggacgccgcggccttcgacgtgccggcctccggcgacgggctctgcgccaaggacgaggccgacgtcgccgccgacatcaaggtgctcgtcttcggctccaagcttgtcggcgctgctgggggcgtccccgccgccgccacgttcgccaaggtgcccgcgctgaacgggatcttccgccaggcggtgcgggcgctgcatgtcttagtgcgcatcgagctcaacgcacccgtcaaattggggaagagggatgctggtgaaaccggtgaggggaaggaggaggcactggtggtgctggccacacagctcgctagagcagtgcaggcactcagcaagctgagcattgcccgggcacggctctgtgcggagagtattgctgatgctgagcttcgggagaagcttactggtggcgttagcgttgatgatttgaaggggatgcttgacaatgttttgattgattcagatgccgtatcagtcttgaagggggtgtacaaccacttgctcaagttcagggactttcttgcctgggaagcagctgtggccatggcagtaattgaagcagacagttcaattgagaagccacaagctgctgttgagaatgaagcagccagtgtaactgagaagccactggctggtggggacaaagcaaagggtgacaagaagagcaagaagaagaaaactttgggtaagggtacttctgctgtgctcatgctgcttagggaccatgtgacaaatggaagtactgttgctgccatgaattctgcgtcggttgcagagtgggcaacctctctgtcattgctatttgatcccaaatgtccaggattggagtcacttgtggagaaggtgaaggagattgttgagagcaatgaagtgaggagattgcctaaaattccaaagggtacacgcgactttggtaaagagcaaatggcgataagggagcgagcattttcaattataactagtgtattcaagatgcatggtgctactgcgcttgatacacccgtatttgagctgagagaaacccttatgggaaaatatggtgaagactcaaagttgatatatgacttagctgatcagggtggtgagctttgctctttgcggtatgatctgactgttccatttgcccgttatgttgccatgaatagcattagtgcattaaagagataccaaatagcgaaagtatataggagagataatccatctaagggaagataccgagaattctaccaatgtgactttgacattgctggtgtatatgaacctatggaaccggattttgaggtcataaaagttctgactgaattgctgaatcagctggatataggcacatatgagataaaattaaatcacagaaagttgcttgatggtatgttggagatttgtggtgtgccccctcaaaagttcagaacagtttgctcgagtattgacaaactggacaagcaaacattcgaacaggtgaagaaggaactggttgatgagaaaggtatatcaaatgaaactgcggatgaaattggcaatttagtgaagactaggggccccccgttggaagttttgatggagttgagaaaggagggcagcaagtttatgaataatgtagggtctgttgctgcactgaatgagctggagatattattcaaagctctggataaagcaaatgcaataagcaagataacttttgatttaagtttggccaggggccttgattactacactggtgtcatatatgaagccgttttcaagggtgcagctcaggttggctccatagcggctggtggtcggtacgacaaccttgtgggtatgtttagtgggaagcaaatccctgctgttggtgtgagccttggaattgagagagtctttgcaatcatggagcagcaggagaaagaaagaaatgagaagatccggcctacagagacagaggtgctggtgtcaattctgggaaaggaccttaccctagctgccgagctcgtgagcgagctgtggaatgctgggataaaggcagagttcaagctcactaccagggtggcgaaccacatcaagtatgccttgcaatcaagcattccgtggatggtgctagtcggcgagtctgagctgcagaaaggaactgtaaagttgaaggacgttgaagccaaccaggaagaagaggttgataggaaggattttgttcgagagttgaagaagagattgagtaaatcctaagaggaaaattttaggcgttgatatcatcttttgacacccatttgacgcaaactcaattagggggagaatgacattacatcattataatttaaactgacgtgaatgtttcagtccggttggcatagggccacttgttatgttcataaggtcattcgaatcccctgagtcccaatgcattatgctgatgaatcaggctgcagacatattgtgaattatattctttttgtactaccttgaggaatgaaaagtttttgtcctcaca

SEQ ID NO: 137105 - DNA, 2337 bp, Zea Mays
gatcagatcgtcttctcccgcgctagggtttagcatcggtccccaatggcgtccccgccgccgccacgttcgccaaggtgcccgcgctgaacgggatcttccgccaggcggtgcgggcgctgcatgtcttagtgcgcatcgagctcaacgcacccgtcaaattggggaagagggatgctggtgaaaccggtgaggggaaggaggaggcactggtggtgctggccacacagctcgctagagcagtgcaggcactcagcaagctgagcattgcccgggcacggctctgtgcggagagtattgctgatgctgagcttcgggagaagcttactggtggcgttagcgttgatgatttgaaggggatgcttgacaatgttttgattgattcagatgccgtatcagtcttgaagggggtgtacaaccacttgctcaagttcagggactttcttgcctgggaagcagctgtggccatggcagtaattgaagcagacagttcaattgagaagccacaagctgctgttgagaatgaagcagccagtgtaactgagaagccactggctggtggggacaaagcaaagggtgacaagaagagcaagaagaagaaaactttgggtaagggtacttctgctgtgctcatgctgcttagggaccatgtgacaaatggaagtactgttgctgccatgaattctgcgtcggttgcagagtgggcaacctctctgtcattgctatttgatcccaaatgtccaggattggagtcacttgtggagaaggtgaaggagattgttgagagcaatgaagtgaggagattgcctaaaattccaaagggtacacgcgactttggtaaagagcaaatggcgataagggagcgagcattttcaattataactagtgtattcaagatgcatggtgctactgcgcttgatacacccgtatttgagctgagagaaacccttatgggaaaatatggtgaagactcaaagttgatatatgacttagctgatcagggtggtgagctttgctctttgcggtatgatctgactgttccatttgcccgttatgttgccatgaatagcattagtgcattaaagagataccaaatagcgaaagtatataggagagataatccatctaagggaagataccgagaattctaccaatgtgactttgacattgctggtgtatatgaacctatggaaccggattttgaggtcataaaagttctgactgaattgctgaatcagctggatataggcacatatgagataaaattaaatcacagaaagttgcttgatggtatgttggagatttgtggtgtgccccctcaaaagttcagaacagtttgctcgagtattgacaaactggacaagcaaacattcgaacaggtgaagaaggaactggttgatgagaaaggtatatcaaatgaaactgcggatgaaattggcaatttagtgaagactaggggccccccgttggaagttttgatggagttgagaaaggagggcagcaagtttatgaataatgtagggtctgttgctgcactgaatgagctggagatattattcaaagctctggataaagcaaatgcaataagcaagataacttttgatttaagtttggccaggggccttgattactacactggtgtcatatatgaagccgttttcaagggtgcagctcaggttggctccatagcggctggtggtcggtacgacaaccttgtgggtatgtttagtgggaagcaaatccctgctgttggtgtgagccttggaattgagagagtctttgcaatcatggagcagcaggagaaagaaagaaatgagaagatccggcctacagagacagaggtgctggtgtcaattctgggaaaggaccttaccctagctgccgagctcgtgagcgagctgtggaatgctgggataaaggcagagttcaagctcactaccagggtggcgaaccacatcaagtatgccttgcaatcaagcattccgtggatggtgctagtcggcgagtctgagctgcagaaaggaactgtaaagttgaaggacgttgaagccaaccaggaagaagaggttgataggaaggattttgttcgagagttgaagaagagattgagtaaatcctaagaggaaaattttaggcgttgatatcatcttttgacacccatttgacgcaaactcaattagggggagaatgacattacatcattataatttaaactgacgtgaatgtttcagtccggttggcatagggccacttgttatgttcataaggtcattcgaatcccctgagtcccaatgcattatgctgatgaatcaggctgcagacatattgtgaattata

SEQ ID NO: 137106 - DNA, 169 bp, Zea Mays
aaaaccgaccctatctacaaaacaaatcctatctctacaaccgaccctatccacaaaacagatcctatctctacaaccgatcctattcacaaaatagatcttatctctacaaccgacaatatccacaaaacatatcctatctctaaaaccgaccatatccacaaaacag

SEQ ID NO: 137107 - DNA, 231 bp, Zea Mays
cttccatcctacaaaaccgaccctatctacaaaatagatcctatctctacaaccgaccctatccacaaaacagatcctatctctacaaccgatcctattcacaaaatagatcctatctctacaatcgacaatatccacaaaacatatcctatctctaaaaccgaccatatccacaaaacagatcctatatctaaaccgaccatatccaggaaacaaatcctatatctaaaa

SEQ ID NO: 137108 - DNA, 188 bp, Zea Mays
cttccatcctacaaaaccgaccctatctacaaaacagatcctatctctacaaccgaccctatccacaaaacagatcctatctctacaaccgatcctattcacaaaatagatcctatctctacaaccgacaatatccgcaaaacatatcctatctctaaaaccgaccatatccacaaaatagatcctat

SEQ ID NO: 137109 - DNA, 231 bp, Zea Mays
cttccatcctacaaaactgaccctatctacaaaacagatcctatctctacaaccgaccctatccacaaaacagatcctatctctactaccgatcctattcacaaaatagatcctatctctacaaccgacaatatccacaaaacatattctatctctaaaactgaccatatccacaaaacagatcctatatctaaaccgaccatatccagaaaacaaatcctatctctaaaa

SEQ ID NO: 137110 - DNA, 160 bp, Zea Mays
aaaaaatttcaagattttttattgattgtctccgctctctgtataatatattttttgatttggctaactgatgttattgtttactccatgcaaatatgtcttggtacaacacgaccaatgaagtgagcgattagaaaagagttcacaacgattgactgaa

SEQ ID NO: 137111 - DNA, 194 bp, Zea Mays
tttcctctccctccctctccccacgccactctctctactccctccctctctctatctccctctctctagctccccatgcagcagcagcccccctcccatggagctggcgaccgagccctcccaagatccactctcaccttggcaagctctcccatggtgtctccccctcctctacggcagtaaggtgtaggtga

SEQ ID NO: 137112 - DNA, 196 bp, Zea Mays
tttcctctccctccctctccccacgccactctctctactccctccctctctctctatctccctctctctagctccccatgcagcagcagcccccctcccatggagctggcgaccgagccctcccaagatccactctcaccttggcaagctctcccatggtgtctccccctcctctacggcagtaaggtgtaggtga

SEQ ID NO: 137113 - DNA, 558 bp, Zea Mays
atgaggtgtcagctggatttgataacggatcaatgcgtactgcaagacattgacccagaagagcttcacgcaaaattgcaagaccctagttttctcgaagaagctcaattgattgatgttcgggagcctgatgaagtgaatgatattgtgattaccaggttgagtttcattcttttatttattttcgttcttgctgggttgatgttgaatttctactacctgcatggtagggagaaagcttcacttccaggcttcaaggttactgccatattggaggatggtagaatatttgaagttgaccttttggttggtgccgatggaatatggtcaaaggtgaggaagacactattcgggcactcagatgccacctattcaggttacacctgctacactggaattgcagattttgtgctgcccgatatcgatacgaaaaccacagttgattttaagccatacattggtccaatctataatgcgatactaggacgtttggccaatcatgatcaggatcagtgcactctcatttatcatgcaaatttgtgttctcccaagaggtaa

SEQ ID NO: 137114 - DNA, 471 bp, Zea Mays
atggaagaggggctcggctgggcgccatggatgcggcagcaggaaggagcgcacggcttagggaagcagggggcgcgccatgggaggggcagggaagaagggcgcgacgaccatggatggagaggggaggagcgctggctgggtagggagcgcgcgcgcacggagctcagggagatgggcacgagcagggaggaacatggatgggcggaaacggctcggttcgagctggggctagccaggcgcacgcgctgggtgctagagaccagagaggggcggccgagcgccaagaagatggagaggaaggcgccggaaaggagcaggcgcggctggagggagataagggagagggatgacggacgaaggtggaagacagaggctgggcacggcgtgctgggagataagcaccacacgcccaaaaaatcaatagagcggcggccaaaaaaatcagagcagaggggcggcgggggataa

SEQ ID NO: 137115 - DNA, 1450 bp, Zea Mays
actctgatttttttggccgccgctctgttgattttttgggcgcgtggtgcttatctcccagcacaccgtgcccagcctctgtcttccacctccgtctgttgtccctctcccttatctccttctagccgcgcctgctcctttccagcgacttcctctccatcttcttggcgctcggccgcccctctctagtctccagcgcccagcgcgcgtgcctggctagccccagctcggaccgagccatttccgcccgtccacgttcctccctgctcgcgcccatctccctgagctccgtgcgcgcgtgctccctacccagccagcgctcctcccctccccatccatggccatcgcgcccttcttccctgcccctcccatgctgcccctgtttccccaagccgcgtgctccttcctgctgccgcgtccatggcgcccagccgagcccctcttccatggtcgctgtcctctgctttcctttctcagcctccaccccgtcaggtcgcgcgctgacctcgagctctagccatgagcgtcggcgtcttctatctctattcctccctcaactccaccatgccgtgaagtttccctgcgcgcatcgagctccctacgcctaccattctagcaactctggcgtcaacgctccctgttcttgttgcttagagtgctccagcatctcgccaccatggcctttgccattcggcgatccaaactatgtacctatgtgtgtggaatcgcagcagagcaattgggtgtcagggagggtgacagctccgtgcatcgcttgtgtggtgctcgacgtaatggcggaattagaaatcatagctgtgctcgtggccttcgagttggattaaattactggtgagtgtcgtgctgtcggaccattgctcatgcttgtttcgtacccgatattaattccttgatgttaatattgtgtgttcttgtgtacgagtgaggagaaaaggaatcaccgaaaagtgtggggaagaagtgtagtccaatacgacacccgcaaagtacttgacaaattgtctaaacctgggatcgtcgccgtttccgtaaattccgtgtcgatctggttatggtgatctgacttgctattccctcttatatgattgaacgaattggatagatatattggttgtgataattatcttgttattgagcaggtgcgttgtagttgtattaaatgtttgttgaactgcctcattatttacggtgatgtagttgtgttcgtatagatatatggtatttatattcgtacgataaagtttaggttcgaggtgcggcgtaggcagagtgtgtattggctctacagatgtcatgtgttgctaggacaagtaaattagtaacataaagaataaatttagcatttaaatcgttttgtcgtttagtgttgtcagtagtaatttttgataaatcttgtttgcatagcaaagtcgattcattgctctggctg

SEQ ID NO: 137116 - DNA, 2013 bp, Zea Mays
ttctttgaccatgccattggtatcaacgttccaaggtcccgcttcctaccagttaaggcgacataagatttgcagctagtacaggattgtatgctatgctgaataaaattgagtatgtgatgtgctctctatgcgtctaaatgaaaacttctatttttgctttgcagtctgatctatataccttggttgatggctttgttacacgtaattcagccagaacaaatccatcaaacccctcaattgaacttggtcctgagttcaagaaggttgggagcttccttggtcgcttcaagtccatacctagcattgttgagcttgacagcttgaaggtttccggtgatgtttggttcggttctagaattgtactgaaggtacatcttcctaagttacaaaacagctataacattcatattggagtctttggttaatggggcaaacaaggcatctagacgaactgaacatggcaggaccccaagtgttctcgttctgctaccaacaagagagctggccaatcaggtgcacgctgactttgagttttatggtgcaacatttgggctctctgcatgttgtgtgtatgggggatcaccttatcatcctcaagaaatggcattgagaagaggtgtggatattgttgttggaactcctggtcgtgtcaaggatttcattgttaaaggaactctcaatttgaaatgcttgaaattctgtgtccttgatgaagctgatgagatgctaaacatgggttttgttgatgatgtcgagctcattcttggcaaggtagaagatgctaccaaagtacagacgcttctgttcaatgccactctgccagattgggtgaataagctctctatgaggtttctgaaagttgacaggaaaacagttgatcttgtcggtaatgagaaactgaaggccagtgcatctgttaagcaccttgctcttccttgtaacaaggcagcaagggcacaagttattctagacattatccgatgttatagccaggatgtactaccccatagatggttgtttttcagtatgctgtttgatttccaatgacttcgctaaacttttctgtgcttcagtggaggtcgaaccatcatcttcactgagacgaaggattctgcatcacagctttctggtttgatttctggatcccgtgccttgcatggagatgtagcgcaagcgcagcgtgaagtatgtgaattcttcttcgatttaataaccttcgcaatcatttgattttcaggtaatactggtgttgctgtcatgctttatgagcccagatataagcacagtgtcagcagactagaaagggagtctgggttaaatttgagcatatctctgtgccacaacccactgatgtagcacaatctgctggcagtgaagctgcagatgccattgcgagtgtgtcagacagtgttattcctatcttcaggcagcaagcagagcagttgctaagctcttccagtctgtctgcagctgacttgcttgccaaagcacttgcaaaggcagttggttacacggccataaagaaaagatcattgttatcttccttggaggattacagtacactacatcttcaaactggcagaccgatgtggtcacctgggtttgctataacattccggtgatcgtatttcttcgtcgtcggggtcatatttgttcccattggtgttatcttcagtttgacgtcggcaacgtggtcatggtgaccggcgggaggaacaccgagcgtgtaggagtgatcaagaactgggagaagcacaagggcatcttcgaggtcatcgacgtgctacttggagttttttgcatgctatgtctagttttctcctatttgttgtacaggaaaacatagaatggaattcaaatttggtggtcgcaaaagtgtggagacttgattcatatacagttaagcttaacattagtgcaaatagttgtattttagtttagatttagagtacacttatgtatgccttgtttgacaatgcttatttatgatatattgaagggtacttattt

SEQ ID NO: 137117 - DNA, 986 bp, Zea Mays
accataactaaaccaaactcgaaatcacgagatcgacgatgatttttggttcgaaccttctaccgaacatttagcaaacgtcgaacgggcctcacttcttcatcatcggtcccgagggtttctctcctcacaagaacacacaaatatacacatgattaatagtttataatcgacaccgagagacaaaatactcaagtaagaatataacctcatcgctgtgcaaagacttgcgggtcacgtatggaaaataatgaactccagttcaaacctcccatcaaacatctggtgcgcgtcgaggacataggtctgccccgtcgtgctgctgctcgcacagagacagagaggggcgagcagagatggctagggagttgggcgagctcggacctagggaacagaggcatggccatgagaactagctggagcagggacgaacgccagcgacgagaacgaagcggcagccgtccaacgcaggggagatgggatgccagccaccaacagagagagggggaaacagaggcaaccgaatttggacaggggcgagctccatggcggctagagggagtgagctgagggaggggcggcgtccatgggagggacaggagcagggacgccgagctttgaaccgatggagggagatcaggaaaagaaggggcagcgacctccatggctgagtagtcgagggcgctggccaaggtaatcacgcagggagcggcgacggagaagacacctcgtggaggagatggcagccagcgctggagataggaacgactggaagaggcgagcaccatggttggcggcgcccatggctgaagggcgagatggggatggaggagcagaggaagcatcggccacctgcaaagaaggaagggggcatcgtcctcagggctaggagctgcggtgaggaagatggctggtgtggggaggaaatggtgcagcaggccgaagccaacagcgtcctgcgctcgatggggatgtgggcaccgtga

SEQ ID NO: 137118 - DNA, 996 bp, Zea Mays
atgatacagctaccaggacaaccatcatttccaacatcagaattccctcaaatgcagttccaccataaagttgttgcaccaaaaaatgaattcttgcagaaccagatgagaagctaccctccacaagatgtgtctcatccaagaccattcgatttccatcatcatactctcccaccagcagttccttctaaccagcagccttctaccattcctgttgagaatgctccagtacctcatcctaacagatggccagagtattctggtggtgttggtctatcctattcatctcatcggcctccatatggtcagcatcaacctcctgggaatcatgatccaggaaatctggttatccccaaaattgaatgcacgctccatattcttgaggcatcgctcgacagggtagtctccaaatttgccacacggcttgcacccgacaaagtgtgtgacgagtggccaccggtgatcgccgagccctggcttgtaattctcaagcatctactcgtacctgtcgaccaagatcccccagtagccatggaggtagtacccattctgaaggtaaaccttatcaccccatttctcgcgctgcgtcgcgaggatgtacaccatggccgactgatcgtcggcctcgaatacttgccgatccttcaaggacttggtcagcaccttgccggcttcaatgcggacagggccctttggccccattggcgcccaggtatccagcttgtcaagcgaccactagcagttgcgcagcaagaagctgccggtgttgagcccgatccaattcttgtcgtcgtagaccatctcgtcccagccgtgcatgatgaggttctacggcccgtagcgctcccacgggagctcgaatgccatgtcggtgaacatggcatcagagtccatcgaccagaggaactcgacctccgggtgcgtgaggagcagcgcccgcacgggagcttggcccagaagcctgccatctcggcgtcgagcagcgccatgttgtag

SEQ ID NO: 137119 - DNA, 108 bp, Zea Mays
aaacgttttcaacgaagtttaaacgtagttttagcaacataggaaaatttgaatatatcataatttcatataataacataaagtcaagcgagcaacaaccaacagagc

SEQ ID NO: 137120 - DNA, 577 bp, Zea Mays
atgatgctttggctggtcaacctctgctctagctcgcagttgctgcgttgccgagtccctggccgccgtgccctgtgcgctttcctccgctcgccgggctgtacgttgctaggatcggaagcaccgtccttcatttggacagcaacagcgtgcacaaaagctttgttgctgctgttggaggcttctcgacgaaatatctaacaaagggttgaagctccagtgcatcgccgtcgttttgctatgtccggcgtcgtgtttttttttgccggtcattggtttcctattcatcacaacgccgtcgtccccgcgtcgcgcccggaatttcgccgcgcgtcctgtttcctgctcgccaacgtgccctctcggctcgctcggctttaattcccaatcgcgtcgtcgattccgccggtcgttcgttgtcgcgtcgcgggtgcagctctatatacgtcaccctcctgtgtcgtcgtcgttccgcgcgtcagcaagaaatcacaaggatcgggtgaagacgaagctagcagcgcgatattccccaagcgctcaaccaattgccttgatcggaaaatcgctaccgatc

SEQ ID NO: 137121 - DNA, 437 bp, Zea Mays
tacccaaacccgtgaacccgtgggttttttaaacccgaccaaacctagtgcatattgtcattttattttataaacgaacaacaaacttgttattccttatttacttcataatttttatacttcataatttttatcaattggtgaatgtattggtagtcagtgagagtgttgcttgcttgctattatagtttttactattgttatatatgtggtggatggataacttagtgcaaggtcacttaattatacaacttattatttgtatttcattctctctactaataatttttatatcaaatcatgaactcgttgttcattacatagattttggatcatgatatcatcagtcattacgatacctattgattatgagaagaacaagtatattagagatgaaacccgcgggtaacccatgggtacccgctaacccgatgggt

SEQ ID NO: 137122 - DNA, 731 bp, Zea Mays
actaaaaagtccaaggttaataacacaaaagtccacgcgaagaggtaagcaaggatcacggccgtctgatccaatactgacggatcatattagaaccccaacattataaaccggtacgcgactagagtcattcgatcagtgatcgatgatcaagatttaaatactcgcgatctaatctcatccatgcgattctgatctaacggctctgatcatgtttccggaagggatatgcctcatccaatcacgattgtcgctgatcaaaccaacgtccaggatccaatccccaattgggatcgttccccggaaatcgatcggccgaacgggccggaccccaatcctcggccgaacggacggccgcgccgcccactccctcggcggtcaccatggccagcgacggtgatcttaagcgccagtgccccaatcccaggtccgagtggcacaatgcgaagcagagacaacgaccaatcacccgagaaggtactcaccgcaatccacccagcgcagagctcccaaccatgccaccgcatggacccgcggtgattcatgtacttcttccctattctcgtcgatgcttgctcaattgacggtggtttggcggcgcctaagatgagggttggggggttttgcgtctacgttatatgggcagaggcgggatcaggaatctcacaacccaatccaccagatcgcaggcatgcgcgtgattggcatcttctattggagtctgttaccat

SEQ ID NO: 137123 - DNA, 615 bp, Zea Mays
ttgagagttctttgagaattgcaagcttttgtcattgccatgaccatgtttccaggttaagaaactccatcaagaaaagcagctaggcatgatggtggacaaaggcctgggtagcaactaggacagggttgagtcagtaccacctgtctcacaggcctagaatgttcgaggtgatcaggatgctggaaggagacaggctcacagagagatgggaggtgtcgcagaacgtggacacgccagagttcgtctcatcggagctcctacttcaaaagtacatggattttgcagcggacgaatgctcgcttggtgtagaagccatggagctctctggactaaggtgaccatctgatcgatcgaatcggccatcgcataggtcgcataggtgtcttgccatatcaagcctatattattgttgtattacattggacacatagggaagggaaaaaaatccggtgaattgtagggtgtgatctgtctgcctatacatgtggtggcattcatttgtgcaaatgattttgatatattgatgtcgagaatatatatgttgtttatttctatgtaatcgttgcacactataattttatcaaacaacttttgtattgttgcaaggggcga

SEQ ID NO: 137124 - DNA, 1453 bp, Zea Mays
atgatgatgatgactagatggagttccactgatatgaagagaagaaatagaatattggctaatatggtgccaattcgtaatttaagtttacctgattattatgaatatgaagaagaataccatccagtttcaagagaggcaaccagaggggtctgtatactcctacgaatagacagatatttatcttcaattggaaggagcattcaagaccgtgaggttctacgcgatttctgccaacggttactctttccccaacgcgaggctgggcacagcttttccgaaatatatgatgatatacgagcgcatggggtagaagcaagtcgattgggtcagcctctaagagatctgtacgatgagatggaaaggaacggcgagatagtaaataacggctcaatcattatccctggaggcggcggaccagtaacagaaagcccattggatcaatttggaattcacccaattctggatctgaatattggcaagtactatgtctcattcacaaatctatccttgtctatgctactcactctcggtttggtcctacttctggtttttgttgttacgaaaaaaggagggggaaagtcagtgccaaatgcatttcaatccttggtggagcttatttatgatttcgtgccgaacctggtaaacgaacaaataggtggtctttccggaaatgtgaaacacaagtttttcccttgcatctcggtcacttttactttttcgttatttcgtaatccccagggacatccggataaggggactgagagagtagatatgggacttttcctcataaaagcctatataggtgggtggtatgataatctttcaaagatgggaaattccaatgattctttccgttttgtcgagccctgctttggtctctggtttgatggttgtctcgacttctccgctatgatcttcccagtagttcatataggagctattgccgtttcattcctattcgtggttatgatgttcaatattcaaatagcggagattcacgaagaagtattgcgctatttaccaaaagaaggcgaggcccacctgccttctctaggtactttacttggaaaggtgtcaccgccttccttcttctctaggtactttacttggaaaggtaggtgcgggaaagaagagcgggtatgtgggcttctttcaatcgaaacttttttgaagccgtcaaactttatcgtttcattataaatggatctaaaacattgcgttgcagagtggaggcgtgaagaaggttaagagaagcaagccaaaggaaagaaaaagcaacttgatacaatattgaagataaacactcaggaaagcactgggtcaactgactccactagccagcttctgcttcagaacttacttcaaagaggctgacttagcacttagcataatgcttttgttccggtgcataaaagtaagtgagcaggtgggtgagtccaaaggtttttcc

SEQ ID NO: 137125 - DNA, 1832 bp, Zea Mays
atgatgatgatgactagatggagttccactgatatgaagagaagaaatagaatattggctaatatggtgccaattcgtaatttaagtttacctgattattatgaatatgaagaagaataccatccagtttcaagagaggcaaccagaggggtctgtatactcctacgaatagacagatatttatcttcaattggaaggagcattcaagaccgtgaggttctacgcgatttctgccaacggttactctttccccaacgcgaggctgggcacagcttttccgaaatatatgatgatatacgagcgcatggggtagaagcaagtcgattgggtcagcctctaagagatctgtacgatgagatggaaaggaacggcgagatagtaaataacggctcaatcattatccctggaggcggcggaccagtaacagaaagcccattggatcaatttggaattcacccaattctggatctgaatattggcaagtactatgtctcattcacaaatctatccttgtctatgctactcactctcggtttggtcctacttctggtttttgttgttacgaaaaaaggagggggaaagtcagtgccaaatgcatttcaatccttggtggagcttatttatgatttcgtgccgaacctggtaaacgaacaaataggtggtctttccggaaatgtgaaacacaagtttttcccttgcatctcggtcacttttactttttcgttatttcgtaatccccagggacatccggataaggggactgagagagtagatatgggacttttcctcataaaagcctatataggtgggtggtatgataatctttcaaagatgggaaattccaatgattctttccgttttgtcgagccctgctttggtctctggtttgatggttgtacgtgctaaaaatccggtacattccgttttgtttcccatcctagtcttttgcgacacttctggtttacttattttgttaggtctcgacttctccgctatgatcttcccagtagttcatataggagctattgccgtttcattcctattcgtggttatgatgttcaatattcaaatagcggagattcacgaagaagtattgcgctatttaccagtgagtggtattattggactgatcttttggtgggaaatgttcttcattttagataatgaaaccattccattactaccaacccacagaaatacgacctctctgaaatatacggtttatgccggaaaggtacgaagttggactaatttggaaacattgggcaatttactttatacctactattccgtttggtttttggtttctagtctgattttattagtagctatgattggggctatagtacttactatgcataggactacaaaggtgaaaagacaggatgtattccgacgaaatgccttggattctaggaggactactattcatattcagaacagaaggttcttctcccacaaaggggatgacgcacctgtcccccccgctgatccggaatccatttaatctgatttggcagagagaatagaaaggatttataggcgggccggggaggagcaatctttagtagaagccgggactacgccaagggaacttgtagataacgtcctgccagagggggcggagctaccgcttctacaagaaacctgggttcagtttgtacgggacgagtcacacagcgagttttgggtagagatcgattcgataatctgctaaggaaatatgggcacgcggcgcgcggtgagcccgacacccccgatcccgatgctcgagcctgatgcccctcaatcaggaggaggcgactcagcggggagcacgggggaagaaaatt

SEQ ID NO: 137126 - DNA, 295 bp, Zea Mays
aaaaatgtttgtgctggaaaatgactcaagcctattttccacagggagaagagaagaaaaagtctatctcccctagtgggaaaaccacggaaccctattttcgcttgggcggcaggctcgattgacaaaaaagtgtatctcacctagtggcaaaagtagtacttttgacctatcaactcagcaacttccctgacttgactggaatttacgtagatgagcgatgcgttttagtaagatcttctgagatgagaatcgactgctttcctgatgaagtgagggtatagggaagtatatg

SEQ ID NO: 137127 - DNA, 808 bp, Zea Mays
gggtgttacaatcagtcctcaactttgttaattagtccgaagctccaactttattcattagtccgaagttgtatttccttggctacgctatacaacagaatgataacactacaccatctatgccgtgtccatcaccatccgcatcgtgctaggcttcctcctcatcgcgctgatctggaagttcgactttgcgccattcatggtgctcatcattgccatcctcaacgacggcaccatcatgaccatctccaaggaccgcgtgaggccgtcgcgcacccccgactcgtggaagctcaacgagatctttgccaccggtatcgtgctcggcacctacatggccatcgtttccgccgtattcttctacctcgcacacgataccgacttcttcacggacgcgttcggcgttaaatcgatcaaggagaacgatagggagctgatggcagcgctgtacctccaagtaagcatcatcagccaggcgctcatcttcgtgacgcggtcccggagctggtccttggtggagcggccgggcttcctcctgctcttcgcattcttcgccgcccagctggtggcgacgtgcatcgcggtgtacgccaactgggacttctgccgcatccaggggatcggctgggcgtggggcggggccatttggatgttcagcatgataacctacatcccgctcgacgtgctcaagttcatgatccgcgcagcgctcagagcaacaacgtccagaacaaggcaagccagcccactctcactgttcaaactgacactcaagaggtgcgtcgtgtcgctggcgaagggagcataa

SEQ ID NO: 137128 - DNA, 590 bp, Zea Mays
cactgcgcgcttcgtactgctggccgggctgctccagcaccaggaacgctcgctcctgctcgtcgacgttagattttcccagacgcgcgagctccccagcaactccaacacgttgctcgcctcgctcagtcttcaagccatcgtgtcgctggttctagccaaagtcgggcgcgttctttccttcgccaggcagcgcctccagtcgtcgtttcttttccacggctgcacgctcaccgactcaagcgcttggccatggagctcagtttcgtgtgtgcctgtgctgggtcgccgggtcacgtgctcatccgttttgatgccgtgcacgctccggcttgtggaactcgccggcgtcgtcatctactactagacctcacagtggtactgtgatgccgccgtggagacgtctattgtgccatctattctctgttgtctcgctacacctgattgtcatcgtcgtccttgtatcgatctcgctacggcagcatcggcgctctcgatatcgtcctgagttcactccgcgtgctgcgacgtctcgctcacctcctcgccaagccgtcgtcgccctcgcggttatcgggtcgattcgatca

SEQ ID NO: 137129 - DNA, 590 bp, Zea Mays
cactgcgcgctttgtactgctggccgggctgctccagcaccaggaacgctcgctcctgctcgtcgacgttagattttcccagacgcgcgagctccccagcaactccaacacgttgctcgcctcgctcagtcttcaagccatcgtgtcgctggttctagccaaagtggggcgcgttctttccttcgccaggcagcgcctccagtcgtcgtttcttttccacggctgcacgctcaccgactcaagcgcttggccatggagctcagtttcgtgtgtgcctgtgctgggtcgccgggtcacgtgctcatccgttttgatgccgtgcacgctccggcttgtggaactcgccggcgtcgtcagctactactagacctcacagtggtactgtgatgccgccgtggagacgtctattgtgccatctattctctgttgtctcgctacacctgattgtcatcgtcgtccttgtatcgatctcgctacggcagcatcggcgctctcgatatcgtcctgagttcactccgcgtgctgcgacgtctcgctcacctcctcgccaagccgtcgtcgccctcgcggttatcgggtcgattcgatca

SEQ ID NO: 137130 - DNA, 590 bp, Zea Mays
cactgcgcgcttcatactgctggccgggctgctccagcaccaggaacgctcgctcctgctcgtcgacgttagattttcccagacgcgcgagctccccagcaactccaacacgttgctcgcctcgctcagtcttcaagccatcgtgccgctggttctagccaaagtggggcgcgttctttccttcgccaggcagcgcctccagtcgtcgtttcttttccacggctgcacgctcaccgactcaagcgcttggccatggagctcggtttcgtgtgtgcctgtgctgggtcaccaggtcacgtgctcgtccgttttgatgtcgtgcacgctccggcttgtggaactcgccagcgttgtcagctactactagacctcacagtggtactatgatgccgccgtggagacgtctactatgccatctattctctgttgtctcgctacacctgattgtcatcctcgtccttgtctcgatctcgctacggcagcatcggcgctctcgatatcgtcctgagttcactccgcgtgctgcgacgtctcgctcacctcctcgccaagccgtcgtcgccctcgcggttatcgggtcgattcgatca

SEQ ID NO: 137131 - DNA, 142 bp, Zea Mays
cggagcatgcctgcctgcaaatcgaatcctatcctatgaaacaagcttctactattcaaatcaaatcaaacacagaaacctcagccggagatggcgagtcaagtattgcacgccggttggaagtcaagctatctggaatgcg

SEQ ID NO: 137132 - DNA, 277 bp, Zea Mays
gcgactctcaccgcatacggctcgcacaaagactcaaaaatccatcccgagctttttattccacctctcctctccaatcctcgatcaaacctctacttcaatgaaccacgtcgcgttctttatctttctcactcgtcgtttcattggtcttttattggtcattgattgtttagtctcgtggaagcaaccgatgctttggtcattcgactccttgatgccagtctgtgcttgctgtcatgctggcaaaagcgggggtttcggccggttttacctacta

SEQ ID NO: 137133 - DNA, 283 bp, Zea Mays
gtacgtgcgactctcaccgcatacggctcgcacaaagactcaaaaatccatcccgagctttttattccacctctcctctccaatcctcgatcaaacctctacttcaatgaaccacgtcgcgttctttatctttctcactcgtcgtttcattggtcttttattggtcattgattgtttagtctcgtggaagcaaccgatgctttggtcattcgactccttgatgccagtctgtgcttgctgtcatgctggcaaaagcgggggtttcggccggttttacctacta

SEQ ID NO: 137134 - DNA, 684 bp, Zea Mays
atggagatgaatgaagaaaggaaggtcagcttactaggactagcagatatattatcagcctcaattggaggattctcatgggctcccttgatttcaaagatctgcaagaataaagtcaaggcggaggcttggtttactggtcttagtgccttgatatgtcgaggacagcatggatcccaggtccaacatatagatggaatccgaatcgctggacttccttttgataacctgaaaagttccaaggatgctttgttggctggtatagatggtggtgatgcatctgctgctgaagctgaaggaggctcagaaaaatctaccgttgaaaaagagctagagcagctttctagcatattgcctgatcttgagaagaagcttgagcacctgtctgaagcaaacccaagcgctggcatggatgagatggtgaaggaaattgcgtctaggatagcaacctcaagcaatggattcgactcctcggttatgtctacggcagcgacaactggaagctttggaagcactgtgactgaccttggggttgtaggcagaggcgtcaaacgagctagcatcaagccgatctctgccgaacctgctgctaagaaacctgcacttgattcaccatctctccaaggtgacagcagcatcaactctgaggttgtccctgcaacgcagactgatgaatccagctaa

SEQ ID NO: 137135 - DNA, 485 bp, Zea Mays
accggcggcgatctagttccggcgaagtggtccgtgaagtcggggaggctctgatgaacacgctggtagtcggatgacagccggtgatggttggagtcgtccgatctacgttccccaacggtctgatttcgtcggcggaggtgttctggctagtcggcgttgttagggttcgattcctttggcaggaaagcttctcggatgctggggagacaattccctaagggaatttggctggggatagctatggacgcgggtacacgctcaccggcggaaccctggctctgcgagggtgattttgggtttcttgcaaagtggagctctggctggggttctggagagtttcggggagctcaggtggacagggtggaggctatagttggggtggcgcgtgttcgggtacggtggttcaccatgaccgaaccttggcagcaatggcagcgactgtgatcttgctctcggtaagctctccggtgaggaaacgatcg

SEQ ID NO: 137136 - DNA, 865 bp, Zea Mays
accaaaccgcttcgcttgctcctcagctccctgtcgcacacaccttacgccgggtaggcaggagcaggactcccactgtcccaccgagccagaggccctccgatccgagcgagcaggggcgccaccgtctccaatggctcggccacagcaacggtaccgcggcgtgcggcaacgccactggggctcctgggtctccgagatccgccaccctctcctgaagacgaggatctggctgggcaccttcgagacggccgaggacgcggcgcgcgcctacgacgaggcggcgcgcatcatgtgcggccctcgcgtgcgcaccaacttccccgaggacgccgccgccgacggacaggggcagccggccgcgacggcgcttctctcccccgcgctcgtcgccaagctccaccgcttcaaccttgcgtccgtgcaggcggcgcgcggcagggccgatgactccgcggcagccgccgcctcggcgcccgccgtgctcgcacgcatcgcgccgatgcctgccagcaatgccagcatgcgaatcgcccccttgacgtcggcggctgtggctgcggggcactggagcggcgactttctcgaggagcagtacgtggaccagatgatcgaggagcttctagactccaacttctctgtggagatctactagtttcacccgactcctctgctccgtctcatctctctgtttggtttcgtcagctcagctcagctagggagtgtagtgagttagtggtgagttagtacagtagtatcattagccatgccaggaggaacttgaggtttctttggttagactcttgagcagtctgatgtgtatacggtagcgtcgtcagagcataaaattttttctactgccaaa

SEQ ID NO: 137137 - DNA, 1025 bp, Zea Mays
tgtgaagagaaattaactatgactcaagctgccatctcaagggaagctggacctctaggttatgatcctggagaaaaaactttcttcaggtcagttcaaggattactagctgtgagcagagtgtgataatggctcctagcgctatcgcaagaggagttggtccaccaggatatacgcctagagaacaccagggcaatggggctccatggaatacaagctatgagcgaagaccgtttacgagtcctgcgactagctcaagagaagttagacctccaggatatgggcctgaagaaaaccaaggtagtggcatttcctgtaatacaagcagagagcaaatattgtttatgagccctacaaccatctcgagagaacttggtccaccaggatatttgcccagagaaaaccagcgcagtgacacttcatggaatacaagctgcgagtcgggactatttatgagtcctgtgaccacctcaatagaacatggtccaccaggatatgggcctggagaaaaccaggagaatgacagtacaagctgcgagttgagaatgtttacaacaaacagagcgcgtttacaagtcctacaaccatctcgagagaagtcggtccgccagggtatggacaggaagatcaaggcaatggtggttattggaacacgagttgtgagcagggagtgtttacgagtcctactacaaacatctcaagataagtcggtccgccaggatacgggcccggggaaagtcagggcaataccacctcgtggatttcgacctgccagcagagaatgcttgcaagaatccagagaactggtggctcaaggagttgctcaaagaaacagtttggacattgatgtggacctagcccttggctttgccgcacactatgggaagatcgaaaccatgggatgcttggttgaagaagtgaacaaccttcggtcaacaggagtgcttgctcgtgtgtacttgaacatgcaattcctggcgcattcttctgtgttggcaaaatcttctaagatggttcctgactaa

SEQ ID NO: 137138 - DNA, 224 bp, Zea Mays
atgttacgtttgcagatatggatgcgatggttttctccactttaggaaagctggaagagccttttgaactcactttttgttttgctaacagtggtgttatggtgaaacatagttttgcgtgtatgtaccaacaactaaaatgtaaatacgatattatcatagttgagtacagaaataattatctcttatatcttattgtaaaatctaaaacagttctcctgtag

SEQ ID NO: 137139 - DNA, 442 bp, Zea Mays
ggttgtaagtcctattgcaagaatagtctactttttataatagaatcctcgtttttatgagaattctattataaaaaaaagttctttgataggaaaagaatacttaggacacaatataccaaaaacttttgttctatataatgataatggagggattcgttctaagaatattgtaccgaggaattcgacacataaaagtacatttattaattaatccgaattattcattcatattaaataattggaatttcttttggatagttcaattcagattatttcaaaatcttattatttgtttgcttgttgcccagaaaaaccttttggttttggatgctcgttgcccctagaaaatgatcttgattttgctaaagaataagattgtactatggaaaaataagtctttttttccaaagatttttacgaatacgcttttttgacatcg

SEQ ID NO: 137140 - DNA, 282 bp, Zea Mays
gatctgggcaaaacaccattaccgacgtgttggcggaagaggggtgtagtggccgccgccgtctggtgcttgcacgggcttgcggttcgtgttgcggttcgggaacttcgcgagcgcgcctgggaagcatatccagcctcgatttggcaagggacgtcatggtctggcgggaattcttcactggagttgggtggcggcgcggagttctctccctccgtggaccagttcgagcaccctcacaactaccgaagagccagtggccgaggatccgggtgttcatca

SEQ ID NO: 137141 - DNA, 1212 bp, Zea Mays
atgcggttgtgcttctcgacacagaacttcttctcctgccgtcgggatcggaacaggaccgggacggtccttgacgggaggtgtgcgaggtacaaacaaccaactcgattcattctgttcgcgatggaagagtggaggaaggaggatgcagggcgttgggatagggtgatgaaccggttgaatcgtttgattcagaagttggaagtggtggatgacgtccagcaaacaatcccgattcagtcgaggttagcaacagaggtggcaacagaatggactgtgttgacacgtcaaatgaaggaaaccaaggctagggatatggagatgtggcctgaggaacggggttggttgtatccacggtctggtgaacgaggatgtcagtgtgggcttgctgcatcgggtgttggaggtatgacccctctggtgtttgatgaaatgcctcacaacagcagcgagactgtggttgtcctgttccctgaagattcagattccttggtgttcagtgaagtgggcctaaaagtggtatgggatgaggagatgcaatctgaaactcacatgcatgaaggtttattgaagcagcttgctcgaggtggagaagatttagaagaatcggctagcaaggatgatcatgttgaagttaaagctagtaggcctgacccacaaagtgaggcaactgtggtagttaagaatggtggaagtatggaggagcttcttcctgctagtgctggcagtgtgctagaggatagcctggagaaggagcagaacgttgaagatcaggttgctgttagtaacgtggaagatgttggcacagaggctgaaaatgttgatgctactagagctggcggtattctctctcaaatattggctctggaatcaaacgatgaatttaatggtgcagggagcctggaggttgtgaagccgaacttgaaggagtggacagaaggcttctctagtggtagtagctctcgagacttcattagtagcggggttgggcagatgatatttgatgaatctgatgccgatgaggatgaagatgatgaggagaaagtatttggttcatcatacctttatttgcagcgtgatttcagccctgctcgatcaaattattttagccttttaaagctcgtagctacggtttaccctacggaagaaagaatacatgtagagctggagattggacttgtgcagaaaatggcagttgcaagcattggctaa

SEQ ID NO: 137142 - DNA, 540 bp, Zea Mays
atgactagtgtgaagtgctgccttcgtgtcctggaacagagaaattcttatttgcagaagtttgcagttaatctgatttccttttcgcatcttcttttcgtcgtggttggattccattcactgacctcacggtactcccagcagtactgtgtcctcattgtgccagagctgatccagcagatgtgggactccaagaacgtgatgtgtgctaagatggacaagagtagctgctatgaggtggttcttcttggcaccataactagggtccaacaactgttacaggatctcttcaatggcaaggagctgtgcaagcacatcatcttcgatgagatggagtttagggaggtagagagtaacatgatttgtgtctgtttgcatgaggaggatcatgtgatcctttgggaaactccaagactagagaactggttttgcaggaccaagatattcctcaagctgttgatcaacggccagaaatgccagacctcacgccgtggttgctcaccaacggccaaggggaacggcgaacgtgacactctgtga

SEQ ID NO: 137143 - DNA, 321 bp, Zea Mays
aaaaaggctgaaggcttcgctatcgctcatggtttgtattgtagtcgtagtcttgtagtcggccctccatgcctctctagtctttctaatcctgaggcctttttccttcattcattttgcggtagcttacgcgtcagaaaaaggcctcctttccggcccggaagatcgcttcgcttctggcgactagcttctacccacaatggctaaagctaccttgaatcaatcaatgaatgattcgtaaccccgggttcgaggacccgttggtcaaaggaagggggggcctgattccaggacggagccgtatgaggcgagagtctcacg

SEQ ID NO: 137144 - DNA, 103 bp, Zea Mays
gtgatttgtgttctgatgatgcaaacacttccattttttgttactcctgcacaagatttcctgcacaaccaactgtcttttgaattctttttgttatttgatc

SEQ ID NO: 137145 - DNA, 642 bp, Zea Mays
tccctgcgggaggcgtgcgaggacgagggcgccgtccacctcgtcatggagctctgcgagggcggcaagctcttcgaccgcattgtcgcgtgggggcactacaccgagcgtgccgccgccaatgtcacccgcactatcgtcgaggtcgtccagctctgccatcggcacggcgtcatccaccgcgacctcaagccagagaacttcctcttcgccaataagaaggagaactcgccgctcaaggccatcgacttcggtctctccatcttcttcaagcctggtaacttctggttactaatatctcagacttacaatttggaaaatatcagtcagttaggaattccgcatttactgttaatcatgaagaacatgaggtgtaaaaggaacatgtctggttatctggagttggcggtggccttttcattcatggttgcctgcactcatccgggttgtagcaatatcggtctccaggtgcaccccatgattaagctcctatgtccagatatgtatattacctatcaacaaatcttggcatccaggtttaaactcctgccgctgctcgccgatgtaaagatctcctacctctgcgattctaaaaagaagattcaggtcccatttgccatagtggatccgtttccactgtag

SEQ ID NO: 137146 - DNA, 487 bp, Zea Mays
gcagcagcagtctcggcatcgtcgcacagcgagctccaccgtcgatctgcgcagcccctattcggttgtcgttctgcctccgtcgacctcctccatgcacgtgcaacagcagccgctgccccttcgcgtcgggtgtgccgacacggatctacgcaatcccgacacgatgttgtcaaactccgccccttgtcgtcgtcacgcctcgcgcatcgctcgtcggcaaagagcccaaactgatgacatgcatgcgcaactccaatcggatttcggccaggttgttcgccttgagtgattcgcgttttgttttatttacgattcagtcaatgacgtgaatatgtgcgtgaaaatataattgtatgaatgaacgcgtgtagagaagaaattgaagtagaaaagaactcgggtatttttatattttgataaaaaaatatgcgatgcgttgtttgaagaaaaactaaattacaaaatgcggattatattttgggaa

SEQ ID NO: 137147 - DNA, 701 bp, Zea Mays
cgcgccgagcgcttctccttcgcccaggcccgcgtagcttcctggtgctgagcccctccccctccacactgctcgctcggggtccatctcccagttcatggacgcgcccagcttctctgcttcgtgcacgcgcctgttccaatgtcgcgtgcttcctccctgctcgcccctccctccctctgtccacttgcgcatagccgcgcccctggctcttctgttggtcgcgcggccgtttcctgctccctgcgcgcacgagctcggcgtccatcttgctcacccctgctcccgcttggaattcccatggccggcgtacggcttcgtgttcgcccaatctccctgctcgcgagtttcttcctcccgaacgccgtcagcttgccgcgtccctagtccggctccagctcgccggtgtgcgtcctgctccttacgcgtccagcgccgtgcgcgtcttcctccctagtgctggagcttcctctgcgagccgagtctcttccagccgtgtgcctagtccccagctccttccctgcaattcccagtttcctctgctcgctcgccgtgcgcgcgcccagctgaagtcccctgtgcgcgtgcctgcgcgcagctcgtgccctgctcgcccctctgctcgtcgagcttgccgtccgcaccgagttcgcccgggtcgcaagcctgtgtgtcctcgccgcgcctactgctcgctgggt

SEQ ID NO: 137148 - DNA, 127 bp, Zea Mays
cctttttttctttttcttatttctattttcatttctattttgtattttctattttattttagttcaaatatccaaatttcaaatctggtttggtcacaaattcatatgcaacattcaaagaactcga

SEQ ID NO: 137149 - DNA, 2094 bp, Zea Mays
aagcttggattcgttttcgttcatgcatttgacaagagaaacctgtggcacaagatgcctgttctgatcggtttactgtacctgaacacccgtcggaccctcctcgaaaaatacaacctgctagctgttgggagttctcatggtgctctgattgaccccaaggatcagttcatgtaccgcaccggagatggcaagtacaatgaccccgataatgctgaggctggtagccaatacacattttttgggagaaacatgaagccggttgatcaagagtatgagttgatgagcccagatccatttgttgtggcgacaaagctgttagccaggagagaatacaaggacacaggaaaacagttcaatatactagcagctgcatggatacagttcatggttcatgactggatggatcatatggaggataccaaacagattgaaatcacagctccaaacgaagtggccaataagtgcccactcaaatcattcaagttctatgccacaaaagaactgcctacgaattctgatggaacaataaagactggttactacaatgtccgcacagcttggtgggacgggagtgcaatatatggtaataatgataaaaaggcagaaaagctcaggacttatgttgatggaaaactagtgatcggagatgacggtcttcttttgcatgaggagaatggtgtggcattattgggcgatgtccgcaacagttgggttggggtttcgatcttacaagctctttttgttaaggaacacaatgcagtgtgtgatgcaataaaggaagaacatcccaacctatcagacgaagaattatatcgatatgctagattggtcacttctgctgtcattgcaaaggttcacactattgattggactgtggagcttctcaagactaagaccatgagagctggaatgcgcgcaaattggtatggtttattgggtaagaaaataaaagatacatttggtcacataggaggaccggcattaggtgggcttgtgggattgaagaagccgatcaaccatggcgtaccttattctttgactgaagagtttactagtgtttacagaatgcactccctattaccaagcactcttaagctcagggatccgaccggccaacccgatgcaaataattccccaccgtacttgaaagacgtcgatattggagagttggttggtctcaagggggaaggacaactatcgaaaataggctttgaaatggaaatattatcaatgggatatcaagcttgtggtgcacttgaactatggaactacccaagtttcttcagggacctcataccacaaaatttggatggtaccaatcgatctgacaggatcgaccttgctgccctagaagtatacagagatagggagagaagtgtaccgaggtacaatgagttcaggagaagactatttctgattccaataaaatgctgggaggatctgacaagtgacaaggacgcaattgaagccataagagcaatatatggagacgatgtagagaaattggatcttcttgttggtcttatggcagagaaaaaaatcaaggggtttgccataagcgaaacagcattcaacattttcattttaatggcatcgaggagactggaagcagatcgattttttacaagcaatttcaatgagaaaacatacacaaagaaggggatgcaatgggtcaaaacaactgaaggcctacgggatgtgatcaaccggcactaccctgaaatcagtgccaagtggatgaagtcctctagtgctttctctgtgtgggatgcagactactagtgcaaaaataaagcccccctgccatattttcaatttgtcaagttttatgaagtattatttgtttacagaatgatggtgtttgttcagtgcaaataaatatacttaatataaatatgtcattgtaatatatgtaataggattcattgttgaatgacacaagttgtatgcttatttttttacaatttattgtacattattatttgttcattgtaattaaatatggctgggaaaataagtaggaggagaccatatgacatctaccttcaatcttctccgagattacatctttcttttggttttggtcaacaa

SEQ ID NO: 137150 - DNA, 1357 bp, Zea Mays
ctctggccgcgcgcgagctcctctgctgaacgctgctgttcggctccctgctgcgtctccctgccatggcatgcccaggctccagctcgccctgcgctaagattccgtctccctctacgcatctctctctggtcgctcgctctcagtggagctcggtctccatctgcgtgcagccgtcgagctcccctgctcgctggtcgcccttccctctatccgcttgcgcgcagccgcgtccctgctctgctcgtcgggcgcgcaggtccttgctggtgctcagctccagtcgaccgcgcgcgctgctccctgcactcgcctggcgttcgcccctgccttcccatggccggaactcccagcgccgcggctacctttctctggtgcttggctagctcgccgtcgggctggctcaagccccatcgcggcactccagctcgcctagtctccgcgccgcgacactccctctggtccgcgcttccttcagctcggccatggcgagtccctcccgtctctgttctttccctgcttgcgtcgtgatctcccagctcctcaatacttgttcagtcgtctcggttcgctcggcctcaaattccagcgcctcgccgcctcgccctactctcgtggttcggcgacagccggcgcgagcctggccgtggcggtgttgtggtgtggggacgtcgtgcgcgtcgcgacagctgtcttggccgcgaagcagtccgcgccatagaattcgcccgaccgcgacattgctttacttctcgcgtcgttgctcgccaagtcctttctcagtccgcgccataaaattcacttggacacgatctcgtcgtcgttccgcgtgtcgtcaagaaatcccaagaatcgggtgaagacggagttagcagcgcgatattccccaagcgctcgacaaattgcctggatcggaaaatcgctaccgatctcgcggattcgtgtcagctgtggaaacggtacgtgaattaaccacgcgatgcggagaaccagaactgagtcgaccataagatggtgctgatgaacggaactggagatggacagacgatgcaagtatcgggacaaaggatggtcgtcaagtgatcgacgtctaacaaacactaacctagtgtttattccaggcaagccccggtgcatgcaacccctttccttgtgtttttaaatactttttgcacacttaagtctagtgaaatgtgcattaggttcataggagttacttgaaaccctttgatgcattgctttccttgatatccatacctttatagatacttctgtgaagtatcaaaatatgatttacaaaaatgcttagccttgcttagatcttgtggatagaggttgtcctcaatttaaccatgga

SEQ ID NO: 137151 - DNA, 198 bp, Zea Mays
atggagcttgccctagccctctccctcttggttctctgctggttgcactcctctccatgggcacccagcgcccaacgccctcattttcccacattttcccagccatggacaccagcatccctctactcctccttccccatggcttcacacctctctgcagtagcccgtccgcaacgccgtcgaccctcggtgcgctaa

SEQ ID NO: 137152 - DNA, 405 bp, Zea Mays
atggagcttgccccagccctctccctcttggttctctgctggtcgcgctcctctccatgggcgcccaggtctcttccccatggtggccgaccctatgcccagctcgcccccatgtccgaattccgaaggcagccgtctctactccccttgccatggcgacctcgccttcactgcatctatttcttctccaagccgacgtcgtctccctctatctttctctctgctgcagcgcctagcgccctcattttcccagccatggacaacaatgtccctctactccttccccatggctatgcacctctctgtagcagcacgttcgcaacgccgtcgaccctcggtatggcacttagggtaattgggatgaagtggaatgtttcagcacatcatccaccaggtgttcggtga

SEQ ID NO: 137153 - DNA, 183 bp, Zea Mays
atggaggctgatcctaggaacgacggccacgggcaagcagagccgggcgccatgggagggcttcggcaggggaagaaacgcgtgtgggagctccacggcgcgcaacaggggaagaagacagcgtcgctggaaaaatctaagtggagggcggcgggattttcttcgtgcgtgcgctggagataa

SEQ ID NO: 137154 - DNA, 3268 bp, Zea Mays
gagttggtgtgtctccctataaaaataaaccggaaaaaactcaccaaactgaaactagtaggggactaggtctagagaaaggagagacacaatcggccggaagagcgattgatttctcccgccgccgccgccccgtctcttcctcgtccgccgctgcgcccgccgcgcacaagaggagggtttcagtgttagggttctacccccgcctgcgctggtatcagcagccaaatgagaatgcttgctgtgtttgattgatcgtcagatccttacttacaacccaccagattgtatcaggtcttgtggtacctgccacctcaaagtcacgacagatggccgcaaataacaacccttggagggtccctatgccaccgctgctcaatgttcgagctggttttggcgatacaagtctcttctcaacctcactgcctgttcttcctcatgaaaagttgatcttttctcattcttctcatggtaccccatcaaaggatgacgcttcggccaaaatgaaagtgcttgctgatgatcctgatgagaaagactacaagttcgattttgatcttcgacagatagatgacttgttgcctgatgaagatgagtttttcgcggggatcactgatgaaactgagcccatcgggcaaacaaataccacagaggaattggaggagtttgatgtctttggcaatggagggggcatggagctggatattgaccctgtggagaccatcacagttagttttgcaaattcaagtattgtggacggggctagaggcaatggcatcaacccttttggtgtcccaaacactgtaggaactgtggctggggagcacccatttggagagcacccttccaggaccttgttcgtaaggaacatcaatagcaacgtcgaggactctgaactgcgatctttgtttgagcaatatggggatatccgtaccctttacactgcaacaaagcataggggctttgtaatgatatcttatttcgacatcagagctgcacggaatgcaatgcgcgcattgcagaacaaacctctgaggaggagaaagctggacattcatttttccatcccaaaggagaatccatctgacaaagatttaaaccagggaactcttgttatttttaacttggatccatcggtttctaatgaagaggttcgccagatttttggggcatatggggaagtaaaggagataagagagacaccaaacaagaaacatcataagtttatagagttctatgatgtaagagcagcagaggctgctcttcggtcactgaataaaagtgagatagctggaaaacgaatcaagttggaaccaagtcgtcctggtggaacacgcagaaacttgatgcagcagctcggtcacgatttggaccaagaggagcccagaagctacagacatcctcatgttggttcacctattgctaactctcctccaggggcatgggctcactatagtagtccaacagataacaatatgctgcaagctttcactaggtctccaactggaaatggaatgagtcctatcggaatgccttcactgatctcaaatgctccaaagattgctccaattggcaaggatagcaatcggtctaaatatgatcaagtcttctcaaatggtaaccagtcactgggagctgcatttcagcactcccactcatatcaagatcacaacagtgaacagatgagttctagtcctgggactttatcagggccccagtttctctggggaagtccaaagccatattcagaacattcaaaatcccctatttggcgtccaccagcaaacggacctgcattgtcatccagtagtcgcactcagggccaaggattcttgtacagtagccgtcaggcttcattatttggttctttagatcagcaccatcatcatgttggctctgccccttcaggtgctccattcgagaaccattttggctttttatcagaatcgccagagacatcttatatgaagcaactcaagtttgggaacatgggtaatgttggtattggtagaaacgggggaggcctcatgctgggcatggctagtcatgcttctgtgaatcctggttcttctctgattggaagtctgacagataacgtatcttctagcttcagaccgatattgtcaccgagattgggacaggcattttacactaatcctccataccatgggcctggtacattcggacttgacagctccattgaccatgcccgtaaccgcagagttgacagcagtgtgttgcaagctgatagcaagaggcagtatctgcttgacttggagaagattcgcagaggtgatgatactcggacaacattgatgattaagaacatcccgaacaaatatacatctaagatgctcctggctgcaattgatgagcttcacaaaggaatttatgacttcttctacctgccaattgatttcaagaacaaatgcaatgttggatatgcgttcattaacatggtatcaccggtgcacattatatccttctaccaggcttttaatggtaagaaatgggagaagttcaacagtgagaaggtagcatctttggcttatgctagaattcaaggacggtctgcactgatatcacattttcaaaattcaagtttgatgaatgaggataagaggtgccgccccattctttttaatcccaatggtcaggactctgtgaatcaggaagcattcccaattaatggtatatgcatccacatgcccctggaagatgattgccttgacaatgaagaaaacaagagtctgaacgagaagacaggagagaactctactgatatcgctgggagtttgtgactgtcggccatgatagcaaacatgatcagaatggccacatatataaatctaactgtctagagagtatccacctccaaattgtataaaaactgatgaaggttgatggttaggcgttgaattttgtggtctttcggttttagttgcaacagatgtggcccctggaagcggaagcgaaagcgagggagcttcgaaccggagctgggcgcttgcttgtcgaatccccctcactctttacagatgtggggatgagcaaccgctgctgctcatagttgtgcttgcttttggttgcttgctgtaaaaaggtgaactgaactgaagaaatttagccaaactgtacagtttagaacttttgtgcatattttgcattctagtatgttaatgtgtatgggtggagcagtagttcagagatcctttttttctgcgtgagatctttttcttaatgcaatatcggggctgtcatactcagg

SEQ ID NO: 137155 - DNA, 3258 bp, Zea Mays
gagttggtgtgtctccctataaaaataaaccggaaaaaactcaccaaactgaaactagtaggggactaggtctagagaaaggagagacacaatcggccggaagagcgattgatttctcccgccgccgccgccccgtctcttcctcgtccgccgctgcgcccgccgcgcacaagaggagggtttcagtgttagggttctacccccgcctgcgctggtatcagcagccaaatgagaatgcttgctgtgtttgattgatcgtcagatccttacttacaacccaccaggtcttgtggtacctgccacctcaaagtcacgacagatggccgcaaataacaacccttggagggtccctatgccaccgctgctcaatgttcgagctggttttggcgatacaagtctcttctcaacctcactgcctgttcttcctcatgaaaagttgatcttttctcattcttctcatggtaccccatcaaaggatgacgcttcggccaaaatgaaagtgcttgctgatgatcctgatgagaaagactacaagttcgattttgatcttcgacagatagatgacttgttgcctgatgaagatgagtttttcgcggggatcactgatgaaactgagcccatcgggcaaacaaataccacagaggaattggaggagtttgatgtctttggcaatggagggggcatggagctggatattgaccctgtggagaccatcacagttagttttgcaaattcaagtattgtggacggggctagaggcaatggcatcaacccttttggtgtcccaaacactgtaggaactgtggctggggagcacccatttggagagcacccttccaggaccttgttcgtaaggaacatcaatagcaacgtcgaggactctgaactgcgatctttgtttgagcaatatggggatatccgtaccctttacactgcaacaaagcataggggctttgtaatgatatcttatttcgacatcagagctgcacggaatgcaatgcgcgcattgcagaacaaacctctgaggaggagaaagctggacattcatttttccatcccaaaggagaatccatctgacaaagatttaaaccagggaactcttgttatttttaacttggatccatcggtttctaatgaagaggttcgccagatttttggggcatatggggaagtaaaggagataagagagacaccaaacaagaaacatcataagtttatagagttctatgatgtaagagcagcagaggctgctcttcggtcactgaataaaagtgagatagctggaaaacgaatcaagttggaaccaagtcgtcctggtggaacacgcagaaacttgatgcagcagctcggtcacgatttggaccaagaggagcccagaagctacagacatcctcatgttggttcacctattgctaactctcctccaggggcatgggctcactatagtagtccaacagataacaatatgctgcaagctttcactaggtctccaactggaaatggaatgagtcctatcggaatgccttcactgatctcaaatgctccaaagattgctccaattggcaaggatagcaatcggtctaaatatgatcaagtcttctcaaatggtaaccagtcactgggagctgcatttcagcactcccactcatatcaagatcacaacagtgaacagatgagttctagtcctgggactttatcagggccccagtttctctggggaagtccaaagccatattcagaacattcaaaatcccctatttggcgtccaccagcaaacggacctgcattgtcatccagtagtcgcactcagggccaaggattcttgtacagtagccgtcaggcttcattatttggttctttagatcagcaccatcatcatgttggctctgccccttcaggtgctccattcgagaaccattttggctttttatcagaatcgccagagacatcttatatgaagcaactcaagtttgggaacatgggtaatgttggtattggtagaaacgggggaggcctcatgctgggcatggctagtcatgcttctgtgaatcctggttcttctctgattggaagtctgacagataacgtatcttctagcttcagaccgatattgtcaccgagattgggacaggcattttacactaatcctccataccatgggcctggtacattcggacttgacagctccattgaccatgcccgtaaccgcagagttgacagcagtgtgttgcaagctgatagcaagaggcagtatctgcttgacttggagaagattcgcagaggtgatgatactcggacaacattgatgattaagaacatcccgaacaaatatacatctaagatgctcctggctgcaattgatgagcttcacaaaggaatttatgacttcttctacctgccaattgatttcaagaacaaatgcaatgttggatatgcgttcattaacatggtatcaccggtgcacattatatccttctaccaggcttttaatggtaagaaatgggagaagttcaacagtgagaaggtagcatctttggcttatgctagaattcaaggacggtctgcactgatatcacattttcaaaattcaagtttgatgaatgaggataagaggtgccgccccattctttttaatcccaatggtcaggactctgtgaatcaggaagcattcccaattaatggtatatgcatccacatgcccctggaagatgattgccttgacaatgaagaaaacaagagtctgaacgagaagacaggagagaactctactgatatcgctgggagtttgtgactgtcggccatgatagcaaacatgatcagaatggccacatatataaatctaactgtctagagagtatccacctccaaattgtataaaaactgatgaaggttgatggttaggcgttgaattttgtggtctttcggttttagttgcaacagatgtggcccctggaagcggaagcgaaagcgagggagcttcgaaccggagctgggcgcttgcttgtcgaatccccctcactctttacagatgtggggatgagcaaccgctgctgctcatagttgtgcttgcttttggttgcttgctgtaaaaaggtgaactgaactgaagaaatttagccaaactgtacagtttagaacttttgtgcatattttgcattctagtatgttaatgtgtatgggtggagcagtagttcagagatcctttttttctgcgtgagatctttttcttaatgcaatatcggggctgtcatactcagg

SEQ ID NO: 137156 - DNA, 1942 bp, Zea Mays
ccgagtaccatgccatgccaccacaaaatgcagacacctccaaaaacttgtcactacaggtgagcaattttaaccagcacaaactctccaagaatcccacagcagcacagacggtatgcagcttctttcttcagctcaaccagggaacacacacattggcatccctctctccctctatatctgaatggaagctcacacaaagtagcccagagtaaccaaaccagcccccacctaacatgcaccagatcgccttttgattcatgggtttcacagggcaccgcattttgctcataggccttgcatatatacatggggatttcatgccacactttacagtgctgcatagccatacatgcatcgatccctagctctttgcttgccgcggatttctcctgctcatacaacacaagccatgaggggtttccagctgctactcatcatagtggcattgcttgccggggagttgcactgcgcaagagcagcatcagcagcagatgcaccggaggctgcaccacagtcccccgaagcaccaacagcagatgagcaaacgccaccgcaggcgcctgggccaacatcaccacctccacctccacgacgtcggggatcaccacatcgacggccaccagcaccgacggatcagcaggatccagcaccgccaaggttggtcgtgccaccacaggaacctcctgcaccggcaccacctggaatgacgatcaaccgcactacgggctgtactacactccttgtacttggagactcaaccgtggaccctggaaacaacaaccatctgcccaccacagccagggcaaatttcttgccctacggcttgaacttctacggtcgcaggccgactggccgattcaccaatggccggttagccacagatatgttagctgagaaactaggcatatccaggattattccaggtttctttgacccaaatctgaggctggcccagctcaggaggggtgtgagctttgcatcaggcggctccggatatgacgacagcactgccaacagaataaatgtggtgtcattctctgaacaagtgcacaacctcttccgttacaagctacttatccgaacactgcttggaccaagaagagcagagcgacttgttaacagggctgcctttgtgataagcactggtacaaacgatttgctttcagtctaccttgcatcgaatcggtcgaatgcaattagtatggaactgtatgagaatcacctgacagcacatgtcgctaattatacccaggccatgataatgcttggaggaaggagatttatttttgttggactgcccccgatgggttgcttgccgattgcccggactttagtgggcacaggatcggacagatgcgacgagacgttaaatcagcttgccaattcgttcaactcaaagctgattcagctgttgaatttcataaattttcagcaccagatacggacttcatacatagacacatatactaccatacatgatgcaacggcctaactgaagtgtcaagagggtgctgcggatcgggggtgatcgaagttgggcaaacatgccgagggcgaagaacatgtggagaccctagcaagtacctgtactgggatgctgtccatccaacggaaaggacgaaccaagtcatcgcgaatatgatgatggattccattggagaactctacagctaggctcaagtatgaagggaaggctagttgtatcagagtcatgtgtatccaaatgtactagagctaatatacacatatggtctagtttgaactggaagagaggtacgctagagtgaactgtgtccaaggcatgagaagtgtgagaccatgagagattcgctccagtgtcaaattgctgagtggcgtcaaccgattagtggggtaagtgatgtcgatcttgttaggaatgcgcattggtatggtaatatacagaattgaaccagagacc

SEQ ID NO: 137157 - DNA, 605 bp, Zea Mays
atggaggcagaagtcattattgcatttgtagccatgtgcattcatgggagaggtgttgaatctattatgtggatgtggataatttggacttgtgcatggtgattctacttggcgttgagcttttagttacttgtttacttgctgcaatttactgttcaaaagaaaagaaagaagtcatgaacacgtggttgtgtaagcacagttgatttacaatgtcctatttgttgttgttatgtttacttgctgagatgtgttatctcacatcttgcattgttttatgcaggcacctaatttctgatttgggaatagagggatgtagcagcacggccactacacctttaataaaggaaccaccatttaataatgttgttaatcagagttggacaagtctagtgaattgctttgttcttggttgagcgtttattttggggtgggctgagtttcttatcccatttgttttgcttcagttgggtcataattaagttttaccacttttgcatttcagtttctactatgtgaattatatgtctttatatcttgtatgagcttcatgtttcccctccttgttatgctagttttcaaaggaggtgctgccggattttgct

SEQ ID NO: 137158 - DNA, 2925 bp, Zea Mays
gatactggaaccatataccactaaaaaaatctaggttttccaaatacggcactaagtacatccgatcatagttagatgacattttgtcttgtaactagctactttttgcactccgaaaaacgacatctacttgtggctggagggtgcagtacagaattttctccttaatggcatatttctccttgtataaatagtagctgcttatctcaaaactgtagaaattataataacggtatgaatctcttaatcaccctgtttagctctccacggcattgccccctcgtttcattccttacctgtcatacaaaatgtattgtgctgtagtatgtatgcactcatttccagtttcttgcagctctaatggctaaagaacaggatggatcccccaaggtgcgccacccagaattccaaaggatgcgcgtaactctcaccataggtgtcattggcctctgtgtcacagcatacattcttggtgcttggcaaggtacctcgaacggcattagttcccccttaataagtaccagaacccagtgcaaagatcccgtgcgatcatctggtgctcgcctggatttccaagcccaccaccaggtgggcttcaatgaatcggcgcttgctgtggagaaattcccaccttgccagctcaagtacagtgagtataccccttgccaagatccaaggaaagctaggaagttcccaaagaaaatgatgcagtacagggagcggcactgcccaaagaaagaagacatgctccggtgcttgatccctgcgcctccaaactatagcaaccccttccagtggccaaaaagtcgcgactatgcttggttcaataacattcctcatcgggagctcagtattgagaaggctgttcagaactggattcatgtcgagggagacctgcttagattccctggaggtggcactatgttcccacatggtgccgatgcttatattgatgacataaatgcccttgtaccattaaatgaaggcaacatccgaactgcgcttgatactggatgtggagttgcaagctggggtgcttatcttatgaataggaacatcatcaccatgtcttttgcgccaagggattcacatgaggcacaggtacagtttgcattagagcggggggtaccagccatgattggagtgatggggactgagagaatcccatatccggctagagcatttgacatggcacactgctcgagatgtttgatcccatggaataagcttgatggtgtctatctaattgaagtagacagggttcttaggcctgggggctactggatcctctctgggcctccaatccattggaagaggcactaccagggctgggagaggacagaaggagacctgaagcaagagcaagatgagattgaggacttggcgaaacggctctgctggaagaaggtcgtagagaaaggtgatcttgctatatggcagaaatctatcaaccacgtagaatgtgttgacagtaggaaggtttatgatgctccgcagatttgtaagagcaatgatgtggattctgcttggtacaagaaaatggacacttgcatatctcctctcccagatgtgaagagtgaagatgaagttgctggcggagtccttgagacatggcccaaaagagcatttgctgtccccccaagagtaatccgcggttcagttccaggcctcacccctgagaagttccaagaggataacaaggtgtggtcagagagagtggatcactacaagaaattgattccaccactgggcaaaagacgatacaggaatgtgatggacatgaatgcggggataggtggctttgcagctgcattgatgaagtaccctctttgggtgatgaatgttgtgccttcaggcttggcccatgacaccctgggtgttatttacgaacgagggtttattggcacgtaccatgattggtgtgaggctttctcaacgtacccgaggacctacgacctcatccatgctgataaagttttcagcagttaccaggacaggtgtgacataacgtacatcctactggagatggaccgaattctaaggcctgaggggactgtgatcatcagggacaacgtagaggtgttggtgaaggtacaagctatcactggaggcatgaggtggaagagccaaatcatggaccatgagtccggtccattcaacactgacaagatcctagtggctgtcaagacttactggaccgggaagctcgtgcaaaaacaataatcgtcgccttgttactgtttttcgtctgcgaaaatgtaggcatgacttgcctgtcagttctgtcttcattgccatttttttatcctaacttcaggatatctgtatataggaggcatgtgaaccatgtagctggaattggtatcaaacatcattagccacgtagcgtatgtgacacattgcaatggtgtataagatgttcactcatatatttggtgtgatattgcaatctaataacatgatgcttggtgtgaaaaaaggagattgtaattgacaacatgttcctgtcaaaaatacgatgacaaggttgtggtacagacgaattctgaagattatactatggccaagtgctgtgaaaaaagagagacgaattctgagagccaagggctgtgataaaaactgtgtgaattgcagatagtgtctccatgcagatgtgtgctgagataatccatttaaccatcaaaactactaaatgagggctccagtctcagtaggaagcccaggcggctgcttcagggaatgagagacctggaggagcaggagctgatgcaccaccctgatcaatgataccgaagtgtgctaggaccttcgcgaggaggacgcctgcgacgtacgacagtccggagctgctgaatccaatggacaggtagtagaggagggttgtgaggtatgtcctatgcctcttaacatgtgccttcccgattg

SEQ ID NO: 137159 - DNA, 2772 bp, Zea Mays
agagggtcctgcgttcccttcttctgctgcggcggcggaggctctttcagttccatccatcttctccctcgtggctctccttcctctctcccgtagtcccgccgaccccccgcgccggccaaggaaatcaagcgaaaacgccagattttgattgttccacatcttctttcatctctgaggggtttcccgtcttcctcgcctgctctaatggctaaagaacaggatggatcccccaaggtgcgccacccagaattccaaaggatgcgcgtaactctcaccataggtgtcattggcctctgtgtcacagcatacattcttggtgcttggcaaggtacctcgaacggcattagttcccccttaataagtaccagaacccagtgcaaagatcccgtgcgatcatctggtgctcgcctggatttccaagcccaccaccaggtgggcttcaatgaatcggcgcttgctgtggagaaattcccaccttgccagctcaagtacagtgagtataccccttgccaagatccaaggaaagctaggaagttcccaaagaaaatgatgcagtacagggagcggcactgcccaaagaaagaagacatgctccggtgcttgatccctgcgcctccaaactatagcaaccccttccagtggccaaaaagtcgcgactatgcttggttcaataacattcctcatcgggagctcagtattgagaaggctgttcagaactggattcatgtcgagggagacctgcttagattccctggaggtggcactatgttcccacatggtgccgatgcttatattgatgacataaatgcccttgtaccattaaatgaaggcaacatccgaactgcgcttgatactggatgtggagttgcaagctggggtgcttatcttatgaataggaacatcatcaccatgtcttttgcgccaagggattcacatgaggcacaggtacagtttgcattagagcggggggtaccagccatgattggagtgatggggactgagagaatcccatatccggctagagcatttgacatggcacactgctcgagatgtttgatcccatggaataagcttgatggtgtctatctaattgaagtagacagggttcttaggcctgggggctactggatcctctctgggcctccaatccattggaagaggcactaccagggctgggagaggacagaaggagacctgaagcaagagcaagatgagattgaggacttggcgaaacggctctgctggaagaaggtcgtagagaaaggtgatcttgctatatggcagaaatctatcaaccacgtagaatgtgttgacagtaggaaggtttatgatgctccgcagatttgtaagagcaatgatgtggattctgcttggtacaagaaaatggacacttgcatatctcctctcccagatgtgaagagtgaagatgaagttgctggcggagtccttgagacatggcccaaaagagcatttgctgtccccccaagagtaatccgcggttcagttccaggcctcacccctgagaagttccaagaggataacaaggtgtggtcagagagagtggatcactacaagaaattgattccaccactgggcaaaagacgatacaggaatgtgatggacatgaatgcggggataggtggctttgcagctgcattgatgaagtaccctctttgggtgatgaatgttgtgccttcaggcttggcccatgacaccctgggtgttatttacgaacgagggtttattggcacgtaccatgattggtgtgaggctttctcaacgtacccgaggacctacgacctcatccatgctgataaagttttcagcagttaccaggacaggtgtgacataacgtacatcctactggagatggaccgaattctaaggcctgaggggactgtgatcatcagggacaacgtagaggtgttggtgaaggtacaagctatcactggaggcatgaggtggaagagccaaatcatggaccatgagtccggtccattcaacactgacaagatcctagtggctgtcaagacttactggaccgggaagctcgtgcaaaaacaataatcgtcgccttgttactgtttttcgtctgcgaaaatgtaggcatgacttgcctgtcagttctgtcttcattgccatttttttatcctaacttcaggatatctgtatataggaggcatgtgaaccatgtagctggaattggtatcaaacatcattagccacgtagcgtatgtgacacattgcaatggtgtataagatgttcactcatatatttggtgtgatattgcaatctaataacatgatgcttggtgtgaaaaaaggagattgtaattgacaacatgttcctgtcaaaaatacgatgacaaggttgtggtacagacgaattctgaagattatactatggccaagtgctgtgaaaaaagagagacgaattctgagagccaagggctgtgataaaaactgtgtgaattgcagatagtgtctccatgcagatgtgtgctgagataatccatttaaccatcaaaactactaaatgagggctccagtctcagtaggaagcccaggcggctgcttcagggaatgagagacctggaggagcaggagctgatgcaccaccctgatcaatgataccgaagtgtgctaggaccttcgcgaggaggacgcctgcgacgtacgacagtccggagctgctgaatccaatggacaggtagtagaggagggttgtgaggtatgtcctatgcctcttaacatgtgccttcccgattg

SEQ ID NO: 137160 - DNA, 2781 bp, Zea Mays
agagggtcctgcgttcccttcttctgctgcggcggcggaggctctttcagttccatccatcttctccctcgtggctctccttcctctctcccgtagtcccgccgaccccccgcgccggccaaggaaatcaagcgaagggccgcagaacgccagattttgattgttccacatcttctttcatctctgaggggtttcccgtcttcctcgcctgctctaatggctaaagaacaggatggatcccccaaggtgcgccacccagaattccaaaggatgcgcgtaactctcaccataggtgtcattggcctctgtgtcacagcatacattcttggtgcttggcaaggtacctcgaacggcattagttcccccttaataagtaccagaacccagtgcaaagatcccgtgcgatcatctggtgctcgcctggatttccaagcccaccaccaggtgggcttcaatgaatcggcgcttgctgtggagaaattcccaccttgccagctcaagtacagtgagtataccccttgccaagatccaaggaaagctaggaagttcccaaagaaaatgatgcagtacagggagcggcactgcccaaagaaagaagacatgctccggtgcttgatccctgcgcctccaaactatagcaaccccttccagtggccaaaaagtcgcgactatgcttggttcaataacattcctcatcgggagctcagtattgagaaggctgttcagaactggattcatgtcgagggagacctgcttagattccctggaggtggcactatgttcccacatggtgccgatgcttatattgatgacataaatgcccttgtaccattaaatgaaggcaacatccgaactgcgcttgatactggatgtggagttgcaagctggggtgcttatcttatgaataggaacatcatcaccatgtcttttgcgccaagggattcacatgaggcacaggtacagtttgcattagagcggggggtaccagccatgattggagtgatggggactgagagaatcccatatccggctagagcatttgacatggcacactgctcgagatgtttgatcccatggaataagcttgatggtgtctatctaattgaagtagacagggttcttaggcctgggggctactggatcctctctgggcctccaatccattggaagaggcactaccagggctgggagaggacagaaggagacctgaagcaagagcaagatgagattgaggacttggcgaaacggctctgctggaagaaggtcgtagagaaaggtgatcttgctatatggcagaaatctatcaaccacgtagaatgtgttgacagtaggaaggtttatgatgctccgcagatttgtaagagcaatgatgtggattctgcttggtacaagaaaatggacacttgcatatctcctctcccagatgtgaagagtgaagatgaagttgctggcggagtccttgagacatggcccaaaagagcatttgctgtccccccaagagtaatccgcggttcagttccaggcctcacccctgagaagttccaagaggataacaaggtgtggtcagagagagtggatcactacaagaaattgattccaccactgggcaaaagacgatacaggaatgtgatggacatgaatgcggggataggtggctttgcagctgcattgatgaagtaccctctttgggtgatgaatgttgtgccttcaggcttggcccatgacaccctgggtgttatttacgaacgagggtttattggcacgtaccatgattggtgtgaggctttctcaacgtacccgaggacctacgacctcatccatgctgataaagttttcagcagttaccaggacaggtgtgacataacgtacatcctactggagatggaccgaattctaaggcctgaggggactgtgatcatcagggacaacgtagaggtgttggtgaaggtacaagctatcactggaggcatgaggtggaagagccaaatcatggaccatgagtccggtccattcaacactgacaagatcctagtggctgtcaagacttactggaccgggaagctcgtgcaaaaacaataatcgtcgccttgttactgtttttcgtctgcgaaaatgtaggcatgacttgcctgtcagttctgtcttcattgccatttttttatcctaacttcaggatatctgtatataggaggcatgtgaaccatgtagctggaattggtatcaaacatcattagccacgtagcgtatgtgacacattgcaatggtgtataagatgttcactcatatatttggtgtgatattgcaatctaataacatgatgcttggtgtgaaaaaaggagattgtaattgacaacatgttcctgtcaaaaatacgatgacaaggttgtggtacagacgaattctgaagattatactatggccaagtgctgtgaaaaaagagagacgaattctgagagccaagggctgtgataaaaactgtgtgaattgcagatagtgtctccatgcagatgtgtgctgagataatccatttaaccatcaaaactactaaatgagggctccagtctcagtaggaagcccaggcggctgcttcagggaatgagagacctggaggagcaggagctgatgcaccaccctgatcaatgataccgaagtgtgctaggaccttcgcgaggaggacgcctgcgacgtacgacagtccggagctgctgaatccaatggacaggtagtagaggagggttgtgaggtatgtcctatgcctcttaacatgtgccttcccgattg

SEQ ID NO: 137161 - DNA, 633 bp, Zea Mays
atgcagcaaggcacagcaaggcgtggatctagagcgggatcttaccttgtcgagtggaaggggacgacgtcggagagctcgatgtggattaggtggagacgacagacgagctcgtggggatggaggatcaggtggctgttacctttatgtactgctttgctagatggagagtcgttgggagccgtggggatggggagctcatggggacgagcgacgacaacggcggaggagctcgtggcgatggcggacgagcgatggcgttggggaggagctcgagaggctagggttagagtcgctgggagccggggcgtcgccgggatggcatcagagaacgaagaatcgcctggcctactgagaccggggcaatttccaaccggaaaaaggcctctcccggacaaatgtttgtcgaaagatggtcttccaaacacacagatggataaaaccaagaaaaatattaaggtgggctttatccccatagaaaaggccagaaaactggtgggattttgggctgccaaaccagccctaattgtagaaaaaataataatcactccaacaactaataccatggagtacttttgctgggctggatttccaccaaccatccatatgttccaccgacccaacccaaggtga

SEQ ID NO: 137162 - DNA, 166 bp, Zea Mays
tggtgcatcataggtccattcctcaaatttggtgggatgacttcattccacatattagtactaaacaactaattatgagaaatgaattccacatattagtactaaacaactaattatgagaaatgaggtggtgatggattaactcactctattccacaaaccaaac

SEQ ID NO: 137163 - DNA, 129 bp, Zea Mays
atggtgcacatgcccgtagtcccagctactgaggaagatgaggcaagagaattgcctgaacctgggaggcaagagatggcagtgagccaagaatgcgccattgcactccagcctgagcaacaagagtga

SEQ ID NO: 137164 - DNA, 1264 bp, Zea Mays
atgtcgtcgcggaagcatcatgagctgccggagggaggagcagggggaagcggcgccggccgcgtggcggtgtgggacaccgggagctccctgtacgactcgtacgagctggccgccgtgcgccggctcctcgacaagcgcctccttgccctccgcgacgctgaagagacgaggggcaagggcaggcaactggtggtcgtgccggtcgtcagcagcaggggggtccaccacagaaggaaggccacgctgagggcgctcttcagggcggtggccacctgtgcggcccggccgaggcaggcgccgccgctcgcctgtgcctgcgctgctggcatggtccatgaccaccagggtggttccgcggtcgagccggaggatctgccgtcccacggaattgatgctggtgattcttgctaccatttgcagcagggacggacagctaaagtagctgtggaatatggaagtaaattgagactgaaacgtttgattgagactgaaaagctgctagcccagttagttgagactgagatgaacagatgtttggttttggggcatgtgtgctaccacatcatagctgccagattgaacggatacatgtctacagtgacaaatcttaagaatccagtgaacaagtggcgatgtggtgcgactcctatttcgtattactactttattcgcctgatcggacgcaaggcttctcatgtggcattggaatgtgctcttcaatcacatccaaacatggttatcctaggacaggaggtggctgcttccaaacttacaatttttgatattacgaagctgatttgtgatgtagtttaggcaagggctgaaaaagacaagaaccatgtggttattctttcctgagggccttgtggagaatattcctgaactatatgctctgctttaggaaatccatggcctccatgccaaaggtgtttctgttgagaatatctcttctcagctttcaccatgggcatctgcactctgagtttttgcccccttttataaggaagcagctactactacatcccgaatctgatgattcagctcaactttcctagtgtgttgagacagaattcttccagctttttgttggaagatgtctacagaaacccaggcccgctccagtttgaaggaccaggtgtcgattcaaatcctatttcattgtgcgttgaggatcaagactatatgggcagaataaaaaagttgcaagaatacttggagaaggtagttttgatacccctccccctgcatattttttgcttta

SEQ ID NO: 137165 - DNA, 3675 bp, Zea Mays
tttgacaccaacactcaacaatggcaaacacttgagtcataccagcaaagtgttgcacatgttgcaactactgcagcagcctcagatgggttcgcagggacatgccataatgtagctcattacactgaggattcttatgcaagtagctataaccagcagagccagtggcaaccggattcgttcggtaataccatgcaggctgatgttttggggggcaagagcttgctaggtagttcctatggttctaatcagcaggctgggaatcagattgggcaacaggccaatgtggactctttaaatcacgagcctcatgtaaatacatttatgccttctacagggaatcagagttggtacagtggtttggagcattctacaagtaaggaattaaggtacaaaggatttgaaccttcaacaggtttccagactagtcgcaaggaattccagcctcctaaagatcaccaggctggtcacatggcagatgaacctttgacaagatatgggtatggtagttcaaatggggtcgtcaatacacaaaatttcgtaccaaaagagggtatgcacaagacacaaatgcatgatgactccactgcgcatacttatgctgcaagcaactattggggtactcagacctccatgggcagtgctcagcagcaactgactggtacaaatggtccatcccaacagtttggtttctcaccacatgagcagagatcatcagctggacgcccaccacacactgtggtatcctttggatttggggggaagcttgtagttcttaaagaaaccagctctatggctgcaaactttgacagcggaaatcagggcaattctggtcgaacggtatcagttcttaatattccagagattgttgctgataaaattgatcattcaagcatcgctaacggtggtgcatttagctacttccatgctttgtgtcgccatcctattcctggccctcttgttggtggaagtgctgcatcaaaggatctgaataaatggcttgatgatatgagtggcgtatatgaatcttctcagacagaattccagggaggggatgttcagaaggtgcttatttcgttgttgaaaatattgtgccaacactatggaaagcttcgttcatcctttgggtctgacccgtcacaagagggtatagatggcccagagatggcagtgacgaaacttttctcatcttgtaagagcagtgctaatatgaaagggtatggagctgttgtccattgcatgagaaatcttccctcagaaagccagattcagactactgcccaggaggttcaaagtctcttggtttctggtagaaggaaagaggcccttcaccaggcacaagaaggtcacctttggggccctgcactgatccttgctttacaacttggtgataagttttatgcggatactgtgaagaaaatggcccactgccattttgtttctggatcacccttgaggacactgtgccttcttattgctggacaacctgcagatgttttcagttttgagaatcctgttaacagtggtttgtcttctccccaacagcctgtagaggctgctcctaaaggtatgctggatgactggcaagagaatttggctattataacagcaaacaggacaaaaggtgatgaccttgtaattacccgccttggggattgcctttgggaagagaaaaatgaggttgcatctgcccactcgtgctatttagttgctgaactaaatattgattcgtactctggaagtgcaaggatgtgccttattggtgcggaccacttgagatgtccgcgcacatttaccagccctgaagcaatccagagaacagaggtttatgagtatgcaaaggttcttggtaattctcagtatatcctcttgccatttcaaccatacaagctgatatatgcatatatgcttgcggaggttgggaagatttctgattcactaaagtactgtcaagcatctctgaaggtgctcaagtcctctggtcgtgcacctgaactagaagcatggaagcaactgtttattaccctggaggaccggatacgtacccatcaacagggcggttatgcaacaaatcttgcccctggaaagattgttggaaagcttttcacatcacttgataaatctttgtcccgaatgatgggtacacaatctgcaccgttgcctcaactgccgcagggtgctgcaaatgagagaggtgtttattcttctcctgatacaaaagtagtaaatagtcagtcagtgatgtccatggcaccattagtgtcatctgcttcagagcagtctatgagtgaaattggaggaaatagtgtctatggcagggaagttgcacataacagaagtatttctgaaccagacttcggcaaaaccccccaacagcagggtgctgctgtatcaagtaaggcacagagcacatcaggttcaggcagttcacgctttggatggttggtgcagaagacaatagggcttgtttcaaaatctcaccgccaggcaaagctaggggaacagaacaagttctactatgacgagaagctgaagcggtgggttgaagaaggtgctgagatccctgccgaggagcccccacttcccccacctccaacaaaagtgccattccagaacagcgttccagatcccaactccaatgctcctcccactggtggaggttattcctcaaatcctcccgagcctagttccgggatgccaccgatgccacccacccagaaccagttctcagcacgtggaaggatgggtgttagatcaagatatgtggatacttttaacaagggtggcggtggtggtggcgcaaatgccttcggagtagcaacatcttatagcaaaccagcagctccttcaatgtccggtgcgaagttccttgtgccaactccagtcaatgttgcttcagaacagatggctgagctaggtgcccacagtgaaaccgcccgacaggatgaatcgtcgtcctcaccagcgatggaaacatcatttagttcgccgccatcactgatacagatgcagtcaagcattccgcggtacccaagcggtgacaacattccacggtacccgagcggtgacaacattccgcggtacccgagcggtgacaacattccgcggtacccaagtatggataacgtcagctcccccacaggcagcattaacagctcgatgtcaaggtcaagagcgtcatcatggagcggaacgtacccagagcagttgagcagcactgccgcttccaggtcacctgatggacagatgacgcagtcaccatcgatgcctggaagaagacctccgcacagccgttccaacagcgcgtcttcttccgcccagctcaatggtttgggtgaggatcttcacgaggtggagctctgacacctggccgcagattttgaccataatgtgatttatattaatagctgcatgtgtctagagagcaaagcaaaggaaattaaagtgcggtgtccctttttcaatttttttacatgtgaaagactgtggatgccgctgcattgtacagatagttgactcgttcgccagatgaaaaatgtataacaagagtcgtaggttcaagatagggagaagatgaaaccgtgatgattcatcattgttaaaaagatggactgtctgttggaaaaataaagctgattaataaccgcaataatgtcggtccgcatcttggtgttc

SEQ ID NO: 137166 - DNA, 3660 bp, Zea Mays
tttgacaccaacactcaacaatggcaaacacttgagtcataccagcaaagtgttgcacatgttgcaactactgcagcagcctcagatgggttcgcagggacatgccataatgtagctcattacactgaggattcttatgcaagtagctataaccagcagagccagtggcaaccggattcgttcggtaataccatgcaggctgatgttttggggggcaagagcttgctaggtagttcctatggttctaatcagcaggctgggaatcagattgggcaacaggccaatgtggactctttaaatcacgagcctcatgtaaatacatttatgccttctacagggaatcagagttggtacagtggtttggagcattctacaagtaaggaattaaggtacaaaggatttgaaccttcaacaggtttccagactagtcgcaaggaattccagcctcctaaagatcaccaggctggtcacatggcagatgaacctttgacaagatatgggtatggtagttcaaatggggtcgtcaatacacaaaatttcgtaccaaaagagggtatgcacaagacacaaatgcatgatgactccactgcgcatacttatgctgcaagcaactattggggtactcagacctccatgggcagtgctcagcagcaactgactggtacaaatggtccatcccaacagtttggtttctcaccacatgagcagagatcatcagctggacgcccaccacacactgtggtatcctttggatttggggggaagcttgtagttcttaaagaaaccagctctatggctgcaaactttgacagcggaaatcagggcaattctggtcgaacggtatcagttcttaatattccagagattgttgctgataaaattgatcattcaagcatcgctaacggtggtgcatttagctacttccatgctttgtgtcgccatcctattcctggccctcttgttggtggaagtgctgcatcaaaggatctgaataaatggcttgatgatatgagtggcgtatatgaatcttctcagacagaattccagggaggggatgttcagaaggtgcttatttcgttgttgaaaatattgtgccaacactatggaaagcttcgttcatcctttgggtctgacccgtcacaagagggtatagatggcccagagatggcagtgacgaaacttttctcatcttgtaagagcagtgctaatatgaaagggtatggagctgttgtccattgcatgagaaatcttccctcagaaagccagattcagactactgcccaggaggttcaaagtctcttggtttctggtagaaggaaagaggcccttcaccaggcacaagaaggtcacctttggggccctgcactgatccttgctttacaacttggtgataagttttatgcggatactgtgaagaaaatggcccactgccattttgtttctggatcacccttgaggacactgtgccttcttattgctggacaacctgcagatgttttcagttttgagaatcctgttaacagtggtttgtcttctccccaacagcctgtagaggctgctcctaaaggtatgctggatgactggcaagagaatttggctattataacagcaaacaggacaaaaggtgatgaccttgtaattacccgccttggggattgcctttgggaagagaaaaatgaggttgcatctgcccactcgtgctatttagttgctgaactaaatattgattcgtactctggaagtgcaaggatgtgccttattggtgcggaccacttgagatgtccgcgcacatttaccagccctgaagcaatccagagaacagaggtttatgagtatgcaaaggttcttggtaattctcagtatatcctcttgccatttcaaccatacaagctgatatatgcatatatgcttgcggaggttgggaagatttctgattcactaaagtactgtcaagcatctctgaaggtgctcaagtcctctggtcgtgcacctgaactagaagcatggaagcaactgtttattaccctggaggaccggatacgtacccatcaacagggcggttatgcaacaaatcttgcccctggaaagattgttggaaagcttttcacatcacttgataaatctttgtcccgaatgatgggtacacaatctgcaccgttgcctcaactgccgcagggtgctgcaaatgagagaggtgtttattcttctcctgatacaaaagtagtaaatagtcagtcagtgatgtccatggcaccattagtgtcatctgcttcagagcagtctatgagtgaaattggaggaaatagtgtctatggcagggaagttgcacataacagaagtatttctgaaccagacttcggcaaaaccccccaacagggtgctgctgtatcaagtaaggcacagagcacatcaggttcaggcagttcacgctttggatggttggtgcagaagacaatagggcttgtttcaaaatctcaccgccaggcaaagctaggggaacagaacaagttctactatgacgagaagctgaagcggtgggttgaagaaggtgctgagatccctgccgaggagcccccacttcccccacctccaacaaaagtgccattccagaacagcgttccagatcccaactccaatgctcctcccactggtggaggttattcctcaaatcctcccgagcctagttccgggatgccaccgatgccacccacccagaaccagttctcagcacgtggaaggatgggtgttagatcaagatatgtggatacttttaacaagggtggcggtggtggtggcgcaaatgccttcggagtagcaacatcttatagcaaaccagcagctccttcaatgtccggtgcgaagttccttgtgccaactccagtcaatgttgcttcagaacagatggctgagctaggtgcccacagtgaaaccgcccgacaggatgaatcgtcgtcctcaccagcgatggaaacatcatttagttcgccgccatcactgatacagatgcagtcaagcattccgcggtacccaagcggtgacaacattccacggtacccgagcggtgacaacattccgcggtacccgagcggtgacaacattccgcggtacccaagtatggataacgtcagctcccccacaggcagcattaacagctcgatgtcaaggtcaagagcgtcatcatggagcggaacgtacccagagcagttgagcagcactgccgcttccaggtcacctgatggacagatgacgcagtcaccatcgatgcctggaagaagacctccgcacagccgttccaacagcgcgtcttcttccgcccagctcaatggtttgggtgaggatcttcacgaggtggagctctgacacctggccgcagattttgaccataatgtgatttatattaatagctgcatgtgtctagagagcaaagcaaaggaaattaaagtgcggtgtccctttttcaatttttttacatgtgaaagactgtggatgccgctgcattgtacagatagttgactcgttcgccagatgaaaaatgtataacaagagtcgtaggttcaagatagggagaagatgaaaccgtgatgattcatcattgttaaaaagatggactgtctgttggaaaaataaagctgattaataaccgcaataatgtcggtccgc

SEQ ID NO: 137167 - DNA, 159 bp, Zea Mays
atggacaagctggaggccctcttgaggcccaaggagggtcagtccaatccggccgggcataagcggggcactaacgataaagatataacagcgaagataaagagagccatggatttatcggaggatttatcggcaaaaataaaagaaaaccaaggataa

SEQ ID NO: 137168 - DNA, 2279 bp, Zea Mays
ctggtactgcattaattaatgaaggagctagtgctgaacagtgcggcaaggactcctataaattggctgccgtgccgctaccatccaatccactccactccatcatcccgtgcctcacgagtcacgagtcactccaggtccaggctgagcagcaatggcgccgcgaacgctcggcctcaacgcggccccgctcctccagattctgcggtccctgtgcctcctggccctcgccgcggcggcggcggtgtccgggcggcgccacggggcctccccggcgcgcggcagcgggcagagcatgtacctggcgccggcctgccgggcgcacacggcgtcggtggcggacttcggcggcgtgggcgacggcaccacttccaacaccgcggcgttccggtccgcggtggaccacctgtcgcagtactcgggcgagggcggcggcggtggcatgctgtacgtgcccgcgggcaagtggctgacgggccccttcaacctgaccagccacttcaccctctacctccaccaagacgccgtcatcctcggctcccaggacgtaggcgagtggccaatcgtggatcccctgccttcttacggaagagggagggacaaggtcggagggaggttcgctagcctcatcggcggatcgaacctgaccgacgtagtcatcactggcagcaacgggacgatcgatgggcagggcgccatgtggtggtccaagttccacaagaaccagctcaagtacacgcgcggctacctcatcgagctgatgcactcggacaccatctacatctccaacctgacgctgctcaactcgccggcgtggaacatccacccagtctacagcagcaacatcgtggtgcaaggcatcaccatcctggcgccgaccaactcgcccaacaccgacggcatcaacccagactcctgctctcacgtccgcatcgaggactgctacatcgtgtcgggcgacgactgcgtggccatcaagagcggctgggacgagtacggcatctcgtacgggatgcccagccagcacatcgtcatccgccgcctcacgtgcgtgtccccgaccagcgccgtcatcgcgctgggcagcgagatgtcgggcggcatccaggacgtgcgcgccgaggacatcacggcgatcaacaccgagtccgccgtgcgcatcaagaccgccgtcggccgcggcgcctacgtcagggacgtgttcgcgcgccggatgacgctcaccaccatgaagcgggtgttctggatgacgggcgactacaagtcccacccggacgacaagtacgaccccaacgccgtccccgttgtcgccaacatcagctaccaggacgtggtggccacgggggtctacaaggaggcggcgcgcctccagggcatccagggcgcaccgttccggggcatctgcgtcgccaacgtcaccgccgacctgtccaagtccaggaagtacccatggaactgcgccgacatcgagggagtgtcggccaacgtcagccccgcgccgtgcgacccgctacagggcgcgcacgacggcgcatgcccgttcccgaccgacacgctgcccatcgaccaggtcacagtgcagcagtgcgcatacgacatcccggccaccaactagcagctcaatcaaggagtgtattcggatgtggatcagccgcctagtacaacttgtagttcaggtccaatgcaagcgactagtagtatcaagtctcatcaacacaataacgacagaatgaatcgggcactagcctagaaagcattcataaactccgagcctgtacaccatctacagcctaaagactgacttgactcatcacctgccgccgaagaacgagaagaagccgcctccgcctcctttcttctcgggcctctcctgctcttcgaccatgaccgccgtcatcgcatctctttccaccaatctccaagtagcctgctccagagcaaggccagcaggcgtgggcgggtcattcagcaccagcggcacgcccctattcgtactccggatcacctccgtgtcctctggcaccacgcctagtaaaggcaacccgagcatttcctgcacgtccagcgctgacatcatgtcctcccccttcaccaggtctggccgcactcggttgacaacgatcttgatgtctttgatgccatcgcactccagcagtcccgcgacacggtcagcatcgcggagagccgtaatgtcgggagtggtaacgagcaccgcctcttctgcgggtgcaatggcagtgacaaacccagcatcaacacctgcaaaacaaaacatcaag

SEQ ID NO: 137169 - DNA, 2339 bp, Zea Mays
ctggtactgcattaattaatgaaggagctagtgctgaacagtgcggcaaggactcctataaattggctgccgtgccgctaccatccaatccactccactccatcatcccgtgcctcacgagtcacgagtcactccaggtccaggctgagcagcaatggcgccgcgaacgctcggcctcaacgcggccccgctcctccagatctcatctagctcccagctgaaagtttcacgcctttccggtcattatgtgcgcatggagattctgcggtccctgtgcctcctggccctcgccgcggcggcggcggtgtccgggcggcgccacggggcctccccggcgcgcggcagcgggcagagcatgtacctggcgccggcctgccgggcgcacacggcgtcggtggcggacttcggcggcgtgggcgacggcaccacttccaacaccgcggcgttccggtccgcggtggaccacctgtcgcagtactcgggcgagggcggcggcggtggcatgctgtacgtgcccgcgggcaagtggctgacgggccccttcaacctgaccagccacttcaccctctacctccaccaagacgccgtcatcctcggctcccaggacgtaggcgagtggccaatcgtggatcccctgccttcttacggaagagggagggacaaggtcggagggaggttcgctagcctcatcggcggatcgaacctgaccgacgtagtcatcactggcagcaacgggacgatcgatgggcagggcgccatgtggtggtccaagttccacaagaaccagctcaagtacacgcgcggctacctcatcgagctgatgcactcggacaccatctacatctccaacctgacgctgctcaactcgccggcgtggaacatccacccagtctacagcagcaacatcgtggtgcaaggcatcaccatcctggcgccgaccaactcgcccaacaccgacggcatcaacccagactcctgctctcacgtccgcatcgaggactgctacatcgtgtcgggcgacgactgcgtggccatcaagagcggctgggacgagtacggcatctcgtacgggatgcccagccagcacatcgtcatccgccgcctcacgtgcgtgtccccgaccagcgccgtcatcgcgctgggcagcgagatgtcgggcggcatccaggacgtgcgcgccgaggacatcacggcgatcaacaccgagtccgccgtgcgcatcaagaccgccgtcggccgcggcgcctacgtcagggacgtgttcgcgcgccggatgacgctcaccaccatgaagcgggtgttctggatgacgggcgactacaagtcccacccggacgacaagtacgaccccaacgccgtccccgttgtcgccaacatcagctaccaggacgtggtggccacgggggtctacaaggaggcggcgcgcctccagggcatccagggcgcaccgttccggggcatctgcgtcgccaacgtcaccgccgacctgtccaagtccaggaagtacccatggaactgcgccgacatcgagggagtgtcggccaacgtcagccccgcgccgtgcgacccgctacagggcgcgcacgacggcgcatgcccgttcccgaccgacacgctgcccatcgaccaggtcacagtgcagcagtgcgcatacgacatcccggccaccaactagcagctcaatcaaggagtgtattcggatgtggatcagccgcctagtacaacttgtagttcaggtccaatgcaagcgactagtagtatcaagtctcatcaacacaataacgacagaatgaatcgggcactagcctagaaagcattcataaactccgagcctgtacaccatctacagcctaaagactgacttgactcatcacctgccgccgaagaacgagaagaagccgcctccgcctcctttcttctcgggcctctcctgctcttcgaccatgaccgccgtcatcgcatctctttccaccaatctccaagtagcctgctccagagcaaggccagcaggcgtgggcgggtcattcagcaccagcggcacgcccctattcgtactccggatcacctccgtgtcctctggcaccacgcctagtaaaggcaacccgagcatttcctgcacgtccagcgctgacatcatgtcctcccccttcaccaggtctggccgcactcggttgacaacgatcttgatgtctttgatgccatcgcactccagcagtcccgcgacacggtcagcatcgcggagagccgtaatgtcgggagtggtaacgagcaccgcctcttctgcgggtgcaatggcagtgacaaacccagcatcaacacctgcaaaacaaaacatcaag

SEQ ID NO: 137170 - DNA, 1387 bp, Zea Mays
ccagcaaactgcaaaccaaccctaaagccaccgatccgacggcggggatcgaccgatcaaaccacaaaaccctacccctggccgccccttttttatataaaaggatcgccctccgcgcgccgccgctccttcgcaaaccctcctaccccattccgccgcccgccccgcgaccccgaggaggaggcaagatgaagacgatcctggcgtcggagacgatggacatcccggagggcgtcacagtgacggtggcggccaagctggtgacggtggagggcccccgcgggaagctcacccggaacttcaagcacctcaacctcgacttccagctgcaggagggcggccgcaagctcaaggtggacgcatggttcggcacccgccgcaccatggccgccatccgcaccgccatctcccacgtccagaacctcatcaagggggtcaccaagggctaccgctacaagatgaggtttgtctacgcccatttccccatcaacgcgtccatcaccaactccaacaccgccatcgagataaggaacttcctcggcgagaagaaggtcagaaaggtggacatgcttgacggcgtgaccatcctccgctccgagaaggtcaaggacgagcttattctcgatggcaacgacgtcgagttagtctctcgctccgccgccctcatcaaccagaaatgccatgtcaagaagaaggatatcaggaagtttttggatggtatctatgtgagcgacaagggtgtgatcgaagaggagcagtgagggacaattagttgttatcgtttgagttggaattattgtttggtttgcaattttctcaaggtgaactttgtaatcggttaggatgtgttgtggaccattatcttatcctacaatattatcgtatctgtttaagaatatgaagcttgtttatcatttcctaaaaggatctggtcgacgaggttactaaaacaggtgaaggttaaaggtttaaacgtagctttaaacaatatagtaaaatattaatatattatagtttcagacaataatatgaagctaaataccaaacaatcaacattgttcacataataatattctgcaaaatgatatctctacaactggtcaactgcacaagttcaactaatagtaagttgacaaacgcaaacaaaatagaatgaaatctataaacataacaaaaaaagcaaatagagtggaatgcaatgttcacaaaatcaagcacacaagcgttatctagtctccctttattatatgttaataaccatcatctaaatcatctataactaacttcatccttgtctaatttgttgcttatcaccatatccaccgctgttgtttctggcttcatcatccatatcaaggtcatcaagcaaaaaaaaaaaaaaaataac

SEQ ID NO: 137171 - DNA, 729 bp, Zea Mays
ggccgccccttttttatataaaaggatcgccctccgcgcgccgccgctccttcgcaaaccctcctaccccattccgccgcccgccccgcgaccccgaggaggaggcaagatgaagacgatcctggcgtcggagacgatggacatcccggagggcgtcacagtgacggtggcggccaagctggtgacggtggagggcccccgcgggaagctcacccggaacttcaagcacctcaacctcgacttccagctgcaggagggcggccgcaagctcaaggtggacgcatggttcggcacccgccgcaccatggccgccatccgcaccgccatctcccacgtccagaacctcatcaagggggtcaccaagggctaccgctacaagatgaggtttgtctacgcccatttccccatcaacgcgtccatcaccaactccaacaccgccatcgagataaggaacttcctcggcgagaagaaggtacaccctacacacatatctctgtttcgtgcgtgcgtcgaagcagatcagatctgggaggttgcgatgtgttctgacctgtgtctgtctgactgcttggtggtgatcccggggtcgatcaggtcagaaaggtggacatgcttgacggcgtgaccatcctccgctccgagaaggtcaaggacgagcttattctcgatggcaacgacgtcgagttagtctctcgctccgccgccctcatcaaccaggtgaatcccggc

SEQ ID NO: 137172 - DNA, 144 bp, Zea Mays
cccgcatctcgcccgggcgggcgctccagcgcgggcgagagcgaggcgataccgcccgctctcgtcgggcgcgagcgccatcgcccggcgccggcctctcgcccacctctcgcccgcgcgcgagcggcagcggcctcttctcgc

SEQ ID NO: 137173 - DNA, 438 bp, Zea Mays
atgcaggatcgaccccgatttgccgaaggatggatccggtttccccaacagactagaatctccgccagccgcctccagaacggcatgatccaactgcagattcaccttgcggagctgcaacttggtatcatccatcgctacatccaccgtgggctaccatgcttccaactccccgctgacgcgctcgagggagatcaggcgctcctccttagctgccaccagctccgacaagcgcttctcccacttgacatccatagatgcaaacttctccatctcatcaacgatgaacaggacattgggatccatcacacccgcgcgtcgctgcgaacgcgtgaagtagccgtgctccagattgagaatcgccaaggaacggcgaatctgataccaattgttagcgtggggaatcagaggaagacatgggaagggagaaagaactga

SEQ ID NO: 137174 - DNA, 87 bp, Zea Mays
ctgaatgacccatctatgatatttcatcaatcaacaagcataaagcatcatggatatcacagcagggcatcgaatccatacaaataa

SEQ ID NO: 137175 - DNA, 771 bp, Zea Mays
cagtcacctcatagtcttcagggttcttgatacaacgaataatgcagcggtcaaactcttttcttaatgaatcaagaccgccaacatcatcccaagtgacatcaggaacagaagaaaacccttctcttctcaaagatggttgaaccatttttcatacctcaaagtcatccatagtaatatgtaggccctccacctcactttcatcccaaggttgcctccaccagtcatgcttgctattcccgtcatgctcacggcgatagtgaattcttcttttatcaattattctcttcattgcaagattccctgctttatccactaatgccttcaagtcagcaccaacaaaaccttgtgtcgctctagctatcttgaacaagtcaaattcgccttcaagtcgaagatgctgagtaagcatcttcagtatttgttttcgtgcattctcatctggaacaccaagagatatctctcgatcaaaccttcctggccttcgcagagcttggtccacagcatcaggcctatttgtggctccaattacaataacataaccaggtttctattcagatgattcagcatccaaattgccagtgtccgatccaatattctggtggtattgatccatgcatgtcattaattgagtaactattcgtcgctccatctctcgttgcagattctccctcttggatgcaattgcatctatctcatcaatgaatacaatcgagggagcagtccgataggccttctgaaacaggcctctgatgttttcctcagaagctc

SEQ ID NO: 137176 - DNA, 1444 bp, Zea Mays
gatctaggacgtcgtttggtctctctgctgccttcttcctccttcctccacccctgccttgctcaaagtagtcagtcgtcatcgtctcctccgatcgcctccagttcattccagttagcgccgctgatcccctccctaatcaccatccatccatccggtaggattccccagccatgtcggcgaccgcggtgaagtttcccgtggaggcgccgccgaggacagtgaaggtcaccaacgtctctcttagtgcaaccgtgcaagacattaaggagttcttttccttttcaggagatattgaacatgtggagatgcagaggttcgtaaaacctgtccaaccaggtcgccccttctcttttcatgtccatacaagcctttgattgccatccccattagcttgtttctctttactttggcagtggtgatgagtggtctcaaattgcatatgtcactttcaaagatgcacaaggcgcagaaactgcacttcttctttcgggtgccacaatagttgatctttctgtgatcattggacctgctccagagtatcagccaccccctattgcctctgctccaccaatgagtggaaccagagttccagttggtggagacaacaacgttgtccacaaggccgaggatgttgtgagcactatgcttgccaagggtttcgtgctaggaaaagacgcggttggcaaggccaaagcgttcgatgagaagcacggcttcacatccacagccggtgctaaggtggcctccatcgacaagaagattgggctgagcaataagattaccacaggcacttcgttggtcagcgggaaggtgaaggagatggaccagaagttccaggtctctgacaagacaaagtcagcgttcgcggctgccgagcagaaggtgagcagtgccgggtccgccatcatgaagaacaggtacgtcttcaccggcgcgtcgtgggtcaccggcgcgttcaacaaggtcgccaaggctgccacggacgtcgggacaatgaccaaggagaagatggcggccgaggagcagcagaagggtttctctggcccatcgtctaggagccactcgtacacgcccatccgatgattcgttggctttctgttatgcgccctccctcagacagacaatgttgtattgtattacacataacacattggtggatgtaagacatagatagctatatatagaacagatcatcaggccccctcgcaccacttgttcaccgttccatgttctgttaaatttcgtactgcagggatttgtttctttaggacaagcaagtatggtggtgataccaatctgttggtttttacaaatccatgttcagactgtttgtggtttgaatgaacattttgtagaagtggtgggaagttaactggataatatgatgttgctgaaacaacatgctatcactatttgcagttatttggaatgcttcttgttt

SEQ ID NO: 137177 - DNA, 1382 bp, Zea Mays
ataaacaactagtatagtgtttacttatctttttgccatgtaaactggaaagggatctaggacgtcgtttggtctctctgctgccttcttcctccttcctccacccctgccttgctcaaagtagtcagtcgtcatcgtctcctccgatcgcctccagttcattccagttagcgccgctgatcccctccctaatcaccatccatccatccggtaggattccccagccatgtcggcgaccgcggtgaagtttcccgtggaggcgccgccgaggacagtgaaggtcaccaacgtctctcttagtgcaaccgtgcaagacattaaggagttcttttccttttcaggagatattgaacatgtggagatgcagagtggtgatgagtggtctcaaattgcatatgtcactttcaaagatgcacaaggcgcagaaactgcacttcttctttcgggtgccacaatagttgatctttctgtgatcattggacctgctccagagtatcagccaccccctattgcctctgctccaccaatgagtggaaccagagttccagttggtggagacaacaacgttgtccacaaggccgaggatgttgtgagcactatgcttgccaagggtttcgtgctaggaaaagacgcggttggcaaggccaaagcgttcgatgagaagcacggcttcacatccacagccggtgctaaggtggcctccatcgacaagaagattgggctgagcaataagattaccacaggcacttcgttggtcagcgggaaggtgaaggagatggaccagaagttccaggtctctgacaagacaaagtcagcgttcgcggctgccgagcagaaggtgagcagtgccgggtccgccatcatgaagaacaggtacgtcttcaccggcgcgtcgtgggtcaccggcgcgttcaacaaggtcgccaaggctgccacggacgtcgggacaatgaccaaggagaagatggcggccgaggagcagcagaagggtttctctggcccatcgtctaggagccactcgtacacgcccatccgatgattcgttggctttctgttatgcgccctccctcagacagacaatgttgtattgtattacacataacacattggtggatgtaagacatagatagctatatatagaacagatcatcaggccccctcgcaccacttgttcaccgttccatgttctgttaaatttcgtactgcagggatttgtttctttaggacaagcaagtatggtggtgataccaatctgttggtttttacaaatccatgttcagactgtttgtggtttgaatgaacattttgtagaagtggtgggaagttaactggataatatgatgttgctgaaacaacatgctatcactatttgcagttatttg

SEQ ID NO: 137178 - DNA, 1021 bp, Zea Mays
ataaacaactagtatagtgtttacttatctttttgccatgtaaactggaaagggatctaggacgtcgtttggtctctctgctgccttcttcctccttcctccacccctgccttgctcaaagtagtcagtcgtcatcgtctcctccgatcgcctccagttcattccagttagcgccgctgatcccctccctaatcaccatccatccatccggtaggattccccagccatgtcggcgaccgcggtgaagtttcccgtggaggcgccggtgagtgctgctgctgcatcttccttccctgtctagctccctccctctctccttccctgccggtgtcgctggatctggcccgttccgtgccagagcgggcgggcggggcaccgtggcgcctctgagattttggtcttctacactaggttcacttgcctcgagtggctggtctgagttccttgctgtcctgctggagcagcttggtgctgcgagcttagctgccccattggggctagggtttgctttggatctgggcgattggagcgtggcttgctcgtatggtcgtacacacgaccgaccgtcgtgctcgaatctcttgcgagacacggctgcaaacagaggcgcggagcatgctcgcgtcgccgtgcttgggcagttgggcttgccaaaccgaatgttgtgggatcggtgcagcgttctgctgcaagtaagcttactagtatgctagttcacatcacccgatcaccgttgaatttgaatgaatggtctgtgacatgatctaggccttgctttgactctagcagtcaggtcgtgcaattgccaaaagcattctgagatgatatactgggccaagctctgtgggatagataagtccaggggtttgctttgactgccaggttctgcaattgcaatgcatctgtgccttaaaaagtgtaccgttttagtcggctactgaatgcctatgcctttacctctcgtacatcgggattaatggtgctaccaatccgcctggtgaaataatctctagacatgtgg

SEQ ID NO: 137179 - DNA, 1625 bp, Zea Mays
cttgaatcagtataagagaattcgcttaattgtggcgcaatcttaagttgcatgattgagatatactgcaaatattgggaggcatataaaatgagaagagacctgtggtctattagaaaaggagctttctgtatgctgcgttgtcaacaaatatgtcaggtgttgatcctttaagacccacagacaacttttggatctgccagtaagcaaaaaaaaaaaagatcagaaagagtgtacggccggtgagcaagcatgggctgcatggcatcggtgttggctatcggaatgacaggtgaaggactgaaaccctgacgtgcaggccgggccattggttagcctgaccaatcctggtaggtgtctgccatttatgatggctgggctggctctcggagcaactctctccaatgagggctttccgtcattgatgccggtgcagaccgtttttcttcgccttgctctcaggtacgctcctgccctggctgaattgcactacatatgagcgagcatatggcaatctaataaatctctcgagtctttctgctggccacaatcttcctaacctaggcagcagctagctctttgatccctgttggattggatggaggtccgtggcagtgcacccagcatgaagccaaaggtggagccgccgttggaggcttcacacgactgggaggtgaccccgctgtccggcgacaaccccttcttcaccagcgtcatgcgcaagagccaagtccagaacccctttcagctggtacacattttcttttcttttctttttccccaatccggaacgcacgcacgtaggagcacaccgtactgtttgttccaggtcatcccggttcgcttccaccgccacctcccggaggcgcgcgcgcccgcggtgctcctctgccgcgaccggtcgtggacggtgagctacgcgggcgtcggcaagtggaagaggctccagggggcgtggagggacttcgcccgcgacaacgggctccgcctcggggacgcctgcgtcttcgagctccttgtgcccagtactgatgcaacccaaggagacggagacggcagcaaggatcagggggaggtggtgttccgtgtgcaggtgctccgcggcggcctgccggctgagatcacctcccggggcgccacctccgacgatccactcgtcattgtggactagatccaactgcggggagagtagtacgtagtagactagtagtggtgcagtgcagtctgtagaggagacgagacgctcaggagctaggtagcatcgtcgttgtattttgttgttgcccctgctctagctagctcgctggtcctcgtggatcttgtagccagtttctttctttcagctgcagaccttcctcttcctgtggacacggttgctccatcaccaagtgtgctgatgctaccagctttctgctgtgacagtacatagtagacgctatcaccaagtgtgctgatgctaccacattccagtagacgcggcatgcttgaagagatgtgttcaatgagcatcatcctttgtgtccatccatcgtgtcaataactagagctgaatagctcgaccgagtttagtgtttaggctatctcgagcagcgttatctaaatgaatattctgtgtcctttaaagg

SEQ ID NO: 137180 - DNA, 1342 bp, Zea Mays
cttgaatcagtataagagaattcgcttaattgtggcgcaatcttaagttgcatgattgagatatactgcaaatattgggaggcatataaaatgagaagagacctgtggtctattagaaaaggagctttctgtatgctgcgttgtcaacaaatatgtcaggtgttgatcctttaagacccacagacaacttttggatctgccagtaagcaaaaaaaaaaaagatcagaaagagtgtacggccggtgagcaagcatgggctgcatggcatcggtgttggctatcggaatgacaggtgaaggactgaaaccctgacgtgcaggccgggccattggttagcctgaccaatcctggtaggtgtctgccatttatgatggctgggctggctctcggagcaactctctccaatgagggctttccgtcattgatgccggtgcagaccgtttttcttcgccttgctctcagcagctagctctttgatccctgttggattggatggaggtccgtggcagtgcacccagcatgaagccaaaggtggagccgccgttggaggcttcacacgactgggaggtgaccccgctgtccggcgacaaccccttcttcaccagcgtcatgcgcaagagccaagtccagaacccctttcagctggtcatcccggttcgcttccaccgccacctcccggaggcgcgcgcgcccgcggtgctcctctgccgcgaccggtcgtggacggtgagctacgcgggcgtcggcaagtggaagaggctccagggggcgtggagggacttcgcccgcgacaacgggctccgcctcggggacgcctgcgtcttcgagctccttgtgcccagtactgatgcaacccaaggagacggagacggcagcaaggatcagggggaggtggtgttccgtgtgcaggtgctccgcggcggcctgccggctgagatcacctcccggggcgccacctccgacgatccactcgtcattgtggactagatccaactgcggggagagtagtacgtagtagactagtagtggtgcagtgcagtctgtagaggagacgagacgctcaggagctaggtagcatcgtcgttgtattttgttgttgcccctgctctagctagctcgctggtcctcgtggatcttgtagccagtttctttctttcagctgcagaccttcctcttcctgtggacacggttgctccatcaccaagtgtgctgatgctaccagctttctgctgtgacagtacatagtagacgctatcaccaagtgtgctgatgctaccacattccagtagacgcggcatgcttgaagagatgtgttcaatgagcatcatcctttgtgtccatc

SEQ ID NO: 137181 - DNA, 1352 bp, Zea Mays
cttgaatcagtataagagaattcgcttaattgtggcgcaatcttaagttgcatgattgagatatactgcaaatattgggaggcatataaaatgagaagagacctgtggtctattagaaaaggagctttctgtatgctgcgttgtcaacaaatatgtcaggtgttgatcctttaagacccacagacaacttttggatctgccagtaagcaaaaaaaaaaaagatcagaaagagtgtacggccggtgagcaagcatgggctgcatggcatcggtgttggctatcggaatgacaggtgaaggactgaaaccctgacgtgcaggccgggccattggttagcctgaccaatcctggtaggtgtctgccatttatgatggctgggctggctctcggagcaactctctccaatgagggctttccgtcattgatgccggtgcagaccgtttttcttcgccttgctctcagcagctagctctttgatccctgttggattggatggaggtccgtggcagtgcacccagcatgaagccaaaggtggagccgccgttggaggcttcacacgactgggaggtgaccccgctgtccggcgacaaccccttcttcaccagcgtcatgcgcaagagccaagtccagaacccctttcagctggtacacattttcttttcttttctttttccccaatccggaacgcacgcacgtaggagcacaccgtactgtttgttccaggtcatcccggttcgcttccaccgccacctcccggaggcgcgcgcgcccgcggtgctcctctgccgcgaccggtcgtggacggtgagctacgcgggcgtcggcaagtggaagaggctccagggggcgtggagggacttcgcccgcgacaacgggctccgcctcggggacgcctgcgtcttcgagctccttgtgcccagtactgatgcaacccaaggagacggagacggcagcaaggatcagggggaggtggtgttccgtgtgcaggtgctccgcggcggcctgccggctgagatcacctcccggggcgccacctccgacgatccactcgtcattgtggactagatccaactgcggggagagtagtacgtagtagactagtagtggtgcagtgcagtctgtagaggagacgagacgctcaggagctaggtagcatcgtcgttgtattttgttgttgcccctgctctagctagctcgctggtcctcgtggatcttgtagccagtttctttctttcagctgcagaccttcctcttcctgtggacacggttgctccatcaccaagtgtgctgatgctaccagctttctgctgtgacagtacatagtagacgctatcaccaagtgtgctgatgct

SEQ ID NO: 137182 - DNA, 1265 bp, Zea Mays
cttgaatcagtataagagaattcgcttaattgtggcgcaatcttaagttgcatgattgagatatactgcaaatattgggaggcatataaaatgagaagagacctgtggtctattagaaaaggagctttctgtatgctgcgttgtcaacaaatatgtcaggtgttgatcctttaagacccacagacaacttttggatctgccagtaagcaaaaaaaaaaaagatcagaaagagtgtacggccggtgagcaagcatgggctgcatggcatcggtgttggctatcggaatgacaggtgaaggactgaaaccctgacgtgcaggccgggccattggttagcctgaccaatcctggtaggtgtctgccatttatgatggctgggctggctctcggagcaactctctccaatgagggctttccgtcattgatgccggtgcagaccgtttttcttcgccttgctctcaggcagcagctagctctttgatccctgttggattggatggaggtccgtggcagtgcacccagcatgaagccaaaggtggagccgccgttggaggcttcacacgactgggaggtgaccccgctgtccggcgacaaccccttcttcaccagcgtcatgcgcaagagccaagtccagaacccctttcagctggtcatcccggttcgcttccaccgccacctcccggaggcgcgcgcgcccgcggtgctcctctgccgcgaccggtcgtggacggtgagctacgcgggcgtcggcaagtggaagaggctccagggggcgtggagggacttcgcccgcgacaacgggctccgcctcggggacgcctgcgtcttcgagctccttgtgcccagtactgatgcaacccaaggagacggagacggcagcaaggatcagggggaggtggtgttccgtgtgcaggtgctccgcggcggcctgccggctgagatcacctcccggggcgccacctccgacgatccactcgtcattgtggactagatccaactgcggggagagtagtacgtagtagactagtagtggtgcagtgcagtctgtagaggagacgagacgctcaggagctaggtagcatcgtcgttgtattttgttgttgcccctgctctagctagctcgctggtcctcgtggatcttgtagccagtttctttctttcagctgcagaccttcctcttcctgtggacacggttgctccatcaccaagtgtgctgatgctaccagctttctgctgtgacagtacatagtagacgctatcaccaa

SEQ ID NO: 137183 - DNA, 1258 bp, Zea Mays
cttgaatcagtataagagaattcgcttaattgtggcgcaatcttaagttgcatgattgagatatactgcaaatattgggaggcatataaaatgagaagagacctgtggtctattagaaaaggagctttctgtatgctgcgttgtcaacaaatatgtcaggtgttgatcctttaagacccacagacaacttttggatctgccagtaagcaaaaaaaaaaaagatcagaaagagtgtacggccggtgagcaagcatgggctgcatggcatcggtgttggctatcggaatgacaggtgaaggactgaaaccctgacgtgcaggccgggccattggttagcctgaccaatcctggtaggtgtctgccatttatgatggctgggctggctctcggagcaactctctccaatgagggctttccgtcattgatgccggtgcagaccgtttttcttcgccttgctctcagctagctctttgatccctgttggattggatggaggtccgtggcagtgcacccagcatgaagccaaaggtggagccgccgttggaggcttcacacgactgggaggtgaccccgctgtccggcgacaaccccttcttcaccagcgtcatgcgcaagagccaagtccagaacccctttcagctggtcatcccggttcgcttccaccgccacctcccggaggcgcgcgcgcccgcggtgctcctctgccgcgaccggtcgtggacggtgagctacgcgggcgtcggcaagtggaagaggctccagggggcgtggagggacttcgcccgcgacaacgggctccgcctcggggacgcctgcgtcttcgagctccttgtgcccagtactgatgcaacccaaggagacggagacggcagcaaggatcagggggaggtggtgttccgtgtgcaggtgctccgcggcggcctgccggctgagatcacctcccggggcgccacctccgacgatccactcgtcattgtggactagatccaactgcggggagagtagtacgtagtagactagtagtggtgcagtgcagtctgtagaggagacgagacgctcaggagctaggtagcatcgtcgttgtattttgttgttgcccctgctctagctagctcgctggtcctcgtggatcttgtagccagtttctttctttcagctgcagaccttcctcttcctgtggacacggttgctccatcaccaagtgtgctgatgctaccagctttctgctgtgacagtacatagtagacgctatcaccaa

SEQ ID NO: 137184 - DNA, 2582 bp, Zea Mays
aatccaagtcagatttattccacaccttcattccatgcgaaacgaatagaccctcaattctctttaatccactatgatcctcttgcaaccgaacctgaccttatatgctgtacccttttgagtaaaaatacctttttttcagggaatctgtgtttcagaaatctaaacacacccctaatccgattccgatgctgtgctgccgcgccaccgcatccctgccgtctccgcctcccccctcgcatgctgccgacccccacgcgcgcctcaggggcggcggccggcccgctacgaccttccgggcgcgctcgccgccttcgtctccatgtcgtcaccctcctccgccgcccacgcggccgcgggccccgtcctacgcaccttcacagcgctcctcaagctctgcgcggcgcgcgccgatctcgccacgggccgcgccgtccacgcgcagctcgaggcgcgggggctcgcctccgagtccatcgcttccacggcgctcgccaacatgtacttcaagtgccgccgccccgccgacgcgcgcagggtgttcgaccggatgccttccagggaccgcgtcgcctggaacgcggtcgtcgctgggtacgcgcgaaacgggcttccatcgtccgcgatggaggcggtcgtgcggatgcagggggaggagggcggggagcggcccgactccgtcacgcttgtgtccgtgctgccggcctgcgccgacgcccgggcgctccacgcgtgcagggaggtacacgccttcgcgctccgcgccgggctcgatgagctcgtcaatgtctccacggcggtacttgacgcctactgcaagtgcggcgcggtggaggcggcaagggctgtcttcgattgtatgcctgtcaggaactccgtgtcttggaacgccatgattgacgggtatgctgacaatggtaacgccacggaggctatggctttgttctggaggatggtccaggagggcgtggatgtgacggatgcgtctgtgttggcagcactacaagcgtgcggggagcttggatatctcgatgaggtgaggcgtgtccatgagctacttgtgagagttggcttgagctccaatgtgtcggtgacgaacgcgcttatcaccacatacgccaagtgcaagagggcagacctcgctgcccaggtgttcaacgagctgggcaacaaaaagacacggatctcatggaatgccatgatcctcggcttcacgcagaacgaatgccccgaggatgcagagaggctcttcgctaggatgcagttggaaaatgtgagaccagattcgttcaccctggtcagcgtgattcctgcagtcgcggacatttctgatccgctgcaagcaagatggatccatggatattctatcaggcaccaactagaccaggatgtctatgtcctgacagcccttattgacatgtactccaaatgtgggcgtgtcagcatagctagaaggctcttcgattccgcaagggacagacatgttatcacctggaatgcgatgatccatggttatggttcacatggttttggccaggctgcagttgagctatttgaagagatgaagggcactggcagtttgcccaacgagacaacattcctctcggttcttgcagcttgcagtcatgctggtttggttgatgaagggcagaaatattttgctagcatgaagaaggactatgggcttgaacctggaatggagcactacggtaccatggtggatctacttggacgagctgggaagctagacgaagcttggtctttcatcaaaaacatgcctatagaacctggcattagtgtttatggtgcaatgttaggtgcttgcaagttgcacaagaatgttgaattggctgaagaatcagcacagataatctttgagctgggcccagaggagggggtgtatcatgtccttttggcaaacatttatgcaaacgcttcaatgtggaaagacgtcgcgagggtgaggactgctatggagaagaaaggactccagaagactcctggatggagtattatccagctcaaaaatgaggtccataccttctactctggaagcacaaatcaccagcacgcgaaggacatatacgcaagactggctaagctcatcgaagagatcaaagatatgggctatgtgccagacactgattcaatacatgatgtggaggatgatgtcaaggcacagctgcttaacacccacagtgagaagcttgctattgcatatgggctcattcgaacagcccctggcacgacaattcagataaagaagaaccttcgagtttgtaacgactgtcataatgcaaccaagttaatatctctactgacaggacgggaaataatcatgagagacattcaacgctttcaccattttaaggatggtaaatgttcatgtggagactactggtagtgaaatgttgaaggcagtctgaatatccatttccgagatgatatacagctgctatacaagtatacaattagactaacaggtaaagctaactattctatctttttcaccgaccatgttttgaatttgatcgggggcattcgatatgttgatttaatgaggaatgtataccatgttcttt

SEQ ID NO: 137185 - DNA, 3222 bp, Zea Mays
ccgcgtcagaagcaccaaccgagccatggttcacgggctgcgggctgcgggctgcgggctgcggcggccgacgggaccggtgtgagcaggcgaccacgaaggggcccacccgtcggtggctgcctgcccccgctcgtcaacaactaccccgaaagccgccaagcggctgctgcgcaaggtgcgaaaggcaccttccctgcccgattggcgatttaagtggtgggggagggaaggccgatggtcagtgaaagagaggtaggtggccggacggtggtggcatcgccaattcaactccgcatctgaatcggcactcggcagcgcgccagctccataggtgaggcttcggatcccgatctccgcaccctgtccgattccagctccgtcctccccggatttcagttccaccgcgttgaggttttctttttttgtctcctttgggtcctcttgttcccgaagcatggggactgggggttgaattcgtgtagagatccagatgattgcgctgctagctccgatcgccgattttactctgctgcctgccggtccagatccatggaagcaagtcgatgaacttagagggcttccgctctggattttctttgaaaataagttagagtcctgtcaaacacctcttttctctgccaaacgatctacaaaatggctttagcttagaaaactgtttagttagaaaactgtttagcttagaaaactgtttactcggccaggggacagagagacgcattaccttgccttcttgctcttttcgcctctagcggtgctgtgtattcagttacttcgtctcaaagaaattcagttggtttcatcctatacacctatatgtagccggccctgtgactcgcagggcagcgtatgatctttgatcctcggcttatgtattcacctcatcggccgcttaaccttgatttttttttctcagtgtaggaggagatggcgctcacaagaatcggtcttgctggccttgcggtcatggggcagaaccttgccctcaacattgcagagaaagggttccccatctctgtgtacaacaggacaacctccaaggtggacgagaccgtgcagcgtgccaaggcagaaggaaaccttcccgtctacggcttccatgaccccgcgtcctttgtgaagtccattcagaagccacgggtggtgatcatgctcgtcaaggccggcgcgccagttgaccagaccatcgcgacgctcgcagctcacttggagcagggcgactgcatcatcgatggggggaacgagtggtacgagaacacggagaggagggagaaggccatggaggagcgcggcctcctgtatcttggcatgggtgtctctggaggagaggagggtgcccgcaacggcccgtccttgatgcccggaggctcgttcgaggcttacaagtacgtcgaagacattgtcctcaaggtggctgctcaggtccctgacagtggcccgtgtgtcacgtacattggcaaaggtggatcgggcaactttgtcaagatggttcacaacggaatcgagtatggcgatatgcagctgatttccgaggcatacgacgttctcaagtcggtcggtaagctcaccaacagtgagctgcaccaggtgttctccgagtggaacaagggcgagctcctgagcttcttgatcgagatcacggccgacatctttggcatcaaggacgagcatggcgatggctacctggtggacaaggtccttgacaagaccgggatgaaagggacagggaagtggacggtgcagcaggccgccgagctgtcggtggccgctcctacgatcgaggcgtccttggactcgaggttcctgagcgggctgaaggacgagcgggtggaggcctccaagatcttccagggtgactactactccaccggctcgccggtggacaaggcgcagctggtggaggacgtgaggcaggccctgtacgcgtccaagatctgcagctacgcgcagggcatgaacatcatcaaggccaagagcgcggagaaaggctgggggctcaacctcggcgagctggccaggatctggaagggcgggtgcatcatccgcgccatcttcctggaccgcatcaagaaggcctacgacaggaacccgggcctcgccagcctgctcgtagaccccgagttcgcgcaggagatcatggacaggcaggcggcgtggcgcagggtggtgtgcctcgccatcaacaacggcgtcagcaccccgggaatgtccgctagcctggcctacttcgactcctaccgcagggacaggctgcctgccaacctggtgcaggcccagagggactacttcggggctcacacctacgagagggtcgacatgcctggctctttccacaccgagtggttcaagattgcgcgcaacatctccaacaactgatgagctgctcaacggatggcatgcccggtgttgactactccagtcggtaatgagatttcctgcaggaacttgtctattgatctttgtaagttaattatttatatgaataaaataagagcagacatgcttgtgtttgggcaccctctgttttctcctccctgttaatcaatgcaccatgctccaaaggtgatgtacataattcagacaagtctcgatgatgtacatgttacagaactagcgaaagagttcagcttggtcgccgcagaaaacctccattgcctcgatgtgcgtccacattggagaggtcttcacgaaaggaggaggatgagttgagaagccatcaggtgttgtgattgaaacaaacttggacattggtctaccctcacaagcttttgggtgcagccagcagtgcaatctttgagctagtctccataactttgcttgcatggatgaagcacggtgatcatctcctgtgttaggggtccatgttcctcttctggtgcagccagcagtgttatctttgagctagtctccatagctttacttggcatagatgaagcacgatgatcatccctctgtattagggggtccatgttcctcttctggtgcagccaacagtgttatccttgagctagtcttcatagttttgcttgccgtggatgaagcacgatgatcatctcgatcctgtattaggagtccatgttcctcctccccctccaacgcagaaaatggcccaaaagcgatgtcctggttaatcccgtcgcagcgtgcatcagttgtgggggtctgcatgacaggatggcacctcaacgatccaaatgatcc

SEQ ID NO: 137186 - DNA, 2039 bp, Zea Mays
ccgcgtcagaagcaccaaccgagccatggttcacgggctgcgggctgcgggctgcgggctgcggcggccgacgggaccggtgtgagcaggcgaccacgaaggggcccacccgtcggtggctgcctgcccccgctcgtcaacaactaccccgaaagccgccaagcggctgctgcgcaaggtgcgaaaggcaccttccctgcccgattggcgatttaagtggtgggggagggaaggccgatggtcagtgaaagagaggtaggtggccggacggtggtggcatcgccaattcaactccgcatctgaatcggcactcggcagcgcgccagctccatagtgtaggaggagatggcgctcacaagaatcggtcttgctggccttgcggtcatggggcagaaccttgccctcaacattgcagagaaagggttccccatctctgtgtacaacaggacaacctccaaggtggacgagaccgtgcagcgtgccaaggcagaaggaaaccttcccgtctacggcttccatgaccccgcgtcctttgtgaagtccattcagaagccacgggtggtgatcatgctcgtcaaggccggcgcgccagttgaccagaccatcgcgacgctcgcagctcacttggagcagggcgactgcatcatcgatggggggaacgagtggtacgagaacacggagaggagggagaaggccatggaggagcgcggcctcctgtatcttggcatgggtgtctctggaggagaggagggtgcccgcaacggcccgtccttgatgcccggaggctcgttcgaggcttacaagtacgtcgaagacattgtcctcaaggtggctgctcaggtccctgacagtggcccgtgtgtcacgtacattggcaaaggtggatcgggcaactttgtcaagatggttcacaacggaatcgagtatggcgatatgcagctgatttccgaggcatacgacgttctcaagtcggtcggtaagctcaccaacagtgagctgcaccaggtgttctccgagtggaacaagggcgagctcctgagcttcttgatcgagatcacggccgacatctttggcatcaaggacgagcatggcgatggctacctggtggacaaggtccttgacaagaccgggatgaaagggacagggaagtggacggtgcagcaggccgccgagctgtcggtggccgctcctacgatcgaggcgtccttggactcgaggttcctgagcgggctgaaggacgagcgggtggaggcctccaagatcttccagggtgactactactccaccggctcgccggtggacaaggcgcagctggtggaggacgtgaggcaggccctgtacgcgtccaagatctgcagctacgcgcagggcatgaacatcatcaaggccaagagcgcggagaaaggctgggggctcaacctcggcgagctggccaggatctggaagggcgggtgcatcatccgcgccatcttcctggaccgcatcaagaaggcctacgacaggaacccgggcctcgccagcctgctcgtagaccccgagttcgcgcaggagatcatggacaggcaggcggcgtggcgcagggtggtgtgcctcgccatcaacaacggcgtcagcaccccgggaatgtccgctagcctggcctacttcgactcctaccgcagggacaggctgcctgccaacctggtgcaggcccagagggactacttcggggctcacacctacgagagggtcgacatgcctggctctttccacaccgagtggttcaagattgcgcgcaacatctccaacaactgatgagctgctcaacggatggcatgcccggtgttgactactccagtcggtaatgagatttcctgcaggaacttgtctattgatctttgtaagttaattatttatatgaataaaataagagcagacatgcttgtgtttgggcaccctctgttttctcctccctgttaatcaatgcaccatgctccaaaggtgatgtacataattcagacaagtctcgatgatgtacatgttacagaactagcgaaaga

SEQ ID NO: 137187 - DNA, 2033 bp, Zea Mays
ccgcgtcagaagcaccaaccgagccatggttcacgggctgcgggctgcgggctgcgggctgcggcggccgacgggaccggtgtgagcaggcgaccacgaaggggcccacccgtcggtggctgcctgcccccgctcgtcaacaactaccccgaaagccgccaagcggctgctgcgcaaggtgcgaaaggcaccttccctgcccgattggcgatttaagtggtgggggagggaaggccgatggtcagtgaaagagaggtaggtggccggacggtggtggcatcgccaattcaactccgcatctgaatcggcactcggcagcgcgccagctccataggaggagatggcgctcacaagaatcggtcttgctggccttgcggtcatggggcagaaccttgccctcaacattgcagagaaagggttccccatctctgtgtacaacaggacaacctccaaggtggacgagaccgtgcagcgtgccaaggcagaaggaaaccttcccgtctacggcttccatgaccccgcgtcctttgtgaagtccattcagaagccacgggtggtgatcatgctcgtcaaggccggcgcgccagttgaccagaccatcgcgacgctcgcagctcacttggagcagggcgactgcatcatcgatggggggaacgagtggtacgagaacacggagaggagggagaaggccatggaggagcgcggcctcctgtatcttggcatgggtgtctctggaggagaggagggtgcccgcaacggcccgtccttgatgcccggaggctcgttcgaggcttacaagtacgtcgaagacattgtcctcaaggtggctgctcaggtccctgacagtggcccgtgtgtcacgtacattggcaaaggtggatcgggcaactttgtcaagatggttcacaacggaatcgagtatggcgatatgcagctgatttccgaggcatacgacgttctcaagtcggtcggtaagctcaccaacagtgagctgcaccaggtgttctccgagtggaacaagggcgagctcctgagcttcttgatcgagatcacggccgacatctttggcatcaaggacgagcatggcgatggctacctggtggacaaggtccttgacaagaccgggatgaaagggacagggaagtggacggtgcagcaggccgccgagctgtcggtggccgctcctacgatcgaggcgtccttggactcgaggttcctgagcgggctgaaggacgagcgggtggaggcctccaagatcttccagggtgactactactccaccggctcgccggtggacaaggcgcagctggtggaggacgtgaggcaggccctgtacgcgtccaagatctgcagctacgcgcagggcatgaacatcatcaaggccaagagcgcggagaaaggctgggggctcaacctcggcgagctggccaggatctggaagggcgggtgcatcatccgcgccatcttcctggaccgcatcaagaaggcctacgacaggaacccgggcctcgccagcctgctcgtagaccccgagttcgcgcaggagatcatggacaggcaggcggcgtggcgcagggtggtgtgcctcgccatcaacaacggcgtcagcaccccgggaatgtccgctagcctggcctacttcgactcctaccgcagggacaggctgcctgccaacctggtgcaggcccagagggactacttcggggctcacacctacgagagggtcgacatgcctggctctttccacaccgagtggttcaagattgcgcgcaacatctccaacaactgatgagctgctcaacggatggcatgcccggtgttgactactccagtcggtaatgagatttcctgcaggaacttgtctattgatctttgtaagttaattatttatatgaataaaataagagcagacatgcttgtgtttgggcaccctctgttttctcctccctgttaatcaatgcaccatgctccaaaggtgatgtacataattcagacaagtctcgatgatgtacatgttacagaactagcgaaag

SEQ ID NO: 137188 - DNA, 2594 bp, Zea Mays
ccgcgtcagaagcaccaaccgagccatggttcacgggctgcgggctgcgggctgcgggctgcggcggccgacgggaccggtgtgagcaggcgaccacgaaggggcccacccgtcggtggctgcctgcccccgctcgtcaacaactaccccgaaagccgccaagcggctgctgcgcaaggtgcgaaaggcaccttccctgcccgattggcgatttaagtggtgggggagggaaggccgatggtcagtgaaagagaggtaggtggccggacggtggtggcatcgccaattcaactccgcatctgaatcggcactcggcagcgcgccagctccataggtgaggcttcggatcccgatctccgcaccctgtccgattccagctccgtcctccccggatttcagttccaccgcgttgaggttttctttttttgtctcctttgggtcctcttgttcccgaagcatggggactgggggttgaattcgtgtagagatccagatgattgcgctgctagctccgatcgccgattttactctgctgcctgccggtccagatccatggaagcaagtcgatgaacttagagggcttccgctctggattttctttgaaaataagttagagtcctgtcaaacacctcttttctctgccaaacgatctacaaaatggctttagcttagaaaactgtttagttagaaaactgtttagcttagaaaactgtttactcggccaggggacagagagacgcattaccttgccttcttgctcttttcgcctctagcggtgctgtgtattcagttacttcgtctcaaagaaattcagttggtttcatcctatacacctatatgtagccggccctgtgactcgcagggcagcgtatgatctttgatcctcggcttatgtattcacctcatcggccgcttaaccttgatttttttttctcagtgtaggaggagatggcgctcacaagaatcggtcttgctggccttgcggtcatggggcagaaccttgccctcaacattgcagagaaagggttccccatctctgtgtacaacaggacaacctccaaggtggacgagaccgtgcagcgtgccaaggcagaaggaaaccttcccgtctacggcttccatgaccccgcgtcctttgtgaagtccattcagaagccacgggtggtgatcatgctcgtcaaggccggcgcgccagttgaccagaccatcgcgacgctcgcagctcacttggagcagggcgactgcatcatcgatggggggaacgagtggtacgagaacacggagaggagggagaaggccatggaggagcgcggcctcctgtatcttggcatgggtgtctctggaggagaggagggtgcccgcaacggcccgtccttgatgcccggaggctcgttcgaggcttacaagtacgtcgaagacattgtcctcaaggtggctgctcaggtccctgacagtggcccgtgtgtcacgtacattggcaaaggtggatcgggcaactttgtcaagatggttcacaacggaatcgagtatggcgatatgcagctgatttccgaggcatacgacgttctcaagtcggtcggtaagctcaccaacagtgagctgcaccaggtgttctccgagtggaacaagggcgagctcctgagcttcttgatcgagatcacggccgacatctttggcatcaaggacgagcatggcgatggctacctggtggacaaggtccttgacaagaccgggatgaaagggacagggaagtggacggtgcagcaggccgccgagctgtcggtggccgctcctacgatcgaggcgtccttggactcgaggttcctgagcgggctgaaggacgagcgggtggaggcctccaagatcttccagggtgactactactccaccggctcgccggtggacaaggcgcagctggtggaggacgtgaggcaggccctgtacgcgtccaagatctgcagctacgcgcagggcatgaacatcatcaaggccaagagcgcggagaaaggctgggggctcaacctcggcgagctggccaggatctggaagggcgggtgcatcatccgcgccatcttcctggaccgcatcaagaaggcctacgacaggaacccgggcctcgccagcctgctcgtagaccccgagttcgcgcaggagatcatggacaggcaggcggcgtggcgcagggtggtgtgcctcgccatcaacaacggcgtcagcaccccgggaatgtccgctagcctggcctacttcgactcctaccgcagggacaggctgcctgccaacctggtgcaggcccagagggactacttcggggctcacacctacgagagggtcgacatgcctggctctttccacaccgagtggttcaagattgcgcgcaacatctccaacaactgatgagctgctcaacggatggcatgcccggtgttgactactccagtcggtaatgagatttcctgcaggaacttgtctattgatctttgtaagttaattatttatatgaataaaataagagcagacatgcttgtgtttgggcaccctctgttttctcctccctgttaatcaatgcaccatgctccaaaggtgatgtacat

SEQ ID NO: 137189 - DNA, 3767 bp, Zea Mays
gaaactttgaaccaagtatttcttatttacctgttgtttaatgtgttgaaatttaaaggcagttttcctcattggaaaggaaggacaatcagagccaagagtttcttcataaacctgaataaaaggacatgcgattacggaatacagacagggcaccgcgtagctcaggtcgtcgcaataatgttctttcatggatctctgaagttaaagacacatctaatgtgggcgtaagaaagaaaagggggagaagagcacctccatctgctaaaagattgcgtgataaaagggtggataaggcgattgaaagtgatggtgctgttgacagtgacagcgatgatacagatggacaggttgacaagaatcagcctagtgcacacattgaggaacatgttgatgggagaactggtgatgacttagcaacagcaggccactcaggcaattcttccaatggtccatcctcagcttcagaagaacaggaccattcaacaaactctaaagacaagctccaaaaagctagctctcaaaacacaaagaaggtttttggaaactcaacaaacggcaagcaaggtgcatctaatttggaacaggaatgtgcaaatgaagatgggtctcatgtgctagttgctgctgtatcagatgcacaactggatacagcttcatctgatgacaaaagttcagaagaagtcgaagacgtgaaggtttgtgacatttgtggagatgttggtgaggaggagaagctcgctgtctgtagcagatgcaatgacggcgcagagcacacgtattgcatgcgggtaatgatggaagaggttccagatagtgagtggttgtgtgaagactgccaaactgctgtagaatctgaaaatgagaatagactacaaaagtctcaggtgaaggctggcacttcaaaagagctttccttagaaggggagattaacaaacctgccattgctgcaaagggaagaagttcatctgactgtgaattgaaggctgggaatatagaaaacaaagagtcaaataccacaaatgagaggaatggcacagtcaaaaccaggacggaagaagatgctgtgacgacatcctcaactagagatattttttctgaaactggtggcttgtacatgggggctgactctagaaagagaatggaaccatcacacgagacattcgtgtctgatgctgacaaaggaaagcaacctagccatcaagtatcaacttcattggtggttaatgctctgaagaatcaggcaccacagtctcgtggtcaactttccaaatccacttctttcaataactcaaaggtccccaaagtgaaacagctattgaatgaagttcctcagaagccaaaatttttgaaggaatcttggtcctctattatcaataaaaaggaaggaccaatcagcatgactactaagtcagcgaccttcaaaaagcctaagccttgtgagccaacaaacaaggcaaagtcttccgtcttgtcacctgtcgaggagccaagggtgccgaatcagttggcgagccacaatgtaacaaatggtcagtgttctatattggggcctccctctgccacatcatcaatggttgctcctgttctaagaactgatagcacaactcagctgctctctacaagaaataacacagttgactcaaataatttaggttctgttcatctacaaggaaacagtgagctaaagaagcctcgtttagcaaaagtgccgggaagtatgatgctatctaatgctgaaagatccgcaggtgggattcttggttccggtgctcatcgagaagtgattcaaaattcagacccttcacatagggatgctaaaataaaggaccaaactggcttcagacagggtgcttctagcagcaatcggacaatccgttgccaaagatgtaatgaatatggccattctacacatttttgcgaagttgaaaaacttcgtttgtcttcaggaaaacctttgagtgagcgaaacttgaaggatgcatctgccaaaagaaataagacatccgaagttagtacattggcttctagtgaaaaaactccttccagagaaccagagcatgtcgtaaagtgtgctattaatcagaatctgataaatgggcctaatgatggtatacctgccccattcagccatgtaaagaagcactcattatcacctcgagctaatgtgtccatccctgggagcggagtagattgtagcaagcctaagttcaaaaataatgatccatctctatctggcacagcaggaatctttgttcataatggtcgcattatgccaaatgatcatagggatgaacctgctcaagggttttcagctggtgatgaaccaacgtcttcaactgtccctgagctgggctggatatggcaaggtggttttgagctgcagaggactggaagttcaccggagctgtgtgatggtttccaagcccatttatcatgttctgcttcacagttagtgctggacgcagttaagaaattcccttctaaagtccagcttgaggaagttcctcggaagaattcatggccaacacagtttcagaaaaacggtccaacttatgacaacataggtctttttttctttgctagagatgttcaaagctatgaaaatcactacagtaaattagttgagaatatgctgaagaatgatttagttctcagaggaagtgttggtactgttgagttgcttatattcccttccaatatcctatcaaagaacttccaaaggtggaatatgttgtactttctatggggtctattcagagttagcaaaaaagattcctctaacctcccatcttatctatccacaagtagagtagaacgaaattttaatgatgatctccaggccatggattggatgccatctacccattcattctcacagaacaggagtgatttagctgaaccggaccctgatttgttaaagtcaactaattttgaaccgagtttggaagccagtcgtgaggtgtgtttggatggagagaactctttgaatcaacttgtacgcagaagagctctagatgatcacctagattcagatgcaaaagcatgttcaacgattagcaatggtgccatgggttcctctgccatgtctatgcaaagaaaacatcagaaacctgattatccagaacatcaagataaaaagagggacacttttggtggtaatgttagtgaaagagatttcgatgtgaacacggtgccagttacttgttctgtctccttaactcaccttcaggaagaacctggtaagctgagcacagccatcgacctcatggatatagaccatggggttagcgcaggtgcactggatcgttcacatgcatcaggtggtgcaggtaaaagaagttttgagacggccgaagtagctgctgaagtacccgagcataagaaaactaagctggataataatgttgtgcctataagctctggtccacgcgagaatgcctgtacgaatgatggcaatagcgataaactgatgcctggaagctcaagcagtgatggcaagcgcgtgtttccacttgatctaaatgcagtgggggatgaggacatcgtaaatattccagccttcaggtgatgaagagttcgctgttccatgacaaaccaaccgtggtggtttggttcagaatgagagatgtgcattgtaaatcgcatgtgcagtttttgacctaatgttttcagacaacacttacagatgtgatgttcccctctttggcagtgaataattctgctccagaatatgcttacagatgtgatctcatctgccagattc

SEQ ID NO: 137190 - DNA, 1155 bp, Zea Mays
attcctcccacattccaccgcacccacacgtttctttaccctaaccccgacagccgccgccgtttcttcatcttcctcgcagcgccggcgctccatcttccgctccctccccgactcgcgatcggcacgcaggcgacgtcggggcagtctcggactcggcggcggcgtcagcggctccccctcccgccctcgccagtcgcttccggtcctccgcacaccaaccggcgactctgcgtgcgcgcctcctgcttccggtggaccgtcgacggcgcccgggccccggtggccggcgggcagcgagagccagcagcctggcagttttcctcattggaaaggaaggacaatcagagccaagagtttcttcataaacctgaataaaaggacatgcgattacggaatacagacagggcaccgcgtagctcaggtcgtcgcaataatgttctttcatggatctctgaagttaaagacacatctaatgtgggcgtaagaaagaaaagggggagaagagcacctccatctgctaaaagattgcgtgataaaagggtggataaggcgattgaaagtgatggtgctgttgacagtgacagcgatgatacagatggacaggttgacaagaatcagcctagtgcacacattgaggaacatgttgatgggagaactggtgatgacttagcaacagcaggccactcaggcaattcttccaatggtccatcctcagcttcagaagaacaggaccattcaacaaactctaaagacaagctccaaaaagctagctctcaaaacacaaagaaggtttttggaaactcaacaaacggcaagcaaggtgcatctaatttggaacaggaatgtgcaaatgaagatgggtctcatgtgctagttgctgctgtgtacaaggatattgataatgaaagaagctctcaaaagattagggatgatgtgagtttcttgctctttgttctggtgtttttcgttttatttatgattacatgtattgtctatatgaagaacgccaatctttatcattgagaagttaatatgcatctttaagtgatttgtttgcattttatgcgaacatatgatgcatgggaaattgaaccctctgtttgtattaaccacatagtttgttgtaaatggtttatattcagcaggtatcag

SEQ ID NO: 137191 - DNA, 2751 bp, Zea Mays
cggggggcatcgggccaaaccaaaagcacggacaccaaccaaaggccaactcatgaacaccaacaactagtgtagtgtgtagttgtgtgcacgctggcttggtccccgtagcagagaaccccacccccataaaagctcctctccattggccgaacgccgagagcaccactccctccctccggctcccaaccccagcacagcgcagcagcagtcctctctcctctcactctactcctccagctccccacccctctcccaaaacctcagttcaatcccaggtttcaaatccgccaccttttggacacacaccacacttgcctacccccagagctgagctagctagctgctctctctctctcttttcacctaagcgagaacagagcccaagaggcctcaaaagaaccactgcacttcctccgcatagctcgtcgccctctctctcctatcagtcctcccagctccagctaccacagcagccctctcgcttaaaggaggagggagaagagggcggggcgagcaatgtcggagcagcagcagccattgccgcagcctcggagcagcatgcgggaggctctggagaaggaggacaaggagaaggcggcggctgctgcggcggccaaggagaaggcggccgtccccaagaacggcaacggcaacggcggcaagaatggcggcggcgccggcagcggcaacggcggagcgcccccgcagtccggggaggagacggcccgcgagatccaggtggtcagggaggcgtaccgccgcgagacggccgcgccggcctacgtcatacccgaggagccgccggccgtggtcgagctcgtcggctggtacatctacggcttctgctcctacttcatcacccacctgctgctgccggtcctcttcccggccatcatcacgcaggtcgccttccccaactccgacttcacgcccgaccccaagtacaccctcaagggcgtcacctgctccgtccacgagatgtccatgtaccagaggcttaccaagcactccattgtgatcgatggatcccggatgtcaccattgggctggagtggactgtcgtgggcaatcggcatcctcatcgtggcgccgctcctcacccagaccgctcaccatctcgaccgtggccagtaccagtcgctgatcctcattgccgccacgtccttcgggtccttcttctgcctgctaacaggcttcttcaagacggtctgggtgttcctgttctacatcctcttcatcgctggctcgatcatcgtcgctgaggcggtgcacacccgcaaccttgggctgatgatccgtggcctggctgcgcatgactcgggcaagcaccttgtccttcgccgccgcgctgctgccagccagctcagcctgtactgcactgccataggaggcattggagctgccctcatggcagctttcatgtaccacatgctgcggcgcactgaccagctcactggcctctgggtcgtgtccatcttctgtggccttatctggttcatcggcatctgccatggcctcttcacaaacaggcccagcagctcgtcacccaccaccgcattcgagcccaacttcttcaccaagctcagctacagcatgaccctcctccgttacccgcaggccattggcagcctggttgcggtgttcctgtcctctttcgccacaatgtgcatcttcaccagcggcacgctctatgctatcggtggtgtctgcatcaagccggtgctcgtgcttgcgctatggatcctctactttctgttccccttgatctcgctcccgctcctccacccgatccagatcataatccgcgcggacgccgtgcgcatgcagctgctcgggttcataatctgcctgttcgtgtccggtgccgggttctacttcaagagccacaggtggagggctgcccacatcatcgtcatcgccctggtccagagcaccgccaatggcatactgtacgcgttcggccgcatcctgctcctcgatgcctcgccgccggggaaggagggtgcgttctcggtctggtacgcgtttgttcgtgtcaccggtgccatgatcggcttcgctgcctcctccgctggccctgggcgcgcgggagggtcctttgctgctgcgttcctcgggagcttcctgggcatcatcgtgctgatcttcggcaacgtcagcaacatcggggcgctgaaggcggccgggcacctcaaggggatggacgacgagaagaggatgggcggtctcgggatggagaagggcgagggcatgggtagcgccgtcgctgattctggcgagagcagggggagggtatgatgatgactattcgtgacagtgaattcctgggaggtgggggagaaaaggattgcgtcctgtggaggttgtgcttgtgagaaggatttgttctctcttttttttcttgtttctttggccgtgtttcagtgacactgttgatggatcccagtgcttcgcccgtttgatgcatcatggtggtggtggtgatgatggatgacatagtggtaggggagtgtgtgctagttgttaatgtgttatttattcttttgcttgcaagacaattgtaactgatgatcgttagatcatatggttcttccttcgttcttcacccgcccccaaagtctcttgcagtaaagcttcattcatgattcagcctgtgtccgtgtggggaaaaaaatgtgatggtggcattgtgtagacagaagtaaaacatctgtaaactcacttgtagcgatcattctgttctctctg

SEQ ID NO: 137192 - DNA, 1326 bp, Zea Mays
atcttcattgttcagctacttttggttgacaaaaagatcaccaacgcaagggatcttatcaatgttttggaagaagccatcagaggtggatacccaatcctgataattgctgaggatattgagcaggaggctcttgctacccttgttgtcaacaagctcagaggatcattgaagattgctgccatcaaagcccctggttttggagagcgcaagactcagtacttggatgatattgccatccttactggagcaactgtaatcagagatgaagttgggctgtcacttgacaaggctgacaaatcagtccttggaacagcagcaaaggttgtccttactaaagagtcgacaacaattgttggtgatggcagcacccaggacgaagttactaagagggttgcacagattaaaaatctcattgaggcagcagaacaagaatatgaaaaggaaaagctcaatgagaggatagcaaagcttgctggtggtgttgctgtcattcaggtgggagcacaaacagaaactgaactaaaagagaagaagttaagagttgaggatgccctaaatgcaaccaaggctgctgttgaggaaggtattgttgttggtggaggatgcacccttttgcggcttgcagctaaagtcgatgccatcaaggatacactggagaacgatgagcagaaggttggagctgaaatagtaaggagggccctgagctacccacttaaattgattgctaaaaatgccggtgtcaatggcagcgtcgtcactgagaaggtcctttctaacgataacttcaagtatggttacaatgctgctactggacagtacgaggacttgatggctgctggtatcattgatcctactaaggtggtgagatgctgtttggagcatgccgcgtcggtggccaagaccttcctgacatctgatgttgtggtcgtcgatattaaggagccagagtctgcgccccttgctaacccgatggacaactctggtaactggcactgctattgacgcgctaggctatggatactaatggagatgagatggccaagccgcatgggaagaagggtgatcacaattttttttttggtaggcgagaagagtcgggtcgaggtagtttttcatcatcagataaaaaaagcgagtttgttgtacgaccattaggcgaaaaataagtgggaggggctgtgtagcccaaatttgtgatgtaaactggagacagacagcagctaaaaacaagcagaaattgctgagtgattttgtaactgatttgcagctatgctgaatgcagtttgcacgcgactaaacaggaatctaaaatgtctctgtcaa

SEQ ID NO: 137193 - DNA, 1296 bp, Zea Mays
atcttcattgttcagctacttttggttgacaaaaagatcaccaacgcaagggatcttatcaatgttttggaagaagccatcagaggtggatacccaatcctgataattgctgaggatattgagcaggaggctcttgctacccttgttgtcaacaagctcagaggatcattgaagattgctgccatcaaagcccctggttttggagagcgcaagactcagtacttggatgatattgccatccttactggagcaactgtaatcagagatgaagttgggctgtcacttgacaaggctgacaaatcagtccttggaacagcagcaaaggttgtccttactaaagagtcgacaacaattgttggtgatggcagcacccaggacgaagttactaagagggttgcacagattaaaaatctcattgaggcagcagaacaagaatatgaaaaggaaaagctcaatgagaggatagcaaagcttgctggtggtgttgctgtcattcaggtgggagcacaaacagaaactgaactaaaagagaagaagttaagagttgaggatgccctaaatgcaaccaaggctgctgttgaggaaggtattgttgttggtggaggatgcacccttttgcggcttgcagctaaagtcgatgccatcaaggatacactggagaacgatgagcagaaggttggagctgaaatagtaaggagggccctgagctacccacttaaattgattgctaaaaatgccggtgtcaatggcagcgtcgtcactgagaaggtcctttctaacgataacttcaagtatggttacaatgctgctactggacagtacgaggacttgatggctgctggtatcattgatcctactaaggtggtgagatgctgtttggagcatgccgcgtcggtggccaagaccttcctgacatctgatgttgtggtcgtcgatattaaggagccagagtctgcgccccttgctaacccgatggacaactctggctatggatactaatggagatgagatggccaagccgcatgggaagaagggtgatcacaattttttttttggtaggcgagaagagtcgggtcgaggtagtttttcatcatcagataaaaaaagcgagtttgttgtacgaccattaggcgaaaaataagtgggaggggctgtgtagcccaaatttgtgatgtaaactggagacagacagcagctaaaaacaagcagaaattgctgagtgattttgtaactgatttgcagctatgctgaatgcagtttgcacgcgactaaacaggaatctaaaatgtctctgtc

SEQ ID NO: 137194 - DNA, 465 bp, Zea Mays
gttttacaggtcatattcttataacccatgtaatgcatatactttagaaggtcagggccggccctgagggtgtgcagggtatgcgaccgctcagggcccccaaggtccgtagggcccccgcttatccatcttgtatctaaatacatatacatcacagataaatctgtattctcattcttttgtggcgtctctttgattttctggcaatcatctcttcgaggtcgtgcaacaatctgcttgatgacaaatactaaaattgatgtgggaaggacggaaggtgttgtacacctgtgtctgtcacgttgcttaattctagcctaccggagggccgaccctaataacatacattgcttaatcctagtttagtttgctgaattttgttttcagaaaatttgctctaatgtatttagatttgggtttactgtgcattttaaggtttacgcagtttgataaattaaaagtaaa

SEQ ID NO: 137195 - DNA, 676 bp, Zea Mays
ctggcgcgtgtatgtatacacattacacctcatcccttcccctccccccgccacgacccctcagccctcacacaagagacgcagctgcgagtccgccagccttatcctcctccccgtctccggctccaacccgcaagcgcggtaaggtatggcttcgacattcggtgccacttctactgtcggccttatggctgctccaacagggaagaatgtgcgccttcagaggagggtgaacttcagagtaagagcagctaaggagctgtacttcaacaaggatggctcagctatcaagaagctccagactggagtcaataagcttgcagacctagtcggagttacactcggaccaaagggaaggaatgttgttttggagagcaagtatggttctcctaaaattgttaacgatggtgttacagttgccagagaggtacagtgcaatgttaccatggttaaggtcagggccggccctgagggtgtgcagggtatgcgaccgctcagggcccccaaggtccgtagggcccccgcttatccatcttgtatctaaatacatatacatcacagataaatctgtattctcattcttttgtggcgtctctttgattttctggcaatcatctcttcgaggtcgtgcaacaatctgcttgatgacaaatactaaaattgatgtgggaaggac

SEQ ID NO: 137196 - DNA, 671 bp, Zea Mays
ctggcgcgtgtatgtatacacattacacctcatcccttcccctccccccgccacgacccctcagccctcacacaagagacgcagctgcgagtccgccagccttatcctcctccccgtctccggctccaacccgcaagcgcggtatggcttcgacattcggtgccacttctactgtcggccttatggctgctccaacagggaagaatgtgcgccttcagaggagggtgaacttcagagtaagagcagctaaggagctgtacttcaacaaggatggctcagctatcaagaagctccagactggagtcaataagcttgcagacctagtcggagttacactcggaccaaagggaaggaatgttgttttggagagcaagtatggttctcctaaaattgttaacgatggtgttacagttgccagagaggtacagtgcaatgttaccatggttaaggtcagggccggccctgagggtgtgcagggtatgcgaccgctcagggcccccaaggtccgtagggcccccgcttatccatcttgtatctaaatacatatacatcacagataaatctgtattctcattcttttgtggcgtctctttgattttctggcaatcatctcttcgaggtcgtgcaacaatctgcttgatgacaaatactaaaattgatgtgggaaggac

SEQ ID NO: 137197 - DNA, 693 bp, Zea Mays
atggcggccactgcagtcattgcggactggtgggtcctccctctctccgcattgaggtatctttgtggggctacgaagcatcgcaccgtgggtgtgaaggtggatctcgaccttgctcacctgctagaaagccgctcgcctagctccatcggtcccaactgctacaccgtcaacctactaggcactccctcgagccaaaggagctcgccagaggattcacgaaagattgaggaaactgatgaagcaaggaaaaaattctctaatgctaaggcaattttgtcatctcagttttttggtactcaaaacagagaagagaaagaggctcagctatcccttcagaaattcacgggttcttcatccatttcaagctctgatctttttgttcgtaccaatgtggacgattctaacctggacctaagcgctaaagatctcatcaacagtttgtgaggttttaatttgagtggcaatctgtgaggttttgcaagagagatgagctcaccttggcaatggtagttaatcttattaatgcaaacaaggatgattaatttgatgtacttttctatgcctcgtggtgcccattctcacaagaatgcatttgaggaatctgcaattaggccaaggcgtcccacacatgtgaatgtagttgtcggaggctatggtggatacaacacaagatgggctcttttcttagta

SEQ ID NO: 137198 - DNA, 507 bp, Zea Mays
aaaaatgcatcaatgttgactctagatggagttgacgtcatgggggaacgcttagcaaatgaggtgcttgatgtaattagttgaaggtcagaaatcaccaaattttctttccctgcacactccattggaggtttagcagcaagatatgcaattgcaagactttatagacatccagacaacgcgtctgatggaaatactaaaggaaccatctgtggcttggtaggaataaactttattactgtagcaacgcctcaccttggttcacgagggaacaagcaggttccactcctgtttgaatctattgcaatggaaaaggttgcttgccacatcgttcattggatatttaggagaaccggtagacatctctttctgactgacgatgatgaagggtagcctccactactgcagcggatggttgaagatcatgacgatctctactttatacctgctttgcgagcattcagaagaagagtggtgtacgcaaacgcagactgtgatcgtatcctt

SEQ ID NO: 137199 - DNA, 340 bp, Zea Mays
gaatagtaatgcatcaattgttcatcacacaactcctatcacctaatgcatcatttaaggtgataaatcatttaaaacacaaggaaggggcaaatgcaccaggggcttgcctttgttgcagagaagaggttctagatacttctaacacgatgatcagttagatggctccatccacttgatgaacaggcactggagtagactcctcttcagcaaccacttcatcttaaatcttcactccttctgttgggggctctgtatgaaatgatatgatcatggatgcttatgtttatgcagtttgcaacaaaaatattaaaaaacattaccagactacacctataaa

SEQ ID NO: 137200 - DNA, 98 bp, Zea Mays
tgcaagaatgaattcatcaaggaattacggctggttgtatacagagcgagagggaaatacgacaactcaattccgaactggcttgatcagtggcagac

SEQ ID NO: 137201 - DNA, 817 bp, Zea Mays
atcgagagcagaaaacaaagatcgatccatcgagaccgaccgagagcaggattgaagttgaaaggaccgtccgtacgggttacttctccagtcagtctccggtgcgccttcttcgccgatcagcgcgactgctgcttgtacatggccacgagagcggcgctcgtcgccggccgccgtgcggccggtcaggacgggctcgcccttctctcctcgggctgcaggcgcgaaggagctcgtccgagctccccccacaagagcagcagcgccaccgagcgggagggccacggcgacgcgacggcggcgcaggtggaggcggcgctgaaccgcaagaacgcggacgtggtcgacgtcgaccgctccggctccgcgacgctggtcccggccgacgcgcggcgcggcgcgggcgacgagtgggtgcccgaccaggagacgggcgtctttgtcccggccgacgaggagtcgtccgggcccggcgacgggggcgtggccgacgtcggcggcgcgcgcgggcaagccccgtcggtgctggaccaggcggtgttcgtccgcgaggagcacatggaggacgtcgagaggcccgccgtcggcgtggacgatgccggcgccgcctgagcgcggggaccgtgtcctcgggcggcccgccgctgcgaccagcaggcagagtagctgtagcctgtagggcaagcaaagcaaggttttctttgttctagcttccggatcgatagaataatgaagtcagatctcaagtcttctcggtcttgcaaagcgcaaaaattgcatgccgcgcgaggccgacggtgcgacccggcactgatta

SEQ ID NO: 137202 - DNA, 289 bp, Zea Mays
ttttttcttctttttttctcgaacgcgcaagagacatgcgcatcttttcattaagaaggaagagaaaaaggatccaaaatggatcagtacaggaagacccccattacggtggtcgaaaacaaagaaacaaaaatacatccataaataaaaggaaccagaaactactttgacctaaagacctgggattggggctgttaagagatctaagtttgtggcccctcctaacacccacaggtccctttcctcctcggttctcttgatggcttcattaaggcagggagaaaggccg

SEQ ID NO: 137203 - DNA, 121 bp, Zea Mays
gaaagaaaaattcattaccatatttaccactaataatctaaatgcattatttttagttgatggttttgtggtgttacacgttcaagggtcccggagtcttctctcaaggtaagcaacccag

SEQ ID NO: 137204 - DNA, 480 bp, Zea Mays
atgggcaacggttccaatcagcagcgccgacacatgaaacacctgcaggaagcccccgctgccacgaacgccaccaggtggatccccatccaacctgggcgagcagggagagaggagaagggcggaactcggcaagtcgcggctgaggagagcaccatggtcgagagggaaaatccgagcgcaggggcgagctcggggagttgggaggccgagttggggatgggcagagggagctggggggaagccgcgacgctggggcaccagggagagcacaagagagaggagagcaaccgggcgccatgggagagcggggaaatgggcgcgacgaccaggggattgaaggcgagggagctcggccggctgggaggagctgggaagccgcggcacgtagagaccaagctcgaagaggacgagcagagatgggagagactcgttcggcagccattgcgagcttgggagaccgcgacgcgcacggcgtga

SEQ ID NO: 137205 - DNA, 618 bp, Zea Mays
atgggatccttggatcacagatcaggaggcgcgttgggatgcatccttctcggatttcaccaggatattcgtgtcatggccttggagaaagcctctggggtgttcgatgactggcgtatgagtatggagggcgccatggatgatctgcggttggaagttgggaagatatccaagcattgggagcgcgccgtggtggacaagtcgacctccatggcgggcgttctctctcatgtgcctacggccaatgaacgaccgttggtcggatcttcggccaactcgccccatgggcatcactttgagacaagatggaaggattcttatcgctctttgttgtgtgctggatccaagactgaaccattgcggaaatctgcccttcaaaaatttgtagggcatgctaatgtcaatgacattctcatggcatggcttgaatctttattcttcacaatttaccaagaggttataatcactcctgagcacaacgaagaagggatttacacagtcagattctacattcagggcgcccgaatgggtgcctcctcttctagtgaaatgttcattcgcaagttgttccggatccgccagactgcttccgtttctgaatatgttgatcagttctaa

SEQ ID NO: 137206 - DNA, 1069 bp, Zea Mays
caagcattcaactccgtctccaaccgggccgtgtgttcgtgggaacagaagtgcagcgggccgagatctagagagagagagagagagagggcagatctacgctagagcgacagagccacaactaaccgagagggacagtccagtatggtggtggcgctcgggcccggccggttctacggcagcggcctgccgaggccgcgcttcttcccgggcgaccgcgtggacccgccggcgtccgtcaccgacccgctgctcgagtgggcgcgcgaagcgcactggtccatgggcggcatcagcgtgaagcgcctccgcctgcagggccgcatcgagggctccgtcgacaagctccgccgccgcgcgcaccgcgatgccagggtcaaggccaaggccaaggcccgcgccgctggccacatgccggcttcgctcgccgcgcttgggtccgacgacgacgcctccagcggcgactccgaggacgagcaggaggtggcggcgcgggagcgggccctgaagcgtgagcttgtcgacgacgacgaggactccgacgggtccggcgagtcggaggaggacgagcccctcgcggccatcgtcaccgccgccaagaagaggcgcgcgaggaagctcagcgacgagttcgaccgcatcgccgcggagcagcagcagcagctggtgttggagagcaagcagaagccgggtgccgcgacgccggcgacgacgtcaacaaagaggaaggctaccgtgccgagggcttcgccaaagaggaaggcttctgtacccgctgctggggcgccggcgaggttgtcgccaaagaggaaggctgctgcaacagccgcggcgcccttgtcggcggctgggtcaaggaggacctcgccgaggaataagcactgagtggtggtcgccgtatgtgctgctctagttcctgatctgtttcttggcgatcgtggagtcctgaaaatgtattgtgtggttgggtgtctactgctggattgaaacgatgatgaaatggaatcgaattgatggttatatctgaaatgggagtcgaattgatggatatctttgtgtaatcctttga

SEQ ID NO: 137207 - DNA, 234 bp, Zea Mays
tgctgctagtgatggccagcaatcaaaagtgcatccccatgaaaaaaaatcacttaatccgatcctggtgccaaaacaatggatgaggttcgagctaggactgaaaaaaaaaaactcaaggctcgctagcttgagccgggtctacttttgtggctcgctgtgagcttaagcgagccagtcatgttatgttaaatcactatcacatcattatgttattaatttattttatttttt

SEQ ID NO: 137208 - DNA, 1668 bp, Zea Mays
ccaaagcgagcagatcccccgcccctaaccgactcccctcgcttccattccattaatggccgccaccaagagccctccaacacacacctgacctccccttcccccctctctccgccgcccgttccccgcgcctccgcccgtacgtcccgttcccggtcggccggccggtccaaagggaggggaggaggaggaacgcgggagtcggggcccgcaccgatgctgagctcggcatcctcggccgcgggagcggccatggggatgggcggcggcgggtacgcgcaccagcccccgccacagcgcacggtcttcaccgccgcgcagtgggcggagctggagcagcaggcgctcatctacaagtacctcatggccggcgtccccgtcccgcccgacctcctcctccccgtccgccccggccccgccgccgccttctccttcgccggccccgccgccgcgtcgcccttctaccaccaacaccacccgtccctgagctactacgcctactacggcaagaaactggacccggagccgtggcggtgccgccgcaccgacggcaagaagtggcggtgctccaaggaggcgcaccccgactccaagtactgcgagcgccacatgcaccgtggccgcaaccgttcaagaaagcctgtggaatccaagaccgcctcgtcgtcgtcgcccgcgcacccgtcgccgccccagctgtccaccgtcaccaccaccgcgcctctcgagccccttgcagcggcggggggcaaggtccacggcctgtccctcggcggcggcgctgctggctcgtcgcacctcggcgtcgatgcttcgaatgctcactatcgttatggtagcaagtaccctctcggagctaaaccggacggcggcgagttgagcttcttctcaggagcgtcatcggggaacaactcgaggggcggcttcaccatcgactctccatcagataacaactcgtggcactccgccctggcgtccagcgtgcccccgttcacgctgtcgacgaagagcggggactccggcctcctgcccggcgcctacgcctcctactcccagtcccactcccacatggagccgccgcgggagctcgggcaggtcaccatcgcctcgctggcgcaggagcaggagcgccagcagccgttcagtggtgggatgctcgggaacgtgaagcaggagaaccagaaccagccgctgcggcccttcttcgacgagtggcccgggacgcgggcggactcgtggccgccggagatggacggcgcgccgcgggccggcaggacctccttctcctcctccaccacccagctctccatctccatcccgatgcccagatgcgactgacgaggaaccgtcgatcgggcggccactagacggtggacgctcacgctcactagtgcgctgtcgcctggagtggagatcgatcgtcacgccgccgccgcctacgccctcgtcctacctatttgttttgccgtagtgtattgtaccgacctcattaagaacagaacagaacagaagtctctgtgtaagagccggctccttcctgttcctatggtttgtactagtagcgtgctttgtatttgttgtacccctcaagaccgagaatgaaacccgcccgccgtcagtctgtctttgcgttttagtagatgatgcgagtgtttcgtgtgcatttcc

SEQ ID NO: 137209 - DNA, 1354 bp, Zea Mays
ccctaccaaaaaaaaatccaaagcgagcagatcccccgcccctaaccgactcccctcgcttccattccattaatggccgccaccaagagccctccaacacacacctgacctccccttcccccctctctccgccgccttctccttcgccggccccgccgccgcgtcgcccttctaccaccaacaccacccgtccctgagctactacgcctactacggcaagaaactggacccggagccgtggcggtgccgccgcaccgacggcaagaagtggcggtgctccaaggaggcgcaccccgactccaagtactgcgagcgccacatgcaccgtggccgcaaccgttcaagaaagcctgtggaatccaagaccgcctcgtcgtcgtcgcccgcgcacccgtcgccgccccagctgtccaccgtcaccaccaccgcgcctctcgagccccttgcagcggcggggggcaaggtccacggcctgtccctcggcggcggcgctgctggctcgtcgcacctcggcgtcgatgcttcgaatgctcactatcgttatggtagcaacaggtaccctctcggagctaaaccggacggcggcgagttgagcttcttctcaggagcgtcatcggggaacaactcgaggggcggcttcaccatcgactctccatcagataacaactcgtggcactccgccctggcgtccagcgtgcccccgttcacgctgtcgacgaagagcggggactccggcctcctgcccggcgcctacgcctcctactcccagtcccactcccacatggagccgccgcgggagctcgggcaggtcaccatcgcctcgctggcgcaggagcaggagcgccagcagccgttcagtggtgggatgctcgggaacgtgaagcaggagaaccagaaccagccgctgcggcccttcttcgacgagtggcccgggacgcgggcggactcgtggccgccggagatggacggcgcgccgcgggccggcaggacctccttctcctcctccaccacccagctctccatctccatcccgatgcccagatgcgactgacgaggaaccgtcgatcgggcggccactagacggtggacgctcacgctcactagtgcgctgtcgcctggagtggagatcgatcgtcacgccgccgccgcctacgccctcgtcctacctatttgttttgccgtagtgtattgtaccgacctcattaagaacagaacagaacagaagtctctgtgtaagagccggctccttcctgttcctatggtttgtactagtagcgtgctttgtatttgttgtacccctcaagaccgagaatgaaacccgcccgccgtcagtctgtctttgcgttttagtaga

SEQ ID NO: 137210 - DNA, 880 bp, Zea Mays
ccctaccaaaaaaaaatccaaagcgagcagatcccccgcccctaaccgactcccctcgcttccattccattaatggccgccaccaagagccctccaacacacacctgacctccccttcccccctctctccgccgcccgttccccgcgcctccccgtccgccccggccccgccgccgccttctccttcgccggccccgccgccgcgtcgcccttctaccaccaacaccacccgtcccgtgagctctctccactttcgctgccgcctccaatcgtgccgtgtgtacatatacatatcagaaatctccgttcaagtgcgtgcgtgcgtgctgtgactggttggttgggtattggcgcgatttatctcgtcggatgattcattaaccatgcgccggcctagcatctggcatctctcgcctatgcggggtgaggcgtgaggggtgggggcggatctttgtcatgcacctcctttcctgcttgctcaagcaacgggatgggtggggggagtctttattattcaaacttttaaacaaagtaggagaaagaaacaaaagcatctttgcattgggttggtcaaatgtttaggggtgcgctttcgatctgcccccccagttagcaagtacaccattggattagaatacacacgcgcacacggcacacacacacactagctagggctgtgtgatgggaggcggattcgatttctcgctctgctcaacagtctcacccctatagctatacgtggttctcctcctgcctgcagtgagctactacgcctactacggcaagaaactggacccggagccgtggcggtgccgccgcaccgacggcaagaagtggcggtgctccaaggaggcgcaccccgactccaagtactgcgagc

SEQ ID NO: 137211 - DNA, 327 bp, Zea Mays
atgacggggttcgacggctcgacggcgcccgcgatcgagcacacaaggcgaccagctttggatctggagcagagggagctaaggcgagctggaggcctagcggttgaagacaaagctaagggagacgaactgcacctaggcaccagagaagacctcgcgctggagctccaaatcgacggcgtgagagccgagcaggacgcggccatgggagagacgccaagggagccgcgcgtgtgggaactccatggcgaggtcacggccaggacgagctgtagggaagcagcggcagtgacggccagcgccatggctgaggcaggggtgagctag

SEQ ID NO: 137212 - DNA, 109 bp, Zea Mays
gggtacaagcacacaaatagtattttcccttacaagcctttatattgtttcaaacattatctctacatatcttcttcttatatatgaatttggattagtatacttctag

SEQ ID NO: 137213 - DNA, 1283 bp, Zea Mays
atgtctggcagtagccctgcaaccgttgcgtttagaaagtgctgccaatttagaaagagctcgcttgcaaagaagctccacccagacacaaataaaggtgatgcggatgcagaacgcaagtttcaagaggttcaacgagcttatgagactttaaaggatgaacaaaaaagatcattatatgatcaggttggccctgatcagtatgagaaaactgcttctggcggaggcggaactggcttcgagggtggttttggaaatccatttgaggatatttttggtggtggcggtggcggtggtggaatgaatgatttctttaggaacattttcggggatagggactttggaggacgagatgttaaggttgcactcgaactatcatttgtggaagcagttcaagggtgcagcaaaacggtcaccttccaaacgtctgtaacatgtgaaatctgtggtggagccggtgtgcctcctggaaccacacctgaaacatgtctatcttgcaggggttcaggatttatattcatgcaaaccgggccattcaggatgcaatcaacctgcacaaaatgtggtggttctgggaaaactgtgaaggaattctgcaaggcatgcagaggaaacaaagttgtgcctggaaggaaatcagtccgccttgacatactgcctggttcggataatgaggacaccataaaggtggttcgatcaggtggagaagacccagatggccgtccaggtgatctttatgtgaccctcgaggttcgtgaggatcctgttttccgaagagagaaaggtgatattcatgttgatgctgtcctgaatgtgactcaggcaattttgggagggacagttcaagtcccaactctcagtggagacgttgttctaaagatcaagcccggtactcaacctggtcagaaggtagttctgagaggaaaagggatcaagacaagaaactcaccgtaccacggagatcaatatgtccatttcaatgtcaacatccccgaaaatttgacgtctagacagcgggagctgatcgaggaattcgcgaaggaggagcaaggcgaagacgagaaggacgccaaggcagcagctggagcatcggggggatagccggttttaggagccacagtagtgccttttagctggtatttataccgtgaccgtagacctgtctcaaattcgcagcggaaagatttatagataggtctttgtttcggattttgtagctggaataaatgaataatacgtctagaactgattttctgtctttttcgtaaaaaataaaaacaaat

SEQ ID NO: 137214 - DNA, 1056 bp, Zea Mays
atgcccttggtggcgccgacattccaatgcagtgactactacacggagctgctcgtcgtctatagcgcgacggaaggatacatgatgcgatgtggtggcgctcaaacagaggcacgaccggcaggagcaagtgccacaccgacgtttggatggagcgagcaagcgtggcctggcgacctgctgatggcggcgaaggggatggcggcaggagcagttgtgggaacggaggcacggagagcaggagcaaatggcacgcctaagtccaaacggagcactctaaaggatgaacaaaaaagatcattatatgatcaggttggccctgatcagtatgagaaaactgcttctggcggaggcggaactggcttcgagggtggttttggaaatccatttgaggatatttttggtggtggcggtggcggtggtggaatgaatgatttctttaggaacatttttggggatagggactttagaggacgagatgttaaggttgcactcgaactatcatttatggaagcagttcaagggtgcagcaaaacggtcaccttccaaacgtctgtaacatgtgaaatctgtggtggagccggtgtgcctcctggaaccacacctgaaacatgtctatcttgcaggggttcaggatttatattcatgcaaaccgggcccttcaggatgcaatcaacctgcacaaaatgtggtggttctgggaaaactgtgaaggaattctgcaaggcatgcagaggaaacaaagttgtgcctggaaggaaatcagtccgccttgacatactgcctggtttggataatgaggataccataaaggtggttcgatcaggtggagaagacccagatggccgtccaggtgatctttatgtgaccctcgaggttcgtgaggatcctgttttccgaagagagaaaggtgatattcatgttgatgctgtcctgaatgtgactcaggcaattttgggagggacagttcaagtcccaactctcagtggagacgttgttctaaaggtcaagcccggtactcaacctggtcagaaggtagttctgagaggaaaaggt

SEQ ID NO: 137215 - DNA, 315 bp, Zea Mays
atggcgagctcgccggggatgcccctgccccagccgcccctccctgcttcttctgccctggtcagcgttcctctctctctcctcatctccatggccggagctccctcatcccctcctctcggcgtcttctacctgctgtgctcgccagctccctacactcagcctggccgcgcggctctctggagcttgcccctggctcggatttccttccccagccgagatccctccctgttcgtctctgctccggtgttaggtcaagctccccatggtgccgtcgccctcaagctcgcgccctgctctctctgctctctctga

SEQ ID NO: 137216 - DNA, 612 bp, Zea Mays
atggctccgccgcggactggcctgaaggccctgaatctcaaacactacatcctggcagctctgatggcgatcctcgccgtggcggtcgtcgtcaccgtcttctccgtcctgctgagccctgcacgcattttcttctccgtaaccaatcctaggagccacctgttggtgggcaatggaggtgcgaatctcaccttcaccctcgccgccaacaacaccagccagcgcgcggcagtgtggtacaacaccatcctcgtcgacgtgctcaacagcacggtggtgaccccggcgtcgatctggaccaaggccgacctgaagaagaacgcgacgtcgctcatggctgggtggcagacccgtgggagcgtggcgactgtcgacgctacagtgtcggtgtctcggggatcgatggccatggccttcatcaacggcgccgacgtcaatagctctgctttcaccgtgacggtcaccgccgtggcccggttcaaggtcggcatcgccaagacgcagttgtacgacatcaatgtgatgtgcactcccgttatcttcttgctccaaaaccgctcaggcataagtgtggccgcctcaggtgccaatgtggattgcgggccctattga

SEQ ID NO: 137217 - DNA, 1814 bp, Zea Mays
gcaaggttgctgcttgcatgcatacctaggaattttaacatatgcttggtttgtatgaattttaaaatgaagacaatatgctagcttaacagtgcccactgcatgcctatatatacctagcatgatcgagtatatagtacacagctagcaggccggcctgcgtatttcggcactgctagcacaatcacttcacagccatgccgcttgttctgctagtgctgctgctgctcttgtcctgttcttctccagttgccctgctagcagcagcgcatgaacatgacgagtacacactcgtggcgaagagctcgctgaaacccaaagctacgtgcaccggatacagggtgtctccaccccagaacatcacgtgggttccattgaacgcccctcacgggccgtgctcgccattgccgggctcggcggcgccgtccttggccgcgctgctcctccacgaccagctccgcgtcgacggcatcgagaggaggctctctgacaatccccatgatagtaagttggttccggctggcggagaggatttccaaacgaacggcaatttacttcaagtcaactacggcaattcaggacagcctatgagctccgaggcccagcagagcggcgtggttaatgcgtcggctgccggcggcggaagcagatccaagctgcccggagtgatccagacggtggttctggactcggcgagcgacgtgccgtgggtgcagtgcgtgccgtgccccatcccgccgtgccacccccaggtggacagcttctacgacccgagcaggtctcccagctctgcccccttctcgtgcagctccccgacctgcacggctctcggcccctacgccaatggctgcgccaacaaccagtgccagtacctggtccgctaccccgacgggtcgtccacgtcgggggcctacatcgccgacctgctcaccttggacgccggcaacgccgtgtcgggcttcaagttcgggtgcagccacgccgagcagggcagcttcgacgcccgggcagccggcatcatggcgctcggcggcgggcctgagtcgctgctgtcccagaccgcgtcccgctacgggaacgccttctcctactgcatcccggccacggctagtgactccggcttcttcaccctcggcgtgcccaggcgagcctcctccaggtacgtcgtcacgcccatggtcaggttcaggcaggcggccacgttctacggcgtgctcctccgcaccatcaccgtcggcggccagcggctcggcgtggcccccgcggtgttcgccgcgggctcggtactagactcccgcacggccatcacgcgcctgccgccgacggcgtaccaggccctgcgctccgcgttcaggagcagcatgaccatgtaccgctccgccccacccaaggggtatctggacacgtgctacgacttcactggcgtcgtcaacatcaggctgcccaagatctccctggtgttcgaccggaacgccgtgctgccgctcgacccgtcgggcatcctcttcaacgactgcctcgccttcacctcgaatgccgacgatcgcatgccgggcgtcctaggcagcgtgcagcagcagaccatcgaggtgctatacgacgtcggcggcggcgccgtgggattccgccaaggcgcgtgctaagagatccatgtgaaggagacaataagctatactatatatatatatatatactatactatctagtgctaatttgcttggcaaccgagaacaaataaatcactatcaagacatgtaaaaggacatttgaagtatgtcaagaaattaagaaactctggagtgataccttataga

SEQ ID NO: 137218 - DNA, 259 bp, Zea Mays
aaggaggaagactagaacaggcaagagcagcgctaatcagtgacagagcatgatgccatccagatgggacaagataaggcatgttatggtgttctctggtttgtcatcgagaatagctcttcctctttcgtcaagggtttcaccaatggcttgtaacaactggatgtagaacgatttttattttttaactgatgtagtgtgtttttgcattacagtccattgtgtctatgggggcggcatatgtagtgtgtagtcatcg

SEQ ID NO: 137219 - DNA, 2931 bp, Zea Mays
gcggcggcggctccggctgccacaccaacagacaggcaagggctaggcaaggcgcaagaagaggaggggaagtcgaaaataatttagcagcggaagcggaagcagcagcacgaggtgggtggggcagcggcagcggggttctggctaaattattttaatgtctttattatcagagattccagtaatgtgccttgcctcttttatgtgattgtacaaatcaatgaacggaactcatccctggacctccatgtccgggggtgcatgttctaaccttggatatgccagagacatgaatggtaatgttccaattagcactacaaattcctctggaccaagcattggagttagctcgttggtgactgacgccaactcgtcactttccggtggtgcccagttacagccaagtactagcatgaatggtgattcattgatgcgtgttcctgcatcaccaatgtcattttcatccaataacatctctggctcttcagtcattgatggttccatcatgcagcaaagtccaccccaagaacagatgcagaaaaggaggtcttcaagtgtaacatcacaacatgtgatcgatgctggtggtgcattgcatgctcagaagaaatcaaggactgatgttagtcagggtgatatcatgcaacatcagctgattcagcatctgatccatggtcagaattctcttcatttccaggggcaacagaacccacagcttcaagcttttatccagcagcataaactagcacaacttcagcaacggcagcagcagcatttgttgcaaccattttctcagatgcaacaaccccaagttggtattcctcggcagccgcaacttaggccgccattggcacagactggaatgcagttaggtggtcctgttaggactcctatcgagaggggtgtttgttctcgcaggatactgcagtatctatttcacaagcgtcatcgcccagagaataactctataacatactggaggaagattgttgaagagtactttgcacctcgagcaagagaaaggtggtgtgtctcttcttatgaaaacagagggaattcttcagctgctgctccacagaaagctctggatacatggcgatgtggcatttgcaatacacatgctgggaaaggatatgaagctacctatgaaatacttcctaggctctgccaaattagatttgaccatggtgttattgatgaatacttatactttgactcacccaacgaatttgggttgcctaatggacaaatggtgctggagcatgcaaaagttgttcaaaaaagtgtttatgaacatctacatgttatacacgagggacatctgagaatcattttcacaccagaactgaagataatatcgtgggaattttgttcaagacgtcatgaggaatacaccactcgtaagactatagcaccacaggttaataatcttctgcaagttgtccagaaataccaagctgttgtcactgaaagtggatcagccgggatatcaaataatgatgcacaaaccatctgcaacatgtttgtcactgcatcacaacaactggcaaaaaatctagagcatcacaccttaaatgaacatgggctctctaaaagatatgtacgctccctgcagatatcggaggtggtgaatcacatgaaggacttgattgagttcagccacaagaacggccttggtcctaaagagagcctgaacagctattctaaaaccatggcgaagtttcagaatatgcatgattcaagacagctcatggctgctgctaaccttgccaataaccagagcaacaccaaactaatggggaccaaagaagaagcaagtgcttctgcgaccaaccagactcctggtgtcggagccatcggcaataatgctcttcagcatgccacacctctaaacagctaccagaatatgctcagaagctccagtgcaaatccagtcttgctgcagcaggaggcatcgagtgtcttcaaaggtcctacagcaatgcacagtggcatacagctggaagcagccagatccttccgtggacctaaccaagtgcagttccaacaccctgcggcgattcagcagcagcagcctatgccgcagcagagcaatttccagggctttggtggtgttaacccacagtaccagcaccatgtgcttaatcagcttctgcaggaagttaagaacaataaccacgtgaaagcacagcaactgcctccagatgcacctaaagcgagcggcggtcttgcaccaggagttgctattcccaacgttgctgctgctggggagcagggacagcatatcaacagtaatacccgtgaccataacggcgcggtgaagggtgctgctccagctggtactggcccaagcaatgtgatcaacaacacagccagcatgccccccggcagaaacaacagcttcaagtcggtgagcagcagtccagctgctgctaccggtggcattgcggtgaactcgaaggtcgacgactccttccatcaactggaggacctcgacctcgacggcttgatcacaaacgaactgatggagagcgggttgttcggcgccggacaagggtggtgagcatgtcccaccacgcctcacactactatcgagttccttcaccgaaagcgccaagcaacaatataagctttgccacccttctctttctggagtttttgtgttgacagtttcagatgatcgtgccatatacaattatgtaaggtagcgagttggatttggcttgggagtcgggaacggcgcaatctatagagctgttagcgtgtgcgtatgacatgttgctgtggttatcattttcatgctatggaggagtgtcgattatagtctcctgttgtctggcacggcgtgagtgtgtgtttcccatggttctatgaaatcaaattatagaagaaacaagatctaatgtttaggaatcgattctctatggttca

SEQ ID NO: 137220 - DNA, 3123 bp, Zea Mays
cctcctccctctcctccgattgggcccactaaccagagagtcggtgagagggccccgccaccggcaataacccacccaaccccagtcagactcagagcctgcagcgtgtcggccacaccagccatgacgcgccgcgggacgctcccgctggcgctgctgctgctgctggcggcgacaaccaccgtgtccgggcagggccgacccgtgacggacagcggcgcgcagacgccgcccacgccatccagcttcacgcccaaggacaacttcctgatcgactgcggcgggacggcgcccctcaccgccgacggcaagtcgtacaagactgacgcgcaggccaaccacctgctctccgccaccgacgccatccgcgtggccgccgacgacaaggccgacgtgccctcgccgctgtatgccaccgcgcgggtgttcaaggaggaggccgtctacagctttccgctcaccgtcccaggctggcacttcatccgcctctacttcttcccgctcaagggcggcgacgtggacctcgcgtcggtgaccttcagcgtcgtgaccgacgacaacgtcctgctccacagcttcaccccgggggacaagcccgtcatgaaggagtacctggtgaacgccaccgagaaccacctcgcgctcaagttccagccgctcaagggctccgccgccttcgtgaacgccatcgaggtggtgaacgcccccgacgagctcatcaccgactcggcgctggccgtcgcgcccctgggcgagattaccggcctcgtgcacgacgcgtaccaggtcgtgtaccggatcaacgtcggtgggcccgccatcggccccgccaaggacacgctgggccggcgctgggagagcgacgcggcgtacgtgcagtccaaggaggcggtgaaggacgtgtcggtgcccaccagcaccatcaagttccccgacggcacgtcccggctggtggcgccggcgctggtgtacgccagcgccgcgaagatggcggacgccgacgtggcgagccccaacttcaacctgacgtggaaggtggacgtggacgcgtccttcagctacctggtccgcctcttcttcgccgacatcgtgagcaaggccaccaacgacctctacttcgacgtgtacctcagcgggcgcaaggccgtgtccgggctggacctgtcgacggtggccggcggcgagctggcggcgccctactacaaggacttcgtggtgaactcgtcggcgctggcgggggcggacggcaagctgagcgtccaggtcgggcccatggggcaggacacggggcgggtggacgcgctgctgaacggcgtggaggtgctgaagatgagcaactccgtgggcagcctggacggcgagttcggcgtggacgggcagaaggccgacgacggcagcggcgggcgcaaggcggtggcggccgtcgggttcgccatgatgttcggcgcgttcgcggggctgggcgccatggtggtgaagtggtacaagcggccgcaggactgggagcggcgggagagcttctcgtcgtggctgctgcccatccacacgggccagtccttcacctcgggcagcggcggcggcaagagcggcaacaccttctcgtccaccatgggtctaggccgcttcttctcgttcgcggagatccaggcggccacccagaacttcgacgagaaggcgatcatcggcgtgggcgggttcggcaacgtgtacgtcggggagatcgacgacggcaccaaggtggcggtgaagcgcgggagcgcggagtcggagcagggcatcaacgagttcaacacggagatccagatgctgtcgaagctgcggcaccggcacctggtgtcgctgatcggctactgcgacgagaaccaggagatgatcctggtgtacgagtacatgcacaacggcgtgttccgggaccacatctacggcagcgaggggaaggcgccgctgccgtggaagcagaggctggagatctgcatcggtgcggcgcgggggctgcactacctgcacacgggcacggcgcaggggatcatccaccgcgacgtgaagaccaccaacatcctgctggacgacaacttcgtggccaaggtgtcggacttcgggctgtccaaggacgggcccgggatgaaccagctgcacgtgagcaccgccgtgaagggcagcttcgggtacctggacccggagtacttccggtgccagcagctgacggacaagtcggacgtgtactccttcggcgtggtgctgctggaggcgctgtgcgcgcggcccccaatcgacccgcagctgccccgcgagcaggtcagcctggcggagtggggcatgcagtggaagcgcaagggcctcatcgagaagatcatggaccccacgctcgccggcaccgtcaacccggagtcgctcgccaagttcgccgagaccgccgagaagtgcctcgccgagttcggcagtgaccgcatctccatgggcgacgtgctgtggaacctcgagtatgcgctgcagctgcaggacgccaacccgcccgagggcggcgacagcgacggcaacagcgacggtgccacggcggagggcggcgccatcgtccccgctggcggtgccgtgcccgacgcgtccaccgccgccgccggggagctcttccagcagctcgccgacatgaaggggaggtgatcgatcgattgcactgtatgtggcatggcaatctgactggctcaactcaacagtcgtatcgtcgtagtggatcactcgtctcgtgcatgtcgtcacatcgatgcatgtattgcacgttgaaaattcgaattctagaacacaaattgaaaagagtggttggtgatcagtacgtgtataagtatatatatatgtataatgtatgtacgtgtaacaactagcactgatcgatacattctttcttcaacctgctgttctgagagacagacagacgacgtgagcgaggtctgcactattgggagctcatcatttcagaaatttcgaatctaataaatatatatgtggcataatatcagagtcatttgggggatcacttacctgacgaaaaatgagaaggaaaaaaaaagaaggggcagagcactgctcctgccacgtcacactcctgttcatcgtcggcccgtagcgtct

SEQ ID NO: 137221 - DNA, 2563 bp, Zea Mays
cctcctccctcctccctctcctccgattgggcccactaaccagagagtcggtgagagggccccgccaccggcaataacccacccaaccccagtcagactcagagcctgcagcgtgtcggcgtaccggccgtgctgctctgccgccctccggcgcctgtggcggtgacgcgcacatacgctggagtagctagctaggcaagcgagcggtggtggtggtcgagcacgtagcacaccagccatgacgcgccgcgggacgctcccgctggcgctgctgctgctgctggcggcgacaaccaccgtgtccgggcagggccgacccgtgacggacagcggcgcgcagacgccgcccacgccatccagcttcacgcccaaggacaacttcctgatcgactgcggcgggacggcgcccctcaccgccgacggcaagtcgtacaagactgacgcgcaggccaaccacctgctctccgccaccgacgccatccgcgtggccgccgacgacaaggccgacgtgccctcgccgctgtatgccaccgcgcgggtgttcaaggaggaggccgtctacagctttccgctcaccgtcccaggctggcacttcatccgcctctacttcttcccgctcaagggcggcgacgtggacctcgcgtcggtgaccttcagcgtcgtgaccgacgacaacgtcctgctccacagcttcaccccgggggacaagcccgtcatgaaggagtacctggtgaacgccaccgagaaccacctcgcgctcaagttccagccgctcaagggctccgccgccttcgtgaacgccatcgaggtggtgaacgcccccgacgagctcatcaccgactcggcgctggccgtcgcgcccctgggcgagattaccggcctcgtgcacgacgcgtaccaggtcgtgtaccggatcaacgtcggtgggcccgccatcggccccgccaaggacacgctgggccggcgctgggagagcgacgcggcgtacgtgcagtccaaggaggcggtgaaggacgtgtcggtgcccaccagcaccatcaagttccccgacggcacgtcccggctggtggcgccggcgctggtgtacgccagcgccgcgaagatggcggacgccgacgtggcgagccccaacttcaacctgacgtggaaggtggacgtggacgcgtccttcagctacctggtccgcctcttcttcgccgacatcgtgagcaaggccaccaacgacctctacttcgacgtgtacctcagcgggcgcaaggccgtgtccgggctggacctgtcgacggtggccggcggcgagctggcggcgccctactacaaggacttcgtggtgaactcgtcggcgctggcgggggcggacggcaagctgagcgtccaggtcgggcccatggggcaggacacggggcgggtggacgcgctgctgaacggcgtggaggtgctgaagatgagcaactccgtgggcagcctggacggcgagttcggcgtggacgggcagaaggccgacgacggcagcggcgggcgcaaggcggtggcggccgtcgggttcgccatgatgttcggcgcgttcgcggggctgggcgccatggtggtgaagtggtacaagcggccgcaggactgggagcggcgggagagcttctcgtcgtggctgctgcccatccacacgggccagtccttcacctcgggcagcggcggcggcaagagcggcaacaccttctcgtccaccatgggtctaggccgcttcttctcgttcgcggagatccaggcggccacccagaacttcgacgagaaggcgatcatcggcgtgggcgggttcggcaacgtgtacgtcggggagatcgacgacggcaccaaggtggcggtgaagcgcgggagcgcggagtcggagcagggcatcaacgagttcaacacggagatccagatgctgtcgaagctgcggcaccggcacctggtgtcgctgatcggctactgcgacgagaaccaggagatgatcctggtgtacgagtacatgcacaacggcgtgttccgggaccacatctacggcagcgaggggaaggcgccgctgcccttcgggtacctggacccggagtacttccggtgccagcagctgacggacaagtcggacgtgtactccttcggcgtggtgctgctggaggcgctgtgcgcgcggcccccaatcgacccgcagctgccccgcgagcaggtcagcctggcggagtggggcatgcagtggaagcgcaagggcctcatcgagaagatcatggaccccacgctcgccggcaccgtcaacccggagtcgctcgccaagttcgccgagaccgccgagaagtgcctcgccgagttcggcagtgaccgcatctccatgggcgacgtgctgtggaacctcgagtatgcgctgcagctgcaggacgccaacccgcccgagggcggcgacagcgacggcaacagcgacggtgccacggcggagggcggcgccatcgtccccgctggcggtgccgtgcccgacgcgtccaccgccgccgccggggagctcttccagcagctcgccgacatgaaggggaggtga

SEQ ID NO: 137222 - DNA, 861 bp, Zea Mays
gacttactccgtcgtccgtcgcactgccacggatcaccctcttccttcgtcttcctccacaaaacctatagtgctggtgcgccgaggagctagctagctagcccggccggccggcgccatgcctcccgtgaaggccgaggacctggttgtgcacgccgtcaaggagcagttcgccggcctcgactactgcatcaccagcccccccccgccatggatcacgacggtgctcgttggcttccagcactacctggtcatgctcggcaccaccgtcctcatcgccaccatcatcgtcccgctcatgggcggcggcatgccgagaaggcgatcgtgatctagaccatcctcttcctctccgggatcaacatgctgctgcaggtccacttcggcacgcggctccccgccgtgatgagcggctcctacacctacatctacccggtcgtggccatcatcctgagccaacgatacgcgctcctcatcgaccctctcgagagattcgtgttcacgatgaggtcgctccagggcgtgctcatcatcgtcggcgtcttccaggccgtcgtcggcttcttcggcatatggagagtcttcattaggttcctgagccccctcacggcggtccccttcgtcacgctcacaggcctgggactcttcttctccgcgttccccggggtcaccaagtgcatcgaagtgggtctccccgcccttgtcctcctggtgatcttcgcagagtacgcctcccacgtgttcgctaaggggagcttcgtgttcagccggtgccccgtgctggtgaccgtcgtgatcatctggatctacgccgagatcctgacggcggccggcgcctacaaccagctgggaattacctga

SEQ ID NO: 137223 - DNA, 612 bp, Zea Mays
atgtggcaaccaaatcaaacctatccgggggggattattttcctggtaaacagtgcttggagtgggagtcctcacttgctctgctttgctggtgggcttggaagcagctgccaaggcgacaaaaggcatgagaccccacaaacccaggacgacaaccggttgcaccaacatgcctacctggtagcaagcgatgagggagctggcgaagccaaacgcgcccgtgacgcggggggtcaccttcttcggggccagctgcaggagccccacggccaccacgatgtccaggctcgacttgacgagcgccagcagccgctcgttcgacttgtgcagcttcatgcggtactgctcgttctggcacacggatcacactcagatacacagagagatgcaaatgcaagcgccagggaggagagagacgtggggggagcggtttcgtttccgtcgaggtgtaccttgtacagctcttggtgcttcagctccttctccagcttcttcatcgacgtggacagccgttgcagctcggctagctacacggcttggagcatgaatcaggtgcggaaacacgagataatacggcactcgagacagagacgcacgcacgcacctcgatga

SEQ ID NO: 137224 - DNA, 247 bp, Zea Mays
cgcggaaacgcgtggggctacctgcctgccgccgcccccgacaccgaccggaggcgcctgcctccgctcctcctcgtccggactcgtttcgatgtagccgcgcgtccgcccttgcgtcctccgcgctcaacgcttgatgatcgggtgtcgccgtctgctactcgatctcctcccgccccggccccaccgaatccatcacccgccgaggggatggagacggggttcgacgtggcctgcccgggttggg

SEQ ID NO: 137225 - DNA, 2157 bp, Zea Mays
ctccctcccgctcactcgcgcaatccgtcgaactcgaacactgccatggccaccgccgctgccgacgacgatgtcaagctcgaatccttcctccaatggctccagtccaacggcgccgacctccgcagctgcacgatccgcgcatgcggcggcaagggcttgggggttttttccaccgccgcccccgagccgggctccaacgacggggtggcgatggtggtaccgctcgatctcgccatcacgcccatgcgggtgctgcaggacccactcgtcggcccgcgatgccgcgcgctcttagaggacggagtcgtcgacgaccgcctcctcgtcatgctcttcctcatggccgagcgccgacgccctggctcactctggaagccatacttggatatgcttccgagcacctttgggagctccctttggtttactgaggaagagcttgccgaactggaagggacaactttgcaccgagctacgttgattcagaggaagtcattgcaatcctcatttgatgagaaggttaaagggctcgttgaggagcttttgcatgtcgatgaatcagcaagctcagttgaagttttgtttgaggacttcctttgggcaaactcaatcttctggactcgagcactgaacataccattgcctcattcttatgtttttctgggctcatgtggcgatcaacaggccagggctgacaatgatgcccaccaggaaattgatattacagctaaggattgtagtgctgatgagaattctaaaccaagtaacacagagtcaatttgggttgagggccttgtcccaggaattgatttctgcaatcataatgtaaaggcactggcaacatgggaagttgattctgtgggaaatgctaccggaattcctgcttcaatgtacctcttgcttgctgataaaagtcctgctgagactggagcagagatctgcataaactacggcaacaaaggaaatgaggaactactgtacctttatggatttgtggttgacaacaatcctgatgattatctcatggttcattatcctttggaagctcttagacagatccagtctgctgatataaaaatgaagctactagagatgcagaagggagaattgaggtgcctcctacccagaagtttgcttgataatggattttttggtatccgttctagtgaagataaggatagcaagaaaaatactggtccgttttcaagttttagttggagtggtcaacgcaaagttccatcatatcttccaaaaattgttttccctcatgaatttatgagtactctacgtactattgccatgcaagaacatgagcttgaacaggttgcttctttacttggagaggttggatatagtgaagacagagaaacatcttgtgcagcgatccaaagtgctatttgggaggtctgcggtgatcagggtgcactgggtttgcttgtggatcttctcggggtcaaaatggctgaacttgaagagggctctggaacagaagcatctgacgccgaactgctcgagcagttcgattccattcagccagaagactacgcgagtgaaagcggcgagaagcacgaaaggaagtcaaagacaaactaccgttcgtgtgtagtgtaccggagagggcaaaagcagctgacgaggctgttcctgagggaggtagagcatcttctggagctttctgcgaaagaacagagctaagagactctcatctggccctgcctgcatcaaggttagaactgcagggttgtgaaaggaggcacacccgttgcgaaagtagaataccgccttcgtttcgttcccttgcgaaagtactactactccgttccaggactacgatttcgtctcccgaggattccggattgcccgttggctgggcatttgtggaggagacgtcgtcttgcactttgctgccacggctaggctgtagctttacctgattcagcttgcagcggcggagctgcagcgaacagccatctagagacagctccagagctctggttttaccaaaatgcgtttcttttctagatgactttgccttcgtcagagatgcatctcctggtctcacgagtcacagttccgactccgagacggtcaaggaggtttgctatgttttaatcgatggacagatttgtcttacatgacgtcatggacactccgcag

SEQ ID NO: 137226 - DNA, 2289 bp, Zea Mays
ctccctcccgctcactcgcgcaatccgtcgaactcgaacactgccatggccaccgccgctgccgacgacgatgtcaagctcgaatccttcctccaatggctccagtccaacggcgccgacctccgcagctgcacgatccgcgcatgcggcggcaagggcttgggggttttttccaccgccgcccccgagccgggctccaacgacggtaacgctcctctcctttcccccgagtcgacgaggctcatttggacgatgcgccggcgctgtgcaggggtggcgatggtggtaccgctcgatctcgccatcacgcccatgcgggtgctgcaggacccactcgtcggcccgcgatgccgcgcgctcttagaggacggagtcgtcgacgaccgcctcctcgtcatgctcttcctcatggccgagcgccgacgccctggctcactctggaagccatacttggatatgcttccgagcacctttgggagctccctttggtttactgaggaagagcttgccgaactggaagggacaactttgcaccgagctacgttgattcagaggaagtcattgcaatcctcatttgatgagaaggttaaagggctcgttgaggagcttttgcatgtcgatgaatcagcaagctcagttgaagttttgtttgaggacttcctttgggcaaactcaatcttctggactcgagcactgaacataccattgcctcattcttatgtttttctgggctcatgtggcgatcaacaggccagggctgacaatgatgcccaccaggaaattgatattacagctaaggattgtagtgctgatgagaattctaaaccaagtaacacagagtcaatttgggttgagggccttgtcccaggaattgatttctgcaatcataatgtaaaggcactggcaacatgggaagttgattctgtgggaaatgctaccggaattcctgcttcaatgtacctcttgcttgctgataaaagtcctgctgagactggagcagagatctgcataaactacggcaacaaaggaaatgaggaactactgtacctttatggatttgtggttgacaacaatcctgatgattatctcatggttcattatcctttggaagctcttagacagatccagtctgctgatataaaaatgaagctactagagatgcagaagggagaattgaggtgcctcctacccagaagtttgcttgataatggattttttggtatccgttctagtgaagataaggatagcaagaaaaatactggtccgttttcaagttttagttggagtggtcaacgcaaagttccatcatatcttccaaaaattgttttccctcatgaatttatgagtactctacgtactattgccatgcaagaacatgagcttgaacaggttgcttctttacttggagaggttggatatagtgaagacagagaaacatcttgtgcagcgatccaaagtgctatttgggaggtctgcggtgatcagggtgcactgggtttgcttgtggatcttctcggggtcaaaatggctgaacttgaagagggctctggaacagaagcatctgacgccgaactgctcgagcagttcgattccattcagccagaagactacgcgagtgaaagcggcgagaagcacgaaaggaagtcaaagacaaactaccgttcgtgtgtagtgtaccggagagggcaaaagcagctgacgaggctgttcctgagggaggtagagcatcttctggagctttctgcgaaagaacagagctaagagactctcatctggtacaagattgatttccttctctctgttttccgagtgaaattcctgaggtttctatgttttactagcctgttgtttatctacgatcatgacattgacaggccctgcctgcatcaaggttagaactgcagggttgtgaaaggaggcacacccgttgcgaaagtagaataccgccttcgtttcgttcccttgcgaaagtactactactccgttccaggactacgatttcgtctcccgaggattccggattgcccgttggctgggcatttgtggaggagacgtcgtcttgcactttgctgccacggctaggctgtagctttacctgattcagcttgcagcggcggagctgcagcgaacagccatctagagacagctccagagctctggttttaccaaaatgcgtttcttttctagatgactttgccttcgtcagagatgcatctcctggtctcacgagtcacagttccgactccgagacggtcaaggaggtttgctatgttttaatcgatggacaga

SEQ ID NO: 137227 - DNA, 2223 bp, Zea Mays
ctccctcccgctcactcgcgcaatccgtcgaactcgaacactgccatggccaccgccgctgccgacgacgatgtcaagctcgaatccttcctccaatggctccagtccaacggcgccgacctccgcagctgcacgatccgcgcatgcggcggcaagggcttgggggttttttccaccgccgcccccgagccgggctccaacgacggggtggcgatggtggtaccgctcgatctcgccatcacgcccatgcgggtgctgcaggacccactcgtcggcccgcgatgccgcgcgctcttagaggacggagtcgtcgacgaccgcctcctcgtcatgctcttcctcatggccgagcgccgacgccctggctcactctggaagccatacttggatatgcttccgagcacctttgggagctccctttggtttactgaggaagagcttgccgaactggaagggacaactttgcaccgagctacgttgattcagaggaagtcattgcaatcctcatttgatgagaaggttaaagggctcgttgaggagcttttgcatgtcgatgaatcagcaagctcagttgaagttttgtttgaggacttcctttgggcaaactcaatcttctggactcgagcactgaacataccattgcctcattcttatgtttttctgggctcatgtggcgatcaacaggccagggctgacaatgatgcccaccaggaaattgatattacagctaaggattgtagtgctgatgagaattctaaaccaagtaacacagagtcaatttgggttgagggccttgtcccaggaattgatttctgcaatcataatgtaaaggcactggcaacatgggaagttgattctgtgggaaatgctaccggaattcctgcttcaatgtacctcttgcttgctgataaaagtcctgctgagactggagcagagatctgcataaactacggcaacaaaggaaatgaggaactactgtacctttatggatttgtggttgacaacaatcctgatgattatctcatggttcattatcctttggaagctcttagacagatccagtctgctgatataaaaatgaagctactagagatgcagaagggagaattgaggtgcctcctacccagaagtttgcttgataatggattttttggtatccgttctagtgaagataaggatagcaagaaaaatactggtccgttttcaagttttagttggagtggtcaacgcaaagttccatcatatcttccaaaaattgttttccctcatgaatttatgagtactctacgtactattgccatgcaagaacatgagcttgaacaggttgcttctttacttggagaggttggatatagtgaagacagagaaacatcttgtgcagcgatccaaagtgctatttgggaggtctgcggtgatcagggtgcactgggtttgcttgtggatcttctcggggtcaaaatggctgaacttgaagagggctctggaacagaagcatctgacgccgaactgctcgagcagttcgattccattcagccagaagactacgcgagtgaaagcggcgagaagcacgaaaggaagtcaaagacaaactaccgttcgtgtgtagtgtaccggagagggcaaaagcagctgacgaggctgttcctgagggaggtagagcatcttctggagctttctgcgaaagaacagagctaagagactctcatctggtacaagattgatttccttctctctgttttccgagtgaaattcctgaggtttctatgttttactagcctgttgtttatctacgatcatgacattgacaggccctgcctgcatcaaggttagaactgcagggttgtgaaaggaggcacacccgttgcgaaagtagaataccgccttcgtttcgttcccttgcgaaagtactactactccgttccaggactacgatttcgtctcccgaggattccggattgcccgttggctgggcatttgtggaggagacgtcgtcttgcactttgctgccacggctaggctgtagctttacctgattcagcttgcagcggcggagctgcagcgaacagccatctagagacagctccagagctctggttttaccaaaatgcgtttcttttctagatgactttgccttcgtcagagatgcatctcctggtctcacgagtcacagttccgactccgagacggtcaaggaggtttgctatgttttaatcgatggacaga

SEQ ID NO: 137228 - DNA, 2284 bp, Zea Mays
ctccctcccgctcactcgcgcaatccgtcgaactcgaacactgccatggccaccgccgctgccgacgacgatgtcaagctcgaatccttcctccaatggctccagtccaacggcgccgacctccgcagctgcacgatccgcgcatgcggcggcaagggcttgggggttttttccaccgccgcccccgagccgggctccaacgacggtaacgctcctctcctttcccccgagtcgacgaggctcatttggacgatgcgccggcgctgtgcaggggtggcgatggtggtaccgctcgatctcgccatcacgcccatgcgggtgctgcaggacccactcgtcggcccgcgatgccgcgcgctcttagaggacggagtcgtcgacgaccgcctcctcgtcatgctcttcctcatggccgagcgccgacgccctggctcactctggaagccatacttggatatgcttccgagcacctttgggagctccctttggtttactgaggaagagcttgccgaactggaagggacaactttgcaccgagctacgttgattcagaggaagtcattgcaatcctcatttgatgagaaggttaaagggctcgttgaggagcttttgcatgtcgatgaatcagcaagttgaagttttgtttgaggacttcctttgggcaaactcaatcttctggactcgagcactgaacataccattgcctcattcttatgtttttctgggctcatgtggcgatcaacaggccagggctgacaatgatgcccaccaggaaattgatattacagctaaggattgtagtgctgatgagaattctaaaccaagtaacacagagtcaatttgggttgagggccttgtcccaggaattgatttctgcaatcataatgtaaaggcactggcaacatgggaagttgattctgtgggaaatgctaccggaattcctgcttcaatgtacctcttgcttgctgataaaagtcctgctgagactggagcagagatctgcataaactacggcaacaaaggaaatgaggaactactgtacctttatggatttgtggttgacaacaatcctgatgattatctcatggttcattatcctttggaagctcttagacagatccagtctgctgatataaaaatgaagctactagagatgcagaagggagaattgaggtgcctcctacccagaagtttgcttgataatggattttttggtatccgttctagtgaagataaggatagcaagaaaaatactggtccgttttcaagttttagttggagtggtcaacgcaaagttccatcatatcttccaaaaattgttttccctcatgaatttatgagtactctacgtactattgccatgcaagaacatgagcttgaacaggttgcttctttacttggagaggttggatatagtgaagacagagaaacatcttgtgcagcgatccaaagtgctatttgggaggtctgcggtgatcagggtgcactgggtttgcttgtggatcttctcggggtcaaaatggctgaacttgaagagggctctggaacagaagcatctgacgccgaactgctcgagcagttcgattccattcagccagaagactacgcgagtgaaagcggcgagaagcacgaaaggaagtcaaagacaaactaccgttcgtgtgtagtgtaccggagagggcaaaagcagctgacgaggctgttcctgagggaggtagagcatcttctggagctttctgcgaaagaacagagctaagagactctcatctggtacaagattgatttccttctctctgttttccgagtgaaattcctgaggtttctatgttttactagcctgttgtttatctacgatcatgacattgacaggccctgcctgcatcaaggttagaactgcagggttgtgaaaggaggcacacccgttgcgaaagtagaataccgccttcgtttcgttcccttgcgaaagtactactactccgttccaggactacgatttcgtctcccgaggattccggattgcccgttggctgggcatttgtggaggagacgtcgtcttgcactttgctgccacggctaggctgtagctttacctgattcagcttgcagcggcggagctgcagcgaacagccatctagagacagctccagagctctggttttaccaaaatgcgtttcttttctagatgactttgccttcgtcagagatgcatctcctggtctcacgagtcacagttccgactccgagacggtcaaggaggtttgctatgttttaatcgatggacaga

SEQ ID NO: 137229 - DNA, 1728 bp, Zea Mays
ctccctcccgctcactcgcgcaatccgtcgaactcgaacactgccatggccaccgccgctgccgacgacgatgtcaagctcgaatccttcctccaatggctccagtccaacggcgccgacctccgcagctgcacgatccgcgcatgcggcggcaagggcttgggggttttttccaccgccgcccccgagccgggctccaacgacggggtggcgatggtggtaccgctcgatctcgccatcacgcccatgcgggtgctgcaggacccactcgtcggcccgcgatgccgcgcgctcttagaggacggagtcgtcgacgaccgcctcctcgtcatgctcttcctcatggccgagcgccgacgccctggctcactctggaagccatacttggatatgcttccgagcacctttgggagctccctttggtttactgaggaagagcttgccgaactggaagggacaactttgcaccgagctacgttgattcagaggaagtcattgcaatcctcatttgatgagaaggttaaagggctcgttgaggagcttttgcatgtcgatgaatcagcaagttgaagttttgtttgaggacttcctttgggcaaactcaatcttctggactcgagcactgaacataccattgcctcattcttatgtttttctgggctcatgtggcgatcaacaggccagggctgacaatgatgcccaccaggaaattgatattacagctaaggattgtagtgctgatgagaattctaaaccaagtaacacagagtcaatttgggttgagggccttgtcccaggaattgatttctgcaatcataatgtaaaggcactggcaacatgggaagttgattctgtgggaaatgctaccggaattcctgcttcaatgtacctcttgcttgctgataaaagtcctgctgagactggagcagagatctgcataaactacggcaacaaaggaaatgaggaactactgtacctttatggatttgtggttgacaacaatcctgatgattatctcatggttcattatcctttggaagctcttagacagatccagtctgctgatataaaaatgaagctactagagatgcagaagggagaattgaggtgcctcctacccagaagtttgcttgataatggattttttggtatccgttctagtgaagataaggatagcaagaaaaatactggtccgttttcaagttttagttggagtggtcaacgcaaagttccatcatatcttccaaaaattgttttccctcatgaatttatgagtactctacgtactattgccatgcaagaacatgagcttgaacaggttgcttctttacttggagaggttggatatagtgaagacagagaaacatcttgtgcagcgatccaaagtgctatttgggaggtctgcggtgatcagggtgcactgggtttgcttgtggatcttctcggggtcaaaatggctgaacttgaagagggctctggaacagaagcatctgacgccgaactgctcgagcagttcgattccattcagccagaagactacgcgagtgaaagcggcgagaagcacgaaaggaagtcaaagacaaactaccgttcgtgtgtagtgtaccggagagggcaaaagcagctgacgaggctgttcctgagggaggtagagcatcttctggagctttctgcgaaagaacagagctaagagactctcatctggtacaagattgatttccttctctc

SEQ ID NO: 137230 - DNA, 1359 bp, Zea Mays
aaaaatataattttctttttaataaatagaagaacatacctacaacaacttttgtcgaaaaggaatagaatgtacgtacctgcatagaccaagtttagcaagtacaaaatgaaacaaaaggtaaaatgccaattatacgcatacatgcttacctctttgacatgagcctccttcttagcttgaacataaatataatttttagatgatccaatgccatgactgactttatctgaaggtttgacttatcgatgatttttttgcatcagacaaatttgcagtctctctctcatgtccaatctgaagtcagagtatgtgctagtagagctgaagtaggccaataaacatccaagaaatgtaataagataaatcttgagcatacatcacatttgaccatccatataaatataatttttagatgatccaatgccacgactaactttatctgatggtctaagcaaaactgaatcttgagcaacctaaatgcagtaaactccaatgaataaatcaccccctaaaaatagaaacaagaattatgtcagtgtacctatcaccactcccaattagcacaaataagcatgcacactccaaggcctatagaatgttgctatacataagagagttaattcctgtgaacatgagcttctatttgaagcataaattttgtagcaaaaaaagtccatgcatatcaccttgtccagcaacgaggctccaaatgctcatacagctatagagaattgcacaacctaacatttaaaaccaagaagtaccaaaaaatcaaggcttgccgctcaaactcattattaagcgcaattattcaacaacaaccgctatgttatatgattattatatattggtatagattatggctaccatcgtcgacctaatgggaggaaaaaaacacgaataaatcacaaacataaacatggtgggtggcaagatgtctcgcccaaccacctgcttagccacccaaatttgagcacaccagcaaaccaaccgaagaatccaaagaaatctgggtacataccgaccaccggtggtgggtggagcgagcctgcggagcgagcgtgaaacagtaaggattacagaaggggtggaccagtcaacggcggcaggtggagcgaggctgcttcgtaggcttgagacactacagtgagggaggatacgacggtggtgaggagcagctacgcggcgaggatgtcgtataccttgtggatggcgctctcctcgcacgagatccccgggcacagcgtctcgccggtccggacgccataggccttgcggacgaagccgtactgaagggcacgagggactgcatctctgcgacggcggtggtgaggaagcgtcactgtgaaaccctag

SEQ ID NO: 137231 - DNA, 2281 bp, Zea Mays
gcttctgctcctgctacttgccccctcttatcagagagagtggtgtggtggcgcctccccaccatcaccaccagccagcaccacccctcctgcccctctgcgctggcgggccgagcgccgcgagcgagctgggccgcgggcggaggaggagtcgaggctgaccgaccccgcggccggcggcgacgagcggacgcagattcggcagccgtgcgcggaatgcccgtggaaggaggggagagagggagggcgcaggcgcagctgagctgagctgagcccgcgaggttcgcggtctgcggtgcggcggcagaggtctcgccagcgcgatggccagcggcggctcctccaggtacagctcgtacaaggcgccggggctgcgcggcgcgctgctggaggcggcgcacgtgtcgtgcctcgaggaccggtacgcgctgggcccgcagctggggtggggccagttcggcgtgatccggtcctgctccgacctggtcaccggcgaggcgctggcctgcaagtccatcgccaagggccggctcgtgtcccccgacgacgtgcgcggggtcaggctggagatcgacgtcatggcgcgcctggcgggccaccccaacgtcgtggggctcaaggccgtgtacgaggaccgcgactcggtgcacctcgtcatggagctctgcgccggcggcgagctcttccaccgcctccacgagcgcggctgcttccccgagcgcgaggccgccgcgctcttccgccacctcatggaggtcgtcgcgcactgccacgccaaggggatcgtgcaccgcgacctcaagcccgagaacatcctcctcgtcagcaggtcgccccagtcgccgatcaaactcgcggactttggactcgccacctacacccagcctggccgaagcttgagcggcatggtaggcagcccgttctacattgcgccggaggtgctctccggcgggtacaacgaggccgccgacgtctggagcgcgggggtcatactctacatcctcctcagcggcatcccgccgttttggggcaagaccaagtccaagatcttcgactgcatcaggtccatggagctgcggttcccttctgacccatgggacagggtttctgattccgccaaggagctcgtcaccgggatgctgcggcgcgaccctaggctgcggctcacggccaagcaggttctagagcatccgtggatgcaggaacacgcggacccacaagactcgtgcgggcagtgccacgagaccggcctccaacgggagggcgccggctcgtgctccttctccacgccgttggcgtcgcggagcagggacgtgagctttgacacgcgtggccccatcgcgtggaggggtgggggcgaggacgaggcgacctgctgctcgcccacgttcgccgccgtctgcaggtcgtcgttctcggcgttcatcaccgacccggccccgccgccctgctcggcctcctccgccttgggtggctctggcttctcgttcggtgagccctgcgaaccacttgacggaggaggaggaggagggttcccgatgcccatggcttccatgccgagcttctcgttcttctgcgcgcgggacagcagcgagccagctgagccacagccggtcgctgcctcctcgactccgaggacggcgaggggatccacgccacggggcgtcaacggcaggcggaaccacacgatcggcggcggcgggcgggagcacctggacgtggcggtggagtctgtcatccgctgggcgtcgtgcaccaacttctccacggcgccctcacttcgggcctccctcgtatgctagcactagcaacgtcgttccgcgcgccggcgccgccaacgccgggctgagggtgaggaggagaattccgacgagacgagcggtagagagtgtgcagtagcctcgaattgtataatatatatacagacacagtgctgttatagtggtgatgatagattagagagtgaaggtgaagttgctacggagggatggatgcatggagatggagagcgagtggcagagctggaactgatgtgttttattcttcgctgtcacgctgctggtcagataagatttgggaacgctgctggtcagataagatttgggaacacacctggcgacggagagagaaggcgtctgataatttgatatgaacaagaagcaacaatgttcaggatgcatggccaggccacacataaaaggactgtttcagtttgtgtgtcagatctgttttccaccaagaaactgtctaaacaaaaggatcacgtccagacactccatcg

SEQ ID NO: 137232 - DNA, 634 bp, Zea Mays
cctgaagagggagacctgcacgaggttggagggccaccacatcgccgccggctccaccagataccgccggaaaactcccgcccaaccgaaccccatcacctgatgagggtacccaaccggccagttcatgcaagctcccgcttgtttggaggagaactaacaaactcctctcgtcccgtacctggctggtgaggatgaggaggagggcgatgaggaaggacatgtgctggccgtagaagacgcggacagaggtcacaagattcttggcgaacacggtgccggcgccggcgttggcgaagatggtgatgaggacatgctccttcacgctgaagggccccgggttgagggtgaactcgcacgggcggccgcggaagaaggcgcgctccggcagcgccgcggccatgaggcggccgacggggagcacggcgacctgcgccgacacggcggtgacggtgagcggctccttgcggtacccgaagaaggcgttgaggaaggagagcgcggcgcaggacgccgtgcccagcacccacgtccggaacgtcagcgccggcgtcgccgggtcgtcccacgccggcaccgtcagcgccacctgctcgatcggagagccgttgtcgtcccccgcttcagcctcctt

SEQ ID NO: 137233 - DNA, 1733 bp, Zea Mays
tatccaggttcattccggttcgtccctgctcccggtatcctcatgtgctccgtgctggcccgaccgccatcgcgtggccatggccgcccaacaggcccgccgtctgccgaatcacccactcgcccggggagcggggacgcacctcgtgcatgtttcttcgccaccccatgacgtcgcccccctcggcgcctcgcgcgagccggtgctcgtgattggtgaccccggcgtgctcgacgaaatgcctgaacgcgggggactgttccgggtgctgcagtgtagccccacgagcagcggttggtcggaactaggggacgcaggcatggctgcgccatctgtgctgtgcatgaggtgaactcgtggagggcctcgggagcgttagtgttcagcagatgatcgacctgtgctgacagctgacatgcgacaattaccaactgttacagtggtacgtacgacacactcgttacccacaactgctctgacgctatcagggcacgtttgcaaaaaaaaaaaaaaaacagtgagcagcctgattgtgttttttaccagcaggtgctgcaatgctactcctgtcagactccagccatttgtattcattaatggctgctattcctgctgattagttctaatctgaatctggttagttcttatctgaaatacactcacacttctgactgtgtcttcatcatgtagttgagatcttttataatttggcaaagactacattgatctttgatggtgtcatcaagatataatctagttttatcccccagtactggcaatgattagaatactctcaattatgcaccagacatctatgtgaagttcaatgtgctttgcagcgtggcatgaagccatccatccaaaccattgtcctagcaaaaacttttgttctccactcctaggcatggatgcagcaataagggaacctctcaattatctgtatggttcagtgatctgtgcatatgtccctttagagataatgtaattctaccctcaaatactgaatggtgacctctctcagttatgcactggacatccatccacagttataccctttgcagtggggcatgaagcaagagggcatccgtccagatcattgccccaccagttcaaacttttattctccagtcccaggcatagatagagcaacacagccatgaacgccaaaccggcgtcaagggcacctgacagcagataattgtgtcgctcccaccagttacgccggtacttatagaccacgtaacctgacagaaacgcaacgagtatccacgtggtatagttggctgcagtggcaggtggcatgaaggtggttgcgccaatcagtacaggcgcattgacatgccggatccatttctgagctgggaatgccttgtgtgtacaccagacaaggaggggagcaatggcaccgcccaggaagaaccagttcacagcggagtaagtgcctaaatcaccaaatattctgcgtgggccgataaggccccataatacggatgcatcgtagaacacatgatcgtaagggcatgtccaagggctgcctgctgggagaagctctgtgttgcacacatcaggtattgtgtccaggagccaccatattgttccaaggtatacggagcccgcaatcaaagtgcccacaacctgttattttccaatatggacaacattatagatgtaactggagcatgtagttatcattcttttgttagtgtaatacttatagttggtgtggctagttg

SEQ ID NO: 137234 - DNA, 111 bp, Zea Mays
atggcgggcgaggacgcgatgatgatgctggcggtctacgtgagagacttccagcgatgcaataatgcacaagataagagcaaggctggcaagatttcagaggagggataa

SEQ ID NO: 137235 - DNA, 311 bp, Zea Mays
aaacctaattctgccgcagatgggattgaggaaggagagaaggagccactgccggggaaatcttcgattgggctattgttcacgccgtcagcggtaccggggcctttcctcaggtgtgaggaaggacggtcatggctgcgctactcaggattgggcgctggcacaccacaatttctcgccgtgaacaagcttcgccgcagctccgctgtacaccgtgaccagcaccatcgaatcaccaatacctgaagagctagtggtcgaggatccgggtgtttagtaggtagaagttgctgagaaggagctcattaaag

SEQ ID NO: 137236 - DNA, 501 bp, Zea Mays
atggtccgctttagtcctcatgtggcttacaatgagttggagaaggcgagccagttccgtgagggcctgaaaccttctatcaggcatgctctgggcgcctttccgttggtggattttcgtactacgatggagcaggcattgggtgtggagatgcaacatcagtacaccatggagtctcagaagtcttcaagtgttgatcagcctcgtggccaggacgcgaggaggggcaacactggggtccagcccacaagaggggaaaatcacagcaccaggaccaccacccctaccgtggcaaaccctctgaattgggtacttcaggagggagtactcaaaggtatcgggctgttcctaagcccgggctggggctggtgtgtttctgttgtggtgaagcgcatcgccgtgccgagtgtcagtggagtggcaggtgctctatttgcagccaagatcacaaggatgtggtgtgtaggagaaatcccaatgggaagctcaaatgggagctag

SEQ ID NO: 137237 - DNA, 1623 bp, Zea Mays
ggacttgttggtaaagtggacttcactgtgaggcacctatcttcatcggtccagacatttccaaactcattttctggattctcaagtggccagccttgctttagtccattgactcgtcagtgtgcggcttctactgcaccggctaactcgcaaacaacttggacaatgcgtgctaccttccctgaatatgtggttgctcttactacaattgttggatctgtgcttttcacgatatttggtggtgtcggaattgcctgccttccattgggacttatattctcatttgttcgtcgtccaaaagctgtaattacacgctcacaatatataaaggaagcaactgaactgggaaagaaggccagggagttaaaaaaagctgctgaagccctacaccaagaagaaagaagtgggaacaagggccggaaatggcgcaaaaatgtgaaggctttagaaaaggagttattactcctggaagatgacatgaaggctctagaagagatgtatcctcaaggagaacaggctgaggctacttgggcattcacagttcttgggtacatcgggaaacttctatttggtgttgttgggttaattgtttcaatagcttgggttgcacatattgtcatatacttgttgattgatcctcctctatcttctttcctgaatgaagtcttcataaagttggatggtgtttggggtctgcttgggactgctgctttcgcattcttctgcttctatcttcttattgcagtgattgctggggagatgatgcttggattgaagctagtttttatcacaattcacccgatgaaatggggaggcactttaatgaactccttcctgtttaatgttgggctcatactactttgctccatcagtgtgattcagttctgtgccacggcttttgcctactacgcacaagcaactgcagctcaagagatatttggccacactttgcaatcccttcgtggaattaagtatctttacaagtacaatgttttccagtatggctttgttgctcttgccatcctcactctcttctactatgctatatttggatggagaaagaggaaaccaacaggaagattccagctctcaaattgatttgctctgtaagtgaagtttgacggattcatcatatgtgccccctgagtggtagttcagttagcatcttagaaatgtatatgatcaacaaaaccaaaccaatccaaaccaaatcatcttcccaaagagttgaggaactgcaaatgatcaactctgagaccttaaaggccagaattatcaactctgagactttgaaggcaagaatggggcaactgttggttaccacggacatggatgttaaagtagaacccagttgactttgcaatgtacacatttcttgtatcggctcttcatttacgtctgtattatcgcttttatgattggatgatgatgttattcttgagagatgttcggtgtgtttgggggcgcttagcccccctttgatattcattcgtgttgggagttaggtcaattcattgcttttatatgtgttatatactgtgattacaatgcaagattctaggttgtattaatgatgccttgatcattcatgtgcttgtctgtgatcactgcttgtgtttcaac

SEQ ID NO: 137238 - DNA, 1362 bp, Zea Mays
atgcagcctgcctgcatcgccggccggtcaagacgggacggcgagaggcgcgcagtagaaggggaggacgacatcctgttccgagtccgtgctccgtttcttctccgggctggacggcgccgcctggcggtcgccggcaccgcggcggccaccgccggcgtcgttcacgtcaggctcgggctcgtccgccgcggcccgcatcctgaacgaggcgatggcgctccggcacagcgggcaggggatggtgccggcgatcccgggcacgtcgtaggacttgaccacagagcacaggtccagcgcgcacttggcgcacagctcgtgcccgcacacttcggctgcgacgtcacagggtctttccaggcagaccgcgcaggcgtcggcgccgccgctgtccagctgcgccgtgttgagaagcaggcggcagtcccttgcgagggcgagcgcgctggcgagcggcgacgagaggtaggcggagggcgggaacctggggatgcgcaggtgagactcgggggacaggacgtgctccagccactggcagccccacgtcctggccacgtccaacgggatccacccgttgcagttggcggcggccctgtcggccccgcgcgccacgaggatctggcagcacctgacctcgccgcccgcggcggcgtagtgcagcggcgcgctcccggcgccgatggccgccatgggggccgccgtgcagggcagcgtcggcgcggcgacgtcggcgcgctcgtccaccagcaggtgcacgcagtccgcgtgcccgtgcagcgccgccaggtgcagcgccgtcacgccgccgctggccgccctgttcacgagcttgttcctgccggcgccggcgccggccagcagcaggcgcacgcacgtggcgtggcctcccgctgccgccaggtgcagcgccgtctggccgctcaggctgtccaccttggacacgttgcatccgaaaaccagcagcgtctgaaccacctcccagtggccgaaccggcacgcctgcatcaacgccgtctcgccggaaaggttcctagcattcacctctgctccgttctccagcagcaacgcggcgatctggtggtggcctttggcggcggcgaggtggagcggcgagttgaggctgctgccgacggcggcgcagcgcgcgagccccgggttttcctccagcaggcggcgcacctccgccgcgtcgccgttcctcgcgctggccgccagccgctcgccgagccccgcgcaccccagggcgttgcccatgcgttcccgccttcccgccttcccgcgcgcgcgcgccccgccgccgcgccggccgaccctccgaccctgagcagactacctgctgctggccagttagctagctggtag

SEQ ID NO: 137239 - DNA, 1023 bp, Zea Mays
accgcatcctgctgcacccgcatctgctgataatcccgcgatcgacgaggccaccatgtcatcgtcgctgcggttcctgcggccgaagaacgacggcggcggcggagacgacgggtgcttcgacggcgtcgagctggaggtgacggtgctgtcggcggactcgctgcgcctaccgccgtcctactcgccgctgccccgccggctgcggccgtacgtgaccgtggcgtcgtcggacgcgcccgccggctcggcctgcagcacggcggtggcagtggggagcggcggcggcggcggcgagcacgcgtggggcgacacgctcgtcgtccccgtgggcgcgggcttcctggagggccgcgcccacgtccacgtctccgtgctctcggagcccgcctgccggctcgtcggcgccacgccgctgggctggtgccgcatccccgtggccgacgtgctcgacggcctccgcccgccgcgcgcgctccgccggctcagctactcgctgcgctgcccgcgccgaggcgggggcgggggcgcgtggggccacggcgtcgtgcacctctccgtgcgcctgcttggcctccgcgacgacgcgccggcagccacggccacggccacggacgcgacgccgccggtgcagcagggttggtgccgcgtggcgatgggcatcccggtgtccggaccgtcgtcggcggccgcttccgccgtcgtcgggatgcccttgtcgtggggcgccaccacgtcacggtgacggggccacgactagccgtggaaaaacggtggaatttttgccggcgatcagtcgatgtcgaccagcgagcgcggtacgaccaggtcgtgattggggctttttcacgcgtcaggaataggaatagcggctggaaaaggaaactagtgcgtttagtcaaaaaaggtgccttccaatcttccatgcagctacctagacgccgctgaggctggagtgtgggaccaaagtgcatgatgaatagtaattgtaaatgtctactgtttatttcaagtctaaccaaa

SEQ ID NO: 137240 - DNA, 240 bp, Zea Mays
ctgaaatcggtcgtcacttgtgctaaattacatggatatcatttttgcatgcacggttttccatgttttgagtgacttgcagttcaaaggtgaattttccgaagaaattcaaataaacgaactaaatataatagttatagaaaacacttttataattgtgccaaaatggtacatgtaggtctacatagtgtaggaatataccacaaaaagtttggttggaaaaaaagaaaagaataaaaa

SEQ ID NO: 137241 - DNA, 1834 bp, Zea Mays
ttactgtcgatagaaaaacacgtcactgcctcactggctgccatcttgctctgagtcagcgcggcaaccttctgcaccgcagcagctccagctctccaatggcttcccagctaccctccctcgccgcgccggcaggactgtgcctgctgtcagctcttgccgcagcgctgctggtgctcaccctctacgtcctgggcgccgtcgcgtcattcgctgtcttctgcgccggagagttcgcccggagagacccgggccggccgccgctcacggggacgatgctccggcagctcaagaacttcgacaggctgttcgacgagcatgtcaggtacgcgctggcgcatcgcaccagccggctggtctaccctggacacagcgagctcttcacagccgaccccgctgtcgttgagcatgtcctcaggaccaacttcagcaaatacagcaagggagcctacaatattggagtaatgaaggatctcttcggggatggaatttttgcaatagatggggatagctggaggcaccagaggaagctggcaagccatgaattctcaaccaaagtgctacgtgaattcagcagcgttgtcttcagagcaaatgctacaagactggtagataagatatcatctgcagcagctaacagaactattctaaacatgcaggatcttttgatgaaaacaactatggattcaatctttaaagtgggatttggtttcgagctgaacacgctatctggatcagataaatccagtgttcagttcagcaacgcctttgatgaggcaaactgtattgtctaccaccgctatgtcgatctgttctggcagctgaaacgttatttcaatattggatcagaagcgaagctcagaaagaacattcagatcattgatgactttgtgatgaatttgatacaccaaaagagagagcaaatgaacgggcaagataataaagccagagaggacatactatcaagattcataatagcaagcaaagaggaccctgaaatgatcaatgattgttacctgcgtgacatagtcctcaattttctgattgctgggaaagacacaactgggaacacactctcctggttcttatacatgctttgtaagaatcctatagtgcaggataaagttgccctcgaaattaaggagtccgttgagtgggcggaggaagataacaacagagaagacttcactgcaagattgaatgacagagcaattgacaaaatgcactacctccacgctgcgatctctgagacactacggctgtatccagctgttccagtggatggtaagatggcagaagacgatgatgtactacctaatggctataaagtgataaaaggagatggcatcaactacatgatttatgcaatggggaggatgacatacctctggggtgaagatgctgaagatttcaggccagaaagatggattgcaaatggagtcttccagcaagagagtccttacaagtttgtgtccttcaatgcgggacctcgcacatgcttggggaaggattttgcatataggcagatgaagatcatggcagccaccctgatacacttcttcaggttcaaactgacagatgaatccaaggatgctacatacaaaacaatgtttacccttcacatggataaagggctcaagctgtatgcgtacccacgttcaatttgaaatgaccaaacaagtttttttaatcatttgttactgttggagacatgtacatattccacaactatacttggggaggttggaaaaaactcactgagtataggtatgctgaataatgagtttattatgctccaattgccatctcaaagaatggactagaaccaaatatg

SEQ ID NO: 137242 - DNA, 189 bp, Zea Mays
atgggcgcatggtgtgaccccttgtgttgtgagccacagcgtgggagacataaatcatatatacagatggaaataggaccgcttgatcatcatcaggcacaggcagtgcgagccgccgtcagctcgaaccaaattcctcgttccatttctcaagctcgtcccatttgctcttctgcaagcttggcctga

SEQ ID NO: 137243 - DNA, 729 bp, Zea Mays
atgccaccggtggcgcaagaaggagcgccgacgtggtcgttgtcacctggcagcggcgcggcttcgtcagcatccgcctcttccaacccgtcctcctcgctctcgctcccgcccccggtccctaccagcagcagcgcgccgtcgtcctcatcacccccgccgtcgccgccaccgtcgcctacctcgccgtgcgccgcgtgcaagcaccagcggcgcaggtgcctgccggactgcctcctgaagccctacttcccggccgacgagcccgacatgttcaagaacgcgcttcggatgttcggcgtcaggaaactgcagcacatggtccggtcagtccgaccagagaggcgggacgcgtgcgcgcgcgccatcgccttggagtccaagtcgcgcgcggaggaccccgtgcgcggctgcagcggtgtgatccaggacctggaggagcagctcatggacacggccgtcgagctcgaggtgctgctgcggcggctggactcgtaccggcacgcgcgcgactcgttgccccagcgtccaccgaaccctcatgacgctggcgcggccgcggactattccccggcgacgctgcagtagtttatgggaacgtcgcgcggcggcggcgtgcagcagcaagccccgtacggcgtgccaccggcggcgtacgattacgagctcgctgggatacagcaacagttatccccgatggagccacaattgccggaagtgccgtagcca

SEQ ID NO: 137244 - DNA, 1005 bp, Zea Mays
acgggtctcttgtcgcccacgcccgccctcccgctccctcctctctcccgtgactatataactcccccaggcgcctacctttcgaaccgctattcgtgtcctggcatccgcagagagcttgttccgtccaggcaaccaaaaagcaagttgccccgccgcgcagaggaagaagagagcagaggaggatggctcgtacgaagcagaccgcccgcaagtccacgggaggcaaggccccccgcaagcagctcgccaccaaggcggcgaggaagtcggcgccgacgaccggcggcgtgaagaagccccacaggtacaggcccggaaccgtggcgctgcgcgagatccgcaagtaccagaagagcacggagctgctgatccgcaagctgcccttccagcgcctggtgcgcgagatcgcgcaggacttcaagacagacctccggttccagagccacgccgtgctggcgctccaggaggccgccgaggcctacctcgtcggtctcttcgaggacaccaacctctgcgccatccacgctaagcgcgtcaccatcatgcccaaggacatccagctcgcccgccgcatccgtggcgagcgcgcgtagccatcatctccggggatctgatgaatgtctagttaccaaacaaataggctgtattagcgtcgttgttctgtattcgttattttggattcggttgcagtgaaaaacagctttactaatcttatttgtgatctctggtggttgctcgcttctaagcgatcatctgtggtgcaaaattcgggctggttattttgttatggccccgtgtttggtctggcggcctggtccatctcaagtgcccgacggaagttgtcgtgcagcatcatgtgggttttactgcgtcacagctcacgaccatccttctcttccgagatgctaatagttggccgtctatttcactgagataatattaatagttcgacgctgttgctggctgtctaataaatttacgattatgatactctgcaagaca

SEQ ID NO: 137245 - DNA, 812 bp, Zea Mays
acgggtctcttgtcgcccacgcccgccctcccgctccctcctctctcccgtgactatataactcccccaggcgcctacctttcgaaccgctattcgtgtcctggcatccgcagagagcttgttccgtccaggcaaccaaaaagcaagttgccccgccgcgcagaggaagaagagagcagaggaggatggctcgtacgaagcagaccgcccgcaagtccacgggaggcaaggccccccgcaagcagctcgccaccaaggtccgtccgtctgcccttctctacccgtttcggatccgctgttctgttctctagggttcccttctgagacgcgccggcggttgtgctgtggttgcaggcggcgaggaagtcggcgccgacgaccggcggcgtgaagaagccccacaggtacaggcccggaaccgtggcgctgcgcgagatccgcaagtaccagaagagcacggagctgctgatccgcaagctgcccttccagcgcctggtgcgcgagatcgcgcaggacttcaagacagacctccggttccagagccacgccgtgctggcgctccaggaggccgccgaggcctacctcgtcggtctcttcgaggacaccaacctctgcgccatccacgctaagcgcgtcaccatcatgcccaaggacatccagctcgcccgccgcatccgtggcgagcgcgcgtagccatcatctccggggatctgatgaatgtctagttaccaaacaaataggctgtattagcgtcgttgttctgtattcgttattttggattcggttgcagtgaaaaacagctttactaatct

SEQ ID NO: 137246 - DNA, 102 bp, Zea Mays
ggaagaactcccattctagcatgctgttatgcaaactgattttactaaatgtgtgtggttgctgcctgatccaacaaacaaattatcccgtggcgtgcaagc

SEQ ID NO: 137247 - DNA, 408 bp, Zea Mays
atggtcgataccgccactagtgaagagggtttcgacaaagtctacccgtcttcttgttcatgcaacggcgaaagagcatgcatgggcgcttacttgtcgtgcttcaacatctcgtggaagcacagtaggtgcatggtgtggccgcaatggagcaccgacgtctccctcagcgaatcgaacaggtactaccttgcaccaacagcagcagcagaggtctccaacggtgagctgcgaagggcgtgcacaaggtgcatacagtatgcggcctcacctcgtagcagatggggcagttgttcttcatcgagttctcgatgcagcagtgcctatcgcgaagggtcgtcgagtagcaggatcctacgtgtgcaaacaaaacaacaggatgatgtatggctggtgatgggagcctaa

SEQ ID NO: 137248 - DNA, 83 bp, Zea Mays
ttttcttgaattttgctcatagggctcacttagggtttttattagggttgcacattcttacctttttaaaaaactcaattgtt

SEQ ID NO: 137249 - DNA, 347 bp, Zea Mays
atgactgggtggccgccaccaccctacgccaggtgcccaggtctcgttgggcccttcgccaggttttccaacccacccaaaatcatgcacttcctggcaacgagcacccaaccaggttttccaacccacccaaactctaacttaagctatctggtgtatttggatctgatctaattacaagtgtattcttggattatgcttactaactttgatcccttttaaagattatcacttatcaggcatacatgtggacacccatgttctttacttgatccacgcctgcagtcctgtgtgctttgatgtgctttgctctgaacgttcgtagcccttctgctcctcacccccac

SEQ ID NO: 137250 - DNA, 323 bp, Zea Mays
gggggcaatgatcaataaccatggctgacatatgcgcctttgagcaatcaaggctgctatgggtatcaaactggagcccttcctcttctctcctgggaaccttttcagttatgttctaatgatagtggttctgtccttggatggtcatgccattctgtgtgtgataaccagggcagctccacttataacatcaggacaagttgatctggtgctcggagatggtggggttaccagttaaatgattgagcaaaggcgaagctgagcccccctcaacacacacgcgcgcgcgcacacacacaacgaaaagggaagaagaaagcaca

SEQ ID NO: 137251 - DNA, 140 bp, Zea Mays
caaatgaagtaattacacaggtattaggtcgtggcaacccattgtcatccaatcaggctgtatatgttcgatgcggtatccggttgcagaccgtaagaattatattttctatttgtcttttgatttggttttcctctaaa

SEQ ID NO: 137252 - DNA, 120 bp, Zea Mays
cccagctctcgttgggcccttcgccaggtcttaaccgggcaattttctggcgccgagcacccaccaggtgtaccaacgccttctcttcccttcctgttgtgtggaactgagcacccaaac

SEQ ID NO: 137253 - DNA, 153 bp, Zea Mays
ttttttttattttttttatttaattttatttactttctgtgatcataattactgtattttaagtaggctaatcactgttcatgctatgggaaaataggaagtttaatttaaaattccgttatgttattgattcacgtagttaattgtttaccc

SEQ ID NO: 137254 - DNA, 393 bp, Zea Mays
atggggatggacaaatgcaatgcgaatggacaagtgtagcgcgaacagcgtggacagcgacaccgtacacaaggcgggcatggtgatgaatgggttgcccatcagtgtgtatgcatcggagacgttggggtgtgcggcggccatgtccacagacagttgatgagcaagatgctcgggcgcattggggattcaccgctgatcaggttcggcacatacacatgtgatgcgtgtgccgtgtcgggcacactcaagtgagacatggccactgtcatggagtacaagggcctacccctgtagcaggccgtcgactactatgtcaggggcacgatgcagaatatccgaagacaactattatcaataattagccaatataaactatttacaaatctttac

SEQ ID NO: 137255 - DNA, 1519 bp, Zea Mays
atgccgactcgtcgaggcacagccgcgccggagcgcttgcggtgctgcgccaacgcggacacaggccaccggccgcacaaggcgagtcgtgccgagcaccgcgcattgggctgcgccacggcgagctcgcaccgtgccagggctggccgtgcaccacaccatgagccgagctggctgagctgggcgctgttgatctgtgaagcagttgtgggtcctacaaatccctatttgtttcagttcatctgtgcagcacctgttcactacttatggtctgtaatagaaagaaggttattgagtgaacaaaacatctatttgatgaaggtgtacaatgagcagattattgtcagtgttttgaaggtatacaatgagcagattcatgatttgctactgacaggatcccaaccaggagcaacaacaaaagggatgaggggcggcgcgtcggcgcagaagaggtccccaagtggcaagttcggtggcatcgtcggcggagagggcgcacagtggcggcgaatgtcgctgccggcgatgctgctcgacgagaccgtgcaggtcagccaattcgcgcggggcatcgtgacgactgccggcgctatgaatcgggagcccccgaggaccccaaaaccggctcccaggaccaggaagccagcagcgggcgagccgactcctctccacgcgcggcgtgcccgggagaagcagagccatcggggtggcaccacgacacggggcgctggcaccgccacaccgccgtcgcgcagtcgcgtgcggtcccggatccagttcaagcccgtgtcgtcggtcgctgtcagccggccgtccgtgtccgccaaccgcgtttcccccaagaaccggccgtgggccaagaaggcggtgatgttccagaaccccatgttccacgcctccacctctgccgccatcgacccttgtgcgacgtcgtcgccttccaagaagcagaagcggctctacaagacacggtcccctgtcgtggcacagcagataccgcacaagttcctggtcaaagtcgccaccgagcgcgctaggatccaatctcaggatgcacgggaaggccctgcccgcgagacccgtcgccgttcgtgaaggcgcaggcgtcacctacaaaaacgtggcgctgctcgttctcgccgtcaagtttagcgacaaggctcatgtcgcctatcaaagagaggctgtcgctgggcaggagccgggacaacggcgtcgatgtcggtggtggcccgatgagcgtgctgaagcagcggccatgtgttagcttgatggtgcggacggtgtcgagcaagatatcatcgaggtgatgatcttcgtttgtcttcagcgtcatgtgaagacgatagggggtacagattggagagaagagaattgcgttgatcttcttcagaaataagatattctctgctgggaaagctcctgtcttggggtgcttgtacacacactcattacagttatctgtaatttttgttgatccttggtgataatacaggggtggtctcctcgaccctataat

SEQ ID NO: 137256 - DNA, 1281 bp, Zea Mays
ccccatccctcttccttgtcgccgccccatccatcctcctcgtcgatcggcatcttgctgcttggccctaatcaagatgccctctggaaggttggtcgcacataccttgatggtaaggggctctttcgattattctctcagtaattgcccccaccgcgtcacccgccgtcgtgccttgctgcacgctcctttcccatccgcaacaaccaaccttgcatcgaaaggtggaaatgacgacaacaatctccaatctactgtccctctaatctctaatctgctagcatcgacctccaatctgcttcccatctctgtcctcttccgaacatagtggaaatggtgacgctggtgctagagtgggctaccaaggagccctgcctcatgaccatgggggttgatgaggcaggtcatggccctatccttgataaacacttgtctttcttctgaccggttaatatgcaatattgctttttttgagttttcttactacattgtatgtataaatgttcattatgtttgaggtcctggaggtttcatgggctcatttctctaatgaaatggatgctacaaaggatttagtaaaatggatgctacaactcgatactagagaaggccctgcttggtaaacgctaccatgcaattttgagaaatctctttgaattgtttgacatcatcttatagctttggagccgtgttgatcgatggttcaaacgaatatatgagttgcagctaaggttagattattgcagaatcatatattgttattccatctttactttaaaatcttatctcatatatattgtttgatttactccaaagtttcatttttaccgcatgggaaggggtcaaccaaaaccaaaatctaaggatacaggttcatggcttgatagcgacagaaaatctatgcccaaaaatgttggttccggttttcccatagtagtgaattcatatgagatggccctgtatgatgctaaatttcttgctgcccataagtggaagtatgttgttgttaatgaggtgatggaaaacatattttctaaattatcacccatttgttttctccttttttgtatttacatgtcagttccatatttctttctctagggcatcggtcgaaaaattctaagtgtctattattaagggagctgaagcgcgtaccaatgtataataagctttttttacttggcaccccttctgtataatctagcgtagctctggtcactattgaacttcattttgcccattatattctcatcaaatcaagaacatgtcatgatataattc

SEQ ID NO: 137257 - DNA, 1492 bp, Zea Mays
gcaatggcgctccgactaacgctcgccgccgtcgcactcgccgtcctcgcagcggcggcggcgagtggcgccagcgcccccgcctcggcgctggggatcaactacgggcaggtcgcggacaacctcccgccgccgcaggcggccctggtgctgctccgcgcgctgaacgcgacgcgggtgaagctgtacgacgcggacgcgcgcgtgctccgcgccttcgcggggtccggggtcgacttcaccgtgggcgtcccggaccgcctggtcccgcgcctggccgcggaccggggcgcggcggccgcgtgggtgcgcggcagcctgctgccccacctccccgccacgtccatcaccgccgtcaccgtgggcaacgaggtgctgtcgggcaccgacgccgccatgcaccgggcgctgctcccggccatggaggccctccacgcggcggtggccgcgagcaacctcacctcccgcgtggccgtcacaacggcgcactccctcgccgtgctgtcctcctcgttcccgccgtccgccgcggcgttccgccgcgaggtggtcccctacatggcgcctctgctcgggttcctggccccgcacgggcgcgccgttcctggtgaacgcgtacccttacttcgcgtacaaggcggacccggcgcgggtggacctgggctacgcgctgttcgagccccggcgcaggcggcgtggccgacgccgccacggggctgcgctacgacaacatgctccacgcgcaggtggacgccgtgcgcgccgccatctgcgcggccaactacggcagggcgctggagatccgcgtgtcggagaccgggtggccgtcgcagggcgacgacgacgaggccggcgccacgccggagaacgccgccaggtacaacggcaacctcatgcgcctcgtggcgcagggcaagggcacgcccgctgcgcccgacgagccgctgcaggtctacgtgttcgcgctcttcaacgaggaccagaagcccggcccggcgtcggagcggcactacgggctgttcaagcccgacggcacccccgcgtacaacgtcggcgtcaaggcgcccaccatcacggtgcccaaaggcagcgggagtgggaacggcaccggcactggcggcttggttgtggcgcaaggacccggcggcgccgacggcgtcgggccgggcaccgggtactacaccgtgtctgccgcatcagtgtacaatgtgaagagcagacagcggcggcggcggagcctggtggcggcggctgccgtcctggccatggtgtccgggctctggtagtctgggactgggagagaacagatgacgagagacagtccatgaaagtgagcgcacgcatgcagctgaggcatatcgatcgtatcatatcatatgccagcgaattcgattgattcatcgtatggcttgtagctgtgctgaggaagacggtagacatgcatgcctgtatgtaattcatgattcatacacacacacacacttgatactac

SEQ ID NO: 137258 - DNA, 2133 bp, Zea Mays
cttatccgcgccgcgtcctcccgtccccttccactcatcagaaacccccgcaccctctaactaaaccctcaccggccgccacccatggcgatggccggcgccgccgccgccgccgccggtcgctgcctcctcctctcccgcccgtcccccctccggctccgcctcctccacgctgccctctccaccgccgcccccaccctcggccccacctccactccggctccccctccgcggcacgagctcctcctcgagcgcctccgcctccgccacctaaaggacgcctcctcccccggcgccccgaggcctacctcgaggagctcggagcggagctcgcagcaggggaaggggaagagggtcgaggccgcggagagcttcgaggagctcggtctcggggaggaggtgatgtccgcgctgggggagatgggcatctccaagcccacggagatccagtgcgttggcgtgccggcggtgctggccggaaccagcgtcgtgctcggctcccacaccggatccgggaagacgctcgcctacttactccctcttgttcagctacttcggcgtgatgaggcaatgcttgggatgtcaatgaagccaaggcgtccaagagcagtagtactctgccccaccagggagctaactgagcaggtttatcgagtagcaaagtctatcagccatcatgcacgttttcggtcaacgatggttagtggaggcacccgtctaagaccccaggaagattctttgaacatgcccgttgacatggtcgttggcactcctggaaggattcttgatcatatcaaggatggtaacatggtttatggtgatattaagtatctggttctggatgaggcagatacaatgtttgatcaaggctttggaccagacatacggaagtttcttgctccgttgaagaatcgtgctgcaaagcctgatgatcaaggtttccaaacagtattagtcactgctactatgacaaaggctgtgcaaaagttgattgatgaggaatttgaaggtattgtccatttgcggacatcatcatttcaaaagagagtttcaacagcacggcatgactttatcaaactttctggagcagaaaacaaacttgaggctcttctgcaggttcttgagccaagcttgggcaaagggaaacaaagttatggtgttctgtaatactttaaattcaagtcgtgcagtggatcattttttaactgaaaatcatatatccactgttaaactatcatggagaggttccagctgaagagagagttgagaacctgaacaagttccgcaatgaagagggggattgtccaacattagtatgcactgatctggcagctagaggcctggacctggatgttgaccatgtcatcatgtttgacttcccatcgaattctattgattaccttcacagaaccgggagaactgcacgcatgggagccaaagggaaagttacaagcattgtggctaagaaggacgtagctttagctacacggattgaagaggccatgaagaaaaatgagagcttggaagctctcacgactaacaatgtcagaaggccaaccagctcgcagagtgtgaacacgaaagggaggccctcaaggttggttaagacttcaaatgctcttaaagttgtcagtcagaagggtagaaggggagtatcgctatctagcaggtcatcccgggctccccaaggatacaacttcaacccgaaggcgctcgccaccgaagagccaggcaaaggcaacaaaatcgtcagcccctcggaaagccaagccggtgaaacccactcagagcagcgcaaaggtctcgaagagcaaagcaaaacctgaggggcgaagatcaaagagtgacactctgaacaagctgggaactaagctcagtgtggttggatttagagggcgcagctcaggcaaatcagcacaatcttcataaggctttggtatttttttttattattgttatgctaaaaaggttcttggaggatttgcagcctgtaaatatctgagactaagtttcatcatttctttttctccttgcgggtttataagtgaagaccacaatctgagatatgaacgcagcactgctatgtaatattgtactgcactcagcagaatgttggaagaatacttttcatta

SEQ ID NO: 137259 - DNA, 1929 bp, Zea Mays
cttatccgcgccgcgtcctcccgtccccttccactcatcagaaacccccgcaccctctaactaaaccctcaccggccgccacccatggcgatggccggcgccgccgccgccgccgccggtcgctgcctcctcctctcccgcccgtcccccctccggctccgcctcctccacgctgccctctccaccgccgcccccaccctcggccccacctccactccggctccccctccgcggcacgagctcctcctcgagcgcctccgcctccgccacctaaaggacgcctcctcccccggcgccccgaggcctacctcgaggagctcggagcggagctcgcagcaggggaaggggaagagggtcgaggccgcggagagcttcgaggagctcggtctcggggaggaggtgatgtccgcgctgggggagatgggcatctccaagcccacggagatccagtgcgttggcgtgccggcggtgctggccggaaccagcgtcgtgctcggctcccacaccggatccgggaagacgctcgcctacttactccctcttgttcagctacttcggcgtgatgaggcaatgcttgggatgtcaatgaagccaaggcgtccaagagcagtagtactctgccccaccagggagctaactgagcaggtttatcgagtagcaaagtctatcagccatcatgcacgttttcggtcaacgatggttagtggaggcacccgtctaagaccccaggaagattctttgaacatgcccgttgacatggtcgttggcactcctggaaggattcttgatcatatcaaggatggtaacatggtttatggtgatattaagtatctggttctggatgaggcagatacaatgtttgatcaaggctttggaccagacatacggaagtttcttgctccgttgaagaatcgtgctgcaaagcctgatgatcaaggtttccaaacagtattagtcactgctactatgacaaaggctgtgcaaaagttgattgatgaggaatttgaaggtattgtccatttgcggacatcatcatttcaaaagagagtttcaacagcacggcatgactttatcaaactttctggagcagaaaacaaacttgaggctcttctgcaggttcttgagccaagcttgggcaaagggaaacaaagttatggtgttctgtaatactttaaattcaagtcgtgcagtggatcattttttaactgaaaatcatatatccactgttaaactatcatggagaggttccagctgaagagagagttgagaacctgaacaagttccgcaatgaagagggggattgtccaacattagtatgcactgatctggcagctagaggcctggacctggatgttgaccatgtcatcatgtttgacttcccatcgaattctattgattaccttcacagaaccgggagaactgcacgcatgggagccaaagggaaagttacaagcattgtggctaagaaggacgtagctttagctacacggattgaagaggccatgaagaaaaatgagagcttggaagctctcacgactaacaatgtcagaaggccaaccagctcgcagagtgtgaacacgaaagggaggccctcaaggttggttaagacttcaaatgctcttaaagttgtcagtcagaagggtagaaggggagtatcgctatctagcaggtcatcccgggctccccaaggatacaacttcaacccgaaggcgctcgccaccgaagagccaggcaaaggcaacaaaatcgtcagcccctcggaaagccaagccggtgaaacccactcagagcagcgcaaaggtctcgaagagcaaagcaaaacctgaggggcgaagatcaaagagtgacactctgaacaagctgggaactaagctcagtgtggttggatttagagggcgcagctcaggcaaatcagcacaatcttcataa

SEQ ID NO: 137260 - DNA, 569 bp, Zea Mays
acccacctattgtgatgatttattagctatgccatgttcttcaactatagattattattattcttcccttgtcttgtgagactaaaccttttgaaggaaaataataagctcaaaaacaaagtgaagaatttaagcaacatgtttgagaggtggcataaatcagaagtcactcatgatcttataatgaaaaatcaaagaagatatgatgacaagagtggccttggtttcaacaagagcaatatcaaaggcgggcaattcaaattaaaaggaaataagatatttcacttcatgtgctataaatgccatgagatgggtcatcttgcaaaggcatgccccaataaaaggaagctcaagttgaagaaggaagaatggaggctaaagcatgaccagtgcttcaagtgccacacttggggtcacctcacctcaatgtgcccaaccaagaaactagtgaatccacaagtgaagcctcaaccaaagtcacgagttgagcaaaagaagaatccccaaaagcaaatcaagattaaccatgaatataatggtgatgtggggaaaacaagaagagaaagaag

SEQ ID NO: 137261 - DNA, 925 bp, Zea Mays
atatgattgattagtccgtatcgtcctagctgggatggatgccccgatccaccaattctgttgcggatttgttcgctctgtggttccggtggtagcagatgaacatccggggatgtcgactcctgcgaggaagaggctgatgagggatttcaagcggttgatgcaggaccctccggccggcataagtggcgccccgcaggataacaacataatgctgtggaatgctgtcatatttggacctgatgataccccgtgggatggaggtacgtttaagctgactctccagtttaatgaagaatatccaaacaaaccaccaactgtgcgatttgtttctaggatgttccatcctaacatttatgctgatggaagcatatgcttagatatcctgcagaatcagtggagtccgatatatgatgtagctgcgatactcacgtcaatccagtcattgttgtgcgatccaaacccgaattcgcccgctaactctgaagccgcccgcatgttcagcgagaacaagcgagagtacaaccgcaaagttcgggaggtcgtggagcagagctggacggcggactgatgatgccctgtgttgcgtcgcgctgtgctgcgcagctgctcactgcgccccgcgtccgtccattccataccaaaaaaagaaaatggcaaagccgaactcagctgttgctgctttcgttgccctgtgtcaagacgactgcttctctatgaacattttaccttcctgtgctgtatctggaatacaaacttaattatctctagcactgtggcaacatcttatcttatatgaaatttcctccgggaaaacgagaatgatttgcttgggtgattatttcatgaccagccaggttgctgtactaaactatggtacttatttcagctaattttgaatttgaactgctctccgtcttaaatt

SEQ ID NO: 137262 - DNA, 1040 bp, Zea Mays
ctagtactcctatctaataaaaatagtattagatttgtatataagttgtttgtgtttagaataagcttcaatttcagttgtactccatgaccgaaaagtgaattaaaaaaactaaaacaagaaagaacaaattctctaaaaaacacctagcggaaaaagaaaaggaaaaaagtcgcccctccgttgggacctaattcacgcgtttcagggctcctcccatttcgtcggcttcgtttgtcgtcgtcgtaagctgcagctagtgtggactggagatccaccactccaccagtccggtccatctgctggacctcgattggtttcttcttacctaggaacatccggggatgtcgactcctgcgaggaagaggctgatgagggatttcaagcggttgatgcaggaccctccggccggcataagtggcgccccgcaggataacaacataatgctgtggaatgctgtcatatttggacctgatgataccccgtgggatggagatatcctgcagaatcagtggagtccgatatatgatgtagctgcgatactcacgtcaatccagtcattgttgtgcgatccaaacccgaattcgcccgctaactctgaagccgcccgcatgttcagcgagaacaagcgagagtacaaccgcaaagttcgggaggtcgtggagcagagctggacggcggactgatgatgccctgtgttgcgtcgcgctgtgctgcgcagctgctcactgcgccccgcgtccgtccattccataccaaaaaaagaaaatggcaaagccgaactcagctgttgctgctttcgttgccctgtgtcaagacgactgcttctctatgaacattttaccttcctgtgctgtatctggaatacaaacttaattatctctagcactgtggcaacatcttatcttatatgaaatttcctccgggaaaacgagaatgatttgcttgggtgattatttcatgaccagccaggttgctgtactaaactatggtacttatttcagctaattttgaatttgaactgctctccgtcttaaatt

SEQ ID NO: 137263 - DNA, 1997 bp, Zea Mays
ctagtactcctatctaataaaaatagtattagatttgtatataagttgtttgtgtttagaataagcttcaatttcagttgtactccatgaccgaaaagtgaattaaaaaaactaaaacaagaaagaacaaattctctaaaaaacacctagcggaaaaagaaaaggaaaaaagtcgcccctccgttgggacctaattcacgcgtttcagggctcctcccatttcgtcggcttcgtttgtcgtcgtcgtaagctgcagctagtgtggactggagatccaccactccaccagtccggtccatctgctggacctcgattggtttcttcttacctaggaacatccggggatgtcgactcctgcgaggaagaggctgatgagggatttcaagcggttgatgcaggaccctccggccggcataagtggcgccccgcaggataacaacataatgctgtggaatgctgtcatatttgggtatgatgcagaatccccccgcccccttttccccacttcttagtttgaattgtaatatttgacatcgtctttggatatgcttatttcttttacagacctgatgataccccgtgggatggaggttagtgaagctaatttctgctgcagtttttttgcttactctttgaccagaccaaactcatcgtgtgcttatccaaacaataagttgcatctgcatgactgcatatgctgctgctagttttgcctgcacaacacacgacttacgtgaccatgtgatacagaatataacaattgactattaggcattagttgacttgcaggtggcaagctgaagttttcagtcatctgtgtttgttgaccttactgtcaaatgcacggctgatgtagagtacaaattccaagttaagatggatagaggaaactgaccccaaattcaatggaactttataatgtagcatgctaacactagtgtcaatcttggtaagagatgacatcaaattaatttctaaagcaaatagtaataattattaacgacaaagctattgttaaacctagtgacaattctttttcttctcataaaaaacatcacaatgaccattgctacacgaaaacatgcaagcccaaagtgtctttgttgcttgtttagggtcagccaatactgtggtatttattatacacacacacgtgcgcgcgcgcgcatagaatgattgattcagacagaataacaagttaagaaattagctggatgagccccattattcacacaacagctcttagattctgtgtcactagcttgtctttctgagcttactacatggtttgcttctgtcctttgactgatatgctaactcctgttttattctcaggtacgtttaagctgactctccagtttaatgaagaatatccaaacaaaccaccaactgtgcgatttgtttctaggatgttccatcctaacatttatgctgatggaagcatatgcttagatatcctgcagaatcagtggagtccgatatatgatgtagctgcgatactcacgtcaatccagtcattgttgtgcgatccaaacccgaattcgcccgctaactctgaagccgcccgcatgttcagcgagaacaagcgagagtacaaccgcaaagttcgggaggtcgtggagcagagctggacggcggactgatgatgccctgtgttgcgtcgcgctgtgctgcgcagctgctcactgcgccccgcgtccgtccattccataccaaaaaaagaaaatggcaaagccgaactcagctgttgctgctttcgttgccctgtgtcaagacgactgcttctctatgaacattttaccttcctgtgctgtatctggaatacaaacttaattatctctagcactgtggcaacatcttatcttatatgaaatttcctccgggaaaacgagaatgatttgcttgggtgattatttcatgaccagccaggttgctgtactaaactatggtacttatttcagctaattttgaatttgaactgctctccgtcttaaatt

SEQ ID NO: 137264 - DNA, 1157 bp, Zea Mays
ctagtactcctatctaataaaaatagtattagatttgtatataagttgtttgtgtttagaataagcttcaatttcagttgtactccatgaccgaaaagtgaattaaaaaaactaaaacaagaaagaacaaattctctaaaaaacacctagcggaaaaagaaaaggaaaaaagtcgcccctccgttgggacctaattcacgcgtttcagggctcctcccatttcgtcggcttcgtttgtcgtcgtcgtaagctgcagctagtgtggactggagatccaccactccaccagtccggtccatctgctggacctcgattggtttcttcttacctaggaacatccggggatgtcgactcctgcgaggaagaggctgatgagggatttcaagcggttgatgcaggaccctccggccggcataagtggcgccccgcaggataacaacataatgctgtggaatgctgtcatatttggacctgatgataccccgtgggatggaggtacgtttaagctgactctccagtttaatgaagaatatccaaacaaaccaccaactgtgcgatttgtttctaggatgttccatcctaacatttatgctgatggaagcatatgcttagatatcctgcagaatcagtggagtccgatatatgatgtagctgcgatactcacgtcaatccagtcattgttgtgcgatccaaacccgaattcgcccgctaactctgaagccgcccgcatgttcagcgagaacaagcgagagtacaaccgcaaagttcgggaggtcgtggagcagagctggacggcggactgatgatgccctgtgttgcgtcgcgctgtgctgcgcagctgctcactgcgccccgcgtccgtccattccataccaaaaaaagaaaatggcaaagccgaactcagctgttgctgctttcgttgccctgtgtcaagacgactgcttctctatgaacattttaccttcctgtgctgtatctggaatacaaacttaattatctctagcactgtggcaacatcttatcttatatgaaatttcctccgggaaaacgagaatgatttgcttgggtgattatttcatgaccagccaggttgctgtactaaactatggtacttatttcagctaattttgaatttgaactgctctccgtcttaaatt

SEQ ID NO: 137265 - DNA, 647 bp, Zea Mays
ggaacggagaaagtacatgtaaggaggcttctggatttcttaacaaatgttgttgatattttatgttcctgaaaaaaaaccaccaccagcttcttatacaagtattaattctgttacagccacaaggcatgggctcatttctcggttgctagccaagttaagggggcagaaggtggatccatcggagtcagggtcttcatttgaatcgactgggtcaaagaagctgctattcaaggttgtatttgttgcagtagctgcggttctatttcactatttctcaaacaacagttaatacttaacatcggtgtctaaaattttgggtgacttttgtggagccacggcagtagaatgtaccatgttgtgtagcatatgtattgcctgtaagttcgcttgcttccaggcgctattttgccatcctagattcttgaaagccgagggccatgcaatttggacccttctgttgtcgtttttttttggtatggttcgtttcgttttctggccggatgtaatgtaatcccctgacggctgttccctgggcgaacagtgtcagtgtgatccgtttggcaatgtttttattcatgaacgccacgcactgaattctgtaatttcgttactactgtaatgaatttttggtttttaccggtttt

SEQ ID NO: 137266 - DNA, 1896 bp, Zea Mays
ggaggcgccgccctgcgctctctggcgctaatggcgccgccgcgtccacccacaggaccgatcctcttcctgcccctcgtcttcctcttcctctttaccaccgccgcggcgtctgcggcggcgcctgaggatgaaaagttcactgaggagctgctcctgcggccgctcccggaccgcaaggcactggcacacttccacttccgctcctctgcgccccccgctgcctccgttggtcggcaccaccacctcttccccaaggccatctcccagctggttaagaaatatcatattagcgagttggagctatctttcacccagggaagatggaactatgagcagtggggtggatttgatcctatgtcaactaataatgcaaagcctcctggtgttgagctgtgggcagtttttgatcttcctttgtctgagatcgatgcaacatggaagaacctgacacatacactctctggcctgttttgtgcatccatcaactttttggagtcctccactgcattttctgctcctcgctggggcttcaaactgaacgaaggcaatttgcgatatggtgcattgcctcgtgaagcagtatgcactgagaatctgacaccttggttgaaacttcttccatgtcgtgacaaagctgggatagcttctttgctgtacaggccttcaatttacaaaggatattaccattcacaaaaactgaaactgagatcctcccagtcacttggtattattcttgatcaaactctgactgttgtgctgcaaccaaataatgtacatggcgaacagctacattccaatcatggtcaacttcagcccaactggtccatgagacatcttttcaacagaaagttgtcagggaaatgccttgtttctaaatccagcagagtattcattgaggttgataaaggcattgctgacgaagttaacatatctggaagtgttcattcttggagtaatgaattctttgtattgtccaatagcccggacaagttgatcaaaggtcaaaatcacttagaaatgcaatcttcttttttatatgtttatgatgctagtaactacagtgaggaacaacctttggatttgggcataacttggaagcttcccctgatatggacttgcaccccatcaccttttcatgcaagcagatttcttatgggcagtggcaatgaaagagggtcaattgctctgtcgtttatgtccactaatcttcataagaagatatctggcagcgcaaatgattgttcaataaaggcagttattttccaggttgttccatggtatgttaaggtctattatcacagcctagaaatatttatagatgggagcaggaagactgtgtcagaagtagttgacaagattcatgtcattccttcagaagacaagcttttgcctggtaccttggagatgctactaagattcccttgcagtatgcagtcgggaactctgacattggattttgacaaggggttcctgcatatagatgaatatcctcctgatgctaatcaaggatttgacattccttcagctttggttagctttcctgagttcagttctgctcgaagttaccctgaaattgatccagtacttggatcacctttactagaaaatttccaggaagatagtgttgtgaagtcgtatacagaagtattgctcgttcccctgacaactccggatttcagcatgccatacaatgtcatcaccttcacatgcactgtcttagctctttactttggttcattattgaatgctttgagacgaaggattggcgaggaagagagggagttgaagaaaagagacatcactcatgtgggagccttcggcactgggtctgcctccctttttttgcccttcattatagttgatgtctatggtaccacacagcttgtgctctag

SEQ ID NO: 137267 - DNA, 1272 bp, Zea Mays
gataaatatattaatttaattaattttatctaaattataattattagaatgaaattcgatttcaacaaaacaaactgaccgtagtggttttataaacatcgtggaagggagtaatttgcttcgtccaaaaaaaaaaaatctccaactcgtcacttcgcttccccacttctccattccattgcggttctgcgagcccctacctccctgtggtgcttggccatggcggactaccacttcgtgtataaggacgtggagggggcgagcacagagtgggacgacatccagcgccgcctcgggaacttgcccccgaagccggagcccttcaagccgccgcccttcgccccgaaggttgacgccgacgagcagcccaagtccaaggaatggcttgacgtgcgcgagcccgaagagctcgaggaactagaggacgatctggatgacgaccgcttcctcgagaagtacaggaagatgaggctcgcagagctgagggaagccgcaaaagccgcgcgatttggtactatacttcccatcactggctccgacttcgtgcgggaggtatcgcaggcacaatcagatgtttgggttgtggtcttcctctacaaggatgggatacctgaatgtggattgcttcagaattgtttggaagaattggctactaggtatccagcgacgaagtttgttaaaattatctccacagactgcatccccaactacccagataggaatgttcctacaatactggtgtataacaacagtgctgtcaaagggacttatgttggtttgcagaagtttggtggaaagagatgcacacctgaatctgttgcgttagccctttgccagtcagacccggtactgaatgatgggcatggtggcagcgattcatctcggggcaatgtcttcgaaggtgttcgcaggaagttcatagagaaggttgtggcccagcatgaagagcgggaagaagaggacagtgactaagctaatacttgtgtttgttttccgcagctggcggatccaatttggttccaatgtttactgatcttatgtgatttttgtgggtgaaatttgccagagttttctgatacctggctgtgcggctgaagtttttgaaagttcacgggtcttattgcctacctttcagctgtaacacagctccattattatattgttaagagatcagagatgattagtgcacttgtataattgcatgagaaaaaatccagccaaactttgaatccacagtatttcactatcttgaacatttctcaacacaaaaca

SEQ ID NO: 137268 - DNA, 267 bp, Zea Mays
atggcgcccggggaaccacgagatcgggcgtgcgcggatgggaccagcagcgggagcaggttcttgcatggtcgccacgccggcggcagccccgcgcgctcggccagcgacgcctccactggatccgccagcccgcaaggccacagtcacgcgttcggccagcgccgctcgcgccagatctgcctgaccgcaaccgctgtcgtgttggatctgcccgcccgcaacatttgccacactgaaaccctaattcatggtggtctcgggtag

SEQ ID NO: 137269 - DNA, 208 bp, Zea Mays
tagatattgaacatgcatgctaagggcatgtacaacccagatactgctgcacggtactccaagtacaagatacaactaaaacacaacataatacagtggtcatgtctaaaacatgtgtcttacgatattcattgtaccaatcagagcattcaataaattaaagtgaccaatcagctagtctcctgtctcgaacatagagctaagacac

SEQ ID NO: 137270 - DNA, 560 bp, Zea Mays
cataatccataccgagacctttgataattgtctttgaatggtacatgtctttagacaacttattgggctttgtcaacacatccccgaataactttaaaatctcattgtaacaattgctcaacaaaaagaacttggacttaatggtcatgagccgagtcacaaaagtgagtatactcacatctgtgtgttcatgcaatggcagattcttttagtagcttaaaaaatccctaaatctctggcgtgggaggatcctcggagcataggtttaactctagacgtagtgaatctagcatctcatgcatcgcatcactgacagcccaatcattattcttctcctcttctacatttgggttgggtactacctcaccatgatgttcctacacctcatgtccgaacataaatccaaactgactgagatcaaagctaacttattcgttattaaggaatgtactattttcgtgctgcctacaagggcatctcacagtgccggttaatgacaaggagaatgcatggtccacaaaatctttggtcttggctacccactcatcagaatgacgctc

SEQ ID NO: 137271 - DNA, 562 bp, Zea Mays
atggcggcggttgcccaagagcgtgcgcgacggcggacccccggccggtggctacggtggctgcggttccccgacccggatgcgcggtgggcgaggttccgaggtcggtggacgaggctccccgatccagagggcgagcgacgatgggtcccctgtacgggcaagcgacggcgtccctgggcccccgaggcagtagcattcccaaggcaggcgagcaagcggcgctcccgacgtgcgagtagcgacgacacttcacgaggcgcgaggttcgagcagcgtcacagaaggcgcgacgtgtgcgcagcgacgatcgcgcgtgacatcctccgattcggcgcagttcgggcggtccgagtgacggcctccatttgtgcttgtatcgtcgacgacgtcctccggcgactacctcctccgattcgtgttgtcttttttattattgtgttttatgcctaccacatgcactatttacgttaaaaaatgtacgattttatgcttaaacacggagttcgtatactagtttactccatgcatattttttaatgcacattggaaagacaattcc

SEQ ID NO: 137272 - DNA, 1279 bp, Zea Mays
cccccccccccagttgctccttccaccgttccacgcgtccacggtccacccacacgcaaggtcgcaggtcgcaacccgcgggcggagggtcaggcacaggaccgttgcgttgctgccgccgccggcacgagatcgaggagggatcccccgctctcacgccgctccaggtcgagggccgagcgagatggtgaacaccttcttcctcttctgcgggtgcgtggaccaggccagcgtggcggtggtggagaagtggggccgcttcctccgcctcgccgacccgggcctccacttcttcaaccccctcgccggggagtgcgtcgcgggctccctcaccacacgcgtccagtccctcgacgtccgcgtcgagaccaagaccaaggataatgtcttcgtccaactgatctgcacaatccagtaccgtgttgtcaaggaaaatgcagatgatgctttctatgagttgcagaatccccagcagcaaatccaggcctacgtctttgatgttgttcgggccatagtgccgagaatgaatctggacgatctctttgagcagaagaacgatgtggccaaagctgtattggaggagcttgaaaaggtgatggcagattatggttacagcattgagcacattctcatggttgatatcatccctgacgctgctgttcgtaaggcaatgaacgacataaatgcagcccaaaggcttcaactggcaagtgtttacaagggagaagcagagaagatccttatggtgaagaaagcggaggcagaagcagaggcgaaatatctttctggtgtcggtatcgctaaacagcggcaggcgataaccgacggccttagagagaacatcctgaacttctcacactcggtgtcgggcaccagcgcgaaggaggtcatggacctgatcatggtcacgcagtacttcgacaccatcaaggagctcggggacggctccaagaacaccacgatcttcataccccacggaccaggccacgtgaaggacatcagcgagcagatccgcgacggcatgatgcaggcctcaagcagcaacgtgtaaatcaccgactctctgcacgattggagacggctcggctcaggatgaggcctggagtaccatgttcatagtgttaggttgttgttagtggtaaataatgagtgctggggcttttggcgagtcttgagttacatgcggttgtacaactagtgtggtttgttttatatataaaaatgtatatttacatggttctgctcctggaattttgactttttatggtttggacattaa

SEQ ID NO: 137273 - DNA, 1623 bp, Zea Mays
gcctcagagagatccaggcctggaactgctgccccttccctgtttcgtgctatcttttatctcaaagaacaaggagtaacaagcaaagtaagacataaacctgaaacaacttcccaaacaaaaaaaaaggaaaaaacaaccctacaagcctctagacacttagataggaggattgtgcaatccaagccctctagcttaccgacttttttgcccccaaccaattaggtctaatgtggatagattcacataactatgctaaaaactatcaaaattgaatgcttaatataatcaaatcaaccaaaacaaacttattaagcttgatttcatatgtcaaaatactaaaaaaactagactctaggagcaaatatatggcggatttgcatccacacgcatctggggttccgtctttgcatgatgaccgtgtgacctgcaaaaaagcctccaatgtgccgtgtcaccagcaacaaatacaacacttgggcatttgcatccagggcactattgaaattattcagccaaatcagtaagccaggcgacggacctagacatctgtcaagtctatgctaccaagccggggctcctctcgaggacccaaataatagacccataaaactccgttctgcggaacccaaatccaaaatcgaaagaaccaccgccctacgttcgccatgctaccataccaagcgggggctcgtctccggaactgaaggtatgcttaccgtcgtggaggttcccctcgcactggggatctctccgccaggcgtcgacgagctggatgactccggcgcggcggcgaagtgcgacggacgagggctctgtagcggcgggggtcctacgccgcttgcgaccggttccggaggccttgacggcgctagggatggcaaatctgcccgcgggtacgggtatccgcgggtttcgtacctgatgggcacggatacgggttttttatttctatttgtaatgtcaactccgggagacagtggcagtggtgctggacctactagtggtggtggtcgacgcgattctagagctccaactccatcatctacgccacgagatcctactcctacaccatctgatggaatagcgcctactcctactgatggtcaaggtactggaaccaccaacactgatgctgttgaaatagatgaggatgttagggttggtagtaaaaggaagcttaaatctgatgtatggcaagactttgaaagagtctgtgtaggtggtacttggaaagctaaatgcaattggtgtcacaaaacactatcagctgtatgtagaaatggtacaagtcacttgcgtagccacgtaaacagctgtgaatctcgacaaacaagaaaaggtctaaaacagtccactttgaaattatctaaaacacaagatggaaatgttctattggagaagtatgtgtttgatcaagctgttgctagaaaagaactcgcattgatgatatgtgttcatgagtacccactttctattgttgagcatgttggttttagaaggttttgtgctgcattgcaacctttatttaaggttatgtcaagaaatacaattagaaaggatattttggacatgtaccaagtgcaaaaggaaaatttggagtctgaaatcattgatacatga

SEQ ID NO: 137274 - DNA, 504 bp, Zea Mays
caaaatcgaaagaaccaccggcctacgtttgccatgctaccataccaagcgggggctcgtctccggaactgaaggtatgcttaccgtcgtggaggttcccctcgcactggggatctccccgccaggcgtcgacgagctggatgactccgacgcggcggcgaagtgcgacggacgagggctctgtagcggcgggggtcctacgccgcctgtgaccggttccggaggccttgacggcgcgagggggcggcgggaggtgaacagttgggacttgggaggagggaccggaatccggataacgacagtcgggcgggaaatgagacttgtgttcttgttgatgcacaccaccaccaatgggtagctactgccttcggtctcgtcgtcgtcgtccgtccgtcgctttacctgtccattgcgcttatgttgcttctcttgcttctaattaatgtacgcataacactatattgtctatatggatcggtgaattttagcaaaaacatttgagaa

SEQ ID NO: 137275 - DNA, 103 bp, Zea Mays
attttcagaaaagctggtcagaaaaaagctgaaccaaacaggcccaatataaggccatccttggacgacattcccaagctaatccctgcactgcacaaatctc

SEQ ID NO: 137276 - DNA, 1651 bp, Zea Mays
atgcagacctttagcgacagtcaaatgaccgaggcatccattcttttcttaccagaacaaggacaggaacaggagaactatgaggctgactatcttaaaaaggcgccgcttcttctcacggccaagttgattaaatatctccgtcacatctaccagatgttgtcgccgctggtatctgcaaaggtcataaaacatataaacttatctgtgaccggtgctgaaaggaaactagagttgcttgttccagctttcaagtggtttaataaccaatcgatggttactctctggacaacaagaaaagttggttttttttcacctttttttgtggttgaggggaatgaaaaaaggaaccttctaagcttgaaaccagaccaagagacagagaactcccctggttcttccccggcagagaagaaccgtttcaaggatgttgttgctgttattgacaagaagatggctggaagacttgattctccattgcatttgacagcttatttgctgaatccacactacagttatgctgacccatcaatctttgatgttcccaaaataacagaaggttttatcaattgtgtggagactttttattatcatgacgacgaaatgcaagaacaagcagccaacatcgaactccagaagtttcagaatagagaaggtccatttagcaagaaacttgcaaggacttttgaaaactttgattataatccagcatcatggtggcggctttatggaactgaaacaccagctctacagaagatggctaccaagatcctatctttaacagcaagttcttctggttgtgaaagaaattggagtgggtttgatggggtgcacactaagaagagaaataggcttactacagaccgcctcaacaagttggtctacattcagttcaacaacaggctaattaataagagagcaaagatcaagtccaagaaaattactgatgttctcttgtctagtggtacaactgaagctcaaggtttcctccaagagaatggagatgattgtgcattagtctcctttagagatgacgaagacgaggaagaagtcatggaaggtacagggataccttggtctgtgcttggagacgcagtgggagcagaagaacaactagagctgcgtagaagtgcaagggtgagagagctcaatgaagaagagttcgagtccgaagaagaagagtttgatgaagatgaggatgaggatgagatggatgaaaccggcgtgtgagccagcttcatgtcatgttttagcttttattatgcatccatgtatctttaacttgtgaacttagaactcctgttgtgcgcttgtgttttgtgttgtggcttgtgagaactgaatcatgtgcatggcttgttattttatttcgtgttgctgcattttatatgtgttactgcctgctgtcccttcatgtttgtgatttctaaaggctatcctatggtgttgatcagtacttaatggatgggagaagggtcagacctcagataagtacctaacttgctatttcctatgtttttatcacttgtattgatgcccaattgcatctaaaagtgttgtccacttctattgcagcagtgcttgaggattcagtgatcagcagatctgcaaggacaaaagtacccaaacccgtgaacccgtgggtttttta

SEQ ID NO: 137277 - DNA, 1310 bp, Zea Mays
atgacgacgctagatgatgtgatatatgaggccttggagttgagggatggaggatctgattatcttggcaagggtgttcttaaggctgtgaacaatgtaaatagcattattggaccagcaattgttggaaagcttgatggaacctccaacgaatggggctggtgcaaacagaagcttggagcaaatgccattcttgcggtctcacttgctgtgtgcaaagctggagctatggtgcagaagattcctctttaccagcacattgcaaatcttgctggaaacaaaactctggtgctccctgtacctgcctttaatgtgattaatggaggatcacatgctggaaacaagcttgccatgcaggagttcatgatcctcccaactggtgcctcattcaaggaggccatgaagatgggagttgaggtgtaccaccatctgaaggaatatgcagctggaacgctaatgtttctgtatgcagagcataatcaagaagaactgaagaagtatggtcaagatgctacaaatgttggggatgaaggtggttttgcacctaacattcaggaaaacaaaaaaggccttgaactactgaaggcggctatagaaaaggctggctacactgggaaggtgttcattggaatggatgttgctgcttctgaattcttcagtgagaaggacaagacttatgatcttaatttcaaggaggagaacaacgatggttcgaacaaaatatcaggtgacagcctgaaagatctgtacaagtccttcgtttctgagtaccctattgtgtcgatcgaagacccatttgatcaggatgactggaccacttacgccaaactcactggtgagattggacagcaagtgcagattgtaggagacgatcttctcgttactaatcccacaagggtcgccaaggccatcaatgagaagacctgcaacgctcttctcttgaaggtgaaccaaatcggctctgtgaccgagagtatcgaggctgtcagaatgtccaagcgtgctggatggggagtgatggcaagccacaggagtggcgagacagaggacaccttcatttctgacctctcagttggcctggctacgggccaaatcaagacaggagctccctgccggtctgagcgcctggccaaatacaaccagctgcgcttaggatcgaggaagagctcggtgttgccgcagtccacgccggagcgaagttcagagcaccagtggagccctactgaaccacgtgtgcctagagcctggagaaagaagatgaggatgtttccccactagttcgctgctgctttttgatagaatgcctgtac

SEQ ID NO: 137278 - DNA, 234 bp, Zea Mays
gcggccatcgcaaggtatccttgccccgccgttgatgccatcggtgtccaagacctcatgacctcggcaagtggcgcatatgggatcaccagggtctatggggcttcatcgaaggtgctgccaaacctagggatcgccggagtcgcatggattgctcaccaaagttcttctcagccgccgagccgctccacgcgtgggcgggggcattgtcaccctaaatccgcggtaagggca

SEQ ID NO: 137279 - DNA, 769 bp, Zea Mays
agttctctgtgtttggcagagtgttatggagggatataatggtacagttatggcatatggccagactggtactgggaaaacttttacactgggaagacttggtgaagaagacactgctgctaggggaatcatggttcgtgcaatggaggatattctagcagacataacacctgggactgattctgtctcagtatcatatcttcagttgtacatggagatgatacaagatctccttgatcctgtaaatgataatatagccattgtagaagacccaaggactggggatgtttcattgcctggagccacagtagttgaagttagagatcaaaaaagctttgtggatcttctaagggtgggtgaggctcatcgtgttgctgcaaatacaaagttaaacacagagtcatctcgaagtcatgcgatcctcatggtgaatgtcaggaggtctgtaaaaggtagaactgaaatggatgtcagcatttctggtgaaaatgggctctcatcatccttggtagggtctttgagaccacctattgttaggaaaagtaagcttgtagttgtcgatttggctggatcagagcgcatagacaagtcaggaagtgagggtcatacgttagaagaggcaaagtctatcaatttgtctttaagtgctctgggaaaatgcatcaatgcacttgctgaaagcagtcctcatgtgcctgttcgtgattctaaacttacaagattgcttaaagattcatttggagaaagaatcagtgtgctatacttatga

SEQ ID NO: 137280 - DNA, 984 bp, Zea Mays
atggcgagcagcggggtgaggaacggcgtggggcccaggatgagcgcgaaaccggaccgtcagggcgccggcgccacgcccaagacggccgcggggaagcaccgcgtctcctcggcgggcggcgccggcgcgtaccgccggaccagctccggcccgctccccgcggcggcgggcggccgcgcggcgtcggacggagagaggctacgtcaaaaccagggtttttggctcaatggaatctacccaatagaagaattactaaaaaatgatctcattcctattaattcttctattgggttgattaaattgtttcattttgtatttattctgactgcgtgccaagtgtacaaattgtctctcattgttgatcatgtggcaactagcgttttgaggcttcaaatgagaatctattcctccctggtcccagcagtttctagtagagtaagggttgctgtaaggcttaggcctaggaatgcagaagagttggcggcagatgcagattttggtgattgtgttgaacttcagccagagctcaaaaggttaaggcttcgtaaaaataattgggagtcggaaacatacgaattcgatgaagtgcttacagacttctcttctcaaaagcgagtgtacgaagttgttgcgaaaccagttgtggagagtgttatggagggatataatggtacagttatggcatatggccagactggtactgggaaaacttttacactggaaagacttggtgaagaagacactgctgctaggggaatcatggttcgtgcaatggaggatattctagcagacataacacctgggactgattctgtctcagtatcatatcttcagttgtacatggagatgatacaagatctccttgatcctgtaaatgataatatagccattgtagaagacccaaggactggggatgtttcattgcctggagccacagtagttgaagttagagatcaaaaaagctttgtggatcttctaagg

SEQ ID NO: 137281 - DNA, 289 bp, Zea Mays
atgcttcataaaatgacagatttaaagagctattttagtcaagcttctagtggaagtagaccaagcactcgcgctagtggagtttgcaatgaacccggaatacaagttggagttcaagagaataatagtgaagaagttgccaatggtgaaaatgttaatggtcaagtcgaagataagaaaactagacaaatgcaattgcctagatctcctagaactagactcaactaaagattttattcgctatatggcatttggttgtaaatggattataatcaagatgactattaaa

SEQ ID NO: 137282 - DNA, 550 bp, Zea Mays
attgttagaatgaattaattttcagaactagatgtcgttttaaatttttgactttgatgctcatatctcttatacctttgataactagcacttggttatttgggataacatgtgttactaaaataaaatttgtgagttctaatagatgccagaaattgattggaatcttgagaacacactgattgtttgtaacttgtttgccgaacaagttagcaaagggaatcgaccaaacacttacctcaattcagttgagtatgctgaggtggagaaaggattcaaagataggacaagtattgatgttacgaagtcacatctcaagaataaatgggacaaattgaaagaagatttcaaggcatggagaaaacataagttgaggcaaacaagaatgggttggaaccatgaaaaggcactattgatatggatgatgattggtggaaaagagctagagcggatgtaccaggatgtcgaaagtttcaggacatgtacatggaaaaagcaccaccaaggacatcacaactcagtggcatggggtggcctatggaaactataa

SEQ ID NO: 137283 - DNA, 592 bp, Zea Mays
gagaggtcagggagacacaacaaaatctctatacaaagatttgacttctggtggtgtggtgaatcaacataaggtggacgtataagactgcatagctcttctaatggtgaatatctttctgtggatggcattccattgtaggatccaatcagcagtcagaattaacaaaacaaagttccaacaacttgatcaaggagccaaggtggtagtggtcttattcaagctggtggccttgctgcagaactggaaggtgatggtttcaaggaaggataaagaagagtggcagagcttatcaggaacatggtaaacagcattgaacaaaattagagtgctgttttctctattgtggttgagttttggctaggtagcaggagtctggtgttgtttttgcatgaactgctgaaagtaaatgcggctgtggctgtatatttgtcggtttttttttgctggtaggtttttagaggagtttgcatagtggttgtttaaattctggtgagtattgagttagtttgtgtttttcaggtgttagagatcttcctgcagtaagctgtgccaatggactttggtctaaaaaaggaaactggaaggggcc

SEQ ID NO: 137284 - DNA, 1974 bp, Zea Mays
atgatgaactatgtcatcttcggcgtcctgctcttggtggtcggcggcggtctcaggccatctccggcagccgccgacgtattctgcgacaaccttaaacaggtggccgccactctgccccaaaacacctcctcctcccccgtgcagttcgccaccgccatcgtcggccaggcccccgacgtcgtctacgctctagccttctgccaaggcgactacaacgccactgcctgccgcgaatgcgtcgcccaggcgttcaatgtaaccccggcgtgcaacaaggacggcatcttctcctacaaagcgtgcccggtcttgtacgccggcgacaacttcatcgacccctccaacgccacggagcaagctgacgacactcctttcgtgaggtggaacatcaacaacgtcaccggagacgcggacgatgtccgcctcatcaccggcctcatacgcgagctgctggtggataccgtggacagggcggccagcacggcgccgaggcggttcgccacgggcgtcatggacagtggcaggcccttcccgacgatgtactccatggcgcagtgcacgccggacctgtccgccagcgactgcctggcgtgtctccggcgccttgttggcatggtcaactccaccatggccctgcggatgggagcgcagatccacgtgatacggtgttatttcaggtacgaggcctactcgttgtacgacagccagcccatgcttcgtgtcgggccgccatcggtgccggcgccagctccagctccagctataggggccaggcgcaagagcaaactttgggtgattccagtcgttgtagttcctctagcagtagcagcagcagcagcactctgcttcattttctactcgccttggttcagaaggtacaggaaaggcgaaacgacgatggcaaaagcaggatctcaagaactgcagggagaacttgttttggatggaaagaattcagagttccgggtgtttgattttgaacaagtactggaggccacaaatgacttctcagatgaaaacaagcttggagaaggaggctttggcgctgtctacaagggccagtttgctgacggattggaggtagcagtcaagagactcgcttcacattcagggcaaggtttcacagagttcaaaaacgaagtccagctcatagccaaactccagcatagcaatttggttaggctcttgggatgttgctcgcaagaagaggaaaaaatactggtctatgaatacctgccgaacaaaagcttggattccttcatctttgatgaaaataaaagggcattactggattggtccagacttctatcaataattgagggaatagcacatgggcttaactacctacataagcactccaggctgcgcgtcatacatcgggatcttaaaccaagcaacattctcctggacagagaaatgaacccaaaaatctcggacttcgggctagcgaaaatattcagctcaaataacattggaggaaacactacaagaagagtggttggaacatatggctacatggcacctgagtacgcttcggagggcatcttctctgtcaagtccgacgtgttcagcttcggcgtcctcgttctcgagatcattaccggaaagcggaattccggcagccatcagtgcggcgatttcatcaatctcattggatatgcatggcaattatgggacgatggaaggtggatcgatctagttgatgcatatttggttcccatgaatcactcggcagaaatgaccaagtgcattaagattgcattgttatgtgttcaagagaacgcgagtgatcgaccgaccatggcagaggttgttgcgatgttaagcctaagcaatgacacggctatgatcgtggctgagcctaagcagccagcatatttcaatgtgagggtgggaaatgaagaggcgtatacgactactgagtcatgcagtattaacgatgtgaccatatcggtcacaacaccaagatag

SEQ ID NO: 137285 - DNA, 804 bp, Zea Mays
gtaaaatctgcacctaatacctaaacttcccctcaaacaacacttctactatccaatcatgacgtcaaaaaaaattcatggcacacaaccaaattatttcatcatacatcaaataccattacagcaataattatataaccaaataattcattagctaagtagtcggagaaacgacttggctcaccacatcatgctccgactcgatttcagcaagaacgaagacggccaccagttcgagcatatcatcgaacacctaatgagtgttgaacttaaccttcttctccacctaattctccaaggattttactccatatcgcacacatcaacacacataaaacctcacatcagcagggtattaacaagaactagtaaaacaacaaagggatttagagatcaccatggaagcagcagaggtggccggccatgggaacaaaggaggggctgggggcacccacttgctgcagaaaggggagggcactgcttgctgcaggggagggcatcgagctacagcagggaggggcgtcggccatggcaggaaggggagagagctcggctgggcaccatagcaagaggaggatggggagggctggagcgcggaccagggcgtggttgtggttgggggcgagcttggaggaagccaggcaccgcgggagagggaagcaggagctcggctgggcgtgcgtggtgcgtgtgaccagcgtcgagcgagagatttgattggcagtggtgaaaggcctggaagttggcgtgcatgagctgagaggaggagctgaacgcgcatcagaggagacgcacaggtttcca

SEQ ID NO: 137286 - DNA, 884 bp, Zea Mays
gtaaaatctgcacctaatacctaaacttcccctcaaacaacacttctactatccaatcatgacgtcaaaaaaaattcatggcacacaactaaattatttcatcatacatcaaataccattacagcaataattatataaccaaatcattcattagctaagtagtcggagaaacgacttggctcaccacatcatgctccgactcgatttcagcaagaacgaagacggccaccagttcgagcatatcatcgaacacctaaggagtgttgaacttaaccttcttctccacctaattctccaaggattttactccatatcgcacacatcaacacacataaaacctcacatcagcagggtattaacaagaactagtaaaacaacaaagggatttagagatcaccatggaagcagcagaggtggccggccatgggaacaaaggaggggctgggggcacccacttgctgcagaaaggggagggcactgcttgctgcaggagagggcatcgagctacagcagggaggggcgtcggccatggcaggaaggggagagagctcggctgggcaccatagcaagaggaggatggggagggctggagcgcggaccagggcgtggttgtggttgggggcgagcttggaggaagccaggcaccgcgggagagggaagcaggagctcggctgggcgtgcgtgtgaccagcgtcgagcgagagatttgattggcagtggtgaaaggcctggaagttggcgtgcatgagctgagaggaggagctgaacgcgcatcagaggagacgcacaggtttccagggatttgaacacatgcacaggataaggctgggaattttctaggagcgcctgctctatccgtttaggagggatgagcagtgttttct

SEQ ID NO: 137287 - DNA, 607 bp, Zea Mays
cgggttcacgcgacccgagagcacagtactccaccgtccagccattggcctggttggtacacgttactctcgccatggtgcccgccatgtttccgagagtacagcaccccaccttccagtctctgccacggagggtacaagctactctcgccatcgctccactcccagtgcgtgcgagctgttctggtattggtccgaccgaggcaaagcttacccatgatgaggcatgtggccagttaaagggtcctagatcagcaggccaacaatcggaacggtccttaagcgacacagacgggcgacctttcctgctcaacgtctggtctcatcttattatttaacacccaaaccatgtacctgacagaggtacaatacttgaataatgaattcatcatcgcgagtgatgccttcattactgcaagtttcttttttataaaacccatatccagtgttacataatattcttttaaaaaggaacaagttttaattttctaggcagggctaagcctcattagttctttttgtaaaacaggtatcaaggaggataatcaaattccaaggaatggtaatgcatcaactgtttcatcactcaactcctatcacctaatgc

SEQ ID NO: 137288 - DNA, 637 bp, Zea Mays
gcagcggaaattctttattacaaaatggttacaagttacaacatttacaagttataacaagattacaatatatatcatcggagtgattacaaaagaaagtgattcaaaaaaattacaatttaaaatgtataaaatatttataggttttcaaatacatgctagcttaagtgacaatcctcaataaagaagctaaagatgggatatacttatataagaaggccgagcctaccggcacttagcagcatccataacagaacaaaattataacctgaaaaacaacagggaataaaaccctgagtacgcaattactcagcaagacttacccgactaaagaaaagactctcaagggtatgctggtttattgggaatcaaggtaaagctcatcaaatttcaaagactcgtttttgcagaaaagcttactagtagtggatccttatgccaaaattttacttcacaagttaagtacttttcctgaatctagatttgcctaatctagagcattcacttgtcctacactagcttccttttatcaactttagtttcacttgttatttacgatgcagggcagtgatccagtcttcatatccgagaagtaacggcgatccgaatcgattaatactcagctgaggatctccaa

SEQ ID NO: 137289 - DNA, 83 bp, Zea Mays
agaaagaggagggaagaagaagatgatggacaagatgttgtttattttccctgccttatatctgatgggttcaaatagaggtg

SEQ ID NO: 137290 - DNA, 961 bp, Zea Mays
ccaagaagacgcggccatcgacgattctgagccacggccgatgcgcacccacgacggcgagccgtcagcagccgcctcgcctccgctgtacagcttcgtccacgtcgtcctccagcagcagtacccgcgacagccggcgcccatggcgttcacgccggggggctccatgatggaggccgccgccaagaaggaggtccgcgccgaggtgcgcgacgtgtgggccggcaacttggacgcggagctcgcaaacctctcggcggtgctgccgcactacccctgcgtatgcgtggacacggagttccccggcgcggtgcacggctcggacacgccgcggcacctccgcggcccgcgcgagagctacgcgctggtcaagaggaacgtggacgacctcaagctgctccaggtcgggatcgcgctgtcgggccccgccggccgcttccccgtcgcgtggcagttcaacctccgcggcttcgaccccgcgcgccacccgtacgcgccggcctccattgccatgctccgcgcgcaggggatggacttcgccgcgctgaacaagttcggcgtcgacccctacgacttcgcagtcgggttccaccgcagcggcctcgcctgcggccagctcacctggaccgcgttctcgggcgcctacgacttcgcctacctagccaaggtgctcaccggcggccagccgctgccggcaacgctggacgggttcctcgccctggtacgtcggctgttcggctgcaatgtgctcgacgtcaaacacctcgccaggtgctgcgccatgcgcggggggctggagcaggtgtccgccgcgctcggcgtcgagcgcgccgccggccgcgcgcactgcgccggctccgacagcctgctcaccaccgacgtactcctggcaatgatgaatcgcttcttcaccaacgtcaatgtgctcgcgcacgccggaactatcgtagatctagcctag

SEQ ID NO: 137291 - DNA, 396 bp, Zea Mays
atggagcaaaggaagctccggaacagcctggcgcgcagaggaagaaaaccacgacgcacgcagcaaggcgacggcgcgcaggaacgcggcaagcaggggtcggaggcgagctccacggcgagcagagcaggggctgggtgcggcatgggagagcgagctgagggacgcggccacgaattgggaagaactgaagggagctacatggaggtcgcgcggtcaggcgattttgagggaaggacgagcggggaaagcagacgaactcctgggctgaggccattgatgggcagagggagctcgggcgccggcgaaccagtaggggaagacgccatggggatgagagaggtccgcgcgcagagggggttggagctgaagggagatcggcgctgggctaggtag

SEQ ID NO: 137292 - DNA, 1182 bp, Zea Mays
ctaaaacagaccctaacacgcccctttcttgcgagtgaggccaaagccgagcaaacaaaacgatatgccgctgccctgaaccgagaccaccaccgctctgcctcgcctcgcctcgcgtcgtctcacctcacctcacctcgccgactagggttttgtaccgccgtggatctcgccgtccccgccatggacgtctcgcacgcgggatcctccgtcgccggcgaggctccgaccaccggggagcaccggatggggactaccatcgtcggggtctgctacgagggcggcgtcgtcctgggcgccgattccaggaccagcactggaatgtatgtagccaaccgtgcttcagacaagattactcaactgacagacaatgtgtatgtctgtcgctctggatctgctgctgatacacaagtcatttcggattatgtacgctatttcctccaccaacacacaatccagcttggacaaccagctaccgttaaagttgcagccaacttgattaggttgctagcttatcagaacaagaacatgttgcaagctggcatgattgttggaggatgggacaagtacgagggaggccaaattttctcagtccctcttggtggaacgatcttgaagcaaccatttgcaattggaggttcaggttccagttacctatatgctcttcttgatcatgaatggaaagagggaatgagtcaggaagaggcagagaaatttgtggtgaaggtagtttcccttgctatggcccgtgatggtgctagtggaggggttgtccgtacagttacaataaatgcggatggcgtgaagaggaacttttaccctggcgacaagctacccctgtggcacgacgagctggaaccccagaactcgttgcttgatattcttgctgctgggaaccctgatcccatggtgcagtgaactcgccctccacttactttgtgaacttttcactgtatctgacttgttcttgattatttctccttgaactatgtcagaccagagtaatttacgaattgttgttatcgcaccttaataaattcatgtttagctgggtgattggcgttttgagttaatggttactggtaagcgtgctactgctgtagttaagcctgtggcaagtattcaaattttcagtaatgaatcccccgtagcagccagcaccattctatctgctacaacaga

SEQ ID NO: 137293 - DNA, 1976 bp, Zea Mays
ctaaaacagaccctaacacgcccctttcttgcgagtgaggccaaagccgagcaaacaaaacgatatgccgctgccctgaaccgagaccaccaccgctctgcctcgcctcgcctcgcgtcgtctcacctcacctcacctcgccgactagggttttgtaccgccgtggatctcgccgtccccgccatggacgtctcgcacgcgggatcctccgtcgccggcgaggctccgaccaccggggagcaccggatggggactaccatcgtcggggtctgctacgagggcggcgtcgtcctgggcgccgattccaggaccagcactggaatgtatgtagccaaccgtgcttcagacaagattactcaactgacagacaatgtgtatgtctgtcgctctggatctgtaagtgccattgtcttctaatgatagtgttgaattatgatgtttgagtagaagcttttttcttactttgtcggtttgtccctttgacaagttatataaatggatattccttgacggtagacggcttatatcttactgtttgatctgaactagtcaaacaacaacctacaagctagtagttattctcttctcattgctgtttttataccaccttattttgttttgttttaatagaaagtaattcctccttttcatggtgccagagatgacacattcctttttgcaagtttttagttcacatgtaaaactcttgctattttaataccacaggctgctgatacacaagtcatttcggattatgtacgctatttcctccaccaacacacaatccagcttggacaaccagctaccgttaaagttgcagccaacttgattaggttgctagcttatcagaacaagaacatgttgcaagctggcatgattgttggaggatgggacaagtacgagggaggccaaattttctcagtccctcttggtggaacgatcttgaagcaaccatttgcaattggaggtataattattttgcctcccctctttcaagttcaggttccagttacctatatgctcttcttgatcatgaatggaaagagggaatgagtcaggaagaggcagagaaatttgtggtgaaggtagtttcccttgctatggcccgtgatggtgctagtggaggggttgtccgtacagttacagtaagttctctctctattttttatgtaaattttcatgctcagttcccttagaaatattgaaacatagcagttagctaaactagttgggtgtcatggattgtcttatgttggttttggcacttacatctagcatgatgcttttggtagctttcaaagtgaaacttaaccagctgtaactgaaaagtcgtaactttggataagttaactcctttgtggtgcgatacattgattgtaccaatatgaattggaacggaggtatgggatctattggaatgtctttctcaatgctgacaacctggcagcctgctataacatttatactcttctgttacttgattcattcacttgcttacatcattcacccagtgaattctttcaatttgctgggatttcatgttcttgaggtttaacttgcaaaaaattattgttcggtctgtgaaaaagtgtgtttgtgttttgcctatacttatctcttactaccatttcctatgtttgcttgtgttctcttcctctgtggcatagacccttttttgtggttcaaaacaaactctcttggctatgctgcagataaatgcggatggcgtgaagaggaacttttaccctggcgacaagctacccctgtggcacgacgagctggaaccccagaactcgttgcttgatattcttgctgctgggaaccctgatcccatggtgcagtgaactcgccctccacttactttgtgaacttttcactgtatctgacttgttcttgattatttctccttgaactatgtcagaccagagtaatttacgaattgttgttatcgcaccttaataaattcatgtttagct

SEQ ID NO: 137294 - DNA, 1310 bp, Zea Mays
actggagatccaccccacgagcgcccagctcatcattgtcgaccacttgcatcagctacagacgtcgtctctctctcctccacttcaacaaacacttgatctcgcgcgaatgcgcgatccctctatttataccccgcttctctcacattccgtcttcaacaactctggcgagcagcagtgaacgtacttacgtcttcccccagctagctagctatctaccttggtggtggcgattgatatatagattaaacatggcgcctcaaagcctggatctcgggctgagtctcggcctgggcgtggcggcattccagcccagcttctgccacccggccggcaatgacgcggcggagcgggaggccagcccgaccgcggacgagagggagcggaggtgctcgcccgccggcagcccgacgtcgagcggcagcgggaagcgcgtcgcggcggagaggtcggccggcagcggcagcggcgacgaggacgacgacgggggcgctcgcaagaagctgcggctgtccaaggaccaggccgccgtgctcgaggagtgcttcaaaacgcaccacaccctcactccgaagcagaaggcagcgctggccagccgcctgggcctccgggcgcggcaggtggaggtgtggttccagaaccggcgcgcccggaccaagctgaagcagacggaggtcgactgcgagtacctcaggcgctggtgcgagcagctcgccgaggagaaccggcgcctgggcaaggaggtcgccgagctcagggcgctgagcgccgcgcccgcgccagcggcccctctcaccgccctcacaatgtgcctctcctgcaggcgcgtctcctcttcatcctgctcatcctcgccgcctaacacgcacgcgcatgccgctgcagctggcactggcaggagcgtggcggcggcggcggcgacgacgttgcccgcccaccggcagttcttgtgcgggttcagagacggcggggcggccgccgccgcagtgtacgggacctcatcggctctcgcaaaggccctcagggcggccagataggcgcagtcgtcgtcactagctctctccgctgatctggacttgctctgctcaccggagctccggcgatcgagcgatgccacggaagtgcgtggccccaagttgcaactaattgcaactgcagagcaagtgttgtagctgaatcatctttagttttttttcctccgtatctttagagcggaatgccgcatgcaaatgttctttagaatcgatttcatgtgggtgtatgattgtactcatgctgtggaaattaataacggtttgtagatgaggtaa

SEQ ID NO: 137295 - DNA, 1110 bp, Zea Mays
actggagatccaccccacgagcgcccagctcatcattgtcgaccacttgcatcagctacagacgtcgtctctctctcctccacttcaacaaacacttgatctcgcgcgaatgcgcgatccctctatttataccccgcttctctcacattccgtcttcaacaactctggcgagcagcagtgaacgtacttacgtcttcccccagctagctagctatctaccttggtggtggcgattgatatatagattaaacatggcgcctcaaagcctggatctcgggctgagtctcggcctgggcgtggcggcattccagcccagcttctgccacccggccggcaatgacgcggcggagcgggaggccagcccgaccgcggacgagagggagcggaggtgctcgcccgccggcagcccgacgtcgagcggcagcgggaagcgcgtcgcggcggagaggtcggccggcagcggcagcggcgacgaggacgacgacgggggcgctcgcaagaagctgcggctgtccaaggaccaggccgccgtgctcgaggagtgcttcaaaacgcaccacaccctcactccggtaagggcgtaactaaggcttcatccttcgatccgacgtcgccgttcctcgccgcctgtcggtcggctgatttgatcttggcggtggccggtgggtgggtgggtggctcaccaaggttctgtccgtctcggcgctgcagaagcagaaggcagcgctggccagccgcctgggcctccgggcgcggcaggtggaggtgtggttccagaaccggcgcgcccggaccaagctgaagcagacggaggtcgactgcgagtacctcaggcgctggtgcgagcagctcgccgaggagaaccggcgcctgggcaaggaggtcgccgagctcagggcgctgagcgccgcgcccgcgccagcggcccctctcaccgccctcacaatgtgcctctcctgcaggcgcgtctcctcttcatcctgctcatcctcgccgcctaacacgcacgcgcatgccgctgcagctggcactggcaggagcgtggcggcggcggcggcgacgacgttgcccgcccaccggcagttcttgtgcgggttcagagacggcggg

SEQ ID NO: 137296 - DNA, 1375 bp, Zea Mays
aaatccacacttctctctcttcctcgcatattctggacaacgatcatactttccctttcgtccgttcccttcctctggccaccctatttcgcccacggcggcgatcgatctggagattccggggccctcctgcaaacggtgccggtcgggtagcagggggtgttctcatcacggtaagcgccgccggcagaatcggcggtccgaatctccaggaaccggcgattccacctcaacgactcccacatctgtgcgaagatggcgtacactcctttggataccctcaaatgggttgtaaaggaaatggagatgaactcggtcgaggttaggcagacggttggtcatcctaccaactcatcttatgaactccagcagcttattgacaagatcctagacttatcggattggttggacatggttgccattcaatgtgcataagttattaccaattacaacccaccccctcacccactacagaagagttagaagttgccgaggaatttggacgagagcctccttcataatcttcaattcgaataggttccatgccatgctcgtactcagtgcccatattgtgtagaatgataacacaatcaacaatgaatttgagatcaatggggttccaattgcgagcatgattctttataatttggtatttgtcttgtaagactccaaatgctcgttccacgtccttttggtactcatcatgtttggcggtaaaatacttgtgcttattgctaaatgggcaagagataggttaaatcaaagtagtccacgacagataaatgccgtcagcaaggtagtaagccatatggtattgttgaccattcagttggtaactaaccgaaggaccaactccattggctaagttgtcgaagactggtgaatgatgcaggacgttaatgtcattgcaagatccaggcattccaaaaaatgcatgccaaatccaaaggttatggcttgcaacagcctctagaatcaatgtaggtttcttgtagtaacctctgtactgaccttgccaggtcgtggggcaattttcccactcccagtgcatgcaatcaatacttccgatcatacctggtgttgggggccttcggcttacgaaggtcctcaaaaacaggatttaacagtatttctggagcataatgtgtgaacaggtaccttcgggctcgagtcggaatcacagtaggagaagcctaaaataatacgaaggttgatacagcgccaaagatgtgagcgggaaagcttcggcgtgctagcagaaaatgaaaccgacttaaagataaaaaggctattcagacctcggcggattactatagaattattaccaaatgtaatgggcatgaatgtaattttgtatgagccgtgtcccgtgtct

SEQ ID NO: 137297 - DNA, 713 bp, Zea Mays
aaatccacacttctctctcttcctcgcatattctggacaacgatcatactttccctttcgtccgttcccttcctctggccaccctatttcgcccacggcggcgatcgatctggagattccggggccctcctgcaaacggtgccggtcgggtagcagggggtgttctcatcacggtaagcgccgccggcagaatcggcggtccgaatctccaggaaccggcgattccacctcaacgactcccacatctgtgcgaagatggcgtacactcctttggataccctcaaatgggttgtaaaggaaatggagatgaactcggtcgaggttaggcagacggttggtcatcctaccaactcatcttatgaactccagcagcttattgacaagatcctagacttatcggattggttggacatggttgccattcaatgtgcataagttattaccaattacaacccaccccctcacccactacagaagagttagaagttgccgaggaatttggacgagagcctccttcataatcttcaattcgaataggttccatgccatgctcgtactcagtgcccatattgtgtagaatgataacacaatcaacaatgaatttgagatcaatggggttccaattgcgagcatgattctttataatttggtatttgtcttgtaagactccaaatgctcgttccacgtccttttggtactcatcatgtttggcg

SEQ ID NO: 137298 - DNA, 266 bp, Zea Mays
gtgacaggtcataacaatgcatgctacgccccatcaactttatctcatacaaaagcaaggcgtatacgtaagcgagtgctagatcagcgaaaactagcatcagcaggtaagacagtgaacaccttttccccgatggttttaaacaatatcaaatattgaggatgaatacaactgtactaggatctagcatgccctctcagcatactcccacactgcaatgtggacacttcgatccagatttcgtaaaaacgatcaaaggtaaattg

SEQ ID NO: 137299 - DNA, 333 bp, Zea Mays
atgagggagagtgcaagggcgctgggcgagctccatgggaggagcgagcagccgagttggggacagggagaaccacggctggctgggcgagctgcaggccggcgagctccatggctgggaggagctcagggcgcgggagctagagctgcacgacagggagatgggcgctgggaaaatctcggctgggaagatgagcacccaaatgcagctgtcgtatttgagcagaggatagagttgaggaagaagcaaaaatctcccctggtaagcaacatggaggatgagcttgaaggagaagaatctccagccacggcagcaagagataaagacgcttga

SEQ ID NO: 137300 - DNA, 1648 bp, Zea Mays
caacaaccaagctagtgcctagtgcgagtgcgtgctgccgcacaccttctccgcttgcattgcctattatactccatccatctaccgtattgccgtatatatttctcacctcgagcgaggagcatccgactccgagtggaggggtgagagggaggccatgaagtccaaccggaacctgtcgagggcggaggggaagaggctggggaatgtggcactcatagccttcatgctcggatccctcctgctgctctccctcgccagggccaagttctccccgatcggtaaaacaggggacaccatcaaggcagaggagcagcaggcaatggcgaaggcgagcggcgagatggccaccgcccatgacgctgcagctgaggaggaggaagaggagactcggtccaagccgaccgactccgatatttcaggcgcagccattgcggtaggcgacgaccacgccgagagggcgcgcaggccggtgtgctacgagtcgagccggcggtcggacacctgcgaggcggccggcgacgtgcgcgtggtggggcgcgcgcagacggtgctcgtgggcgcgctggaccgggagtggaaggtgaagccctactgccggaagcacgacgcgttcgcgctgtcccacgtcaaggagtggacgctccgtccgcttgtcggcggcagcgacggtgacgaggcgccgcggtgcacggtgaacagctcggccacggcgttcgtgctgtccacgggggggttcacggggaacctgttccacgactacacggacgtgctgatcccagcgttcatcacggcgcggcggtacggcggcgacgtgcagctgctggtgagcagccacaagccgtggtgggccgccaagtacatgccggtactgcagcagttgagccggcacgagctggtggacgcggacgccgacggcgaggtccggtgctacccgcgcgtggtggtggggccgacgttccaccgggagctgggcgtgggcgcggagacgaaggcgcccggtggcgaggaggagggggtgtcgatgccggagttccgcgcgatgctgcggcgcgcgctggggctggagcgcgcggcggcggcgccgagcggggaccggtgggacgtccggcggcggccgcggctgctgatcatctcgcggcggcagtcgcggcggctgctgaacgagcgcgccatggcggacatggcgacgagcctggggttcgacgtgcgcgtgggcgacccggaggcgagcacggacgtggcgcggttcgcgcggctggtgaactcggcggacgtgatggtgggcgtgcacggcgacgggctcaccaacatggtgttcctccccgcgggggccgtgctggtgcaggtggtgccgtacggcgggctggagtggctggcgcgcggcatgttccgggaccccgcggccgggatgcaggtgcactacctcgagtacgtggtgcgggcgggcgagacgacgctgagcgaggagtacggcgaggacgacccggtcatcagggaccccgccgccgtccacaggaaagggtgggacgcgctcaaggccgtgtacctggacaagcaggacgtccggccgcacctgggcaggctcaggaacaccttgctccaggcgctcaagctgctgccccatggacggcagagcaccgactga

SEQ ID NO: 137301 - DNA, 1342 bp, Zea Mays
caatcattaacgagagtgctctggcctctggctagctatctcgtccggtcctgcatcaggtcgtagatatagtggggatagttttgttgttggtctggaaagaagagagggaaaaaaaaagatccatggcgacggaggaggccggccgtgccctggcgacgaaggcgaagctggtggcggcggtgctggtgctggagctgctcgtcgcgggcttccacgtcgtgtcgagggcggcgctcgacatgggcgtcagcaagatggcgttcctcgtctaccggaacgccgcagccctgctcgtggtcgcccccgtcgcctacttcctcgacaagaaagataggccgcccttcacgctacgcttgctgatggacttcttcttgctggctgcagtcggggtaaccttcacacaggggctctacatcctcggcctgtactacctgtcaccaacctacgtctctgtcatccagaactcagtccctgcgatcaccttcgtcatggccgctagtttgagaatcgaacaggtaaatgtgaggagcagatacgggctggcaaagatgctaggcacggtggtcaccatagcgggggcaaccgtcataaccctctacaaagggacgccattattgacagaaacagctcatgcagagggcaccacgcacacgctggaaggcacccacacgctcggaggatgggtcgcaggatgcctcatcatgttcgcgaactgcatttgcttgtctgcgtggatggttctgcaggtcccggttctgaagaaatacccagctaagctgtcgtctttcaccatcactctggcgttgggtttcgtccagctcgctgtcgtcgcgccgtttttcgagagcgacgttgagaggtggaagatcagctcaggaggcgagcttttcaccatcctgtatgctggcgttgtggtgcttggaatcgcctggtatctcatgatctggtgcataaacaaaggagggcctcacttcgtttccgtcttccagccactgcaaaccgtcatggtcgccatcatggccgccatcttccttggcgacacactctacattggaggagtcataggtgcggtgatcatagtcgcgggtctgtactgtgtactgtgggcgaagagcaaggagaccaaaagcagcggcgatctcctagtccttcctgaaagaagccccgcgcagcagaatctcctccagcgtgaagattgaagcgagaccactcactgtactgtacggttctcggccggctgtagctgccccaacaagaaatatgggggtgtttggtttgagaaatcacttcatccaaaatgtggtggtgcatcatgagtccattactcaaatttggtggg

SEQ ID NO: 137302 - DNA, 406 bp, Zea Mays
cctttctacaagactcatgcaacacatagagaaagaaagtactgcaaaatccggcagcacctcccttgaaagtagcataacaagggaagcatatagtttatacaggatataaaagaaagataattgccatagtataatcaaaatgcaacggtaggaaaaacattcatgaccagacaaaagatagacatctcagcccaccaaactaaacagttcaactaccatgaaagattagaatgtaataattccctagacttgacccttcctgtttaacatcattaataaacagttattcctttatttaaaagtgtggtggccgtgctgctacatcccttcttccccaaagcaaagatcaggtgcctttaccgaagttagggcaaaatccctaagaacgatccggaagtccacc

SEQ ID NO: 137303 - DNA, 818 bp, Zea Mays
atctcatcttcttcctccatccgcactactgagagcgacaaagctagctctctccagggatcggattcggatcaccatgccgtccaccgtgaactccgcgtccctcgaccagaaccttgagctcgccaagcaatgctcgcgagaggccgccctcgcagggttcaaggcagcagctgtcgcgaccgtcgcctctgcagttcccaccctggttagcgtcaggatgctgccatgggccaaggccaacatcaaccccgctggccaggccctcatcgtctccacaggtcgatctctgaatctctccctgatccctctacgacgacctagctagctattactaccaagatgccttcacatgtctttctgtgtgtaactaatggcggaatgcctgctttaatttgctccacgaaaactgggtcgtcgtgcagttgctggcatggcgtacttcatcgcggcggacaagaagatcctctcgctggcgaggcagcactcgtacgagaacgcgccggagcacctcaaggacacctccttccagggcaccggccgtccgcacccagggttcttcaggccttgagcgagagaccatcaaactaccgccctagctagctggacgcactagttcgtcagcggccgccgattcatgtcgtccaagatcatatcaactactgctagcatatatatagtgtactagctagtagtaggcaccggcgatccgtgcatgcatgtgctcggagaaactgtaatggcttagtgctctgctccagtttactgtatctaccttccattatcatataataatatcatcctcctgtttaagcata

SEQ ID NO: 137304 - DNA, 671 bp, Zea Mays
atctcatcttcttcctccatccgcactactgagagcgacaaagctagctctctccagggatcggattcggatcaccatgccgtccaccgtgaactccgcgtccctcgaccagaaccttgagctcgccaagcaatgctcgcgagaggccgccctcgcagggttcaaggcagcagctgtcgcgaccgtcgcctctgcagttcccaccctggttagcgtcaggatgctgccatgggccaaggccaacatcaaccccgctggccaggccctcatcgtctccacagttgctggcatggcgtacttcatcgcggcggacaagaagatcctctcgctggcgaggcagcactcgtacgagaacgcgccggagcacctcaaggacacctccttccagggcaccggccgtccgcacccagggttcttcaggccttgagcgagagaccatcaaactaccgccctagctagctggacgcactagttcgtcagcggccgccgattcatgtcgtccaagatcatatcaactactgctagcatatatatagtgtactagctagtagtaggcaccggcgatccgtgcatgcatgtgctcggagaaactgtaatggcttagtgctctgctccagtttactgtatctaccttccattatcatataataatatcatcctcctgtttaagc

SEQ ID NO: 137305 - DNA, 119 bp, Zea Mays
attgtttctattttcttgttttcaaaatctgatatttgaattcaaatttgtcacagaaatcaagtgcataaataaagtgctagcatgatgaattataattatttatatctatttttttg

SEQ ID NO: 137306 - DNA, 98 bp, Zea Mays
cctattctatttccaattgaattcacttttgaatctgagtttgaatttttctattcaaaccaaaatgcaccatcaaaatccagcatgatgcaatattc

SEQ ID NO: 137307 - DNA, 815 bp, Zea Mays
ggctgcatgcatcgtctatctggatcaattcgaaacatcggagagagagtagcaaataaacaacaaagagattgttgattatccaattggatcgttcaagcaggatgagcaaccgaacgtcgcacctgaccgtcctgcaagtgccccgccgcggggccgtcgttgttgccggagacgcggcggcggccgcggacccctacgacggaccgcagccgcagacggccacctgctgcacggcgctgcagcgtggcgtggccctcgacggcctggcgcagccgcggtacgcgccgctgcggacgctagcgaccgtcgacgatgacgacggcgacgtcgaagaggacgaggatgggaatcccaagaacagcggcaaggacaagaaggacgaccacgacgccgccaccgctataaaaagcgacgacagcagcaggagtggtggtaagaagaagatggtgcgcaagtgcaagtcgacggtggatgaactgaaggtgtcgcagctcatccagggcccgcggctccggcgcagcgtcggcatgcgccgggactggagcttcgaggacctcggcaacgccgcttagcagctagctagctccgacaagctggtaccaccggccccacatgcatcctgcgaaatactccactgtgttacactgcaccgtacctttatttgtacatgccgctgcaaaataataccctccaagaatctcacgccgcgctcgcagttagtaacatctgcctgaaattaatttgtacatatatgtatgtacattgttgatgcgcgtatatgtaccctctcgaagagagtgcaattctagaat

SEQ ID NO: 137308 - DNA, 514 bp, Zea Mays
ctgtatttgatttcttccaaacgtgcaacttgattgtgaatagtgttaatgcttcttgtaagagaagggatcaattggctcaacaacaccatgacaaacttgtgaacatgttggaaaggggggaaattttttcaggtagagggaaaatcaagaaaccaacctagcacgacctggggatactcgatggggttcacatcataaaactttatgtcgtattgttctcatgtgggatgctattctagaggtattagagattgtggctgatgatggctctaatggggataagaaatatatggcttctagtttgttgaaacaaatggagagctttgaatttgtgcttattatgcatctcatgatgaggttattaggcaagactaatgatttgtcacaatgtttgcaaagaaaagatcagaatattgtccttgctattggattgattggagccacattgcggaatattagttaagtacgtgatagtggatgggaagaattgtttgaggaggtaaagaccttt

SEQ ID NO: 137309 - DNA, 102 bp, Zea Mays
aactagtaaataacaagctaaatactagattgttaaatgtttctcaaaattcagaatcaaaaatgaagaggacaaaaacattgagatcgttttattgtccgg

SEQ ID NO: 137310 - DNA, 624 bp, Zea Mays
atgacaagttatttggaggcaaacaatagaaaaagaccaatgtttctagatgaagatgatgaagatgatgaagtggtggaggtggcagcagcagatggggcgaatgatacatctgttgtggagtctcaagcatccaagatccatacagagaaaagaaaccgattgttgcataagaggttgaattctattgtcttcatttcctacaacagaaagatgaaagttaggttccaaaaactacgccggaagaagtggaaaaactttgatccattggttcatgaggacttcaactgggacaatgagtgggctgattctttgcatgtagtccctgaaggtgggcgtgggtgtaagtgtgaccttacatgggaccttgtggataatgccattggagcatcacaagcacttcatggccgaaacttaccaagaagagcccataatgtgtattcaagaagaaattctgttgctgcacaaaatatgtcagaggctgaagaggaagatgaagatgaagaagatgttccacatgatgatgcggaaatcacagattgtgaagatgaatctaatggtggcaatgatggtgaagaaggggaggcacccaatatcccaggagagtttgatgatgatttttga

SEQ ID NO: 137311 - DNA, 490 bp, Zea Mays
ataagaggctcaaacatctgcattggctagggccctccaaaaccgagagccggccctggtggccgggcggggtatccagctcagtggcaggcggttcagtcgcgacgggtcaacacggcgagacggtgctcctcttcgtggcggctcaccacatcgcggcggcgcccggtggcgtgccatcgctgaacgcagagtatgaatcaggatctgatgtctccatggatggcctacgggatggtcctgttggagatgtttactggaagaaggccaactggcagcttcatcgacgctgtggcaaatcttatcggctttgtgaagatggcttattctgatcatctacttgagatacttgatacgctgtttagatgaactaagctagcaatcaggtggctacaagtttgctaatttccattgtgaagctccgatttatggaaggtcttttgttggttattggtaaatcaagtatatattttttttgaagcaaaatcaa

SEQ ID NO: 137312 - DNA, 746 bp, Zea Mays
tgtgatttgtgatgcaaccaaaggactcttctgaaacgccctggcgggtggcgcgcggcattgacgacgaaacggggtgcgttttcgtgtataagtagggcctcgcccgcctgatcgatcttcgtccattgccgtgcacaacaaggcaggaagagagctgcctgaagcggtgcctgaaggaggagaggaggagaagccacgaaccagcgacagcgaggatgtacaacgcgccgccaccgccgcaggacatgtcctactacgagcactgccagaggcggcacgaggagaagggctgcctctacggatgcatcttcactgcgctgtgctgcttctgctgctacgagacctgcgagtgctgcctcgactgcctctgctgctgctgcaactagccggggctagctccggaggacggtcgagacgcagcagatggaggtcgcctccgtctcttctacctacctaccaatctacctagtgatgatgattcagttcccgtttagtctggtggtgtgcaagtgcaaacataataacgcacgcatgtcgtagcgtagtacaggagagatgttttactctgtcagttccagtttgagcattcgtaaaccaaccaaccatggtctgaactctgaaccaccgcatctatcttctgttatttgctaaatcgcccccgactccggcgactctgaacacaacgacgacacatccgtccgcgtaacgccttgttcagttgtgtcggattgcattcggaatcg

SEQ ID NO: 137313 - DNA, 817 bp, Zea Mays
agcagtccaccactcgttcgttccaaacggagaagaggatcaggttcgttccaagggaaaggagaagagggtcaggagagagagagagagagagagagagagagagagagagcccttgctcgttcgttcaccaccacagctccgatcgatccgcaaggcaggcaagatgtacaacgcgccgtcggcccaggagatgtcctacttggagcacgtgcagaggcgccacgaggagaagggctgcctctacgcctggtgagctagctagacctccgtctccgtctccgtctgctctgcctgagttgatcagagaagaaaaagagatcggaggaggggtttcggtccgccgccagctcagtttcagtttcagttgccatggcgttgccttgctccttgtcgatcagtttctttgtcaccagcacaaggccgcgcgccgcttcctgctggagtgttgaactaactgactgctgttcctctgctctgttgttgcgcagcatcttcactgcgctgtgctgcttctgctgctacgagacctgcgagtgctgcctcgactgcctctgctgctgctgcaactagccggggctagctccggaggacggtcgagacgcagcagatggaggtcgcctccgtctcttctacctacctaccaatctacctagtgatgatgattcagttcccgtttagtctggtggtgtgcaagtgcaaacataataacgcacgcatgtcgtagcgtagtacaggagagatgttttactctgtcagttccagtttgagcattcgtaaaccaaccaaccatggtctgaactctgaaccaccgcat

SEQ ID NO: 137314 - DNA, 578 bp, Zea Mays
agcagtccaccactcgttcgttccaaacggagaagaggatcaggttcgttccaagggaaaggagaagagggtcaggagagagagagagagagagagagagagagagagagagcccttgctcgttcgttcaccaccacagctccgatcgatccgcaaggcaggcaagatgtacaacgcgccgtcggcccaggagatgtcctacttggagcacgtgcagaggcgccacgaggagaagggctgcctctacgcctgcatcttcactgcgctgtgctgcttctgctgctacgagacctgcgagtgctgcctcgactgcctctgctgctgctgcaactagccggggctagctccggaggacggtcgagacgcagcagatggaggtcgcctccgtctcttctacctacctaccaatctacctagtgatgatgattcagttcccgtttagtctggtggtgtgcaagtgcaaacataataacgcacgcatgtcgtagcgtagtacaggagagatgttttactctgtcagttccagtttgagcattcgtaaaccaaccaaccatggtctgaactctgaaccaccgcat

SEQ ID NO: 137315 - DNA, 252 bp, Zea Mays
atggcgagcaattgcttggacgccgagggtccaatggcggaattgatggtcgccaaagttccctggaacaatggcgctgctctggaataccgcactgacgcccgagcgcccacgatttgtggttttgtcggcggcggattctctctccctcacggctacacagtgacctggtattcgttgtcgcgcgacaaagggaaaggaggaggacgggattcggctccgccatttatggttgccatgaaggtcggttga

SEQ ID NO: 137316 - DNA, 1262 bp, Zea Mays
gtcgctatccctctctctccccttgatttttccagctcgccggtgcttcttccctgcgcccagcgtcgcggctcttccccagctccctctgcctggcgcgctctccctggtacacgcgcgcagctcctccctgcagttcgttcatggccgtcgcgccctcacctgcaggcagtcgagctcctccctcgcccccatggccggcgctccttcaagctcggtcctcctctctgcgcgtaggagcttctcccatggcagctcttcctgctcgacgacgccctccctaccctagctctttcagtcgtcctccccacctctctcccatggtcgaagcaccagccccgtcattggtcaagctcgcccagctcgccttctgtccccaaccatggatgtcggccgccccttgctcccatccatggctgcctccctggttcgctggtctgcgtgccccctcccttcattgccctcgtcttctccctctgctcgctcagtctccagctccctcctctcccccgagttccctggtcgccacgcgccctgcttggcttttcaagctcgccggcgctcctctacaggtcgtgtccaccgcttccagttgccgctgatctctggtgctcgcccctggctcggatccggtgctcggtgcccagcctgctcgccgcggatgcgggccgccgcgctgccaggctgctctctctgctcggcctcgatctctcgcgcgcgtccctgctcgatgcccagcgctccttcctgctccgcgccatggcgtctcccagtcccaggtcgccccttcggccgagctccacatggtgcccggatctccctgctcccctgcgcgcgctctgctccctgcgcgcagctgcgagctccgctcggtcgctcctccctgctcgcccctgcgctcatccaactccactacgccgtgtctctctgtcgagtcgcatccgcagttcgccgccagcgtccgtccgccggtggtgctcgttcccttgacgtcgaactgcgccccatgtcggcttctccagtccgccctggcttggcatttggacaccgggtctgccctgctcgcgttccgggttggaccggacatcgctgtttgcctggtcacatgtgttcatcgcgcctgacctacttgtgctcaggtcttcaccatcgatgttttggagtttgccgtgacgccgtaccagcgttctgtgtgcagtgggaaaactttgtaagttcgcgttgtcatcaatgccacgcgaggtcggctctttgctctgccc

SEQ ID NO: 137317 - DNA, 1407 bp, Zea Mays
cgacaacaaacaacagagcaggacaggatagaccccttgcccttggcaccgcccacccgtctgactgtctgagccgcctgtctcctcctcgttctctcagcccgttcggcgcaatgccaccgccggcgccgctcttcctctcgctcgcctccacgccaccgcctgcgcttatgcccgtacaccaccccagggccccgcaatccctaaccctagtccctccggttgcctcctccagaaaggccgccgccgttcccgcgtgccccgtcgcctccccgcgtcactccgactacttcgatccgcgggctccgccgccgccgcgcggggacggagggtacgggcgccctcccaacggcgcgcaggacgggagggtcttcacgagctacagcatctacaagggcaaggccgcgctgtcattcgatcctaggccgccgctcttcgtgccgctcgattctggggcgtacaaggtggccaaggagggcttcgtgctgctgcagttcgcgcccgccgtggccacacgacagtacgactggacgcgcaagcaggtgttctcgttatctgtgtgggagataggaaccctgcttactcttggtccaacagattcatgcgagttctttcatgaccctttcaaggggcggagcgaagaaggtaaagtgcgtaaggttctaaaaattgagccaacaccagatggcaatggtcgctttttcaacctcagtgtccagaatcggcttatcaacgttgatgagagcatttacatccctataaccaagggagagtttgctgtcattgtatcaactttcaattacatcataccgcacctcatgggctggagcacatttgtaagttcaatcaaacccgaggagtcacggccatacagcaggccgcagtccacgtctgagtacgaatggcgaaggtgatgtgttgatgaactacagcaaaatggctgagacccacactgaagggatgagattattggtattgtttggctgggtaatctcagatgtggttagttgatggatgcctttttggggtactccttttgtttcctttctagttcagcaggcaggtagcactacttgtatccagagtttcacggggcggttggggagggggcatattttgggcagcaaacctcagttctgacatggaatgacgcagtcacgcagcaggggcggttgtgaatctgctccgtaaggccgtgactccagtgatagcgggacgcagctgacagatgtttgggttgctggggaagggttggcctgaaattgttgcttgcatacacgagattattgtgtacatgtagtctgcgactctgcgttacccccttgatgaatgtccgccctgtggaactgtggtgtttttgctgatgattttgctgaattcaaaagcttaaaccattagaattagaaa

SEQ ID NO: 137318 - DNA, 1319 bp, Zea Mays
agccgcctgtctcctcctcgttctctcagcccgttcggcgcaatgccaccgccggcgccgctcttcctctcgctcgcctccacgccaccgcctgcgcttatgcccgtacaccaccccagggccccgcaatccctaaccctagtccctccggttgcctcctccagaaaggccgccgccgttcccgcgtgccccgtcgcctccccgcgtcactccgactacttcgatccgcgggctccgccgccgccgcgcggggacggagggtacgggcgccctcccaacggcgcgcaggacgggagggtcttcacgagctacagcatctacaagggcaaggccgcgctgtcattcgatcctaggccgccgctcttcgtgccgctcgattctggggcgtacaaggtggccaaggagggcttcgtgctgctgcagttcgcgcccgccgtggccacacgacagtacgactggacgcgcaagcaggtgttctcgttatctgtgtgggagataggaaccctgcttactcttggtccaacagattcatgcgagttctttcatgaccctttcaaggggcggagcgaagaaggtaaagtgcgtaaggttctaaaaattgagccaacaccagatggcaatggtcgctttttcaacctcaaatcggcttatcaacgttgatgagagcatttacatccctataaccaagggagagtttgctgtcattgtatcaactttcaattacatcataccgcacctcatgggctggagcacatttgtaagttcaatcaaacccgaggagtcacggccatacagcaggccgcagtccacgtctgagtacgaatggcgaaggtgatgtgttgatgaactacagcaaaatggctgagacccacactgaagggatgagattattggtattgtttggctgggtaatctcagatgtggttagttgatggatgcctttttggggtactccttttgtttcctttctagttcagcaggcaggtagcactacttgtatccagagtttcacggggcggttggggagggggcatattttgggcagcaaacctcagttctgacatggaatgacgcagtcacgcagcaggggcggttgtgaatctgctccgtaaggccgtgactccagtgatagcgggacgcagctgacagatgtttgggttgctggggaagggttggcctgaaattgttgcttgcatacacgagattattgtgtacatgtagtctgcgactctgcgttacccccttgatgaatgtccgccctgtggaactgtggtgtttttgctgatgattttgctgaattcaaaagcttaaaccattag

SEQ ID NO: 137319 - DNA, 1283 bp, Zea Mays
agccgcctgtctcctcctcgttctctcagcccgttcggcgcaatgccaccgccggcgccgctcttcctctcgctcgcctccacgccaccgcctgcgcttatgcccgtacaccaccccagggccccgcaatccctaaccctagtccctccggttgcctcctccagaaaggccgccgccgttcccgcgtgccccgtcgcctccccgcgtcactccgactacttcgatccgcgggctccgccgccgccgcgcggggacggagggtacgggcgccctcccaacggcgcgcaggacgggagggtcttcacgagctacagcatctacaagggcaaggccgcgctgtcattcgatcctaggccgccgctcttcgtgccgctcgattctggggcgtacaaggtggccaaggagggcttcgtgctgctgcagttcgcgcccgccgtggccacacgacagtacgactggacgcgcaagcaggtgttctcgttatctgtgtgggagataggaaccctgcttactcttggtccaacagattcatgcgagttctttcatgaccctttcaaggggcggagattgatctgataagcatgtatggctgctaggtgtccagaatcggcttatcaacgttgatgagagcatttacatccctataaccaagggagagtttgctgtcattgtatcaactttcaattacatcataccgcacctcatgggctggagcacatttgtaagttcaatcaaacccgaggagtcacggccatacagcaggccgcagtccacgtctgagtacgaatggcgaaggtgatgtgttgatgaactacagcaaaatggctgagacccacactgaagggatgagattattggtattgtttggctgggtaatctcagatgtggttagttgatggatgcctttttggggtactccttttgtttcctttctagttcagcaggcaggtagcactacttgtatccagagtttcacggggcggttggggagggggcatattttgggcagcaaacctcagttctgacatggaatgacgcagtcacgcagcaggggcggttgtgaatctgctccgtaaggccgtgactccagtgatagcgggacgcagctgacagatgtttgggttgctggggaagggttggcctgaaattgttgcttgcatacacgagattattgtgtacatgtagtctgcgactctgcgttacccccttgatgaatgtccgccctgtggaactgtggtgtttttgctgatgattttgctgaattcaaaagcttaaaccattag

SEQ ID NO: 137320 - DNA, 601 bp, Zea Mays
gtctgagccgcctgtctcctcctcgttctctcagcccgttcggcgcaatgccaccgccggcgccgctcttcctctcgctcgcctccacgccaccgcctgcgcttatgcccgtacaccaccccagggccccgcaatccctaaccctagtccctccggttgcctcctccagaaaggccgccgccgttcccgcgtgccccgtcgcctccccgcgtcactccgactacttcgatccgcgggctccgccgccgccgcgcggggacggagggtacgggcgccctcccaacggcgcgcaggacgggagggtcttcacgagctacagcatctacaagggcaaggccgcgctgtcattcgatcctaggccgccgctcttcgtgccgctcgattctggggcgtacaaggtggccaaggagggcttcgtgctgctgcagttcgcgcccgccgtggccacacgacagtacgactggacgcgcaagcaggtatgtttttttatacccaacgcaccaatttgagccatttcgggtatggggacagaagagccgacatttgtagcttagctagaaattcaggttgcttttcttgtgttgaaaataaatgttatagc

SEQ ID NO: 137321 - DNA, 105 bp, Zea Mays
gatgtttccactttttttgcaactgtagtgtacattttgttgcaactggtctatcacataagttgcaactgtataatttttactttcaacccacatacatcattc

SEQ ID NO: 137322 - DNA, 376 bp, Zea Mays
cttgaatagatcaactgaggtgggctctgtgtctcgcacggtggcgcggacggtgtagccacggtcgaggaggagcctgacgatccaggacgcgatgtacgctgatgcgtcggtgacgcacaccaccttccacatccccattgtcgtggtcgcagcagcagagtggcacgggcgacggcggcgacacgggctaggcggcgaggtcgggaggaggaggaagggtcacggcgggagggacggcgtgggagggcgaggctgggagggagtggtacacgggctgggcggcgtggtcgggaggaggagggcgggtcgcggcgggagggacggcgagggtcgggaggaacaacgtgggacggtgggagggcgaggctgggag

SEQ ID NO: 137323 - DNA, 78 bp, Zea Mays
tgaagaaagacgtgccacccaaatgttggtaatacaacaaatggcaaacatggttactgaactgcaaaatcagataag

SEQ ID NO: 137324 - DNA, 3442 bp, Zea Mays
gtcgctcgccggtcctggctccgcgcctgcgccaccgggttcgcgtcggattcgctccctcttcgccgcgccccaccactccatcgtcgctgggggatctctagggtttagcgcagtcgccggctccacctcgcgccgtcctcgccgccgccaccaccaccaccaccatgccgctcaggttggagatcaagcggaagttcgctcaacggtcggagagggtcaagtcggtggatttgcaccccacggagccatggatcctgtcgagtctgtactcggggagtgtctgcatctgggattatcaagcacaggcaatggtgaaatcatttgaagtttcagaactgccagtgaggtcggcaaaatttatttcaaggaaacaatgggttgtagctggtgcagacgacatgttcattcgtgtctacaactacaataccatggacaaagtcaaagtttttgaggctcatactgattacattagatgtgttgcagtccatccaactctaccatatgtgctgtcatcatctgatgacatgttaataaaactgtgggactgggataaagggtggatgtgcactcaaatttttgagggacattcacactatgtgatgcaggttactttcaacccaaaggatattaacacttttgcaagtgcatctcttgatcgcactacaaagatatggagtttaggttctccagatccaaacttcacacttgatggacatcaaaagggtgtcaattgtgttgactacttcactggtggtgacaggccctatttgattactggttctgatgactccactgcaaaggtctgggattaccagacgaaaagctgtgttcagacacttgaagggcatacacataacatttctgctgtttgtttccatcctgagctccctataatcattactggatccgaagatggtacagttcgtatatggcattcaacaacttacagacttgagaacacactaaactatggccttgagagagtctgggctgttggatacatgaagggatcaagaaggatggtgattggttatgacgagggggccattatgataaaaatgggccgtgaagtacctatagcaagtatggataccggtgggaaaatcatttgggcgaaacataatgaaatacaaactgtaaatattaagacagtcggtgcaggctttgaggtcacagacggagagagattaccgttggctgtaaaagagttaggaagctgtgatttgtacccacagagcttgaagcataatcctaatggacggttcgttgttgtatgtggagatggtgagtacataatttatactgccctggcctggaggaataggtcatttggatctgcactggaatttgtttggtcatcagaaggagaatatgcaattagggaaagtacatcaagaataaagattttcagtaaatcatttcaggagaagaaaactatccgcccttcattttcagcagagcgtatttttggtggggtattgttggcaatgtgttctagtgatttcatctgcttttatgactgggttgattgtagactaatacgccgaatcgatgtgaatgttaagaacgtttactgggctgatagtggtgacctagttgcaatagcaagtgatacatcattctacatcctcaagtacaatagagatgttgttgcttcttatctagaaggtggaaagcctgtggatgaaggtgtcgaagatgcttttgagctgcttcacgaggtcaatgagcgagtgagaactggaatttgggttggagactgctttatctataacaactcgttgtggcgcctaaattattgtgttggtggtgaggtcactacaatgtatcatttggatcgccctatgtacctattgggatatcttgcgaaccaaagtcgagtttatcttattgacaaggagtttaatatcattgggtacacattacttctgagtttgattgagtacaagacccttgtgatgcgtggggatttggaacatgcaaatgaaattttatcatccataccaaaggcacaatacaatagtgttgctcattttttggaatctagaggtatgttggaagaggctcttgagatagccacggatgctgactacaagtttgacctagctgtgcagcttggaaaattagatgttgcaaaggctatcgtcatagaagcacagagtgaatctaaatggaagcagttgggtgaactcgccatgtccacaggcaagctagagatggcggaggaatgccttcttcaagcgaaggatttaagtggcttgttgctattgtactcatctcttggagatgctgaaggaattgaaaagcttgcttctttggcaaaagaacatggaaaaaacaatgttgctttcctctgccttttcatgcttggtaaagtggaagattgcatacagttgcttgtagacagtagccgtatacctgaagctgcactaatggcgcgatcgtatcttcctagcaaagtaccagaaatagtagcaatttggagaaacgacctcagtaaaattaatccaaaagctgcagagtctctggcagatccttctgaatatccaaatttatttgaagactggcaggttgctctaactgtagaaaaaagcgttgcttctcagagggatcattatcctcctgctgaccaatacttgaatcatgctgagaagtcaggcatgattcttgtggaagctttcaaaaggatgcaggtcattgagcatgaggaacctgaagatgcagctgaggaaaatggagaacctgatcaacaggcatcggaagagaaggaaatgcataacacagatgatgctgatgaacatgaagagacagtttcagtaaatgggaacgagggtgaggaacagcaggtgctaactgaacatgaataggggccgagggaagcacaacgcattggctgcaaatgttattttttcccgagggtaacaaatgtggcccccagttttaccctgaagcaccggaaactggtgatgcttgtggccattggaggccacctgatgcttgtccgatctttctgagtgaaccccaagcttgacatattgatgcttgctacacttttggtgtcgatatgcttcttctgccaacaacataggcaattctttcttctcggatcatctgcggacccgatttctatgcgctcgaaccaatgaactgggtggggactgtggagccattttgtgatgaatagttcgaataatcagtatagaggtacgttgtaagatatgccagattaccatagccatcgaattctcctaggagatgacagtttttgttagccattcattgtaatgatgttacttgataaggaaggttacgtgtagtatatgattgcggttgcgggccgagggttttgcccatgttatacttatatatagtggtatcaatccatcggatcggaggctctcgtctactgatgcctaatcaatgccgatgactgcgagaa

SEQ ID NO: 137325 - DNA, 3230 bp, Zea Mays
gtcgctcgccggtcctggctccgcgcctgcgccaccgggttcgcgtcggattcgctccctcttcgccgcgccccaccactccatcgtcgctgggggatctctagggtttagcgcagtcgccggctccacctcgcgccgtcctcgccgccgccaccaccaccaccaccatgccgctcaggttggagatcaagcggaagttcgctcaacggtcggagagggtcaagtcggtggatttgcaccccacggagccatggatcctgtcgagtctgtactcggggagtgtctgcatctgggattatcaagcacaggcaatggtgaaatcatttgaagtttcagaactgccagtgaggtcggcaaaatttatttcaaggaaacaatgggttgtagctggtgcagacgacatgttcattcgtgtctacaactacaataccatggacaaagtcaaagtttttgaggctcatactgattacattagatgtgttgcagtccatccaactctaccatatgtgctgtcatcatctgatgacatgttaataaaactgtgggactgggataaagggtggatgtgcactcaaatttttgagggacattcacactatgtgatgcaggttactttcaacccaaaggatattaacacttttgcaagtgcatctcttgatcgcactacaaagatatggagtttaggttctccagatccaaacttcacacttgatggacatcaaaagggtgtcaattgtgttgactacttcactggtggtgacaggccctatttgattactggttctgatgactccactgcaaaggtctgggattaccagacgaaaagctgtgttcagacacttgaagggcatacacataacatttctgctgtttgtttccatcctgagctccctataatcattactggatccgaagatggtacagttcgtatatggcattcaacaacttacagacttgagaacacactaaactatggccttgagagagtctgggctgttggatacatgaagggatcaagaaggatggtgattggttatgacgagggggccattatgataaaaatgggccgtgaagtacctatagcaagtatggataccggtgggaaaatcatttgggcgaaacataatgaaatacaaactgtaaatattaagacagtcggtgcaggctttgaggtcacagacggagagagattaccgttggctgtaaaagagttaggaagctgtgatttgtacccacagagcttgaagcataatcctaatggacggttcgttgttgtatgtggagatggtgagtacataatttatactgccctggcctggaggaataggtcatttggatctgcactggaatttgtttggtcatcagaaggagaatatgcaattagggaaagtacatcaagaataaagattttcagtaaatcatttcaggagaagaaaactatccgcccttcattttcagcagagcgtatttttggtggggtattgttggcaatgtgttctagtgatttcatctgcttttatgactgggttgattgtagactaatacgccgaatcgatgtgaatgttaagaacgtttactgggctgatagtggtgacctagttgcaatagcaagtgatacatcattctacatcctcaagtacaatagagatgttgttgcttcttatctagaaggtggaaagcctgtggatgaaggtgtcgaagatgcttttgagctgcttcacgaggtcaatgagcgagtgagaactggaatttgggttggagactgctttatctataacaactcgttgtggcgcctaaattattgtgttggtggtgaggtcactacaatgtatcatttggatcgccctatgtacctattgggatatcttgcgaaccaaagtcgagtttatcttattgacaaggagtttaatatcattgggtacacattacttctgagtttgattgagtacaagacccttgtgatgcgtggggatttggaacatgcaaatgaaattttatcatccataccaaaggcacaatacaatagtgttgctcattttttggaatctagaggtatgttggaagaggctcttgagatagccacggatgctgactacaagtttgacctagctgtgcagcttggaaaattagatgttgcaaaggctatcgtcatagaagcacagagtgaatctaaatggaagcagttgggtgaactcgccatgtccacaggcaagctagagatggcggaggaatgccttcttcaagcgaaggatttaagtggcttgttgctattgtactcatctcttggagatgctgaaggaattgaaaagcttgcttctttggcaaaagaacatggaaaaaacaatgttgctttcctctgccttttcatgcttggtaaagtggaagattgcatacagttgcttgtagacagtagccgtatacctgaagctgcactaatggcgcgatcgtatcttcctagcaaagtaccagaaatagtagcaatttggagaaacgacctcagtaaaattaatccaaaagctgcagagtctctggcagatccttctgaatatccaaatttatttgaagactggcaggttgctctaactgtagaaaaaagcgttgcttctcagagggatcattatcctcctgctgaccaatacttgaatcatgctgagaagtcaggcatgattcttgtggaagctttcaaaaggatgcaggtcattgagcatgaggaacctgaagatgcagctgaggaaaatggagaacctgatcaacagtgctaactgaacatgaataggggccgagggaagcacaacgcattggctgcaaatgttattttttcccgagggtaacaaatgtggcccccagttttaccctgaagcaccggaaactggtgatgcttgtggccattggaggccacctgatgcttgtccgatctttctgagtgaaccccaagcttgacatattgatgcttgctacacttttggtgtcgatatgcttcttctgccaacaacataggcaattctttcttctcggatcatctgcggacccgatttctatgcgctcgaaccaatgaactgggtggggactgtggagccattttgtgatgaatagttcgaataatcagtatagaggtacgttgtaagatatgccagattaccatagccatcgaattctcctaggagatgacagtttttgttagccattcattgtaatgatgttacttgataaggaaggttacgtgtagtata

SEQ ID NO: 137326 - DNA, 555 bp, Zea Mays
ggtgccaagaccgtgcgcaagccggtcttcaccaccgtcaaccagttgcgcccccagatgcatggccacactcttgtcgtctgcgtcgtctccgcccacaccatcatcgacaaatcttccatgcacattggtcgcacctgcatcgccaagtgcctcgtcggatacaacaccgacaccgtcctcatcacacccgcaacaattaggatacactcacggtgtgctggtgtgtatgtgtggaggaagagcctgacggaggctaagggagaggaatcagtagagcaaatcagcaagatgagacagatgtgtagctgctggtgtttctccactatcgcgacctcactgctcaagcatggcctatatagagtgacgagaacaccatggaacggagttgtgctgttgtggtgcggagtaggagcgtctaagcgaggagagaatcacaggcgatttctctcattgttgttttggcgtcgtttctaattctatgttgaaacaaagtgtttgtctcattagggcgtgtctcctcgctttttctcgcataagaatccagtaaaaagg

SEQ ID NO: 137327 - DNA, 589 bp, Zea Mays
ggcacaacttttctacgcacaacacattccaagaaccagggggaaaatgtcgttctagctactacactatcatcgtcaggcactcaggccacacgatgcttgctttagcgtctggttctggttcatcgtcttcatcatcccgcaacatttaccacgcactgctgcatttgcactgcaccacagcccgagaactgaacgtactggttctggttctgcctttgcccaacaccagcgacgacagccactgtctgttcgagatctgccgagtcctgtctctggtgaaaatggagagtgaaggagctggtgagcactttgtggaacaagctgatggtagtggccatgttgtgtggacttctgcaatgtccgcttacatgctcagtaacctagcaagccttgtggttgaagggatcaggacatcaacaggcttcaagaaagttcaccttaacatgtgtgctaaggctctaaatgactatttcaagatgaagctcactggagaacaagtgaagaaccatttgagcatattgttactatatttcagcatattacttttacatgtactgttaatatattttagcatattacttttaca

SEQ ID NO: 137328 - DNA, 945 bp, Zea Mays
gaaatgccgcactatgatcggttccattgcagctctcaacccgcccgcccttgccttgggagtgagattggcattccgagaaggaggaggttcatggatcgccatcttgtcgatcgaaaacgagccctcagcttctacgatctccctcagctctttctctgatggcccatacaccggacggcatttataaattcgaaaagctggagggcgttctccggtttgtcgtcggggcgctgcccaaggagggagaacaccatctttcctccgggaaccatctcctgagctcgcaggcgcaggatctgggtgaagtcgctgcgaaactgccgggcataggcctggatgactgcaggacgccgagcacgcctcgccgactcgtccctgtcgtagaacgggatcccgttctgcaccagctcttcagtttgtactgtacgtacacacgcgtggcgtcgtcactgacctttgagagccactgcaagctcgcgtttgagcagaccaggtgaaggctacgcttgctgaagagccgggcgtggaacgagccgggaacgatgctggtcaggacaggagggcccaagctttcttgggctttcgcgtacgtggccaggctcttggttaccaggttgaagtcgttgtttgggaggtcgttgaggtgcacgcagagctccggtggctgccgccggagctccgagcagcggcggcggacggcggcgacggccgtcgacacgagcacaagcgtgtttgggccggaggaacagcccaggtcggcgatcgccaggccggtcgcaccatcattgtcgttaaggaggcttaccacggcttcttcgatcatgggctttaggttgctttgctgcccaccctggacgtacgatagataacagaagaaatgtaaactgttttttttattttgtaaagtaggacaaataataagggaagttttagctttggaga

SEQ ID NO: 137329 - DNA, 241 bp, Zea Mays
caagaatataccattgtattttgctatatatgtggtgcaatgcatgctattttcagaagggttgccacattcaagtatcattctaaaacctctgaaaggacttaccttttgttttcattgagtagttgcattactaacaggacattttcttttttttcatatagtgtctctcgctatgctggatcactactggtgtacgcagatgtaccagggcgagaagatctgcctcaacatgcacttc

SEQ ID NO: 137330 - DNA, 843 bp, Zea Mays
atgacgatagggcaaatactttaccttgaattgcgtcgcgacaacttcagttcacggtgcgcaggagctccacgacgacatctaagcaccggcgagaaattgcccagcgcttacaccaaccccgagcacggtgaggccacgtacatcaccgatgcaccccggcgaaccacccagagcagtccccaagggatcgacgatggcccacgcgagggacggcgtttgcggtacccgccaccatacccgacgatggcgatttcctcttctctttcccggtttcggttcatggcagaagatgggggccctatggcgcgcagtggatccacagcaacgttggtctttggtaatattgcaaactatttgagcctggcagaggttgattccatatatcttccgatccctgtgaacttcatctttattggatttgatggaaatggacggcatgagtttaagttggggcctgaagaactggagcgctggtttacaaaaatagatcacatatttgagcacacaagaatccctctagttggtgaagttcttaccccgttctataagactactgttaagaaacttcatcattatgatcttcctttaatcagccatgtgaaccacaatttctctgtgcatgccatacacatgggagaagatgtcttatctgtttttgagcatgctataaaagttctatcctgtaaagatgatctcgtggattccagattacaaacaccaatatatatgtatttcttgacttctgaattctcatgcaaatggcctgctttatcatttcgatggtgtattgagtttatacaaggaaaagttcaaagattatatggtggattgagtttataa

SEQ ID NO: 137331 - DNA, 2115 bp, Zea Mays
atatgcctcaggccctcagcacaaggcccgtgttcgtgtccgcaccctcggccgaacagttccccgagtccccgactgctctctgtctctctattggcgacgactgggctaccgccgccacaggcgccctacgccaggtgtccaggtctcgggcccttctccggcaccgagcacccaccagcggaatataccatggaggtcaggcccatggtagctctgcgtgccgccctagttggtggggtagcggcatttgcgaagatcggtggggcgatgaaagccgcaggcggtgtcaagattggtgcagccgctgcagccgtcacggctgcaacatcagctgccatatcgggaaaagacgcaaaagaagacacttcaaagccggaaacgaaatgatatgacccatggattggtcgacaagtatgaaatcgcctctccagaggtttagaagagagagggtgccatagtcaataagttacaggagtaaattttgatgctccgtgtgttttttatctcgggaataagaatgacagtacagttttccccagaagtatgattttgtgttgtgcaacagtttcggctgttgaatgcttttagtcacactgtctgaatggcttgatttctgctgtgccacattctggggcgcgatgcatctgtgatctgttgccatattctgtttgcacagggagatcctgaaggccttgtgcagtctcatgcgtaaggcagtgcatctaagatctgcttgccaaattctgtttgcacaggaagatcctgaaggccttgtgctgtttcatgcgtaagatcctagtgatctacatcggcatctgtatatttgaagtatctcaaactgtagaacgctatggaagacattcttatgatatgttgtatgctgttgcgaaaaccatcgtgctatcccctaactaccagtgtcttttccttttaccatattataaggaagagggagaaatagtatctcgtatgggaaccattgctgcggagttaataaaccatccttcctatcatgtccttcctagtgacgattcaaacccaccaaggttgcttttatggcatcttgatccatcaattattaggcttgatctctcagtgatgctcaaggaggggtttgagttgtgtgctagaacttcacaatgcattggtatcatcggcactagacattcttctcaagcctatgccatgaggaatatccatagatttggggcagagatttcccttttcacatgcttacttcctaagccatcaaagaaacttgcttgcaatactaactggacccttatcttgtacatgattattagttttcctgtttggttcagttttgcaactgctttacttttctacagagaaggctcacacgattctttatcagaaacattatccaaagagccaactgctgaatcaataagtgacgtcagtcttgttcagagggcagccttttacctttcttgggtgctatgcccttctaatgatgatcaatgcgagatgctatcaaacaatatattggaaatatcacattcttgggctaggaacaacaaaaagtgcctgagctaccaaattactatgaaccataggaggaaactgcaaatacccacagctgcgaagtcagagaaatttcatgtgccaataaacactgcagctgcattgatagctgagagatgggctttgattggagcatatctcatctttatctggcttgacgtagttgaggatatgtcctcattgatatttggttgcgaagatagatgtcatcgttctgtcagccaactcagaaacaagactgccccataccctgctcaaggttctaggtttgcacggctggctcctaatccagacacccaagaccaccagctgcgcatatatcaagcgaatggactgccgtcttctctgaacacactgctagtgctagtgctagtttcttctcgatacatggttctgggaaatgaagaaagaatagtctactctgaacgctgcacgttcccactgctagtgctagttgagacgccggagcacaaatggactgccgtctgcaggacatcagcattaatttcagcagctgaatttgatatatacctgtactctgttgccgctttgtccctttctgtatga

SEQ ID NO: 137332 - DNA, 1966 bp, Zea Mays
ctcgggcggtgggcaaagctacagccacgtgcaaggcacgccgcgtaggggttcttcttcctcggctcctcgcgccgcactacgccgcatcgcgtcctcgcttggtagatatagggaagggattcggcgggtggtggtggcggcggcggcgagtgcgaaccagtggaggaggcacaagaccctcacgggttttctagtagtagatactagatagtgataaccgattttctcctctagaatcccactcccactcgcgcacaattacgcactcaaagcccggcctcccccaccactagtccaccaccgggaaactttcccccgatctgtcttctcgccgttccgtcggcatgcacgacattggcctctccgcccgcgcggccggcgcgacgtcttgctcctccgccgccgccgccgccggggacggcggcgacgagtccaagacccggaaggcgcaccctagcttcgtcgtctccgcctacacccgcctgcactcctcccaccgcaccgtcgcctccctgctgctctttctcaccgtcgccgtcgctgccttccttgcgggccgcgcccgccctagcgtcgactgcgcgccgccgcgcctcgatgcgcgcttcctcgccctccccgacgccgccgccgcctccgactttggctccctcggcgtcccctggtgcagatcaaaaacagggaagactgtggaatggacgtctaaagacctacttaatggattggaagaatttgtaccaatatatgagacgcgccccattaagaataacgtatatggaatgggctttgaccacagttttgggctttggtttatggctcgctggattaaaccggatttgatgattgagagtggtgctttcaaggggcactctacttgggttttgcggaaggccatgccaaatactaggattatatcactctctcctaggcaccctgagaaatatcttaagaaaggacctgcatatgttgatggaaactgcacttacctcgctgggaaggattttgttgattttggaagcattgattggggaaagctattgagaaatcatggcatttctgatcctgataaggtgcttgttttctttgatgaccaccaaagcgagttgaaaaggttaaagcaagcactaaaggctggattcaggcatctcatatttgaggacaactatgatactggtacaggtgaccattattccttgaggcagatctgtgatcaatcatacatcagaggtggtggacatagctgcttttgggagagtgatgaggcaagactaagattcgaacggaagaagttctgggagaaggctgtggggatagctgatctatgcggaaaggatgatgcatggtggggtgttaaaggttacatgagggacaatttcaaccatagcaatatggccatctcgtacaaagagcattttcagaacagcaggctcgtggaatctgtgttggatatgtattgggagcttcctcctgttgccggcccatccttaacacaccaaacaaggtatgacccagcacgtacagttgacccaatcatcgaagatggtcgctacggcttgttccgaaagaccggtctagcgaggttggatgcctcggtgttcaatggttacactcagatggcatatgtgcagatatcaggttcaatgttgagcacggacgatgtttaaagattttttgtgggtgagcttgtttcgtttttggccaactgttgataggctttttgtacaacactgatgcgcttctatgcttacttagtttcttttaaccttccagaaattaatatttaccagaccaccttccaaatatttatgagggttgtgtttcttgggtaaggtcacttttctgtgaaatttggttctgaataatcacatgtacttctagggcctgcgctacatgcctacattacattagccaaccaatggcttgtgtgctcttgtacggatgtgtgtattatattcagaagtca

SEQ ID NO: 137333 - DNA, 1704 bp, Zea Mays
tctgtccacctcgacagacacctggccaacatcccctcctgttctcgggcgaatcccactcccactcgcgcacaattccgtcggcatgcacgacattggcctctccgcccgcgcggccggcgcgacgtcttgctcctccgccgccgccgccgccggggacggcggcgacgagtccaagacccggaaggcgcaccctagcttcgtcgtctccgcctacacccgcctgcactcctcccaccgcaccgtcgcctccctgctgctctttctcaccgtcgccgtcgctgccttccttgcgggccgcgcccgccctagcgtcgactgcgcgccgccgcgcctcgatgcgcgcttcctcgccctccccgacgccgccgccgcctccgactttggctccctcggcgtcccctggtgcagatcaaaaacagggaagactgtggaatggacgtctaaagacctacttaatggattggaagaatttgtaccaatatatgagacgcgccccattaagaataacgtatatggaatgggctttgaccacagttttgggctttggtttatggctcgctggattaaaccggatttgatgattgagagtggtgctttcaaggggcactctacttgggttttgcggaaggccatgccaaatactaggattatatcactctctcctaggcaccctgagaaatatcttaagaaaggacctgcatatgttgatggaaactgcacttacctcgctgggaaggattttgttgattttggaagcattgattggggaaagctattgagaaatcatggcatttctgatcctgataaggtgcttgttttctttgatgaccaccaaagcgagttgaaaaggttaaagcaagcactaaaggctggattcaggcatctcatatttgaggacaactatgatactggtacaggtgaccattattccttgaggcagatctgtgatcaatcatacatcagaggtggtggacatagctgcttttgggagagtgatgaggcaagactaagattcgaacggaagaagttctgggagaaggctgtggggatagctgatctatgcggaaaggatgatgcatggtggggtgttaaaggttacatgagggacaatttcaaccatagcaatatggccatctcgtacaaagagcattttcagaacagcaggctcgtggaatctgtgttggatatgtattgggagcttcctcctgttgccggcccatccttaacacaccaaacaaggtatgacccagcacgtacagttgacccaatcatcgaagatggtcgctacggcttgttccgaaagaccggtctagcgaggttggatgcctcggtgttcaatggttacactcagatggcatatgtgcagatatcaggttcaatgttgagcacggacgatgtttaaagattttttgtgggtgagcttgtttcgtttttggccaactgttgataggctttttgtacaacactgatgcgcttctatgcttacttagtttcttttaaccttccagaaattaatatttaccagaccaccttccaaatatttatgagggttgtgtttcttgggtaaggtcacttttctgtgaaatttggttctgaataatcacatgtacttctagggcctgcgctacatgcctacattacattagccaaccaatggcttgtgtgctcttgtacggatgtgtgtattatattcagaagtca

SEQ ID NO: 137334 - DNA, 597 bp, Zea Mays
atgggcagcgaggctcgacggcattggggttttgcgacaagacaaagtcaagcacacaaggcgacacgaagatgttgggcaccgactacgacgtgctgggcagagcagagagctaaccccgcgttgcgtccacggcagcacggttcggataagaccacacaagcactagacaagaaaaacgacgagctcaacggcacacgaagctatcaccagcgacgacatgatgatggcaacatggacaagtgtggatcggcgcgggccaaacaccggacaatcgtggtagcgaggaactcgccatggagcagtggagttcgcagctgcgcgcatagggagaatggaacgcgcgtgcagggcagaaatccgagcagagagcttcgcgcctggggaagaaagagactgcgcacgcaggaaggggggcggccatgggcgcggcagagagctttgacggtggccatggagggtctccgagctatggtcgagaaacaggagcgtggcaccagggagtttcacgccgccggagctggaggaggaaggagagtggctgggctgggcgcgccatgggaggactgcgcggctggggaaaaggagcggcgctag

SEQ ID NO: 137335 - DNA, 2403 bp, Zea Mays
gctttcccttcttctcggttccctcgccgccaggcttccacgctcgccccctgctctccattcttcctccaaaaccccggccaaaacccttcgaaagtcgaaaccccgttcgtcttccatgcccccctcgcacgccgcgatgctccgctcgccttcctccctccgcttgcttctccacctctcccgccgcctcctctccaggaaccctctcctccccagctccgcgctctccgcccgccctcgcttcctctcttcgtcctcctcgtccacccccggcggcgcaggatgggccacctacgacccgctcagcgacagcctcagcgcctccgctgcgctctcttccgcctccatctccgattccgagcctcccgctgtgtcggatgcctggggcgtttacgaccccgtcttgggccgcatcgtcaagcaggggtccccacctccttcgtcgtccatcaccgtggaggaggacgacgaggagggggaagaggcgggaaagctcgaggaggagaaggcgggcgtaaaggagaaggggaagaggcgggtgacagcggtcggcgtgaatgaccatgtcaggtggtcgtcggtggcggcggcgcggaggcccgctggtaagggcggcaaggagaggagctcgtacgtgtgcagcaactgcggggagggcgattcacagtggtggggcaaatgccgccactgcaatgcgatggggaccgttgacaagtacgtaggcgtagcagggcctgagagcggtggtgtcgatgtggagtggtcgcaccacatcggacgatcatggatgccccagaaggccaaggaggtggtgccacagagccttcaggaggtgaacaagggggtcgatcaggcacagtggcgcatacctctgtgggggagtttcgggatggagatatctcgagtgcttggtggtggtattgttcctggctccttgattttagtcggtggggatccaggtgttggcaaaagttcattgatgttacagcttgcttcgaatatattggagggtttcaaggccaaggagtcttctcctgttgtatatgtgtctggtgaggagagtattgagcaaattggaaacagggctgaccggatgagtatcacgtccagcaacttgtacctctactctggtacggatattgaggatatcttggacaaaattcaacccctctctccaagggctcttattatcgattcgattcaaacagtttatgtcagatcatttgctggaagtgctggtaatttgtcacaggtcaaagaatgtacctctgccttgttacgatttgcaaagctgactaatatcccagttttcttgattggacatgttacgaaaactggcgatattgctggtcctcgcctcttggagcacatagtggatgttgttctgtatatggagggagagaggtgctcatcccatcgattgttgcggtcagtgaagaaccgttttggttcagctgatgagcttggtgtatttgagatggctgaatttggtctgcaagctgttctgaatccaagccagatgttcttaactgagcatgactctgattctgaaattatggctggtcttgctgtagctgttattttagatggatctaggacctttgctcttgaagttcaggcattgtgtgtttctggttatcatcgttctggacaagtagttggtataccacaaagcagggctgatgtcataatctctgtcctcatcaagcaagcaggcctaaaactccaggataatattgtttttttgaatgttgtgagtggcttcaagttgactgagactgcaggagatctggctatagcagcttcaatttgcagcagtttcttggaatttcctatcccaaatgacgttgcatttattggagaggtcggccttggtggtgaacttagaactgtgccaagaatggacaagcgagtgattgctatttcaaagctgggatacaagaagtgcgtcgttcccaaaacctccgagaagttgctcagaccacttgatattgacattgagatcttgccctgcagcaacctgaagcagcttataaataccgtgtttaggccccaaggttgatgtaggcgtacaagatgcctggtttaggaaatctgacagtaggcagttatttagattagagtattgttgtaggtcaaggacttggctagtttgggttggtgtagcatagtgtggtcggtgccagttagaaagtgcatggggttcattgctgggcttccgttccgttgaattggtgtagcatagtccggtagtgccagttagaaagtggattgctggtgttactctgaaacacagtagggcacacttcttttggttgctttatgtgatgaaataccggacatattctttgctacttcagcaccgtgaacttattggctttttgagttgacttttgtttt

SEQ ID NO: 137336 - DNA, 722 bp, Zea Mays
ttttttccatcgtgtcccctaactgggaaaaaataagaaaaggtacaagccatcgcccatgttttattgaacaccatgtatatgtccacgcatatatgaccatgttctacaggttggtttacattgtatatgaccatgttatgttgcatggcagatatgtgaacaccaaaaggggatgcaactgcgaactgtgagaaattttccacatactacgctcacattgtctggggcaatgggatatcatactcatacagtaatactgctgcctgtcgatcttaacaaatttcattcaagaactagggcatgctaatgttcaaaagagttgtcagcgattcatgacacctggtagcactacaaccagcaatgtatggatgaattgaaggaagtaaagaaggcagacaatcttacagaaactttacagaaactctgcatcttgaaactgccatgattgacaaagaagctggatgcatcatgtgcattggtgtcttcttatcaccatgcattaatgtgaagcaagttcatttgttgactaagaatggatgaacacaaatcagtggagttcgttgcactagagatggaggttggagaggtgtggtaggtgtcaatatggctttgatacaattttgccctacaatctttgtacggaacaagaaaaatgacattgtacgtggatactatattgtaattcaataattttttctaaataataaatatatttgttt

SEQ ID NO: 137337 - DNA, 780 bp, Zea Mays
atggcgaataggaaatcgacaaccgatgaaaccgatagccgaacaggaattgcacagatcgccgatgcgaggcccgatctagtgagcacgacgcaaaggagggcgttgctgccgctgctccgacacgaagtacttgctgccgaggcagacaagcacgatggaggccggggtctgggcatcaagccaacgcatcacgcggtttggaaactacaccacccacacgaagcgcttgccgcagagcaccagaccacgcgccattcgcgcagagctccaaaatcgcgcgccgaactgggagccgacgcgagtgcggcaagtgagataagggggcgcgtcagaacactcaacggcggtgatctgggcgagcgcgacacaggagaccagagagagaggcgcgctgacgaggaagcaggaagtcgtgtcgccggaggagcaggggagatgggtgtcgtacaggggcaggacgagcgcgccagggagctgcgcacgcggcaagcagagagggaggaagatgggcgcatggccatggaagcagggcgcgagctaggagacggacgccgagtagggagcttggctgggacgcgactcccatgggcgggctggccgagcaccgggagatggggcgcgcgcaccagggggagcaaggcgcaggaacgctcggccggacgcggcaagcagagagaaaacgggaggaaggaagaggagcagggcgcgcggcgcaggcagccatgggaggagcgagctgagggagctcggcgcacagaacttgaaccaggacgatga

SEQ ID NO: 137338 - DNA, 340 bp, Zea Mays
ctttgttgtgaatttgtactttagattaaatattcaaaccaaggatgccattatgaaaaggcacttttatttacatattttcttcatattgtatatagggttttcctattcttttatttttctttctttcccatttccaaacattcaagatgttctttaattctcaaatgagttcatttgtattaatatgaatattgttattattaaatgtccataccaataaattctacataatgcaatagatatatgtttattttaattattttatttatttggtggatgcttgaagtatgaaacacactcatattgttttctctctttttataaaaaatagtatttt

SEQ ID NO: 137339 - DNA, 920 bp, Zea Mays
gtctggaaccatcacttcttctgggaatcaatgcaaccagaaggtggtggaggtgtgctgcagcagattgaaaaggattttggctcgtttactaattttagggaagagtttatccgctcagccttacagctgttagggtctggttgggtttggcttgtctgtgagtttctttctattttttctgaagtacatgcaccactgattcaagctactgatttcctgaattgctctttctatagcaagttattcagtgtgcaatttttacgagtttgatcccttgttttccatccactgaataggcattcttcggatacatcggatcaaatcctgctggaggaaccagagagttggaaaatctcatgtctcacaagaaatgcttatcaccccaatgtcatatacgccaagataagctgctgggatttcaccattgcccttggatattgctacaaggaaatcactagtcagcatccagtttgaagacatgcaacaaaacaactctagaagctatggagctggtagattctggagttggcagtgaggcagtgatccaacttgggctttgaagccatggtgctttctctagacggctattatgtctgtagtgttgttagaataatcctggttctgtgttttcataacttcatcatgctagtgttctgttgtagtggaacgcagaatggaacggaacgatattcttgttttactggttgagcactacaccacggttgtttttctagggtgttctggacaaagaaagcttgtaccttaaaacaggaggatacaaaaagctggagtggttgtgtgaaggcttttgaactgcttgaagcattagggtagctctggagcttttgtgaatgatctagctagctatctgtaaatgatctagttgtgaatgatattataattctgatgcttttgtg

SEQ ID NO: 137340 - DNA, 357 bp, Zea Mays
ggtcgctatagagcaaggatcactatcaaatcttatagcctgaacgtacatgtagatgttagtgactaaaaattaattaaaacaagtgaacattgatcgctaaattgcgtggtgatttatttctttttaatattgcttgtatgtttatttcatggtttgtttatgtatggacatgactataatatgcaattgtgttctttgtgcttatatgatattagattcgagttgaaagtcgtttcaaatgtttattatttatttgcattcgtaataatttattcaaatgtctattatttatttggtaaattttttatgattttttgagtaatttaaaaatgcatttcgaaataaaaaaaaaga

SEQ ID NO: 137341 - DNA, 906 bp, Zea Mays
atggcgagcagaggatccactcgcgtggtcctgtgcacgcggctgggcgagcagggcgtggccgacgcgcagggagcagggcgctcagcgcgcggcagagaagagggaagtagggcgcggcaccaggaacgagctgaggaagaaagtgagagattgagcgcgccgtggggaaaggaagcagggcacggcgcgtgcgcaggatggcgcgcgcggggaggagacctcggctggagagagcgcgcagctgagcaggcagctgggcgcgagcaggaagaagacgcacgagagggagagagctggggtacagggagacgagcggccgaactggagcagagcaggctccatggccgagggccagggccgctgggcgagatccgagccggggaggagcgccgcgagagctttccggcgaggtcgcggccaggtatggagttccatggcgcggactactccgcgcgctggaggaaagttccggccaggtgcggccatggggagctcggggcgccgtacaggggcagagcgagctcgctagggaggagaggggctgggcgaccgggcgtcgagccagaggggcgcggctatggcaagggagaagcgccagggagaacctcagctgccatgggagcaggggagctcgcggctgggcactcggcgatagagcaggcgcggctgggggttgaagagaggaaaagctgggcgacggaatcctcgctgccggcctgccgcgcgcgtagatatggatcaggggctcagggcatgggcgacgggatttttcatcccagagcggcggcaggaaatatcaagaggagagataaggagagggacgggagatgcacgtatgggatatttgaagaagagctgggcgtgcaagcggtggaaaaatctctaggagatcttgcgcgctag

SEQ ID NO: 137342 - DNA, 188 bp, Zea Mays
agatcatctaagaggactatggctatttgtctggctatggattcttgtcctgcctggattgcagttgattataaagaagctagagcttccagtcaagcctgtatttccaaggaatttgttaggtgggatttttctaggaagcaatcctggcgactacatgatgcatggccttggagacatggtaggcc

SEQ ID NO: 137343 - DNA, 365 bp, Zea Mays
cgcgcaccggtcctggaggcagcagtgaaccgggcagaggaagagagagagagaagtagggaacgcccaccgcggcgccgccgacgccacacccggccgagccgaaaccgagactgcatcctccttcgcggcgcgccgagatgagcggcatgagcctctcccatcgtctccctcccgccgcggcggcggtggacccctactacgtgtatgcggcgcacccggacccacagcggcagggcgtgctcacgctcttcgtcgcggggctccccgacgacgtgaagccccgcgagatccacaacctcttctcccaccgccccgccttcgatcactgcctcctcgagtacaccggccgtggcaaccaggtc

SEQ ID NO: 137344 - DNA, 1007 bp, Zea Mays
cagctgatatagggcatttacccttttgtgactatggcactagcggctatctataaccttttcatcattaacaaatcaggcggccttatatactacaaggactatggttcagcagggaggatggataccaatgacagtctaagattagcaagtctgtggcattcgatgcatgctatctcccagcaactctcccctacccctggctgtactggcattgatctcttacaagctcataactttgatctccattgctttcaatccctcacagcaccaaagaatgtggtttttgtgctgaccactacatgtgtgggaatacttccattatctgctattactttgcccggtgctaagtagcagtgtttttagctcaggaatgggacaaaatttttcgttgtatgcgaaactggagctccaaacatggaaatgctgctgaaagtgatttatgagctgtacacggacttcgttttgaagaatccgttctatgagatggagatgccgatccggtgtgagctgtttgatcacaacctggctcagatgatccagaaggaccgtgttgcgcttctgggtcggtgaatcttgaaaactcatggtctcagcccttgaaaaccctacttttccgttttcgacgcttggacttgctctgctggaaccctaaattctaccttgcggcactgctgtgctgtgcataaccgataacttgaatagtgtgttgctcgcttgtaatcttcttgcggtgtgatgaaatgtagagctttgcgggcataaatgccgctgcaaatagtaacaacatggaagcagcttttgttcttgcatgttttccctgcaatgagcttgagcagctagatgagggctggtttggtggaagtggaattgaaggggatccatagagaggaatttccttgctatttttgaatagcaagtgaatttctcccatagatcccttcaattccattttaccaaattggttatcagtgatttttcaatgcccttttaccaaattggttatc

SEQ ID NO: 137345 - DNA, 1229 bp, Zea Mays
agcgcatcttacgcttcgtccaggggactctctcctcgggtcttcacattggcaccgggtctatcaccaagctgactgcctactctgacgccgactgggcaggccgcccagactctcgacgatccacgacggccaaccccgtccaccacaagaagatatatggcctgattggttgcccgcatatagtcgaaccaggctcacggtgagcctgattctcgtggtggcagaaaaggcctcaggctaggatctagagatgcgaccaaaatcaatgtatcttcagagccaggcccaggctgtcgcggtgtacagctgggctctcgctagcctggttagcacgaccaggttgcccaggtgcgggcaaccaatcagctgatatagggcatttacccttttgtgactatggcactagcggctatctataaccttttcatcattaacaaatcaggcggccttatatactacaaggactatggttcagcagggaggatggataccaatgacagtctaagattagcaagtctgtggcattcgatgcatgctatctcccagcaactctcccctacccctggctgtactggcattgatctcttacaagctcataactttgatctccattgctttcaatccctcacagggacaaaatttttcgttgtatgcgaaactggagctccaaacatggaaatgctgctgaaagtgatttatgagctgtacacggacttcgttttgaagaatccgttctatgagatggagatgccgatccggtgtgagctgtttgatcacaacctggctcagatgatccagaaggaccgtgttgcgcttctgggtcggtgaatcttgaaaactcatggtctcagcccttgaaaaccctacttttccgttttcgacgcttggacttgctctgctggaaccctaaattctaccttgcggcactgctgtgctgtgcataaccgataacttgaatagtgtgttgctcgcttgtaatcttcttgcggtgtgatgaaatgtagagctttgcgggcataaatgccgctgcaaatagtaacaacatggaagcagcttttgttcttgcatgttttccctgcaatgagcttgagcagctagatgagggctggtttggtggaagtggaattgaaggggatccatagagaggaatttccttgctatttttgaatagcaagtgaatttctcccatagatcccttcaattccattttaccaaattggttatca

SEQ ID NO: 137346 - DNA, 1395 bp, Zea Mays
cgtatttattcgttttcgcagggcggagggccgagcgcccgagccgccttgcaaacaaacccacgacgagccgtcgaatccagcaagccccagcgcagctcgtgcgacgtggcccgtgcgtgtgcgtgccacgcggttcagacgcgccgcgcggcgctgggagagccggccgtcgtctgatcggaggccagccgtgtgcctcgccctcatcctggtgctcgctggagggtggaggctgacgacgacgacgccttgctaatttgcagcagggagagagagagacaccccagccgtccgagagcggtcgggcggctgtgctggtggaccaaaaatagcgagcgaccgtgccatgcatgccgcgcgctgacgaggcgttcggcacggctccgctccgcctccgctccaccaaccgaggattaggcgtcgtcgccccgtgccacaggcgccgcgcccagatcggtgaccggcggctggtgcgcgcgcgcgcgcatggcgttgcccctgcagaacggcctccccggcagggcgccggccacgccaccgccgacgcagctcatggaacggctctcgtcgtcagacggcagcgccgaggcagaggcggatgctgacaggatcccggcggcggtgttcgagcgggacccgtccgagtccaacaaggactggagcatgatgtccacggagtcggtgttcggcctccaggtcgcgccgtccagcgacttcaccggcttcttcctggcgcacccggagctcatggacatcgccacgccgccgcgcagcagcgccgtcatcgacgccgacaacgatgccaaggccgcccctgccatcgtctcgccgcccttcgagagcatcccagagctccccgagagcgccatgaaggggaactactccttcgccttcccaaatttgatagaggacaagaggaactactccaagaagcagtctcatcgagaccaccagccggaagcagcagcagcaacgacggaggcggtcaaggccgcgccagcaccgccagtagttgaagcgaaggcggagccgcagccggagacaagaagcaaaccggaggcaggaaagggcggcttgttctcctgcttcccctgctgctgataagcaagcaaaatgcagcggccagcatgatgtctctgtaaatagccacttgggcgttagggtgcgaggaaatgtgagggtaagtgtaagggcaaggggtttccgggtacaaagatggtgttggaggttcttgcaatgcaaggaagtatatatatgtatgtatgtcgaattcagaatggcttacttgcttcactggcggtgcaaacgatctttttatgtactatggagacactgaacaattccaagtcaatttcgacgcttctataatgaatgccatctacagttcagttc

SEQ ID NO: 137347 - DNA, 89 bp, Zea Mays
aaacaaagctggcatacatggacttgtagtgcctgatcttcctttggaggagacagcgttgctgaggagcaaggccattatgcacaaca

SEQ ID NO: 137348 - DNA, 1479 bp, Zea Mays
cgcacccgctgcccctgctccctctgtctcgcgccgcggtgacaggatccgagaacaccctgcggacgcgtccaggattcaaggcctccccctcccttcccctgccctcaccccctcggcgatgcctggattcacggtggcgcaggcgctggaggcgtccacagggggcgacaccgtgaccctgcccccgttcgacatcatcgcccctccccccgaccaccgtcgatttgtagaaactcctcgcccgtgcttgcttcaccagcgattcggggaggccatgcccccctcgatcacaccccctctctcctcctcaccgcctcctgcctcctccccctcgaccacatctacctccctccgtggcctcgctaccaaggccgaggtcgtcgagatcgacctcaccgaggaagacactagctccttggcccacgcgccgcggtgccgcccctggaccggtcgagaggagcggaaatccatccatccggccgtcggtcggtctcgtcgtctgtcgttggctgtaatgaaaatctgggcctgctagagccaggagttttcgttgcaaatctgcgtgtccgctatgggttcaggcaacttgatcgtgaagaaggtggtaaagcacagctcttttgatctggacattcagctcgataagagttggatggaggacgttacctgcccgatctgccttgattaccctcacaatgcagtcctactgagatgcacatcttatgagaaaggctgcaggccgtttgtttgtgatacagaccagacccgttccatctgtcttgagagatttaaatctgcatatgaactgccttccaatgtgaaagtttcatcttttgccatgcctcctctcgatagcatcattcatattgtgccatcgaacgcaaacaaccgccccagctgccctctgtgtaggggtgatgttattggatggattgttattggtgaggctcggcagcatcttaatcagaagaaaaggtgctgtgaagaggattgctgctcgtctgtcggtaacttcaatgagcttgagaagcacaccaacaaaagcaccaggattcacgcccttcagagattgatcctgctagacaagttgattgggagaatttccagcaatcttctgatattgtagatgtcctgagcacaatacatgcacaagttcccaatgggatagttctgggagactatgtgattgagtatggagatgatgacaatggtgaggactatgaagttttccgcggtgtcaggacgaactggtggtcatgtatattctacaaggcgttttcgagatctttaagaagtcgtagaagagcaagggaaagaaggggcagtggaaggaggattgggaaccaagctaatctagaaaattttaatatcgaggttccaacacaatctgttgaattaagggaaaatagatttgatgaaattgatgatgaatacatagtcacaggggccctcgtctacatcgattaaggtggtcgg

SEQ ID NO: 137349 - DNA, 2826 bp, Zea Mays
atgacattttttcagcaactgaaaagtagccgcaatgagtacctcaaactgaaggcacgtgttgataatttacaggggactcaaaggaacttgcttggcgaagatctcgagtcattaggcataaaagagctggagcacctggagaagcagctcgattcgtccttgaagcacataagatctacaagggaacaaatgttttgtgaagcaaataagtgtcttcgaagaagaggtgggaggggggctccaccacgatggccggggaagcgagcgtcggggaccggggagcggcggacgtggcgagcatcgcggacgcagggcagagagggagatggatggcagcggttgcgcgggggcgggcgggggcacaaccttgcctcttgtggacgcgtcccttccagggcggcgagcaacacggacaccaggcggggaggtggggcggcgaacacggtcggtggctgttgcgtggggaggggtggatttggcgatgctgggcggataggagaatgcgggggagcaagcggatcagacgagggtaacgggggtgggggcaccggggcaggggccatccctcgcatctccaacctccggggcggggatggggcgattttggactacgtcggcgccttcataatgccatgtgggaactgcttctaccgcgttaagggccaagaagatctgtgcgagtctttcttcatgtataatcgtgccaaggggacactctatgatggcgagacacgactgtttctaaggggcaatgggaaaccagtgtacatgtatagtatgggagggcttgcagagtattgtgttgtcccagccaatgcgctagcagttcttcctgactcactgccatatacagaatcagaaattttaggatgtgtagtgtttacctcgtatggtgccctaaggcatgctgctgaaatgcggcctagtgattcggtagctgtgattggagttggaggggttgggtcaagttcttttatttgcaactgtttacagatagcaaaagcctttggagcttcccaagtcattgcggtggatgtccttgatgagaagctccagaatgctacaacacttggagccacccacactgtaaatgcagcaaatgatgatgcagttgaaaggataaaggaaattactgatggtaggggtgtagatgtggctatagaggcacttggtaaggcgttaacattttcccagtgcgccaagagtgtgcgtgatggaggcaaagctgttatgatcgggcttgctgcaacaaacgtaatgggagaggttgatataacccatcttgtccgacgacaggtgaaaatcattggctcatatggcgcaagggccaggcaagaccttcatcagatagtgaagctcgcggagagtggtgccttcaatctccagaacaccatatcaaggaaatgcaaattcgaggaggcgaatggcgcctatgaggatctcaatcatggcaagatctcagcggtgaatctcacatgtcatgccactattttgcgcaacaatgtgaccatcagtggcgtcacaattctcgtgccggtgaattcgcctaacaccgatggaattgacccggagtcttcctcgcgtgtcaagatcgaggacagctacatcgtctccggcgacgactgtgtggccgtgaagagcgagtgggacgagtacgacatcaggttcaacatgccgaaccagcacatcgtcatccggaggctgacctgcgtctcccccacgagcgctatgatcgcgctggacagcgagatgtcgggcggcatccgcgacgtgcacgccgaggacagcgtggccatcaacacggagtcggccatcagggtcaagacgcttggagcaattgctggtgttctgtcgaggaatgagctcgtcgctgcagctctcttcactcttgcaatcaatcacaaacagattttcactaaaataatagataacatgtacttgatgcagtttaacatgatcatgttgatgttccattgggagcataagactatggaagttgagcaagttgctgctggctttatcctgaggaagtttgcagacttggttgggcaaggagtaaaaacggataaagggttcaaggaggtccatgtcaactctgttgccaaggcactaactgaattcagtggccaagaagtcacaggaacccaggtctacaatcctttgaggaagtggcgtcagaaatggatcagggtttgtaggctcaaggacctaagcggtgctcattgggatgagaatacatttacaatcatccttgatgatgaacatctgctgggccatacaaaagacaacccaaaggatgctgaattccccaatgtggcaattgaaaactatgtgcagatgcaaattatatttggagctgggcaggctactggcaagtatgccatggcctcaaatgagccccttggcaccatctcggatgtcactgaaggtgctggtgcatctgaagaaccatgtcttgttggtactactgcttctggttctgctggtgccagcccttctcatagtggtgctggtgctggtagttcctatggatcatatggaaagaaaaggagactcagtgatgaagagttggggattatgacagggcttactggagctgtgaacaaattggctgaagctgtccaagcacctgttgtagtccagaccacagatgtccaccctgatctgtatcaaatttgcatgagtattccaggtttcactgatgaggagttgatgacttgccttacctacctattggacaacaaaaggcaaggtgatggctttgtgaagatggagcctaaacactgtgtgctttggctaaggcagcaccttgcaaagatttga

SEQ ID NO: 137350 - DNA, 104 bp, Zea Mays
gttcagccagtcgttgtgaactcttttctaatcgctcacttcattggccgtgttgtatcaagacatattggatggagtaaacaataacatcagttagccaaatc

SEQ ID NO: 137351 - DNA, 1753 bp, Zea Mays
ggggagggagggagggagagagagaaaggggaccccgatccaatcccagtcctctaaaaccctagcggggagccggggatgaggatccagtgcaacgcgtgcggggccgcggaggcgcgggtgctgtgctgcgcggacgaggccgcgctatgcgtcgcctgcgacgaggaggtgcacgccgccaacaagctcgccgggaagcaccagcgggtgcagctcctgacggactccgccaccgccgccgcctcccccgcgccggccgtgcccaagtgcgacatctgtcaggaggcttctggatacttcttctgcctagaggaccgtgcactactttgtagagactgtgatgttgctatacacacagtgaattcctttgtttcagtacatcagagattcctgctaactggagttcaggtgggtcttgatcctgctgatccagttccacccattgctgaaaagcatgttaatgcttctggtggatcagtaaagcaatcagtgagacatctgcctaggagaagcccgggagttcaattttcagttgaaggcagtgcttctgttccgagcaaaaatgtatcaaatggagattattcaaggcagaattctgttccaacagccagggcagaagtggttgattggactaagaacaatactacaattcagtcagtagaatccccacctaagtacatgtcagaggagagtccaacacttctgcaatctagccagaccacaacagtcttctctaaccaaattaacggcaatagtgatgggacctaccacttgtcattctcaagtggtaatgtgacagacagtctaccagattggcctgtggatgagttcttcagtaactcagaatatgttccaaacttaggcttctccgagcatggttcttctaagggtgataacgctaagctggagagtgctggtggatctctacaatgccgtttagctgaaggctccattgctgaggaactattaggacaggtgcctgggttgatcactgatgattatatgagccgggtacctgagaattcatggacagtacctgaggttccctcgccaccaactgcctcggggctcaattggcatgggaatttgtgtttccctgcatatgacagcacaatgtttgttcctgaaattacatccctccagaactcccaaaatcagttcaccgtaccttcgagtttcaagcgccggagaagagagtattgaggtgacgacaagatcactagatatccactgtccagtttaggccatcttgagaaaggtttcttgctgtaccaaatgacggagaaaggatatccaggactgggttatcattcaaacttcaacagaacaatccaagtagctaggtttgaagtgtgctgcaatgcttcaatgatgttcattttccaaagatctaagcttcgctagtgttggggtcttcttctccgcgaaggccctttaggcaaaaacaccttcagcaagacagtacaaaggcaggtgcaacatgaagatataagccgaagctacaatcaaaagagcttcggtttggtgtcatgctaaagacgaaggacgataccgacttaaagaggaaaatactgtatagcccttggtagtctgtattatgatcataattagttattaatgatataaatgtaattttgttcgggctacggctcgcgcctataaatagatgaacaatatccccgtattgtttacgctgcatggttgttggggacttgttctcaaatgctatgaattaagaacaaggcaacac

SEQ ID NO: 137352 - DNA, 1165 bp, Zea Mays
ggagcagaacgagctggtcgcggcgcgcctcgcctactgctcccccgccgtgtcctcgctcgccgtctactgccgcgaccccaccacgctcgtcagcctcaccccgcactggaggtcccgcctccgcagcgtcaagctcgtgcgctggcaccagcgcccgccgggcctcgacgccggcgcggatctcgagccgctcctcggggactgcccagcgctcagggcgctcgacctctccgagttctactgctggacggaggacatcgggccggcgctcgcagcgcacccggcagcagccgcggcgctcaccgagctcgacctcggcctcgcgggcgccacggacgggttccacgccaccgagctgggagccatcgcgggatcctgccccaatctccgcaagctcgtggcgccctgcgtgttcaaccctcggtacgttgacttcgtcagcgacgacgcgctttacgccatcgccaccagctgccccaagctggcgacgctgcggctccgggaaccttttgagccggcagctacgggccaacgagaggacgcggccgtcaccgttgcagggctggtctccttcttcgccgcgctaccggcgctggaggatttcacgcttgacctgcggcataatgtgctggagacggcgccggcgatggaggcgcttgcccgcagatgcccacggatcaagttcctgactctggggggcttccaggggctgtgcagggcttcatggctgcatctcgacggcgttgctgtgtgcggttcgctggagtcgctatgcatcaaggcctgttcggatctcactgatgccagccttgctgccataggtcgtgggtgcgggaggcttgtgaagttcgccatccacggctgtgatcttgtcacgtcagctggggtcaggaagctagcaacagcgcttcggcccacgatcaaacaagtcagtatcttgcaatgccggcgtctgcacacagcagcatgcctcgctgctctaagtccgatccgtgatcgcgttgagagtcttgagatcagctgcgtctgggaggaagttgaacagccagagagtgtggccaacggcacaactggatgcgatcatgaagatgatgatctcggtggtgaagaaatctcatatgagtccgcatcgaagaaatgtaggtacatgggaattggatga

SEQ ID NO: 137353 - DNA, 942 bp, Zea Mays
atggaggtgctggctagtccaaaccctagagccgacatcgggccggcgctcgcagcgcacccggcagcagccgcggcgctcaccgagctcgacctcggcctcgcgggcgccacggacgggttccacgccaccgagctgggagccatcgcgggatcctgccccaatctccgcaagctcgtggcgccctgcgtgttcaaccctcggtacgttgacttcgtcagcgacgacgcgctttacgccatcgccaccagctgccccaagctggcgacgctgcggctccgggaaccttttgagccggcagctacgggccaacgagaggacgcggccgtcaccgttgcagggctggtctccttcttcgccgcgctaccggcgctggaggatttcacgcttgacctgcggcataatgtgctggagacggcgccggcgatggaggcgcttgcccgcagatgcccacggatcaagttcctgactctggggggcttccaggggctgtgcagggcttcatggctgcatctcgacggcgttgctgtgtgcggttcgctggagtcgctatgcatcaaggcctgttcggatctcactgatgccagccttgctgccataggtcgtgggtgcgggaggcttgtgaagttcgccatccacggctgtgatcttgtcacgtcagctggggtcaggaagctagcaacagcgcttcggcccacgatcaaacaagtcagtatcttgcaatgccggcgtctgcacacagcagcatgcctcgctgctctaagtccgatccgtgatcgcgttgagagtcttgagatcagctgcgtctgggaggaagttgaacagccagagagtgtggccaacggcacaactggatgcgatcatgaagatgatgatctcggtggtgaagaaatctcatatgagtccgcatcgaagaaatgtaggtacatgggaattggatga

SEQ ID NO: 137354 - DNA, 1758 bp, Zea Mays
tcgaaagcaacccaaaactcgcagcaacgaattgggcatattcgccccacctgcacccccacttttggcactttcccttccggccccctctcctcggcgcgatctaaatccggtccggcgatggacggcggggggcagcccccggacacggagatgacagacgccggcttgggcggcggggggcagccgccgccgccgccgcagcagccggcgggcggggccgggatgatggagaacatccacgcgacgctcagccacggtggccgcttcatccagtacaacatcttcggcaacgtgttcgaggtcacctccaagtacaagccccccatcctccccatcggcaagggcgcctacggcatcgtctgctcggcgctcaactccgagacggcagagcaggtggccatcaagaagatcgccaacgccttcgacaacaagatcgatgccaagcgcacgctccgcgagatcaagctgctccgccacatggaccacgagaatattgttgcaataagagatatcatacctcctccattgagggaggcattcaatgatgtgtatattgcctatgaattgatggatactgatctgcatcaaattattcgttcaaatcaagctttgtcagaggagcactgtcagtattttctttatcaaattcttcgtggcttgaagtatatacattcagcaaatgtccttcaccgtgacttgaagcctagcaatcttcttttgaatgcaaactgtgacctcaagatatgtgattttgggcttgctcgcaccacctcagaaactgattttatgactgaatatgttgtcacaagatggtatagagcaccagagcttttattgaactcctctgaatatactgctgccattgatgtgtggtctgtgggctgtatatttatggaactgatggaccgaaaacccttgtttcctggaagagatcatgtccatcagctacgtctactaatggagctcattggaacaccgaatgaggctgatcttgattttgtaaatgaaaatgcaagaagatatatccgccaacttccctgtcatgctagacagtccttccctgaaaaatttccacatgtacaacctttagcaattgacctagtggaaaagatgctaacttttgatcctagacagagaataactgttgaaggcgcacttgcacacccttacttggcatcacttcatgacataagtgatgagccagtctgctcaatgcccttcagcttcgacttcgagcagcatgcattatctgaagaacagatgaaggatctgatctaccaagaggctcttgcattcaacccagattaccagtagccaaagttcggttccagccgggtgattgccttcattgacatggagatttttatcccacctgatgtcactgcaaaaagtccccaactccgattgctagctgtaaataattgccttccccgaagaccccccattccttccttgattaaaaaaaagcaggagacggtgccattcaagggtagaaaagagcgagcttgtgaaggtcaaatttctgcgcagctatggattcttgtgcttacaatatgttgtttttaatcaggctttcctttctttttcttcttaagtacttctcggtgttgtctgtaagagaggtagctcatgaacgatggctgcctgaattcagtggctgtcgtcaaagttaacagttctagtcgacttaagaattcttgttttatctacttcattgtttatataaaaggacctgtatctccgacgttgcctgcg

SEQ ID NO: 137355 - DNA, 314 bp, Zea Mays
aagaaaaacagctaaatgacatttcttttatttctctttacagaacccacgtcaatcgttacagttcgcaagatcaatgcccactttatccggccggtttcttctggactcagctcaaaaaaaaaggagaaaaaaaagcatccctgcaaaaatccctcgaactcgaatcctagtttgccgtcgcaactcttgcgaatatctggattctgcatcagttctcttacttattatggatccttattaaaaaaaactagaaaaggatcaccgatatttgttggatggacaaagcattgtgttctactctgctccaacag

SEQ ID NO: 137356 - DNA, 116 bp, Zea Mays
ttttttttattttggccaccaaactttttgtggtaggttcctacactatgtagacctacatgtaccattttgggacaattataacattgttttcaataactagtagatttagttcg

SEQ ID NO: 137357 - DNA, 653 bp, Zea Mays
cgaagatttaatccagaatggtttaaagaatatggtggttggcttgagtataatgacaaggttcataaggccttttgtttatactgctacctttttagagattgtaatgaggataagctaggaatgatgcagttgcaattaatggttggaatggttggaacaagaaaagcagattagatactcatgtgggcaagggttatgctagaagttttcataatgttgcggtaaaaagatgtgatgctttgatgaatcaaaatcagtcaattgaggttgcttttgatagacaaactgatcttacaaaaaagaagaatagaatctgacttaatacttcaatcaattcagttagatacttgcttcatcaaggcttagctttttgaggtcatgaggaatcaaaagagtcaaaaaataagggaaactttcgagagctggtgaatactttagctgatcaaaatgatgttatacagcaaattgcaattgtgttaggatatctcaacaagcaaggacttatcattgaaagtttagttggagttgtacatgtgaaagaaacatcagcaatatgtctcatggaagctcttcaaaaattattcactgatattgggttaagcataaaacaagtcaggggtcaatgttatgatggggcaagcaacatgcgt

SEQ ID NO: 137358 - DNA, 819 bp, Zea Mays
tcagctgttgctgctaaagaaagtaccttactcaacgagtacagagaactcttggcaacagcagcagcactacaggtccaagagtcgagcctaaggacacagctcatacaagaaacagagtgaacaggttaaggtcctgtatttctaactaggaagatagaagtaaacaccattcgttagtttcagtgactgctgcatatgtgtacctttgatgtcgttttgtttttcctttgctcttccttttcccccccacttattagctagctcatatttctttacatttctactcccccccccccccctgttcttttctgttcgaacaacttacatggaagataagggaagcaacatggaaatggaatcatggatttactccatgacaaagctgccaatgtggtcttttattgcatcctagaccaatgagccaaaaactgaaagctttgttgtaagctgtaaatctgagcagttatgtgtccttcagtgtaatgcctttggatgtatctttcttagatcgccatcactttagaattagaggctccagctaacagaatacttactattagtgctggtccaagatccaagcaaggggagaccagaaacctctaaccgacactacaacatgacaggtacccgataccgacttcgtcgctaacacttgtaagtactatatgtcctgccaggagaataccatgttctgttcttctccacttaactctgatggaaacatgtttccttttcatgccgtgttgttggcatacatcaagttgttttcgccattgctttcatttgcatgtgcaatgctgccgcacatgcaagagt

SEQ ID NO: 137359 - DNA, 2123 bp, Zea Mays
cggggcgcgtccatccggtccggacacccgagtacccgacctgcttgctcatcgcgcgcacccgccaaagcaaccaaccgccccatcgtccccgtcctgttccggcaggcagccgctcccgctcccgctcccccaccccactccccctcgcgcggcgcgttctcagatcccccgcccggttggcaccggcaccccggtccgaaatgcgaggagccttgtagcgcctcggagcacggacggaatcgcgccgcatgcatcccaagcccgagggcggcggcgacgacgacggggccgccgcggaggtgggctccccgcggtccggctacttccggcagcggagcatgcacgccgccgccgccgccgcggatccggaggcggcgcgccggccgttccacgtcgagaacccgccttgctccgccggcggggggctgcggcccagcgagtccgtcaccaagctggagtcgctggagcgtgccgcgctggcgcccgccgtggtgctcaggaccgggttctacatcctggtgtggtacgcgttcagcacctgcctcacgctatataacaagacgctgctgggggataagctcggcaagttcccggcgccgctgctgatgaacaccgtgcacttcgcgctgcaggcggggctctccaagctcatcatctggttccagcccaaggggcccgaggccgccgtcgacatggggtggaaggactacttcatgagagtcgtgccaactgctctcgggacggccttggacataaacctgagcaacgcgtctctggtgttcatctcggtgacgtttgctactatgtgtaaatcagcctccccgatattcttgttgctctttgcttttgcatttaggttggagaatcctagcatcaagcttctaggaattatagttgttatttctactggagttctgttgacagtttccaaggagacggagtttgacttctggggcttcatttttgtgacgcttgctgctgttatgtcaggattccggtggtccatgactcagattctgttgcagaaagacaattacggcctgaagaatccgattaccttgatgagccatgttacaccagtgatggccatcgccactatgatactatctctattactggatccttggagtgaatttcaaaagaattcatattttgatagcccttggcatgtcatgcgcagttgcttacttatgcttatcggaggatccttagcttttttcatggtgttaacagagtatatacttatttcagcaacaagtgccataaccgtgacgatagctggggtagtaaaagaagctgtaaccattttggttgcggtattttatttccatgatgaatttacttggttgaaagggtttggtcttttcaccattatggttggtgttagcttgttcaattggtacaagtatgagagattcaaaaggggtcagataaatgaggatgacgtcagctctccatttactggtgacgtcaagtacattattatagacgacttggaatatcagaatgaatttgaggaagatacataattctgtaatacagtgaattctaactgccactggcttgttcatgcctgaacctattgaaatagtagttacttatcgaggttttctccggaaaacatgcacgaagaacacagctaaggctaggtgtgattatactatgcacaccaaaatctgatgtgagctatgtttgtcacgatggatgttcaattctcgtcttggttgaacagccaggctgactacactgtcaagcaaagagctaactccatcggatcagaattcccattttgagaagactagcagtgggttgcatattgatatacatgcttatagcgggaactgctgagaatgctccggcatctgtatatttgttgttctcttcgcgttagtgcgctgggcgcatattcattcttgaacctccacatttttagtgacgaggtgtattcattctctatataggtctgttttgtaaatgtgaccagaggataccatacacgtgctgttttcccttgaaacctagggagcggcatttgattttttctgtagactgtttcggggtaccgaatatgttgtggatatttgattgaagaattaagaacagcagggtagattggctaa

SEQ ID NO: 137360 - DNA, 99 bp, Zea Mays
tgcatagggcaagtaatgcaagtgatagctatgtcaatttacccctattttcttgggcatcacttgtctcaaatgaagtccattggaggttcgcaattt

SEQ ID NO: 137361 - DNA, 2007 bp, Zea Mays
gatggtcactctgataaatcaaattgtatgctgtcatttccttgaattatactagaataaaatcagaagctcacaatgagatttattggtctaaagtgaatcagaagttagttcacataaaaaactatgaccatgcagttacatgtgttgcatagctccagaaggtggtagcacaaatcccataggcccagtaacccatccataaaagttttttgattgattgcttgattccctattctcacttgtaggttttgagaccgaacctatatgtaccaccaaaacaatatcctaattgcaaggaaggtgaccttcctctcatcatcgcgattgactagcaaccaatggccctgataggtgttatgcaagtgtagggcgacatcactaatgctcggacaacggatgtggtgagacggacgcaaaagaagtataggtttttgttgctgcagttagctggctgtgactaattagtatggatttggtgtcatgttattaggcatttcgatggatgcaaagcagacttggttgtttgcgatggaggcttcggatagtaagatatcatatgagtgcaagagaactactcccaccattaactataacaaattttgtcaccagtgaggattacatgattactgctcttttgggtgactatagttactggccaccctgatatttgatacaattgatctttttttatctcatgctaaagaaatttggtggctggtggatctgcttaagaatcaaaagtcagacaaggtggacatcaccatccaaccggaggagcaggaagccatgaatgatgttctagcagccagattccagggcgattcagcgcatgctgcacgcaccaggtattttaaggggtcacacttgcttgtttcatgtactagcacaagaagagaccgtaccacttcctcgagccaaatcgccagcaatccaccatggctaaaccagaggggccaaccattggcgtgaagctgtttgtggacaaagagaagaaggtgctctttgctgagtccaacaaggagttcgtcgacgtgctcttcagcttcctcaccgtgccgctcggcaccatggtccgcctgctggataagcagtctcagttgggttgtctcgaccagctgtacaagagcgtggaggacctcaacttggagtacttccaaaccaatgcttgcaaggcgatgcttctgaaactgctcaacgcggcttccggccactgctgtcgcctcaagatcaacgtcgatggaagcgttccaagggtggtctatgtctgcaaggacacgcggtgcagcgctctcagcgacaacgcgttcagttcgttccctggcacggtctgcaaatgtggtaaggtcatggagtccattggacagttcccaaaatacgatggtgacactgaaaccgccgccgccacttgttcagaggatggagtttttgtgaaaggttgcttgaagtttatcgtcactgatgatctccaggttgcgccagcatctacctctcttatgatgtctgtcttcgagaaatttggtgtgcttgatccagctgtcctagagcagcaggttctgcagttcagttcagaaaagataacatgcttgctgaagagattgttgacgtctaagtaacctctcactgaccattatttcgaagctcctgttccataagatgatgcaagcctagaagtgcttgttcagaacttacatcctaaacaagaaaacgaggaccaggtcttgtgtaactgaatcttggaacaggttatggagctacagagggctgtcctgctgctgagtcgtaccacactcagctccgtgcttctgcatcctaagaagaccaagaatctgcaccattaccatcgcgtgtattaaagccgtcgttgttgctttactctatgattagccacaataataactatgtatgtctgttttcctgctggatttgtaagtttcattttggccactgatatttggtaactattataacagttcgagcatataataaatataaacatttgattcg

SEQ ID NO: 137362 - DNA, 2389 bp, Zea Mays
ctgcctcctgcctgcatcccgccggtggacgcaccccgccccgcatcccgcgaccttcttcctctgctgcctccacgggagccttctcacctccacacgttgttgcgtcagatccgtctgccgctagagaaaaccctacccaatgaccacatgcattcttactggggcgacgccactattggcgcagaggagccgatatggcgcatcgcatgtactccgtcgctgccctcctcgactccgcctctttctccaacgccacaggcaaggagatgcctgcccaccgccccggcaccccccgccctcgccgcgcacacccccaagccccgcggatcacagtcgcctctaccctagcgggagccgcgcccgcacccacattacccgcacgatggcaagaggcagcggcacaaggccacggcgactcctcgagcagaggaacctgaccgagcgcagcaacgcaaatcttcaatctcaaatccctgctgcgagaaaagagagctcccacaagtggtatggctcgatagaggttatttggatctgtgatgcgatagaaattcatgggtttttaggatctgttgtgtatatgcatggtttaaagataggggtgacgagtagccgcgggtggctgagcatttgctgtcttgcatcagggctgaaggcagctgcagggattacgtggctataaagatggatggctcgagtattctgcgacttctttagagtaaagtgctttcggcaaggagaactgcagtgggtttgctcatggaactggtctgcttaagaaggagagaaatggttgaattgctcctgcatggatcgagagcagagtcggtcgtggaggcaatggatgtgctgttggagtacctccggagcttgctcgcagaagaacaagccccaatcgccgttctactgatgtgtttggatgcattggtggagccaaacagaaacagcacgtacagagaagaggcgatcaagaccatcgcacgttctctgagatgctgcctgccagaggacactgccgtgcccagcactcggagagctctgctgctgcttctcaggcgaccttcacgcagaggactggatgctggaacatgccggcttcgtcgaccattcacgggccaccactgccacttctgatgctgttgtacacgacaaggaagcggccgaaaacgatgcgtggctgagacacgtggccgcggcgctactcggcagccgtagcaggatcaggagaccgttcctggaggcgctgtccacgtgcctgggctcccccgacgccgacctggtgggggcgtgcctgacgatggcctggtggaggttatcagtgagaaagtagatatctggataaaccacctcttcagctatgattttgcactctggttttatgcaaatgttgcctatcatattattgaattgcaattattttttttgtactggttaaatactaatagtgccatgagttaacgttagtgtttgtgattttttacaggctattgggtgtctcttgtatagaatctgcactgaatattaactgttggttatgattatggaaggtcttgttttcagctcatgaatataggtttcaaattttagttgtttttttattaggatggtcgaatataaaagtaactgattttattgtatgtacctgattaatctaaaagcattgaaataattctgctcttggctcgagtatgtatctgaagtatacagagaaatggaacgtgctggatgcgctccagatagaaaggctagagaaatgtttcatataaaaaaatttactaccgtcgcaacgcacaagcacatacctagatgagtctgtctgttactgtgaaaagctacatacaaattataattgagggcacattttcattactaatagtttttttgttttccttctttttttacctgaggttacaaagggtgcagggtattctccacgtcagtgtgtccaataatcctaaacaaggcaatatgtatttgctctttattatcaattcatgtgaaaatctgaaagaacgtggaacctaaaactattgtctggtgggctggtggctgattttcattcaattgggctggtacacctctgttttgactcccatacaccaagaatcgagggcgcctgcatccgtgggagtaagactctccggctttgaaggaggagacaaaggccgaagggcagacacattgccttctgttcatgctgcttgatgttgaaacaccaaccactcaccagtcatttactctctcacttgctcattggatcatgtgcaccaccatagttagaaacctttatgtcatagttagagcaatgcattgggattttttttgctatgcacagaatacttgtatttggatctggcataattacaatcatcctgtcatcatcagtttc

SEQ ID NO: 137363 - DNA, 1004 bp, Zea Mays
atgaagggcatggtggactctctccgcgacctcggcgagccgctcgccgatcgtaccttggtgctaaaccttctgcgtagcctcagcccccgctacgaccacctgaaggctctcatcaagaggatcgtgccctttcccaccttccaagtcgtgcggaacgagcttctcctcgaggagctcaccatggtgactgaggcacccgctccggccctggccctctacaacgctcctcctggcggtcaggcgccttcggggggtaggcccctcaccctctgtcaaccggggctcctgcccgccctcctcccgcggtccctacggctcctcgtccggtttccaccaccgacggaggtcgtcgttcccacaagggcggccgcgagggtggcggctccatccgtggtggtccctcctaccgaggtggcggccaggcatggccgtcattctacacccgtagaccatggccatctccatgtagctgggccaggccccgagtgcctcccgtcttctggcgctggccctcctgacagcacctccctacagcgtgcctcctcctacgcctccctacgatgtgccaccgacaactctggcaccgccccagcttcggcccccatggaccaccacctcaacgccttggttcccactggctggaggatgggaccccgcctccctcactgccgccttcagcaccatggcgatgaccccacccctccgactaggtggaagacttcggagcttcctaccacaccactcccactgcaagcatgctctcttgatcccatcccatctattccgcccacccctcctcgattgtcgttggaaatggtaccactctgtcagtcacctctgtaggtgcatcggttctccctaggccgttctatctcaatggcgttctcatagcccctaacatcactcataatcttctttctgttcgtcggttcaccatcgataactcttattccattgagtttgacccctctggtttttctgtgaaggatctggccaccagg

SEQ ID NO: 137364 - DNA, 185 bp, Zea Mays
gcgagcgccgtcccgtccttccccgtgcggcccaccttctgtaagagggtcctggaccttccttttataggcgtaaggagaggatccaggtgtacaatggggggtgtagcagtatgctaacgtgtctagcggaggagagctagcgccctaagtacataccatcgtggcagccagagaggttttgg

SEQ ID NO: 137365 - DNA, 99 bp, Zea Mays
tttggcctttaccattgtctctcttgtattgtgtacacatctaaaggtgcaacaggagagcacgtgctcgaggacaaatttattttctccacaccatgg

SEQ ID NO: 137366 - DNA, 645 bp, Zea Mays
atggggaacgttcctgaggattccattgaagagaagctggaccgcctgctcgcccaagtctccacgctcaacacgcacatggcgctgcacgatcaacggctcgcgcgtatggagcagctcgtcctgccggggaccgataccgcggccggccttcacggcacccagcagagcgcgggcggcggtcacactgacaaggggggcgccgccaagatcgacgcggatcctctacaggagtctgatggatcccccttgccgctcgaccgtcgtctccacgatcgacgtcgcgccacgggggcgccttctgatgacaacgacggcagcgccaccgacgactccctcaacaccgattggcgggaggaccgccgcatctccaagggccggcggggcgctggacgggaggacgtccgtccggaagacaggcgcagtggggatttccgtcaagaggaccggcgcgctgacagtgaagcaaatgtgttacccaggacaggcaagatttgcttgcagacatcaaggaagggcttggtgagaatgactccgttctctgccttcacatgcttcatcccttccaaagagggggtgaacaccgtctctgccatctatgaacctgaaagaatcaacaaatatatcaacccatcatcccaatga

SEQ ID NO: 137367 - DNA, 964 bp, Zea Mays
gacgggccaccgatccaagagcgagccgacgacgacgagcagcgagagagatgaggccgtccatcgtgctgttcggggactccatcacggaggaggcgttcggggagggcggctggggcgcgtcgctcgccaaccactactcccgctccgccgacgtcgtgctgcgcggctacagcggctacaacacgcgctgggcggcgcgggtcgctggccgcgccgtggccagcatcgccagtccggtctctgccgtcaccgtcttcttcggcgccaacgacgccgcgctgcccgaccgcgcctgcgcgctccagcacgtgcccctcgccgagtacaaggacaacctccgcgccatcttcgcgctcctcaagaagcggtggccgtcggtggtcgtcatcctcatcacgccgccgcccgtcgacgaggacgggcgtctgcggtacccgtacgcgcacgacttctccggcctgccggaacgcacgaacgcggcggcggcggcgtacgcgcgggcgtgcgtggaggtggcgcggcagtgggggctcagggccatcgacatctggtccaggatgcagaggttccccggctgggagaagtcgttcctgagggacgggcttcacctgacgccgcgcgggaaccgggtgctgttcgaggaggtggtgttcgcgctcaaggacgccaacctcagcctggaggcgctgcccgccgacctgccgctcttcagcgacatcgacccggataacccggtcaagtcgttcgaggaccaggagtgaagaaggcccatgatggcaagacaacggcggcggcttcaagtctgggaactctattgttaattagaaaaaaaattctgggaactgtgtcctacagtgcatggaatgttctggatggatttttttagtcgaagcataattcttggaatagtgtcttacggttagcagtttgctactttgctgtataagtttgttcgaggtcc

SEQ ID NO: 137368 - DNA, 675 bp, Zea Mays
cggggtcccggtacggcctcgcctgtctgtcccgctcgtgacggcatttgtttaggtgccggatctcgcactgagggggcactgctcctgcacgttgcccacgcgcgcccgagcacgagcagcattgaattgacgcgcgggaacgagacgcggcgctgctgctcgtcccgtgtgcatgtggtctcgtctccgtctccctcacactgactcggtttcctctttggcgccctcctcggctcctcctcgtgcgctgctgcagggttcagcacggcgttccagacgtgctgcgggtccggaggcggcaagtacaactaccagaacagcgcgcggtgcggcatgccgggcgcctccgcgtgctccaacccggcggcgcacctcagctgggacggcatccacctcaccgaggccgcgtacaagcagatcaccgacggctggctcaacgggccctactgccacccggccattctccacagctaaagcgacaggggggcccaattaattattaattattattatttgttgtttacgttgccgggagagaaaaacaaagtgtctcagcaactgcatgcatgtgttcctggtccctcactgctatgacttacagagtattatatattagtactatgtatactggtcctcatttacaaatcaaatggtatagggttttctatttaa

SEQ ID NO: 137369 - DNA, 2013 bp, Zea Mays
gtctgctaccaattctagacatacccctgcccagtcgctctgctttgagagagagcagcagcagcaactgaaagtaacctcacagtcacagcacaagtcgagcaaaactgcaagagcaaatcctccagggcacgggactgacggctgattagccggctggaatgctcccgtctctcgccatcattccgcccagggctgccgcctgattggccgtcttcgctcggaaccgaccatcactgcccatcggaaaggcgccctccacgcaaaaccacatggaaagtcgccggtggatcgcaaagcggttgctgaaaaggcccggccacacagcgcacgtcctcgccggcgctcctgccggtgccggtgccggtgccggggctaagtaaccaccggaacgggcgcgcgacccgtgtcgggtcggccgcgttcgtttgattcggttataatagagtattagtttattactaaatgaaatgatggcatgcatgtggttagccaggttgacagaagtcacagaacgcactgctcgactctagctgttccaggcggcgagacgcaagcgcaagcgcaagcgttttgttggcgaggctacaaaaggctgctccaggccagccgtctcgttccagttccattcaagcgcactgctggactccaactcgactgctctgcgtagcggagtaggctgatcagaggcgagatatgaggagcggccggcggatggcggcagctctggtggcgctggcgtgggcgctcgcggctgtggctgtggcggcggcgcagaagtacaatgccatcttcaacttcggcgactccatcaccgacacggggaacctctgcaccagcgggaggccgtcgcagatcaccttcacgcagccgccctacggcgagacctacttcggcacgccgacgtgccgctgctgcgacggccgcgtgatcccggacttcctctgctccaagttcgggctgccgttcctgccgccgtccaagtcgacgacggccgacttcaaggagggcgccaacatggccatcaccggcgcgactgccatggacgcgcccttcttccgctcgctggggctctccgacaagatctggaacaacgggcccatcagcttccagctggagtggttccagcaggtcgcgtccgccgtgtgcggcggggggcaggcgcagcaggccgactgcaagagctacctggccaactccctgttcgtgttcggcgagttcggcggcaacgactacaacgccatgctgttcggcaactacagcgcggaccaggccagcacgtacacgccgcaggtcgtggccgccgtcgccagcggcgtcgagaagctggtggccatgggcgccaccgacatcgtggtgcccggcgtgctccccatcggctgcttccccatctacctcaccttctacggcacctccagcagcgccgactacgacagcctcggctgcctcaggaagttcaacgacctgtccaccaaccacaacaaccagctgcaggcccagatctccggcctccaggccaagtacaagtcggcgcgcatcatgtacgccgacttctactccgccgtctacgacatggtcaagaatccaggcagctacgggttcagcacggcgttccagacgtgctgcgggtccggaggcggcaagtacaactaccagaacagcgcgcggtgcggcatgccgggcgcctccgcgtgctccaacccggcggcgcacctcagctgggacggcatccacctcaccgaggccgcgtacaagcagatcaccgacggctggctcaacgggccctactgccacccggccattctccacagctaaagcgacaggggggcccaattaattattaattattattatttgttgtttacgttgccgggagagaaaaacaaagtgtctcagcaactgcatgcatgtgttcctggtccctcactgctatgacttacagagtattatatattagtactatgtatactggtcctcatttacaaatcaaatggtatagggttttctatttaa

SEQ ID NO: 137370 - DNA, 524 bp, Zea Mays
cctccctccagctcatacgtatatcagattgccctgtcttgaagaagaactgctaagaacctgatggggaaagctggccaaagatttcacaccttcgctggaagcacatctactaataccaaacttgcttctttagacttgccacttgaaataaatgagaaggcacctcgatgttaccccaacgcgacgctctctcctcttgaagctccagagtttaggaccaagtcagaagccaatgcgtcagctaatgctgtcgtcccagtggttccctgttttttccgcttgcatttgctccgctatttcacttgttatatcattccttgattatgaacaattgccaatgtgtatttctccgacagaatgaagtaactaattgtggctatggcttttacttttcatgtggcagttagtcctacgagaggctaattagagtatggaatgtctcatacctttactatgtttcttagaagaaagtaagaatattgggcaagacatgtttctaaattaaatttgtgcttccatcc

SEQ ID NO: 137371 - DNA, 296 bp, Zea Mays
ttctgcaacattgattccgccgtattgttaccggaaggatgggtaggtcgctcgtgcccgtctgcgccgctgcgtcatcgatcgtgcttgtgttattccagaaggcatggtgattggagaaaaacgcagaggaagatgcacgtcgtttctatcgctcagaagaaggcatcgtgctggtaacgcgtcaaatgctactgaattagggcataaccggagcaataatgcagttttacagtatgttccagagcagttcccccctgcttaaaacccggcgttctggctgatgctattggggg

SEQ ID NO: 137372 - DNA, 263 bp, Zea Mays
gaaagtcaagtagtgcccaggaaggatagctttcagtatttaggatcaatgctaggtactgatgaaaacattagctatagaaccatgacagggtggatgaagtggcgccaagcatctaacgttctatgtgacaagatagaacactggcattctatgtgacaagagggaaccacgaaagataaaatgcaggttttataggacaaaacctgctatgttatatggtgcagaatgttagcctacaaaaaatgacatattcaacagat

SEQ ID NO: 137373 - DNA, 640 bp, Zea Mays
cagcttattccatcatgagtgaacagcttgggattttgggcgacaggtatgcctcaatgggggttttgggccgcgctccccgcggatgcggcgggcgagctgaatgtccttgggcatgatggtgacgcgcttggcgtggatggcgcagaggttggtgtcctcgaagaggccgacgaggtaggcctccgcggcctcctgcagcgcggcgacggcggaggactggaagcggaggtcggtcttgaagtcctgcgcgatctcgcggaccaggcgctggaaggggagcttgcggatgagcagctccgtgctcttctggtacttgcggatctcgcggagcgccacggtgcccgggcggaagcggtgcggcttcttcacgccgccggttgccggggccgacttgcgcgctgccttggtcgccagctgcttccgcggcgccttgcctccggtggacttgcgcgccgtctgcttcgtgcgggccatcggtgtggtgtgggagcggaggtgccggtggagcgtgtttggggtttgggatcggaaacaacaagagcggcgacggcgtctttgggagattttggagtggcagattcgggtgcgtttttaagcgctggggtttggggagttggcgcgcggctttgaaatttta

SEQ ID NO: 137374 - DNA, 1832 bp, Zea Mays
cgaaaatgaacggaaccaccggcgaaccgacctccacggagactaacaagaagcagccgaccggcgaaccgacctccacggagactaacaagaagcagccggccggcgaaccgacctccacggagactaacaagaagcagccggccggcgaaccgaccaagctacgccccggtggcgtgtcgtcggcgccaccgtacgagtcgatgctcaggtccacgatgtacgagcggttacgcgcgcagcacccggcggagttcgaacccgcgagcgtcttcttcacgcacgatgagcggagcttcatcgaccggcgcaaaagcttgcgggtgaaggccgcgctcgtctacgaggccgtcacgggccgtcacgaagacgacgaccagatgcagagcgccaaaatcctactcctggctctcgccaagaaatgccactccaaaatgcacccagaaaccgccgtcgtccatggtggtggtcgtggtactggtactggtatgtatgtcgcccaagcccaaccatatacgtctatcgtcatgccatgcgagtccaatacttattgctcatcgatcttccctagctagtcgatcgtgtgtatctcttcatctctactccgccctacacgcagctggagaaacgggaggagatgccgccgacgaaactggctgggacgataagatgatgcgcgtgctcgacggcatcttcctcgtcgtcggcttcctgccaaagctcaacgaagcgatcagcagcagcaacgccgaccgcgactccgtcgaccagagcttcaggtcgcgccacatgctcgagatggtcgcggacgtggtcaagctcgagaaccagctactctggctgcaggacctgctcgatgtggcaggccacatcgaggccgtcatcaaggagaccgtcgagcaacacgatttcagggacgtcaagaaagccatgggacgcgagtacaagcaggaggtgacggcgcagaacctcgccgacgtcatccaccgcttctgctggtactactcgcccttcgccaccaagaagcccgccccggacagcccgttcaaggacgtcgtggccaacaaggagatggcggcgaagcgcacgctcctggactgcctgcacatgagcgtggtgaagccgtcgtcgcacggcaagggcgggagcggcggcatcggcaggccgtctcgcatgccgacggcgagggatctctggcggtccggggtccgtctccaggcctccgagaacggccgcgccgagatcgagttcgcgcagccgacgctgtggctgccggccctggtgtacgacttcaagctggccacggtggcccggaacctcctggtgctggagtacgacgaggagcagagcaagccgatcacgcgctacttccagatgatgaacgagatcgtcgaggacgcggccgacgtgcggatcctccgccgcgccggcgtggtccgcggcgggcaggaggtgcacgagctcatcaagaacatcgacagccgtgccatgtacccgtccgtgtacatggccatggaccgggagatcgacaaggtgagagagtaccacgacaagaggatggccagcttcttcgtccgcaaccgccccggcgtgatctgggcctcgtccgtggccgccatctcgatggcggctgtcgtcgcctcgatgaggaaacggggctaaagcgaacaacggagggatcagctgtcaatttattgatgtgtacgatatctacatgtacatgtattgcaacttattgatgcgttgtaaggcgtatcatggtccgaacgcgcaatacgactgtgtaagcgaactgatgattgattatatatatatatatatatatatatata

SEQ ID NO: 137375 - DNA, 1524 bp, Zea Mays
atgaacggaaccaccggcgaaccgacctccacggagactaacaagaagcagccgaccggcgaaccgacctccacggagactaacaagaagcagccggccggcgaaccgacctccacggagactaacaagaagcagccggccggcgaaccgaccaagctacgccccggtggcgtgtcgtcggcgccaccgtacgagtcgatgctcaggtccacgatgtacgagcggttacgcgcgcagcacccggcggagttcgaacccgcgagcgtcttcttcacgcacgatgagcggagcttcatcgaccggcgcaaaagcttgcgggtgaaggccgcgctcgtctacgaggccgtcacgggccgtcacgaagacgacgaccagatgcagagcgccaaaatcctactcctggctctcgccaagaaatgccactccaaaatgcacccagaaaccgccgtcgtccatggtggtggtcgtggtactggtactgctggagaaacgggaggagatgccgccgacgaaactggctgggacgataagatgatgcgcgtgctcgacggcatcttcctcgtcgtcggcttcctgccaaagctcaacgaagcgatcagcagcagcaacgccgaccgcgactccgtcgaccagagcttcaggtcgcgccacatgctcgagatggtcgcggacgtggtcaagctcgagaaccagctactctggctgcaggacctgctcgatgtggcaggccacatcgaggccgtcatcaaggagaccgtcgagcaacacgatttcagggacgtcaagaaagccatgggacgcgagtacaagcaggaggtgacggcgcagaacctcgccgacgtcatccaccgcttctgctggtactactcgcccttcgccaccaagaagcccgccccggacagcccgttcaaggacgtcgtggccaacaaggagatggcggcgaagcgcacgctcctggactgcctgcacatgagcgtggtgaagccgtcgtcgcacggcaagggcgggagcggcggcatcggcaggccgtctcgcatgccgacggcgagggatctctggcggtccggggtccgtctccaggcctccgagaacggccgcgccgagatcgagttcgcgcagccgacgctgtggctgccggccctggtgtacgacttcaagctggccacggtggcccggaacctcctggtgctggagtacgacgaggagcagagcaagccgatcacgcgctacttccagatgatgaacgagatcgtcgaggacgcggccgacgtgcggatcctccgccgcgccggcgtggtccgcggcgggcaggaggtgcacgagctcatcaagaacatcgacagccgtgccatgtacccgtccgtgtacatggccatggaccgggagatcgacaaggtgagagagtaccacgacaagaggatggccagcttcttcgtccgcaaccgccccggcgtgatctgggcctcgtccgtggccgccatctcgatggcggctgtcgtcgcctcgatgaggaaacggggctaa

SEQ ID NO: 137376 - DNA, 4095 bp, Zea Mays
atggagcccaaccttcaatccgcactggaggaacaaacgaagatccttcgcgcgctcagtgcccggctcgctgcccaagaagagcggtggcgcagttgggagtcgaaagtggcgcaccattcggcgtcgatccacgaccttgaggtagcagtggccattgtgccatccgcggcgttgaggccggagcgagacgctcaggtcgccgcgacccgcgagtgtatggccgtggtcgctgacgactggggtggcctcttcggcacaggcgacggctgcatcatggccgacaactggggtgggctgttcgagtatcctgctcacttccaggaagaacaggacatctacaactgcatccccatcaacgatggcacccgcttcaccgaggaagacgacgacaaccaccccgccacgctcgaaccactgctcaccgtcaccaccaccgccgccgaggtcgattccatcgccaacaccgacgatgtcgaggctgactctctcgcctccgcctccacggtgggggtcgccacatcccaggccgccgagatgcagctccatgtcgggtgggcgcgctggctggagggacaggccgactacctaagacacgatcggatgctctgctccaatctagattcccttacttcgagcaaccacccgctgctccaggatgcctcagccaccaacaactcgcccacccagtactcgacagaatgcttcagccatgacatcgtcttgttgaggactatcagtgctgcacccacaagcgaggaccgcgcgctgcagcagaggcgccacgagtgcctcgtcacgcggcccgagtggcggaggattggcggacggaactacatcatgctcgagcatcaccccaacaggatgttcgacgcgtgcgataggttctggcactgcgtcttcgcgctctgtgacttcggctctgtgcagggcctgcagaggaagctggagcggctctgcctggcggggagcgcgcctgacctggaagtcctcgccgtgctttcgagcctgcgcgcgcgaagcctttccgaccagcgtgccgctaaccatacccgcatgtccatgcggagcatctccacgacggccaccccgttcagactctgctctgcacagagcggctacatcgcaagcgggacttcgacgggcacgacttgcagcaccaggtcacagagctggatctcctccaagttcgagcacttctccattccgacccccaaccagaaggtcttcaacctctcgtctgatgtcctcaataagagagatccgtgggtcggtaccttcgaccacattttcaccgagctcggccaaccacaaagcctggaagctgtccgacttccctgccacctgcgtcatcagctaccagactgctcccagttggaattcacagacgaggtgtttgctgcacaggaggtgttcgaggaattgtctcttagctcccctgctacttgggtcaatattgggaagctcttagcctctctgtgctggaaaattccttggccaccaccacatatacaagttgggttgggatgtggtagtgagactttacgttcaattccatggttgtctcccaccatagctagtaccaatgaggagagaatattcatcatatctgaggatggcaaggttgatgatgtggttgatcggacgatggatgaacagatcgcaactgcagtctttgtgccagcttgtatagaagcttcgcttaatgatgggatgaatgcaggcaaaaccagggaggcctttgctgatcatcagtattctgattatgacagtagattgaaagataaggatcagaagatattatttgaagatgagattgatttatcattgttcaactgcaagttcgattcctgcgcaacagatagtcctgtcattgatgttgtttatactgcactcaaagaagcagagcttcgttctacggatctttggccatactggaaggttgattgcttgtgcaagataattccaagacagctactagcagagaaggcaatgatgcttataaggaacactgttggcaagctgattatgaagcataaagaaatacaagttgaaactgaacagattgtgggcgaggattatgtaaatgaaggggattctagcatcctacggttcctacttgcaaatgtgtcaccaaaaatagaagagccaaaaattccgtacaccctgcaggccattggaggaaacgtaattgcagtttatggactttttgtgcaactgatgaccaatggtcagtttacttgttttgcacaatatcagcaaatattcacgcaactagctaattgtggtggatctgcacgtgtccttagggttgaccgtgtgttcagagctgaaatttacaacatcagcatgccgctttctgacttggtttgtcttgcggccaaaatgaaagttaaggagcacaatttgagaagctttgggacattcctagagattaatacatggaaggcaacaaagaccaaaggactggagctgcttgaatatatgggaatggagagactagagtttattgtggaacaacctgacatggcatgtgattcacgggaacattcacggaactgcctatcggtctttctttgtgatcctggtagtaccaaaagaggggtgctaacaatcatgtcgcagcgccgccgtcctcgtcgtcgttcttgtcatgccgtcgccccggtcgacaaaaccacaaccgaccgcgaccacgcgacgccccttgtcatggacgtggaccgcgtctctcatccggccgagacgacgtccgggcgctccgacgacggggaaggggaactggccgcgaggtggcgggagatccacggcagcgaccactgggaggggcagctggaccccatcgacgcggtgctccgcggggagctcatccgctatggcgagttcgcgcaggcgtgctacgacagcttcgactacgaccgcttctccccttactgcggcagctgcaggttcccggccaagaccttcttccaggacgtcggcctcggaggcgccggctaccaggttagccgctacctctacgccacctgcaacgacctcaagctccccaacttcgggggccggaagcacagctccgccgccaacgacaagctgtggagcgagctgggcacgttcatcggctacgtggccgtgtccacagacgaggagacggcgcgcctcggccgccgtgacatcgccgtgtcgtggcgcggcacgatcacccggctcgagtgggtggccgacctgacggccaaccagaagcggctcagcgagctgggcgtgccgtgcccggaccccgacgtgaaggtggagatggggttcgcggagctgtacacgggcaaggacgcggcctgccgtttctgcaggtactcggcgcgggagcaggcgctcgccgaggtgcggaagcaggtggagctgtaccacggcaggggcgagcaggtgagcgtgacggtcaccggccacagcctgggcagcgcgctggcgatgctcaacgccttcgacgtcgcggagacgggcgcgaacgcgtcgccggacggcaggaaggcgccggtctgcgtgttctccttcgcggggccgcgcgtcgggaacctcaggttccgggagcggttccagcgggagctcggcgtgcgggcgctgcgtgtcttcaacgtgcacgacggcgtgcccaaggtgcctggcgtgttcttcaacgacgcggcgttcccggaggcggtgctgcgggtggtggacgggctgggcgcgggcggcgtgtacacgcacctgggcgtgcctctggcgttggaccacaaggtgtcgccgttcctcaaggagaccatggacatctcgtgctaccacaacctggaggcgcacctgcacctgctggatggctaccgtggctccggcgaggggttccagctccgcgggagagaccccgcgctggtaaacaagtcggccgatttcctccgcgacgagcacatggtgccgcccgtttggtaccaggcggagaacaagggcatggtcaggacggaggacgggcggtgggtgctgccgccgcgccatagggacatcgacgagcacccggatgacactgaccaccacctccagcagctcggtgtcattctcaccgcatcaacctag

SEQ ID NO: 137377 - DNA, 285 bp, Zea Mays
atggggaagaaggcaccgaagctggacacggacttcacctaccccttatgcaaccacccagacatcgtccagtgcaccatcttcttcaaggaatgtcgtcttttcgtcgtggcgtcttgcagcgtctgcaaggagacctacgccactaagcaggggtcgatctacaccccgggccacctgccccaaatttatggagcagggggtgtgggtttgagtgatcgctctgcactattttttgtgcggtgtggtagctgcgcgggtgaggtcggggctgggcagtcgtag

SEQ ID NO: 137378 - DNA, 591 bp, Zea Mays
agcttccagctccacgccagttcctggctcgatgtcagcgagcacgccagccacccgcccctgaacgagctccctccactactcgttatctgtgcttccaccctgtcgcatccgcccaggccactggacgccggcgtcgcgttcggctggtcgcgctcgtccttgcctctgcatctaccagcgccctacacctgctcatcgctccccatcgcgctcgacatcatccccagcctcacgctgcactcaccggacagcatcctcctcgccgcgtggagctgctgaatgtggctccccaacgtcgctgttgcctactgctcgctctatagcagctcgccggctccctggaaattccccagccatcgtccggcttccttgcctcgccgttcggtgcgtcgtcatccctgctgtctcgtaacgtcgcgctcctcacactttatttcctctatgtcggtgacgcttgctgaaagcctgaattacgttatccgtggatcaatcgcttggtggagtaattttctagagactggtcatcaccctgaagactcgtgaaattttatttccttagtcctcggctcttctctgcaacaaaggcaa

SEQ ID NO: 137379 - DNA, 128 bp, Zea Mays
cccctataaatatgaaggggtacggtcgattgagaaacccccaaacacattccaatcgaaccaattactttacttacttttcctgccctaggagtagatgtagcgttgttctagttgtagtcttccac

SEQ ID NO: 137380 - DNA, 160 bp, Zea Mays
ggtacgctagatgattatgcgagctaaaggacatggatcagagtgaaccatcatatggtattggtggattaatcttgtggatgcatcaagccagcaccagaatgggagatactcaccaagcgagtatcatctaacaacactaacatagtgtttatcctag

SEQ ID NO: 137381 - DNA, 653 bp, Zea Mays
agacgaatgtagttgtcggaagctatggtggatacaacacaagatgggctcttttcttagtatgaacaggcctatcttcttgaacaatatggaaggaaggctccaatgaaagtgcataaatctgagagggagaaacgtaagaaggacaagtagaatgatctcttttgggagccgggaaacatgctaggttctttgattgggctgccatcattttctccgtcgacgaagcatcgtctacagttgtgtaccaaagacgaagtggagtttgcaaaatgaaagatggagagaaaatactccaaggatgagtgtcattgcttgctgacatgtgatttcaagatagtaatataatttgatggctcctattgcttaactgtacttggttacaactgttccaaggatgactgttccatttgctgacatgtgatttttacagtcaccattttatgctgctgattttcatgggttgcagtgatttgttcatgtgccacagttatttttaggatcgaattaccatcgtttttacatttgtatggagctatgaatcattttccgtcttgattgcttgctttcgactgcagatgcaacaacaaacattgtatatggtgattgctattttttacttgtaatgtaataaaattgtccctatcaccaca

SEQ ID NO: 137382 - DNA, 703 bp, Zea Mays
atctgaagccaaaagcaaactaatttgggtgactaaaatttggacctgaaagaacctaatgaattgtgtcatgtggtgattcaagttcaagatgcatgcgcaacacagacatgcaacaacgcaaggatgaaacgaggcctatttgcagatttagttggtttgaatgtttagcctattggtttggttttaggatatactagggattgattagtttgttaggaacttcaggagatgtcatcagtggtgcaagcaaatatttacctccaatttacctaacacccactttgttcctgcctcgaggttgtgatgagctgatcatggctctgtcgtcgtgccattgatgtccacggtcacacccaccccacaactatgccatcgccatccacctccctcgagggcattgaagctgcggtacccgctgtggtcggcgagcaaggggaaggcggcggtcgtttccctggcggctgatgctcctcccaccatctctgctccacgacggtgcgttttcacgttgctgccatcttttgttttgttttcctttccacatcttacgatgggcgcaatcttatttcactcgtggatccgcgattgttgtgttttgttcaaatctgataatatagtacctagcagttctgtcgtgcaggagtaggacatgcctattgataggcccactttgtgggggtgctaaattgctaacaattac

SEQ ID NO: 137383 - DNA, 1191 bp, Zea Mays
gatttaacagaacatcccatttctcgtgcggccaaggcccagtccgatgactctggccaaggcccagtccgatgactctggccctataactctgagccccatcggagactcggagtcgggggcgccagcgtctcgcctcgccgtcagcagcagcagcagctgcacctccattccacggcttccgtcgtgcgcttcgtctgcacccacaaaggcgacggcgacggcagggggaggagatgaagctgaagcagctggagggcctcttgggtggcctgacccagttctccgaccccaagctggagctggagcagtatgcgacgggccctcacatcgcgtcgcggatgctctacatggcagagaatagtttcaatgacataactggcaaagtggtagctgacttcggctgtggctgtggcactctggctgtggcgagtgctttactggatgctgaacatgttcttggtattgatattgacccgactatcacttgaacttgctcaagaaaatgctgctgatctggagctggacatcgatttagtttggtctgacataaagaacttaaatctgaaaggcgtccatgttgatactgttgtcatgaatcctccctttggtacacgaaggaatggagcagacatggagttcctctctatggccttgcaggttgcttctcaagctgtctattctctacacaagacttccactagagaacatatcaagaaggcagccttgcgtggcttcaatgccatcagtgcggaggttctatgcgagctgcgttacaatctaccgcggacgtacaagttgcacaagaaaaaagagatcgacattgcagtcgatctgtggcgctttgttcctaacgcccaacgccgcagctagcgcgctcgctatgggccgaggggcacaggtgatggaatggaactgaacatgaatggaaaatgatcaaatggatatgtgtctcaaaaggctggacttgatcgaagagatcccaagcgtcacgcttgctgtgcttatcgtcttcttggtgccagtaagggtagctcagaatttgacgaactgtgtagagttttgtgggcacagatgatgctcccagtagtgtgcacaatgaatgctttgtatgtattgtgctctattgcctgtgctaacgctacagaataatatttacaattaatttggtgatcagtcagtggcgccgca

SEQ ID NO: 137384 - DNA, 1093 bp, Zea Mays
gatttaacagaacatcccatttctcgtgcggccaaggcccagtccgatgactctggccaaggcccagtccgatgactctggccctataactctgagccccatcggagactcggagtcgggggcgccagcgtctcgcctcgccgtcagcagcagcagcagctgcacctccattccacggcttccgtcgtgcgcttcgtctgcacccacaaaggcgacggcgacggcagggggaggagatgaagctgaagcagctggagggcctcttgggtggcctgacccagttctccgaccccaagctggagctggagcagtatgcgacgggccctcacatcgcgtcgcggatgctctacatgacatgttcttggtattgatattgacccgactatcacttgaacttgctcaagaaaatgctgctgatctggagctggacatcgatttagtttggtctgacataaagaacttaaatctgaaaggcgtccatgttgatactgttgtcatgaatcctccctttggtacacgaaggaatggagcagacatggagttcctctctatggccttgcaggttgcttctcaagctgtctattctctacacaagacttccactagagaacatatcaagaaggcagccttgcgtggcttcaatgccatcagtgcggaggttctatgcgagctgcgttacaatctaccgcggacgtacaagttgcacaagaaaaaagagatcgacattgcagtcgatctgtggcgctttgttcctaacgcccaacgccgcagctagcgcgctcgctatgggccgaggggcacaggtgatggaatggaactgaacatgaatggaaaatgatcaaatggatatgtgtctcaaaaggctggacttgatcgaagagatcccaagcgtcacgcttgctgtgcttatcgtcttcttggtgccagtaagggtagctcagaatttgacgaactgtgtagagttttgtgggcacagatgatgctcccagtagtgtgcacaatgaatgctttgtatgtattgtgctctattgcctgtgctaacgctacagaataatatttacaattaatttggtgatcagtcagtggcgccgca

SEQ ID NO: 137385 - DNA, 738 bp, Zea Mays
gatttaacagaacatcccatttctcgtgcggccaaggcccagtccgatgactctggccaaggcccagtccgatgactctggccctataactctgagccccatcggagactcggagtcgggggcgccagcgtctcgcctcgccgtcagcagcagcagcagctgcacctccattccacggcttccgtcgtgcgcttcgtctgcacccacaaaggcgacggcgacggcagggggaggagatgaagctgaagcagctggagggcctcttgggtggcctgacccagttctccgaccccaagctggagctggagcagtatgcgacgggccctcacatcgcgtcgcggatgctctacatggcagagaatagtttcaatgacataactggcaaagtggtagctgacttcggctgtggctgtggcactctggctgtggcgagtgctttactggatgctgaacatgttcttggtattgatattgacccgactatcacttgaacttgctcaagaaaatgctgctgatctggagctggacatcgatttagtttggtctgacataaagaacttaaatctgaaaggcgtccatgttgatactgttgtcatgaatcctccctttggtacacgaaggaatggagcagacatggagttcctctctatggccttgcaggtcagaaccggtgcttgtttgcgactagcagtttcctttggaagatgatatttgacattttaagtgcccatttgctac

SEQ ID NO: 137386 - DNA, 927 bp, Zea Mays
gatttaacagaacatcccatttctcgtgcggccaaggcccagtccgatgactctggccaaggcccagtccgatgactctggccctataactctgagccccatcggagactcggagtcgggggcgccagcgtctcgcctcgccgtcagcagcagcagcagctgcacctccattccacggcttccgtcgtgcgcttcgtctgcacccacaaaggcgacggcgacggcagggggaggagatgaagctgaagcagctggagggcctcttgggtggcctgacccagttctccgaccccaagctggagctggagcagtatgcgacgggccctcacatcgcgtcgcggatgctctacatggcagagaatagtttcaatgacataactggcaaagtggtagctgacttcggctgtggctgtggcactctggctgtggcgagtgctttactggatgctgagtgagtatgtttaacttggtagttttaagtaaccatgttctttcctgtgacaatccctctattgcgtaatgtctacttcaatattttaaaacaaaaaaacttcctgtttagtgcttatgtttgtaattttgcacagtttgtttgctgattgatctaacaaaaagtggcttcctctgcaattgtgtcctggtagattgtgtctattcttttttgttagtatttttttagggaatcaggaggggctgacccctattataaatttatataaagaacagaacaagctccaaatgagttttaggaaacaaaaaaggtaacaaacatagtaattgtacacatgtcttgcaggtgaagctaaaataaagagtagaattccatgtcataaaatgattttagatagtgcgtaattcttttaaatgctcattgatatatatgtaaccataaattaatgggtatcaccagtttggtggctagtttcc

SEQ ID NO: 137387 - DNA, 672 bp, Zea Mays
aaggcccagtccgatgactctggccctataactctgagccccatcggagactcggagtcgggggcgccagcgtctcgcctcgccgtcagcagcagcagcagctgcacctccattccacggcttccgtcgtgcgcttcgtctgcacccacaaaggcgacggcgacggcagggggaggagatgaagctgaagcagctggagggcctcttgggtggcctgacccagttctccgaccccaaggtactgctgactgcgccaccgccaccgcccccacctcttgggtggcctttctttcttcctttctcgtaccctgctcgatttcgcctcgcccaaccccgacaaaagggagggggaaaagcggaggagtatctgacttttgccaccaatggcgtgtttttttacaacgagatggcgttgttgggtgtagctggagctggagcagtatgcgacgggccctcacatcgcgtcgcggatgctctacatggttagtttggcactcacgtcctgctacgattccgatcctttcccgctttgtttcaggatgctatgcctatgtaggagtatctttcttttgttgggatagtcttgggaagcggcgccgggctttctcgtgagtagtggggctatggaattgggtgccgcaaagtgcagctttgattctgaattaactgagc

SEQ ID NO: 137388 - DNA, 231 bp, Zea Mays
aaatctacttggtgttggggtccacttagcgtgaaggagctagagcaacttgagaaccaaattgagatatccctcaagcatatccgatcatcaaagaaccaccagatgcttgaacatctcttcgatctcaagcgcaagactcgcggaaatactaaccaacatagtgaggttttgcaggaacaacaactgcaagatgctaacaaagacttaagaatgaagatatatacatga

SEQ ID NO: 137389 - DNA, 258 bp, Zea Mays
atggggcgcgacaaggtggagctgaagcggatcgagaacaagatcagccggcaggtgacgttcgccaagcgccggaacgagctgctcaagaaggcgtacgatctatcggtgctctgcgacgccgaggtcgccctcatcatcatctccagctgtgcccgcctcttcgagttctccacctcctcctcgtggtacacatgctgctccgccccacctgtgccttacatacccagacgatctggttttgaacatgaacgttga

SEQ ID NO: 137390 - DNA, 325 bp, Zea Mays
taggttatactcctccttgatgaggttggccagcttgggcaggagagtgcccatcgccccggtgactatctccgccatggttgctcagagctcttactgacaagtgatggctaatggtgtatactgtgactctgtgagacagaatctgaccaggtggctagcaataaaactgtatactggatggagacagaatcttaccagggatagtgggctctcgtgggaagcctcgaatggcacatcacttggacttaacataacctggcttccagttggcacgactatctgtaaagtatttcgttaatcaagaaagttttgtctatatata

SEQ ID NO: 137391 - DNA, 474 bp, Zea Mays
aaatgatcaactagcatatcatagtaaggttctcgaaccaaacaaaggacatgaacaatctatccccagttatatctctaaccaaacaaaaaacaaggatcatctcatccttccaaccaaataatatgaggaatcattccattcccaacttaggagccattctattctgccctcatttgtccagcaaccaaacgtatcctaatataataaatagagatagagatgtttgtccgaccggcaattaccaaggtacacagacgaggacataaatacttcaactaagggatgctgttgacaaatcacaatcgatatagaacaaatgatgggcgacaataacttttgcattcatgcatgcaggaagcgatcgaaccattcgcttgctgccttcaccatgtcgattgtgattttatggccgactccaggctctgcaatgaactgaccagtacagataataaagatgttagcagcccaaac

SEQ ID NO: 137392 - DNA, 106 bp, Zea Mays
ctccgcacaggtcgtcgtctatcagtccatgtcaccaaatcagtggaccatgcatcactgtacctaattttctttaataattaaaaaaaattaggtacagaatttc

SEQ ID NO: 137393 - DNA, 899 bp, Zea Mays
taaaaaataaacaatggcacccaggtgtgaatctgcagataggaccagtttacagccatccgtcccgtctctaggattgcgccctgaaaaaaagaaagatacacacaggcaagagcaagaacaagaggacacccgccgtacagcgcgatttatcggcagaaccaaaaggctcaaacagaccatatgtgtgtgcagcttattgttcttcaccaccaatacgataactaaatacaggcacggcatcctacgcgcgttgctaatgcgccgtcggatcgcagcctacgaaaacgcatttgaagttcaggccctgtacacggcgcaggccttcttggagaacctgacgggcttggtcttcttggcgtccacgacgacggggcacgtcacgtgcaccttgtgcgtcacccgcacgagcttgccgatcacgtagccccgcgaggtcaggtccaagtccagcgtcaggggcaccgccccgcccgtgcttgtcgacagcatcaggctgcccccggcgccgtacagcggcaccttctcgccgtggatgaccgccgtcaccatccggtggctcttcctcggctggtaatacctccgaacctgagagtgatcgcagtcacagtagccacgtcagattcaatgactattaccagcaattctggcttttgactcaactgatgcaaacagatgtccagaaatgaaaggaaggattcatgcaacaacatttgctggactattagcactgtctattgctgaagcagccctagtatacatactgtctttattcttttgtccccacaaacaaaacttttcaactcgatcatgcattttgtacgattaacttgacaaggaattacgcatccgttagtcagatctttgacgacctttgaggctttgatgcgatggatggg

SEQ ID NO: 137394 - DNA, 1634 bp, Zea Mays
gtttctactgaataggaaatgaaatgaccaagctatgcgtgtcactgcaggcggacctacaagctctttggaggagtagagacttccagccatcccttctacgctctccccgttcccgtgtcgtcctcccgacaaagagggagccgctagggtttagcggcttccgcgtctgggcgagggcttacccgcgagggacggcgcgacgcggcggcacttgagctagggtttaaccctccgatcccgttcctttcccggcgaggcgatggacgaggcggcgattgacgacttgatccggcggctcctcgaggcccgcggcgggcgcaccccgcgcaacgcgcaggtgactgacgccgagatccggcgcctctgcgccaccgccaaggacgttttcctctcccagcccaacctcctggagctcgaggcccccattaagatatgcggggatgtccatggccagtattcagacctccttcgattatttgagtatggtggctatccaccagatgcaaattatctgttcctgggtgactatgttgatcgggggaaacagagcatagaaacaatatgccttctcttggcgtacaagataaagtacccagaaaacttctttcttctcaggggaaaccatgaatgtgcctcgatcaaccggatatatgggttttttgatgagtgtaagaggagattcaatgtgcgtatctggaagatattcactgagtgttttaactgcctcccagtggctgcacttattgacgataagatcttttgcatgcatggggggttgtctcctgagctaaagaacatggatcaaatacgtaacatttctcgtcctgtggatgttcctgacgttggtcttctatgtgatctgttatggtcggaccctgataaagagattgttgggtggggtgagaatgacaggggtgtttcctacacctttggagctgacatagttgctgagtttcttcagaaacatgatctagatttgatctgcagggctcaccaggtcgtagaggatggctatgagtttttcgcaaatcgccagcttgtaacaatattctcagcaccgaactactgtggagagtttgacaatgctggtgcactgatgagcatcgacgactccctagtatgctcgttccagatactcaagccttctgaaaagaaaagaaaagcaggagctgagaacatgccaaagcccggtacacctcccaggaagataaaaataagtgttacccgcatttagccagattctcgttatcaaactggatttgagaagttgtgattaaatgctccccaaacttgttatggtaggttttttggtgagcttaacacggtgttaaactgtggagtgtggaccaccgtgcttatgtcttgctgatctgaagtcatgcaaatgtatcctggcgttttgccaaacaaaaaagatcatgctaacagaaacttctggattttttttttattgtggacctctgttcttattccccaacagatgcaacatgtttatgaatgggtagcattgcttgcattggagattgtgctttcttttgtactacttaataaatacttaatagcatgtataaggtctgtatttggaaacgctaactaacagtaacagcacatgccctttactgatgtttatg

SEQ ID NO: 137395 - DNA, 1306 bp, Zea Mays
cccctagaaccggctgtgacaagacttccaggcttccagccatcccttctacgctctccccgttcccgtgtcgtcctcccgacaaagagggagccgctagggtttagcggcttccgcgtctgggcgagggcttacccgcgagggacggcgcgacgcggcggcacttgagctagggtttaaccctccgatcccgttcctttcccggcgaggcgatggacgaggcggcgattgacgacttgatccggcggctcctcgaggcccgcggcgggcgcaccccgcgcaacgcgcaggtgactgacgccgagatccggcgcctctgcgccaccgccaaggacgttttcctctcccagcccaacctcctggagctcgaggcccccattaagatatgcggggatgtccatggccagtattcagacctccttcgattatttgagtatggtggctatccaccagatgcaaattatctgttcctgggtgactatgttgatcgggggaaacagagcatagaaacaatatgccttctcttggcgtacaagataaagtacccagaaaacttctttcttctcaggggaaaccatgaatgtgcctcgatcaaccggatatatgggttttttgatgagtgtaagaggagattcaatgtgcgtatctggaagatattcactgagtgttttaactgcctcccagtggctgcacttattgacgataagatcttttgcatgcatggggggttgtctcctgagctaaagaacatggatcaaatacgtaacatttctcgtcctgtggatgttcctgacgttggtcttctatgtgatctgttatggtcggaccctgataaagagattgttgggtggggtgagaatgacaggggtgtttcctacacctttggagctgacatagttgctgagtttcttcagaaacatgatctagatttgatctgcagggctcaccaggtcgtagaggatggctatgagtttttcgcaaatcgccagcttgtaacaatattctcagcaccgaactactgtggagagtttgacaatgctggtgcactgatgagcatcgacgactccctagtatgctcgttccagatactcaagccttctgaaaagaaaagaaaagcaggagctgagaacatgccaaagcccggttttttggtgagcttaacacggtgttaaactgtggagtgtggaccaccgtgcttatgtcttgctgatctgaagtcatgcaaatgtatcctggcgttttgccaaacaaaaaagatcatgctaacagaaacttctggattttttttttattgtggacctctgtt

SEQ ID NO: 137396 - DNA, 499 bp, Zea Mays
tagagcttgggcccttggcaaataatagtttggtaagtgaacagtctacaactcagccttatacttctgatttttgtttgcatattgtttccaaaatgggaaaagaaaggccaaaagttatctaatgcagcagccttatacgagtcattcaaagcttatgaagaagactctaggagaagctttaagaaacaagaaagaaattatcagtgtcgtgtgccggtcatcagacaacttttcttgaccaccaactccaagcgatctgacagattattgtataattgcgctgttggaattgtgtctatggtctatagcctgttcggcgtgactcaaaatataaacctttggatatacatgcaacagtcttcaagctcttatgtagtagttcaattgttttgttcattatggctcaccaaaacaaggtctaaattttatctgttattaaactttagaacatgtgtatacatggttgttttggccaaacattatcaccaggatttta

SEQ ID NO: 137397 - DNA, 1014 bp, Zea Mays
atgttttcacttgacgcggcggcagagggtgacgccgtcgccgacggggagctggcagatctcgacgcggtcgtcggcggcgagcgccttgttgaggacgagcacgaagtcgcggtagaagcggatgtacttgcgcatgggcgcgtcgtcggggagcacgacggagccgttccacagcgtgttgtcgtagccgatgaggccgcccagcttcaccagcttcagcagccgctcgtggtagttgaggtagttgtccttgtcggcgtccacgaagacgaagtcgaacgacccgtggttcttctcctccgcgatgaggtcgtcgaggacggggagcgcgggaccctcgcggaagtcgatcttgtgggcgacgccggccttctcgatgcagggcaggcccagctcgtagttctcgcggttgatgtccatggccaagatctgcggggcgggacgaacaacaaagagagggagagagaaatccttggtttatcagtgggaggaccgctagctgcttcgccttcagggaggtggggtggcagatctgagaaaagggagggaacaacgacggaccgtgccgtcctccgggagggcgagcgccgtggcgaggagggagtagccggtgtagacgccgatctccatggtcttcttggcgccgatgagcttgatgagcatgttcaggaactgcccctcgtcggcggaggtcgtcatcaggttcctgcacgccattttttcagatctcgatctgtccagcagctaggtcgccgccgagagatcggcccgggaaagcggaacataccatgggtgcttggcggtgatctcgcggagctccttcatgctctccggctcccgcgggtacacgctcgtgtccaggatgtactggtggaagtcgtcgctcttgagcaggctcttgtggccgacctcggagtgccgcgtcttctgctcgccgttgccgttggcctgctgctcctgcgccggcgccgcctcggtcgccgtggtggccattgcgtgcagtgtagttag

SEQ ID NO: 137398 - DNA, 709 bp, Zea Mays
aacaaaaccatccacggtagcagtagtaatagtaggagtatattgtaaaattgaggagcattactgtattaccgatctcgtgatttacgtatcgaaacggcggcgacaattcccaagaaggaagaggaggagaaagattacaggggcaagaaagagccaaaaaaaaagccggtggataattaatgctgcgggtcgtctattatgattggaatgaggatgcggccggcggcgccgtcggtggcggtggtggggcaggccaggccaggccatgttttcacttgacgcggcggcagagggtgacgccgtcgccgacggggagctggcagatctcgacgcggtcgtcggcggcgagcgccttgttgaggacgagcacgaagtcgcggtagaagcggatgtacttgcgcatgggcgcgtcgtcggggagcacgacggagccgttccacagcgtgttgtcgtagccgatgaggccgcccagcttcaccagcttcagcagccgctcgtggtagttgaggtagttgtccttgtcggcgtccacgaagacgaagtcgaacgacccgtggttcttctcctgcgcagatgcagacagacacgggtccgagatgtcatgtcaacttctactcgatcgatataggcgaagaagcacagatctggcggcctggccatttcgtacctccgcgatgaggtcgtcgaggacggggagcgcgggacc

SEQ ID NO: 137399 - DNA, 390 bp, Zea Mays
atggcagcgagccacggcaccgggacgctcaagtccacctccatcaacggggtcaagctctactcgctcaccggcggccgctatgttgccccctgggtcgtcgtgaagaagaagcgcatcctccgcaaggacaaagaagtagaaaacttgtgccggtatgagcttccaaatgagagctgggaagtaaatttgcctgctgaaaaggtgtctcctgagctcccagaaccaacattaggcataaaatttgcaagagacggaatccaggaaaaagagtggttgtccatggttgctgcacacagtgatgcatggttactttctgttgcattttatcttggtgctcgatttggtttcaataaaaattacaggttaattttcattccatctttatga

SEQ ID NO: 137400 - DNA, 1139 bp, Zea Mays
ttgagaagcctttcgtctaaaaaacagtgaatcgatgaaatccactgtcatgtatactttctcaatgtgtgtagtacatgttgaccaagagagatttttacgaaggtctactatggaatcatctatgtattcaattcaagaagctcagaaaatcaaagtgggtttctcttttttcatggcaatctggtatggtgtctgctccacaacaacaaaattgggtttatacctctctgaattattccaatctagatttttaaaatttatcaatgggcatgcttcaaagttctaatggaattaatttcattctcccagcctataacataatatagagttcatgatgtttaactaagctgatgcacgtatattattagttgttagggaaatccttctgttactttgatgtgttttttcaaaccgaaataaggcagccaagcatttgtactttgatagaatttgtcttttagtgtcagctacataaataccggactatcagtcactagcaccagaattaggaggcagtccattgggaaggaaaaatctacctgactgaatcagcattggagttaagtttgttggagctgattagacatgatggtgcagcgttccacataggatgaggtgtgaagttgagatgaaaagaaaagtacgaggacataaacacacttcgatagttcatgaatgattgtttgaaacttttttgaactaggaaaacaacaagaattcaatgccagttaccaatttgtgccagtgctcttcactctcgttcgatctgaatgtgccggacccggtggctgatgagatgaacgagcgttgtgacactctgctacacctctagcagcgaacgcgaaccgaccacgagcactcccctaaactggtactacaggatcgtgcacgctttcatgtggccaatccgatggagcagtgcgtagccgaagcctcccaaactgctgctatcgtgttgctatctatctccatagaaattggtgaggaactacccttgtcagcattctgcaggacaagtgttagtgaatgggagaccttgaggagcattgacatggatactgaggtgtgtagagcctgttctgctagccacattttgttcatcattgttcataatataatttggtgagtatatcata

SEQ ID NO: 137401 - DNA, 917 bp, Zea Mays
tcatcaaaggtctttacttatttacttagtcacgacttatgatattcttaggtcttacttggaagatcagatgtctctggctggggagcattcctcaaggtaaaactatatatctgttcttttgtgttcgtactttcccttgatgttgtcttatttgtcttttcttaaaccttcagaatagtgttagcaaacatgaataccttggtgagtacactggggaactaatctcacacaaagaagcagataagcgtggaaagatatatgatcgtgagaactcatcgttccttttcaacctgaacaatgagtatgttcttgacgcatacagaatgggtgacaagctgaaatttgccaaccatgcccctgacccgaattgctatgccaaggttatcatggtaactggtgatcatagagtgggcatattcgccaaagaaagaatcctcgctggtgaagagttattctacgattaccgctatgagcctgacagagctcctgcttgggcccgtaagcctgaggcgtcgggagcaaaggatgatgggcaaccgttcaatgggcgtgcaaagaagctcgcccaaaacaaccgaggctgaatctgatttgattctttcattgttaggacaaatttggcagccattcaactaatacaaggaacctgtcattcataggccccaatttatttgaactcgtcattgtaactcgtatgtgcttgaattctccatggcatctggtcctgccatccgtagagttaggtcccgtttgttttgtttgttttgaggaactaaaaattaatccctctattttagtcacattgagtctctagattgtcaaacggcgggactaaaacaaagactaaactatttgtctctagttcctcaagccatgacttaaagggaataaatcacataaattttatttttatc

SEQ ID NO: 137402 - DNA, 3135 bp, Zea Mays
ccacgggtgatggaagcagaggctgccgcggcggtagtggcgtcgtccgcatctgcctcggcttccgcgggccggtctcgcccatctagcagcgccgcccaggtcaccagtaattcggctgtgcgagctggagaagaaaatgctgcctccctctatgttttatctgttattgactcgttaaaaaagaggattaccgcagatcgtttgacttacattaagaataggataggggagaacaagactaatatcagcagctatacacagaggacttacaatttatcaaaaaataggcaaattagtacatcaaagggtactgattcagcatcaaatttgctcacaaaaaggcaagatgatgcgctatgcaccctgcatagtcttgatattattccggttgacaaagatggtggtacttttcaagacgaaagtcctttctcttcatctaatgttatgtttggtggaaatcttggtcccaagaatgctattattagaccaattaaactaccagaagtgccaaagcttccaccttatacaacatggatatttttggacaggaaccaaaggatgacagaagaccaatctgtacttggtcgacggaggatttactatgataccagttgtggtgaagctctaatttgcagtgatagtgaagatgaagccattgaagatgaggaggaaaaaaaggaatttaaacattctgaagatcacattattcggatgacagttcaagaatgtggcatgtctgatgctgtactgcaaacgctagctcgacacatggagcgggctgctgatgacataaaggccaggtatgaaattctgcatggtgagaaaactaaggattcttgcaagaaagggactgagcataatgtcaaagtggaagatttgtactgtgacaaagatttggatgcagcattggattcttttgacaatctcttctgtcgacgatgtctagtgtttgattgcaagctacatgggtgttctcaagatttagtatttcctacagaaaaacaaccagcttggagtggcgttgatgacagtgtaccctgtggtattcattgccataaactggcatctgaaccagatgctgctgctggtgctgatcacatgctttttgatgttgaggagccaactcactcatcagacaatgtgatgaaccagccaggttcaaataggaaaaagaacggctccagtggaaggaagactaaatctcaacaaagtgaaagctcttcaactgcaagagttatctcagaaagcagtgattcggaagtacatccaataagcaataaatctccacaacactcccctagtccctcaaaagttaaaattgggccgaaaggtggaatcagaaagattaccaatagacgaatcgctgagagaattcttatgagtgtgaagaaaggacaaagggaaatggcatcatctgattctaattttgttagtggatatcttttggcaagggacatgaagcttaggtctgatacacgaaatggaaataaggaattaattgtatcctcacaacagagttctccaagcacaagaagttccaaaaagaagagtacacctcaaattgggaacagctcagcttttgctgaggctcataatgattcaacagaggaagcaaataaccgtcattcagcaacagatggttacgatagttcaaggaaagaagaattcgtcaatgagaatttatgcaagcaggaggtgtacttgagatcatggaaggcaattgagcagggacttcttgtgaaaggattagagatttttggaaggaacagttgtttaattgctcggaaccttcttggtggaatgaagacgtgcaaagatgtttttcaatatatgaattatattgaaaacaacagtgcctctggagctcttagtggtgttgattctcttgttaaaggatatattaagggtactgagttgcgcacaagatcaagatattttagaaggcgaggtaaagtccgtcgtttgaagtacacctggaaatctgcaggttacaatttcaaaaggattaccgaaaggaaggatcagccttgtcgacaatataatccttgtggttgtcaatctacatgcggaaagcagtgtccatgtctttcaaatgggacatgttgtgagaaatactgtgggtgtccaaaaatttgcaagaatcgttttcgaggatgtcactgtgcaaagagccagtgtcgcagccgccaatgtccatgttttgcagctgacagggaatgcgatccggatgtttgcagaaactgttgggttgggtgtggtgatggtacattgggagttccaaaccagagaggagataattatgaatgccggaacatgaaactgcttcttaaacaacaacaaagggtcttacttggaagatcagatgtctctggctggggagcattcctcaagaatagtgttagcaaacatgaataccttggtgagtacactggggaactaatctcacacaaagaagcagataagcgtggaaagatatatgatcgtgagaactcatcgttccttttcaacctgaacaatgagtatgttcttgacgcatacagaatgggtgacaagctgaaatttgccaaccatgcccctgacccgaattgctatgccaaggttatcatggtaactggtgatcatagagtgggcatattcgccaaagaaagaatcctcgctggtgaagagttattctacgattaccgctatgagcctgacagagctcctgcttgggcccgtaagcctgaggcgtcgggagcaaaggatgatgggcaaccgttcaatgggcgtgcaaagaagctcgcccaaaacaaccgaggctgaatctgatttgattctttcattgttaggacaaatttggcagccattcaactaatacaaggaacctgtcattcataggccccaatttatttgaactcgtcattgtaactcgtatgtgcttgaattctccatggcatctggtcctgccatccgtagagttaggtcccgtttgttttgtttgttttgaggaactaaaaattaatccctctattttagtcacattgagtctctagattgtcaaacggcgggactaaaacaaagactaaactatttgtctctagttcctcaagccatgacttaaagggaataaatcacataaattttatttttatc

SEQ ID NO: 137403 - DNA, 854 bp, Zea Mays
cccagcctctgtcttccacctccgtccatcgtccctctccttgagcctcttccccagccgcgccctactcggttccccctgcgtcgcgcgcctggcttgctccctgctaggcgttctcctcccctgcttctatagcggctgagctccctctgcttgcgcgtcccttgctcctcccagccggccgagctcctgcttcccctccgtggagcaccccctgctcctgctccccgagctcgcccctgcgctcggattttctccctcggccatggtagccgcgcgccattcctgctcgcccttcgctcggccgcctctccttggtctcccatggcgccctggctgcgacctcgccttggttatcacatcttctcgtgttgttgtgcgtttgttgatgttttagtcatcgcatagctcgctgatggccgggcatttcaccttcgattagctcaccatgacgccgacgtctagccctgactccagtctcctcgccacgaaagcacaaccgctactcagtgtgttgatgtcatatgcgtggcaccgtcgtgggttgtcgtcgttcgtcgtcgcgtcatgtgtgcaacaacgtcgctgattcctccatggtgcttgtcgatgaacttcgcttcataggttccccgccttcggttcggctcacgtatgcacaccgaacgcattcaccgcttgaccctgtgtcgctgtgtcgctagagctcgtgacctcgccgtcgtcggagtcctcactggattcgtgtcctcgtaagagctcgcgctaacctgctcgaccacacctcaccagctcgctgcagactcgatctcgtcgtcattccgtgcgtcatcaagaaaacccaagagtcgggt

SEQ ID NO: 137404 - DNA, 1174 bp, Zea Mays
tacgccgctcaagctcgtggaaaaatcccaccgcccagcctctgtcttccacctccgtccgtcgtccctctccctgagcctcttccccagccgcgccatgctcggttccccctgcgtcacacgcctggcttgctccctgctcggcgttctcctcccctgcttctatggcggctgagctccctctgctagcgcgtcccctgctcctcccagccggcccgagctcctgcttcccctccgtggagcacgcccctgcctcctactccccgagctcgcccctgcgctcggatttctccctcggccatggtggccacgcgcccttcctgctcgcccttcgctcggccgcctctccctagtctcccatggcgcgcatttccctggccgcgacctcgccatggctatcacatcttctcgtgctgctgtgcgtttgtcgatgttttagtcatcgcccagctcgctgatggccaggctgttcgccttcgattagctcaccatgacgccaacatctagccctggctccagtctcctcgccacgaaagcacaaccactacttattgtgttgatgtcgtatgtgtggcgtcatcgtgggttgtcctcgttcatcgtcatgtcgtgtgtgcaacaacgtcgctgttcctccatggtgcttgtcgacgaacttcgcttcatcagtttctcgccttcggttcggctcacgtatgcacgccgaacgcgttcgccgcttgaccctatgtcactagagctcgtgacctcaacatcgttagagtcctcactagattcgtgtcctcgccagagctcgcgctaacctgctcgactacacctcgccagctcgctccagactcgatctcgtcgtcgttctgtgtgtcatcaagaaaacccaagagtcaggtgaagacgaagctagcagcatgatgttcaccaagtactcgacgcaagggctgaactagaatccttgtcgtattcacggatagagcgtcagatttagtatagtaagccgattcatatttctgttagcttaattattggtttgatgaataaattgtatacataagtatgaagtggtcgtgtcacacgaaattcaagtttaaaatgattattgtgtgaggagtggttaagtgaataataagtctagtgtctcgctcatatagctgataaatgcattcgtggttatattaaa

SEQ ID NO: 137405 - DNA, 1375 bp, Zea Mays
cacgggtagctcatggtcgagcgtagcatgcaggaacttatttgccgtgcgctcccaggtctccgctcgcgtgccttccagtctgtctcacactagctgctgtgggacgatcgaagtgggtgtgtcagctagctagctgcgccgtgaccacgcacatgaccgcagtgcgcgcggggctgatcaagggaaagtgatcggatggagctggagctcgggctcgcgccgccgaacccgcatcagccgctggctgccgccgccgagttcgtcggtctcctcagcagctcggctggctcgtgcgggaacaagagggttctcggcgacgcgttcggggccgccaaggcggccacgcttccgctcttcgtctgcgaggatggcgacggaggcggcggcgaccgcgaccgcgacggcgtcgtcgaccatgaacagcaaagcaacaatgtacccaggaagaagaggctggtggggtggccgccggtgaagtgcgcgcgtaggcgtagctgcggcggcgggtacgtgaaggtgaagctggaaggggtgcccatcgggcggaaggtggacgtgtccatccacggctcgtaccaggagctgctccgcacgctcgagagcatgttcccttcgggtaaccaacaagatcatgcagaagacgaggtggtggtctcgcacgagcgccgccgtcgccatccttatgtagtcacctacgaggacggcgaaggggactggttgctcgtcggagatgatgtgccgtgggaggtctttgtcaagtcagtgaagcggctcaagatacttgcgtagccgacggtcggcgcctcagagacgtcgtgtggtccgtctcaccaggatcggagcagtgtagtactcctgggcgtcatctgcgtaataacgttgtttctgtcctgtgtgcccgtagcagtacgtactgtcctatagtaagctagctttatggggtgcttcagctttcagagcatgacgaaagcactgattagctgctgtcatcacatttggttcgtctttgtgtcgtacggtatcgctggcgtcagtgtcgcggcagcctaggtgatctaagcatacttactatctcaagttacttttggtttcctgagcttgcatggtaattcatataccgtatacgtgtgtgactcaggggcgaagctgccttaaggcacaggggtcaccggacccgatggaatttatcaaatccagtgtaaaatactatttaacactgttcatcaatatatttgatttcaataattcatggagctgaccttgtggatccattttctgtcttcgcctctggtgtgactagtattttggtttgacttttcactctgtataagatatatattataccagcgagtttatcgactgctagttttac

SEQ ID NO: 137406 - DNA, 1360 bp, Zea Mays
actcacgggtagctcatggtcgagcgtagcatgcaggaacttatttgccgtgcgctcccaggtctccgctcgcgtgccttccagtctgtctcacactagctgctgtgggacgatcgaagtgggtgtgtcagctagctagctgcgccgtgaccacgcacatgaccgcagtgcgcgcggggctgatcaagggaaagtgatcggatggagctggagctcgggctcgcgccgccgaacccgcatcagccgctggctgccgccgccgagttcgtcggtctcctcagcagctcggctggctcgtgcgggaacaagagggttctcggcgacgcgttcggggccgccaaggcggccacgcttccgctcttcgtctgcgaggatggcgacggaggcggcggcgaccgcgaccgcgacggcgtcgtcgaccatgaacagcaaagcaacaagaagaagaggctggtggggtggccgccggtgaagtgcgcgcgtaggcgtagctgcggcggcgggtacgtgaaggtgaagctggaaggggtgcccatcgggcggaaggtggacgtgtccatccacggctcgtaccaggagctgctccgcacgctcgagagcatgttcccttcgggtaaccaacaagaagacgaggtggtggtctcgcacgagcgccgccgtcgccatccttatgtagtcacctacgaggacggcgaaggggactggttgctcgtcggagatgatgtgccgtgggaggtctttgtcaagtcagtgaagcggctcaagatacttgcgtagccgacggtcggcgcctcagagacgtcgtgtggtccgtctcaccaggatcggagcagtgtagtactcctgggcgtcatctgcgtaataacgttgtttctgtcctgtgtgcccgtagcagtacgtactgtcctatagtaagctagctttatggggtgcttcagctttcagagcatgacgaaagcactgattagctgctgtcatcacatttggttcgtctttgtgtcgtacggtatcgctggcgtcagtgtcgcggcagcctaggtgatctaagcatacttactatctcaagttacttttggtttcctgagcttgcatggtaattcatataccgtatacgtgtgtgactcaggggcgaagctgccttaaggcacaggggtcaccggacccgatggaatttatcaaatccagtgtaaaatactatttaacactgttcatcaatatatttgatttcaataattcatggagctgaccttgtggatccattttctgtcttcgcctctggtgtgactagtattttggtttgacttttcactctgtataagatatatattataccagcgagtttatcgactgctagttttac

SEQ ID NO: 137407 - DNA, 1372 bp, Zea Mays
gtcactcacgggtagctcatggtcgagcgtagcatgcaggaacttatttgccgtgcgctcccaggtctccgctcgcgtgccttccagtctgtctcacactagctgctgtgggacgatcgaagtgggtgtgtcagctagctagctgcgccgtgaccacgcacatgaccgcagtgcgcgcggggctgatcaagggaaagtgatcggatggagctggagctcgggctcgcgccgccgaacccgcatcagccgctggctgccgccgccgagttcgtcggtctcctcagcagctcggctggctcgtgcgggaacaagagggttctcggcgacgcgttcggggccgccaaggcggccacgcttccgctcttcgtctgcgaggatggcgacggaggcggcggcgaccgcgaccgcgacggcgtcgtcgaccatgaacagcaaagcaacaagaagaagaggctggtggggtggccgccggtgaagtgcgcgcgtaggcgtagctgcggcggcgggtacgtgaaggtgaagctggaaggggtgcccatcgggcggaaggtggacgtgtccatccacggctcgtaccaggagctgctccgcacgctcgagagcatgttcccttcgggtaaccaacaagatcatgcagaagacgaggtggtggtctcgcacgagcgccgccgtcgccatccttatgtagtcacctacgaggacggcgaaggggactggttgctcgtcggagatgatgtgccgtgggaggtctttgtcaagtcagtgaagcggctcaagatacttgcgtagccgacggtcggcgcctcagagacgtcgtgtggtccgtctcaccaggatcggagcagtgtagtactcctgggcgtcatctgcgtaataacgttgtttctgtcctgtgtgcccgtagcagtacgtactgtcctatagtaagctagctttatggggtgcttcagctttcagagcatgacgaaagcactgattagctgctgtcatcacatttggttcgtctttgtgtcgtacggtatcgctggcgtcagtgtcgcggcagcctaggtgatctaagcatacttactatctcaagttacttttggtttcctgagcttgcatggtaattcatataccgtatacgtgtgtgactcaggggcgaagctgccttaaggcacaggggtcaccggacccgatggaatttatcaaatccagtgtaaaatactatttaacactgttcatcaatatatttgatttcaataattcatggagctgaccttgtggatccattttctgtcttcgcctctggtgtgactagtattttggtttgacttttcactctgtataagatatatattataccagcgagtttatcgactgctagttttac

SEQ ID NO: 137408 - DNA, 1372 bp, Zea Mays
gtcactcacgggtagctcatggtcgagcgtagcatgcaggaacttatttgccgtgcgctcccaggtctccgctcgcgtgccttccagtctgtctcacactagctgctgtgggacgatcgaagtgggtgtgtcagctagctagctgcgccgtgaccacgcacatgaccgcagtgcgcgcggggctgatcaagggaaagtgatcggatggagctggagctcgggctcgcgccgccgaacccgcatcagccgctggctgccgccgccgagttcgtcggtctcctcagcagctcggctggctcgtgcgggaacaagagggttctcggcgacgcgttcggggccgccaaggcggccacgcttccgctcttcgtctgcgaggatggcgacggaggcggcggcgaccgcgaccgcgacggcgtcgtcgaccatgaacagcaaagcaacaatgtacccaggaagaagaggctggtggggtggccgccggtgaagtgcgcgcgtaggcgtagctgcggcggcgggtacgtgaaggtgaagctggaaggggtgcccatcgggcggaaggtggacgtgtccatccacggctcgtaccaggagctgctccgcacgctcgagagcatgttcccttcgggtaaccaacaagaagacgaggtggtggtctcgcacgagcgccgccgtcgccatccttatgtagtcacctacgaggacggcgaaggggactggttgctcgtcggagatgatgtgccgtgggaggtctttgtcaagtcagtgaagcggctcaagatacttgcgtagccgacggtcggcgcctcagagacgtcgtgtggtccgtctcaccaggatcggagcagtgtagtactcctgggcgtcatctgcgtaataacgttgtttctgtcctgtgtgcccgtagcagtacgtactgtcctatagtaagctagctttatggggtgcttcagctttcagagcatgacgaaagcactgattagctgctgtcatcacatttggttcgtctttgtgtcgtacggtatcgctggcgtcagtgtcgcggcagcctaggtgatctaagcatacttactatctcaagttacttttggtttcctgagcttgcatggtaattcatataccgtatacgtgtgtgactcaggggcgaagctgccttaaggcacaggggtcaccggacccgatggaatttatcaaatccagtgtaaaatactatttaacactgttcatcaatatatttgatttcaataattcatggagctgaccttgtggatccattttctgtcttcgcctctggtgtgactagtattttggtttgacttttcactctgtataagatatatattataccagcgagtttatcgactgctagttttac

SEQ ID NO: 137409 - DNA, 7364 bp, Zea Mays
atgtggaacggcgtgccgcctccgcctccgcctccgttgcagatggcggcggcccctcctccccctggcacgacggtgcccggggcaggccagcccccgcccccgcccccgccgcctgccggggcgtcgcagggcggcaagccgctgacaccgatggagctggaggcgcagctggtggagaaggcccgcaaatggcaccagctcaactccaagcgctacggcgacaaacgcaagttcgggttcgtcgaggcacagaaggaggacatgccccctgagcacgtccgcaaaatcaccagagaccatggagacatgacttccaagaagtacagacatgataagcgtgtttatcttggagcactcaaatttgtgccccacgctgtgtacaaactgctggagaacatgccgatgccttgggagcaggttcgccatgtgaaaatcttgtatcatatcactggggctatcacttttgtaaatgaaatcccatgggttgttgaacccatatacctcgcacagtggggtacaatgtggattatgatgcgacgagagaagagggataggcgtcattttaaacgaatgcggtttcctccatttgatgatgaggaacccccactggactatgctgataatttgttggatgttgaaccacttgaagctatacagttggagttggatgaggaggaagatgcagctgtctatgaatggttctatgatcacaaacctctgatgaagacgaagctcataaatggccctagttacaggaaatggcatctatctcttcccataatggcaacactatatcgccttgctggccagctgttgtcagatctgatcgataggaattatttctacctatttgatatggagtctttctttactgccaaggcccttaatatgtgcattccagggggtccgaagtttgagccattataccgtgatatggagaagggtgatgaggactggaatgagttcaatgatataaataagctcatcatacgtcagccacttcgaactgagtacaggattgctttccctcacctgtacaacaacaggccaaggaaagtgaaacttggtatatatcatacccccatgataatgtatatcaagactgaagatccagacctgccagcgttctactatgatcctctgataaaccctatcacttcaaccaacaaggttgatcgtagggagaggaaagcagctgaagaggaagatgatgaagatttttgtctcccagaagatgtagagcctctcttgaaacagactgaactctacactgatacaacagctgctggtatatcgttactttttgctccaaagccttttaacatgagatctggtcggacacgtcgtgcagaggatattcctcttgtatctgagtggtacaaggaacattgccctccagcttatcctgtgaaagttcgggtgagctatcagaagctattgaagtgttatgtgctcaatgagctacatcataggcctcccaaggctcagaaaaagaagcatctgttccgttcactccaagcaactaagtttttccaaactactgagcttgactgggcagaagcaggcttgcaagtttgcaagcaggggtacaacatgttaaacttgttgattcacaggaagaatcttaattatctccatttagattacaatttcaatttgaagcctgtgaagactcttacaacaaaggaaaggaagaaatctcgttttggaaatgcatttcatctgtgtcgtgagattttacgacttacgaagttggttgttgatgctaacatccagttccgtctgggaaatgtggatgccttccagttggctgatggtctgcaatatatattttctcatgttggacagttaactggtatgtataggtacaagtaccgattgatgaggcagattaggatgtgcaaagatctgaagcacttgatatattaccgtttcaacactggtcctgttggcaaaggacctggttgtgggttttgggctccaatgtggagagtgtggctctttttccttcgaggtattgtcccactattggagcgttggttgggtaatcttttggcacggcagtttgagggtcgtcattccaagggtgtggccaaaactgtaacaaagcaacgtgttgagtctcacttcgatttagaacttcgcgctgcagttatgcacgatgttttagatgctatgccagaaggcatcaagcaaaataaggctcgaactatattacagcatcttagtgaggcatggcgttgctggaaggcaaatatcccatggaaagtccctggtctacctgtgcctattgagaacatgattcttcgttatgtgaagtcgaaggcagactggtggactaatgtcgctcattacaatcgtgagcgtatcaggcgtggtgctacagttgacaaaactgtttgtcggaaaaatctaggaaggttaactcgtctgtggcttaaggcagagcaagagaggcaacacaattacttgaaagatgggccatatgtaactcctgaagaggctgttgctatctatacaacaactgttcattggctggaatcaagaaagttctcgccaattccttttccgccgttgtcatacaagcatgacactaaacttcttatacttgcactggaaagactgaaggagtcctacagtgtagcagttagattgaaccaattgcaacgggaggagcttgggttgatcgaacaagcgtatgataatccacatgaagcactgtcaaggataaaaaggcacctccttactcagcgagctttcaaagaagttggtatagaattcatggacttgtacagctacttgattccagtatatgaaattgaacctcttgaaaagatcactgatgcataccttgaccagtacctgtggtacgagggggacaaacgacacctctttccaaattgggttaagcctgctgattcagaaccaccacctcttcttgtttataaatggtgccagggcataaataatttactggatatatgggacacaagtgatgggcagtgtgttgtgatgctccagacaaaatttgagaagttctttgaaaaaattgatctgactctgttgaacaggcttctgcggttggtcttggatcataacatagctgactatgtcactgcaaagaacaatgtagtgctgtcttacaaggacatgagtcacacaaattcttatggtctcattcgagggcttcaatttgcatcttttgttgttcagtactatggccttgtgctggatctcctgattcttggccttactcgtgcaagtgagattgctgggccacctcaaatgccaaatgaatttcttacatatgctgacacaaaagttgagacaaggcatcccatcagattgtattctcgatatattgacaaggtgcatatattgttccggttcacccatgaggaagcacgggatctcattcagcgttacttgacagaacatcctgatcctaacaatgagaacatggttggttacaataacaagaaatgttggcccagagatgcaagaatgaggcttatgaaacatgatgtgaatcttggaagaagtgtgttctgggatatgaagaaccgccttccgaggagcattacaactttagaatgggagaataactttgtctctgtttacagcaaggacaatccaaacctgctttttagcatgtgtggctttgaagtccggatactgccaaagatacggatgactcaggaggcgttcagcaacacaaaggatggggtatggaatttgcagaatgaacagacaaaagaaaggacagcaattgccttcctgagggttgatgatgaacatatgaaagtgttcgagaaccgtgtcaggcagattctaatgtcatctgggtcaacaacgttcacgaagatagtcaataagtggaatacggctcttattggccttatgacatattttcgtgaagcaactgtccatacccaggagcttttggatttactagtcaaatgtgaaaacaagatccagacccgtataaagattggcctgaattcaaagatgcctagcaggtttcctccagttatcttctatactcccaaggagattggaggtcttggaatgttatcaatgggccatattcttataccacagagcgatcttaggtatagcaagcagacagatgttggtgtaacacattttagaagtggcatgagccatgaagaggaccagctcattccaaacttgtatcgttacattcagccatgggagagtgagtttattgattcacagcgtgtttgggctgagtatgctttgaagaggcaggaagcacaatcacagaacagacgattaactcttgaggatctcgaagattcatgggatagaggtatacctcgtatcaacactcttttccaaaaagaccgccatacactagcctatgacaaaggatggagagtgagaacggattttaagcaatatcaagtgctgaaacagaacccattctggtggacacatcagcggcatgatgggaagctttggaatctaaataactacagaactgatgtcattcaagcacttggtggtgtagaaggcatcctggagcatacattatttaaagggacttacttccctacttgggagggtctgttttgggagaaggcatcaggtttcgaagagtcaatgaaatacaagaagctgacaaatgcacaacgttctggtctcaatcaaatccccaatcgaagatttaccctgtggtggtcaccaaccatcaatcgtgcaaacgtgtatgttggtttccaggtccagctagatcttacggggatattcatgcatgggaaaatcccgacgttgaagatttctctgatccagatcttccgtgcacatctgtggcaaaagatccatgaaagtgttgttatggatctttgccaagttttggaccaggagttggatgcacttgagattgagactgtgcagaaggagacaatacatcccaggaagagttacaagatgaacagctcctgtgcagatatccttctctttgctgcacacagatggacgatgtccaaaccaagcttagtttctgagtccaaggatgtctttgatcagaaagcaagtaacaagtattggattgatgtgcaactgcgttggggagactatgattcacatgacgtagaacgatatacaagagccaagttcatggattacacaacagacaatatgtccatatacccatcgccaactggtgtgatgattggaatcgatctagcatataatttgcactctgctttcggtaactggtttcctggatcaaagccactacttcagcaggcaatgaacaagatcatgaagtcaaatcctgccctgtatgtcctgagggagagaataaggaagggtctgcagttgtactcttctgaacccacagaaccgtacctgtcttcacaaaactatggagagatattcagcaatcaaatcatatggtttgtggatgatacaaatgtgtatcgagtcactattcacaaaacatttgagggtaacttgaccaccaaaccaatcaatggtgctattttcattttcaatccaagaacgggtcaactttttcttaaggttatccacacaagtgtatgggcagggcaaaaacgtcttgggcagctggccaagtggaaaacagctgaggaggttgctgcattagttcgatctcttcctgtagaagagcagccaaagcaaattattgtgacaaggaagggcatgttagatcccttggaggtccatctacttgacttccctaacattgttatcaaaggcagcgagctgcagcttcctttccaggcttgcttgaagattgagaagtttggtgatctgatactgaaggcaactgaaccacaaatggttctttataatatatatgatgattggttgaaaagtatctcatcatacacagcattctctcgcattgtgcttatcctacgtgcacttcatgtgaataatgagaaggcaaagatgttgctcaaacctgacaaaacaattgttactgaaccacatcatatatggccaactctgaatgatgaacagtggttgaaggttgaatgtgcactaagggacctcattctttccgattatgcaaagaaaaacaatgttaatacttctgcactcacacaatctgaaatgcgagatatcatccttggtgctgaaattgctccaccatcacagcagaggcaacagattgctgaaattgagaaacagtcaagagagacgactcagttaactgctgtaaccacaaggacaacaaatgtgcatggagatgaactcattatcacaaccacaagtccatacgagcaacaagcattcgcatccaagactgattggcgtgtcagagccatctctgccacaaacttgtatcttcgtgtaaatcacatttatgtcaattctgatgatataaaggagactggctacacttacattatgccaaagaacatattgaagaaattcatatgcatagcagatctgcggacacaaattgctggatttttgtatgggctgagtccacaggacaatcctcaagtcaaagagattaggtgtatagccatgcctccacagcatggaacacaccagatggtgactcttccagcaaatcttcctgagcacgagttccttaatgatctagaacccttgggatggatgcatacacagccaaatgaagctccacagctatcgccacaggacctgacatcacatgccaagattctggagaacaacaaacaatgggatggtgagaagtgcatcattctgacatgcagcttcaccccaggatcttgctcgttgactgcatacaagctgacaccaagcggttacgagtggggacgcagcaacaaggacaacggaagcaatccacatggataccttccaactcactacgagaaggtccagatgcttctgagcgaccgcttccttggattctacatggttccggataacgctccttggaacttcaacttcatgggagtgaagcacgacccacagatgaagtacaacatgaagctgggcatgccccgggacttctatcacgaggaccacaggccaacacacttcctcgagttcagcaacatcgaggagggtgaggccgctgaaggcgatagggaggacacattcacgtaggcgcctgttagaaactgctctgttttaacggcagtgtgtgtagctgtaacctgacttgacgggtgtcatctgttcgcctgttgcttaagcctgtattatactacctctttgttgtaagaagccctggtgagggattaaaattgtacaagtgcgcgccatggtaacagtaaaggttttgcttcctcccaagcttccaccttcaatccttccaggcttcataaatttaaattaaaaaaggtcttttaatagattcctttctttat

SEQ ID NO: 137410 - DNA, 1611 bp, Zea Mays
ttggtttggttgcttgctgtggccgtgtgtttgtgtctcccccaattgcatataagcatgggctcctcacgcttcacaagcctttgctcttggcctttccctcatcgcctaatgtcttggacccttgccccgcctcctgcaagttgcaggcaaccgagaagctaccactactagctgctcaggctctgcccagctcaaaaggcgttcaggtttagtgcacgaaatgagcagcgcgctgcccgcggcagatcgggcgacagggagaaggaggagggagagatgttgctgctaggattagccacgggctgctgcgtcctcgccgtcgccggggaagccgagaagcaggacggcggcggggcgtcctccgggggcggtcatggtcttggttccaagattagccccgccgtgctgttcgccgtggtgatagcggccgtggtgctgttcgtctcctgcctgctgcatctcttggtcaggctcttgctcaggcgcggccgtgcccgtgcccgtgcgcgcgcgccggccgaggccggtgccggtgccggcggtggggcggacgcggcgggcggcggcggggaggagtccgcgttgcagaggcagctgcagcagctgttccacctgcacgacgccgggctggaccaggacgtcatcgacgcgctcccggtgttcctgtaccgggaggtggtcggcgccggcgccggcgccaaggagccgttcgactgcgcggtctgcctgtgcgagttcgccggcgaggaccggctgcggctgctgccgctgtgcgggcacgcgttccacatcggctgcatcgacacctggctgctctccaactccacgtgcccgctgtgccggtgcgcgctcggcgccgacgctgccgcgctgttcgacgaggaaggcatgtgggagcacgaggacgccgtgctccccgtgcgcctcggcaagttcaagaacctggccagggcggcgcctggccccgtgcgcgccggcgccggcattgtgaccagggaggccggcgagacgagcagcagcagcctggacgccaggcggtgctactccatgggctcctaccagtacgtcctcgccgaggcgagcctccaggtgtccgtccacaggaggcacggcgacggccatggcaggggcggggcggggctcagaggcgtcggcgtgggctccaaccgcgccggcgccacagaggggaagaggatcggcgcgggcagcaaaggcgacagcttctcggtgtccaagatttggcagtggccgcggaacggcaaggagaagcttcccgtgctcgcgtccgatgactcgccggccatgaacggcaggctgccgtggcagaggccaagtcccggggattcgtgaatcgtgtcgtgacacaaagaaagcgtgtgtggtggtgcgtgctccaaacttgtattgagcttgtctgctcgcccttttaaccgctgatgatgaattggttcataggcattcgttgtttatcttatcttactagtaataataaatctcatttgcttgcttgcttgcttgtggtggtggtgatcctggctttctaggtgcatgaggaagatgaaacttgtgtgttcaacagagcatcccaatctggaattagccattcca

SEQ ID NO: 137411 - DNA, 724 bp, Zea Mays
atggcgcgcccttcaccgctaggtcctgccgccacctcctggccacgcatctcgctgcaggcacccggatctgtgccaccgccggcccatccgaggcagcgacgaggtaccccggtcgcctgcgtcgaagacctcccaccaccactgcgacttgagatcaaagcaaacactatagccttggttattgaggttttgacatattcactttatatgcagaaagtcaagactgagccaatttgtgtatgtggtgatgaagaggatcaagctgagccagagaaggccatcttcgtctttgccaagaacaccttgccaccaattggtataaattgaacaaacatcactatccattcattgttgctgaaattgttgccacttattattatttgtcagaccccatgttagaattggagaacttctacatgttaccaaatcaacctatgaccacaagtagggatccacaacacatgcgtcaacttcactacttttacagctgccagtgtgtaaacttttactaaaactttttctccattcacaatccattctcatatgccttgtgtgtctgatatatctaccatacattacacaagtgacaagtagggatgcacaaagcacttatgcctgcttcacagccttcaccttgagggcttctggtgtttatgtttagcttgattttttttttgctaaaacaagatcacagagaacagttaattggatcatgatcact

SEQ ID NO: 137412 - DNA, 114 bp, Zea Mays
gttttaattcaaaacctttattacttttatttgtatatttgtttagaaggatatgctttgataaagattcacatactaaaataaatgctaaatcttatttcttgaatatcgaag

SEQ ID NO: 137413 - DNA, 152 bp, Zea Mays
attgatgaagatattaaccataaaatcaaaacagggtggatggaacaaaatcaagcatctgttctatatgacaagagggtaccatggaagataaaagacaagttttataggatgtcgattagaccagctatgttgttggtgcggaatgttgg

SEQ ID NO: 137414 - DNA, 231 bp, Zea Mays
ttctcaaattggtggtgccaaagtatcaaggaagtggagaagagactaagaaaaggtcttaattccttgatcattttggtcgcttgggagatttggaagcatcgtaatgcttgtgtttttgaaggggttgtgccctgcacccagcgagttcagagtgctgtgattgaggagggcagcgtttggtgcttggctggtgcatcagctctgcaggacctcctcctacgccagctc

SEQ ID NO: 137415 - DNA, 173 bp, Zea Mays
ctgttgattcttccacttgcatcaattgatgttccaagataatttctacgcagaacaagattgcaaaagaataagtaaggttgctataattaacttaatagttaaaataatgattactataagaaagaaagaaatttatacatgaactgcttctgaccagaaggattgttaga

SEQ ID NO: 137416 - DNA, 1176 bp, Zea Mays
gcttctgccgagtcgctcccccttccagggtctcaaacgcaaaccccaatctcggcgtcaccgccccaaatctagcaaacggaaatcccatctcgccgccgccgcgatgtctcgccgctatgacagtcgcacgacgatcttctcgccggaggggcgtctctaccaggtggagtacgcgatggaggcgatcggcaacgccgggtcagccctcgggatcctggcggccgacggcgtagtcctggtcggcgagaagaaggtgacctccaagctcctccagacctcccgctccgccgagaagatgtacaagatcgactcccacctggcgtgcgctgtggcagggatcatgtccgacgccaacatcctcatcaacaccgcccgcctccacgcccagcgctacgcgctctcctaccaggagcccatccccgtcgagcagctcgtccagtccctctgcgacaccaagcagggttacacccagtttggtggcctccgcccctttggggtctccttcctattcgccggttgggacaagcaccacggtttccagctctacatgagcgacccatctggcaactacggcgggtggaaggccgccgctgttggggccaacagccaggccgcgcagtccatgctcaagcaggactacaaggacgccttgacccgcgaggaggccgtcggtctcgcgctcaaggtcctcagcaagaccatggactccaccagcttgactgccgagaagctggagctggccgaggtatttctgcagcccgacaccggggaggtacagtaccaggtgtgctctcctgaggcgctggggaagctgcttgcaaactccggcctgacacagccaacacccgaggcataatgtactggtttgcagtggcatgtgatgccttctactgctcttagacatggtttaagcagttatgcttctgttgtgtgaacttaaatattcgacaattatgtgttctatttttgtgttgagcatccttgatccgttaatgtttcatctgtaatagtgcattgcattgaattggttgcaaattgttgatctctatctgctctgctttattgttgtcacgattatggagcatgtggatgttggacagtggaacaggggaaggtaggttcaggtctactagggcaatttgaggcacctggatgatgcttagtaaacatggg

SEQ ID NO: 137417 - DNA, 609 bp, Zea Mays
ttccgagcacaaggcatgatgtaccacaatatcaagtcatttggtagggaaggtggggtggagcataaacaccttgagctttacttttacgatgatgatcccaatctcgagcatcggtatcgtaagtgccgcgaaaaatgtcaacagaaagacaaagatgttattaaacaattagttggcatactccatggaaacccgtactctgagcaccttaggagcatgggccatgttgagaaccttgatgactatcgtatcacattgaaccttgaccagacgttgaaccagaagacatataacacgcctctcacttcagaggtcgctactgtctggatcgaggggagcgaacagcgaggccagttcagcaagagtgttatgctacatgggaaggataggtcaagccacgacatccgctcataccatggatgctatgatgcactatcatatccactgttcttccctagaggtgaacttggatggcatgcaaacataccaaaggtcggtgtatccatgggcgaagtggatgcataccgtgcgacgcatagggcaagtaatgcaaacgatgaagatgcaggttagttgtttctttgatatttcttacataacacattg

SEQ ID NO: 137418 - DNA, 103 bp, Zea Mays
ttttttttgttttatggatcaatgttcttgtcatcatagagtgtggtctattattgcattagagtgccttttctggttgaaatcatctaagaatcaatgtgtc

SEQ ID NO: 137419 - DNA, 128 bp, Zea Mays
gaaacgggttccaggcaaaatgttatggagttcatatgcctaaaatattaaaacaaaaaggagactctaaacagacaacaataagatccactggaaaattaacatgatcaatatttgaaaagaaaaaa

SEQ ID NO: 137420 - DNA, 3600 bp, Zea Mays
aaaaccaaaccaaaaaccgatggaatgaaaagtcgtattccattcagtttttgtctactaactagggtttgccgcggatccggtccctcctccactaacataagtcgccatccccgccgctgcagttcgagctccgaccggtcccacgccggatctacccggtgtcgtcctcgactttcgccgttagtcccctcaaggaaaggaaagaaggagagggatgacgtggttccgcgccgcatcgggtgccgcccgcctcgccctccgccgcagcctcgccacccgcacgccgccagccgccgccacccgatgcggccgctgcttccactccaccgctatgcgtccccgctccgccgcccccgtgccccgggccgtcccgctctcgcgcctctctgacagcttcctcgacggtaccagcagcgtctacctcgaggagctccagcggacctgggaggctgacccttcctccgtcgacgagtcatgggacaacttcttccgcaacttcgtcgcccaggcctctccttccgccggcgtctccggccagaccatccaggagagcatgcagctcctcctcctcgtcagggcctaccaagtcaacggccacatgatggccaagctcgaccccctgggcctcgacgacagagccgtccccgaagatctccgcctcggcctctacggcttcacagaggccgacctcgatagggagttcttcctcggcgtctggaggatgtccggttttctctccgagaaccgccccgtgctcacactccgtgagatcctcaacaagctccagcaggcatactgtggacccatcggctacgagtacatgcacatccctgatagagacaagtgcaactggctcagggaaaagatcgagactgccaagcccaaggaatataacaaggaccgccgccttgtcatgcttgacaggcttatctggagcacccagtttgagaatttcctagccaccaagtgggccaccgccaagaggtttggccttgagggtggtgagacgctcatccctggcatgaaggagatgttcgatagggctgctgacctcggtgttgagaacattgtcatcggtatgccgcataggggaaggctcaatgtccttggtaatgtcgttcgcaagccactgtctcagatattcagcgagttcactggcggcacaaggcctgttgaaggcgaagatggtctctacaccggaactggtgatgtcaagtaccacctgggtacctcctatgatcgcccaactcgaggcggcaacaggatccatttgtccttggttgccaatcccagccatctggaagccgttgatcctgttgtcattggcaagacgcgtgctaagcagttctactccaatgatgctgacaggacaaagaacatgggtattctgatccacggagatggcagctttgctggccagggtgtggtctatgagacactccatctaagtgccctcccaaactacactactggtggaaccattcatattgttgtcaataaccaagttgcctttacgactgatccaagagctggcaggtcctcccagtactgcacagatgttgccaaagccctgaatgctcctatattccatgtaaatggcgacgatttagaggctgttgtttgtgtttgtgagcttgcagcggagtggcgccagactttccactccgatgtggtggttgatctgatttgctaccgccgtttcgggcataacgaaattgatgaaccttccttcacacagccaaaaatgtatcaggtcattaagaaccatcccagctcattgaagctttatgagcagaaactgctaggaacgggtgaagtcatgaaagaagatgtccagaggatccatgacaaggtgaaccgaatcttgaacgaagagtttgctaagagcaaagactacgttcccaacaagagggattggctctcagcttactggactggctttaagtcaccagagcaaatatcacgtgttcgcaacactggggtgaagcctgaaatactgaaacgtgtaggtcaggcaattactacactgcctgaaaacttcaaaccacacagagcagtgaagaagatttttgagctgcgtgcagctatgatagagagtggtcaaggaattgattgggctgttgctgaagccctggcctttgcaacacttatagtggaaggcaatcatgttaggctaagtggacaggatgtggaaagaggaactttcagccatcggcatgcagttctgcatgatcaggaaactggagcaaagtactgtccacttgaccatgttgcaatggatcaaaatgaggagctatttactgttagcaacagttcactttcagagtttgctgttcttgggtttgaattgggttactccatggagaaccctaattcattggtactttgggaagcacaatttggcgattttgccaatggtgcacaagtgatgttcgaccaatttttgagcagcggcgaggcaaaatggttgcggcaaaccggccttgttgttctgttgcctcatggttatgatggccaaggtcctgagcattctagtgcccgcttggagcgcttccttcagatgagtgatgataatccttttgtcatacctgagatggaaccaacacttcgcaagcagatacaagagtgtaactggcaagttgtgaatgtgacaactcctgcaaattattttcatctgttgcgtcggcagatacatagggagttccggaagccgctgattgtaacagctcctaagaacctgcttaggcacaaggattgcaagtcaaatctttcagagtttgatgatgttgaaggccatctaggattcgataagcagggaacacgtttcaagcgactgataaaggaccgtaatgatcacaagcaagtcgaggagggtgtcaaccgtcttatcttatgttctgggaaagtttactatgaacttgacgaagagcgtaagaagtcggagcgtggcgatgttgcaatttgcagagttgagcaactttgcccgttcccctatgaccttatccaaagagagctgaagagatacccaaatgcggagattgtgtggtgccaggaggagcccatgaacatgggtgcatacagctatatctctcctcgtctgtttactgcgatgaaggctcttgggcggggttcgtttgaagacatcaagtatgttggcagagcaccttcagctgctacagcaacaggcttcctgtcggttcatgcgcaggagcagtcagagctagtgaagaaggcactgcaggcagagccgatcaaattcctctgatgtatgcaccgtatctacagcaacaacctgcctgcatggttgcaggaacatgccagggattttcttttccccggccagttttgaggcttttcagcgttggaactaatgacgacttccttccttgaagacatcatattaattgccctaatcagctatctagtagttaattataaactacgtgcgaacagaccctggtttagctggcagttcaatttgagacctgggttcaaaaaaaaaaatctctgagtcgggtttaaggcagccagacaacacaggagttcagcttctgacccataataaaactatttatatttaataaaactatatttaac

SEQ ID NO: 137421 - DNA, 884 bp, Zea Mays
atgtcgtcggtcccggactgctccgacgccatcgtccccaacagcaagcgacggcgccaccggtcgccgcccgccgcttcatcctcctcctcgcacagcagcagcaccacacagaaagaggaactggaagacgaggaggaggacatggccaaatgcctcatcctcctcgcccagggccccgccgccattgaggcagctagagtaatgccggcaccccgtagcaggccaaagagcacggggagccgcaggttcttggccgccgccgaggccagaggtggtgtgtgcgtgtcgtacgagtgcaagacgtgcaacaggtgcttcccctctttccaggccctcggcggccaccgcaccagccacaacaagcatccgcgacggccagcagaggaggtgctggcggcaatggccatcaccaccacgcttagcctagcggcgacgaggcccgcgcacgagtgctcgtcatgcggctccgtgttcacgtccggccaagcgctcggcgggcacatgaggcgccaccggccgctcaccaccaccagctcgtcgcccgccacggggaccgaggaccaacaagacagcagtagcaagctgctgcaggagagtagaatcaacctggagctggacctcaacctgctgccgtcgacggagcaggaggtgacatcaccaccgccaaagccgccatgccatgcaccagctgctgcttcaccgatcgatcatatccaaggctgctgccagttccgctagtgttccctgcggttttcatccggccgggccggccggcaggcctatgtttgcactatcttcttattcttgtttcgattaccatgcatgttgcaacatgtatgcattgcatgcatggtcttgaatctatattatttgtttatctg

SEQ ID NO: 137422 - DNA, 1206 bp, Zea Mays
atgtcgcggctcggtttatcccttccccagattccttgggcactgggtctgcccttgtttgggaagagaggtattgagaagcagcctttccagcttcctgactttatagctgcaactggaatagaaaagataagacaggcgtatattgagaaagaggatagcaagaagttgaaacagaaacagcgggagcgcatgcagcccaaaatgggcaaaatggatatagattatcaggttttgcatgatgcgttcttcaaatatcagacaaaacccaagttgtctagtcatggtgatctgtattatgaaggcaaagagtttgaggttaaactgagggaaatgaagccaggcatgctgtctcatgagcttaaagatgctcttggtatgcctgatggtgcccctcccccatggcttataaacatgcagcgctatggtccacctccatcttatccccaactgaagatcccaggtcttaatgccccaatcccccctggtgccagttttggttatagaccaggagagtggggaaagccaccagttgatgaggatgaacctgttgatcgcagcaaacactggggagatttggaggaagaggaggaagaagaggaagaggaggaagaggaagaaccaatggaagacgaggaaatggaagacggaattcagtccgtcgataccatttcaagtactccgactggtgttgaaacacctgatgttatcgaccttcggaagctgcagaggaaggagactgacaagcaggcagaacggccgttgtatcaggttcttgaacagaaggacaaaaggatcgcccctgggacactatatgggtcaagccatacgtacgtgctgggagcacaagataaatcatcagctccgaaaagagtggatctgcttaagaatcaaaagtcagacaaggtggacgtcaccatccaacccgatgccatggatgatgttgtggcagccaagtacgaagaagcgcgagaggaagagaagcttcggaaccaaaaggaggacttcagcgacatggtggcggagtttcataacacttctcatgatgtggcagagttggaaagatcaaaaaagtgctacaaaattttcattgaaaatagcctaaggaaggaaatgatgacgctgcctaaggaaagaaatgatgacgctgtggtttggtacaaatcgtactgccttgttcaacaattcacctatatagtcatctaa

SEQ ID NO: 137423 - DNA, 730 bp, Zea Mays
tttttcttttctctctttgtaaagaatatcgagccttcttctcttgagagttgagaacctagctttcaagtgggccaagataaagcccagtttgtcccactgggctgggtacgcacagaacctacccaggcgaacaggatatcgagcctctcctcgtttcggccctcctcgcttgcgcgccgccgccgactatggccgccgccggggtggagcctcgccccaacccgcctcctaccatggcttccgacctccccaacggaagtaaaaccaagtcgcgagagtccgaccggcgccgccgccgccgcaaggtcaagaagaacaagtccgccgctgaggccggtgcccagaacgagggcgggggagcttctagctccgacgccaaggagaacgcagatcctaaccccgagcccatggtggaggtggagatagagtatgtactggagaaggccgagctggacgatcctctcctcgatgacttcaagaccatcttcgaaaagttcacctttaagggcatgcacaatgagtgtcttaagttgtgtcttaaagtgtgcctaaggaggtgaatgtaaaaaatctcaagacatgtatcttgacgaagacacagtgtcttagctctatattcgagacagaagactatctgattggtcactttaatttattgaatgttctgattggtacaatgaatatggtaagacacatgttttagacatgaccactgtattatattatg

SEQ ID NO: 137424 - DNA, 2952 bp, Zea Mays
cagacaaccagcatgtctatagctttaacctaactcgattgcgctgaagcaataccacattctacaaggatgtttctgtgttaaacatgtctatttacatttgttgtcaagaaatttaacacatacttaattcctgttccagagatctacaaggagtcctaaagggtcccctgcaaccaaaggtgctgctgctaagaagcagcgagcaagtccaatggcaaaacagccagcagggatcaagaaggttagcggaactcggggaaagaaaaaaccaaaggtgggagaagatgaaatcgaagagctctcaagttcctcccaggataacgacgcagatgatgatagtgacgaggactgggccgaataatgcgatggtacagacgacggataggttgggccgttggggaagcatatgcataattgatgtgcggctgaagagaaggatggattgggggatggcacagaaactgcctgttttcatggactggtttggctggtcatgtctgacgacggatctagaatatggaatatcctgatctgttgtcaagctgagtccatgaaacgttggttgatgaaacattagttagtcagaagcgggtttgtttgtagttaggaactaggaacacacacacccgaggttgtgatggggttgcatacttggactagccattcccattcatctgtctgtactctgttcgactgttcctttgtgtggctcacacctgttgtgtttctgatggtggtcatttctccagccaggggcaaagaacacactgcgtttcgctgatcctttaattcagacccatagtccttttttttcttcagcacattctgatgtggctctttgtattgcagactgtatcatggtatcagattggtttcgacttgaaacccctctctcttcattacgcgtgtttctgatcttcttgttttggagtcagatcagatcggaagcaggagaggagaatatccgagatagataccctttccaagaggagagattccgcggggattctgagtagccttcggagttcggagcggtggggctggggcgtgcgggcgcggaccggcctcacctcccttcccctattttggtcctcctccctccccttgcgttcacaggccctatataacattagctagattcctcctccctccttcctcacggctgctgctgccctgccctgccctggagtaaggaagccgacaccacttggagttgctgccaactaccgggctcggctgtcaaattctctatctggcagccagcccgtgtccaattccaactccaccggtggtaaaccatcgacagcaggagcagggagggcaggctgcacaagaaaagagcatcattcctgctgatcggctcggctccactccaccccgaataaaatggcttccttctcgggacatctccaccgccccctgtccgccatggccgtggccgccttcgccgccgtctcctcccacgagcttcccgacaagctgtcccaccacaggcttcctgatgccagcacaggcacggacgcgctcgcctcgcttccattgaccaggtcagatgttcccgcagcgccttcggcatctgccctttctggcgcgcagctattgccacgggacctccacagcttgcgtctgctgaaggcgcccttcgcgtctgtgccggtcatgcagacggtgtaccagtacgccaactttgccaaaacctcgggacaggccgatgcgatgcctgcaattccttcctcgccgtccgatgtgctgtaccgctggcacctgccagaccccagggtctatgccgacttccctgacaagtctcagacggtcgtggtccttcttggttggttgggctcaaggcagaagcacctcaagagatatgccgattggtacacctccaggggcttccatgtcgtcactttcaccctcccgatgtctgacattctcagttataaccttggagggaaggctgagaagaacgttgagatgctatctgaacatattgctgactgggtcagggaggagagtgggaagaagattattttccacaccttcagtaatactggttggctttgttatggcgtaattctggagaacttgcaacagcatgatccttcagcagtggacaaaattaaagcttgtgtagtagactcagcacctgttgctgcacctgatcctcaggtttgggctttgggcttctcggctgccctcatgaaaaaacgcagtgtcaccacgaagggactaggttcagatgattcaaggtctgatgtcctagttgtggagtccaacaaggagctcaagctgggggcaacagaggcggttatactgtcagcgttagagagtttctttgacgttgttttgaactatccaaagatcaataggaggttgtgtgacgtgatggagctcttgtcctggaagcaacccaagtgcccccaattgtacatatacagctccgccgacagggtgatcccagcgaaatcagtggaggcattcatcgacggccagcggaaagccgggcatgaggtgagggcctgcgacttcgtgtcatcgccccatgtggaccattaccggagcaatcctgggctgtatagctctcagctggccaacttcttggaggattgtgtgcttgccaagcgctgtgagggtgcttgcacatcatgattgtctcttttatttgttcctggtcttgaattggaatgcaccagggacactgacatacgtgggttatacatgattttgttctctccttgttttaacggtctttgtgggtgacttttttttccccctcttgtaactcttgtctttgtggttggagtctgggcgcacaattgtaaaaacgtgtgaggagaaataaccaaatgaaaggagaggaaattcttttttttttatccactgagactgactgatagcctgaattacattttgattatgttactcgacctgtatggaatgatgtgcacagtg

SEQ ID NO: 137425 - DNA, 2006 bp, Zea Mays
ctctgctctgcaatctccctcccgtgagggaggtggtggggttcctgctttcctggaacaagcaaatccttgcttgccggttcgtctcccgacgatggtgggagacgaaagcaaaagagaaagcgccgtcctttttccgcccgccgcctcgctttcaattccccaccgccctcccgtgcctactttcgttttccctttctttttttcttctcgcttttccccttctcctacgcctctgcaaattgccgtatgcatagtctgatttcttctttttctttactatgatagacttgctcaatgtttcttctccttctgaattctaatggcttgctcaatgttttctttaacttcttctaaattctagtttgtttttttcctacatacatatgcaggagtaaggaagccgacaccacttggagttgctgccaactaccgggctcggctgtcaaattctctatctggcagccagcccgtgtccaattccaactccaccggtggtaaaccatcgacagcaggagcagggagggcaggctgcacaagaaaagagcatcattcctgctgatcggctcggctccactccaccccgaataaaatggcttccttctcgggacatctccaccgccccctgtccgccatggccgtggccgccttcgccgccgtctcctcccacgagcttcccgacaagctgtcccaccacaggcttcctgatgccagcacaggcacggacgcgctcgcctcgcttccattgaccagacggtgtaccagtacgccaactttgccaaaacctcgggacaggccgatgcgatgcctgcaattccttcctcgccgtccgatgtgctgtaccgctggcacctgccagaccccagggtctatgccgacttccctgacaagtctcagacggtcgtggtccttcttggttggttgggctcaaggcagaagcacctcaagagatatgccgattggtacacctccaggggcttccatgtcgtcactttcaccctcccgatgtctgacattctcagttataaccttggagggaaggctgagaagaacgttgagatgctatctgaacatattgctgactgggtcagggaggagagtgggaagaagattattttccacaccttcagtaatactggttggctttgttatggcgtaattctggagaacttgcaacagcatgatccttcagcagtggacaaaattaaagcttgtgtagtagactcagcacctgttgctgcacctgatcctcaggtttgggctttgggcttctcggctgccctcatgaaaaaacgcagtgtcaccacgaagggactaggttcagatgattcaaggtctgatgtcctagttgtggagtccaacaaggagctcaagctgggggcaacagaggcggttatactgtcagcgttagagagtttctttgacgttgttttgaactatccaaagatcaataggaggttgtgtgacgtgatggagctcttgtcctggaagcaacccaagtgcccccaattgtacatatacagctccgccgacagggtgatcccagcgaaatcagtggaggcattcatcgacggccagcggaaagccgggcatgaggtgagggcctgcgacttcgtgtcatcgccccatgtggaccattaccggagcaatcctgggctgtatagctctcagctggccaacttcttggaggattgtgtgcttgccaagcgctgtgagggtgcttgcacatcatgattgtctcttttatttgttcctggtcttgaattggaatgcaccagggacactgacatacgtgggttatacatgattttgttctctccttgttttaacggtctttgtgggtgacttttttttccccctcttgtaactcttgtctttgtggttggagtctgggcgcacaattgtaaaaacgtgtgaggagaaataaccaaatgaaaggagaggaaattcttttttttttatccactgagactgactgatagcctgaattacattttgattatgtt

SEQ ID NO: 137426 - DNA, 2549 bp, Zea Mays
atggccgccgctaggatcgccgcctgcaccacctccgcccgcaccgccctcgccttggcagacgaccccgcgccgccggacacgctggacgtggtgcgccggcagcgccagctcctacgccgcgccgcggccctctgcctcgaccccatcgccgaggagtccgacgttatttgccccctcccagtccctcgcatggccgttttttcagcgtcgaaggcggtctcggatgaatccgctttccgtgtggccggtagagtcttcgtcttcgtctcgtctcgtctcgtcccaaacacgcgaacgcgacacgccgacacccgtatcgtaccacctaacttttgctccgagatctcctcctcccgtctcatcagtcttttccaatcaatcaccagctcaaacttgtacccaaaaccctacaccggagggagagggatggtcaagaaagccgtctccaccgcgccagcagacgccgaggccgacgagcgccgccgcctccgctcgctcgccttctccaacggcctgctccagcgaggcgaccccgcggcgccgcgggcgccgctcgcgccggcggctgccgtcacgcgcctacagggccgcgacgtcgtccgccgtggcggccagcgaaagagccgctacctcttctccttccctggcctcctcgcgccagcagcctcgggtggccgggtcggagagctcgccgacctcgggaccaagaaccccctgctgtacctcgagttcccacagggaaggatgaagctcttcgggacgcacgtttaccccaagaacaagtacctcacgctgcagatgaccaggtcggccaagggcgtcgtctgtgaggacgtctttgagagcctgattgtgttttctgaagcctggtgggtgggaacaaaagaagataatccggaagagctcaaacttgagtttccaaaagaattccaaaatgatggcacgacagcagactgtgatttcagaggtggtgcaggtggtgccatcgatgaagcaactggaagcaaagctggaaaggaaattgcagaacctcgttccccaaagtttgcatctgatgacgatgctcctgaggattcaaatcataaggatgagaataacacacagactatgagtggaacaccagttagacagtctgctaggaatgcagggaaaaccttgaaaaggtacacagacttatcttctggaggtgaatcgtctgacaataataatgaaactgatatatctgaggacttggatgataaggaggtggagagtccagaaattaaggacgagattgaaagcgaagatgtcaaacccgcagattcttcagcaatttccctctctagcaagaaggagcctcttgttcaggctactttgtctagcatgtttataagggcagaagaaaaaaagagatctacaaggagtcctaaagggtcccctgcaaccaaaggtgctgctgctaagaagcagcgagcaagtccaatggcaaaacagccagcagggatcaagaagggtaagttcactgaagtgacatgcatcttctgtagtagacatctactaacattagtgtgctatcatttggtgtaagcatccaaagacatctgaccaatttcgtttgggaagatgtgtgctagtacaagtgaagaactcttagggttgtttgcgagataagctttcagtttcatttgtataggctgggggcactgaccagtgtgttttccgaatgcagttagcggaactcggggaaagaaaaaaccaaaggtgggagaagatgaaatcgaagagctctcaagttcctcccaggataacgacgcagatgatgatagtgacgaggactgggccgaataatgcgatggtacagacgacggataggttgggccgttggggaagcatatgcataattgatgtgcggctgaagagaaggatggattgggggatggcacagaaactgcctgttttcatggactggtttggctggtcatgtctgacgacggatctagaatatggaatatcctgatctgttgtcaagctgagtccatgaaacgttggttgatgaaacattagttagtcagaagcgggtttgtttgtagttaggaactaggaacacacacacccgaggttgtgatggggttgcatacttggactagccattcccattcatctgtctgtactctgttcgactgttcctttgtgtggctcacacctgttgtgtttctgatggtggtcatttctccagccaggggcaaagaacacactgcgtttcgctgatcctttaattcagacccatagtccttttttttcttcagcacattctgatgtggctctttgtattgcagactgtatcatggtatcagattggtttcgacttgaaacccctctctcttcattacgcgtgtttctgatcttcttgttttggagtcagatcagatcggaagcaggagaggagaatatccgagatagataccctttccaagaggagagattccgcggggattctgagtagccttcggagttcggagcggtggggctggggcgtgcgggcgcggaccggcctcacctcccttccc

SEQ ID NO: 137427 - DNA, 2369 bp, Zea Mays
atggccgccgctaggatcgccgcctgcaccacctccgcccgcaccgccctcgccttggcagacgaccccgcgccgccggacacgctggacgtggtgcgccggcagcgccagctcctacgccgcgccgcggccctctgcctcgaccccatcgccgaggagtccgacgttatttgccccctcccagtccctcgcatggccgttttttcagcgtcgaaggcggtctcggatgaatccgctttccgtgtggccggtagagtcttcgtcttcgtctcgtctcgtctcgtcccaaacacgcgaacgcgacacgccgacacccgtatcgtaccacctaacttttgctccgagatctcctcctcccgtctcatcagtcttttccaatcaatcaccagctcaaacttgtacccaaaaccctacaccggagggagagggatggtcaagaaagccgtctccaccgcgccagcagacgccgaggccgacgagcgccgccgcctccgctcgctcgccttctccaacggcctgctccagcgaggcgaccccgcggcgccgcgggcgccgctcgcgccggcggctgccgtcacgcgcctacagggccgcgacgtcgtccgccgtggcggccagcgaaagagccgctacctcttctccttccctggcctcctcgcgccagcagcctcgggtggccgggtcggagagctcgccgacctcgggaccaagaaccccctgctgtacctcgagttcccacagggaaggatgaagctcttcgggacgcacgtttaccccaagaacaagtacctcacgctgcagatgaccaggtcggccaagggcgtcgtctgtgaggacgtctttgagagcctgattgtgttttctgaagcctggtgggtgggaacaaaagaagataatccggaagagctcaaacttgagtttccaaaagaattccaaaatgatggcacgacagcagactgtgatttcagaggtggtgcaggtggtgccatcgatgaagcaactggaagcaaagctggaaaggaaattgcagaacctcgttccccaaagtttgcatctgatgacgatgctcctgaggattcaaatcataaggatgagaataacacacagactatgagtggaacaccagttagacagtctgctaggaatgcagggaaaaccttgaaaaggtacacagacttatcttctggaggtgaatcgtctgacaataataatgaaactgatatatctgaggacttggatgataaggaggtggagagtccagaaattaaggacgagattgaaagcgaagatgtcaaacccgcagattcttcagcaatttccctctctagcaagaaggagcctcttgttcaggctactttgtctagcatgtttataagggcagaagaaaaaaagagatctacaaggagtcctaaagggtcccctgcaaccaaaggtgctgctgctaagaagcagcgagcaagtccaatggcaaaacagccagcagggatcaagaagggctgggggcactgaccagtgtgttttccgaatgcagttagcggaactcggggaaagaaaaaaccaaaggtgggagaagatgaaatcgaagagctctcaagttcctcccaggataacgacgcagatgatgatagtgacgaggactgggccgaataatgcgatggtacagacgacggataggttgggccgttggggaagcatatgcataattgatgtgcggctgaagagaaggatggattgggggatggcacagaaactgcctgttttcatggactggtttggctggtcatgtctgacgacggatctagaatatggaatatcctgatctgttgtcaagctgagtccatgaaacgttggttgatgaaacattagttagtcagaagcgggtttgtttgtagttaggaactaggaacacacacacccgaggttgtgatggggttgcatacttggactagccattcccattcatctgtctgtactctgttcgactgttcctttgtgtggctcacacctgttgtgtttctgatggtggtcatttctccagccaggggcaaagaacacactgcgtttcgctgatcctttaattcagacccatagtccttttttttcttcagcacattctgatgtggctctttgtattgcagactgtatcatggtatcagattggtttcgacttgaaacccctctctcttcattacgcgtgtttctgatcttcttgttttggagtcagatcagatcggaagcaggagaggagaatatccgagatagataccctttccaagaggagagattccgcggggattctgagtagccttcggagttcggagcggtggggctggggcgtgcgggcgcggaccggcctcacctcccttccc

SEQ ID NO: 137428 - DNA, 2333 bp, Zea Mays
atggccgccgctaggatcgccgcctgcaccacctccgcccgcaccgccctcgccttggcagacgaccccgcgccgccggacacgctggacgtggtgcgccggcagcgccagctcctacgccgcgccgcggccctctgcctcgaccccatcgccgaggagtccgacgttatttgccccctcccagtccctcgcatggccgttttttcagcgtcgaaggcggtctcggatgaatccgctttccgtgtggccggtagagtcttcgtcttcgtctcgtctcgtctcgtcccaaacacgcgaacgcgacacgccgacacccgtatcgtaccacctaacttttgctccgagatctcctcctcccgtctcatcagtcttttccaatcaatcaccagctcaaacttgtacccaaaaccctacaccggagggagagggatggtcaagaaagccgtctccaccgcgccagcagacgccgaggccgacgagcgccgccgcctccgctcgctcgccttctccaacggcctgctccagcgaggcgaccccgcggcgccgcgggcgccgctcgcgccggcggctgccgtcacgcgcctacagggccgcgacgtcgtccgccgtggcggccagcgaaagagccgctacctcttctccttccctggcctcctcgcgccagcagcctcgggtggccgggtcggagagctcgccgacctcgggaccaagaaccccctgctgtacctcgagttcccacagggaaggatgaagctcttcgggacgcacgtttaccccaagaacaagtacctcacgctgcagatgaccaggtcggccaagggcgtcgtctgtgaggacgtctttgagagcctgattgtgttttctgaagcctggtgggtgggaacaaaagaagataatccggaagagctcaaacttgagtttccaaaagaattccaaaatgatggcacgacagcagactgtgatttcagaggtggtgcaggtggtgccatcgatgaagcaactggaagcaaagctggaaaggaaattgcagaacctcgttccccaaagtttgcatctgatgacgatgctcctgaggattcaaatcataaggatgagaataacacacagactatgagtggaacaccagttagacagtctgctaggaatgcagggaaaaccttgaaaaggtacacagacttatcttctggaggtgaatcgtctgacaataataatgaaactgatatatctgaggacttggatgataaggaggtggagagtccagaaattaaggacgagattgaaagcgaagatgtcaaacccgcagattcttcagcaatttccctctctagcaagaaggagcctcttgttcaggctactttgtctagcatgtttataagggcagaagaaaaaaagagatctacaaggagtcctaaagggtcccctgcaaccaaaggtgctgctgctaagaagcagcgagcaagtccaatggcaaaacagccagcagggatcaagaaggttagcggaactcggggaaagaaaaaaccaaaggtgggagaagatgaaatcgaagagctctcaagttcctcccaggataacgacgcagatgatgatagtgacgaggactgggccgaataatgcgatggtacagacgacggataggttgggccgttggggaagcatatgcataattgatgtgcggctgaagagaaggatggattgggggatggcacagaaactgcctgttttcatggactggtttggctggtcatgtctgacgacggatctagaatatggaatatcctgatctgttgtcaagctgagtccatgaaacgttggttgatgaaacattagttagtcagaagcgggtttgtttgtagttaggaactaggaacacacacacccgaggttgtgatggggttgcatacttggactagccattcccattcatctgtctgtactctgttcgactgttcctttgtgtggctcacacctgttgtgtttctgatggtggtcatttctccagccaggggcaaagaacacactgcgtttcgctgatcctttaattcagacccatagtccttttttttcttcagcacattctgatgtggctctttgtattgcagactgtatcatggtatcagattggtttcgacttgaaacccctctctcttcattacgcgtgtttctgatcttcttgttttggagtcagatcagatcggaagcaggagaggagaatatccgagatagataccctttccaagaggagagattccgcggggattctgagtagccttcggagttcggagcggtggggctggggcgtgcgggcgcggaccggcctcacctcccttccc

SEQ ID NO: 137429 - DNA, 760 bp, Zea Mays
atatattccctcggagcaaagtgttgcggaattcacatcagccagggagaagcccgctgacagctgcaactgcaagccgccacgggctgagctgaggctgtgtcgatccatccgtattcaggaaaacaacgccaatcaatccagtccagaggaagggcgatggccgccgctaggatcgccgcctgcaccacctccgcccgcaccgccctcgccttggcagacgaccccgcgccgccggacacgctggacgtggtgcgccggcagcgccagctcctacgccgcgccgcggccctctgcctcgaccccatcgccgaggagtccgacggtggcatcgactctgcctccgacgtccactccttgggccggagccggagccggggccagaccgccgccacctccgcactgccggcgcgtccctgaggatctgaaccgtcaaagacgagaccttttccttcttgccataggagtggagttttttcccgtgggttttaagaaatactccgtacaatgtatatgttgttactatagtaatattatagaatatagaccaaaagctgtttcagacaccgttgcaaaatagagctttcaatatcatggtttaatccaaactgtggtaattttcgagtatttgacaaacatcttaagaccaaagttttgctccgcaagacatgcacttttctatcgttgcgctaccggacagtgttatttgtctcttaatttatatataaggtcatgtttaaatatattagagataatagtt

SEQ ID NO: 137430 - DNA, 1621 bp, Zea Mays
ggcaggctgcacctgcaacacaagaaaagaaaaggcgcgccttttctcctctcgttccaccgacggcgacgcaggcctcacccgcaccaaccttcgttctccttccccttctcctccacgcgcgtcaatttgccatcccaggaaggcagaaccccacacctctgatctgctctgcccatcatccagcgcatccccggccctgacttaacttgctgctcacctcgccatgggaatctcccaccctctctccgacgagtacgacgccctccgcggcgccgtcctctcgccggatacgacgcctccctcatcgccgctcgcccaccgccacctcctggagcacgaggttactaggatggacacgctcgccggcatcgccatcaagtacggcgtcgagatatctgacatcaaaagggcaaacagtttggtaactgacagccagatgtttgcacacaaatcgctgctcatacctctaccaggaatgcccatgccatccctgaatgcttgtggtcaaagaacgataagaacgtgtgctccaaaccatcggcaaaagagagacgcgcccaagtctcgtcagcagggtgcgtcatctgcaatgaataccttgcagagatactatggcctaacaccacctcagaaaggaggaaataccatggatagcagcactgaactgtctgtgtaccataagggcggcggcttccagagtaacctcagcgaaacattgctcaatccttccgcagctccaggcaccgacagcagctggaattttgaagcgctaggcttttcagcgaccgagggcgatggcggggcaccgaaaccagagcaagatggttctatgcggcggcgacagaaagtggaagcagagtctaacgcccagggtgattttctagtgaaggcgatcaagagtctgttgatttccagcgtccgtctagacacgtatgcaggcagcccaggttccagccagaagagcggcttcagatctgtgactgtgaggaagtccccgagcgcgcccagctttgcggatgctgacaatggagtctctatgtggtcaagttccaagtggacgttcagccatgactccttcacccgaccgttgcttgatggcctgcccaaaccagcgtcagctcggaggaccaaccaaaaccgcgttggactgaaactgaactgaatacacacatgtttgagcgtctcctttgatgaacgacgagctgtggcgtgactaggcgactgacttggcagcagagcatatctgtctgcagctctggtgttagcacaattgattggcttgtacaactcctacaaaagagaagagttacgatggagcctagctacatgtaatgtatacaacatgcatacatgcatgtgttgatggaatgaattgtattgtatcccatcccaggcagtgctacacacagatattctgtctgctgtgtgatggggtgaatttggtttcagttactccctaaatcaaatggaagttcttcttttttttttcccactgtggtttggttttcgttattattattatactaggtcagtacccgtgcgttgcaacgggaacatataataccatgataacttatatacaaaatgtgtcttatattgttataagaaaatatttcat

SEQ ID NO: 137431 - DNA, 2267 bp, Zea Mays
tttcttttagagtagaaatttagagttatatgagtgcggatagcctaacgcccgaggcgccgacggctgctccctggccgtcctcggaagcgcggcggccaggcgctgaggcgcaccacgccacgccggcggtgggacggaggagaggccggaagttgctggctcaaggtaagcggaatggcttccgttcccccactcctcccctccttgtagcttgcgagagcaaccttgtcggagctcgccgccgcagccacagccacaagtacgcatcctccgtttgaattcacatacagttctccatgggtacttcttcctgcacattcacactcaccacttccttgttgctaacgatggctaaataaggctaccactctatgactccgagccaagccaggagcaatggctctcgactgagtcctacctaggtgtatgatgaaatgcctgcaggacttcaaacgctgtcaagcagcattttcatctcagcaaatcacgtagcctaccctgaatttctgtctgcgtctttggcagatactcttcctttatcatgtccggcgagatgaggccacagcagctgggggcgatgcggcgtgccatctggaggagctggcctatcctgtgcttgcagtcacagcacaggcttctaccatctttctgtgcctcaaccaaggccgccacgatggccgcctcgtctctgccaccaccaactcatcataagaagaaggacacggtcatcgtcatctctggtcctactggtgctggaaagagcaggctggcgctggaggtggccaggaggctcggaggggagatcatcagtgcggactccgtgcaagtctaccgtggccttgacgttggttctgccaaaccgtccgcggcggagatgagcctagtgccgcatcacttgatcgacatactggacacgtccgacgattactcggctggagcctttttccgcgatgcccggagggcgacgcaggatgttcttgacagaggctgcgtgcccgttatcgcaggagggactgggctgtacctgagatggtacatctatggcaagccgaacgttccacagtcatccatggagtccactttggccgtgtggtctgagctcgctgattttcgggagaacggccagtgggaggaagcggtagagctggtggtgcaggctggtgaccccagagcccgggacttgtctgtcaataactggaacagattgagccgcagcctcgagattatcaggtcatcaggctcccctccttctgccttcgccttaccgtacgatgcattctgtgaacagcatgacactgacctaactgaggctccctcatccgctggaaactacgaggccagggagatggagtatgacttcttctgcattttcctcgcaagtccacgcattgaactgtaccggtcaattgatctgaggtgtgaagaaatgctggttgacacaggcggcttactttcggaagcctcatggctgcttgatatcgggttgcagccacgtatgaactctgcaagtagtgccatcggttacaagcaagccatggagtacctgctgcactgtaggcagaacggaggcgaaagcaccccacaagagttccttgacttccttgccaagtttcagaggacatctaggaacttcgcaaagaggcaacttacctggttccgcaatgagaagatttaccactgggtcgatggctcgaaaccatttgaggcacttgttcaatttgtctgtgatgcttaccatggctgcagtgcaaggatggttcctgaatcacttgaaatgaaaagggaaaattgcgtgctcaaaagccgtgatctcaaaacctatcgctcaatgaacagggtgtttcttgggggtgatgactgctctcacgttttgaattggatcaggagaacacagagcaaatgaaatatagatctactcccttatcatgtttttttcaaacatggaaattgtctagctttttggtgttgaccaattaggacaggagtttagtagatcaagacgcaaataacacatgaatttagtttataggtttttattctgttttctatcatagtgaaaatgccttttcaaagtgccacaatggaacgaaaagtcaggtttctcctttgacatctctccattttgagctttgtaagaagctcggttcctgttttcttaaggcaggtttcttctttgggcatctccctctttgagctttacgtaaatagtagtacctgattttgtaatatcttaatcttgaagtgtgattcgtgcagaattaagc

SEQ ID NO: 137432 - DNA, 556 bp, Zea Mays
gagagagaaggggagggtaggcatcgaaattccgaatccccacctcgtcgctcccaccaccaccgcggattgcgtcccgttcgattgcgcaggagtttttgttccaggatgagcaccgagtcaggggagctgctcgggatcgaccccgtcgagctccggttcccattcgagttaaataagcagatctcctgcacgctgcaactcacgaacaagacagacaagcaggtcgcgttcaaggtcaagacaacgagccccaaaaagtactgtgttcggccaaacaatagcatggtggtgccccggtccaaagctgacattgttgtcacaatgcaagcgcaatgggacgcgccaccatacatgcattgcaaggacaaattccttgtgcagagcgccatcatggccaaggagatcatgtcgaaggaagtcactggagacatgtttaccaaagattcaggcaatatagtggatgaagtgaagttgaaggtagtttatacagcgccatcgtcctctcaaagcgagggatttgaggatggtaatctcggcagtttgagttatcaag

SEQ ID NO: 137433 - DNA, 642 bp, Zea Mays
cacagccaccccacaccagttcccgagcagagcgagcgccccatgccgcgtgccacggcgagcctccgcctgcaggcagcggcgtcgtccacctccaccgcgaccccaagagagcagcaggcgtcgtcctcatcctcgtcatggcctgttccaccaccgcttccccagcagccggcggtgtcggtgaactccgacacggtgatgatcctggcgtccttcctgtgcgcgctcgtctgcgtgctcggcctcgccctcgtctcccgctgcacctgccgccccgcctcgtcctccaccgccacggggatcccgcagcaggcgaggcctccgaaaggactcaagaagaaggccatcgacgcgctgcccaccgcgccattcaccgctgccgcctcctccgactgcgccatctgcctcgacgagttctccgacggcgacgcgctgcgcgtgctcccccgctgcggccacgccttccacgtcgcatgcgtcgacgcctggctccgcacgcgcgccacctgcccctcctgccgcgccggaatcgtcatcgcccaccagccgctcatggccgcaagtctgtctcctggatatcttgacccgtccgtcgtctctatctagctagctgttaaaatacccaatcctttgctccct

SEQ ID NO: 137434 - DNA, 359 bp, Zea Mays
cccatgacctggtgaaagggaccactgagccgtaatgcaaccattataactctgaagataatcagtcatctaacatttgattattcaactagatagatgatgcctccttatgggacaccaccaccatatgcagcaatgtatgcacaaggtacaccatatcagcaggcaccaatgccaccgggttcacacccatacagtccttatcctatgcagtcaccaaacgggacagttcaaactccaataagaatctcttggctgctcacctgttgagttttccccgtttcaaaatcgtcctgcttgcatcttccccgattcaaaatcgcctatggattatttcagatacgatgtccctaattgtc

SEQ ID NO: 137435 - DNA, 249 bp, Zea Mays
atgtacgaggactacatgctaattgctaggtactttaccctagtaaagcatgtccagctacatgtttccccgttacatcaacggaaaagcatgttcctccacttgtccttcaagtccaccggtgtcctgccggtaaaagcctcagcattgttatctagaatatccctccaattgccaacaccatacctacacgtgaaacaaacagaacgaggaacatacagcaacagcaataataataaaaaaaactga

SEQ ID NO: 137436 - DNA, 2066 bp, Zea Mays
atggcggtggagttggccaagcaattgcttgcggttattggaagctatacaccacctctctgggctaccctcatcgccggggtttttgttatcatctccgtctcgctgtccctgtacttgctgttcaatcatctgtcagcctacaaaaacccagaggaacagaagtttcttgtcggcgtcattctcatggtgccgtgctatgcagtcgagtcgtacatatcactggtaaatccatcaataagtgttgatatcgaaatcatgcgagatggctatgaggcatttgctatgtactgttttgggcgctatctagttgcttgcttaggtggtgaagataggacaattgaatttttgaatagggaaggtggttcaggttctgctgcaccacttttaggacaagcatctgaacaacgatacgtaaaccatccttttccaatgaactacgtgcttaaaccgtggccgctaggcgaatggttctacttggtcatcaaatttgggctagttcagtatatgataataaaatcaatatgtgctattcttgcggtgattcttgaatcctttggagtgtattgtgaaggagagtttaagttgaactgtgggtactcttacacggccgtggttctcaatttcagtcagtcatgggccttatactgtctcgtccagttctacaccgtgataaaggatgagttagctcatataaagcctcttgcgaagtttctgacattcaagtccattgtgttcttaacatggtggcaaggtatagcaatcgcattgctcttcaactggggtttgttgagaggtcctatcgctcaagaactgcagttcaagtcaagtatccaagacttcattatctgcatagagatgggtgttgctgccgttgcccacctgtatgtcttccctgcgaagccgtacgagctgatcggtgatcgtcttgttggagatgtttctgttcttggagactacgcttctgtcgactgccctctagatccagacgaggtcaaggatagcgagcgcccaaccaagttcaggcttccccagccagatgatcatgtccggtgttccactgccataaaagaaagcgttcgcgatgtcgtacttggaggcggtgaatatatcgtgaatgacttgaagttcactgtgaaccacgcggtggaacccatcaatgagaagctgcacatgatatccgagaacataaaaaagcgcgagaagggaaagaagaaaacaaatgacgatagctgcatcggttcacccacatccttgaccagggtcatcagtgggattgatgatcccctcctgaacgggagcctgagtgacaacagtggcccaaagaaagcgcgaaggcagcacaggaaatcaggctatgcaggcgcggagagcggcggagagagcagcgaccatggcctaggtgggtttgagatccgagggaacagatggattactagctagggagtgacaactaagagcaacctgtggagatgctatacaaatgtcacaggagttagcctagccagtgggttcaagtgtaggatgaggtatctggcatgatgttgtagcatgggcaaatcgagatgagtgagcaatcaggttgttgtctgttgattcttttagctgagcgcctgagctgctgaggccttgatcctgtatttaagatgtcaggccttgattctttcagcaagcgttggaaggaaggaagcaatgtgcctgttctgagctcccgtcagcatcacttgtaaagttcttataagtacagactagaactagtcatgcatacaagagaatagacagtcgatgtttctatctgtttttgtttcattctaaggcccttgtcacacgagcaccagaattttttttctttccttttggtaccatgatggtgatggacgtgagagttccttgagatgatcaaagcatctatctttccaattccatgtgtatcctgataactgaagatgatcgtttggttttccttttggtacgcaacatgccaagtgcaggatgaactctgccctgcaagaaaaaccacaggcaagtttgtccgattaacaactatctgcacaggtcataaaaag

SEQ ID NO: 137437 - DNA, 1763 bp, Zea Mays
cctccccacctattttatcgctcgtgtgtccccgtctctctcctccgctcctcctccatcatagctcctggctcgcggctcagcttgccactaccagcaagcgctcgtcacccgtcggttctccccgagtagctcgtcgcgtcggcaatggagaatctgagatctcaaaactgccaccaaggtgttgccatggagggagtcaagtttgcgccggagaaggccaacaccaaccggagagccctcagcgacatcaagaacataataggaggcccacaccagcacttggcggtcagcaagagggctctgtcagaaaaaccagctgctgctgctgctgcaaatgctaaagatcaagctggctttgttggacaccgtccagtcaccaggaaattcgctgcaacattggcaacccaacctacagttgcccttctggacccaattggaagtgaaagactgaaaagaaacgctgatacggcatttcacacacctgcagatatggaaagcacaaaaatgacagatgacagtcccttgcctatggtgtcggagatggatgaaatgatgagtcctgaactgaaagagatcgagatggaagatattgaggaggcagcacctgatattgacagtggtgatgcaggaaattctctggctgtggctgactatgtagatgaaatttacagattttacaggaaaactgagggtgcaagctgcgtccctacaaattatatgtcaagccaaactgatataaatgagaagatgcgtggcattctaattgactggctcatagaggtacactacaaactagagctgttggaggagacccttttcctaaccgtgaacatcatagacagattcttggcacgtgaaaatgtggtgcggaagaagcttcagttagctggtgtaactgctatgttgctcgcgtgcaagtatgaagaagtgagcgtacctgtggtcgaggatctgatcttgatctgtgatcgtgcatacacaagggctgacattcttgagatggagaggaggatagtgaacacacttaatttcaatatgtcggtgccgactccatactgtttcatgagaaggtttctaaaggcagcacaatcagagaagaagctcgaactcctgtctttcttcatgatcgagttgagtcttgtcgaatatgagatgctccagttctgcccgtctatgctagcagccgctgccatctacaccgctcaatgcaccataaatgggttcaagtcctggaacaaatgctgtgagctgcacacaaaatattcagaagaacatctaatggtttgctctaggatgatggttgaactgcaccaaagagcagctcatgggaaacttacaggggtccatagaaagtacaacacttctagatatagctatgctgcgaaatcggaacccgcaactttcttgctggatgcctgaacctaagcttgaactatacacactcttaactacttccatggaaagaggtgtatatataggctgcttcgactaaactacagaagtgggatctatctgaatatatgcaacggctgttgcagcaaatatttggtggggctgggttggtgtgttgtttgttagttcaataacttaacattaatgaaacagtgtttgtgttgtttagggtttttttttccaattatatcgattggaatttcatttgttgtatcctggccatcattctttactcatgtcatgtgacacctctgcgttttgaaaaataaacattgattatgtggatctgctgaaattgttgtctgact

SEQ ID NO: 137438 - DNA, 1736 bp, Zea Mays
acctattttatcgctcgtgtgtccccgtctctctcctccgctcctcctccatcatagctcctggctcgcggctcagcttgccactaccagcaagcgctcgtcacccgtcggttctccccgagctcgtcgcgtcggcaatggagaatctgagatctcaaaactgccaccaaggtgttgccatggagggagtcaagtttgcgccggagaaggccaacaccaaccggagagccctcagcgacatcaagaacataataggaggcccacaccagcacttggcggtcagcaagagggctctgtcagaaaaaccagctgctgctgctgctgcaaatgctaaagatcaagctggctttgttggacaccgtccagtcaccaggaaattcgctgcaacattggcaacccaacctacagttgcccttctggacccaattggaagtgaaagactgaaaagaaacgctgatacggcatttcacacacctgcagatatggaaagcacaaaaatgacagatgacagtcccttgcctatggtgtcggagatggatgaaatgatgagtcctgaactgaaagagatcgagatggaagatattgaggaggcagcacctgatattgacagtggtgatgcaggaaattctctggctgtggctgactatgtagatgaaatttacagattttacaggaaaactgagggtgcaagctgcgtccctacaaattatatgtcaagccaaactgatataaatgagaagatgcgtggcattctaattgactggctcatagaggtacactacaaactagagctgttggaggagacccttttcctaaccgtgaacatcatagacagattcttggcacgtgaaaatgtggtgcggaagaagcttcagttagctggtgtaactgctatgttgctcgcgtgcaagtatgaagaagtgagcgtacctgtggtcgaggatctgatcttgatctgtgatcgtgcatacacaagggctgacattcttgagatggagaggaggatagtgaacacacttaatttcaatatgtcggtgccgactccatactgtttcatgagaaggtttctaaaggcagcacaatcagagaagaagctcgaactcctgtctttcttcatgatcgagttgagtcttgtcgaatatgagatgctccagttctgcccgtctatgctagcagccgctgccatctacaccgctcaatgcaccataaatgggttcaagtcctggaacaaatgctgtgagctgcacacaaaatattcagaagaacatctaatggtttgctctaggatgatggttgaactgcaccaaagagcagctcatgggaaacttacaggggtccatagaaagtacaacacttctagatatagctatgctgcgaaatcggaacccgcaactttcttgctggatgcctgaacctaagcttgaactatacacactcttaactacttccatggaaagaggtgtatatataggctgcttcgactaaactacagaagtgggatctatctgaatatatgcaacggctgttgcagcaaatatttggtggggctgggttggtgtgttgtttgttagttcaataacttaacattaatgaaacagtgtttgtgttgtttagggtttttttttccaattatatcgattggaatttcatttgttgtatcctggccatcattctttactcatgtcatgtgacacctctgcgttttgaaaaataaacattgattatgtggatctgct

SEQ ID NO: 137439 - DNA, 1110 bp, Zea Mays
tgtacaatagagtctcttagttgtctcctgtgcttggagaaccgttttggtgtctctccactgtacatgcccttaggcgtcaacgggctctggtcgtagcagtccaagttgtcgccgtagctgagaccaaacatgtcgcagtagcgtttgtagaagccgatccggctggcaacacgagcgtcggcgccatggccgcactcgaggccgccgttgatgatgttggtgaggacgccataccccggcagcctccctgcggccacgtcggcgggcgagggcgcccactggcccgtgatgacgtcgtggcaggacggcttgggcggctgcggcgtcatccagtaccagagcgccgtctcgaaggagacagtggcgtcggcggcaaccagacctgggttgcccagaaggtcctggccgatggcctccccggcgggcccgtagttgtagttccaggagagctggatgggcccgcggccgtagtacttctggccgtcggcgcacggccactgggggctgggctggcagtagtccggcccccacacgccgccgacctcctccttgaagcagtagccccaggtgtagggcccgtcgggcgccgtgtcccacccgcccgtggtctcgtgcgacgtctgcgccaggaacgccgccagctcgcgcttctgcgtgtcggcgccgcccgtggtgccgaagcccgggaacgcgttcgcggccgcgatgaacgcgtcgtaggtgtagaagccgatggccgggcacgccacgtcgttgcggtgcagcagcatctcgttgaacagggattcggagatgatttctgacaccggcccgctcgggggagtagcaggggtaccgccgccgccgccgcagccgctgccgaagcactggctctggcagccgtcggtacagtagtcgggagtggagccgcaatagccccactggctgcagcagaggcagtcggggcagagcgcgccgccggcctgcgtaccgcactgctgtgcgcgagcggacatgaagaacaaggcagcagtggctaacatggccaccatggccagtgctctcgtcatggccatgggcaacaaggagctggctctagttctatgatctctatgggatctagaacca

SEQ ID NO: 137440 - DNA, 152 bp, Zea Mays
gtgcttttacaagattgtttgttccgttgatcatattttggttaaaccccaaaaacttccattacctaaacccctactctatgatgacacagtcacataggcttgtttggtattatatgcagaatgatctgttaattgcgagagcctgagcc

SEQ ID NO: 137441 - DNA, 1227 bp, Zea Mays
atatatcagactactatatggtggcaagcctatataaggacatgcttgcacaccgcttcctgcacacaccacccaaactaaacaacaccagcttctctcacgatcacgatgatgagagccctggcggtggtggccatggtggccaccgccttattcttcgctgtgcccgctcgcgccgagcagtgcgggtcgcaggccggcggcgcgctgtgccccaactgcctgtgctgcagccagttcgggtggtgcggcagcacctccgactactgcggcagcggttgccagagccagtgcagcggcagctgcggcagcaccccgaacccgccgagcagcggcggcgtggcgtccatcatccccgagtcgctcttcaaccagatgctgctgcaccgcaacgacgcggcgtgccccgccaacggcttctacacctacgcgggcttcatcgcggcggccaacgcgttcccgggcttcggcaccacgggggcgcccgacgtgcagaagcgcgagctggcgcctggcggcgttcctggcgcagacgtcgcacgagacgacgggcgggtgggcgacggcgcccgacgggccctacgcctggggctactgcttcaaggaggagcagggcggcgcgtcggggccggactactgcgagcccagcgcccagtggccgtgcgccgcggggaagaagtactacggccgcgggcccatccagatatcctacaactacaactacgggcccgccggccaggccatcggcgccggcatcctcgccaacccggacctggtggccaccgaccccaccgtgtcgttcgagaccgccgtctggttctggatgacgccgcagtcgcccaagccgtcgtgccacgacgtcatgacggggcagtggacgccctccgcggctgacacggccgccggcaggctgccgggctacggcgtcgtcaccaacatcatcaacggcggcctcgagtgcggccatggcgctgacagccgcgtcgccgaccggatcggcttctacaaacgatactgtgacttgcttggggtcagctacggcgacaacttggactgcgccaaccagacgcccttcaacggctgattaataagctagctacctcaccatgcatgcatgccttattattagagaacacaataagacctgatcgatatgatgatgggtatgtattactttactacacgcagatccagcaatcaagaataaagcaaattaatgtttactca

SEQ ID NO: 137442 - DNA, 1172 bp, Zea Mays
caaacacgcaatcagtatgtctatctacggcgtcggcggctgggctgatgactgatgagatacgaaatgcgcgtggtgggtgcacagatggaccggacgtcgatcctgggcgacacgatcgactacatgaaggagctgctggagaggatcaagctgctgcaggaggagatcgagcagcagggggaggcgccggcgggcatgctcagcgtcttccgggagctcaaccccaacgagatggtggccaggaacacccccaaggtacgattctatcttgtggctggccgcgattgggggaaggggaatgcgaggcgcggctgagacgctgatgctgatgctgatgctgcgtcctcgtgcagttggacgtggagcggaaggagggcgccgacacccgggtggagatctactgcggcgccagcgccaggccggggctgctgctgtccacggtgagcacgctggacgcgctagggctggacatccagcagtgcgtcgtcagctgcttcaacgacttcggcatgcacgcctcctgctccgaggtagtcaccaccgtgaccgctgcctgcccacacacacaatacattggttctagatctgccagactcccttcgtcctcaaattaattggacgcgatgcagtgcaaacaagttttgctccttgaatgtggttgcctgactgactgacaggggggacaatgacatcgcagatgcagagggacatgatcagcgccgacgcgataaagcaggagctgttgaagaccgctggatatggcggaggctgcatgtagagggcatggcgcggctgtaggaaggagaagaagaggaggagccggagcaggaggaggcggcaataaattaagctctattaaacagcgctagtagcaaggagcagcagcagtatcggttcagacttcaggtccagtagctgaaaaggcaggcagggcatgaggccagtgaagatatggcatgggggacctttttgcaatccattctccccatcagaacccacttcgagttagcagtgtgtgtccgccactccgcctgaatctttctcctatatactgctgtatttaattagcaagagcaaagctctcactgcctttctaatgattgatcagaagtgcctttggcgaccccttgtctttctggacatctatatataataacgttcttcattca

SEQ ID NO: 137443 - DNA, 1578 bp, Zea Mays
gaggatcccacgagaagctgtctgtcctgcctttcctcctcggccagtcgacctcgaagcatccatccatccagtggagtcgagcctctcgcacgctctcctccagtgtcgcggagggaagcgtggccgacggggaagaagaggatggatgcggcgtggacctccgcggtgaatcgggccaccggcatggccgactccgccaagcgcttcctcctccccttccgccgcccgccgccgccgccgccgccatgtccggaccccgaccctaaccccgtacagatcttgaaacgtttgcagcgacaagcgttttacgacattatgcagctgagggagaggcaagagaaagttgaaagagtgatctcgttgttcaaagctaccaaagttggtccgttcgcagaagaaagcactcgggtcaagggcgttgtcaatgtcgctggctcgctcccaagagacatctcagaagcagaatcttgtatcagttcacggtttgtgtttgaggctcctgtcaggaagaaggattccctgtttgccgagctcagcaccgaacatagatacgtgtctcaggaaaacgatcacatcgagaccccttttgtgttgtcaaagttgatgtacctgtcgaacatcagtgactcgttttcggttgctgttgtaccgaaaggagctaggtgtaaagatttttcaacggaccaaaatatccgagagtttgcttaacaggaacattggctggccagtttgcgatcttcgctgaggccacctttgctgagtaaaagccacagatatgctggcggcctaatactgagatcgaagaacttcgctgtttctatagcgcagctgatctcagttgccgcgaggccagtaaacggcggtgaagccagcagagtctgtacagagtttgggcaaatctcgtaccagttccctgatgacataaagttgaccctgtctgctgctttgcatggacccagtgtagttcctcggaagaggaaaccaactgctggaggttgcgttggtcttgagctggaaattgatgaggactccagaatcggggcctggatcgagttgaacaagaagtcaagctcacgtttgctgagatgggccctcacactgtcagatacgccggaaggtgaccttggatggggcgtgagcttgcgtagaggcactgaggaaaaaccgcaactgtttcaggtggagggatttctgaacttgcatctggggaaggctgctgccgtgcagcctggcatcgtgttcaacgtggatggccggaggtgcagacctggtctcgtattccactcgagttggtccttgtgattctggtgtaggaacttttggtagatcacagaatgctgatgagattgtatcagctgaaagaggcaaatgattcatttgaaagtgcatgatgctttggtgctgattatttccagttgttataattatttttcaggcgttgacttataatgttgatttgatatccctatagcagatgtgatgaaccatgaatcttctatttttatttttatggcacatatgtaaatgagtgttaaattgcacagaaccggctggaagcaacaagctccaagcatt

SEQ ID NO: 137444 - DNA, 1645 bp, Zea Mays
gaggatcccacgagaagctgtctgtcctgcctttcctcctcggccagtcgacctcgaagcatccatccatccagtggagtcgagcctctcgcacgctctcctccagtgtcgcggagggaagcgtggccgacggggaagaagaggatggatgcggcgtggacctccgcggtgaatcgggccaccggcatggccgactccgccaagcgcttcctcctccccttccgccgcccgccgccgccgccgccgccatgtccggaccccgaccctaaccccgtacagatcttgaaacgtttgcagcgacaagcgttttacgacattatgcagctgagggagaggcaagagaaagttgaaagagtgatctcgttgttcaaagctaccaaagttggtccgttcgcagaagaaagcactcgggtcaagggcgttgtcaatgtcgctggctcgctcccaagagacatctcagaagcagaatcttgtatcagttcacggtttgtgtttgaggctcctgtcaggaagaaggattccctgtttgccgagctcagcaccgaacatagatacgtgtctcaggaaaacgatcacatcgagaccccttttgtgttgtcaaagttgatgtacctgtcgaacatcagtgactcgttttcggttgctgttgtaccgaaaggagctaggtgtaaagatttttcaacggaccaaaatatccgagaggtaatttcttcagacgagcagcgatgccttcaatactaccatttttgcctgctaatgtggtaaggtaacagtttgcttaacaggaacattggctggccagtttgcgatcttcgctgaggccacctttgctgagtaaaagccacagatatgctggcggcctaatactgagatcgaagaacttcgctgtttctatagcgcagctgatctcagttgccgcgaggccagtaaacggcggtgaagccagcagagtctgtacagagtttgggcaaatctcgtaccagttccctgatgacataaagttgaccctgtctgctgctttgcatggacccagtgtagttcctcggaagaggaaaccaactgctggaggttgcgttggtcttgagctggaaattgatgaggactccagaatcggggcctggatcgagttgaacaagaagtcaagctcacgtttgctgagatgggccctcacactgtcagatacgccggaaggtgaccttggatggggcgtgagcttgcgtagaggcactgaggaaaaaccgcaactgtttcaggtggagggatttctgaacttgcatctggggaaggctgctgccgtgcagcctggcatcgtgttcaacgtggatggccggaggtgcagacctggtctcgtattccactcgagttggtccttgtgattctggtgtaggaacttttggtagatcacagaatgctgatgagattgtatcagctgaaagaggcaaatgattcatttgaaagtgcatgatgctttggtgctgattatttccagttgttataattatttttcaggcgttgacttataatgttgatttgatatccctatagcagatgtgatgaaccatgaatcttctatttttatttttatggcacatatgtaaatgagtgttaaattgcacagaaccggctggaagcaacaagctccaag

SEQ ID NO: 137445 - DNA, 1489 bp, Zea Mays
gaggatcccacgagaagctgtctgtcctgcctttcctcctcggccagtcgacctcgaagcatccatccatccagtggagtcgagcctctcgcacgctctcctccagtgtcgcggagggaagcgtggccgacggggaagaagaggatggatgcggcgtggacctccgcggtgaatcgggccaccggcatggccgactccgccaagcgcttcctcctccccttccgccgcccgccgccgccgccgccgccatgtccggaccccgaccctaaccccgtacagatcttgaaacgtttgcagcgacaagcgttttacgacattatgcagctgagggagaggcaagagaaagttgaaagagtgatctcgttgttcaaagctaccaaagttggtccgttcgcagaagaaagcactcgggtcaagggcgttgtcaatgtcgctggctcgctcccaagagacatctcagaagcagaatcttgtatcagttcacggtttgtgtttgaggctcctgtcaggaagaaggattccctgtttgccgagctcagcaccgaacatagatacgtgtctcaggaaaacgatcacatcgagaccccttttgtgttgtcaaagttgatgtacctgtcgaacatcagtgactcgttttcggttgctgttgtaccgaaaggagctaggtgtaaagatttttcaacggaccaaaatatccgagaggaacattggctggccagtttgcgatcttcgctgaggccacctttgctgagtaaaagccacagatatgctggcggcctaatactgagatcgaagaacttcgctgtttctatagcgcagctgatctcagttgccgcgaggccagtaaacggcggtgaagccagcagagtctgtacagagtttgggcaaatctcgtaccagttccctgatgacataaagttgaccctgtctgctgctttgcatggacccagtgtagttcctcggaagaggaaaccaactgctggaggttgcgttggtcttgagctggaaattgatgaggactccagaatcggggcctggatcgagttgaacaagaagtcaagctcacgtttgctgagatgggccctcacactgtcagatacgccggaaggtgaccttggatggggcgtgagcttgcgtagaggcactgaggaaaaaccgcaactgtttcaggtggagggatttctgaacttgcatctggggaaggctgctgccgtgcagcctggcatcgtgttcaacgtggatggccggaggtgcagacctggtctcgtattccactcgagttggtccttgtgattctggtgtaggaacttttggtagatcacagaatgctgatgagattgtatcagctgaaagaggcaaatgattcatttgaaagtgcatgatgctttggtgctgattatttccagttgttataattatttttcaggcgttgacttataatgttgatttgatatccctatagcagatgtgatgaaccatgaatcttcta

SEQ ID NO: 137446 - DNA, 506 bp, Zea Mays
gccctcctccctcaagccctagctgagtttttccatggtgctctggatgccagcccctttactcgatgcccctgctaggttccatggtcgtcgctgccccagccatctccttggtgaccgacctcgcccctgccccagccacagcttccccttcggccctattgctgcaagcactcagcctctcctatggcacatggtgctcatccagcccctttctactggtgtttgcaccatctctctggtgctcgacgaaatgaccatgaggagttttgtgttgtgtgtagccccacctgcgacaccgtcgacccccggtgaggttctgttctcgccctgtcgctttagcgctcgacgtcgattactaatgtgtgaattgtgtgtgttgacgagggagttaaccggtaaagaagtgaggtccgtgcgacgtttgccaagtgttcgatggaaggtccgaaccgggaacctcgcctttctcgcggatcttcgggtcggtttgtgaattggtgagc

SEQ ID NO: 137447 - DNA, 211 bp, Zea Mays
gtaatggtgcactcatatatggaacccctcctagtgcagcgtgaactcatctttgaacttttctattacagtttgatggaatacatcgagtgtcatcatcaagtactccagtgaagaagcaaccaacagtgcagtttcatgttcagaattgtgtttcacatagatgttatctaaaacatatgatggtgttattacttatttctagacatgt

SEQ ID NO: 137448 - DNA, 374 bp, Zea Mays
acctcagtcttggatgccgcccgtccgccgtctagatctccccaactcctccgtccccttgcttcctgtcgtcgacctcggtggccgccgcgagctgcgggtggttcatcgccgtcgacctcgcctctccgctccttctgcactgcctgttaccggcttcctgttgctctaccggtgcggcgcgggtcgtcagtgaagctccgactatccggattgactcggatcgacctctgctctcgtggaaccaaccaacacaatctacaatcaatcgaggagacctcgaagggagtaggagcaccaattgggagcggatgaagccaccgcttctgtaatcccgcgaaggaattcacaagagcaaaggggtagagatcact

SEQ ID NO: 137449 - DNA, 1218 bp, Zea Mays
atgccagacgccgagaatcgaaagcaaccatcgaaggcgaagctgaggccgagacaaacttcaatgcgacgccttcaggaagggagtgacgtcgaggacgacaccgtcgcgagtccgagatggaccaggcttttgcccaaggaagaaaatgttggggaatacgacgcccccaacaggggaagcgccgcccacggacgtcgccgtcgccgaggctctcgcccaagaaggccccggcaccaacgtcagaccaagagctaccgtcgttgccgtcctccataccatatgcgtcacacaggcacgtgccagagccgcacccggcagccgatggcactaacacacacggccaccgaatctagatgtcggcgagcaccctgccaccttgcgccgtcctggccactggccggcgccacccctcacaaatgtgcgacctcaagcgccgccacgccgacgccggagcgtcgagccaccaccatcgcagcttcacacagttgcacgctgaggccacaaatgaccaacattcatcactgtcgaaactgtggtgatattttctgcgataagtgcacccagggaagaattcctctgactacagatgctgatgctcaaccagttcgagtctgtgacagacgcatgaaaatttcagtaattacaacagatgggcaagacctgtacttagttcagcaacctgagttcctctctatcgacaactgtaggtcatggttatctgcatttcctgttcggttttacctgaggggggcactggaacggtcggcgtggtccggcgaggccacgctgtcgcgtctggttggcgcgctcatcgcgttcaagccgctctactcggtattgaagctcgcctcccgggaggtcatcatcaggacgacggagaagtcgaacatcccgtggagggagatgacgaaggaggtgctggagtcggacgtgtacgaggtgttcgagagaatccaagacccaaacctcgtgtaccctgactactatctcaacctgtttcatgcctacgacgaagggaatctatcatggctggctgcaacagaggctgagcctgcaacaatgtcgatcgcaaagagggccatacctgaggctacatcaatcgaagaggccaaccaaatcgtctgcggcaactggctgaatgtaattgaggagcatcgtctgaagtacttggggagctctcaggtaacctggacattggctgctctgttggagtaa

SEQ ID NO: 137450 - DNA, 303 bp, Zea Mays
agttatatgtatgtatataaatccgacacggtacaagcttcgcaagcacaggataacacacatgcaagcaagagcaggctacgaccacctacatgtgccctgcagatttacatactaggctagtagcaagacctcaggcagcacatgctaggctcctgctagtctagagagattgatagagggagagactagagaccaaaccatcgagctaggataagcaaaaaaattcccaagctagcaaatgattctaaaccgaagaggcaaaaaaattacaagccacagggcttagaaactactacctcc

SEQ ID NO: 137451 - DNA, 104 bp, Zea Mays
cgacacggcccacaattagttatgtgtgccagaccggcccaaatagcccaaaataccttaatgtgccagaccggcccatatacatacaatagtaatacatcaac

SEQ ID NO: 137452 - DNA, 183 bp, Zea Mays
tttttttttttttttttttttttttttttttttttttttatttttttttttttttttttcttttttttttttttttttttttttttttttttctttgattttttttttttttattttttttttcgtttagttgatttcatttaatcaattgtttatccagctctattttgatcaactaaaaat

SEQ ID NO: 137453 - DNA, 2271 bp, Zea Mays
ccctgccgactgccgtcgtgtcggctcgccaacgccaatcccaccaggccaccaccacgccacgcactgcgcctccctcccttgcgtccgcctctcacccgcaacttcaaacccgccgccacctccggggaccagcaaccccaactccagcgctggggaggagcgacgacgagctgcccgattccaccaccaccagcaacttgaggaatagcctcctgcctcctgcctccagcagagcgcgtgtccctcctgcctgccggctacattcgcccgactccgactccgctgagaagccaagccagccatggggtgcgtgtgctcgaggcacttcccggaggacgcgccgggcacgctggcggccgcctacgacgcgcgccgcgggaggtacggccccgggaacttcgactccggcgagctcgccatcccgccgccccactccaacaaggtatcagacacaggtacatttctgggaagagctagcattgctgccgttgaagtgttagacacgctcgggagtagcatgacaagcttgaatcctggcagcggctttctctccggaggaaccaaccggggcaatagagcctgtattttagcatttgaagtcgcgaatacaatagctaaggcttctagtttgtggatgtcatgctctgatgagagtatagaagagctcaagaaagaaattctgcattcagatggagtgcaagtattggtgtcctcaaataccattgagctgttgcatattgctgtcgttgataaaagggaagaacttgccgtcttttcaagagaagtaatacgatttggcaacctctgcaaagatcctatatggcataacttggggcgatatttcgacaagtatgcctctgaaaagttaacgacagataatacaccccaggatcattcaaaggagactatggaagctactgtccagcaattgattaatttggcacaaaacacctctgagctatatcatgaattgcatgctctggacaggtttgagcaggattttaaaaagaaatttcatgaagaggagcctgtgccagcagctagacgagagagtataatgatattgcatagtgaactaaagcgccagaggaagcttgtgaaaaatctgaagaaaaaatccttgtggtcaaggaccttggaagagatcgtggagaaacttgtggacattgtagtatttttacatagacaaatccgagaatcatttaacgaagctggaaccgatttctgcgcttccgagcaaactcagaacaaaaggctaggttcctgtggtctggcactacattatgctaacatcatcaaccaaattgaaaatataatttcccggcccctctctcttcctcctagtgcaagggacaatctgtaccatggtctgccagtaacagtgaagttagctctgcgatcacgactgcagacatataacaccgaagaagagcgtacggtagctcaaataaaagccgaaatgcagaaaactcttcgctggcttctgccggtagcagaaaatacaataagggcgcaccaaggttttggatgggttggcgaatgggctaatcttgacatgggcaagaaatcaggctaccagcacaggcacagcgtcatccgcatccagacgctgcaccacgccgacaaggcgaaaaccgagcactacatgctggagctggtggtgctcctccaccacctggtgatgcaggtgaagagcagaggctacgggaccggcaagccatcgaggcacgagcatgacgcctcgtcccggtcccgcaaggcggcacctggcctccacccggagacggagacggagacgaggcgcaacacgtcgcccgtgaacagccgcgtggcttcgagcccgctgtcggactgcgagcgggcggcgctggaccacctgggcttcaggagggcgacttacggcaggagccagagctgcgagcctccgccgcctggccgacggagcctggctcgccggagctggggcttgtgccggagccatggcggctcgccggctagggcgttgggcagcaagacccccgccgtgggtcgtgacgcggccatggaccttgatgtaattgatggcttggatttggatagactgacttcgtcgtactcgcacccgccctccccccacgttttgctagaatagctgaattcttcgtacatcttgtatatgtccatatattatcctaagtttattatatgtacatatgaaatcttgagtggaagtatatatagagcaagatcacaagtggcattagatcatctcacctttggaaaaaaaaa

SEQ ID NO: 137454 - DNA, 1267 bp, Zea Mays
gctcacgcggccactggctcctcctccctgtcctgctaggctgctgctacttactacttgtacccgcgccgccacgcccacggccacggcccatccattccttcgcgcacgcaacgcaaaaacaagcacaaacacgcgcgatccgatctgggccggccaagcagccacccatccatggcgactagggtttggctcaccgccctcctgcttggtttcctcgtcgccgcctcccccttcaccggccgagttgctagagctgaatccgaggaagatgctgctgcagctgaggttgttgaaggggctgatctaggtattgtgggtgatgatacacaggtttccagtgatggacctttaagtcctgctcctggtgtagagacagtagttgtcttcccaaaaaatgctggcaaaattgtactagcaggtgaagaaactgaattactagttggtctgcaaaatgacggtgaatcaattttgaatgttgttgctgttcattcaactctccatcttccttttgaccacaatatgtatggccagaaccttactgttcagaatttcttcaattcatcagttcctgtttctgtgcaagcaaccttcccctacaagttcgttgtgagcaagttcttgcagcctggagcatatgatctggttggttacatagtgtatgagatcgaccagcacccttaccagaatgtattctacaatggcactatcgaggttgttgaggctggaggcttactcagtgttgagtctgtgttcctcatcacccttggatttgcacttcttggtctgtttggattgtgggcatatggccaggttcagcagctctcgaagaaaacaaagaaggcacccaaggtggagctcggaactggaacaactgatgccaacatcgatgagtggctggagggcacttcgtttgtgcagagaagcaaatccaagaagaagcagacctgaggctctccaggctagttaaatccttttgaggatctagaatgagacatttgagggtagcccttcacaagtgacttttgcagaaagatagatgcgtaaggaggtgctgaaaaccgtaaacatcttcgttgacattttcgaccttgtgtactttacatggaacaaaattttgttaaaagaaagtatatgctgttgccgctgtggtttctgatcttattcgctgcctttgtcatttttcctgtcatggtcaccccaggattttttctttgtttcggtagtttagccgaagccggttggcaaaatgaaattgttaatgaaa

SEQ ID NO: 137455 - DNA, 651 bp, Zea Mays
ttcttagggttatcatttgtacctttcttcagtgaatgtaagctttcagcgttcaataaaccatagtgaggtagacctttcttcagtgaatgtaagctttcagcgttcaataaaccatagtgaggtagtaattcaggctgtttatttgtgatttaccggaatcccagtcgaaagtttacttgaagcggcaatattgacctctgatattactgtcttgagccctatttgtttaactgatttgtttcttggttgtagaaaacaaagaaggcacccaaggtggagctcggaactggaacaactgatgccaacatcgatgagtggctggagggcacttcgtttgtgcagagaagcaaatccaagaagaagcagacctgaggctctccaggctagttaaatccttttgaggatctagaatgagacatttgagggtagcccttcacaagtgacttttgcagaaagatagatgcgtaaggaggtgctgaaaaccgtaaacatcttcgttgacattttcgaccttgtgtactttacatggaacaaaattttgttaaaagaaagtatatgctgttgccgctgtggtttctgatcttattcgctgcctttgtcatttttcctgtcatggtcaccccaggattttttctttgtttcggtagt

SEQ ID NO: 137456 - DNA, 2125 bp, Zea Mays
acgcggccactggctcctcctccctgtcctgctaggctgctgctacttactacttgtacccgcgccgccacgcccacggccacggcccatccattccttcgcgcacgcaacgcaaaaacaagcacaaacacgcgcgatccgatctgggccggccaagcagccacccatccatggcgactagggtttggctcaccgccctcctgcttggtttcctcgtcgccgcctcccccttcaccggccgagttgctagagctgaatccgaggaagatgctgctgcagctgaggttgttgaaggggctgatctaggtattgtgggtgatgatacacaggtttccagtgatggacctttaagtcctgctcctggtgtagagacagtagttgtcttcccaaaaaatgctggcaaaattgtactagcaggtgaagaaactgaattactagttggtctgcaaaatgacggtaaccattattttcctcccatctctctctctctctcttctccctctccctattgagaactggcatcaattcccttgcatatactatacaactttccctttttgctggtggctcatgttgagtcccatttctggtgtaccccaacttgattgagtccaaaaagctttgttgttccttctgttgcagcaaatcagtgtgatagaattagcagtgaagcttgggtgttgcatctgtctgttcacagagagtttgttaagtgcatgcttatatgtgctctatgtattgtttcatgcatagtaactctgagcaagttcatgttcatttccttttgtggtagcatgcagttctaaaattgattcggttgttcaatgttggccagctagttttgtgtaatcatgttttttgtcactattgaaacaaatttggttgtagctgaactaaatgaagaacatagattgcaatttgttcaatggaatgttcgtatactgttcatcccaaactttatttgatgctttcactttggatagttgctcttattaggtttactacatattcatttgccgctataaggggttgtttggtttgatgcctaagacgccacaatgtgccaaacttttctgcctaaccttagttcttcaattcgagcgcctaaggttaggcagattgtggcgccttaggtaggaaaccaaacatgccctaaataacaccatgaccatgatccatgtaatcaaaatttaggcatggttatgccggtgttcatagttaatgtcgcaatatcttaccaacctccccctcccactttttttggggactgtgggcttatggttttatcgccttcactatttcattgtcatgctaattcctgtgtttgcttacaccattttcttacattgtgtttacaggtgaatcaattttgaatgttgttgctgttcattcaactctccatcttccttttgaccacaatatgtatggccagaaccttactgttcagaatttcttcaattcatcagttcctgtttctgtgcaagcaaccttcccctacaagttcgttgtgagcaagttcttgcagcctggagcatatgatctggttggttacatagtgtatgagatcgaccagcacccttaccagaatgtattctacaatggcactatcgaggttgttgaggctggaggcttactcagtgttgagtctgtgttcctcatcacccttggatttgcacttcttggtctgtttggattgtgggcatatggccaggttcagcagctctcgaagaaaacaaagaaggcacccaaggtggagctcggaactggaacaactgatgccaacatcgatgagtggctggagggcacttcgtttgtgcagagaagcaaatccaagaagaagcagacctgaggctctccaggctagttaaatccttttgaggatctagaatgagacatttgagggtagcccttcacaagtgacttttgcagaaagatagatgcgtaaggaggtgctgaaaaccgtaaacatcttcgttgacattttcgaccttgtgtactttacatggaacaaaattttgttaaaagaaagtatatgctgttgccgctgtggtttctgatcttattcgctgcctttgtcatttttcctgtcatggtcaccccaggattttttctttgtttcggtagt

SEQ ID NO: 137457 - DNA, 1098 bp, Zea Mays
gctcacgcggccactggctcctcctccctgtcctgctaggctgctgctacttactacttgtacccgcgccgccacgcccacggccacggcccatccattccttcgcgcacgcaacgcaaaaacaagcacaaacacgcgcgatccgatctgggccggccaagcagccacccatccatggcgactagggtttggctcaccgccctcctgcttggtttcctcgtcgccgcctcccccttcaccggccgagttgctagagctgaatccgaggaagatgctgctgcagctgaggttgttgaaggggctgatctaggtattgtgggtgatgatacacaggtttccagtgatggacctttaagtcctgctcctggtgtagagacagtagttgtcttcccaaaaaatgctggcaaaattgtactagcaggtgaagaaactgaattactagttggtctgcaaaatgacggtgaatcaattttgaatgttgttgctgttcattcaactctccatcttccttttgaccacaatatgtatggccagaaccttactgttcagaatttcttcaattcatcagttcctgtttctgtgcaagcaaccttcccctacaagttcgttgtgagcaagttcttgcagcctggagcatatgatctggttggttacatagtgtatgagatcgaccagcacccttaccagaatgtattctacaatggcactatcgaggttgttgaggctggaggcttactcagtgttgagtctgtgttcctcatcacccttggatttgcacttcttggtctgtttggattgtgggcatatggccaggttcagcagctctcgaagaaaacaaagaaggcacccaaggtggagctcggaactggaacaactgatgccaacatcgatgagtggctggagggcacttcgtttgtgcagagaagcaaatccaagaagaagcagacctgagggtagcccttcacaagtgacttttgcagaaagatagatgcgtaaggaggtgctgaaaaccgtaaacatcttcgttgacattttcgaccttgtgtactttacatggaacaaaattttgttaaaagaaagtatatgctgttgccgctg

SEQ ID NO: 137458 - DNA, 103 bp, Zea Mays
ggaacaacacagatataaattatcaagtaaatcttacatagaagcaattggtgagattagtggcaccaaagagaagcatgatgtcacaagcaaaagaaaaaag

SEQ ID NO: 137459 - DNA, 2053 bp, Zea Mays
tccctcttctctctcccctcacctctctcctcccttccctcgcctcgctcctctctgtcccgaccgagaagccatcaaagccatggaaggccgcacgctcctctccctcctccacgtcgccgccgcgctggtggtcctgctgtagctgcatggtggcgccgtcgtggttgcgtctgagccgccctactcctgcggcgccggcgttctgcgacgcggggctgcccatcgaccggcgcgtcgacgacctcgtctcgcggatgacggtggcgaagaagacctcgcagctcggggaccagtccccggccatcccgcggctcggcgtgccagcgtacaagtggtggtctgaggcgctgcacgggatctccagccagggccgcggcatccacctcgacggcccgctccgcgccgccactagctatcacaggtcatcctcaccgccgcgtccttcaacccgcacctctggtaccgcatcggccagggcattttctgcaaaaaaaaactccaaagaaatgccgcgtgttcttgcacctaatttcacaccaaccgggtgtgtaccaaccgtaacggcttctacagatgccaagagaattattgacgaagaaagatctaatgctcggttggagataggaattgaagtgctaaagcttctgtacaaaaaattcaatcagcacttaaagagcaggaaaaattttctcacagaactgggaagcagtatttcttctcaactatctatagacatgtcttattatggaaatttgaagttgctagtgagtatcgacaaaatgcaaatggatgtcgatgaactaaaggaagaagttcaagaagcaccaagagtgaaaatgttgcattgcccaagcaaggcaatggacattgagaacgagatccaagttctgtgtgatcaactggctaaaaaatcttcagattctcttcgccttttgaaagagttggagctgcatcgaagttacggggaaaatgacatgcccttgtatgaactaaagggtctagaaactttaggctcaacgttgcacatagttgttcacgactgtgcctctgtagatttctggaacagttcaatccaatggtttcgcatacagcctgaaggaagcaagaaagaaattatttgaggttgaacaattctcatcctacaaagtactaatattttctagagatgaagatatatttctgacattttctgctactaaaacttttaagcaccacaaaaccagcatatgctccagaaccacatgatgtgggccggtacacccaagctgaagtcaaatctggtggccaaacatcaatcacaaaaactactggttcagtagatcctgtaatgatggatgaattgtccaacacatacagctgttgtttaattgttttggatttgtgacatggctgacagttcttcagtttcgtagctgcaggattggttcattatgtagaggctcttgtaaggcaaagagaaactggttataatgtatgatcacgtggcaaaaaaatttaccatgtttttgttttaaagaaggcacacctttcatctctttcattatcacgcttctctttttttattgattgattgtgatcacatggtaggcctcatgtgcgctttgctgctgagggttggtcagtttttcttggaatttaccattattctcttgttttattgcttgattgtggcctcatgtgcgctttgttgctgcatttctcaggttcgacatgccctgtgcctactatcactctcgatttgaagaagagtctgaaggcttttgaactgcttgaagcattagtgtagctttggtgcttttgtgactaatcagctctggagcagctagagtgatgtagttgtgggcttttgaacaatagctagagtgatatgacacattagtgatgtagttgtaggcttttgaactgcttcaagctggagtgatgtcgttgtggtgcttttgtgactgatcatctctggagcttttgtgaatgatctagctagctatctgtaaatgatctagttgtgaatgatattataattgtgatacttttgtgaatatataattatggt

SEQ ID NO: 137460 - DNA, 1142 bp, Zea Mays
gtctacggatcgaagcaacgagaagaagaggtagagagtaagaagaacacgcctcgttgggcagccgccatgccgcgccataccccgtaggctagaggcagcgtccgtcagcagcttttcttctcctttctcttctcttttcttgtcttctcttctgtaataagagatcgagccaggcaactgcaagcaaggcatgatgatggagagccagagggcagcgtaggacgaagcaggttcttctttaagtattttaggaagtgcaagcaatggcgagtagctagggaagggactaccatatgctatagctgccttgctagctagctagggagagggggggggggggggggggggcatccaagagaccaagctcacgggggcggatcggaggtgatggagaacgacgaggaggaggaggggtacgtgaaggtggggacgaggttctaccgggtggcgatgaggccgagcggcgccgtggcgcgtcatcgcctccactacctcgagtcctgctacctctgcaaggagagcatcgcccgcgaccgcgatgtcttcatgtacaagggggacgcggcgttctgcagcgaggactgcagggacgagcagaaggacatggacgaggcgctccacgcggcggcgcggcgccaccgcctccttcgctctccgtcggcgtcctcctcctcgcaggcggcagctgaggccgcggcgtcgaccaggccgccgcccgtgatgcgccgccgccccaccatcgccaacctcgccgcgcgcaacccgcccgtggcagccagctagctagtagctacacggcgggcagcactcgtgattcgaacatcgaccgtcctcgatcgtgcagtggtgatttttttttgccgcctgccatgcgtggggttggggtccggatcaggtgtgtgtgctctgccgccttggacgagttgcagctggacctccggcggttagctaggtaggtagagctatacggagcatgcacggactgacgatgaagaacgacatgcatctggaggacgaagctacgtagaggcgcggcggagagaaggaaatgaataacgaaagctttgttgtgacgacctagctagctgtacatgtacaaaaccacagtagcaaatgaacagatcgatcgattatcacca

SEQ ID NO: 137461 - DNA, 1693 bp, Zea Mays
caagcagtcagcggaatccaatcccctgcctcgctcggcgctccgccgccacctcgaatccagttcacccacctcctccgtccttattcgtttcttccgccgcaagccagacagagttgactgtcaccgtgttccctcggggtgggcgatggggtcgtcggagccgtcgtcgcgttccgtgcagaacctcgtgctgtacgccgccagcgccgcgctcagctgcctcgtcctcttggccggccttcgccacctcgatcccaaccgcgccgcctctcagaaggcgcagcagcagaagaaggagatcgccaagcgcctcggccggcccctcgtctccaccacgccctatgaggacgtgattgcgtgcgacgtcatcaaccccgacagcatcgacgtcgaattcgattccatcggcggcctcgacaaggtcaagcaagcgctctacgagctcgtcatcctgcccctgcgccgccctgagctcttcgcctccggcaagctcctcagcccccagaagggcgtccttctctatggcccgcccggcacaggaaagaccatgctcgccaaggccattgccagggagtccggtgccgtcttcatcaatgtcaggatctccaatctcatgagcaagtggttcggggacgcgcagaagctcgtgtctgctgtatttagtctcgctcacaagctccagcctgctattatcttcattgacgaggttgatagtttcttggggcagcgacggacaactgatcatgaagccatgactaatatgaagacagagttcatgtccctctgggatggcttcaccactgatcagaatgctcgtgtaatggtcctagctgctacaaacaggccttctgagctagatgaggccatcctaaggcgctttactcagatatttgagattggaattcccgtccagagtgaaaggaacaagatacttcaggttgtgttgaagggagaaaatgtcgagcctaatgttgattacgatcacattgcaagattgtgcgagggctttactggatcagacatcctagaggtgtgcaagcaggcagcattctaccctatcagggagctattggacaatgagagaaacgggaggaaattagataaacctagacctttgagacaatcagacttggagagagccttatcaacatctagaaagtgcaagaaggctgcaagttcaggactgcagtcacccttgtgggttcggccgacagattcagaagacgatcaggtacagaacgcgatccttgagatatctaagctgatgtctcgaatagttgagagcagccagtcagaaccccaagagccttcttcaccttaatctaatccttttgctagatcgcgtgaaaattctacagcggagtaaacgcaggcattacgtcgatacccttaggttttcttacgcagcttgcagagaggttcagcgtatatatatatatgcattaattcgttttgcttggcgagggcgcaccgggttttttgaagctaactgcagctgggagtatgccctggtgtttaagtttattattcaagattgatgcccctgtgggctgtaagctcagaactccatagttgtccggcctacaattggccttagtttccttgcattttatcttcagtttaactagtctagggtagcgaattatacattcatataatgcagaaaggggcccttccgtctcgtcatcat

SEQ ID NO: 137462 - DNA, 373 bp, Zea Mays
cggccgacagattcagaagacgatcagatcgcgtgaaaattctacagcggagtaaacgcaggcattacgtcgatacccttaggttttcttacgcagcttgcagagaggttcagcgtatatatatatatgcattaattcgttttgcttggcgagggcgcaccgggttttttgaagctaactgcagctgggagtatgccctggtgtttaagtttattattcaagattgatgcccctgtgggctgtaagctcagaactccatagttgtccggcctacaattggccttagtttccttgcattttatcttcagtttaactagtctagggtagcgaattatacattcatataatgcagaaaggggcccttccgtctcgt

SEQ ID NO: 137463 - DNA, 165 bp, Zea Mays
aattttagctagtcgtgggctatgcgggggaatgagaataggaattagtgtgggatgtgcggggagggggaatgtgaaatgcagaacaaagaatgtgaatgacagaacggggaatgaaaggctacccttgtggccttaataagtagtagagaatcacatcttgag

SEQ ID NO: 137464 - DNA, 1053 bp, Zea Mays
ctccaaaaacatatcaatatcatcaccatcgaccgaccgaccgatcgatcgatccgtatgcattgcatgtccaaacgaacgaacgaacgaccaatccgatccacgaatcactggttccgaccggctactactcgatcgcaggcgggagccaaccatgatccttcgatcatcgatcggtcgaccccggccggcctgcgtctaaatcctaaccaagaagaagaaaaccctagtaaatattattgttgttcttcgatccgtcggggacgagcatggttggattgctcgatcgatcgacctcccttcacaccaccgccgaccgaccgattcaggcgcggaagcagccggcgatgtggaagtggttgctgttgtggtgtcctcctccaccgccgccgccgccgccgccggagacgcggtggtggtggatgatgccctggacgcggcggaagtggtcgacgccgcaggggatggtgatggcgcccttctgctcgaagccgtactcctcctccgccgccttgagcagcgccacgaagagcgggtgcgtcaggtaccccacggggaccacgaaccgctcctcctcctcctcctcctccttatggccgccgcccgcgggccccaccacgcgcaccgccatacaccccttgggcggcatcgacgacccggacccgccgcccagcgacggcgcggacgagtgctgcttcttcagccggtgaacacccatggaccgggatcggatcgaccgaacgatccttcttgctgcgcgcagtctgctctcgatcgtcgacttgcgtccgccgaccagccgttcgctcgtcgcaccggccgggaggcaacgacgagcggcggggtacggtgggtggttatggcgtcttgctggcctgtgctggggaggggagcgaggcgaggtgcccgtgtatatgaggcaaggcagcagcgtcgcctgtgggctgtgcattttgttttcttgtgcctgcgacgggattgttttctttttttttaaaaaaaatatccccagtaattcagtttttgctgctgtatatatctaaacataaataa

SEQ ID NO: 137465 - DNA, 2282 bp, Zea Mays
aacggacgccacctcctccccctctctcgcccgcttcctgctctctctttctctttctcccctgcttccccttccattcccgacggacgacgcaacaacccgcctgccctgccctgcctcacgctcgcacccgcggcggcgcggagggccggaacctaaaccctaaccctagcggcccgcccgcgatggggcagtgctacgggaaggcaggcggcgcgtcgtcgcggcgggcggaccacgacgaccacgcccacgcggtcgcgccgccgtccccgctgccggccaacggcgcgccgccgccgcagcccgccacgcccgggcgccgcaagtccggatcggccacgccggtgcaccaccaggcggcgacgaccgcctggcccagcccgtaccccgccggcggggccagcccgctccccgcgggcgtgtcgccgtcgcctgccaggtccacgccccgcaggttcttcaagcggcccttcccgccgccctcgcccgccaagcacatcaaggccactctcgccaagcgcctcggcgggggcaagcccaaggagggcaccataccggaggagggcggcgccggcgtcgccgccgactccgccgaggccgagcgcccgttggacaagacgttcggcttcgccaacaacttcggggccaagtacgacctcgggaaggaggtcgggaggggacactttggccacacctgctccgccctggtcaagaagggcgagtacaagggccatgccgtcgccgtcaagatcatctccaaagctaagatgacgacagccatttccattgaagatgttcgtagggaagtcaagattttgaaagctctatcagggcacaataatctcgtcaaattctatgatgcatgtgaggacgccctcaatgtctacattgtcatggaattatgtgaaggtggagagttgctagatagaattttggctagaggcgggagatatacagaagaagatgccaaagctatcgttgtacagattttgagtgtagtgtccttctgtcatcttcagggagtagttcatcgtgatttgaagccagagaattttcttttcgcaacaagagatgaaagtgctcctatgaagttaattgactttggtctgtctgattttattagaccagatgaaaggctcaatgatattgttggaagcgcatattatgtcgctccagaggttctacacagatcgtacagtatggaagcagacatttggagtataggtgtcataacatacattctgctctgtggcagtcggccattttgggcaaggacagaatctgggatctttcggtctgtattaagggctgatcccaactttgacgattcaccatggccttcagtatcggctgaagctaaggattttgtgaagagatttctgaacaaggattaccgtaaaagaatgactgctgtccaagcactgactcacccttggttacgagatgaacaaaggcaaattccattggacatactcgttttcagattagttaagcaatatcttcgtgctactcctcttaaacgtttggcattaaaggcactatctaaggctttaagggaggatgaactgttgtatcttagattgcagtttaagctgctcgagcccagagacgggctcgtatcgctcgacaactttcggacggctctgacgagatacgtaactgatgctatgagagaatcaagggttcttgagtttttgcacgcgttggacccgcttgcgtacagaaagatggacttggaagaattctgtgcggcagcaatcagcccgtaccagctggaggctttggaaagctgggaagaaatcgctggaacggcttttcagcacttcgaacaggagggcaaccgagttatatctgtggaggagttggcgcaggaactaagcctcgccccgactcactactccatcgtgcaagactggatcagaaagtccgacggcaagcttaactttcttgggttcaccaaatttttgcacggtgtcacgatacggggctcaaacacgagacgacactaaaatggacgcgaactgtgtattcgcttctaatttaaagcctctctctcgtcgattatatatagatggccctgattggtgttttgtgatgtcgcgcggctagctgttgttgtcatagctttttgtagagtacgtgtgaagatcatcgtgatggcgaaatcatatggtttgctcaaaaaattcaagtgtcatttgttcctcgccgattttgaatccatcatccgtgggacaaagaccttttgtcaacgtggcgctaaagttgacatcgtcgct

SEQ ID NO: 137466 - DNA, 103 bp, Zea Mays
gcctggctcagacgagctgatgtttatcacccaatatgcagtcgggctagaagaccaaaactactgtttgtttaaggaattttccccttattaaaaaaaagaa

SEQ ID NO: 137467 - DNA, 723 bp, Zea Mays
atgaatctggtaacttgggtgtctcagaagcaaagagtagtcgccctatcttcttgtgaggctgagtacatagctagtgcaaatgctgcatgccaaggcatttggctcagtcgtctattgggtgaactgctgggaattcaagctccgaaagtaaaactccttgttgataacaaatctgccatagccctgagtaagaatccagttcatcatgaacggagcaagcacatagacacaaaatatcattttgtgagagaatgtgttgacagtggaagcattgacattgatcatgtgagtacacagaaccagttagcagatatactcacgaaggcactgggcaaagtcaggttcatcgagctgagacagcagctaggcgtgagtgaggtgcagcgagattaggggggtgaaatgttgacataatctcatgcatacttaacatcattctgtaactaggcagttgcattttagttgcacgtttacattcctgaaagttagctagctgcatgtgagatgagcggtggagagggccagaaccatgctgcgttcatggtgcggctatgagtactcaccgccatgcgtgtatgaaacgttcccacgcacgaggtgggcacgacgcagcgtgaggcgcgcatggcgggggagatcgtgggtcacagaccatgtaagcaccgcaaataagtaacaagaaagaccagaaaaagctgcgacggttttggcagcgccaca

SEQ ID NO: 137468 - DNA, 190 bp, Zea Mays
gatttagggacttagcttaacattaatctggagcattgacgtaactatggaagtttgaattcatggtcagatggcaaatcccacagccccctacttacgaggatggaacatgcatatccaaatgagtcatcagaattccctttggctcatctgtgcattacgatggtcgtgaattctacagcagcacttt

SEQ ID NO: 137469 - DNA, 2423 bp, Zea Mays
gtgaattatctagaagcaacaaagcaacagatttaaaatgccagttatagagttaggcttagttttagttaaaatattagtggtgaattatctaggcatacatccagtccacaccctcaacataccgagttaggctcagttttagttaaacaacgtcttggtttcttgtgcctactgatggcttttcttaatattatatcaatgacatcttaggttttggaaggtggtgcagttgtcaggactcttagagatcatagtattccttctaatggggatatcaatgaaagtaaagtttcttatttgttattattatattcttgttggtgcaacctgaaaatgaaaagccaattactgaaagcggagatgaaatctcttatgaaggagcaaaggcaaaaagtccaatatatttattatcgggactacgaaggagatcaacgtaagttcagtttggtccattttatctattttcctttcttatggtatggagtcaacaaatggaattaaatagagcccatgctaagtttggaccaagtcatcacgagagaaaggaatctattggagcacctataaaattggatgtggaagctcatgctcatattcagaagcataggtatgccaatctataaaattggatgtggaagctcatgctcacattcagaagcataggtatgccaaattttttttcttaatatgtgagaagttatcttaggctccagatcaatgcccacattattcttatccacaacttctttattgcacatgcacaatctatttataggaccaattatttgcctggtgttagtaaattgatgtgttgtaagctataattgttgtggtgcctattagcttcattgttgttctaattgtttgaggatttgtgcgtcattttttgtgtcatcaaatgaaggttgtggtcttgttgttacttgaacttcttaccacatagaaagcttcaagaagatttaactgacgaaatggtcaagttaacacgttgatagaaggaagttaacctgatgatggtgtttcctgatttaaatgtaggattgtgatggtatgatggatgtttcaattggagcctactatatagtcctcttcatcatataaggttatgcatatgaactcttgggatttacaaaatttgcttctatatgttggatgcagcgtaatcttacatattcagaaccaaaggctgatgaactggcagcatcagaaatggcagttgcatatagctcctcgaattgggtattattagttgagggatgacatccatctactgctgagtaagtcacagaaagtgctctgttcaggctgactagatagggtaattgttattggtgtgttctgttcagttttttatagcatttttggcggggtaatatgaacttctattcatttttcaaatatattctagaccctaactaactgatccaaaatgtcacattgattgatatgtggattttgatacttctgactccatgcaactacttggaatgttgcttgtcgcgttggctcattttttattccttttactgtgcacattaatagcatttttacctataatgaacagtcttgtggttttattttcatttctggcgttaaatgtatgtctttctttctattgtatgagtttatttaggcataacctttatcactttctatcaatgctacaacagtagatatactaccatttatcattgaagtaattaagcggttgtatttcattttttatgttatcaaaatttttagttcttcaaatataatagatgaatcattgctaaatctaacattgctgtcaatgttttcatagttccaagaacggaagcatttatctgatgtcctgttaagtgtgtgcaaggtcattggatgactgcattccatttggcttatcgagtaagcaatccccatttaacttttcaaacttgtcatataatacatcccagcctgaggtctgtgccttcaagttggttttattttgcacaaaatcggatgtcattccatttggcttattgagagccctgaagcaagattctggtatttcaacttctggaccaatcagctcagtctcttgttcgtgagcaaaataaccttcagttggcacatcttccagcactacaagattatcagaatatgcatactcatggaatatagcttcaatcctttgccttttctaacaagttgggttaacacttgagatatcatcatttaactgggaagggccatcgtctaaccacttataactgccattttcaggataatgcatttgcttataccctaacttgtaatcaatactggcaacattgtcatctgggcggcatgaattagtgatccttccagagaaacgaactatgcaaaacaaatgtcatattaataatctagaaacatgtttgagatgggttttatctattgatgaggagcctgttaag

SEQ ID NO: 137470 - DNA, 728 bp, Zea Mays
ctgccgccccgcatcccgtccgcctcgccctctggccctccccgcggcaatctcggcgctcgccctccccagcggcaatctcggtgtcccccgcagcaagctcggcctcccctgcggcaatctcggcgtcccccacaatcacggtgtctatccctcccatctcaccgctgcctcataacactcccgtgtcccacgccatacgcccaagaccgagccgcctagatctgattgggttggctctcgtcgcgggggcgaaggggaaggcgaggaagaaccaggaggcatgcgttcgtccaagatgctgcaactcctgatggcgctggccttctcggcgaccccgctgacgctgtatgtgccgccggcgcgcagcctcagcctcttcgtggaggccatggaggccgtctgccgcgactgcgggccctactcccacggcgctgtcgcccgcttccgcctcggcctctcccgcgtcctcgccggcctagcgtgcgccctccgctaggcgggccggcaccccatcgccggcgccggttcctcctgcctacaggagtatactacacatggacacacacacgcacgttcggtgaccttgtgctctccctgctttctatttccttttgtactactagcgaggaagtggtttctagcgcagcacagcaatctacatgctggagcaggactagcggtcagtttcaagatctttcctgcttcgtttctccctttttgtgctc

SEQ ID NO: 137471 - DNA, 113 bp, Zea Mays
aaatgaacctggcaaagtagctatctgtgttccaaattttgcggccagcaacacatgtggtgatctgtactactcactatttttgttcttttgccttgcgtggctgattaatt

SEQ ID NO: 137472 - DNA, 3805 bp, Zea Mays
tcgcccgcttgttaagcaacgcagctcatggagaccccacatgtcatcctcacgtccgaccacccccgacgcgccgggatcaccccatgttcccgggattacgcctcccgccacttgtgctggccaaaaaagaacagccaaaaacctaattagtcatccagagctttgtttggtttccctcatcaatcgactgctcgaccgcgcgcgcgcgccaggcgactcccatccgctacgaaccctgccgcatgcgggatcgatccatggccggcgccggcgccggcgcccgcagctcgcgcgccggcggcgggaagcgcggcgccgcgtcgtcctcggctgccgccgcgtccgcgtgcgtctactacgccacgacggcgctgctcgtcgcgctgtgcgtcgcgggggcctacttcctcacgtccacctcctccgccgacggggacgccgcaacggtcaccgcgtaccgccacactacacgctcctctttcgcgtacgagctcaccagggagcgggcggcgccgcgcggggaggaggcgtcggaggcccgagacacgcccgccgctgttaaggccgttggcgccgaggaggagccgcggcccgaccggagcgccggcgccgcgctgggcgacccgcacgccaggcctgacgaggagcgtgtgtcggacgaggcggcggcgggcgtggaggaggagcacgaggccgccgcggtggccatggaggacgtgaaggccgaggacggtggtggccacgtggccgccggagacgacgaggcggccagcgcgcgcggtggggaggtggaggaggagaaggagcgagaaacagccgtgctggaagagagcagccgcgagcagcgagaacaggagcaggagcaggagccgcagctggagatgccacacgagcggcctcggggtgccgccgctgccgtcgaggagaagaacctggacggcggcatcgaggaggagagcaacgcggggcagaggcagcgagaggcggagcagagcgcgctcgaggagcagcaggccgcagccgggagccagttgcgccgcgaagcgcaggaggacccgcaggccgacgacggtgccgacgaagggacagaggaggagcgcggcagggagcagtcacagggcgaggaggaggcgcgctcgtcgtcggtgtcagggtccagcggagacgccgacagcggagaggccgtgtcggagtcggagcacacggggacggggcgcgcggacggaaatgccagtcaggacgacggccgcagcgtcgaggtcgaggactcgctcgccgccgaaggccgcacggaggagcagaaggcgtgggcgacgcaggccgacgagtcacaccgggagacggaccgccgcgacgagggcggcgacatcgacggcaacggcgcggagaacgccggcggagaggagcgcgagtggcgggtgtgcaacgtgaaggccggcgccgactacatcccgtgcctggacaacgagaaggccatcaagaagctgcggccggagaacttccggcggtacgagcaccgggagcggcactgccccgacgagggcccgacgtgcctcgtcgcgctccccagcggctaccgccgtcccatcgagtggcccaagagccgagacagggtatggtacagcaatgtcccgcacacgaagctggtggaggtgaagggtcaccagaactgggtgaaggtgagcgggcagtacctgacattccccggcggcggcacgcagttcatccatggtgcgctgcactacatcgacttcctgcagcagtccgtccgcgccatctcgtgggggaagcacacgcgggtggtgctcgacgttggctgcggcgtggccagcttcggcggctacctgttcgagcgcgacgtggcgaccatgtcgttcgcgcccaaggacgagcacgaggcgcaggtgcagatggcgctcgagcgcgggatcccggccatctcggccgtcatgggctccaagcgcctgcctttcccgagcaagtcgttcgacctcgtccactgcgcgcgctgccgcgtcccctggcacaccgacggtggcgctctcctcctcgaactgaaccgcgtcctgcgccccggcgggttcttcgtctggtccgccacgccggtgtaccagaagctaacggaggacgtcgagatctggaaagcaatgacctctctgacgaaatccatgtgctgggagctggcgtcgatcaagaaggaccggctgaacggcgtcggggtggccttctaccggaagccgacgagcaacgagtgctacgagtccaggaggcggcagcagccgccgatgtgcgcggacgacgacgacgcggacgcggcgtggtacgtccggctcaacccgtgcgtgcaccgcgtgccgacggccccgtcggagcgcggcgcgcggtggccctccgagtggccgcggcgggtgcggttgccgccgtactggctcaacggctcgcaggccggggtgtacgggaggccggcgccggaggacttcgcggtggactacgaccactggcggcgcgtcgtcgacgggtcctacctcaacggcctgggcatcgactggtccagggtcaggaacgtgatggacatgagagccgcgtacggcgggttcgcggccgcgctctgggagaagaagatctgggtgatgaacgtggtgaacgtcgacgcgcctgacacgctgccggtcatcttcgagcgcgggctgctgggcatctaccacgactggtgcgagtccttcagcacctacccgagaagctacgacctcctgcacgccgaccacctcttctccaagatcaaggatagatgcgcggttctgccggtggtggtggaggtggacaggatcgtgaggccggggggcagcatcgtggtgcgcgacgaggccggcgccgtcggcgaggtggagaagctcctgaggtcgctccactgggacgtgcggctgaccttctccaagaacgacgaaggggtgatgtacgccgagaagtcgggttggcggccggagcttgtggaagagccgtcgtaatggccaccatttcagtttcagaccggcgagcagtagggctggccctttttctcttcttgcgtccgtcagcatttggtagctctgtacatggttttgttattgctgctgcagcagtagtattttctgtacgtttgtgagcacccatagagagagctctagattatatatacgtacagcaaccggagagcctgcacgccagaggttctacgattccttctttttctttttcttttttttaaaagaaagaggcttgtaaagaaagcgattccttcttttttttctttttttaaagaaagaggagaaaagacaagctaaaggcatcaaggccctcggtctcggttctatccagcaagccaatttgtactttctggcacacgcccgtactccagatgtgtacggcatgtttcagttaggttggaaacgagtgaagtggtcatggtcaacgctactcccgtgtaagcaacaacgagaagcgtgttctctatgcacttgacagttgacagttccactgaaaagcaggagagctctgaagcaggcgcagcacaaaacgcccatcaaatcatttctagttaaaaaaatatatgacatattcagctactgagacatactgacatcgcagctatatctcgggaaggcagaagtgtcactaaaccgacttgtcaatgaaaagctctggaaaaaaaaaagagagtgagcactaggaatccaaaagaaactactattgcacaacatactccgtacataacaacgaccagtcgactaactagctccagcgatcggtccggtgcagacctccc

SEQ ID NO: 137473 - DNA, 2779 bp, Zea Mays
atggccggcgccggcgccggcgcccgcagctcgcgcgccggcggcgggaagcgcggcgccgcgtcgtcctcggctgccgccgcgtccgcgtgcgtctactacgccacgacggcgctgctcgtcgcgctgtgcgtcgcgggggcctacttcctcacgtccacctcctccgccgacggggacgccgcaacggtcaccgcgtaccgccacactacacgctcctctttcgcgtacgagctcaccagggagcgggcggcgccgcgcggggaggaggcgtcggaggcccgagacacgcccgccgctgttaaggccgttggcgccgaggaggagccgcggcccgaccggagcgccggcgccgcgctgggcgacccgcacgccaggcctgacgaggagcgtgtgtcggacgaggcggcggcgggcgtggaggaggagcacgaggccgccgcggtggccatggaggacgtgaaggccgaggacggtggtggccacgtggccgccggagacgacgaggcggccagcgcgcgcggtggggaggtggaggaggagaaggagcgagaaacagccgtgctggaagagagcagccgcgagcagcgagaacaggagcaggagcaggagccgcagctggagatgccacacgagcggcctcggggtgccgccgctgccgtcgaggagaagaacctggacggcggcatcgaggaggagagcaacgcggggcagaggcagcgagaggcggagcagagcgcgctcgaggagcagcaggccgcagccgggagccagttgcgccgcgaagcgcaggaggacccgcaggccgacgacggtgccgacgaagggacagaggaggagcgcggcagggagcagtcacagggcgaggaggaggcgcgctcgtcgtcggtgtcagggtccagcggagacgccgacagcggagaggccgtgtcggagtcggagcacacggggacggggcgcgcggacggaaatgccagtcaggacgacggccgcagcgtcgaggtcgaggactcgctcgccgccgaaggccgcacggaggagcagaaggcgtgggcgacgcaggccgacgagtcacaccgggagacggaccgccgcgacgagggcggcgacatcgacggcaacggcgcggagaacgccggcggagaggagcgcgagtggcgggtgtgcaacgtgaaggccggcgccgactacatcccgtgcctggacaacgagaaggccatcaagaagctgcggccggagaacttccggcggtacgagcaccgggagcggcactgccccgacgagggcccgacgtgcctcgtcgcgctccccagcggctaccgccgtcccatcgagtggcccaagagccgagacagggtatggtacagcaatgtcccgcacacgaagctggtggaggtgaagggtcaccagaactgggtgaaggtgagcgggcagtacctgacattccccggcggcggcacgcagttcatccatggtgcgctgcactacatcgacttcctgcagcagtccgtccgcgccatctcgtgggggaagcacacgcgggtggtgctcgacgttggctgcggcgtggccagcttcggcggctacctgttcgagcgcgacgtggcgaccatgtcgttcgcgcccaaggacgagcacgaggcgcaggtgcagatggcgctcgagcgcgggatcccggccatctcggccgtcatgggctccaagcgcctgcctttcccgagcaagtcgttcgacctcgtccactgcgcgcgctgccgcgtcccctggcacaccgacggtggcgctctcctcctcgaactgaaccgcgtcctgcgccccggcgggttcttcgtctggtccgccacgccggtgtaccagaagctaacggaggacgtcgagatctggaaagcaatgacctctctgacgaaatccatgtgctgggagctggcgtcgatcaagaaggaccggctgaacggcgtcggggtggccttctaccggaagccgacgagcaacgagtgctacgagtccaggaggcggcagcagccgccgatgtgcgcggacgacgacgacgcggacgcggcgtggtacgtccggctcaacccgtgcgtgcaccgcgtgccgacggccccgtcggagcgcggcgcgcggtggccctccgagtggccgcggcgggtgcggttgccgccgtactggctcaacggctcgcaggccggggtgtacgggaggccggcgccggaggacttcgcggtggactacgaccactggcggcgcgtcgtcgacgggtcctacctcaacggcctgggcatcgactggtccagggtcaggaacgtgatggacatgagagccgcgtacggcgggttcgcggccgcgctctgggagaagaagatctgggtgatgaacgtggtgaacgtcgacgcgcctgacacgctgccggtcatcttcgagcgcgggctgctgggcatctaccacgactggtgcgagtccttcagcacctacccgagaagctacgacctcctgcacgccgaccacctcttctccaagatcaaggatagatgcgcggttctgccggtggtggtggaggtggacaggatcgtgaggccggggggcagcatcgtggtgcgcgacgaggccggcgccgtcggcgaggtggagaagctcctgaggtcgctccactgggacgtgcggctgaccttctccaagaacgacgaaggggtgatgtacgccgagaagtcgggttggcggccggagcttgtggaagagccgtcgtaatggccaccatttcagtttcagaccggcgagc

SEQ ID NO: 137474 - DNA, 420 bp, Zea Mays
atgccaacccacccagtgctaaaacacaacctattgagccggaaagcagcattactcacatcagcagcagcaaaaacagagaaagctatggagtttatatgtgaagaattagacaaactacaagaaaaggtttgccaaatgctatcatctgaagaagatgtaatagcaggaccttcgacaggacgagagaaggaagacaatgctgcaaaacatacaagaccagtagttgaaaatctgcataaccatgaagcagttaaacagaaaggaaggccaaaaaaacctacaaggttaaagccactagtggaggaaatccgcatcaagatgaagaaggcagagcaaaagaaaaacaagaaaacaagcaatgcagcagcaagcccacaaggaaaggagaagaagaagatgaaaagaacagcaccttga

SEQ ID NO: 137475 - DNA, 740 bp, Zea Mays
agcaaatgctaccagaaaaatggaaattgctttgcaagaaatataggaatgccagaggactttgaggacatagttaactattcactaactgtatctgaatttgagaggggctggaagcaaatggttgaggactaccatctagaaaacaacaagtatttcagcaaaatgtgggaaacaagagccaggttcataccagtatatttcaaaaatgacttcttcccattcttgcaaagcacaggtagaagcgaggggacaaactcaaggtttaaagacaatgtgacttcgacttatagtgtgatcagcttcttgcgtgagtaccaaaggattgtggagcaagtgaatgtgtcataggagtatgaggataatgaaagcaatcgtaaacgtccaaaagaactaatgtttggatatacaatagagaggcaagcacaagaagtctacaatagaaacatattcaagaaattccagttccagttgcaatcaacaccaaggctaagttacaacagaacatctaatctgcatactttcgaggtgtatccaaaatcaaaccaagaagaaaagccacataaaaaggaggtaccttgttatggctaacctaacatatggaatggaagagttcacttgtgtatgtggaaagtttgacaggatggcattttatgctcccatatacttaaagtgatcattgaagatggctcacgaaaatcccagagcaatacatactgaacaggtggaagaaaaaacag

SEQ ID NO: 137476 - DNA, 1038 bp, Zea Mays
aagaagaatagatctggtttactcctagggcctcctacgggagggctgagtaccgggactatcttgcgagtgcatcgcagttcacaacaaattggtataccggagccactacgcgcgcatcgccaccatggccggcgcgcacgacgatcttgtgacctactccgctaagatggacctcatcctcgagcaacttgccgccatcaatgcccgtttggattcccacgacgctcgtctggccaagctagagcaggcgtgggtcagcccctctacttctaccgcgggctgcctgggcgcgagcgagggcggcctgggcacgggaggaggcggccgagtcgaggacgatggggtcaatgggctgcaacccaacacacccagggaggtggaggcggcgttctacgttgaggtggctgtgccactgctgcagcccgcctccgtgctcatggaggtccaggcgtggcccgactacggctgcgcacggatctgctcgcccaatctgcaacaatcggccgccatggtggcccaacctgtagaggcgctgctgcgggataaccctccacgccacaactaccaatcctccgcgccgtggccatcaatcttctgcaccacggacagccatctgctgcgtcgtcgcagctgtggtcgacgtcagccaccttggccaccgccgcggcgtggtcacttgagctacaacaccggagggtgccaccgaccttcgctaggcgcagggagccctctgcgccaccgcagccacgtccgtcatcagtcgatctggccgccgacacgtcctccttcgatagatccgaccactgacgtggttcatttttttttctaggtgaataaaatactaagtcgagatgtaaaagacttagtattgagtcattaagtgctagtttagtatgggtcaattcttcttgactacagctcgcggacgagctgtttttaaggagggatggaatgttatgggccttagcccattagctatgtcattatggctaggttagctgcggccactgttcacgtgcggttactgtagcgcgt

SEQ ID NO: 137477 - DNA, 381 bp, Zea Mays
atgtggtgcactgtgcccgttgaccaagtcctcttccttttccctccattcatttgcatcagctccggccaaggtgtgggcaggggtgctcggggtaaacctgctgggcacccacccaacaagactctcattccatgtcccgacgctggccacggcctgtctggcagcttcggagtgtgcaaaaatttagaagacttggggcttggggccttgactttgggggaactcggcgtgatctcgcatccatccgcagagccgcaggggggaaggagcggaggagccgccgagctggccgcttaccgctacctccttccgtgtccgtctgtaggggtgcggtcatgtactcgttcggcgacctgggaagattctgaccggatttaa

SEQ ID NO: 137478 - DNA, 2061 bp, Zea Mays
aggaggtaaaaaacaaacatggcctaaataaataaatactcttgttacccggtctgcagccaagtgcaaatgtgccatgcatgcgagttggggccctggaagacgacgacgaccacacccacaccacacacacactgcaaagcctctgtttctcatgtcagtaaaaattcctccctgtcctctgccggcatgtagttatcgacaagaaagccatggctggcagaggcaaggacagctcggtcgccaaagcgcaaggtgcaaatcgtgaaaagggagcaaaggcaaaggcaaacaactcgatcccactgcgcggccatattattcactttctccatttcttccctagctggctagctctctccgatcctcctgcgcccattctctttcgtctggttgggtggagataagctggagagactggagaggtgcgccgagctgtgggatcggagaccgagcgagcaataaatagaaagtaaggtcggggccggcctccatggcggcggttgcaggcgccctcgaatccctcccctgaagtccactgactccgcgcgtctctctctctctctctccttcttcttccttcctcgtcctcctgctgcgcctctttatatagcctccaattccggaaagcagcttgcttgcgttctctcccacccctccttccctcctccagatactacttattgtagacggcgcgggtgagggagaaagcgagaattagcctgcttagaccccaagacgcgaagagaggaaaaggattacgcaagaagagaggtggattagaggcgagctgcttcctattttcagcgaaggcaaggagctagctgctagcaaggagccgaggcagagagaaagagggatcggaggaggagctgataaggctagcctcgctcttttggtggtggtggtggcggtggactggtggcgcacactctccctctcgctcgtcttgatggtggtgggtggcggcagcggctgcctcgcatggctgggttctctctgaggagcggcggagccggaggaggcggaggcgggaggggcggggaccggggcggcgatcactcgatcggcgccgacagcctgttcctgtacgcgcgaggggcggccgccgcggccgccgacacggcggccagcggcggcgggatagggttccagctctggcacccgcaccaggtccagcaggcggcggccgcgccgcacacgtcgcagttcttctcctccggcgccgtggccacgggcgtcgtgctcggcttctcgtctcatgacgggggcgccgccgggatcgccggcgccgggggcggcagggccggcaccagctgccaggactgcggcaacaacgccaagaaggactgcccccacatgcgctgccgcacctgctgccggagccgcggcttcagctgccccacgcacgtcaagagcacctgggtccccgccgccaagcgccgggagcgccagcagcagctcgccgcgctcttccgcggcgccgccaacagcaacagcgccgccgccgccgcgagcaagcgcccgcgcgagctcgtccggtcccttggccgtttgccgtccgccaactccgccatggtcaccacgaccacctcctcaggcgacggcggcggcggtaggttcccgccggagctgagcgtggaggcggtgttccgctgcgtgcggatcgggccggtggacgagccagacgcggagctggcgtaccagacggcggtgaacatcggcgggcacactttcaaggggatcctgcgtgaccacgggccggcggacgacgcgggccatctgccgccgccctcggcggagtaccaccaccaccagctgacggcggggcaagcgagggaagcgccgtcgccggcggggagcagcgaggcggcggccacggcagcgacgtcggcggcggtgctgatggatccgtacccgacgccgatcggcgccttcgccgcaggcacccagttcttccctcataaccctagaacctagctcactactactagtatctacatattagctagctttgctgcttccattattatggctttcgatcgatcctagtagtagctt

SEQ ID NO: 137479 - DNA, 268 bp, Zea Mays
agcattccttccaatttgtccaaatgttaggcatggaagaacatggagataggaggtggcaatggtgaatggagtttattttgttggtataatacttttcaatcatgttcttgtttatattaattacctttctcaaaccttttatttatctatctatgatctatctttggtcatcattttgtgttcaaaaaacagatgcaaattattatgggcagcaatcatgttactattgttctacaagaggccagtttttttagaccgattggct

SEQ ID NO: 137480 - DNA, 2274 bp, Zea Mays
taacacatggagacacgtggatttttttaaaggagggaaatagagacccgtgaaaacgactccgaaactgcaagggccaataagcaaaaacgaaacgacgaccacaaacaaaacagcgtctctcacttgttgctgcctatcgcttttgctttgataaaagccattactcccggccgtccattgctcgccgccgccgccgtctccggcgaccgaccgccagcttcgtcgtccatggcctctacaagccctaacccggcctctctctccgcgcccttgctctccgactccatctcgcccgcccacgccgccaacgggcacgcagccaaccatcggcaccaccacgacggcgccgtcgcggcctccgtgtgcggcgacgcgggggacccgttcgcgttcctctcggaggatcggccgccgcgggaccgtgggccgtccccggccgacccgttccgcaacggcacgccggcgtggtgcggcggcgcgtacgcgtgggcgaggacgctgctgctcctgccggtcgcggcggtgcggctggcgctgttcgggctcgccatcgccatcggttacgcggccacgtgggtggctctccgcggatgggcggacacgcacgtgaggccgcgggagggcggcgggcctatgccggcgtggcgccgccggctcatgtggatcacgcggatctccgcccgctgcatcctcttctcattcgggtaccattggatcagaaagaaaggaaggcccgctcctagggaactcgcacctattgttgtttccaaccatatctcgtacatagaacccatattcttcttctatgaattattcccaaccatagtttcgtccgactctcatgatgccctaccatttgttggaacaattattcgagcgatgcaggttatatatgttgatagattctcacctgcttctcggaaggctgctgtaaatgaaataaagagaaaggcagcttgcaatagcttcccgcgggtcctgttattccctgaaggcaccacaacaaatgggagattcctgatttcgttccaacatggtgcgttcatacctggctaccctgttcaacctgttgttgtccattatccacatgtgcactttgatcaatcatggggaaatatatcgttattaaagctcatgttcaagatgttcacacagtttcataatttcatggaggtagagtaccttcctgttgtctaccctcctgagatcaagcaagagaatgcccttcattttgcagaggataccagctatgctatggcacgtgccctgaatgccttgccgacttattattcatatggcgattctatgattatggcacgagcagtagaagctggaaaggtgaactgctcaaattatatggtagaaatggcttgggttaaagatgtttacggtataagcacagcagaagtgatggaactattggaacatttcctggctatgaatccagataacgatggacgtgtgaaagctgaagatttctgggctcattttggtctggattgcagtcctctgtgcaagaagatatttcactatttcgatttagacattaaggggttgattacgttccgtcagttcttggttgggtgcgcgcacctgaggaagcaaccactgttccagggttcctgcgagaccgcctttgagaagtgccggggtcctgaaacgtctgagatctccagggcacagctagctgatctcttgcggttaagcatggtgccaccttctgatgataagatgctggagctgttcaagacgttcgatgtagatggcgacgagaagatcagcagggacgacttcatggcgtgtcttgggaggttcccgttcctgatcgcgttctttgctgccctgatcaatggggaagtgtacatcgagatagtctgaatgaatgcctgaggcaaagcgatgccgcgtaaaaggctggagctgccagtgccaggcgtaggcaggggatccctccgtttatgcaatgtggatacccaccgggtgctcctccactttgagaccaaagcaactgtagtattgggtattgggttgcatcaagtggctgaccagtgtagtgcgtcgattttgtttagttgcttcgttcgaattattattggccatttaccgaatctgttgagatacgcgctggactagtagattgtcgatggaactcagaacgcaaatagaaagcatctgtaatctgaactaactgagaaaacatttttttttggctctctaacctgctgaagttgtgttttcttgctagctgtagcacttcggccagttgtccgc

SEQ ID NO: 137481 - DNA, 1150 bp, Zea Mays
atggagaattccccaccaccaccagcaccgcaggcgcaggcgacgcggcccgatcccatccaccgccccgctgaagaccccgcgccgatgcggccgccgtcgccgtcgtcgccgcgcccgcctgtcgcgttcccgacgctggactcgctggcggcgttcctccggccgcggctccctcccggggcgctctcctcctggggcgccgtgccggggaccaagaccctcgcgaacctgttcctggagctcgccgtgggcgactgcgcgctggacgccgcctcgccgcgggtggtccgcgcggtgcacgtggccacggtccgcatccgcaaccggcgcggcgcgcggctcgtggaaacccggcagctgctctccgacggcacggtccggcggcgcggcccgcggccgctgtccgagaagatgcggcccggcgagtcccccgaggccgccgcggcgcgcgccgtccgggaggagctcggcgcccgcgcccgcgtccggatcctcggcggggccggcgcgcgcgtggaggagcgggagtccgcgtcctacccgggcctccccgcccgctacgtgctccacgcggtcgacgccgaggtggtggacggcgtgcccgaggacggcgagttcgagaccgaggaggccggcgaggacgacgccgccggtgccatcaccgtgaagcgccactactgggattggatcgacgacgatgacgacggtgacagtgagcgcaaggaagttgctgctgccggcgcgcgcgcgcactaggactaggggctgctccgtcagtggtgcatgccgagcaaatcgtctgtctcctcctgatgattctgttggcaccggattatttctctaatttatatagattttgatgagctagaatgaatcctggcttatttcggtataaccgaacgggcccttagaaaatggttgaacatgccacaataaaccattaaacgatccaccaaacctaagataggggagttgatttcatagttagagttaggctattttcagcaacatcctctaaatttcatctccctaaaggaatattctttgtcatttacaaatcactctaaaagattctgtcctctatatcttaactctctccagcaacgtcctctatatctcatcctctatatattttattttttattta

SEQ ID NO: 137482 - DNA, 1595 bp, Zea Mays
acccctaaaatccgggtgtgacaatctacggctaacctagggttcccgtcccgtccggatccgtcgatggggaaggagggcgtggtggcagggccggcggcggatgggagtaaatcgcggccggagtgcatcaactcgtccaacccgtaccacgagtgcactgactactgcctccgcaagatcgccgaggccaggcagcgcctcgacgacgagctccccgactcgtggaagcgcccgcccgagcaccgcaccgtccaccgggactgcatcaacgcctgcaacccctaccacgagtgctccgactactgcttcaagcgcatcgccgacgccaagtcagggcttgagcgtggggagcaacagccaccagctgacgtggccaccgctgccggcacgtctgatgccgtggagcagcagcaacttgaagataacgatgccgacggacaggagggcgcagccgcggatgacggctacccgcagatgacggaaaagcagaagaagctgttcgagctgcgccttaagatgaatgaagcgcggaaagcgaatcagcaggcaatggttgccgagaagaaaaggatggaaccgcggggcgagagccgaggtgtttctaagcagaagtggctggacgacaggaagaagaagatcgggaagctgctggactcaaatggccttgatatgtccaaggcgtacatgctcgatacgcaggagactgcagaagccaagtacaagaaatgggagaaggaacctgctccatatgggtgggatgttttcaatcaaaagaccttgtatgatgcatacaaaaagaggaccaaggatatagaagttgacatggaggcgtacaataaagccaaggaagctgatcctgaattctaccgtgacgcctccagtctccagtacgggaaggtgtccaatgtccctgaagaaaacattgacaagatggtcaaggaactcaaggagcgggaagagaagcggaaatcgttcagcaggaggcgcaagtttaacgaagacaaggacattgattcgatcaacgaccggaatgagcacttcaacaagaaggttgagcgcgcgttcggcaagtacacgctcgagatcaagaacaacctcgaaagaggtactgccttgccggactaaaactgtacacagcagctcggtatcaagaacagcatgggaagagaggtaaggtactggcttgccggactaaggaccttacacagcagctatcttatggcgctcaagctaaccactcgcctagaggcgtgtgtccctggtgttttccttttcgcatggttacttcttgcctgtatgctcggaactcgtggccatggttccattttgatttgtaagaaaccggggactgggttgtcatgacgttaggttgaagtaatgtacagaccaagttgtgcctgaatggaatggttgatttgtaattgtgtatatgccgcgacgaggtttatgtaatttaaaatcaattctgagacattgagaccaatctgtgtgtctctacatatataactaactgttgatgcactcttccataaacaaaccatccgtccctacaacaaacacctgagaagaggagacgagaaaaaaaaaacgaa

SEQ ID NO: 137483 - DNA, 474 bp, Zea Mays
atggtccttggctttcccagacttcaccaacgcgaagaaatggtggaagagggaagtgcagggggccatccccacgaacatctcgcagaggtggacgaagatggctgcctggaggatggagtggggcgtgaggtgctagagctggagcccgaactcctccagcagcaacaggaagaaaggcaagattggcagcgccaacccgcaggagatgtaggagacgaactccccggcggcgaggccaccgagggggacggcgccggcacagactctctcggcgagccccgacgcggtccacccgagcaagccgcacgccagattgagtgccgcctcagactggaagcagtcaggatggccaagcgaagtcatggcgtcggtggcggtgcgggtgtagagcaggagagcgcgaaggcaaaggggcgtggagggctcgaaggtgaaagggcgcagcgattggaagagaatgcaaaagcgtaa

SEQ ID NO: 137484 - DNA, 750 bp, Zea Mays
aataattggcggccccggcttggccctcatcaaaccctcacagcgaaggacacaaaaacacaggtagggttaggcgacgcggcggcgagagcgcgagagtaggaggaggcgtcggccatgacggggaaggcgaagccgaagaagcacacggcgaaggagatcgccgcgaagatcgacgcggcgacgacgaaccggggcggcggcaaggtcgggcaggcggatcggctagggcaggacaagggcgggcacgcgaagctggcgtgcccgctctgccgcaccccggcgcccgacatcaagtccatgcagatccaccacgaggcgcgccatcccaagctccctttcgagccggagaagctcgtcaacctgcactcctccacccccgccgccgccgaggccaccacctccaagcccaagcccggggtccgcggcagcctcaagaagtagctggctggcttgcctgcctgactgcctgggcgatgtacagattttaaggcttccaagcctcaagcttacagttaccccctcaatgtaactgcatttgttcattttcttggcaaatttagtgcttccgtgatcaggattcactcaggatttacttgtataacactacttcatgcaagcaagcttagccttctgtaaagtgaccattcaattttaggcaataatgcagtagtatggtaactatggttggtggtatttgagacattgggggtatgacaagaattgcactcttttagtttgttggatgtc

SEQ ID NO: 137485 - DNA, 927 bp, Zea Mays
atcaaaccctcacagcgaaggacacaaaaacacaggtagggttaggcgacgcggcggcgagagcgcgagagtaggaggaggcgtcggccatgacggggaaggcgaagccgaagaagcacacggcgaaggagatcgccgcgaagatcgacgcggcgacgacgaaccggggcggcggcaaggtcgggcaggcggatcggctagggcaggacaagggcgggcacgcgaagctggcgtgcccgctctgccgcaccccggcgcccgacatcaagtccatgcagatccaccacgaggcgcgccatcccaagctccctttcgagccggagaagctcgtcaacctgcactcctccacccccgccgccgccgaggccaccacctccaagcccaagcccggggtccgcggcagcctcaagaagtagctggctggcttgcctgcctgactgcctggggtaattcccttcgatttcaatcccatccaccgacccgatctacaatcaatcaaagtaccgcccgccctccggcctgcggtgtactgttagtctgctgctgctgcttcttatcgttgttatattgctgatacatgtctcgcgtgatagatgtgcaactatatatcagtctcgtcgccggcaacactggcatgcttaaacatgtgtcgctgctgctccgtgatgccggcgacggctgctattagtgttaatgttagtgtcgatcgggtctccttgaacaatggcaggaatctgttgcttgtttactttcttctaatggcaagtaaagttccctaattgtttcgtctgccgttgggtgtttaatactgtcagggtttcatgagacagatcctctcttgtcttgtgtatgaatagtttgtattgtcggatatgctcggctagcccaaatcttcacctgctttgcttatgcccacttgaactagcg

SEQ ID NO: 137486 - DNA, 433 bp, Zea Mays
atcaaaccctcacagcgaaggacacaaaaacacaggtagggttaggcgacgcggcagcctcaagaagtagctggctggcttgcctgcctgactgcctggggtaattcccttcgatttcaatcccatccaccgacccgatctacaatcaatcaaagtaccgcccgccctccggcctgcggtgtactgttagtctgctgctgctgcttcttatcgttgttatattgctgatacatgtctcgcgtgatagatgtgcaactatatatcagtctcgtcgccggcaacactggcatgcttaaacatgtgtcgctgctgctccgtgatgccggcgacggctgctattagtgttaatgttagtgtcgatcgggtctccttgaacaatggcaggaatctgttgcttgtttactttcttctaatggcaagtaaagttccctaa

SEQ ID NO: 137487 - DNA, 2246 bp, Zea Mays
agataagtggaggtggcaccaccaattccttgatgtaccaggaatgtttggattgttgtattttgacattgtttagttcaacatattcaagattaatggattcgttgaagaaacttgcaaaaaagctagggattgcactttttgccattgatgaggtccattgtgtttctaaatagggccatgattttcgacctgactataggtccactcttgtgtttggtactcaaggaatggtgaggtttaacaaactgcaaagaaggggaagaaaggaggtacatggaaggtttcaatatatctgtcaacctgtatcagcatggtcactaggaataaacttataaagaaggggaagaaacatgaaggaaatctaaaataagtcgtgagataacttaaggtgcttttgcagagaaggcaatttgcatctcccagcagcgatggttagagcatctcagagcataaatctaaacctgtcgcaagatctattcatgacaatatgagcagatattcttctcttagtagttagttttaagacacaactgaattcagtaggataagctttcgatacaaaacattctttagttcctcatgagaatggtcatggcaaatcattgggcactaagttgcacacgcttggcagtctgccttcacgtgtactacttaatggcaccgatggggatgatcatagtgaccatttgaagcaaggtttcattttgtccagtttattctttgtggtgttgttggtcttgaaccaccatgatgactgccagcaacttccttcaatgctgaagcacctcaattggggacaattgataatattgttccatagtatctgattcctctgttgctgattttagtgacatatgtcaagaatctgatgtcttttgtacttcaaaaaaacaattaatttatgcccgtcgcaacgcacgggcacctaactagtagacaaaaaaatgttatgacttctgtacaggacattttttctcttgttgcaaaaaataactttttgtggaaagatatttattacgtcttctaatttgtttattttaacacgtgagctctttttgcagtctgctcgctggcgattgcgattcccaccagtcccccagccccaggcacgaaacctaacccacccaagcggcaaccatggagccctcccccgtcggcgccagcggctcggcggagcggtggcgcgcggaggcggcgcgggcgttccagcactacctggaccgctcggcgccgcacacggcggggcggtgggcgggcacgctcgtggccgcggcggtgtacgcgctgcgggtctactacgtgcggggcttctacgtcgtcacctacgggctgggcatctacctgatcaacctcctcatcggcttcctctcccccatggtcgaaccggagctcgaggccgggcccgggctcccaaccagcggctccgacgagttcaagcccttcatccgtcgcctccccgagttcaagttctggtatgccgtcacaaaagccttttgcattgcctttgtcatgaccttcttctctgtattcgacgttcctgtcttttggccaatacttctctgttattggattgtgctttttgtcctgacaatgaagcgacaaattgtgcatatgatcaagtacaagtatgtcccattcagcataggaaagcagaggtatggcggaaagaaaggccctgccgccagtgcatctaaggagtaaagacggagggagggtgtgggacctcgagagcagtgcatgtgctatctttgaggcatcctgctggcatggtggtattttgagtaccagggctactgatagtgaacgcacaccatattcgctagtggagagtggagattgcagagaagctgaccagacttttgcattggttgatgatttctgttttacgtgtcggtagtttatgtacaatggcatggagcatagctagtagatcaaatttccggatcctctgttgtactgtccctttgtggacaagttgtggacctgttggatccttgcaaacgcattgtgatccaggacctagaggacaaaatcaaactgtccagcgattgttacttggaccttccaacattgactgcatactagtaccagcgattcgtagctgctactgcctttctcatggttaccggcgaacgtttcagccattgtttatttgcatctagcaggcagttgtaagggagttattcgctattatattactcgtttgaagtggcttcttcgtaatagtattaacaactaaggct

SEQ ID NO: 137488 - DNA, 2175 bp, Zea Mays
atgccatttgctttgctgacgaatagctttcgatgatacactagtgttcagttaaccgtaggttgtttcgccacaggactcggtggaaatggagttcttcaccgagtacggagaggcaagccagtaccagatccaagaagtcattggtaaaggcagctacggggtagttgctgcagctgtagatacccgcaccggtgagcgggttgctatcaagaagatcaacgatgtgtttgagcatgtctcggacgccacacgcatactgcgggagatcaagctccttcggttgcttcgtcacccagacatagttgagattaagcacatcatgctccctccatctcggagggagttccaagatatttatgttgtttttgagctcatggagtctgatctccatcaagtgatcaaggccaatgatgacctcacccctgaacatcaccagtttttcctgtaccaacttcttcgtgctctcaagtacatccatgctgctaatgtatttcatcgtgacctaaagcccaagaatatactggctaactcggactgcaaactgaaaatatgtgactttggtcttgcccgtgcatcatttaatgatgccccttcagctatattttggacagattatgtggcaacgaggtggtaccgggcacctgaactatgtggttcttttttctccaaatacactcctgcaattgatatttggagcattgggtgcatatttgctgaacttctcactggaaggccactatttcctgggaagaatgttgtacaccaattagatattataacagatcttcttggaactccatcatctgagaccttatctcggatccgaaatgagaaggccaggagatacttaagctgcatgcggaaaaaatatcccgtgccctttactcataaatttcgaaatgccgatcctttggctcttcgtcttttagagcgtttacttgcatttgatcctaaagatcggcctactgcagaagaggctctagctgatccatactttgcatcccttgctaatgtggaacgtgagccatcaagacacccaatttctaaacttgagtttgaatttgaaagaaggaagctggccaaagatgatgttagagaattgatctatcgagagattttggagtatcatccacagatgctggaggagcacatgcaaggtggagaacagattagcttcctctacccgagtggagttgatcggttcaaacggcagtttgcacatcttgaggagcattatagcaagggagaaagaggttctccactgcaaagaaagcatgcttctttaccaagggaaagagtggttgtatcgaaggacggtgatactgatcaacatattaatgaccaggagagaagtgcagattctgtcgcccgcaccactgtgagccctccaaggtcagaagacgacgacatgagcgatgtgaaatccacaagcttaagctctcggagctacctgaagagtgcgagcataagtgcttccaagtgtgtcgttgccacgaagaaacacccggaggacgatggaatcgctgaggaaatggaaggcgccgtcaatggattgtctgaaaaggtctccaggatgcactcgtaagcaggactgcccctggcaacagcaaccttgttgcaaggtttctgtctctggtacactgtattccgacgacagccttggaaaggcaaacactgtatgtcacacagcagtacagcacactgtgctgcgaggttgggttttgcttgcgtacatccatccacagctagttcgactttacctgggtggaagaggaacacaccaccgcctgatggccctttcttcatcgtctgcatttccaccgtgtcatgccagcgctgcgtggcacctctagaaggtagaagccctgcatggattcatgaagaattcctaagatgtagcactagtcagtgcatggaggaaacatagtcggcctgtcgaccatgagatgttttcttgcaaatggagtctggacctatggttttcagttttattacaacggcttctgccgtaggaagtgtcagcagtgtatcatccctgtaatacccaatttataagagaccatataaaaggagaaaaatcatttgctttatgtatgtgtataacatatccacttatcatcacatgtgaatgccatatttaaagataaataactaataaaaagttataccact

SEQ ID NO: 137489 - DNA, 2106 bp, Zea Mays
gatcgtccacggcttccgccgctggttccaccgccggagcggctccacctccaatcagtcgtccatcgccggcgacggcgagggggaggcggacggcggctcgccggatctcgagatcgtcgatgacccggatctcctcggcctccgcgccatccgcgtgcccaagcgcaagatgccgctccccgtcgagagccacaggaaggactcggtggaaatggagttcttcaccgagtacggagaggcaagccagtaccagatccaagaagtcattggtaaaggcagctacggggtagttgctgcagctgtagatacccgcaccggtgagcgggttgctatcaagaagatcaacgatgtgtttgagcatgtctcggacgccacacgcatactgcgggagatcaagctccttcggttgcttcgtcacccagacatagttgagattaagcacatcatgctccctccatctcggagggagttccaagatatttatgttgtttttgagctcatggagtctgatctccatcaagtgatcaaggccaatgatgacctcacccctgaacatcaccagtttttcctgtaccaacttcttcgtgctctcaagtacatccatgctgctaatgtatttcatcgtgacctaaagcccaagaatatactggctaactcggactgcaaactgaaaatatgtgactttggtcttgcccgtgcatcatttaatgatgccccttcagctatattttggacagattatgtggcaacgaggtggtaccgggcacctgaactatgtggttcttttttctccaaatacactcctgcaattgatatttggagcattgggtgcatatttgctgaacttctcactggaaggccactatttcctgggaagaatgttgtacaccaattagatattataacagatcttcttggaactccatcatctgagaccttatctcggatccgaaatgagaaggccaggagatacttaagctgcatgcggaaaaaatatcccgtgccctttactcataaatttcgaaatgccgatcctttggctcttcgtcttttagagcgtttacttgcatttgatcctaaagatcggcctactgcagaagaggctctagctgatccatactttgcatcccttgctaatgtggaacgtgagccatcaagacacccaatttctaaacttgagtttgaatttgaaagaaggaagctggccaaagatgatgttagagaattgatctatcgagagattttggagtatcatccacagatgctggaggagcacatgcaaggtggagaacagattagcttcctctacccgagtggagttgatcggttcaaacggcagtttgcacatcttgaggagcattatagcaagggagaaagaggttctccactgcaaagaaagcatgcttctttaccaagggaaagagtggttgtatcgaaggacggtgatactgatcaacatattaatgaccaggagagaagtgcagattctgtcgcccgcaccactgtgagccctccaaggtcagaagacgacgacatgagcgatgtgaaatccacaagcttaagctctcggagctacctgaagagtgcgagcataagtgcttccaagtgtgtcgttgccacgaagaaacacccggaggacgatggaatcgctgaggaaatggaaggcgccgtcaatggattgtctgaaaaggtctccaggatgcactcgtaagcaggactgcccctggcaacagcaaccttgttgcaaggtttctgtctctggtacactgtattccgacgacagccttggaaaggcaaacactgtatgtcacacactagttcgactttacctgggtggaagaggaacacaccaccgcctgatggccctttcttcatcgtctgcatttccaccgtgtcatgccagcgctgcgtggcacctctagaaggtagaagccctgcatggattcatgaagaattcctaagatgtagcactagtcagtgcatggaggaaacatagtcggcctgtcgaccatgagatgttttcttgcaaatggagtctggacctatggttttcagttttattacaacggcttctgccgtaggaagtgtcagcagtgtatcatc

SEQ ID NO: 137490 - DNA, 1553 bp, Zea Mays
cacgccggaagaccgagacatgctcccatgcactgcggcggtggccatttttaagtagttagtaagtggcatctccacgcaagctcgcgtcgccaacccgctcgctccacgcgccatcctctcctccggatcctcgaatgtcgatgagcaagctcgcccgcgggtgggccgacctcccgcgcgacctgctcgagtccgtgctcgcccgcctccccgtgccggacctcgtccgcttccccgccgtctgcaccgcctggcagtcggtccacgcagctgccgccgcgcggcttcggcaggccacgccgtcgtccccgtggctcatgctccccttcaatccgaccgcacgggccggcggcgtcgccaaactctcggtggcacggttcctgagcctggcggagggccgggtgtacgtgatccgccagccggcgccggccgcccgcgaccgcctctgcgtcggctcgtcggccgacggatggctcgtcaccgccgacgcccgctcggagctaagcctcctgaacccgatcacgggcgcgcagctccgcctcccgcccgccgccacgctcccgttcgtcgacgcccgccgcggcgcggacggccgcgtcgagagctacggtctgcggtcctgcttcgccgacggcggaggctgcggcgaggaggcgctggtcccgacggagacgctagggcccgacaggctccggtacgaggtatacgagaaggccatcgtcgtgtcggcgccgcgaagggtgcccccttgctcgtgctgggtcggatacgccgtgctgctcatctgccagcccctgggccgcctcgccgtcgcgcgggccggggacgcggagtgggcgctgctcgacgacgctgacgcgcccgcccgctgctgggtcgacgccgtgcgcgcgtcgttctccggcgcggacgggagccggcgtgaccatcagccggtgtacacggtggacgccgcggggcgcgtcgacgcgtgggacacggacgctgccacgacgcccagcagagcggtcgcgccgccgtgcggctgctcggcccgctcctgcgccatgtcagccgcgtgccgcaagtacctcgtggagctctcgccagggcggctgctgcaggtgcaccgcctccgcgagacggcgcacgcgcgatacgcgtgggagccccgaccggagcacatggagtacaccaccaccggcgtcgagctcttcgagtggacggccgccaccggcctgtgggcgcgggcggacggtcgggtgctgggcgggcgcgcgctgtacctcgggaagagcgcgtcgctgtgcgtccccgtggacgtggacgacgccgggtggtgtcccggggtgaggggtggctgcgtctacttcaccgacgacgggccgtggtcgcacgatcggtgccacgaggtgacgccggacgtgggcgtgctggacctcgacgacgggagctacaggccgccgcgcggcgccgcgagggacctgctctggaagtggccacccccggtttgggtgttcccttcgctcgccggctgactgatccgcctgcctctgaatcttggaagcttc

SEQ ID NO: 137491 - DNA, 689 bp, Zea Mays
actaactcagcactcggcagtcccagctcatccccatccctgcccgtctccccggccggccactcgaccagaagcaccggagcgagcggagaccgatcggaggccgacggctatgggcaagcaagcgatggcgctggcgctgctgtgcgccgtcctgctggcggcgacggcggacgacgcggcggcggcggcgtcgtcgtgcaacccgtcggcgctgagcgcgtgcgcgcccgcgttgttcggcagggcggtcacgctggggtgctgcgcgtcgctgcgcgcgcagcagccgtgcctctgccagtacaagcgcgaccccgcgaaccgcgcctacgtcaacggccccgccgcgcagcgcttcacccgcgcctgcggcctcacccagatgaagtgctgatggaccgagagcctgcatgcgctccgccggccgctggagatgttgtagtatgcgcggctacgtgtatgtactactactacgagtccacggcgggtccatggacatacatacgtgccgtctaaataaaaacgcggtcgcggcgagctcgtacgtcgtgctccggcaaatcgtggtcatctacgatacctcgttcagcaggagtaaggctgtgcatggcgccggtggattcggctgttcccgtgaatcgtgatgctcttcagctgtttcgtacgaataaaatcatgttgccgaa

SEQ ID NO: 137492 - DNA, 51 bp, Zea Mays
atggcggacgcgcccgccgccttcctcttcgcccctctctcgctgccctag

SEQ ID NO: 137493 - DNA, 1349 bp, Zea Mays
gtcccgctccgtttacccaatcacccaccacccttgcagcttgcgctgtggccctggcgccctgccttctctctcgtggcctctctttctcgccgcgcaactgggtgggcggtgggccggtcaggttttagccggcgacgagcacattaggttcgcccctgctctctggaaccatggggacctctcctcaggattcgcctctttggaagcaaatcgacgacgccgagtactatctagtcagtggatcgttcgagccagcgttgttgactgatttatctgtcgctgatcaaatacgcacggcttctctggagagcgcatgcttgaatcagctgggatggtacttgtacaggcactaaaagaactcaggaggacccctgagatgtttgttcagcttaggacgatgtttggttcagtggcatcagtacctgctagagttttccttacatgagctaccattcaagtggcagaaggatctgtatctgacctcagaccaatctttgaggaataccttgctaattggagatattagaataatgaggcttatgttttggatggaggagggcatgacagcgcctcaaatggttttgttgttgcatctgttatgtcaaccgggcagtattttcaggtggcaggattgtatacagtaacattcctctgtcttgtctctcaagatagtgaaactgctatctcacgggcagaaaaggctgatctgactgagcaaagacgacaggacctactaaaaaaagctccatgcagtacgattagctgcaaataaagagcagtccaccgaggaaggggtagtaaaacaaacggaagagaggaaccttgctacttctacaaacggctggacaccatcgccacatgaggatcctccaaatagacagctcctgtgtgcgaagggctgaaaagggtcctagtgaagtctgctcaaccatccgagcgcgtcgcagatcaattcgatccgctgttctggtggttccgttccattcgcctgaagcttgggaaaacacatattgttctaccaagcggcaagttaatgtttctcgtctcggtctcgctgctgttctcgactgtgtacgtgctccgaaggaaagctgctggcttgaagaggaccgtgttccagcaaagctgcttctctgcgacgagcgttctttgacgcgcttgagctggcggtctctgtccggatgaaccctctagctgccgtccaacaggtgccacaaggccctcgaggaagccggttatgatggagtcctttattggaattcggcagatgaccagattctgtttcgtggaaaatgtaaatgcaaacacaaccgtgtgcttaacgcagcatgataatgatctgggtc

SEQ ID NO: 137494 - DNA, 786 bp, Zea Mays
tcggtcgaggcattactagctcagcgggcggcggcaatggaggagtaccagcaggtgcatcagcagcagcagcagcagggtggccgtgggagcaacaagatccgggacatcgtgcggctgcagcagctgctgaagaagtggaagaagctggccacggtgacgccctcggcggcctccagcggcgggaggagcagcgtgccgaggggctccttcgcggtgtacgtcggcgaggagatgcggcgcttcgtcatccccaccgagtacctgggccactgggcgttcgcggacctgctccgcgaggccgaggaggagttcgggttccggcacgagggcgcgctccggatcccctgcgacgtcgactccttccagggcatcctccgcctcgtgcagcaggggcagggcggcaggaggaatgagcccgccgccatgtgcgactgcgactgctcctgctcctccgagaccgagatcctctgcagatgagatgacgactcgacgacggccgccacgaatcgaggcctcgctctcgtcgtctcgtctcagtgccctgctctgcatttctttctttgtttttttttccctctctcctttctcgggttggttctttctttcttcgcggtttttttctgaagaaaggaggagaggttgcattgctctgcagtctgcaccgataagatctgtaatctgtacaacaactatgggaggagataaagatctctttttttttggtctcctggtcagaacaaggatctaatgtaagacaaaccaaacaaagctttgatcttgcaa

SEQ ID NO: 137495 - DNA, 301 bp, Zea Mays
gtgaccgagcgtgcacaaaaagaagtcatagcgcgcgtgggtctgggatttggacgttgttgcccctagtaattgcacaaaaaaagatgcatttaagaggaatcgaacttgagacctccagtctagaatgccttgaagctgctgcagcaaccaatcaagcctgattgttttagtgacgttaatgcacccatatccctatttaataggggcaaacagggaaaactctatgataattaatcactccttggtatgcacaatcatgtcctaaacgactacctttactgcactggagggagtacat

SEQ ID NO: 137496 - DNA, 1248 bp, Zea Mays
atggtgctgatatttatgtcaccaactaagcttagtatgaaaatacatctcatgatcaatctgatgggaaggaatcttgcatcatcgcctgctaatataatctactccacttggactgtgcttgttgcaagcttcagaagcaaatggataagactagttaagcagcactcctctcctcctctagcgttggcgcggatctcgtcggtgatgaacatacgacagcttgtttgtgtaccattagcaggatactataccagcctcctaagtgaaggcacaaatccacaagactatgacgatttagttgacttgtatcctgaggaacaaccacaaagggtcgaagtaaacacttatgcaccctctgctagaccgaaccataagaggtcaaagaatttcagtgacgtggaagacgagcttttggtgtctgcatggcttaacataagtttggatccaattattggttataatcaaactcgcagttcatattggactagaatttatgactactttcatgccaataagaccttctcctcaacccgtagccagaactctattatgcaccgttggaccagcatacaagaaggtgtaaacaggtttactggatgccttgctcaggttgagagaagaaggcaaagtggtgctacaatgcaagacaagcttacacaggcgtgtgctttatataagtctgaagataagcaacataaagcttttccatatatgcattgttggaataagttgcggacacagcgtaaatgggagatgaaacttgaagaattggctgttggcaagtcatctaataagaagcaaaagatgaactcaaatgaaacctcacctccacatttaccaagtgccaccgaaacaagcgagcctacaactccaaatgagactgtcacaacaagaccacctggaaagaagaaggccaaagcagcagcatttcaagctgaaaagaaaggctacacagaaactttaaacaaattatttgaaaagaagaaagaaacagatgaatttaaagaaatgaaaaaagacgagaggtttagattagcattagcagttgaacaagagagggctgcgaatgagaaattaaatatgcagttaaggagtaaagagctagaattgaggcagcaagaagttgaacaacataagaagagggaagaagagaggattatgacactagaccttagtgtcatgcctgctgatcagaagcaatattacatgagactacgatctaagatattgtctgaaaatgcctaa

SEQ ID NO: 137497 - DNA, 1095 bp, Zea Mays
gaagaatccaattgtcaactttattattcgttcattcacagatgagaaattcattcatgtttttttttgaatcatgtaataatccatgaccacgatcagattaccatatgcacacagaacatagcaggagtagtatatacatacacaccacagcaccgacagaggatgggcaggatgtcttattcgcaaattggaacccttcccaatttgccaaaccgaggacgacgagatgggaatcagatctcctcgaccacgatccagtcctcctcgccgtcggagaactccagcgcgatggtggtgccaaccatgcagaaccccatgtcgtcgccgtcgtcctccacctcctcctcctcgccatccttggcatccagcagcccctgctcttcaactgcctgaatctctcctacagcatccacgccgtcctcctcttgcccgcggccgacgaagaggtcgtagaggtcagagagccggccgtcgggcgccgctccgccctcgtcgtcgtcctcctcctcctcgtgccagctgcttccaccggccaggtacgccagcagggaggaggcggacgcgccgctgtacccggggccctggtcgacgacgcgccaggacacgaggcggtggttgagcgcgacgtcgcaggcgcgcagcttgcgcgcgcccttggccttgtcgcgcgccttggagaccgggtgcgcgtggcagcccgcgcaccgggcccgccggcacttgcccgtgctccgggacgcgttcgtcggcttcctcgccgccgccgccgccgtttccacgaccgcgtcggcgtcggagttgtcgtcgccggcggccgtcctcagcaccttgctgcggctgccccggacggcgccgtgctgccatccgtccctcttcatcgtccggcttcggctgggattgcgggtttcgtggggggtggcttgtttggttggaggagcgaggagaggaggtagttggcgatggcaattggcaactaactatacaagcaaggggaaagggcaggaccatcagaccatgcgcgtgtggatggttgggcaagtgtgttggagtcgccaaggccaaccatggccgcaccgcaccggtggtttggtt

SEQ ID NO: 137498 - DNA, 674 bp, Zea Mays
agtatcctttacatctatggttctttctcattctccactaaattgcatttcctatgaaacgataaaatactatgttgttataaacatgcatttcaggtgtaccatccaaatattgatctggaaggcaatgtctgtctgaacattctgcgcgaagattggaagcctgttctcaacatcaacactgttatttatggcctgaatcttctttttacgcaaccaaacgacgaggatcctctgaaccacgaagctgcagttgtccttcgcgacaatccaaagatgtttgaggcaaatgtgagaagagccatggctggaggctacgtcggccaacactatttccaaagatgtgcttgacttgatgtggtggtggcttgaaaacgatcaacagagcccctccccctgtatcagcaccagcgcgcccagctttgtgtgcggaaagtgcttctggaagcaaaatccaaaccgttcatggtgtgacatctgtttgcccgcctttgtgatgtgtggtatagtggtggtgcataatgacagggaaatgcttctctaactgtatcattcattccataaatcctaaacgaggaatgggaagtggattgttaagcagattccttctgcagatgttgatgtcgtattcggcgtgtattcattgtcgcatcttccaggtcgacgttgacatg

SEQ ID NO: 137499 - DNA, 1529 bp, Zea Mays
ctcaataaaatatgtactcggaatcggaagaacctaccttacttttccatccgcggaacgacgcacgcggacgcctccttgttccgggtcctactcccgccgccttcgcctaaagaggcctcgccctcccccctccggcgaaaaccgattcccttccccgattccctccggcgtttcctggtcccttagtgcaagcaaggacaccgctcctctagcgagctctgttctgaagcggcaaggtttggccttacctgtttgcctcaagcttgccggcttggctgcctgggcaagcaaatccttgccaatttaggcgagccaaattttctctcctgcatggacaaggtttgctcacgcgctcgcatggccagctgagccgtcactaaattggccactccatgctgttgctggatcgggatttgttattgctgaattgatggccatcactggactcagatagtcaggtttgccagcacggcagcaccaaatcgacctctgctaccatcagattgatgttcctaggcactgaattgaccctcatcactgttgaatcgagctctgttattgttggatcaagctacagtttgaggcaaggcgagcgatggcaagggaagaaaacacctttggaagattaccttcctttgcctagcaagaaagatgattaatcttttcaaaataaagggtcaaaagaaagaagaggcagcaagtgctgctggaaaggcccctgttaagaaacagtctgctggggagctccgtcttcataaagatattagtgagctcaacctgccgaagaccacatcaatttcttttcccaatggcaaggatgatctgatgaattttgagaccaccatccgacctgatgaaggatattacatgggcggcactttcgttttcacctttcaagtgtccccatcttatcctcatgatcctccgaaggtcaaatgcaagaccaaggtgtaccatccaaatattgatctggaaggcaatgtctgtctgaacattctgcgcgaagattggaagcctgttctcaacatcaacactgttatttatggcctgaatcttctttttacgcaaccaaacgacgaggatcctctgaaccacgaagctgcagttgtccttcgcgacaatccaaagatgtttgaggcaaatgtgagaagagccatggctggaggctacgtcggccaacactatttccaaagatgtgcttgacttgatgtggtggtggcttgaaaacgatcaacagagcccctccccctgtatcagcaccagcgcgcccagctttgtgtgcggaaagtgcttctggaagcaaaatccaaaccgttcatggtgtgacatctgtttgcccgcctttgtgatgtgtggtatagtggtggtgcataatgacagggaaatgcttctctaactgtatcattcattccataaatcctaaacgaggaatgggaagtggattgttaagcagattccttctgcagatgttgatgtcgtattcggcgtgtattcattgtcgcatcttccaggtcgacgttgacatg

SEQ ID NO: 137500 - DNA, 1389 bp, Zea Mays
ctcaataaaatatgtactcggaatcggaagaacctaccttacttttccatccgcggaacgacgcacgcggacgcctccttgttccgggtcctactcccgccgccttcgcctaaagaggcctcgccctcccccctccggcgaaaaccgattcccttccccgattccctccggcgtttcctggtgagtttacgccagcgccgacttctccgatcaggtcccatcggttttgggtgcgcgcacctcgtttggcttcgcgtcgttcttcggtgcgcgcacgcgattcgtggatccggcggtcggatcccgcgccgtccgcagcgatggctgctccccaacccttgcttctttgcgcgcaccccttccccacggccttttagtttttacatggagaggggcgaccctcgctagccgcagggtccctctccatcctcaccgctttcttcctctgcaggtcccttagtgcaagcaaggacaccgctcctctagcgagctctgttctgaagcggcaagaaagatgattaatcttttcaaaataaagggtcaaaagaaagaagaggcagcaagtgctgctggaaaggcccctgttaagaaacagtctgctggggagctccgtcttcataaagatattagtgagctcaacctgccgaagaccacatcaatttcttttcccaatggcaaggatgatctgatgaattttgagaccaccatccgacctgatgaaggatattacatgggcggcactttcgttttcacctttcaagtgtccccatcttatcctcatgatcctccgaaggtcaaatgcaagaccaaggtgtaccatccaaatattgatctggaaggcaatgtctgtctgaacattctgcgcgaagattggaagcctgttctcaacatcaacactgttatttatggcctgaatcttctttttacgcaaccaaacgacgaggatcctctgaaccacgaagctgcagttgtccttcgcgacaatccaaagatgtttgaggcaaatgtgagaagagccatggctggaggctacgtcggccaacactatttccaaagatgtgcttgacttgatgtggtggtggcttgaaaacgatcaacagagcccctccccctgtatcagcaccagcgcgcccagctttgtgtgcggaaagtgcttctggaagcaaaatccaaaccgttcatggtgtgacatctgtttgcccgcctttgtgatgtgtggtatagtggtggtgcataatgacagggaaatgcttctctaactgtatcattcattccataaatcctaaacgaggaatgggaagtggattgttaagcagattccttctgcagatgttgatgtcgtattcggcgtgtattcattgtcgcatcttccaggtcgacgttgacatg

SEQ ID NO: 137501 - DNA, 1155 bp, Zea Mays
ctcaataaaatatgtactcggaatcggaagaacctaccttacttttccatccgcggaacgacgcacgcggacgcctccttgttccgggtcctactcccgccgccttcgcctaaagaggcctcgccctcccccctccggcgaaaaccgattcccttccccgattccctccggcgtttcctgggtccctctccatcctcaccgctttcttcctctgcaggtcccttagtgcaagcaaggacaccgctcctctagcgagctctgttctgaagcggcaagaaagatgattaatcttttcaaaataaagggtcaaaagaaagaagaggcagcaagtgctgctggaaaggcccctgttaagaaacagtctgctggggagctccgtcttcataaagatattagtgagctcaacctgccgaagaccacatcaatttcttttcccaatggcaaggatgatctgatgaattttgagaccaccatccgacctgatgaaggatattacatgggcggcactttcgttttcacctttcaagtgtccccatcttatcctcatgatcctccgaaggtcaaatgcaagaccaaggtgtaccatccaaatattgatctggaaggcaatgtctgtctgaacattctgcgcgaagattggaagcctgttctcaacatcaacactgttatttatggcctgaatcttctttttacgcaaccaaacgacgaggatcctctgaaccacgaagctgcagttgtccttcgcgacaatccaaagatgtttgaggcaaatgtgagaagagccatggctggaggctacgtcggccaacactatttccaaagatgtgcttgacttgatgtggtggtggcttgaaaacgatcaacagagcccctccccctgtatcagcaccagcgcgcccagctttgtgtgcggaaagtgcttctggaagcaaaatccaaaccgttcatggtgtgacatctgtttgcccgcctttgtgatgtgtggtatagtggtggtgcataatgacagggaaatgcttctctaactgtatcattcattccataaatcctaaacgaggaatgggaagtggattgttaagcagattccttctgcagatgttgatgtcgtattcggcgtgtattcattgtcgcatcttccaggtcgacgttgacatg

SEQ ID NO: 137502 - DNA, 1118 bp, Zea Mays
ctcaataaaatatgtactcggaatcggaagaacctaccttacttttccatccgcggaacgacgcacgcggacgcctccttgttccgggtcctactcccgccgccttcgcctaaagaggcctcgccctcccccctccggcgaaaaccgattcccttccccgattccctccggcgtttcctggtcccttagtgcaagcaaggacaccgctcctctagcgagctctgttctgaagcggcaagaaagatgattaatcttttcaaaataaagggtcaaaagaaagaagaggcagcaagtgctgctggaaaggcccctgttaagaaacagtctgctggggagctccgtcttcataaagatattagtgagctcaacctgccgaagaccacatcaatttcttttcccaatggcaaggatgatctgatgaattttgagaccaccatccgacctgatgaaggatattacatgggcggcactttcgttttcacctttcaagtgtccccatcttatcctcatgatcctccgaaggtcaaatgcaagaccaaggtgtaccatccaaatattgatctggaaggcaatgtctgtctgaacattctgcgcgaagattggaagcctgttctcaacatcaacactgttatttatggcctgaatcttctttttacgcaaccaaacgacgaggatcctctgaaccacgaagctgcagttgtccttcgcgacaatccaaagatgtttgaggcaaatgtgagaagagccatggctggaggctacgtcggccaacactatttccaaagatgtgcttgacttgatgtggtggtggcttgaaaacgatcaacagagcccctccccctgtatcagcaccagcgcgcccagctttgtgtgcggaaagtgcttctggaagcaaaatccaaaccgttcatggtgtgacatctgtttgcccgcctttgtgatgtgtggtatagtggtggtgcataatgacagggaaatgcttctctaactgtatcattcattccataaatcctaaacgaggaatgggaagtggattgttaagcagattccttctgcagatgttgatgtcgtattcggcgtgtattcattgtcgcatcttccaggtcgacgttgacatg

SEQ ID NO: 137503 - DNA, 3368 bp, Zea Mays
accattagccaagccagtaccatcgcaagcacgcacctttgcctcccttccgctccccgcctcccccctcactcactgcccactgccactccactccccgctccccaaaccctaccccaacggcccaaccccccggagcggagcggagcgattcgctggtcccgccagcgccgcgcccgggcatgccgccgccattgggtggcgcgaccgacgacgcccactgagccgtgcgccggggagccgccgctgttccttcctcggtgtccagtggattggagtggagatcccgccggaagcggaggcaggaaccgcccctgctgtcgcgagttctgcggtgctgacatcggtgaaagatgaggaggatcaggcttgcctgtttgcttgttatctttgtgcaagtgcaatgggcggcccttggaacgcatgatgtgtacatcgtgaccatggaaggggatccggtcgttagctacagaggcggtgtccaaggatttccagcaaccgctgtggattcggacgaggaaattgatctaaccagcgaggctgtcaaatcgtatgccctccacctccgaggacaccatgacaagctgctagactcgcttttagtagaaggaacttacgagaagctttatagctaccatcatctcatcaatggcttcgcagttcacatgtcgccactgcaggctgagttcttgaagaaagccccaggagttaagcatgttgagagagacatgaaggtacagaaattgactacacacacacctcagtttcttggattgccaactggggtatggtcaacaggaggtgggcttgatagagctggtgaagatgttgtgatcggtttcgtggattctggaatttaccctgaacatccgagcttcgctgcgcacaagactgatccatatggacctgcccctcgttataaagggaaatgtgagatggatccagtaacacaaagaagtttctgtaatgggaagatagttggggctcagcattttgcaaaagctgcaatggctgctggcgcgtttaatcccgatgttgaatttgcatctccattagatggtgatggtcatggaagtcacacagctgcaattgctgctggaaacaatggggtcccagtgcgaatgcatggtcacgaatttggcaaggcaagtggtatggccccacgtgctagggtagctgtctacaaggttctttacaggctttttggtggttacatagctgatgttgtggcagctattgatcaggctgttcaggatggtgttgacattctcaacctttctgttgggcccaatagcccaccaacagctacacggactacttttttgaatccttttgacgctgcacttctttctgctgtgaaagctggggtatttgttgcccaagctgcaggaaatggtggaccatttccaaaaacactggtgtctttcagcccatggataactactgttgctgctggagttgatgaccgcagatacaagaatcatttaacactaggaaatggaaaacttctctctgggcttggagtatcacctgcaacacatgggaatatgtcgttcagcttgatttctgcagctgatgctctattgggttcatctgcaaccaagtacagtgcattagattgccagaggcctgaactattgaataagaggaaagttcaggggagaattcttttgtgtggctattcgttcaattacatttctgggacagcttcaataaagaaagtgtctcagacggccaggaatcttggagcagctggctttgttgttgctgtggagaataattacccaggaacaaaatttgaccctgtaccattcagcatccctggaattctcatcacagatgtcagcaaaacggaggatcttatagactactacaattcttccaccataagagattgggctggaagggctacagccttcaaagcaacagcaggtattgcagatggtttggcaccaacactatacaattctgccccccaggttgcactgttctcttctcgaggacccgatgttaaagattttagctttcaagatgctgatgtccttaaaccagacatacttgctcctggcaatctcatatgggctgcatgggcgcctaatggaacggatgaatcaaactatgctggtgaaggatttgcaatggtttctggaactagcatggccgcaccgcatatcgctggcattgcggcactgataaagcagaagaacccaaagtggagcccctcagcaataaaatctgccatgatgacaacggccaatacactggacaaagggagccgtcctctcagagcgcagcagtacactgcatcggaaatgatgacactttctcgggccacaccgtttgattgtggtagtggcgctgttaacccaaaagctgcccttgatcctggtcttgttctagatgcaacccacgaagagtacatcgcatttttgtgctcgatccctgacgtcaaccagagcgaagtgtcaaacatcgccggttcagcttgcaactccagctccaaggggcgtcaacgccccttcgacctcaacctcccctcgatcgccatctctcagcttcgaggcaccgtgacggtgacgcggaccgtcacaagcgtgtccgaggagaccgagacctacaccatcatgacgagaatgccgccggaggttgccctggaggtgacgcctccggcggtgacggtgctgcccggagcatcgagagagctagctgtgaccctgacggcgaggtccgtgaccggcacctacagtttcggagagatcgccatgaaaggcgaccgcggccacctcgtcagaatcccagtggtagctatgggattcaagtagatagaagacgaccgcgaccggcgctagagagagtaagtacgaggagcgagttgtgcctctgagatccgaggtcttgagctgcagaggaatgctgtaatttttccatagtttgtagagaataagagttagggtctgtttggttgggctgtggctgtgaaaaaagttgctgtgggctgtgagctgtggaaaaagctgctgtaggctgcaagctgttaaaaagctaaaaactgtttggtggaaaccactaaaagtcgttaaaaattcttcgatatatgttttcacagtttcatctaaaaagccactaaaagcaggtccaggggtgctttcagatttgcactgcgagaaagtcggcttttagaaaaagctgcttcctggatctagccttttggttgacttttggcttttaggggggcaaaagccaaagccaaaagtcaaaccaaacacacccttagaatgccctcctggttgtaaaaatatgtatttgggtgtttaaatttaagcctatgttcagccttgctcttaaggcaaagtatcatgtgcacatca

SEQ ID NO: 137504 - DNA, 2933 bp, Zea Mays
taccatcgcaagcacgcacctttgcctcccttccgctccccgcctcccccctcactcactgcccactgccactccactccccgctccccaaaccctaccccaacggcccaaccccccggagcggagcggagcgattcgctggtcccgccagcgccgcgcccgggcatgccgccgccattgggtggcgcgaccgacgacgcccactgagccgtgcgccggggagccgccgctgttccttcctcggtgtccagtggattggagtggagatcccgccggaagcggaggcaggaaccgcccctgctgtcgcgagttctgcggtgctgacatcggtgaaagatgaggaggatcaggcttgcctgtttgcttgttatctttgtgcaagtgcaatgggcggcccttggaacgcatgatgtgtacatcgtgaccatggaaggggatccggtcgttagctacagaggcggtgtccaaggatttccagcaaccgctgtggattcggacgaggaaattgatctaaccagcgaggctgtcaaatcgtatgccctccacctccgaggacaccatgacaagctgctagactcgcttttagtagaaggaacttacgagaagctttatagctaccatcatctcatcaatggcttcgcagttcacatgtcgccactgcaggctgagttcttgaagaaagccccaggagttaagcatgttgagagagacatgaaggtacagaaattgactacacacacacctcagtttcttggattgccaactggggtatggtcaacaggaggtgggcttgatagagctggtgaagatgttgtgatcggtttcgtggattctggaatttaccctgaacatccgagcttcgctgcgcacaagactgatccatatggacctgcccctcgttataaagggaaatgtgagatggatccagtaacacaaagaagtttctgtaatgggaagatagttggggctcagcattttgcaaaagctgcaatggctgctgtcacacagctgcaattgctgctggaaacaatggggtcccagtgcgaatgcatggtcacgaatttggcaaggcaagtggtatggccccacgtgctagggtagctgtctacaaggttctttacaggctttttggtggttacatagctgatgttgtggcagctattgatcaggctgttcaggatggtgttgacattctcaacctttctgttgggcccaatagcccaccaacagctacacggactacttttttgaatccttttgacgctgcacttctttctgctgtgaaagctggggtatttgttgcccaagctgcaggaaatggtggaccatttccaaaaacactggtgtctttcagcccatggataactactgttgctgctggagttgatgaccgcagatacaagaatcatttaacactaggaaatggaaaacttctctctgggcttggagtatcacctgcaacacatgggaatatgtcgttcagcttgatttctgcagctgatgctctattgggttcatctgcaaccaagtacagtgcattagattgccagaggcctgaactattgaataagaggaaagttcaggggagaattcttttgtgtggctattcgttcaattacatttctgggacagcttcaataaagaaagtgtctcagacggccaggaatcttggagcagctggctttgttgttgctgtggagaataattacccaggaacaaaatttgaccctgtaccattcagcatccctggaattctcatcacagatgtcagcaaaacggaggatcttatagactactacaattcttccaccataagagattgggctggaagggctacagccttcaaagcaacagcaggtattgcagatggtttggcaccaacactatacaattctgccccccaggttgcactgttctcttctcgaggacccgatgttaaagattttagctttcaagatgctgatgtccttaaaccagacatacttgctcctggcaatctcatatgggctgcatgggcgcctaatggaacggatgaatcaaactatgctggtgaaggatttgcaatggtttctggaactagcatggccgcaccgcatatcgctggcattgcggcactgataaagcagaagaacccaaagtggagcccctcagcaataaaatctgccatgatgacaacggccaatacactggacaaagggagccgtcctctcagagcgcagcagtacactgcatcggaaatgatgacactttctcgggccacaccgtttgattgtggtagtggcgctgttaacccaaaagctgcccttgatcctggtcttgttctagatgcaacccacgaagagtacatcgcatttttgtgctcgatccctgacgtcaaccagagcgaagtgtcaaacatcgccggttcagcttgcaactccagctccaaggggcgtcaacgccccttcgacctcaacctcccctcgatcgccatctctcagcttcgaggcaccgtgacggtgacgcggaccgtcacaagcgtgtccgaggagaccgagacctacaccatcatgacgagaatgccgccggaggttgccctggaggtgacgcctccggcggtgacggtgctgcccggagcatcgagagagctagctgtgaccctgacggcgaggtccgtgaccggcacctacagtttcggagagatcgccatgaaaggcgaccgcggccacctcgtcagaatcccagtggtagctatgggattcaagtagatagaagacgaccgcgaccggcgctagagagagtaagtacgaggagcgagttgtgcctctgagatccgaggtcttgagctgcagaggaatgctgtaatttttccatagtttgtagagaataagagttagggtctgtttggttgggctgtggctgtgaaaaaagttgctgtgggctgtgagctgtgg

SEQ ID NO: 137505 - DNA, 2940 bp, Zea Mays
cacccggatcctccgcgcgcgccgccaggtccgtcgcgatggccgcactccgcctccccgcccagccggtggcgaggtggccccaccttccttccgcctacgccgccgccgccgccgcgcgtcgggtctcggcccctcgcggccatctcgcggcgcggcgggccaagggggaggagccgccggagccgccggtgaggacgctgctgatcgacaactatgacagctacacctacaacatcttccaggagctgtcggtcgtcaacggcgtgccgcccgtggtcgtgcgcaacgacgagtggacgtggggggacatctttaaccggttgtacaaggaccgcaccttcgacaacatcgtcatctcgcctggccctggatctccggcatgccccgccgacataggggtatgtctgcgcatacttttggagtgtggagatatacccatcttgggtgtctgccttggccaccaggccctgggatttgtacatggtgctgagattgttcatgctccagaagctatacacgggcgactcagtgaaattgagcacgatggatgccacctctttaatcgtgtcccctcaggtagaaattctggcttcaaggtagtgaggtatcattcccttgtaatagaatctggttctctacctgatgatcttacatcgatagcgtggactgcttctccaaatttgctttcttaccttgaaagtgatcgaaccaatgttagtaccttcttgggaacattggataacaatttaatgagaaaccctctagagtacagtaacaatggtggggaactatccaacataggacatgcttgtgagtcagatgatagccgagttatcatgggcatcaggcactctagcaggcctcattatggagtgcagtttcacccagagagcattgctactcatcacggaagacagattttccgaaactttaagaagataacaggaaattttggattgcgctcatcgtggattcaggaaagaaaggtcaattctgcaagtcatcatgattctattcctaaggacttgttgcatactgaaagaatggaactttcagagtctgtacttggaaagagagggattgggaagaagtgtttacgattacaatggaagaagattgaaaattttgtctgtcccacagtaggctctgaagacatatttgcggtgctttttggccatcaaagcggtgaagacacattttggttggatagctcatcagttgaccagaacagggcacgtttttcattcatgggtggtaaaggtgggtccctgtggaagcaaatgtcattccacctatctggtcaaagagccaattgtggaggaatgcttagtatccaagatgcttatggatttactgccaaaaaatttatcaaagacggcttcttggagttccttaacaaggagattgagtccattcaatacaatgagaaggattacgaaggactgccctttgaattccatggtggcttcgttggatatcttgggtatggtcttaaagtggagtgtgatgcatcatcgaacaaggccaaatcaagtactcctgatgcatgcttcgtctttgctgataacactgtggtggttgatcacagcaatggtgatgtgtatattttgtcactgcatgatgaattttattctagtaatggagatgggatatgcaaaaattcaacgcatacttcatggttagtggagactgagaagaagcttctcaggttgggtggtatgccctcaggatcaccaattatccgaaagacacatgctagatcatccagtgtgcataagcagagttttgttgtagagaaatcaaaggaccaatatgttagagacgttcagaattgcttggattatatcagggacggagaaagctatgagttgtgcttaactactcagatgaagagaagagcagactgtataaatgcactccaactctaccttaaactgagaaaacaaaatccagcgccttatgcggcctggcttaacttctcctcagaaaacttgagcatatgttgctcttctccagaaaggtttctacgactagaccgagctggagttctagaagcgaaaccaattaaaggtactatagcacgtggcagaacaccagaggaagatgaatgcttacgtctgcagttgagatacagcgaaaaagaccaggccgagaacctgatgattgtcgacctcttaagaaacgatctcggcaaggtctgcgagccagggagcgtgcatgtcccacgcctcatggacgttgaatcatacagaagtgttcacaccatggtgagtaccgtctgcggaacaaagaagccagatctaagccccgttgattgtgtgaaagcggcctttccaggcggttcgatgaccggggctccaaaagtcagatcaatggagatccttgattcacttgagacaagcccaagaggagtgtactcaggatcgatcgggttcttctcgtacaaccacacattcgacctgaacattgtgatccgaactgttatcctgcacgacggagaagcctcggtcggggcgggtggggcgatcgtagcgctgtcgagcccagaagcagagtacgacgaaatgctgctgaaagcgaaagccccgactgaggtggttgaggatctcgttcagacgatctacagctcagaccggtcggattccatgcagacaactatcagctagatcagataggcaaaggaccattatttgtcgcgacaccaagcgcttacgatggacctcggcaaacaccatgtgtctcagaaatttggtatcagtgaccggtgcgtgctgatgaacattggcagtgggagaggggggggggggggggggtgaggtggcgtatcttctttgcgatggtcatccctttgccagaaggaaataaaggagacgcgaagaggatgtcgaggtcagtcggatccacggttagcatatagagtcaggtgacatggcctct

SEQ ID NO: 137506 - DNA, 716 bp, Zea Mays
ccatactaaattattaatgttaataacgtgcattacatcaacatgctgagggaccagttataatacaagtatacaaccctgcacgcattccgttcatcccttgtgttcactttaacccgaagaaacatgcttcttaccggcaactgtggaacttccatcgcaggttaaacatgaagacagtgatagtgatatcttcccaaagaacggtatcagcgctgttatcagggaaggcaacattctgaagatgcagcgcaagcagaagccgtgcgctcccctcccttctaataagcagagtcggtactaccggcctcgggtcaaggggaggtttgtcagcaaggcttatttcctccagcagcagcaggtattggagaaggagagctaaagaaaatgggtcttgcgggcatttctggggctttactcttgctctctaggagaagcagcagagcttctcaattttcatttctgcagcgttacagcacggcagatgtagagatgcatgtagagttgcatgtaagttgtgaccatggtttccttgcaacttctctagctccagatggcttaatggccatgaagtgatatcccaaccagttaactgaatcgtgttctcactctgtttctgcaaatcctattctttgtttgctggggttccgccccagagctgtcatgtgagtgaaggctgcagcagtaccaaaaaactgagaagagttgacctgcaa

SEQ ID NO: 137507 - DNA, 2549 bp, Zea Mays
ttcctcaatcaggtcaagcctcttccttcctcgaatccatgtcatctttgacgaatccaagcactaggaatctaggatcttgcttggtctcggagttggaggcggctctaattcctccgcccgatcctcggttcggtccaaccacacacctccgctgtcagtccctactgctattctctccttcactcctcgccgaaactgccacgcaggagcacgaggacctcgtgagcccaagcttgaacgctcgtttacttttcgaggttggtgcggttctcgcagctgctgatgccgccgccgccgctttgtttaagcagcaaaccaccgcacctgctgtttcttctcggtccgctttgatcaatcgcctccctttctttctcggtgatcgccttttcctgagattgaaattttatttgtcggtggtccggcactttggctccgtctccgtggccggccgaacaggcggcagacgcaggcagcagcagcagcaggcgctggtggtggcgctggccgttggcgttggcgttgtgaacaagaaattcctcgggtttcacgcggctcccgtcgctttggcgttttggtcccttccttttcttcctttccgctagttttctggtgacggggggtttttgcgctctggttcgtgttgggtttataggacggcacggcaccagctgagttcgcttccccatccccatccccatcccgctcccgcttgctccgtgccgtggtctccgagatcggggttcctttccttgccgatttgatccgcccagctggaaaacgaaaatcgctgatgggttttggaaggaaagttgtcatttcttggtgaggtttccgtttctggatcgactagctgatcgatcgtagtatcgtactagccaccatggcgtcgtcgtgcatcccggccggcggcatccggctgccggacctggatatggtcaagaccgcaccgccgccggcgccgcaccgcccggcggcgtcctccacgctctcggaggcgtcccactcgtccccagcctcctcctcgtcggtggcgtcgctgtcgctcaagcgcccgcgcacgcgcacgccgcggaagcggcccagccagacgtacaacgaggcggcggcgttgctcgcgtccatgtacccctccgtattccccgtcgccaggggctggggggcccccgaggcggcgccaccccgcctcctcggcctcgcctccgcgcttggcgacgacccgtcctgctccgacctcctccctccgttccccgttcccggaggccacgccgccttcctcctccgcgacctgccgccgccgccgccgcagagccctgccggcgtcgccaagagctgcccgtcgcccgcggccgtcagcagcgtcttcagcgagttccgcgacccggcaccgtcccctgcaacccctgacgatgctgctgcggcacctgacgagcccggagagctccacttcgacgttgacgacggtttcgacgctgactctattctgtgcggcgtcgaccagagcgcggccgagggcatcgacggcatcatgggtaagctctctatggaaaacagcgggacgtccgtgtcaagctcaagcgtcaactccaacctgcccatatccaagatacacccttacctcaggaaccttatggtcctcgggctgagcttccggcacgatcagaatatcttcaaccaagcgctcaagcgccatagcgtcgatcatgaatggtggatgtgccctgccatacctgtaaaagacattacccctgcgccgccaccttcagtagcaatgtcgaaagtgacagacaagaagactaagaagtcactggggacaatgtacgaggagggggttcctgagtctgtcaatggcgacgctggaactttggcactgccagagacaggattggggctgagcttgaacactgacggggtgctcaaggcgtggtgcggcagaggctctgtgttcgctgatagcaatggctctgacttgccgttgtcttctgctcatgtggtagttaaacatgaagacagtgatagtgatatcttcccaaagaacggtatcagcgctgttatcagggaaggcaacattctgaagatgcagcgcaagcagaagccgtgcgctcccctcccttctaataagcagagtcggtactaccggcctcgggtcaaggggaggtttgtcagcaaggcttatttcctccagcagcagcaggtattggagaaggagagctaaagaaaatgggtcttgcgggcatttctggggctttactcttgctctctaggagaagcagcagagcttctcaattttcatttctgcagcgttacagcacggcagatgtagagatgcatgtagagttgcatgtaagttgtgaccatggtttccttgcaacttctctagctccagatggcttaatggccatgaagtgatatcccaaccagttaactgaatcgtgttctcactctgtttctgcaaatcctattctttgtttgctggggttccgccccagagctgtcatgtgagtgaaggctgcagcagtaccaaaaaactgagaagagttgacctgcaa

SEQ ID NO: 137508 - DNA, 570 bp, Zea Mays
atgtcccgccaggctctccccacccttctccgttcgccctggcctcagcgccgcatcctccgcgatgcttgcgcgccagtctccgctccgtgtccgccgcccacgctcccccgtccccgcctcccaccaaagatcgatcaaggcggcgatcttctccgccagggccttcgcgctggcggctgtccgtgcgcaggggcagcatcacggcagcgggctcttgaaccaccagaacttctactcaccacgcatggcaatctaccctctgtgatcgccactgagaacgtcgacgcgctgctcgggcagggcctcctcgtcgcgcggctcaagtcgcacagtgtggttagcctaagatctgcatgtggccaagcaggcatgaccagtcgctgtggagccagtggcggtggtgttggtagcgggtgctcacaagctgagcactgtaaatattacattttggttgtggtggagctgtccaagcacctcaccaatgcagaatggaaccttgtgaaagcagctaatccctgtgcggaagacgtactcgcagaacatgactctactgcagatgagtcataa

SEQ ID NO: 137509 - DNA, 1459 bp, Zea Mays
cccaccaccaccagacccctgtcgcactcgtgtgccggccggcgacggcgatgatggcgactggccgatcgctcgccggggtatactccgccagagccacccgccccatgcctctacgcgccggcgcacgggcgccctgcgccggtgccgccgcggccgagcctgcggccgagcacgtgcggaggctcgtggcggagttcgacccggcggtcccgctggactccgcggtcacgccgccgagcgggtggtacaccgacccggattttctccagctcgagatcgacagcgtcttcttccgcgggtggcaggctgtcggtcacatatggcaagtgaagaacccaaatgatttcttcacaggaaggctgggaaatgtggaatttgtcgtatgtcgggatgcaaatgggaaacttcatgctttccacaatgtgtgccgacatcatgcttcactccttgcatgtggaagtggtcataagacttgcttccagtgcccttaccatggatggacatatggattggatggcacccttctgaaggctacaagaatatcaggaattaaaaacttcaataagaatgattttggtctcataccaatcaaggtggctacttggggaccttttgtgttgatcagatttgatgatgagtccactgaagataatgtttatgacacagttggaaatgaatggttgggtagtgcttcagatctgttgggtacaaatggcattgacacttcactgccgcatatttgcaggcgagaatatattatcaactgtaactggaaggtcttctgtgacaattacctagacggtggatatcatgttccatacgcacatggggatcttgcatcgggtctgcagcttcaatcctatgaaacacttacatatgaaagagttagtgttcaaagatgtgaaagtgcaccagcagaaccagatgacttcgatcgcttagggacaaaagctctatatgcctttgtttatccaaactttatgatcaacagatatggtccatggatggacactaatctagctgtcccattagattcaaccagatgcaaggtggtatttgattattttcttgacaagtctctgctggatgaccagtgctttatcaagaaaagcctcgaagacagtgagcaagtacagatagaagacattgcactgtgtgagggggttcagcgtggcctggaatcgccggcctacagtgttggaagatacgctccgtctgtggagatggccatgcaccacttccaccgcctcatgcatgctaaccttagtgagtactgagtaattattctcatggacgcatcttgcaaagttgtacagaaccaaacgctttttttttggcaggacactgcatgaacactgttctctattgcaatcttgtgaattcagccacatttcagttacacaaaaaacatgtttgctggttatgaattttttagatgcataaaatactttctgaa

SEQ ID NO: 137510 - DNA, 1612 bp, Zea Mays
cactccttagtccttacacccaccaccaccagacccctgtcgcactcgtgtgccggccggcgacggcgatgatggcgactggccgatcgctcgccggggtatactccgccagagccacccgccccatgcctctacgcgccggcgcacgggcgccctgcgccggtgccgccgcggccgagcctgcggccgagcacgtgcggaggctcgtggcggagttcgacccggcggtcccgctggactccgcggtcacgccgccgagcgggtggtacaccgacccggattttctccagctcgagatcgacagcgtcttcttccgcgggtggcaggctgtcggtcacatatggcaagtgaagaacccaaatgatttcttcacaggaaggtgcttacgtcttgtttcgatgcctcagtagttccagttagtagtaattttgctacgcctttcgtacatatataaataattttgctacctcaaaatgcttctaaatatggtgatttatgctggagactgctaaccttcactcatctaataagatgaagcaacaggctgggaaatgtggaatttgtcgtatgtcgggatgcaaatgggaaacttcatgctttccacaatgtgtgccgacatcatgcttcactccttgcatgtggaagtggtcataagacttgcttccagtgcccttaccatggatggacatatggattggatggcacccttctgaaggctacaagaatatcaggaattaaaaacttcaataagaatgattttggtctcataccaatcaaggtggctacttggggaccttttgtgttgatcagatttgatgatgagtccactgaagataatgtttatgacacagttggaaatgaatggttgggtagtgcttcagatctgttgggtacaaatggcattgacacttcactgccgcatatttgcaggcgagaatatattatcaactgtaactggaaggtcttctgtgacaattacctagacggtggatatcatgttccatacgcacatggggatcttgcatcggacatatgaaagagttagtgttcaaagatgtgaaagtgcaccagcagaaccagatgacttcgatcgcttagggacaaaagctctatatgcctttgtttatccaaactttatgatcaacagatatggtccatggatggacactaatctagctgtcccattagattcaaccagatgcaaggtggtatttgattattttcttgacaagtctctgctggatgaccagtgctttatcaagaaaagcctcgaagacagtgagcaagtacagatagaagacattgcactgtgtgagggggttcagcgtggcctggaatcgccggcctacagtgttggaagatacgctccgtctgtggagatggccatgcaccacttccaccgcctcatgcatgctaaccttagtgagtactgagtaattattctcatggacgcatcttgcaaagttgtacagaaccaaacgctttttttttggcaggacactgcatgaacactgttctctattgcaatcttgtgaattcagccacatttcagttacacaaaaaacatgtttgctggttatgaattttttagatgcataaaatactttctgaa

SEQ ID NO: 137511 - DNA, 1465 bp, Zea Mays
cgacctccaggaaggaccgcactccttagtccttacacccaccaccaccagacccctgtcgcactcgtgtgccggccggcgacggcgatgatggcgactggccgatcgctcgccggggtatactccgccagagccacccgccccatgcctctacgcgccggcgcacgggcgccctgcgccggtgccgccgcggccgagcctgcggccgagcacgtgcggaggctcgtggcggagttcgacccggcggtcccgctggactccgcggtcacgccgccgagcgggtggtacaccgacccggattttctccagctcgagatcgacagcgtcttcttccgcgggtggcaggctgtcggtcacatatggcaagtgaagaacccaaatgatttcttcacaggaaggctgggaaatgtggaatttgtcgtatgtcgggatgcaaatgggaaacttcatgctttccacaatgtgtgccgacatcatgcttcactccttgcatgtggaagtggtcataagacttgcttccagtgcccttaccatggatggacatatggattggatggcacccttctgaaggctacaagaatatcaggaattaaaaacttcaataagaatgattttggtctcataccaatcaaggtggctacttggggaccttttgtgttgatcagatttgatgatgagtccactgaagataatgtttatgacacagttggaaatgaatggttgggtagtgcttcagatctgttgggtacaaatggcattgacacttcactgccgcatatttgcaggtcttctgtgacaattacctagacggtggatatcatgttccatacgcacatggggatcttgcatcgggtctgcagcttcaatcctatgaaacacttacatatgaaagagttagtgttcaaagatgtgaaagtgcaccagcagaaccagatgacttcgatcgcttagggacaaaagctctatatgcctttgtttatccaaactttatgatcaacagatatggtccatggatggacactaatctagctgtcccattagattcaaccagatgcaaggtggtatttgattattttcttgacaagtctctgctggatgaccagtgctttatcaagaaaagcctcgaagacagtgagcaagtacagatagaagacattgcactgtgtgagggggttcagcgtggcctggaatcgccggcctacagtgttggaagatacgctccgtctgtggagatggccatgcaccacttccaccgcctcatgcatgctaaccttagtgagtactgagtaattattctcatggacgcatcttgcaaagttgtacagaaccaaacgctttttttttggcaggacactgcatgaacactgttctctattgcaatcttgtgaattcagccacatttcagttacacaaaaaacatgtttgctggttatgaattttttagatgcataaaatactttctgaa

SEQ ID NO: 137512 - DNA, 1660 bp, Zea Mays
cgacctccaggaaggaccgcactccttagtccttacacccaccaccaccagacccctgtcgcactcgtgtgccggccggcgacggcgatgatggcgactggccgatcgctcgccggggtatactccgccagagccacccgccccatgcctctacgcgccggcgcacgggcgccctgcgccggtgccgccgcggccgagcctgcggccgagcacgtgcggaggctcgtggcggagttcgacccggcggtcccgctggactccgcggtcacgccgccgagcgggtggtacaccgacccggattttctccagctcgagatcgacagcgtcttcttccgcgggtggcaggctgtcggtcacatatggcaagtgaagaacccaaatgatttcttcacaggaaggtgcttacgtcttgtttcgatgcctcagtagttccagttagtagtaattttgctacgcctttcgtacatatataaataattttgctacctcaaaatgcttctaaatatggtgatttatgctggagactgctaaccttcactcatctaataagatgaagcaacaggctgggaaatgtggaatttgtcgtatgtcgggatgcaaatgggaaacttcatgctttccacaatgtgtgccgacatcatgcttcactccttgcatgtggaagtggtcataagacttgcttccagtgcccttaccatggatggacatatggattggatggcacccttctgaaggctacaagaatatcaggaattaaaaacttcaataagaatgattttggtctcataccaatcaaggtggctacttggggaccttttgtgttgatcagatttgatgatgagtccactgaagataatgtttatgacacagttggaaatgaatggttgggtagtgcttcagatctgttgggtacaaatggcattgacacttcactgccgcatatttgcaggcgagaatatattatcaactgtaactggaaggtcttctgtgacaattacctagacggtggatatcatgttccatacgcacatggggatcttgcatcgggtctgcagcttcaatcctatgaaacacttacatatgaaagagttagtgttcaaagatgtgaaagtgcaccagcagaaccagatgacttcgatcgcttagggacaaaagctctatatgcctttgtttatccaaactttatgatcaacagatatggtccatggatggacactaatctagctgtcccattagattcaaccagatgcaaggtggtatttgattattttcttgacaagtctctgctggatgaccagtgctttatcaagaaaagcctcgaagacagtgagcaagtacagatagaagacattgcactgtgtgagggggttcagcgtggcctggaatcgccggcctacagtgttggaagatacgctccgtctgtggagatggccatgcaccacttccaccgcctcatgcatgctaaccttagtgagtactgagtaattattctcatggacgcatcttgcaaagttgtacagaaccaaacgctttttttttggcaggacactgcatgaacactgttctctattgcaatcttgtgaattcagccacatttcagttacacaaaaaacatgtttgctggttatgaattttttagatgcataaaatactttctgaa

SEQ ID NO: 137513 - DNA, 76 bp, Zea Mays
cacataccgcaagtcgacatcttggcatcctcgttgctcagattcaatcgagcgcctcgccctctagctacgacca

SEQ ID NO: 137514 - DNA, 872 bp, Zea Mays
cttttctctctctttctcagaatacagacgacagtcgacagcgtctctttgtctccttttctatctcgggacgagttatatttacacaaaataaatactcgatctcgcgtcgatcggtgatgcggtggccatgggcgtctgaggctcggagccattgatgagagcagcaccgctggctgcggcggccggacgcgatgtccgttgtggcggccgtggggcccggcgccgcggtggcggcgtacgggcacgggcacgggcacgggcagccgctgtgcggcggcggggcgaggaagaggaaggacgtccgggaccatgaggttggattgccgggtagcgacggccgcgcggcggcgcggcgtggggccgggctgttcgtgctggagacggtggaggaggaggaggaggaagaaggggcggacgcggagaggtcgtcgtccgtcggcgcggcgtccgaggacgacgcggaggaggaggaggacggggacggggacgaggtggacagcggcgggacgaggtggacagcagggaggaggaggaggagggagggcggcgcgctcgaggccgccatggacatgggcgccctcgacgacgcgctccccatcaagaggggcctgtccagcttcttctccggcaggtcgcggtcgttcgcgaaccttctggacgcggcgtcggcggtgggcagcgcccgcgacctggcgaagccggagaacccgttcaacaagcggcggcgggtgctccggtgctgctccgtcgtccggagggccgcgtcgaccacctcgctcgccgcgctgccgcccatagccggcgacgacgacaacgacgacgatggccgcagtgtgcctagctgaggaaccggccggggcggccgccgg

SEQ ID NO: 137515 - DNA, 93 bp, Zea Mays
ctcaagtatgattaacagggcatacatgggtaattccccatcttgtaagatagcaacgatgccacaagatttccatcactgtagtttccaatt

SEQ ID NO: 137516 - DNA, 438 bp, Zea Mays
atgaggcggtggcggcgggcacgcgccgccgccgcgctgtcgtgcctcgccatcgccatcgcgctgctgctgctgctactgcagctcgccgtcgttaccgaggggagggcgccgtcgttgccgcagccgcaggagcgcgcgcacggtgacggtgagggccacgcccacgtccacgcgcgccctcgcagtcacagcgggagcgggctgccgccgtcgacgggtgcaagggcaacgacgacgaccgtgcaccacgctgtgggcgtcgtcggcgcgtcagtccgcttcgacgcctccgccgcaggtggtgccgctcgttggtgtagtaagagcggcgggcggaaagcagcgggcggcgccggcgctgctgctggcgcatgcgccgccgacgacgacaagcggcggataccgacgggtgctaaccctctgcacaacagatag

SEQ ID NO: 137517 - DNA, 250 bp, Zea Mays
gtttttgccatcacaatatatactgaataataaatgatcaaccatatcccacgaaaagagaaaagggaagaaaaagaaaagtggcactggcaaaggtacttattgatcctactaattctatcaaaagcatcattattatgtggcctgcttttttatttcttgattggtttaagttatattactaattgtaggagagtattgtcacaccgggatttaaggaacaaagccgggtgcatctcatatatgcgcc

SEQ ID NO: 137518 - DNA, 305 bp, Zea Mays
gagagagggaggtcgggcctagaagagcacggcggtaatggtgtgcgaggaacaagagcaatgtgtcgcccacgtccaccatgagccaccgctggtgccggccggggctttggactctccccccacggtacgcatgctgctatgcatcttttcacctcccttatgttttaataatctgtcaattggctttagaacctcagtggctggtgagagtatagtggccccaagaaattctggaacaatggtgtacaaatttgagaattgcagggaccgaccagagttgactcagaaggccaattgaggga

SEQ ID NO: 137519 - DNA, 169 bp, Zea Mays
gagttttttacccaagcatatgggtggaactgaagtttagtgtacggattgactctgtgtcatggttatatagaagccaggagtggtacaaggtttttatatcgtttcaaggtaacaatcttgaaaataataaagcttcccttatgaaaaaaagaaagaaagaaagaaa

SEQ ID NO: 137520 - DNA, 378 bp, Zea Mays
gagccgacgcccccgaagcgcattctctcgctggccgcggcctccatctcgagaaggtcgcggattacaccggccaccgcgcccgggagcggcgaggaggtgccccagcgccgccactcctcgtggctcacatcgccccgatccccggcgccggcgacggccgcggggagggcttcgtcctccgcttccaccttctcttcgaccgctgccggatcggtggggaaggccatgagggagcgcacgatgggaggcgcccgccgcagtgggaggggcagtgggagactgcggtggagggcgagggcaccgatggaggcgacgggacgaataagagcaagcattttattttatttgcttcgctatagtttgatttgatgactg

SEQ ID NO: 137521 - DNA, 1021 bp, Zea Mays
ggctgtggttgctacaaaagcaaggtttttaccttcgtaagaaaaaaaaagtactaatagtgaggcatggggcccaaaagtttcggcccaacgaggcctcggcctcggcctcggcgacggcgaaccacatccatccaggaaacgaatgaatcagagcaacggacaaccaactccccccctccaccatctacgaacgggggccgggaaaagatcggctacagacagatgaggctctgtctccggcaagcggcggccaccagctcacccctcgcagctaccctccgcggcaagacttctacgagcaccctcgccccccatggccggctcagcttcagccacaccacgtcgctgcagacggcgcccgggcaccgcgggctccgagcagggtgggcggtgcgcgtgctcccgctgacggaggagaacgtggagaaggtgctggacgaggtgcggccgagcctgatggcggacggcggcaacgtggcgctgcacgagatcgacggcctcgtcgtcgtgctcaagctgcagggcgcgtgcggctcctgccccagctccaccatgacgctcaagatgggcatcgagacgcgcctccgcgacaagatccccgacatcctcgaggtcgagcagatcgtcgacaccgagaccggcctcgacctcaccgccgacaacgtcgacaaggtgcttgatgagatcagaccgtacctctccggcactggaggtggaagcctcgagcttctccagattgacggatacgtcgtcaagatccggatcggcggacctgcagccggtgtaatgacagtacgagtagccgtgacacagaaactgagggagaaaataccttccatcttggctgttcagctcacagaatagaaatgcgagagctcacttgtgcatcatcacgacgaaactctggctttcaggcgaatgtgcagtgttcatcagtcttatatttctgtccttacagtacgtacagtgagttgcagaactgattaatacaattttcatgcaagaattctgccttgac

SEQ ID NO: 137522 - DNA, 285 bp, Zea Mays
atggtgacggcgtatgcacagaatgccatgccagtgaaggcactggagccatttgagcagatggaggtggccggcatgcccattgatgaagcttcactcaccggtgcaatctgctcagctcgaataagattattggagctacgggcaaaattgaatcttgcaagttatgtgccagtccttagttcagttgtttataacgtaagtgaggaagagaaagaaaggttgtcaatgggtcatagtgagaagcttgctctgtcatttggatttgctcaaactcgagtctag

SEQ ID NO: 137523 - DNA, 255 bp, Zea Mays
atggtttcctttgggcctagtacggggctgctgctcgccattgctcccttcaccgcctcagtcctcagctggccgtctccttcacgtcatattcgtcctctgctgaagacaaagttcgtgaggaagaaacaagctgttggaatttctccatacatggaccgacgaaggcatcaacctatttatccttgggtagcaaccaaggcatctgatgtgtatatgatttctctctacttcctcttctaccgaattggctaa

SEQ ID NO: 137524 - DNA, 555 bp, Zea Mays
atgcaaataaatacactcaatgaagtgcagcgccacttcattgaaattggtaacaggcctaatagcgcgagcaaaaccatactgcttagtttgaaaccctacgagagtaacttgaaccttgaggtatataccatactgaacgaaagccacttccttagcatcaatatcttcagcgatcctccgcgtgagcgcgatcttcccggtgccgtcgtcgagcgtgaacgacacgctggcctccatgttcaccacgctcaccaccctccccagaatccaaacgttggtggcgtcgacgccgtcgatagggatgacaaggtcgccatcaccggtggcgtcggcggcggcgaaggagcgggcgatgtgacgaacggtggtggaggcggatccggagaagcgggggtcacgcgacttagccggagaaggggtggcgaccgcggaattgtcgggcgccgcggtggcgtgctgcgacggcacgatggccggaccggcgaagtaggaggccatcgtactcacgtcggcgcgggtacggtggtactgcggtttcggtggggacgatga

SEQ ID NO: 137525 - DNA, 2253 bp, Zea Mays
aaccaggaaacgaacgaagggtgcctgcctgcttttggcacccagcttctgaactcaaaagaagaagaagaagaaaaaatcagttgtccccccgccattagctcgacaaaacttcaggtaacagaactggaccatcttggaggagacagaaacagcctgtcaaacacggactggcttagtcaaagccggctttcagacatataatcgcgctcgccgtcgtgcgcacggcagtcggcaggcagtaccggagcagcgtgccaggccccatggacagctcgagcggcatgtgggccgtgctcggccaggcctcgaacgtggcgcagctggtcggcgtggacgcgctcgggctggtgtccatggtcgtgcaggccgcgctggcggcgcgccgccaccgcgacgcgtgccgccgcctggcgcagcacgtggaggtcgtcggcggcctgctgcgggagctggagctcgccgagctgatgcggcgggaggccacgcggcggccgctcgaccagctccgggccgcgctgcggcggtgctacgcgctcgtcacggcgtgccaggactgcgggtacctccgcagcctgctcctcggcgcccggatggccgacgagctccgcgcggcggagaaggaggtcgacttgttcatccgcttagtcccacttatcgccctcgtcgacagcacgcatggtcgcagtggcaagactgccgagggagtaccaggtctactcacgaacggttcaaaccatcatgtcaggttttcaagaagtgtttccgcctccatcaaaatacacattcaacgaactactcaaatctgcagtattgcagaacagccattagcaggagcactggacttgggagaacataaaaatctggactttgaagaattgttggagctttgcatccgtactcaagagagttgctcaggattcagaaggtttgaattatttcagatcattgacgctacaggcaatttcccggaaagtagaatcatcgggtcgggtggttttgctatagtttacaagggtcagttacctgatggatccatggtcgccatcaaaaggatggatgaaggtgccacaatgtttgatttcagcagtgaatttctggctgcgaggcttcagcataccaatctaattagacttttggggtggtgtatccatgggaaagaaaggattctagtgtatgagttcatgcacaagggtaccctgcacagtttaatctttgacaaaagaatggggttgttgctagactggtctaaacgaatcgatataatcagaggggtagctgaaggacttctttaccttcacaagcaggccaagttatggattgttcatagggatttgaagctccagaacgtcctattagatcatgacatgaagccaaagcttgctgattttggatcggctagaagtctgagttcagattccgccgaagagtgtacaagcagggttgtggggactagtggttacaaagctcctgagtacacgtctcgaggtgtctattcactgaagacagatgtgttcagcttcggggtggtggttctagtgaccatcagcgggcgagagaacaccgtactggagaagcaaggagactctgttggcgcccttgtacgagatgcctggcagctatggaacgatggaaggctgcatgagcttgtagatccagtgctgggtgacggattcgaacttgctgaggtggtgcagtacgctcaagtggcactgctctgcgcgcaggaggagccagcagatcgtcccaccatgtccgacgtcgtgtcgctcctgaactttgaaagcataggtctgctgccagatcctaagcagccgtctgagctttgtaagggaggtggtggtacttctggtgacaggttgccgacatgtggtagccagtcgagcaggaccatagacatcacaatcacaagttcggctcctgtgtcaactagaactagggtccgcatcattgtggacccagagacctaaaatgtagacataaaccgatattaatatgtaaaagaacatggacaacttttagagctagtttggatacactaattattctctatggtgattggggctatctgagggccaaggggaaaattagtccatttctctctcaattccctccattctccataaaaactcatggatccaaactagcccaaaatgtgatgggccttgggctggttcatgcagaaatgtcaagtgttaggagcacactgtgtgtgatatattacatcattcttacagttcttttttttggctg

SEQ ID NO: 137526 - DNA, 3710 bp, Zea Mays
cctcggggaacaagacgaagaagaaagatcaacgccacctgagactcagagagagcaaacagcttcttcttctcctgcccccaatactgtcgtagggaaaggaaaaaaaaaacctctggttctttagctagccacggcagcccagaatccaaaccgagcgtctctgcgagcggcaggacgtttcatctttcatgagagcgaatcatgcagccactgaatttgctacgcagcagcagtacagcctccaagttacccgcgcctttctttggtactgcctcggtcgtcctcgtgctcctctcctgcgcgcgcctcgccagctcctgcacagagcgagagaagagctcgctcatcgacttccgggacggtctctcgcgggagggcaatggcggcctcaacacgtcgtgggccagcgccacggactgctgccagtgggaaggaataacctgccgcggcggcgacggcgtggtcactgacgtctcgctgccttcgaaaggcctcagggggaggatcccggcgtccctcggcaaccttacggggctgctgcgcctcaacctgtcctgcaactcactctacggcgaccttccggcggaactggtgctctccggcagcatcgtcgtcctggatgtcagcttcaaccgcctatccggccctctgcaggagcgtcagtccccagtttctggcctccctctcgaggtactgaatatctcaagcaacttctttacaggacagctaccatccacaacgctgcaagcgatgaatagtctcgtcgctcttaatgcaagcaacaacagctttacgggacccctgccgtcttctatctgcatccacgcaccatcgcttgccacaattgacctttgcttaaatgacttcagtgggcctgtttcctcagagtttggcagttgctccaagctgacagtactcaaggctggccacaacaaccttaccggatctctaccccacgaactgttcaatgctacctcactggagcacctctcttttccaaacaataatctgcagggggtgcttgatggttccggcctagccaaactcagcaatcttgttttccttgaccttggatcgaatgggctcgaacgagagctgccagattctattgggcagctggggagattggaggagctccacttggacaacaacctgatgacaggagagctgccatcgaccctaagtaactgcaggagtctcaagtacatcaccctcagaaacaatagcttcatgggagatcttagcagagttaacttcacccagatggatctgaggactgcggatttttctctgaacaaattcaacggaacaattcctgaaagcatatatgcatgcagcaatctagttgctttgcggttggcttacaacaattttcatggccagttctcaccaagaatagccaatctcagatccctctccttcctttcagttaccagcaactcgtttacaaatatcacagatgcacttcagaacctcaacagatgcaagaaccttacctccctgctaattggaagcaacttcaaaggtgagaccataccgcaggatgcagcaattgatggttttgagaatctccgggccctaaccatagacctatgtccattggttgggaaaatccctatttggttatcaaaactcacaaaactggagatattagatctatcatacaatcaccttactggaacaataccatcctggattaacaggctggaactcctcttctttctggacatatcaagtaacaggctcacaggggatatcccacctgaattgatggagatgccaatgctacaatctgagaagaatgctgccaagttggacccgaagttccttgagttacctgtattttggacacaatcacggcaataccgtttgctcaatgctttccccaatgtattgaatctatgtaacaatagcttgacaggcataattccccaagggattggtcagttgaaagtgctcaatgtcctcaactttagcaccaacagcttgtctggagaaataccgcaacaaatttgcaacctcacaaacctgcaaactctagacttgtcaaataaccagctcacaggtggactcccatctgcactgagtaatcttcacttcctttcttggttcaatgtgtctaacaacgacctagaagggccagttccaagtggaggacagtttaatacctttacaaattctagctacattgggaattccaagttatgtgctcctatgctcagtgtccattgcggctcagtagaagaacctccagacgtaatgaaaagaaggcacaagaagacggtcttggcagttgccttaagtgtgttctttggaggttttgccatccttttctcgctgggacgacttattttgtccatcagaagcacaaaatccgctgacagaaataagagcagcaacaacagggacattgaaacagcttcattcaactctgtttcagagcacctgcgtgatatgataaagggaagcattttagtgatggtacctcgaggcaagggtcaaccaaacaatctcacattcaatgatatcttgaaggccacaaataattttgatcagcagaacattattggttgtggaggtaatggtctagtctataaagctgagctaccttgtggatccaagcttgcgatcaagaaactcaatggtgaaatgtgtctgatggaaagagaattcacagcagaggtcgaagcactctctatggcacaacatgagaatcttgtgccactatggggttattgtatccagggaaactcgaggctcctcatatattctttcatggagaacgggagccttgatgattggcttcacaacaaggacaatgccgactcatttcttgattggccaacaaggctcaagattgcaaaaggagcaggccggggcctttcttatatccacaacacctgcaaccctagcattgttcaccgtgacgtcaagtccagcaacatcttacttgacagagaattcaatgcttacgtcgccgattttggccttgcaagactgatccttccttacaacacacatgtcacgactgagctggtaggcactctgggttacattcctcccgagtatggccaggcctgggtggccacgctgagaggtgatatatatagcttcggagtggtcttgcttgagctgctcacagggaagaggccagtccaggttttgaccaagtccaaagaacttgtccaatgggtacgagagatgaggtcccaaggaaaggacattgaggtcttggatcctgctctcagaggaagaggacatgacgagcaaatgctgaatgtgcttgaagtagcatgtaagtgcatcaaccacaatcctggcttgaggccaaccatccaagaggtggtgtactgcctggagaccatagttgagccgctacatgtgcaggagcaggtgcatgtgtagttaaaggagaacatattgtaggtggcaatcttgtactctaccagactaggtgtaacttcagtaaaggaagagtttctaacaaagagcgcagtagtgtacatttctgaaagaaaagtctcgctgtcatgaggccctgtatacggttttccttattccttccgtggaaatattgcacctcctagctcaaacaactgaacatggaaagtgcataaaaagagcactgggatcttgcttagtatgcctacgtttctatcctagcgaagttgtacagttgcgtatgtaaatctgtgaaaagaaaaggc

SEQ ID NO: 137527 - DNA, 1699 bp, Zea Mays
cggggaacgctagcgcgccaaccaaaccgtggcggggggcaacgtctccagccagagaaaccggagcgacccaaccaaccacccacccgcggccatccccaaccaagcgagcacggtgcacggctacaccggggcagacggacgggaccggaggagaaaccgaagcacaaaagaaaaagaccaaaaaaccaagcagaaactagggtgggggagccctgagcaggggaggaaaaataaactagtggccaaaccctagcccgccgagctcccgcgtgcgctctccgccgcccgcctactcctctctgtccgcgatgcgccgggcgaagccgcagcagccctcgccgtcgcccgagatccggtaccgcggcgtgcggaggcggccgtcggggcgctacgccgccgagatccgggacccggccaagaagaccccgatctggctcggcaccttcgactccgccgaggccgccgcgcgcgcctacgacgccgccgcccgatccctccgtgggcccaccgcccgcaccaacttccccggcgccgcggcttccgcgccgcggcacagggcccgctccgcctccgcctccgccgccgccgcagcccccgcggcggtgccggccacgtctagccacagcagcaccgtcgagtcgtggagcggcggcgcgccccgcgtcgccgccccgccgcggagcgccgccgcgcccatggaggaggacgacgacgaggactgccacagctactgcggatcctcgtcgtccgtgctctgcgaagacgcccgcggggacgacgacgacgacgcggcggcgtcccacgcgcccctgccgttcgatctgaacctgccgccgccgatcgacgcggctgctgaggccgatcagatgggtgcccgctacgacacgctactccacctctagctcgcgacgacggccaggaattagaggaaggaatcgagaccgtctgtccttcttcggctgctgatccggtggtgttctatcgctagatggataattcttgcctttttcccccttcttttcttctgctactttttttgttttcttctcttaccaccacgatgatgatgattcgatattatgtgaataattcagttatgtccatgtaagctgtgaggaaggaaatctgagcttttccttatcttcctatggtgtttctgctggtgctgctctttcatttgttggaaagataatggaagaaatcaagagaaattatttacacagatcatttgctgccgctttaccatgtcagagttggactgagctgaacatgattaccttataatgcactaacaaaaattcatctactgatgttcaaattgtagtgtcaatgcatgcgttgcaagttatggcagggctgcaacctgcaagagcagtgcgcagtgtcatctgaaagttctattctaatacttggatttggtaacatcaaatctgaactagaatactagatgaaggcaacacttggattagtattcgtctacttatgtgcagatcatagtaccaaagtccactcgcattgcaggttgcgacttggaggcgcaatgggagtgtcatctgaaaggtcttttcctcattcgggtctggtaaaatcatctcaatattctaaggcaatacttggactataattttattttttttttgcagcgcttcttccctcaagctggctgattctaattctgttggttttgctatttctt

SEQ ID NO: 137528 - DNA, 1810 bp, Zea Mays
ttttgttcatttttgaaaatcctatataagcatggtgaaagctgagaagagatattctcaacagaaacacctttgccatggaagccatggatttcctataaacaaatagctccagtgagtaaaattataaatgggtagtcataagacgtgtaaacgtacctaaagcagagcatatagttcaggaatattctccacaagtgtctcaaataatcagatccaagcaaccatgagcatgacaaaattaagtattaggtatgtattgtttcatttgataattctaggatgtttgtacttcacatcagagttcagttgtttcaacatctttgtttctctaatgcagctactactacatcctgaatctgatgattcagctcaactttcctagattgagactgaaaagctgctagcccagttagttgagactgagatgaacagacgtttgaaggaggacacttacaaaggaaagaagtttaatgcattctgtcacttcttgggctaccaagctaggggagcactgcctgcaaagtttgattgcgattatgcctacgttttggggcatgtgtgctaccacatcatagctgccggattgaacggataacggatacatgactacagtgacaaatcttaagaatccagtgaacaagtggcgatgtggtgcgactcctatttcgagccgcgtgagaggaagctaaagggttctggcttaagctgtatcaggtcaaattttcaccattgatccaacctctgctacggcaatttccagcatcggcggtgtgctctttacaaagccttagagctgcctctcctgcaaagtctgaacttgcagagatagtcccacaagagaaatcaccaaaagattccattcaaccaatgtcaccgagtccaaggtattctacctcaagatgaagggcgactaccacaggtatactgttatcgctagcagatctagaccatgcaagttgtggtttgtagagatcaaaacttaagatctgtgtgtagatatttgtctagacaatgggagtgacaggatgctggtttttagtaaggttggttgcttatctatgaatttgcctgtatgatgcatgatcctgtgctgtctcctgtagtacatggttgaaatataaatttgtgttccatgttttttacccgccccctacacgtatctcttggatatctgatttctactcatgatgatttggcatgtaccttgctgagttcaagtcaggtgcatagaggaaggatgctgcggggagcaccatgaatccctacaaagctgctcgagtttcctctgactgttcaccattattggaagcaggtcaggcagagagccttggaaccgaactcttggagatggtgcctagcagggaagaggagattaagttgaaagaataaagggaggatgctttgtcgacttttgtagttaatgattatgtgagacttcagtttaagggctcaacttttactggttcttggaagtcatttagtagccctaagatttcatcagcattcttagtagtaattgctatagtatcaaatgggattgtggtatgagttgctcgagtactaagtactaacgttgttgtacattgtgaagctaagtgggtaatatcaaaagggattaagatttatgtgtggtgcttactgtatttgtttttattattttattgtgctttgtacatgtaccgtcattcttactctggtgttcttttaatgcaaagtttgacacaatatatttttatacgagagaccgaaggttacttagtattgttttctgtttcttttatcgtctttgcagatctatgtttggatg

SEQ ID NO: 137529 - DNA, 624 bp, Zea Mays
cgccgcagtcctcgcatccgcgcccgcagccgagcagtcctgccgcgcccgcagtcccgcagcgtcgccgcgctcgcgcttccccgcgacagccgccatgcgccctatctccgccgtgcctacgcctcctcccccgcccgcccgagacccgccaagtttcccttccttacacggcgagatccaccatcggcgcccccttccctggcgagccacagccgtccacgttcctggccaccggcgacctcccttctctagcccttagcggcgagccaacacctcctccccatggctgccctccagaccccagtcccgtccgcgcatccgctccctcatcagcgacgcaccgattctccccgacgtcgcccatggcgtggacagcgacctccctcaccctgcactctggctacaaaaggaagaatctcttatcttccgggtcaccaaaacaaatgaagttagtggtatagaaaagaaatacaacaccccatgatttcccattgaaacaaaaggaagacattcatatccatcattgcaattgcaaaagaaaaaaaatagcaggatgtgcaagctgttccaattgttttttcttttccaattcttagtccatgcaattgcctttatgcttct

SEQ ID NO: 137530 - DNA, 848 bp, Zea Mays
tcgccgaagcaaaagtacgtatcgtctagcatcagtagcatccccacatggcgaagtccgctgccgctgccattctgctcgccgccgccctgctcggctgccttgtctcggcgtcgctcgccgaccagggcaccgccacctactacaccgtctacactccgtcggcgtgctacgggaaccaggacgagggcacgctgatcgcggcggcgagcgacgcgctctggaacggcggcgccgcgtgcggcaccatgtacacggtcacctgcgtcgggggcaccaacgagaccccgaacccctgcaaccccggcgcctccgtcaccgtcaagatcgtcgaccgctgcccgtcgcccggctgccaggccacgctcgacctctcccagcaggccttcgccatcatcggcaacctcggtgccggcaagatcgtcatcgactacagccaggcgtaagatacatgcatgttgtgggaagcacgaactacgtatatacatgcaaaagcttcattcaagcttatatatattattcggggatgagttagtaaatactaagcaataacaaatcatgtcgtattagtctcaagctacgactatacaatcctagtgcaaacaagtgatttgtttgctgaaataatgacctgcaccatacgagtgtgcgtgtataatcgtacctttggagaaataaataaccgggcagtcggggcttatctaaagcaaaacaagttctatatatcttgcaccacaacatttcatatcgtataattataattcacaacctcagagagtaattctttactgtcagtttaaaccgcattagaaagcgaacagggcaaaagaaaagtaaaagaaaaaaaa

SEQ ID NO: 137531 - DNA, 1894 bp, Zea Mays
gtcaaactaacttcagagaccggctgctggttctccaccaaactaaccaaccatgcgtccgtcgtcgcgttacccgccgcaacccgcgctactcgctctcgctctcgccctcgccctcgcggcggcggccccggagctgagacccctcgccgccgccgtcaccgtcacgccgccgccggagcggacggacgaggaggtgcggcggctgtacgaggagtggaggtcggagcacgacgcggggccgaggcgtggcgccaccggcggcagcctcggcccgggcgaggacgacgacgcgcggcggctggaggtgttccgctacaacctccgctacatcgacgcgcacaacgcggaggcggacgcggggctccacggcttccgcctcggcctcacccgcttcgccgacctcaccctggaggagtaccgcgcccgcctcctccttggctcccgcggccgcaacggcaccgcggtgggcgtcgtcgggagccgccgctacctgcccctagccggggagcagctccccgacgccgtggactggcgcgagcgcggcgccgtcgccgaggtcaaggaccagggccaatgcggtgcgtgctgggcgttctcggcggtggcagcggtggaagggatcaacaagatcgtgacaggcagcctcatctcgctgtcggagcaggagcttatcgactgcgataagttccaggaccagggctgcgatggcggcttaatggacaatgctttcgtgttcatgatcaagaacggcgggatcgacaccgaggccgactacccgttcactggccacgacgggacgtgcgatctcaaactgaaaaatacaagggttgtatccatagattcgttcgagcgtgtgcccatcaactacgagagagcgctgcagaaggccgtggcgcaccagcctgttagtgccagcattgaagcatctcggcgcgcgttccagctctacagttctggcatcttcgacgggagatgcgggacgtacctggaccacggtgtgacggtggtggggtacggcagcgagggcggcaaggactactggatcgtgaagaactcgtggggcacccagtggggcgaggccgggtacgtccggatggcgcgcaacgtcagggtgagggccggcaagtgcggcatcgccatggagccgctgtacccggtgaaggagggcccgaacccgccgccgggcccgacgccgccgtcgcccgtgaagccgcctaacgtgtgcaacgcggagtactcgtgcccggaggccaccacctgctgctgcgtctccgagtaccgcggcaaatgcctcgcatacggctgctgcgagctggagaacgccacctgctgcgaggaccactcgtcctgctgcccgcacgactaccccgtctgcagcgtccgggacgggacctgccgtaagagcgccaacagcccgatgatggtgaaggctctgcagcgcaagccggcgatgtatactggcggcggcggcggcggcgagcaaagcgggaggagcagctggtgaggagattgagactgtggtggtgcgtggcgtgtactgttcatcgttcagacagatgacttgctggccatgctgtgggctcaggaactgcttcttcacagtggcgatgttctgatctgtaatgcacgaagcacgatactatttgttgtatatgtatgtatgtgtaactacagataagattaggaacggtgtgaaagaataaagaaaccgatggaataagtgatttgggaacaatctcagaatcaatttatgcagccctttaggataacttcgggaacagtcttgcacaaacaacaaggtaataatgcattcactcgtcgtgttatgtaaaacatgttctccagaacaaagctcagatttgcagtgaatatattcctgaattcaagttcg

SEQ ID NO: 137532 - DNA, 1493 bp, Zea Mays
gtcaaactaacttcagagaccggctgctggttctccaccaaactaaccaaccatgcgtccgtcgtcgcgttacccgccgcaacccgcgctacctgcccctagccggggagcagctccccgacgccgtggactggcgcgagcgcggcgccgtcgccgaggtcaaggaccagggccaatgcggtgcgtgctgggcgttctcggcggtggcagcggtggaagggatcaacaagatcgtgacaggcagcctcatctcgctgtcggagcaggagcttatcgactgcgataagttccaggaccagggctgcgatggcggcttaatggacaatgctttcgtgttcatgatcaagaacggcgggatcgacaccgaggccgactacccgttcactggccacgacgggacgtgcgatctcaaactgaaaaatacaagggttgtatccatagattcgttcgagcgtgtgcccatcaactacgagagagcgctgcagaaggccgtggcgcaccagcctgttagtgccagcattgaagcatctcggcgcgcgttccagctctacagttctggcatcttcgacgggagatgcgggacgtacctggaccacggtgtgacggtggtggggtacggcagcgagggcggcaaggactactggatcgtgaagaactcgtggggcacccagtggggcgaggccgggtacgtccggatggcgcgcaacgtcagggtgagggccggcaagtgcggcatcgccatggagccgctgtacccggtgaaggagggcccgaacccgccgccgggcccgacgccgccgtcgcccgtgaagccgcctaacgtgtgcaacgcggagtactcgtgcccggaggccaccacctgctgctgcgtctccgagtaccgcggcaaatgcctcgcatacggctgctgcgagctggagaacgccacctgctgcgaggaccactcgtcctgctgcccgcacgactaccccgtctgcagcgtccgggacgggacctgccgtaagagcgccaacagcccgatgatggtgaaggctctgcagcgcaagccggcgatgtatactggcggcggcggcggcggcgagcaaagcgggaggagcagctggtgaggagattgagactgtggtggtgcgtggcgtgtactgttcatcgttcagacagatgacttgctggccatgctgtgggctcaggaactgcttcttcacagtggcgatgttctgatctgtaatgcacgaagcacgatactatttgttgtatatgtatgtatgtgtaactacagataagattaggaacggtgtgaaagaataaagaaaccgatggaataagtgatttgggaacaatctcagaatcaatttatgcagccctttaggataacttcgggaacagtcttgcacaaacaacaaggtaataatgcattcactcgtcgtgttatgtaaaacatgttctccagaacaaagctcagatttgcagtgaatatattcctgaattcaagttcg

SEQ ID NO: 137533 - DNA, 1519 bp, Zea Mays
aaaatggcagctgcggagctgccatctttgcacgaagacacacacacacagcagctgagcagcagcaacacgctcccatcatctctcgccatgcgcccaacacgctcccctgtgccggctacggcgctgctcctgcttgccgtggcactggcactggccgccacggcggcggcccgccacttctacaccaccaccaccaccacccgcgtcccggcgccagcggagcgggcggacgaggaggtaaggcgcatgtacgaggcgtggaagtcgaagcacgggcgcggcggcagcagcaacgacgactgcgacatggcgcccggcgatgatgagcaggaggaggaccgccggctgcggctggaggtgttccgcgacaaccttcggtacatcgacaagcacaacgcggaggcggacgctgggctccacaccttccgcctcggcctcacccccttcgccgacctcaccctggacgagtaccgcggccgcgtcctcggattccgcgcccgcgcccgccgcagcggcgcccgctacggccacggccacggctaccgcgcccgtccccgcggcggcgacctcctccccgacgccatcgactggcgccagcttggcgccgtcaccgaggtcaaggaccagcaacagtgcggtgggtgctgggcgttctcggcggtggcggccatcgaggggatcaacgcgatcgcgacgggtaacctggtgtcgctgtcggagcaggagatcatcgactgcgacgcccaggacagcggctgcgacggcgggcagatggagaacgcgttccggttcgtcatcggcaacggcgggatcgacaccgaggccgactaccccttcatcggaaccgacggcacttgtgacgccagcaaggagaacaacgagaaggtcgccaccatagatgggttggtggaggtggcgagcaacaacgagacggcgctgcaggaggcggtggcgatccagcccgtcagtgtcgccatcgacgcaagcgggcgtgcgttccagcactacagttcgggcatcttcaacgggccatgcgggacgagcctggaccacggcgtcacggcggtgggctacggcagcgagagcggcaaggactactggatcgtgaagaactcgtggagcgccagctggggcgaggccggctacatccgcatgaggcgcaacgtgccccggcccacgggcaagtgcggcatcgccatggacgcgtcctaccctgtgaaggacacctaccacgaccccggcaccggcaccggcaccgccacggctacggcagctgccatggatgtgatcaagatggttcttgcttaggagggagcgagcggagcaggcagcagagagccgatggtcttgtcgtgttgaactttacatatggtagctaggtaccactggggataattaagttaatccgttatggtgtggcaagttaattaatatgtgcgtatctcttttgatgagtgccatatatgatgtaatgaagttacataaactcaaataaagtcgtaatcgtaatggtaaa

SEQ ID NO: 137534 - DNA, 2445 bp, Zea Mays
tccagtccaccacctctcccgcgccacgccgcgccgccgaccccgtccgcgtcccgcgggttcggcatctcggccccacctccacaacccgatcccccagtcctcggctcgcgcacctccgcaccgcaccgcgcacgcgcttgcgcctttggcttcttgctccagcgaccccgccgtccccgtcgggcaccaacccaacccaacgctctcctcctcgcttcccttcctttccctctgcccaccaattgatagctcacctcacctcacctcacctcacctccgcacccgctgtttcgtgcaccgcacttcacaccccaccaaccttctccccccctgaaaaactatctaccccaccccaaaccacccctacccgccgacgagcgcgatcgattgattcgtttcgcgccgggcggcggcggagggagcccaccagatccggctaccgccgcggctacgatgaagtcgctgctgccgcggagcgagctgcggcgctcgtcggcagcggccgtgcggtcgtcggccggcggcgccgcggggggagacggtgctgtggccgacggcggcggggctgggccgcgagcgcccgcctcctccaccttctggttcctgctgcacgcgctctgctgcctcatctcgctcttcctcggcttccgcttctcgcggctcctcttcttcatgctcttctccaccaccgcgctctaccactccacatcctcctcctcctcggccgcggtcctgcgcgccaccaccacgacgaccacaaccaccaccactaccaccaccacgaccaacaccttcacgctctccttcgcggccgccaacactcccccctccggcccggctaaccgcacggcgctggaggcggccgcggaggccgacaaggcggcggcgtctgggaacccgcagagccacgtcgtggtcgggaggcacgggattcggatccggccgtggccgcacccggaccccgtcgaggtgatgcgggcgcacgggatcatggagcgcgtgcaggaggagcagcgccgctggtacggcgtcaaggagccgaggcaggtgctcgccgtcaccccgacctactcccgcgcgttccaggcgctccacctcaccggcctcctccactcgctccgcaacgtgccgtacccgctcacctggatcgtcgtcgaggcaggcggcaccaccaacgccaccgcgtcaatgcttgcgcgctctggcctcactgtcgttcacatccccttccctgaccgcatgcccaccgagtgggccgaccgccacgctactgagaaccggatgcgcctccacgccctacgcgtgatccgtgagaggaagatggatggtgtagttgttttcgcggacgacagcaatgttcatagcatggagctgttcgatgaggtgcagaaggtccagtggatgggtgctgtgtccattggaatccttgcgcatactggaactgcagaccaacttcggctcagcgaggaggacaagcagaatatgcctctcccagtccagggccctgcttgcaactcctcagggcatctggctggatggcacacgttcaactcattgcccttctctgggaagacagccaccgtggtcggtgaggcggcccctgttcttcccaggggtttggagtgggctggctttgtgttgaactcgagaatgctgtggaaggaggctgaaggcaagcccgactgggtgaaggatcttgatgctgttggcgagaatggagaggagattgagaacccacttactctgttgaatgatccatcctctgttgagccactggggaactgtgggaagaaggtcctactgtggtggcttcgtgttgaagcacgggcggatagcaagtttcctcaagggtgggtaattgagccacctttggaagtcgtcgtccccgcaaagcgcactccatggcccgaaaccacccccgagcttccatccgagttattggatgacaagcaaaagctggaggataggcacttgtcaagaggcaacaaatcgtctcagccccgaggcaccacgaaacggaagggcgaccctcaagggcaagataactgatggagaacgcactggcattgtaatgtatatctcttgcaccctgcaagaacacggtaggaagcatatcgggttactctggcggtggcggtgtttaatttctttttttctgatgtttttgctcttgtggcgatggtccacgcttgggtgtgttatctgtagagtgcacatttctaaagtagctgtacctgttgtgttgtaatgtaactgcattgggaactaaaaaaatgggggctggattctggaagcctatctatgcttgtgaagggaggactgaactcttgggtgctgcagcacgggctgatggctggttgagcatatgaatctttctttatttatttattttattattgttgctcagggctggaagcctatctattccttctttctttattt

SEQ ID NO: 137535 - DNA, 679 bp, Zea Mays
gcactagcactaacgtcgcgcgcgttttctgacgacccgtcctcgtgctcatgcaggcactgctcccgctgttcctgaggccggtggtccggttcgcggcgcgcgtggcggccggcgggccggcggccgcggcggcgacgatcctgcaccgcgccggcgcgctgccgaggaaccggggcctggagcgcctcgtccgggacgacgacgtcgacgacgacgacgagctccacggccgcggccacgacgactgcatcgctagcttcgtcgtcggcgtcatgcgctgcctctgctagctagtagtctagtctagtctagtctagatggcgcatgcagcagtgctggccatggacgacgtgacatgcgtgcacgcacgtagcaatggcgcgcgacgctggtgtagattcagctagctgactagctctggctagctagtagagctagagagaggggaaacgggctccattgttctcgccttctcggagggaatccaccttgatgaattcgtgaatttgtagcagggaatgaagttgcattgcaatgctgacctttaccttctgcatgtgcacctctcagctgaaggcattttattacagctagctgcggctagatgtaggaatcaagtgtaccccttgcaaaatatggtattcacatgacaaacgaacgaacgaacaaaaaaaaa

SEQ ID NO: 137536 - DNA, 920 bp, Zea Mays
gtcaaaagcacactgcaccaccaacctttcctggcttcatctcctcctttcctccccaaaagacacaagagggggaagagagagagaggagaggcagagagaagagggggaggcagtccagtgtccacgcaggtacgctccacagaagagagatggcgatgcggatggcggcggcggcagtggcgctggtggcggtgatgggcgtgctggcgccccgagcggcggcgcagacgccgaactgcgcggagaagctgatcccgtgctcgccgtacatgaacacgacggggacgccgccggatacctgctgcggcccgctcaaggacgccgtccagaacgacctcaagtgcctctgcgacctctacgcctcgccggagatcttcaaggccttcaacatcagcctcgaccaggccctcggcctctccaagcgttgcggcctcagcgacaccaccgccgcctgcaagggcctttctcctacgcagtctcctccaggttcgccgccatcaggcggcagcagcaacgccgcccgtcgcgctctgccggccagtttcgcgggactggtgacgagcttgttcctagctctgtggtctgtattattggcgtaaattaaaagctccgcatgctgcaacgggcggcaatgcttgttgcttgtcttatcccacagtagatgatttcacttgcacatacgatacgatcaacatttgttttgctgtgctgtgtgtctgatgagatcagaatttctcattggttccttcgtggtgttcgtgttagactctgcacaattaaatggaaggtttctggctagttgctactatgtgttgtgtatgtcagtatgtgcttggttaccaatgtactctcaccagtacagatcactgaaccactttgtccgctgatagctacatggaacgcgaagcagccactac

SEQ ID NO: 137537 - DNA, 435 bp, Zea Mays
aatttaataatctcagtgatacttatctactactacacattgtgcaagggtagcaggtgggcttcgggagagatgtattatatgtttttactataatagatgtagacataaacacatatgtggtgtagtggtagctacaaacacatttatttgagaggtcgcgggttcgaatccccttggagcccgtttttttaatttaattttagctaggcgtgggatgcacgtgggaatgagaatagactttgtgggagggggaatgagaaagacacgtgatagccgggaatggaaatgtgaatgggctttgcagggagggggaatgagaaagacaggcagctgggaatgggaatgggctttgcagtgaggacggaatgggaatggcagaacacggaatggggcagcctactccttaccgtcttaataggtaatagagatttc

SEQ ID NO: 137538 - DNA, 2755 bp, Zea Mays
cccatgtcagctgaggtctgctcacctgtgtgagagagagtgtgtgagtgtgaccgtgggtggggtggggaggaagacgagcccgtcgagctgtgccgattttgcccccgaatccgtcgttacccctgctttggagggatctgaaggtgctggtggcctgctgctgcctgcctgtctgccaggagcccagaggccagaggtgagtgactggcccgatgaattccgcaatcttgtggagctgtggtgctggcgtggcgctgccgtgctgctggagactgtggtggtggtgatggcggctgtgcagcggaaaggcttctcgtcgtggtactagtggaggaggcgtgaaatttcatccataaaggctgtcgcggtggccggtgggtggagatcgcgctcaattcccgccgaaaccgcctccggggtagcgtggccgcgggaagtgggagtgggagatgattactttcgtggactcggcggccatggagctggagagggagagcggcaggtgcctggtggacccgcagctgtggcacgcctgcgccggcggcatggtccagatgccgccggtgcactccagggtgtactacttcccgcagggccacgccgagcacgcgcagggccacgcccacgccgacctccccgccggccgggtcccggccctcgtcctctgccgcgtcgacgccgtccggttcctggccgatccggacaccgacgaggtgctcgccagggtccgcctcgcccccgtccggcccaacgagccggaccacgccgacgccgcggcgccgggcgcgcgggaggacaagcccgcgtccttcgccaagacgctcacgcagtccgacgccaacaacggcgggggcttctccgtgccgcggtactgcgccgagaccatcttcccgcggctggactactccgccgacccgcccgtccagaccgtgctcgccaaggacgtgcacggcgtcgtctggaagttccgccacatctaccgcggcacgccccggcgccacctgctcaccaccgggtggagcgccttcgtgaaccagaagaggctcgtcgcgggggactccatcgtgttcatgaggacggggaacggggacctctgcgtcggcatccggcgcgccaaaaagggcggcatcggaggagggccggagttcccgcaccaccagccgccagacggcggcgggtacgggtacgggtacgccggcttctccacgttcctgagaggagaagaggacgacgcggccgcgaggggcaaggtcagggtgctggtgcggccggaggaggtcgtcgaggccgccaacctcgcggcgagcgggcagccgttcgaggtggtctactacccgagggcgagcacgccggagttctgcgtcaaggcgggggcggtccgcgcggccatgcgcacccagtggtgcgccgggatgaggttcaagatggccttcgagacggaggactcgtccaggatcagctggttcatgggcactgtcgccgccgtgcaggtcgctgaccccatccgatggcccaattcaccctggaggcttcttcaggtcgcttgggatgaaccggacttgttacagaacgtgaagagagtgagcccatggctggtcgagcttgtctcaagcacgccggccatccaccacctcacgccgttctcgccgccaagcaggaagaagctgtgtatcccattgtacccggagggccaccagctcccggcgccgatgttccacggaagccctctggtgggccgtggtgttggcccgatgcgctacttcccggacggcggcactcctcctgcaggcatacagggagccaggcatgcgcaattcggcatatctttaccagatctccaccacctcaccaggctgcagtcgagtctatcgccgcacgcgcacgggcttcgccaccagctcgaccacggcgcgcggccgaggatcgccggcggcctcatcgtcggccacccggcagctcgggacgacatctcgtgcttgctcaccattggcaccgccccgcacaagaaaccatcagacgtcaagtcggccgcggcggcgccggcgccgcagctgatgctgtttgggaaaccgattctcaccgagcagcagatatctctaggctttcggccgctgccggcgccgaagaagagcccgtccgacgacgctgctgagactgagaggacggtgagcaacaactcggatgcctcgagcccagctgggactgcgagtgggagcacgccgtccatcagtggaggcgccccgtcgtcgtgccaggacaacaaggcggcggcgacggcgacggcgactgatgacgacgatctcctcgggcactgcaaggtgttcatgcagtcggaggacgtcgggcgcacgctcgacctctcggctgtcgcgtcgtacgaggagctctaccagaggctggccgacatgttcggcgtcgacagggccgagctgacgagccatgtcttctaccgcgacggcgcttctggagcgctcaagcacgccggcgacgagcctttcagtgagttcaccaagaccgctcggaggctgaccatacaaacggacgcgaggtagaagaaggcggcagacaatgaagctctcgtcgcctgtacaaccggggggagctagcgagccgcggcggcgatctcgaaggacgatcgccacttgcagagtgctggtgcagactgcagagagggcggtgctgctgtcgtgtcggtcgtttcttatcagctcttttgttgcctgcaaaatgaatttaaagaatgtgctctgtc

SEQ ID NO: 137539 - DNA, 2455 bp, Zea Mays
cccatgtcagctgaggtctgctcacctgtgtgagagagagtgtgtgagtgtgaccgtgggtggggtggggaggaagacgagcccgtcgagctgtgccgattttgcccccgaatccgtcgttacccctgctttggagggatctgaaggtgctggtggcctgctgctgcctgcctgtctgccaggagcccagaggccagagcagagactgtggtggtggtgatggcggctgtgcagcggaaaggcttctcgtcgtggtactagtggaggaggcgtgaaatttcatccataaaggctgtcgcggtggccggtgggtggagatcgcgctcaattcccgccgaaaccgcctccggggtagcgtggccgcgggaagtgggagtgggagatgattactttcgtggactcggcggccatggagctggagagggagagcggcaggtgcctggtggacccgcagctgtggcacgcctgcgccggcggcatggtccagatgccgccggtgcactccagggtgtactacttcccgcagggccacgccgagcacgcgcagggccacgcccacgccgacctccccgccggccgggtcccggccctcgtcctctgccgcgtcgacgccgtccggttcctggccgatccggacaccgacgaggtgctcgccagggtccgcctcgcccccgtccggcccaacgagccggaccacgccgacgccgcggcgccgggcgcgcgggaggacaagcccgcgtccttcgccaagacgctcacgcagtccgacgccaacaacggcgggggcttctccgtgccgcggtactgcgccgagaccatcttcccgcggctggactactccgccgacccgcccgtccagaccgtgctcgccaaggacgtgcacggcgtcgtctggaagttccgccacatctaccgcggcacgccccggcgccacctgctcaccaccgggtggagcgccttcgtgaaccagaagaggctcgtcgcgggggactccatcgtgttcatgaggacggggaacggggacctctgcgtcggcatccggcgcgccaaaaagggcggcatcggaggagggccggagttcccgcaccaccagccgccagacggcggcgggtacgggtacgggtacgccggcttctccacgttcctgagaggagaagaggacgacgcggccgcgaggggcaaggtcagggtgctggtgcggccggaggaggtcgtcgaggccgccaacctcgcggcgagcgggcagccgttcgaggtggtctactacccgagggcgagcacgccggagttctgcgtcaaggcgggggcggtccgcgcggccatgcgcacccagtggtgcgccgggatgaggttcaagatggccttcgagacggaggactcgtccaggatcagctggttcatgggcactgtcgccgccgtgcaggtcgctgaccccatccgatggcccaattcaccctggaggcttcttcagaacgtgaagagagtgagcccatggctggtcgagcttgtctcaagcacgccggccatccaccacctcacgccgttctcgccgccaagcaggaagaagctgtgtatcccattgtacccggagggccaccagctcccggcgccgatgttccacggaagccctctggtgggccgtggtgttggcccgatgcgctacttcccggacggcggcactcctcctgcaggcatacagggagccaggcatgcgcaattcggcatatctttaccagatctccaccacctcaccaggctgcagtcgagtctatcgccgcacgcgcacgggcttcgccaccagctcgaccacggcgcgcggccgaggatcgccggcggcctcatcgtcggccacccggcagctcgggacgacatctcgtgcttgctcaccattggcaccgccccgcacaagaaaccatcagacgtcaagtcggccgcggcggcgccggcgccgcagctgatgctgtttgggaaaccgattctcaccgagcagcagatatctctaggctttcggccgctgccggcgccgaagaagagcccgtccgacgacgctgctgagactgagaggacggtgagcaacaactcggatgcctcgagcccagctgggactgcgagtgggagcacgccgtccatcagtggaggcgccccgtcgtcgtgccaggacaacaaggcggcggcgacggcgacggcgactgatgacgacgatctcctcgggcactgcaaggtgttcatgcagtcggaggacgtcgggcgcacgctcgacctctcggctgtcgcgtcgtacgaggagctctaccagaggctggccgacatgttcggcgtcgacagggccgagctgacgagccatgtcttctaccgcgacggcgcttctggagcgctcaagcacgccggcgacgagcctttcagtgagttcaccaagaccgctcggaggctgaccatacaaacggacgcgaggtag

SEQ ID NO: 137540 - DNA, 91 bp, Zea Mays
gcgcattgtttttgaattaaaaaaatgtcacgttgatgaggaggtcaccttgtggtggatacacacaatgagtcaatgacacaactgacaa

SEQ ID NO: 137541 - DNA, 1935 bp, Zea Mays
atgacccagctgccttcaaagttcaaaaacaaaatgatggtggtgagggtggacgagaaccctgcgccggatggagagaactctcccctggacgatgagtacgtctcggccgacgatgagcacgttgacaatgaagacaaggagaccgatagcatcggcgactacgaaaaccccagtggggcgccccagttgaagaagggtccttggtcgcccgaagaggataagcgtcttaaagactacgtcgaggtacacggcgcggggaactggaataaggtgcagaagaatgccatgctcaaccgttgtggcaagagctgccgtctccgctggaccaaccacctcaggcccgatcttaagaaggatcctttcgacgctgaggaagaggaaaagataatcaagctttacatcaggtggggccccaagtggtccatgatggcctcatatttgcctggccgcacagataatgaaataaaaaacttttggaataccagaaaaaggagaaaacagagatgtggttcgcctctccatccagaatatatgctttctcagcttagtcataaagacatggactgtgaaactcctggagaatcacatggcaagaaacggtcaaatgagtgctcaaaagaaaaggttgttgatgtgcaagaacttgtggatgagttaattgtatttgagcaccttgactatggtaaggatacagtgtttccaaccagacctttgaaatgccatgcatctactagtagtgtgcaaattcctggtgccattgagaaaaccttttgtcccactgatttgaactatgtaatgacaaagaatcagtcggtgcatgttggtagtgccattggcagtggctatccagtatatggtggcagactctctacttcagggaccatattcggttccattcagacagagatcccttcgatccaaagttccagctatagcccaagtaatgactggttggctcaatgtccttcggcttgcattgagcaacggattccaatggaatgcaatacaatatctcagtcaaaagcttaccttatgatgcattcttcttcagctttctgtgcccctgaacatgaggcctgttctgaaactcaagctccagacttatgttcaggttcagatgctgttttcgaccccagccagtgttatccagttgctagtttttctgatcttgggatctcggatacactactaacaaaaggtctcttgaatgatatagcactagcaagtttgttgaatgttaatttgaaggaccagtcacatatcaacaggcaggaacctaccaatgatacatcactaggaggagcaagtttcttgaatgctaatttgaaggaccagtcacatctcaactggcaggaacatatgaatgagacatcaccagtagcaggtttattgaatgctaatttggaggagcagtcacatctcaactggcaggaacctaagaatgagtcatcaccagaagcaggtttcttgaatgctaatttggaggagcagtcacatctcaactggcccttgcaggaatgtgagccatggattgagagacaaatgttttgaccaatagtttgatccttgttacaagcctgacttcccatgttcctgagcagcagtttcctctactgcacaaccagggccagagtgagcaacaaccaagatattcttgtgagcgtgatggaaattacattttagttctctgccttcgctgtcttaagctctctgaagtattgtcttcgactttgctgggatgatgagctgctgccccgagacaacaacagtcagccagaccaaaatcacttaaatagttttaacaatgtattaagttttgtcttgttacctgctgtctggcgtctgccatgttttgtccactgttaaacttgtctaataatacccttttagggctaatttggaaagcctcaatgtcttaagttttgtcttggt

SEQ ID NO: 137542 - DNA, 184 bp, Zea Mays
aagagccaacataaagcaacgcccaggcatacacgacacgaaccaggcaaccagctgccgagggaggaaccctagcggaacaggtgacggcgtcgcgctaccggtgacggcgtcgcgctaccggtgacgggggatacggcggcatcgtccccctcggcccctcctccatccccggcgcggcggc

SEQ ID NO: 137543 - DNA, 2119 bp, Zea Mays
gccaacagagcaacgcccaggaacacacgacacgaatcaggcaaccagctgccgagggaggaaccctagcggaacaggtgacggcggcgcgctaccggtgacgggggatacggcggcatcgtcctcctcggcccctcctccatccccggcgtggcggcgccagcagccggcctgcagaagattaaaggagccccaggagccccaactttcggaggacgacccagctgccttcaaagttcaaaatcaaaatgacggtggtgagggtggacgagaaccctgcgccggatggagagaactctcccctagacgatgagtacgtctcggccgacgatgaacacgttgatgatgaagacaaggagaccgatagcatcgacgactatgaaaaccccagcgggacgccccagatgaagaagggtccctggtcgcccgaagaggataagcgtctcaaagactacgtcgaggtacacggcgcggggaactggaataaggtgcagcagaatgccaggctcaaccgctgtggcaagagctgtcgtctccgctggacgaaccacctcaggcccgatcttaagaaggagcctttcaacgctgaggaagaggaaaagataatcaagcttcacattagacggggccccaagtggtccatgatggcctcatatttgcctggccgcacagataatgaaataaagaacttttggaataccagaaaaagaagaaaacagagatgtggttcgcctctctatccagaatatatgctttctcaggttagtcataaagacatggactttgaaactcttggagagtcacatggcaagaaacggtcaaatgagtgctcaaaagaaaaggttgttgatgtgcaagaacttgtggatgagttaattgtatttgagcaccttgactatggtaaggatatagtgtttccaatcagacctttgaaatgccatgcatctactggcagtgtgcaaatttctggtgacattcggaaaaccttttgtcccactgatttgaactatgtaatgacaaagaatcagtcggtgcctgttggtagtgccattggcagtggctatccagtatatggtggcagactctctacttcagggaccatattcggttccattcagacagagattccttcgatccaaagttccagctatagcccaagtaatgactggttggctcaatgtccttcggcttgcattgagcaacggattccaatggaatgcaatacaatatctcagtcaaaagcttaccttatgatgcattcttcttcagctttctgtgcccctgaacatgatgcctgttctgaaactcaagctccagacttatgttcaggttcagatgttgttttcgaccccagccaatgttatccagttgctagtttttctgatcttgggatctcggatacaccactaacatcaggtttcttgaatgatataacactagcaagtttgttgaatgtcaatttgaaggacctgtcacatctcaaccgacaggaacctaccaatgatacatcacttggaggagcaagtttattgaatgctaatttgaaggaccagtcacatctctctcagtgagctggaatgcatgtgcctgacttgtgggggcatggttttgaaattctcaggccaactttccttcactcgagagcttgatagagagaattcacgaggatggaagagtagcagagaagacactggacctgccaatgtatgccaagtacaaagactcgccttatctgagaaacccttcgaagcacgggagtactatcggtgggacccaggctgagatggattccaagtgagaagccccctggagggccactagataatctgttacttatttgccctatggtaaatgcgtcggtgttgatgcagaaacaattggactcattgtgagcttactcgcttcttttcgaaagtagttagtattcctcgaagtggtgtttttaccttgtaataaaggaaaaaaaataaagtggggttattgaaacttgagagtcaaatactgagatgttatgcgcgttttgatttctgaattaatcgatcggtatcacttgtactgtttttatacgacgatgctcgaaaccattcatttgtcattttaatttgatacacttgaagtc

SEQ ID NO: 137544 - DNA, 1301 bp, Zea Mays
gccaacagagcaacgcccaggaacacacgacacgaatcaggcaaccagctgccgagggaggaaccctagcggaacaggtgacggcggcgcgctaccggtgacgggggatacggcggcatcgtcctcctcggcccctcctccatccccggcgtggcggcgccagcagccggcctgcagattaaaggagccccaggagccccaactttcggaggacgacccagctgccttcaaagttcaaaatcaaaatgacggtggtgagggtggacgagaaccctgcgccggatggagagaactctcccctagacgatgagtacgtctcggccgacgatgaacacgttgatgatgaagacaaggagaccgatagcatcgacgactatgaaaaccccagcgggacgccccagatgaagaagggtccctggtcgcccgaagaggataagcgtctcaaagactacgtcgaggtacacggcgcggggaactggaataaggtgcagcagaatgccaggctcaaccgctgtggcaagagctgtcgtctccgctggacgaaccacctcaggcccgatcttaagaaggagcctttcaacgctgaggaagaggaaaagataatcaagcttcacattagacggggccccaagtggtccatgatggcctcatatttgcctggccgcacagataatgaaataaagaacttttggaataccagaaaaagaagaaaacagagatgtggttcgcctctctatccagaatatatgctttctcaggttagtcataaagacatggactttgaaactcttggagagtcacatggcaagaaacggtcaaatgagtgctcaaaagaaaaggttgttgatgtgcaagaacttgtggatgagttaattgtatttgagcaccttgactatggtaaggatatagtgtttccaatcagacctttgaaatgccatgcatctactggcagtgtgcaaatttctggtgacattcggaaaaccttttgtcccactgatttgaactatgtaatgacaaagaatcagtcggtgcctgttggtagtgccattggcagtggctatccactttctgtgcccctgaacatgatgcctgttctgaaactcaagctccagacttatgttcaggccaactttccttcactcgagagcttgatagagagaattcacgaggatggaagagtagcagagaagacactggacctgccaatgtatgccaagtacaaagactcgccttatctgagaaacccttcgaagcacgggagtactatcggtgggacccaggctgagatggattccaagtga

SEQ ID NO: 137545 - DNA, 101 bp, Zea Mays
aaagaaaacaaactgctggcgatcaagacaacccgcttttttgtctgaatacttgccgatgattgttcggtatgagagcaactccaaaagaacactaaaaa

SEQ ID NO: 137546 - DNA, 1986 bp, Zea Mays
ctttcatctttccccgcaccgcatcgcaccgcgagtttcgaaaaccccaaccaatcgcgcctcagatcacgcgagggcgtgagggggaattcgctctcccagcctccgctcacccgtcgatcgatcgtccgggccaggggctctccggcggcaccggggccatggaggaggacccgctcatcccgctggtgcacgtctggaacaacgccgccttcgaccatgcctccgcctccgcctccgcgtggcacgcccattcccctgcgcccgcgagcgcccgcgagggggacaaggagaaccaccgccccgagcccgacgttgaggcggaggtcgacgacgttgaggccgagatttaccacatcgaggcggagatcctgcgcctgtcttcccgcctccaccacctccgcacctccaagcagacggagccgcccaagcgtggacaggtcgcgcggacgcggatgcgggggctcagtctgggccagctcgacgtcgccgctgccgtcgactccgacccgctcaccgacaagcagcagccgagcgccgcgcagggcttgaaaaagcctatcaagcaggccccggcggcgccgcgaggccggagctccagcctcgggcccctcgagatcgtcgccacgaaccctagggtcctccgctcctccgccgccgccgctgccgcaccgaagaggaagattcagggcgagggcggcgccgcgcggccgatcctcaggccgatcaaggagcctcccgtgcagcggcgccggggcgtcagcctcgggcccttggagatccaccacggcgtcggcagcaagcccggggcggcggcgcgggtcaagcacttctccaacaacaggctcggtgccgttcgagaggaggaaggccagcgttccaaggagcacgccgtccccgccagaccgtggccatccagcaatgccaggcacccactggatgccaggcaaggcaccgcagcaagcagagccaaggcgaggagcgggagcataagccccagcaggttcaggaggcagtccacttccaaggctgccgagacaagagcgggaaatgccaagcctacagaggcgacgaggggagggagcgaagcggtcaatcacaccagcaatgtagccacgacgaagaggccggcggggagctccaaggtcagggttgtcccgagccgctacagcatcccacctggctcctccctagcagctgtgacacaaggcaaccgatgcaagcagtctctcccaggatcggctactgagaccagagtaaatctcactgagccgccgaacgacgagttgtctcctgaagaacttgccaaggttgcagagctgctcccaaggattaggaccatgccgccttctgatgagagcccgcgtgactcgggatgtgccaagcgtgttgctgatttggtcgggaagcgatccttcttcactgctgcaggggacgatggcaatctcgttacgccctaccaggcacgggtggttgaacttgaatcacccgaggcagcagcagaagaagcagaagcttgagaagtttgtctttgatcaattccgaagtggcttgcatctgggcgtggcctctttttgcagtgtgtgctactacatagtctactgttacattcatatcatatcacatttcctattttttcccccttgagacattgcttagtacttttgtgttgccttgtgaaaagagagtggaaaggtttgcatctgctgatgctcttgtttcggattgtgtgttcctggttcgatgaagtacaggataatgctgtggtttataacatgccgcctcatttggatattttgctaggactgatgaattgatgtcccatgtctgcatgtaagtatcattagcacacctattggctattaggttctctcatttttacaccaatccagctagaaatgccacatttttctcctgaatgttgtacaacaaccatgcatgatgatggtacagttcgtgcctgtttggcactgatgttttagtttc

SEQ ID NO: 137547 - DNA, 1648 bp, Zea Mays
ctttcatctttccccgcaccgcatcgcaccgcgagtttcgaaaaccccaaccaatcgcgcctcagatcacgcgagggcgtgagggggaattcgctctcccagcctccgctcacccgtcgatcgatcgtccgggccaggtatccgtccgtctggtttggaatttcgattgctcgtttggattggttcggggggctgtgttctgctggcttgcttccgccctgatctctctgctcgtgccgatcctcgacgggacgacgaaacacaggggctctccggcggcaccggggccatggaggaggacccgctcatcccgctggtgcacgtctggaacaacgccgccttcgaccatgcctccgcctccgcctccgcgtggcacgcccattcccctgcgcccgcgagcgcccgcgagggggacaaggagaaccaccgccccgagcccgacgttgaggcggaggtcgacgacgttgaggccgagatttaccacatcgaggcggagatcctgcgcctgtcttcccgcctccaccacctccgcacctccaagcagacggagccgcccaagcgtggacaggtcgcgcggacgcggatgcgggggctcagtctgggccagctcgacgtcgccgctgccgtcgactccgacccgctcaccgacaagcagcagccgagcgccgcgcagggcttgaaaaagcctatcaagcaggccccggcggcgccgcgaggccggagctccagcctcgggcccctcgagatcgtcgccacgaaccctagggtcctccgctcctccgccgccgccgctgccgcaccgaagaggaagattcagggcgagggcggcgccgcgcggccgatcctcaggccgatcaaggagcctcccgtgcagcggcgccggggcgtcagcctcgggcccttggagatccaccacggcgtcggcagcaagcccggggcggcggcgcgggtcaagcacttctccaacaacaggctcggtgccgttcgagaggaggaaggccagcgttccaaggagcacgccgtccccgccagaccgtggccatccagcaatgccaggcacccactggatgccaggcaaggcaccgcagcaagcagagccaaggcgaggagcgggagcataagccccagcaggttcaggaggcagtccacttccaaggctgccgagacaagagcgggaaatgccaagcctacagaggcgacgaggggagggagcgaagcggtcaatcacaccagcaatgtagccacgacgaagaggccggcggggagctccaaggtcagggttgtcccgagccgctacagcatcccacctggctcctccctagcagctgtgacacaaggcaaccgatgcaagcagtctctcccaggatcggctactgagaccagagtaaatctcactgagccgccgaacgacgagttgtctcctgaagaacttgccaaggttgcagagctgctcccaaggattaggaccatgccgccttctgatgagagcccgcgtgactcgggatgtgccaagcgtgttgctgatttggtcgggaagcgatccttcttcactgctgcaggggacgatggcaatctcgttacgccctaccaggcacgggtggttgaacttgaatcacccgaggcagcagcagaagaagcagaagcttga

SEQ ID NO: 137548 - DNA, 1641 bp, Zea Mays
acatggtagaaagagatgtatttattacaagtcctgatagtactcgaagtgcataacttattacaataattggaagggtgaagcctttccaaagagatatataaaaaccttctaagcttcaagttctccacaagaagtaactaacccaaagataggggaataaaacttctcctacaaaaacaacaagggataaaaccctgagtacgcaattactcagcaagacttacccgactaaagaaaagactctcaagggtatgctggcttttgggaatcaaggtaaagctcatcaaagttcaaggactcattttgcagaaaagcttactagaagtgggtccttaagccaagttttatttcacaagttagtttattacctgaatcttctagcctgaatctagcattttcctaatctagatcattcacttgacctacactaggttgcttttaaaatccaaattttgtttcgcttgttatctacgatgaagggcagcgatccagtcttcatatccgagaagtaacggcgatccgaatcgattaatacccagctggggatctccaaccacacgacatatgtagcacttaacccttgcatatgtcaaccattcccacggatcctccactacatgaactggtccgcgctacccgggagcacattaccctaccattcagcctcttgccaggagggtaactgctactcccaccatctcccacgcccagtgcgcggttgtcttttcacgtatggaatagccgggttcaggcttacccatgacgaggtatgtggccagttaaaaggtcctagatcatcaggccaacaatcggtacggtccttaatcgacacagacgggcgacctttcctgctcaacgtctggtcccattttaagctatttcaaaactttggcgcctgacagaggggccatgcctggataatgaatttatcaacgtcttgatgccttcattatcccaagcccattttctttttgtaaaaacatgagtcacagatcaaaaatatttttcttagtctatcagcatgactaagcatctctagcttttataaaacaggtaacaaggtgtggtaatcaattctttcaaggaatggtaatgcatcaagtgtttaatcaatcaactcctatcacctaatgcatcatataagtgataaaattttgtaaatacaaggagggtggcaaatgcaccggggcttgccttattgcagtgaagaggtactcgatccctctattaaaccccagttagatggctcctccacttgatcagcagccactggagtagattcctcttcagtcaccacttcagcttgaatcttcactccttctggtaggagttctatatgaaatgacatgatctatgcttatgcaacttgaaaagaaaatactaagaagcatcacaagacttacacctctctaaaggtgcacacaaaaactaacaaaaccttaagagagttaaatactctaatatcacaacacaattcaccaaccaaactaggaaaccttgcctccataaccaaccaagtgcttcatttatgccttaagcaaggatccaaactgcatgtactacaagttaaggtgtccaaaattcagccacaatttactgaacttggtttcagtcctctgaattcagtttagagttcac

SEQ ID NO: 137549 - DNA, 2469 bp, Zea Mays
gaagagccactccgccgccaccacctcgtccaaactttcgtttgtcatcatggcgcccttcctcatctaatcttggtggcgccccttcctagcgtttgttctgccgtccgcgctgcagtctgcttctcccgtttcactcctatcttagctgcacggactagttttgcatcgttttgatctacaccgtaccgtttcactctcttgttcttaacggcgggggcgcgagtttttccgtgctaagccgcctacgcaaggaggtgatagattgacgcgtcaagaaatcgtttcagttgccatgactccagtaggcaatatgattgttgcttgactacagttttgtctcccactacttcgccttttctgtttgttttaaattttaatcccgctcgcgatttgatgaatcttaactaggtttcggtttctgcacagtgctaaccccgggcttgtcggattaacttcctgaagaaggaagccccaatgcctgtgctagatccagcatgccattcagtgttgcaggtcatgacgaatcttgtgattggtctgtgtcaaagcaatggatacatatatattcgcaatacatcagcattttttctttgttatgtttggtttgctgtctcgcttgattgattgatggcagtgatttgacattacctgcgcttctgatgtaacctgtgaaggaaagggaaaaatcaatggttgaatttcttaatatgagccatctagtaaccattcaattcaattgtctcttgttatttctgcatcagctcatttcattcatttggcagtgatgatacaaccattcagcttacaacgccagttctgcttctgataaatcgtgacagacaaagctgattcatatctgagccttatccgtgtcagtttttaacaaatacgtactcaaatttagggtcttgaatttttgtatctgtccaacccgtacatccctttggccactgatgaagttgtccaatgtttggaggctgcagtcggctccaagttcctgcttgtcaggtagaacctacttggagctgctgcactcgcatgacaagactgggcaatactgaggcctctatgcagtgtccaaatacgtttgcagtttaatactcctatatatggtagactagttatttcacccacaatatttatactgggttaatttttgccgagtttaactatccttacacgagtgttattgttcgtgttgaggctgaaaaactcggagaatgcgtgttgtcatcagcttcggctctgtgctgtgagttgggagttaaataacagcacaagattgtttacttctgtggtttcataccgcatattttgcaccatcccttgcaacatattatcctgtcaggcttagaacaacgattcattagctacctatatgtcaaactaattcatcagccatgtgttcaactagtagttttgactgtttttatcttctaacaattatctctagaggtgtcgaacaggcccttagagttgtggatgatgataccaaagtaaaatacagttatccctggcttattccttttaaaagggtgctgagaacattattctgacacaactatatcagacggtgaaaactcgaaaaccaagaacacctcacacggcgcagtaatttcgtgctactaatgagaagtcaatacttttctgatgatacatcacttgcatcttttttcgagttgcataatgaattttacattttgaatttctgtgtctcgtttcaaatgcaagccatgttcttttgcagatagtttggtaacatttcactggtagtcagtcatgtttaactgagcatccacttttctgagttgtttatattgtgtgtatctagcttgtttaccctgtatctcaaatgttaatcttgttttgatgtttctgttcagtaattatcactggtaatgttgtttgtcttgaggcaacaaattagagtctctgatgtgcttctttccatagtgcatcaagcgctgtacgttgccaatagcagtttggaataagttatcatgcattcactgtccttaaacagtgtgtgcatcccgatgtccaacatttgcttcaatccccattgcaaactcgaacaatttgcaaaatttcttctagtgacgtgtatgtggtttttctattgttgggcaaccataggatgccgtaggatgactgctttaatattgccttcgttgtaaattttttagttcgacgattaaagtattttctttagtttgctctgctcagtttacttgttaaacttgtgctatctaggtccagtgaagttctcaagacctacggatgttcgaagattttatcacctactgatgggatcaactagggtcgagggattgtacataaccaatttacttgttgatttgtgctatgctgatgttttatgggcaagagtatgtaagaaaccggagctgtggcaggattggacaaaaaataatcaaaacatttattatattttctcgcctttttatg

SEQ ID NO: 137550 - DNA, 1138 bp, Zea Mays
atggggctgcatataggaccaccccatgatcgtgccactgccggcccgcagccgaatatcactgatgtgccacctaagcacaccagccgctgcaccagagttgtgctgcggcagccagctccagcggtggggagtggagggaaatgccagaacaagaagcaacagcacagaatcaaggttgggaaggtgcatgaggagatagttcgggaggtgcatactggccaacagctcaccttcaaggagtttgagctctgcattggttgatcatcagttgtgcacgagctaatgaggctgttgacaagttccacgtcctcgtacacccccacgttccagcccaagaagacttatgccttgttcgcttattctcattccatgtggattggagtggattgagatgctgactcaatcccaccgcatggattaatatcaaaacgaacaagcccttaggagggtggctacatggcatcaagcacttggctgccactgtcacatatgggtggcgcagcaccgagtacggggcaaaggagaaggaagtttagtgcctcgattccgccacctggacagccttgatggcattggctcgtgcaatgctggaagggtccaggtgggcatacgggaaggcttgcaaggaactccctctgttcatgacacaggaataggctgcccaacatgggctgtgtggtgcataaactccagcctggttggaccatatctcgcatggctggagaggaccttgtgaaccatgtgtgggagttgacagatggaggaagaaagtgtgtctctcaaagaatgattcaccaaagagagcaagtgacgtggtcggcctccacatatattctgtgtgaagggataaggggcaaatgcataatcgtccccggcctccacatatattctgtgtgaagagataagaggcaaatgcataatcgtcccctaacatgtgttgggaaataaatggagaagggaaacagagaaatgggaaaggaacacctgaaataaagattgggcgtgtccggtgtcaaatttggaagtcgcaagaattgggtgctatgtcttagtgagtaatgcgtactgagatcaatattctgaaatatctcctaaattctaagataccgacaaaactacagaaatttccatggaa

SEQ ID NO: 137551 - DNA, 264 bp, Zea Mays
atggggctgcatataggaccaccccatgatcgtgccactgccggcccgcagccgaatatcactgatgtgccacctaagcacaccagccgctgcaccagagttgtgctgcggcagccagctccagcggtggggagtggagggaaatgccagaacaagaagcaacagcacagaatcaaggttgggaaggtgcatgaggagatagttcgggaggtgcatactggccaacagctcaccttcaaggagtttgagctctgcattggttga

SEQ ID NO: 137552 - DNA, 2337 bp, Zea Mays
aaacacatgacccttcatctccttgttcagggttccgatttccgccccaccatccgccgccgccgacgatgcttcgtcgttgcatccttcgcagcccttgcactacgtactatcgtagccctcttttctttatagcttgtgttgtctattttgatttggtaattcaggccccgtagaatgttttcttttgttttatgcatgcaaaggtcgatttggtgataggagcggtgatgattttgtggactagagtttccgatactaccacggtagtatttgacgaccaaacccttggctgtctgagctcctaaatcacagtcttcgaccacttcgctgtttatatatatacatgcgagatctgcggtctttattttcttctgcaatgcaatggtatgatgagattacgggtaatgaagaacaagtgagttttcgactagagtctctgatgctgctactttgttggcggtagttgaagaccaaacccttggctgtctgaactcaatctgagcatactacttgctggtttcatagtagttataaaaaatatcttttgctgcatgcgtccattaccaattccggaggattatttcgttcctcacggtataatggctcggacgcaacaagctattctcttgatgtgtggttatatcctgattggtggcgttcttatgccaatccgatcttggaaaggccacatatattttttcatttgcaaaaatctgtaaacgtttttttttcttagttacgtgatctaaatgatgtgaaactttgaaagggaaagcacccaatctgatcggttgtggtgtaccatgacacttctttcatattgaataggaagatctgatagatccatgaaacttttttttgttgctgtgctctgtttagagatgttgatgatgataacacaagtaaaatacagttatccctgtctgattccttcaaaagggtgctgattacgttattctgacacatctgtatttattaaaaaaattgtcgtgttccatgcgcattttagtttcgttaattggagtaaaagatgactgctttaaagtttctctgaccttggcctatgatgacatgattgtttcagaagaagcaaattttttgtctaatcttgttgatatttatcatgaactaggacggtctgaggcaaatttctgtctaatttgttttttgtttgtctttcccacgaactctttgattgattggatcttgagagctatgacttataaagcagtgttctttccccatcttttgattctgatttgaccattgttggctgtgttggaggatgatgatatggttttgtcgccccagtcttagatccggacttccggacctttgctgattgacatgttaattgaatctgactccattgtcttaactatgttttttatctgttagattctttaggtgacaatttacaattgatgcatttgactgttccagatatttgttggtgcattgcagatgatgataaatctgaggcttgtttctctacattcgcagttgccgcctaagagctttcgccttgccaggcttgagagctagtgctgctaaatccttccttggatgtctgatgcgattcaaatccaattcttttgtgctttggttgtagagggttccgtaggtttcggtctaaaatcgtgtgctttgcaagatcagcttcttgtttggacttcgaaactgaaacctggtccaggcaatcggcaaatcatcctgccatcttgcgatactgtatccaagccagcttaaactcacctggatctgacgtcctgattttctgggccctttcggctggcacatgccttctgcttcagccatttatgcttctcttttctgctgttgcttgaactgtgtacctgaatgttttactgcttaccctagctaaaattttcttgaatggctatttgctatggcacacagcaaaagcttatgttgcaaggtcatgttttgaattgaaggcataactcttatttgagaatcctgtattttcttggccccacaaatcaagctcctgtattagctttatcagtaagcgattgtttctagatatggatgtaatggagcttctcccaaatagcaaacaagtttcggctgcataactcttatttgagaaggatgatttgtttggcgtgagatactgaagtcgtggctccctacctttatcagtaatcaaaggatgcgccaaatgcttgcagactccagtgagcaggactgcagtatacacgtacattgaggcagtaatattaatgttgatagagagaattaaatacatctctttgtttttgaactagaggtttatgccttgtatactgggagtaagtattctgttgctgc

SEQ ID NO: 137553 - DNA, 1251 bp, Zea Mays
tggccgcaccgaccctcgagagtccagacggccgtatcgttggcgcttgtcgtctccctatcgccccggctcctcgcctctccgtggccggccggtgctgatcacttctctgctcaccgctcgaatctgggctgtcgccgagccattctgatcaccgctgctgatcacttctctgctcaacggaaaggagacagattcgtggttcgtcagcggacgcggcggcgacttcatagggtgttctcggccgcttccggcgcgcaaagcggacgcacggcgtgcgcccgcccccagggatgaactgctccagattctacaaaggttagatctactgctgcatcttccgaatccgcgtgcgaatgcaccgccgagctcgataaggccctgtggccgcgccggcgctgtgcctcgtacgcctggccgcagggtcgttggtaggcgcgtacaaccccgccgctattgctcgcggatggcccggtgcgtggctcgctgaggcagtgtgaggctgccgagggggccggtggggaaatcttggatcctggtcgttcggcgacgtggcggtatctatagagctcggattcatgggctcgtcatcccagcacgattccatttccgcatcaggaagttcggagcgtgctgatggcagcagaagcagcattagcatgtggaccaaaattacgagcacagactcgtggagatggtgcctagggttgatttacatcgttgctgttgccagtatatggattgctgctagctacatcgtgcagtctgttgtggatgccggtgtctctccgttcttgatcacctatatatgcaattctctgtttgttgtctacattcccatagtcgaggctgcccggtactttgaggattctattggtgacttgtggacaaagctgaaattcaaggatgctgaaagcctgcagcaggcttctgacatggagagtgtgaatcttctccaaagtggggggcatgagatcaatgttgcctcggatcaatcacaaacaaggctgtctggagacgcttcagttccagatacatgcttccctgcccaggcagagctaactgttgtagattgcagcaaagggttggatgcaaaagggcgctggacacgtgctcgtgtggcccaagtgagcatgctaatcagccccttttggttccttgcacagcttacgttcaatctgtctctaagatacaccactgtcacggtaagtgttactaagaagaactgaatgatacttccatattttactg

SEQ ID NO: 137554 - DNA, 225 bp, Zea Mays
aattgtgttaatttagtattgcattgatgtggtatataaaactatacttgtttaatacccgtgcgttgcaacggtacctaactatatttgaagatattgattgggtaaccctccacataaaaatacccatactaaatgaatttaatgtcaaagtgaacatattgttcatatactggacattgaactggtaaaacaagtattacacttgatcttagccaaaagact

SEQ ID NO: 137555 - DNA, 871 bp, Zea Mays
atagaatacgacatttacggttggcggacgccagggacaggcgtcctgctgctgtgacatgtgagcctgcgacatatcaggctgcttggaggccggtggggacgtgcagctcgccggagtggccgccgcacaccgtcgacagccacgaggacgagcctttttcgtggtcacgggcccgccgcccctcgcggcgccgtcctgctgctctcggcatgctcgaaatctgcagcggggcagcaccaccagaaatgcgacccgtcagtccttgattttccgctgctcatattcaggcaacagccaattttctcattgtttgtctgtagaaaaagaattagtatatcaattatcgtttgtgagttgttcttttaattctatggttgttgtacatctgctcctgtcttttaagggaaaaccagagcgagcgaggtgaaacgagggcgaggtactacttgcccagggaagctcaggagatgtgacatacagaaaccctcgttcacaaatggcggcggcgccgacgaacaagaagaaggtgacgagaatacgtcgagaagagaaggaagcaagagaggagggaggaaggagatctgaaccttctatattgacaggcctgcgtacgtacataaaggtggtctgatcgtaaatttggtggggctttctcttccttccaccgtctcgagccgtttcttgagaacagcagcactagtagctatggcctacggagtactactgctgctgttctccacgatgatctttatgaaaaaggagatacaactgtttcagcgtgtgtgtgtttcaagatgaagatggttgtgtttcaccggtgcaaaacatttcggttgcacagtcgctctctcatataagtgaaactgtt

SEQ ID NO: 137556 - DNA, 1120 bp, Zea Mays
agggcaaaagaggaaatttctttgggctgggtctactaaaccctaatgggctgcggcctcgtatataaaccagcaccactcatccgtcgccgcacggaagtttcggcggcgccggcgtgctcgtgatctcaacccaaggcgtgcctccgctccggtcacccgtcgctccacgcaaccatgtcgaggaggaagaccagggagcccaaggaggagaacgtcacccttggacccactgtccgtgaaggagagtatgtctttggtgtcgctcacatctttgcatccttcaatgacaccttcattcatatcactgatttgtctgggagggaaactctggttcggatcaccggtaccatcctaaaaccttgggccatgcacgacctaggtggcagatgtatattgttttaactgagatgtgctaaacctaaaccctgtaggtggcatgaaggtgaaggctgaccgtgacgagtcgtcaccttacgctgctatgcttgctgctcaagacgtcgcacagcgctgcaaggagcttggcattactgcactgcacattaagcttcgcgccaccggaggcaacaagaccaagacccctggacctggtgcccagtctgccctcagggcgcttgctcgttccgggatgaaaatcggacgcattgaggacgttaccccggtccccactgacagcactcgcagaaagggcggtaggaggggaaggaggctgtaggcgtctcgtctgcgtggcatttgccggctcttggccggtggccattatgaagctagccctctctgggtggtgttgctgttctgtgtttgtcaagacgagctttaattttgctctatgtggatgaccgtttaccgttactcgaacctatatgatgttccatggataatgttttttggctgaggaattggctcgtcatatttatgtatgcattttcactctctctataaagtgtactagagtaatcttccctagcgaaagggcctatagcctagtggttaaggactttcgaatagcatctccaaatcttgggttagatttctctcgggaacaaatttttaggcttgttaaaaaaatcctctcgctatgtctcatccgcttttgggttatgatgttctgtgcgtc

SEQ ID NO: 137557 - DNA, 1020 bp, Zea Mays
agggcaaaagaggaaatttctttgggctgggtctactaaaccctaatgggctgcggcctcgtatataaaccagcaccactcatccgtcgccgcacggaagtttcggcggcgccggcgtgctcgtgatctcaacccaaggcgtgcctccgctccggtcacccgtcgctccacgcaaccatgttgtatgtgtttgcagtcgaggaggaagaccagggagcccaaggaggagaacgtcacccttggacccactgtccgtgaaggagagtatgtctttggtgtcgctcacatctttgcatccttcaatgacaccttcattcatatcactgatttgtctgggagggaaactctggttcggatcaccggtggcatgaaggtgaaggctgaccgtgacgagtcgtcaccttacgctgctatgcttgctgctcaagacgtcgcacagcgctgcaaggagcttggcattactgcactgcacattaagcttcgcgccaccggaggcaacaagaccaagacccctggacctggtgcccagtctgccctcagggcgcttgctcgttccgggatgaaaatcggacgcattgaggacgttaccccggtccccactgacagcactcgcagaaagggcggtaggaggggaaggaggctgtaggcgtctcgtctgcgtggcatttgccggctcttggccggtggccattatgaagctagccctctctgggtggtgttgctgttctgtgtttgtcaagacgagctttaattttgctctatgtggatgaccgtttaccgttactcgaacctatatgatgttccatggataatgttttttggctgaggaattggctcgtcatatttatgtatgcattttcactctctctataaagtgtactagagtaatcttccctagcgaaagggcctatagcctagtggttaaggactttcgaatagcatctccaaatcttgggttagatttctctcgggaacaaatttttaggcttgttaaaaaaatcctctcgctatgtctcatcc

SEQ ID NO: 137558 - DNA, 1004 bp, Zea Mays
agggcaaaagaggaaatttctttgggctgggtctactaaaccctaatgggctgcggcctcgtatataaaccagcaccactcatccgtcgccgcacggaagtttcggcggcgccggcgtgctcgtgatctcaacccaaggcgtgcctccgctccggtcacccgtcgctccacgcaaccatgtcgaggaggaagaccagggagcccaaggaggagaacgtcacccttggacccactgtccgtgaaggagagtatgtctttggtgtcgctcacatctttgcatccttcaatgacaccttcattcatatcactgatttgtctgggagggaaactctggttcggatcaccggtggcatgaaggtgaaggctgaccgtgacgagtcgtcaccttacgctgctatgcttgctgctcaagacgtcgcacagcgctgcaaggagcttggcattactgcactgcacattaagcttcgcgccaccggaggcaacaagaccaagacccctggacctggtgcccagtctgccctcagggcgcttgctcgttccgggatgaaaatcggacgcattgaggacgttaccccggtccccactgacagcactcgcagaaagggcggtaggaggggaaggaggctgtaggcgtctcgtctgcgtggcatttgccggctcttggccggtggccattatgaagctagccctctctgggtggtgttgctgttctgtgtttgtcaagacgagctttaattttgctctatgtggatgaccgtttaccgttactcgaacctatatgatgttccatggataatgttttttggctgaggaattggctcgtcatatttatgtatgcattttcactctctctataaagtgtactagagtaatcttccctagcgaaagggcctatagcctagtggttaaggactttcgaatagcatctccaaatcttgggttagatttctctcgggaacaaatttttaggcttgttaaaaaaatcctctcgctatgtctcatcc

SEQ ID NO: 137559 - DNA, 998 bp, Zea Mays
agggcaaaagaggaaatttctttgggctgggtctactaaaccctaatgggctgcggcctcgtatataaaccagcaccactcatccgtcgccgcacggaagtttcggcggcgccggcgtgctcgtgatctcaacccaaggcgtgcctccgctccggtcacccgtcgctccacgcaaccatgtcgaggaggaagaccagggagcccaaggaggagaacgtcacccttggacccactgtccgtgaaggagagtatgtctttggtgtcgctcacatctttgcatccttcaatgacaccttcattcatatcactgatttgtctgggagggaaactctggttcggatcaccggtggcatgaaggtgaaggctgaccgtgacgagtcgtcaccttacgctgctatgcttgctgctcaagacgtcgcacagcgctgcaaggagcttggcattactgcactgcacattaagcttcgcgccaccggaggcaacaagaccaagacccctggacctggtgcccagtctgccctcagggcgcttgctcgttccgggatgaaaatcggacgcattggtaaggagaggacgttaccccggtccccactgacagcactcgcagaaagggcggtaggaggggaaggaggctgtaggcgtctcgtctgcgtggcatttgccggctcttggccggtggccattatgaagctagccctctctgggtggtgttgctgttctgtgtttgtcaagacgagctttaattttgctctatgtggatgaccgtttaccgttactcgaacctatatgatgttccatggataatgttttttggctgaggaattggctcgtcatatttatgtatgcattttcactctctctataaagtgtactagagtaatcttccctagcgaaagggcctatagcctagtggttaaggactttcgaatagcatctccaaatcttgggttagatttctctcgggaacaaatttttaggcttgttaaaaaaatcctctc

SEQ ID NO: 137560 - DNA, 657 bp, Zea Mays
agggcaaaagaggaaatttctttgggctgggtctactaaaccctaatgggctgcggcctcgtatataaaccagcaccactcatccgtcgccgcacggaagtttcggcggcgccggcgtgctcgtgatctcaacccaaggcgtgcctccgctccggtcacccgtcgctccacgcaaccatggtaagcgagcctcttctcgtctgcttattgctcgcaagcggacgtaggtgcaagcacggtagcggtggattcggatccggctgcaagcacggtagcgctggattcgattgtttttgtttagagatgggttaagagcgtaggtttggctgttgactagggctactgttgttttggctggttgcccgtggtggattgtatctgataaattgcaatttgacatctgtgcttggttacatttgttgactgctactcctactcctgagttgaagattgaagtgatgctgtggcaacatattttctaatctgatcacgatttatgagttttcttgttgaaccttttttatctgccaaaatatttgagatgtgctgttaaattggtgaagcatagatatgattagaatctactattacaaattaagagtgagaaatgctggttatgtgggcctttgccctttggcttgggttgatttgcacacg

SEQ ID NO: 137561 - DNA, 887 bp, Zea Mays
gggcttggtctaataaaccctaaggggctgcggcctcgtatataaaccagcaccactcatccgtcgccccacggaagtctcggcggcgccggcgtgcttgtgatctcaacccaagtcgtgcctccgctccggtcacccgtcgctccacgcaaccatgtcgaggaggaagaccagggagcccaaggaggagaacgtcacccttggacccactgtccgtgaaggagagtatgtctttggtgttgctcacatctttgcatccttcaatgacaccttcattcatatcactgatttgtctgggagggaaactctggttcggatcaccggtggcatgaaggtgaaggctgaccgtgacgagtcgtcaccttacgctgctatgcttgctgctcaagatgtcgcacagcgctgcaaggagcttggcattactgcactgcacattaagcttcgtgccaccggaggcaacaagaccaagacccctggacctggtgcccagtctgccctcagggcgcttgctcgttccgggatgaaaatcggacgcattgaggacgttaccccggtccccacggacagcactcgcagaaagggcggtaggaggggaaggaggctgtaggcgtctcttctgcgtgccatttgctggctcttgtcgggtggccatcatgaagctagtcctctctgggtggtgttgctgttttctgtgtttgtcaagacgagctttaattttgctctatgtggatgactgtttaccgttagtcgaacctgtatgatgttgcatggataatgttttttggctgaggaattggctcgtcatatttctatatgcattttcactcttttttttgacgaaaaggaaaatccccctatttcattaagaaacaggaaacatgatgttc

SEQ ID NO: 137562 - DNA, 865 bp, Zea Mays
gggcttggtctaataaaccctaaggggctgcggcctcgtatataaaccagcaccactcatccgtcgccccacggaagtctcggcggcgccggcgtgcttgtgatctcaacccaagtcgtgcctccgctccggtcacccgtcgctccacgcaaccatgttgtatgtgtttgcagtcgaggaggaagaccagggagcccaaggaggagaacgtcacccttggacccactgtccgtgaaggagagtatgtctttggtgttgctcacatctttgcatccttcaatgacaccttcattcatatcactgatttgtctgggagggaaactctggttcggatcaccggtggcatgaaggtgaaggctgaccgtgacgagtcgtcaccttacgctgctatgcttgctgctcaagatgtcgcacagcgctgcaaggagcttggcattactgcactgcacattaagcttcgtgccaccggaggcaacaagaccaagacccctggacctggtgcccagtctgccctcagggcgcttgctcgttccgggatgaaaatcggacgcattgaggacgttaccccggtccccacggacagcactcgcagaaagggcggtaggaggggaaggaggctgtaggcgtctcttctgcgtgccatttgctggctcttgtcgggtggccatcatgaagctagtcctctctgggtggtgttgctgttttctgtgtttgtcaagacgagctttaattttgctctatgtggatgactgtttaccgttagtcgaacctgtatgatgttgcatggataatgttttttggctgaggaattggctcgtcatatttctatatgcattttcactcttttttttgacgaaaaggaaaa

SEQ ID NO: 137563 - DNA, 82 bp, Zea Mays
cacctctttaatacaaaagaaagaattttgtgaaattgttgtttggtatgtctcatggaaaaaaagcaaaggcacaacaaaa

SEQ ID NO: 137564 - DNA, 899 bp, Zea Mays
gggctgggtctaataaaccctaatgggctgcggcctcgtagataaaccagcactactcatccgtcgccccacggaagtttcggcggcgccggcgtgctcgtgatctcgaccaaggcgtgcctccgctccggtcacccgtcgctccacgcaaccatgtcgaggaggaagaccagggagcccaaggaggagaacgtcacccttggacccactgtccgtgaaggagagtatgtctttggtgtcgctcacatctttgcatccttcaatgacaccttcattcatatcactgatttgtctgggagggaaactctggttcggatcaccggtggcatgaaggtgaaggctgaccgtgacgagtcgtcaccttacgctgctatgcttgctgctcaagacgtcgcacagcgctgcaaggagcttggcattactgcactgcacattaagcttcgtgccaccggaggcaacaagaccaagacccccggacctggtgcccagtctgccctcagggcgcttgctcgttctgggatgaaaatcggacgcattgaggacgttaccccggtccccacggacagcactcgcagaaagggcggtaggaggggaaggaggctgtaggcatctctggcggctcttggcggcatgaagctagtcctctctgggtggtgttgctgttttctgtgtttgtcaagacgagctttaattttgctctatgtggatgaccgtttacagttactcgagcctatatgatgttgcatggataatgttttttggctgaggaattggctcgtcatatttatatatgcattttcactctctataaacgtgtactagagtaaccttccgtttcgatgagtcatatttatatgaagccagttacagacatggaatgcaacggaagatgcaagaga

SEQ ID NO: 137565 - DNA, 891 bp, Zea Mays
agggcaaaagaggaaatttctttgggctgggtctaataaaccctaatgggctgcggcctcgtagataaaccagcactactcatccgtcgccccacggaagtttcggcggcgccggcgtgctcgtgatctcaaccaaggcgtgtctccgctccggtcacccgtcactccacgcaaacatgtcgaggaggaagaccagggagcccaaggaggagaacgtcacccttggacccactgtccgtgaaggagagtatgtctttggtgtcgctcacatctttgcatccttcaatgacaccttcattcatatcactgatttgtctgggagggaaactctggttcggatcaccggtggcatgaaggtgaaggctgaccgtgacgagtcgtcaccttacgctgctatgcttgctgctcaagacgtcgcacagcgctgcaaggagcttggcattactgcactgcacattaagcttcgtgccaccggaggcaacaagaccaagacccccggacctggtgcccagtctgccctcagggcgcttgctcgttctgggatgaaaatcggacgcattgaggacgttaccccggtccccacggacagcactcgcagaaagggcggtaggaggggaaggaggctgtaggcatctctggcggctcttggcggcatgaagctagtcctctctgggtggtgttgctgttttctgtgtttgtcaagacgagctttaattttgctctatgtggatgaccgtttacagttactcgagcctatatgatgttgcatggataatgttttttggctgaggaattggctcgtcatatttatatatgcattttcactctctataaacgtgtactagagtaaccttccgtttcgatgagtcatatttatatgaagccagttac

SEQ ID NO: 137566 - DNA, 415 bp, Zea Mays
gggctgggtctaataaaccctaatgggctgcggcctcgtagataaaccagcactactcatccgtcgccccacggaagtttcggcggcgccggcgtgctcgtgatctcgaccaaggcgtgcctccgctccggtcacccgtcgctccacgcaaccatggtaagcgagcctcttctcgtctggttatggctcgcaagcggacgtaggtgcaagcacggtagcggtggattcggatctggctgcaagcacggtagcgctggattcgattgtttttttgtttagagatgggttaagagcgtaggtttggctgttgactagggctactgttgttttggctggttgcccgtgctggattgcatctgataaattgcaatttgacatcacctctttaatacaaaagaaagaattgctttttacg

SEQ ID NO: 137567 - DNA, 365 bp, Zea Mays
agaaatagttcctttatttaaatcaggaattatgttggatagaaaaacagagagcaattgtttgtatgcctgccaaatagcaggggaaaattaatcagcgtaaattatagcagaacacccccaaatgtctgtttcagaagattcataattcttaccttttctcagtgatatcaacatgaacattagagctcccataactaatgtgaaagcaagcaagaaggactgcaaaagaaaaaaatgtacaagttagtctacaatgtgatatctcaacgcgtaaaatgcaacttcaagctatatctaattatacccatcgcacaactctacagaagtcctgctttgcttggcactgccagacatggggggag

SEQ ID NO: 137568 - DNA, 1687 bp, Zea Mays
aaaaaaacagtaggggttcaagttgggcctccacccagatgacagcctcggatcggacccaaatccgacccatcaccacgacctctgaagcccgagcgcggcaccaccgtccgatcctggatccaacagccgaaacccagcctccagaaaccctagtgccgccatcctatataacgctccccgcctcccgcgcgctccgatttgacccatctcccaacccctacactcccggcggcggcgcaggagcagcagcaccagcacccgaggatggtgaagttcctcaagcccggcaaggccgtgatcctcctgcagggccggttcgccggcaggaaggcggtgatcgtgcgcgtgttcgaggagggcacccgcgaccgcccctacggccactgcctcgtcgccggcctcgccaagtaccccaagaaggtggtccgcagggactcggccaagaagacggcgaagaagtcgcgcgtcaagtgcttcatcaagctcgtcaacttcacccacctcatgcccacccgctacaccctcgacgtcgacttcaaggacgtggccaccggcgggcccgacgcgctctccacccgcgacaagaaggtcgccgcatgcaaggccgccaaggcgcgcctcgaggagaggttcaagaccggcaagaacaggtggttctttaccaagctccgcttctagatggtcggcgtcccgaatggtgaccgtcggtttcttgtatgggacacactccaagccatgtctcttttcgtattgccatgaagacttcttcgtgtttagtcctggggctctcaggtatattgtgcgtgtgtacttcgaatgtttggtcttggagtcctactgaattgatgaatgttcaatttatgtcttcaggattaacagcgaatatcatttacaatcttatttatcccattggttagtttgtaaacttttaatattgagttgatcgtgaactgttatagtagcctatgaaagtaatgccattgctgatacttctagggaaaatcttgcttcactctatttgcccactcaaatagtcatttgtccgctcaaataggcattctaggacattgttacatgagtctcctgctttccattatcgattagggctgatttggtgacccgggatcacggaaggattagagggaattgaggaagaaattaggattggaggggattgacagagaaattaactaaccctcaatctcctccaatcctcccgtgatcccttgtcatcaaatcaacccttatagcaagaatttctctcctggtgtagtcatcactgcagagtttagtagaacatatgaaaaataatctcaaccgtgacattcctgcctcatcccactgttgagagcaatccatctgcatcccagaaacatgatccaagtccaagatagtttgggacccccaacagaagataaatatcttccatgggtgctattaattattactacgcaatgaaaataaaatcatatatctgagtaatgaatggaagaattaagaagtggcgcaagcgaggaagccaagaaattaaacaccacatatatggttgagaataatggtttcccttttctccgttcttttaagtctaatctacctttgagtctgtggattgaaattgtattctgttgccgttacatcgaagtaaataatgcaaatttagggggaaaacaaaatgattaacaac

SEQ ID NO: 137569 - DNA, 1199 bp, Zea Mays
gaaaggtctatccagcggcaggagttgccaatcactgagtacatatatggtgcaatgagcaagcatgaattgctggaagctcaagagcaagaacagcaattggcttatcaggataaacttgtggaatggacaaaggacaggaagaatgcattagaatcttatgtatatgacacccgtaacaagctttctgagaggtaccggagctttgctactgattcagaaagggaacaaatctcagttaatttacaacagactgaagattggctttacgaagaaggtgatgatgagacagaagcagtttacagtagcaaacttgaggagctgaaaaagcttgtagatccaattgaaaatcgttgtaaagatgacgaagtgagagctgaagccatgagagatcttttgaagtgcattgttgaccacagaaatgctgccaagtcattatccacacctgaaagagatgctgttgacaatgagtgcaataaagctgagcagtggctaagggaggggtcccaacttcaagaatccttgcccaagaatgtggacccagtactttggtcctgtgaaatcaagagaaaggaagaagagctggatacgttctgtcgaaacataacaaggcacaagggctctccagcaaggacagatggcagcaggggttcagattacatgcctacacctgatagagattaaatattttcacgatcacgaggtttctttactgtacggccacacatgtcttagaccttgttcgtttacgtcggattgcacccggaatcgttccagctaatcaaagtttatataaattagagaagcaatccggctaggaatcgttccgacccaccaatccggtagaaacgaacaaggccttaatcattttgtagcatatatatgaatgaacgagttcctgctaacaccgtcatataatcgactctgtacaacactaggcccgccattgggtgaccgcttcttggttctccaaggtgcagttgtcacttgagagcctactgatcatgattgtcgatacctgtgaattcttttccggtacttggatcaaggttgtctgcttcagtttgttctgaatggaaaggataattaaaaggaaattgtatgcaatagatattgttgacgccgttttttagcttggcagatttatgcttcagtttgttgatcccaggaagttacccattatttaattttgtttgtta

SEQ ID NO: 137570 - DNA, 376 bp, Zea Mays
ggggggtgatccgaagggaggactttgagaagctatgtgccagactgctggagagggttgttgaaccttgcaagagggcggtggaagattcagggattggattggagaggctgcattctgtggaactcgtcgggtcaggttctcgggttcctgccattaccaaggtgcttgcgggattctttagaagggaacctagtcgcacactcaatgctagtgagtgtgtggctcgggggtgcgcgttgcaatgtgcaatgcttagtcctacgttccgtgttcgggaatacgaggtgcaggatgcaatccctgcttccataggatttaacactagtgacggcccagtttcaacattgtcaagtgatgcattgttccggagagg

SEQ ID NO: 137571 - DNA, 317 bp, Zea Mays
ctgtagttttcgtccaagttgtggataccacaccctggaggagttggtggcagattcttcatcaagtatggaatgcctgcgatgccgagctgggtgcttggtggcaacagaaggtagaaggaagacctttaagctgcccactttctgacaagacacatgacaagcgttatcaatggtttcacgatgatgacgcgttagaagaagcaataggtggagagtacattatgtttcttatttatgtacaaattgaaatcctttatctatggtttgacaatgatgaaacgctggaagaagcaatgggtggagagtacattctt

SEQ ID NO: 137572 - DNA, 611 bp, Zea Mays
gagcaagttggtacctggaatctcaagtccttgtagggatggcaacgggtttaaaacccgcgggtatagagattacaaacccgtacccgcgagattaatgttaaacccgtacccgcacccgctacccgcgggtttatggcacccgcgcgcgggcacagtcatataataaatatttattaaactgatagcacataataataaacatttattaaactgataaaaacatgtaccgatcttagccaaaagttcactggcgcctgtagtcttcttttatatcatttgattggctctgctcgctcaaagctttcggagtggcacacacgcgggtatgcgggtttgcgggcacgggtacaacattttcatacccacgataaaaaaactcgtcgggttgagaatcaaaaccgtacccgtacccacgggtacaaactcacacccaagcccacaccctataaggtttttacccgtgggcacgcgggtaaaatgtgcccgttgccatccctaagtcccaggcaagttgtgcccttaatcacttcttttaaccagtcatgttctgattaatcataatgatccgcataggttaattttgatgggacccaataggttaccctagt

SEQ ID NO: 137573 - DNA, 962 bp, Zea Mays
gaatcccgcccttctccatggccgaactccacgcggatgtcgttgacctcccgaatctgcaggctggggaaatacgggtcggaatcccgttgtccttaggcatataaatccatggccgcacccccttgaacccaaaccaggtcaccatggtgaacaccgaagtaatggggatgtgccgccggtcgcagttccttgctgttgtgccgcgcgcagggtgttggccaccgtgtcccggctccaacctcgtcgccgcacaaacagctccgcgggccctccttccaatcgcgctcgaccggatctctggcgcgccttcgccgtggccgcctctctccatcgctcagctgttgtggcgcgcccgtttgttttggttctctccggtgaggacttcctcgtggattcggccgcgcgatgcattccgctgcgtcagatgggggcagtgcagtgtttgccacggctgctgcgcagattggggccacggcagtggtggggcacccaggcgcgcagtccgcgctcctgttcctcaccggcgccgggatgacgcgcccggcatcctgatcggtcgcattcctgttgcacaagttcgtcgccgacgtgggaggtcttcagtccacgatggcctcggttgggaaattctccggcaaggcgccgacgcatgggcacctgcgccaccgtgaacaaccagctgtgggagatgatccagcgtgagccgtcgatctaacatcggatggactagattaggtcagtgcttttacctttgattctttcgatccgggcccttggatcatgatccgatgaccaggatttcataccgattcggtgggatgatgatttgatctgggccatcaggttatgatcctgtggcgtaggttgtggataccccttcgccgcgtactcttcacaaaaagcccctcggcttttgcataataaaacctgccgtccttcgccatgggaagacctttaca

SEQ ID NO: 137574 - DNA, 481 bp, Zea Mays
gaacatggttgtctgaaactgaatcgcaaacggctgcattaagagcagcaagtaaatcaccattgcagggggtgtagatttagtgagcgtacactggtgcttgcagcaatggaagaggccgagccacttgaggcgaacgtcgacgtcatccttggtgagcttggcagcgtggatctcctccatggtgatcttggcgaggtcactaatgtcgtcgtccatgaactgccccatgggctccttctctagcttcaccttcttctatgggttcagcccgatccgatacttctccttcagggcccagtaccctccctcccacttcttgaccctcgactccagccgctccgtggggatttcatcccgtgtcgtcggcgaggacgatgatatggagacggtcgttgcggagccgggacgacgacgaccctatcgccacgtgcggggagggcgtgaggaagcgttgcggggatgttgaggaggcacgcac

SEQ ID NO: 137575 - DNA, 309 bp, Zea Mays
tctttcttttttccttttcgtgggtgctttctaggcaccttgtatttggtcttttctagacctttttctgacttcttaatatatgatacgtggttcccccacgtgttcgagaaaaagttatatatcatgtacatcggtgaaaagaatttgaacctgtgcattgaaaccaaaaattatctttgatgaaaggccatctctagcatcaacaattcccctgtagagtgaatcatcgccatggaaagagtacatgtaacttggtcccagaaaatatatgccctttacttgctctgaagaaagtgcatcagaaaa

SEQ ID NO: 137576 - DNA, 303 bp, Zea Mays
atgacgggcaagcagagcggggcagcggcggcgggcgtgggccgtggcgtcgaggcggccgccaccgaggagcaggcgagggcgatcatcgccacggccaagagggcggtggaggaggatgcagccaaggccaagacgacgataggggacggcggcactacaccgtcgtcgtcgctgaagaggtcgctcgagtgcttcctgcaaggccggatgaacaaggcgacgtcgtcgtctgccgcaactcgtccccacctcgagacctccaccgcgtcttcttcctcctcctcgtcgccgtctacctaa

SEQ ID NO: 137577 - DNA, 1223 bp, Zea Mays
cataaagatcaccacctccattctcacgcacaaggcctctctctcgcagattaagccagagcgagagaggatggacgactcgtggaggtgcacgatgggctcggtgctgccgcggcagcggtcgtcgtcggaccaacacgccggcggcggccaccaccagagcttggcgcccgacgacttccgggacgtgtacggtgggccaccgcgcaccgtgctcctccgcagcttcgccggcgaggcggccgactaccactccccgacgggacaccggcacacgggctacggcggcgccgaggccttctgtcgccgcccgcacgccgacgggcgcgcggcggcggcggcggcggcggccgtgcccacggagcagggcttctttgacgacatcttcggcgcccgtcgtcacatgaggtccaggtccaggtccaagtccaagtcatcgtcggcggtcagctccgacgagttcccctccgccgccggcttctgccggccggtggccaccggcggcagccgcgctgacgccacgctctcctcgttcacgtctaggctcaggccggtcacgatcccttcgcggcggtacgactcgtcgccgcagtcatcgacgtcgacgagagggacggagtaccagagcagcttcacgtgctcgacggccgcgtacccggcggcagctcgctactactacggcggcgtcgccaagaacgccggcagcaggtcgacgtcgaaccacagcagagccgtcggcggtgggtcgccgtcgccggcggcaacgcgcaaccaccgcgggggcagcagcttctgttgcttcaagtcgaacccggagaccagcagcgacgcgccgagcttccggcaggcggccgcacgcggggcggcgtggtcaccggccgccgagaccaccgtcaccgacggcgattacggttacgggtactaccactcgccgccatcagccacgtcgtcgtcgtcgctcttcaccaacccgctggccaggacgccgcggcgcctggaggatgtggtgagggaggtgcgggagcgggcgccgctgctgctgatggacgacgacgacggcgacatcgacagcgtcggcgccgccgcggtggacgaggcgattgcttgggccaaagagagattctggagcgaggcccgttaaaccggacgatcaggataaacgtcagcagcgtttagatcatgatgatcgatccgtcaattcatggcgtgcggcgtgcctatat

SEQ ID NO: 137578 - DNA, 1289 bp, Zea Mays
aactgagcaaaagacatctcactctcctcaccccaaattaggatatggcaggtgctaaaatttagcacatccaaacactacatgtgaaaaaatggagtttgatttccactccaccacccccggaagaaaaaaactgtccaatcgaatcaaagagagaaaaaaaatcctaaaccctagcatctcccatggacgacagcgatggcggactgagcttcgatttcgagggcggcctcgactctgccccagcttctgggggcgggggccccgtgccgtcctccaccgaccccggcgcgggtgtcgggggaggcggcgacgggctgggtatgcacgggcgcggccgaggtcgcgggagctaccgccaaacggtgtgccggcactggcttcgcggcctctgcatgaagggcgaggcctgcggattcctgcaccagttcgacaaggcccgcatgcccgtctgccgcttcttccgcgacttcggcgagtgccgcgagcccgactgcgcgtacaagcactcgtacgacgacgtcaaggagtgcaacatgtacaagatgggtttttgtcccaatggtcctaattgccggtataagcatatcaagctccctgggccaccgccttctgttgaggaagttcttcagaagattttgcagatgcgctcttttaacagatacagtcagaatagaaataataattataatcatcaaggggagagacctcaacatccacaaggttctgggttgcctaaccaaaactcggcagaaaatgccactgccgtggatccaccagctggtggacaacaagcacaaacgctgaatcaacaaccaccacagcagcagcagaagccaaatacaaatgatcaggcccaaggtgtttcaaatggtcatcaagccactagaatcgccacaccccttccacaaggaccatctaggtgtgtgtggagtttctagtcatgcttgtaaaacttttagaacagtgaaaactacgcacttagttttggttgcaacagtgtatctcataaaactatgacatattatatgttttgacacttgttgatacattgtacttaatttcaagctattgaaagaaaaagcttgtagtcgtttcgctcttcggattacaaatctaggttagctagttattctctctggttggttccacaatatttaactcttcaatagaagcttgtgtaacagtagttactgctaaactattactatgtttgtatggacaaagttcatgctggaaagttcaagtagcacatgagatggttcatgtgttgcgatacttgggaaatc

SEQ ID NO: 137579 - DNA, 822 bp, Zea Mays
aactgagcaaaagacatctcactctcctcaccccaaattaggatatggcaggtgctaaaatttagcacatccaaacactacatgtgaaaaaatggagtttgatttccactccaccacccccggaagaaaaaaactgtccaatcgaatcaaagagagaaaaaaaatcctaaaccctagcatctcccatggacgacagcgatggcggactgagcttcgatttcgagggcggcctcgactctgccccagcttctgggggcgggggccccgtgccgtcctccaccgaccccggcgcgggtgtcgggggaggcggcgacgggctgggtatgcacgggcgcggccgaggtcgcgggagctaccgccaaacggtgtgccggcactggcttcgcggcctctgcatgaagggcgaggcctgcggattcctgcaccagttcgacaaggcccgcatgcccgtctgccgcttcttccgcgacttcggcgagtgccgcgagcccgactgcgcgtacaagcactcgtacgacgacgtcaaggagtgcaacatgtgagatctctgatgccacacgaaagtgttgatgtaaacgtctgggtgggaaagacggctttttataagcttggtggcggctgtggtcgaagaaatttgctaacttgtccgaaaaatttctaactaagatggcaaattcgtggtgattgattcgagtttgggtttgagattatagtgatcatagtctctggtcctctaggtcggtcttagttagccctcggttgctacatgtggtttgattcaatataataaacttggctacttcgataatttcactgaaagaa

SEQ ID NO: 137580 - DNA, 4055 bp, Zea Mays
tgttggtttgcttctcaacaattaggcaatagactgttctaggacagattcaaccatgagccaagaactgccaatttccaacatttttgtttctgttgttaccaacaaagttgagatgcgttgatccgaggtatgcgcatcagatattcatagaaaaattccaatctgcagctgcacccgtcgctcgtgtcagcggctccggtcgaggtaggaggagcgtgttgcaatttgttgcgcgacggcgacggcaaaggatcactgcagctagcgccgggccgatggcagcggcaaccacggagggcggcggcgcgggcgaatctgaaccgagctaatctacacgacagcgcccccggcggcacgaccgcacgagtactaggcagtactagcctagcctagtactcctagtcctagtcctaagattaggtcccaggagatgaaggcacctacttggttggaagggtgaacggccgctccccctccctaagatccaaaccccggcacccgcggcgccggcgacgcagggaggaggcgatgcacggccggccgcggcgcccggccaagcctgaggacgacgaggcggcgtcagcgaaagccgccaagctccgggacctccaggcccaggtcctgcacaatcaccatgcccgcacgtacacaaaggagtcaattgggctgagcttcaagctgctcgagacaaatccagaggcctacacggcatggaactaccggaagcttgcgttgcagcacaatgtcaaggagctttctgacccacaggccatcaagtctgctattgatgatgagctgagagtggctgaggttgctttaaggcagaacccaaagtcctatggggcttggtatcaccggaagtggttgctaaaccaaaagctagcgcctgtggatttcaaatatgagcttggcctcttggataaactgttaaaggtggacgccaggaatttccatggatggaattaccgaaggttccttgcgagattcatgggtttgccagatgatgaggagcttaagtatacgatggataaaatcagtgacaacttcagtaattactcagcatggcataatcgtagtatacttctgtccaacctactaatccagcagagcaaaggttttgagtcaaagcagaagattttttccgaggagtttgaacttgttactcaagctctttttacagatccaagtgaccaaagtggatggttctatcacctctggcttttagctcaaacatctagtccagataacccacagctgattgcttcatggccttctaatgctgcaaagctcagtttctcttttatcaaggaaaaggctgagcagcacacactgtcatccgtctggtcaaggactgtacccattgttctttattttaatgagcctgtcaaaggattaaatcattcaagtgtgaacttaaagtctgatttggagttcggtaaggatatccaatggaggcccctcacaatggcagactctgggtactctaaatgttgggccacatatcttcaaattacaaatgaatgtagcagtttgcaggaatattctgttgaaatgagcataccctgctcggatgacattgtgtctagaagtggctctaactacaactgtcctgtgcattttacattttacattgaactgatcagcaacaacgcagcccagggtttagatacgtttgataagccagttgcctggaattgctcagactcattccagtctcatggaaaccgtgatcctatccctttggatctgctaaacattactagtgccttggtcgaacatgactcagattggcattttgaaaggctgtctgaggagatagatcttttcagagagttagctgatgacaatagcaagtttgggaagttgacattagcccggctattgcttgcttgtgctgctataaaatcccgtggaagatctctaattgaaaggaagggatactgtgaagaggcactggggctcttcactgacttgattcacctggatccatctcataagcagtactatgaggatgaacggagcttagccctgatggataagttaacatgtgacatggagactttcacgaagcattgttctgttcaggttcaaccaaattcagctcccctgcatcatgtgcagtttcgcagattgtctgtaacacgcatcggatttgctgagcgcctgttgtgggttcaaatgctggacctaagccataatagtcttagatcagtcgaaggtttggaggctttgcagcgccttgtgttcttgaacatcagcaacaaccagatcagtagtttcacagcacttgaaccccttacgaagataatctcactgaaagttctggatttgtcgttcaacgagattggagctcactcaattgacacagcacggtatatctgcccgtctccgttctcacacaaaactgaagcaagtgaagcttttgaagagtaccaggaggtaaataatatcaacgtgacggaatactgggacgccatattgttcttcagatctttgaagctggcacagcttgatatcagaggaaatgcagttgccagcaaggacggcttcagaactcttgtcgtgacgctcattccttgtctaaaatggtttgatggtgaaggtgtcagttaatcggtggagttccacttaggagttgggcaatcttggtagtgtcaaggctcactatgtgaactattttttgctagaagccattgatttgcttcatatgcagtgctgtatttgtttatgcgaatctgagacatgatcatgatgttacagagttctgaattttcaggattgaactgtcataggtcatacaagaaagaagatgttatctaattgcaagttgttctactttcagaattctttaataagtttatttattaaaatagaacagagctacactgctaccatttacatttttgttgtgagcgttgctctcttccagaggttatctgacgatgatgttgtaattgaactttgggagttttgaatgcagtttatgtactacagattttctcccgttctcttttcacaaggcctgaagctaaaatcccttgtcagaggctcttgattctagtgtcgcagtcccagacttaactagtccaacaatctgtagtttctatttagatgcattcttctaaacttctgtttttgttgatagctgtagctctggagctaactaaagactatgtaaaataaactctgcatcatagtagaaaatagaaaagcttatgtatgaactctgaagttttctaataaacaatccttcaaaaataggaaacaccaatcatgcctctcagtttcagatagcagagatgagccccagtaacttagtacatgcgtagtgtattccctttgaagcacgattcactcaaaacacaggagcgacatcttctcttcaacggagcaatcgacctggcacgacgaccggcaggcggccgggatcaggatgagccccaggcaccgctgctccgtcggaggcgagcagtggcgggcgctgcggtactctacggcgtcctggaggatgatgttgccctgcttgtcgatgcagtggaacaggccgtggaagtagcggccgtcgttgacgccgatgagcatccgccggaacagcagcttccggagcttcgcgacagacggtgagctgctgcccacgggcgcggtggagctgttgcggtacgtgtctccagaatccgggatggcttgcgacggccctggtgctccttcttccattgtgctaaggatcccctctggtagtggtagatgagcatgggcatgggcatgtaacagggttaaagaaaatttggatatgggttctggtacgcagaattactaggcaagattttatgcctggtacttaaggatctcgatggcaggggtggataattttcgcagaaaatttcgaaactggtaggtaactgggtcagatccgaatacagatagcttagctatggttttgggtgctctgtttcgagaagtaggaagggaggagaaggatcgggcgtaccttctacgcgctcgtcgccggggaagacctggaggagggctgggtgctcgcgttcggggccggg

SEQ ID NO: 137581 - DNA, 357 bp, Zea Mays
ttaacggcgatcgtcagtcagtcgcgctccgatatctcggtgaaggtgatggaggtgcgcgtcgtctcctcagacgacagcggggacgaccgcgccatgatcgaggtcagcagcgtggacgacgtggccctgctccgcagcttcaggtctccgaaatccctgatcacgtcgggcttgctgatcgtctccgtgtccacgtccgcctcgcctctcagcatggccaccaccgcagacatgcccggccggcgtttcgtgccgtcttgggtgcagaggagcccgatcttcagaaacctgcaggcttcgtcaacgtccaggtcgtcgccaagggagctgtctatgatcttctccagattcccg

SEQ ID NO: 137582 - DNA, 82 bp, Zea Mays
atcgacatttaccgattcaggacttcaatatgtgtccgcatcttggcacctgagcttgttgggagcaaagcatgtttgggag

SEQ ID NO: 137583 - DNA, 822 bp, Zea Mays
atggtcccttgcgaacgggtagaacgcgccaagctggatccagcggctgcagagctcctcggttgtgttgccgccgaagccgcagatgtcagcgccgaccatggggatgccgaagaggccgaagctgagcatggtgttgatggagtagcggaggtcgtcccacgtggcggcgttgtctccggtccagtgcgcggtgtaccggccggaccccacgaacgtggaccggctgagcacgaagggccggcggccggtgtcggcgagcagcgcgccgtgcgtggctcgcgcctccaggaagccgtagaggttgtgtgcgtcgtagtcgcgcacgccgccgtagtgcaccgcggacgccggcgtggtcttgttgttgatggggcggtgcacgccggagttgttgatgcggtacggcgggtcgtccagcgcgttgaggggcgccgggtcgacgaagttggagacctcgttcatgtcgatccagaggccgtcgacggggagcgtccgccggaacagggcgatctcgcgcgcccagaactcggcggcgcgcgggttgaggaagtccgggaagtagacgtacccgggccacaccttgccgaggtagttggtgccgttccgcttcaggaacacgtcctgctgcatccctcgcacgtacgtcccgtatgtctcgttcacgctgatccctgggtctataatgacgacgtatttctggccgttccggtggaggcggtcgacgaactgccgcatcgggccggccgggaagttcaccggatccagcgtgaagtccttgaacgcgtccatgtagtcgatgtccgtccacatcacctctag

SEQ ID NO: 137584 - DNA, 312 bp, Zea Mays
atgttcacatggctagatgagccctttgcttctgaagcaatcgacggtctccctgatggtcacatcaaacggaaggaaacaaacgcccagatcgatcaacttcttggagggctcctttgctctcatcaaccaacctgtttgtcctctttgatagttgattctcttaggtgttgcaacagattattcaggctggtattgactgatgacatgaaaaatggacccagagtagtccctggattcagcacaaccagctgcaaaccttccctttcggcgaactcccacttatatgccttcgtgatgtgggctgcgtag

SEQ ID NO: 137585 - DNA, 369 bp, Zea Mays
tttggtgaacagagtaactttatttggtataccaaagtatcgttatgttgcaactccaaccgttcgtgatggaaagcataaaccttgacaaggtaatgactaatgagttatgcaaatgagtaatgacatattccctcaattttgtggtgatcgtgggttccaacaatgtgcaatgcaactgcatcttcttctgaaacaaagggaaaagtctgcataccaacacaggctcagagcatggtgagtggtggagacaaagcagatgctcaagatgctccccgtgctagccatcacgttcgttcccagtgcgatgatggcacatatcaacacactgttcgtcaagcagggcacgacgctagaccctttctctag

SEQ ID NO: 137586 - DNA, 384 bp, Zea Mays
atggtggctgatccgaatacgagtggagtggaatctcatgtgctggattgggtgatgggttggatgttggaaactggctgggttgcaagaacagaggctgctatcaaacttgatgctgagctggctggagaggtcctagtggtggatgagctatcaactgacaagagagggtccagtaagggtatcgatgagacagaccatcaggtccaggaacatcgacaagctgcaacagtgctcccacatgggcagccgaacgcgctcgaagaagatggggacaacatactcactgaatgggaaaggacgaaggagattgtcttgaggccagcattatggatactaaaagctcttcagaggagtctgataaagatgaagagagtaatttaa

SEQ ID NO: 137587 - DNA, 3221 bp, Zea Mays
atgcgaccggccttctccgcctccaagccgtcgccgtccgggagggagaagggcaggaggaagggcgcctccgcggccgaacagctgctcaccggccaggccgtccccctccgcacccgcctccacgacgctctcgccctcggcctcaccaagtctgatggccacggtgctaaaaaatggcagtctactgatgctggagtacagtctcacgtgctcaaatcggtgggtgcatttgtcggttgtctttcaaatgaactgctcagacttcctcctataaaggagtcaatttcagatatacttgtagcactggaaggtattcttaagacagagaacgtttcagttctgatccaagcagctgacgtgagctcgaagtttttctctactttaggaaattctgttcgccaatactcagttttggagatggtttcgtgcctctcatgccatttgtctgcaaatcagctacgtattgctttaccatgtgcaagtgcattgacttgtatattgaacaaccaagttacagcgagagcttcgactcaggcagaaatttgggaggctctggacaagaccaatgcagttgcgagtgttatttcaactctacagaattacaccgaagatgtccatccactgaactatctgacagagatgatatctctgctaagaagtatactgtggatttggccttcctcgagataccatgtatggagcaatcacaacttgatggccaaactagcacattactgtcttactgctgaaacaacagtttcagctaaaattcttaagctatatgctgctttagctttatgtggcaatggagcaatggtccttcttaagaatgaagagctgatcattaagactggtaaccttatgggaaaatctcatcctactgttactaggattgaagcattgaggctctgccaggtttttctgagatcttcaaggggctgcaattggttgatgactgcacatggtcagcctattgttcaaggcataaccaatgccatgtctgaaataaatgagaagacattagtaagagagggatgtcggactgcattactggcgcttcgttattctgggaatcatcatagatgcttctggtttaatgctattgataaaatactttataagattctttgtgggagctgcaactcttcatctcatgcacatcagactttgtgccatggggagctgttcaatatagattccaaagatattatggatatacatccctatgtatgggatatactcggatatctagcagtacattgcgacaatgagcatttttcggtagggacatgtcagaataatttcttgcagggactgatatcatgtgcttgctcgctagcaacagatttaactctgaaaaaaagtcccctcaaattgtctaaggaggagcaggaaccggctttgagggcagttcttatgatgcttctctctcctagccaattcattttctctgaggcaagttctaaatttctggaagctgttctaccattagacaatgaatatatgaacatgttcatgtcatcactagaatcgaatgttaccagaaatcttacggcatcttttgactgtgtcaagatcatgaccaacctcatgaacatagcatgcttgttggtagtacaatctaactatagtctcaacaaaaggagtgctgtagatgtattatccaacattatcaaggaatgtctgcacgatcatttgtacattacgagatcaaactttgcttctcatctgcaattttgttttgatggaagttcatgctgctatctctctgaagagtgggagggtgaaaatattgttttattttatggtctcgtagtattgtttaatctgctgaagagtgacaactttatttgtttccactgtaaaagaaagttagatgcggggattgtgtgccatgaatgcagagatcattacaacgaaggtttggttggagtccttaaacaagccttgtgtcagaacatgagcccagggcccaagtcttatattgcacatatactgagtatgtttggcctctgtggttttccaagcaagctaggaggaaatatgagaaatgttttgtgtgacagtgagttagttgatctggaactgttgcttgcagatggcgaatctctaagtgctcatgcggctatcctatcagcaagatgtcctaaattattaccatctgaaaaaacttttgtccgtgatgggtcagtaacttatgaatggggcagaaggtcatgctatcatgttcgaatgtctgatcgtgtagatagtcacgctctgaagaaaattttggagtatgcatacactgggttggtcactgtagatgatgccactgttaagcctgtaaaaacacttgcaaagtattgccatttgagatcgctgcacttgatgcttcagaaagagcaacctagatggcactcatgtcccatatatgatcttactacagcactcgaaccagctaaacattcgttctcggacatcattttggaggcccaatcaaatgacaaaatggagtgtcaccatggttcgtgccagttatcgactcctcatattcatagccataaggtcattctgagcgtgagctgcgaatacctccgtgctttgttccagtctgggatgcatgagagctttgcggagactatcagagttccggtcggatgggaagcactgagaaaactagttcagtggttctactcaggcgagctgcctagagttccacctgactgccgatggaaggctacgagtacagaagagaagctatctatcctgaaatcgtacgcggagctgtcgtccctggcggacttctggttcgtggacgggatgaaggaagagagccttcaagtgttgacctcgtgcctgaattcctccagcacggacgcctccctcgccttcatcggcttcgcggcgaacttgggccagtgggagctggtggaggccgccatcagcagcgtggcgcatctgtaccccaggctgcgagactccggtcggttggagcagctcgatgaggacgtgctcaacatgctgcggacagagcatgtcaggtatttgcagcaccgcagtgcaagtaaatgaatccttaatgtcatggagggttttttttccccgtccactggtggtcgcatagcggtcctgttgtcatgttgtggtggtgtatgcacagctgttgcgttaaaaaaaaactgtacagccacttccgttgaagcttatggcgtcatgaacggggctcatctccgttg

SEQ ID NO: 137588 - DNA, 662 bp, Zea Mays
ctcgcctcctccctctgccgctcgtcttcttctctccatttccctgtgcgtccgtcgtcctgcccactcccatggcgcgctcctgttcggtctgcgctcagcccagccgttcctccctgaagatttccctccatggcgcgtcgtgctcctctgttcgtccctgacctcccatggatgcacgccctggtccctcttctctcttccatggccggcttccacccctctgcttcctgcttggccgcttcattcctgcttccgtggcgtcgctctggccctctccatggcacgcgcgtctctagtcgcagtgagctcctctgccggcgcgggcccgtccctgagctcctgtgccgcggtacctctgttcgccgcgcattttctgcccagctcgctccagctctgttgtcgcgcaggtcaccgatgttgcccttcgtttgccgcgcgcagccggcttttctccttgggtttcgtgcgtgctcgcgtttaccgtcgagtcgtcgaacccgtcatcctctgctcaaaccccacctcaccagctcgcttccaacacgatctcgtcatcaagcttcgcctcagccctagctcgtcggtcacgctcgccagatgtacgatcgaggacttcagctgaaggccgtcgtcgttcaggcaactaccaaatcgagttg

SEQ ID NO: 137589 - DNA, 671 bp, Zea Mays
ggccttcatgggtacgacacatggacgagtgtgagctctctcgtctctcctatataaagggaggacgcgccttggcgcaaaagcaagccccgcgcgccaatggccaaccgagcagaagccgccgccgccgccgccgccgacgcgggtggtgaccgcgaggctctccagaacctcttccttgacgtcgcgcgcgtgctggtggtgttcggcgcgctcggcgccacctcggccggcgaacccgtgctggcgttcctcagcctcctgctctggctgctcggcgtgtggctcctcgcgctggtgctagtgctagcggcaggacgcttcccgcacttggcactggccgccaccgccatggccatcgccatcctgaagaacttgctcgccttgtggaactagcttcatcggtcgatcgatttgcagatggtgaggtatttactagagccttgagtatgatttaccaagtgaataaggagggattggactttcttgcttgctatatatcagagtatatatgatcatatatagctgtgagttgtgacctggctgttctcgctcgcgtggttcgttcagtttgatgtatttatgatatatttaatctgctacgtaaacatggtttcatttgctacacgtgatttatattcataattcgtatgatatggttgctttaaaaa

SEQ ID NO: 137590 - DNA, 2058 bp, Zea Mays
cgacgcggccgaggctcggcttgactggcgcttcgccagactgctgcagtcgaaccgtgacgcggtgagtccactacctcctcttctcgtcgtcgacgagccgaaccgcgtcgtggcgagcccatcgccgcttcctcccgtcgtctacgagccgtaccgcgacgaggccatggcaggagccgacgccagggcgcactacggcgggtacctgccctgtgagagaggaggcctcgccacggcgtggcaaccgggcgacctcttcggtagaggcgtctactccgacgagcagcgcttcgaggagcccatcagcgccgacaactgtggggccgatgcaaggcgagaagtcgcgctcgcggcgcgtgtgcttgccgccgacacgtgcgcagccgggatcctcgacggcgctgcgccctttgccgccaccagcgagaagcagatggcacctgtggcatcaccttcgccgttctcatttctgaccacaacatcagcggctcgagttgcagtcatggagaccaccaccagcaactcgccacccaagtgttcggcaaaatgcttgaacgtctcatcgacgcccaatctggcgttgggcgacccagaggagccggagaatatcgtcgcgtcgaagcccgtcgtggacaaaccggtgactagcgccaacaccaagacgttccagcacgagatcaaggacctggcagtcaacgtctatggcaagtggctgaggctcgggatctactctgaggtcaggttccagacctgcaccaaggcccattccgggtcccttagtcacgaggagcaggacgccaagaccttcgcggcatggggagtggattatctagcagacccggtgtcctactccgaggagtacgagctcttgttcggcatctaccactcgaccaacaccgaggacagaattcttaccaccatgccaacctcgacatccacgctgctccactcgtcattgacatatgcacttccaggtgcttcccttccaaaccttgccttgctgagctcgatgtctctggagcatgccagcttgggtgcacatcacgtgttggaggaattgtcaacacgcaccgatgacctcttcagcaatagaatcggctccaagcccacactcatggcctacggtagtgagcttcgtgtagtccgagctgacaagtcaagacgaagccctgttggtaagataagagagctcaatgaagacataattgttcccgaatattattacgctggtggagatgaactccaatcacttaatgcttggtttggtccagaggggaatattcagataatagttgaactccaatcacttaatctaaacagtagaccatccttgtcattggtggtttcgctggagactagtacgagtcctccaattctatggccaagccgtggaccgctcaacatgtttgctatggttctatgcacacttgaggaagctgatcaatcattcatattctacagtatcggcagcttgggagcaagtgtatgtgcagcaatagagatgaccatgggcagtcgatcaaaggatagcaccaaagaaatacagatgccatgggatcctgggttgcagaagaccaatgagttcggtgaccaaggcaatttctccatctttgtttgggatcctggtgatcacaatgttcagccgatcaaaggatagcacactggtattatttggataaattgcttgcactggcaatgagatctcgatggaattgatgccatgtatcggcttgggggcaagccgatttttaagaaggggagaatgttagggaatgtgagctcaaacggtccgtgccagcccaggttcaaaagagcaggacggtcaggagaatagacatgaaatattcagagtgttactgttatctttcttctccagttttctctcttctatgtttcctctaccttccctctagattcttctagacccttctagagtggcttcaacattgttcttctatccttaatcctcatgctgttcttccttcccagactataatcctctgtaatcgctattgtgagttgaattaatacacactggtagtgtgagttgttaac

SEQ ID NO: 137591 - DNA, 1278 bp, Zea Mays
acacatcagctgcactgccacgagcatggctgcagaacgagcgtgcggcgcgctgctgttggtggtggtggcgctgatgatgcggctagcggcaggcgccgagcacgaaaacaacgagcgggacgcgctgcgggcgttctgggccggcgtgtcgtcggacccgtcgggcgcgctccggtcgtggaacagcacggcgcatttctgccggtgggccggcgtgagctgcatccgcggacacgtcgtgtccctgcagctctcctacctcggcctcgtcgggaccatctctccggccatcggcaacctcacgtacctcgagctcctcgacctcaaccggaaccagccctccgggagcataccgtccagcatcggccggctgcggcgcctcacgtacctcggcctttgcgacaacggcggcgtcggcggggagataccggacagcctccgcaactgcaccggcctcaccgtcgtgtacctcaacaacaactccttcgtcggcggcatccctacctggcttgggacgtttcaaaacctcagctatctctatctcagccaaaactccttgtccggcgagatcccgccgtcgctcggcaacctcacaaagctccagatcctcacgctagaccagaaccttctggaaggaccgatcccagagggcctttcacgtctctcttccatgcaggtctttgacgtccaccagaacagcttgcgcggggagatcccgcctggtttcttcaacctgtcgtcgctgcagcaactgaacctcgccagcaacgcgttccacggccgcctcccactcccactcccacccgactcgggcgcgcgcatgtctaatcttcggtacctcctcctcggcggcaacaggctggccggtccgatccctgcggcgatcgctaacgcctccggtctagcgacgcttagcctggccaacaacagcttcagcgggcaggtgccgccggaggttggcaagctctgcccggtcacgatggagatatctggcaacgagctgacggcgaccagcgacgaaggctgggagttcctggtgttggatcttttatgggcttggcccatttattaaataaactctatggtgtgtaatggtggagaataccaatagtaccacattggaagtccaagggtcttttgccttgacttatatggtgggatttattccacttaacttgagaagtcaagaaatggacaagggcgtgccacacgcgcgcgcgcaccgccgccgctgccggccgggccgggcgtggcgtggcaggcaggcgtggttgt

SEQ ID NO: 137592 - DNA, 246 bp, Zea Mays
atggcggccagcagaaccagcgtggtcgttgtgctttgcttcgtcgttgtagcctctcttctcctgtcgtcctcgtcatttgctgcccgcactactactacaaccgatgaatggagaagggagacgacggcgaagcagcggcccgtggttgaggaacaggactactaccccgtcacagaggggtctcctaatattccgtcttactacgtacccccgcccccgccgccttcaccctatacgccatga

SEQ ID NO: 137593 - DNA, 3708 bp, Zea Mays
gtttgccgaaccttctttgccgagtgtaacactcggcaaagcctttgccgagtgtttttaaggcttcgccgagggcttccggcactcaaggaatcttttgctactgctgccaggaggacactcggcaaagatatcttcgttgccgagtgtcaccgttgacactcggcaaagccgccgtctccgtcaaccggcgtcgtaacggtcgcttttctttgccgagtgctccctgacactcggcaaagatatttgccgagtgcccgagaaaaagtactcggcaaagaagtctttgccgatgcactgtttgccgaaccttctttgccgagtgtaacactcggcaaagcctttgccgagtgtttttaaggcttcgccgagtgcttccggcactcggcgaagctattgattccggtagtgatgtggagaaaacaactacaaactagacacaagacatgtcatagacggagtggtaggggagggtacgcgcgagggtgaggtcgacggttcgaatactaacaaccgcgtagcgcgcgaattttgcgcgaaaaatgcgcgacttgcgggtggggtgggcctaataaaaataaattttttaactatttttaaaatatgttttatgtttcctagaaacgatttgcactggcggtcctcagttacccgcctgtaaaaatgatgatttctactggcccctagcactggcggttacgaaaaacgccactataaataggtttacaaccgccactatagaacttctctgtactagtgacgacggccttcatctttaaggtgtggaacatgaagcatgtggcagatgtgagggcggtgaacgcaaagaacgctgagagcttaagagtcagattcagcttggcagttggtccatgcaggaagagtatgtcggtaattaagcgggagcatggagagtgtgatgaggagcgcggacgacgactgagttgaggtcagaattcagttctctctctttggtaacggtggtaccgtggtagtagtagtagtgctagcgctgtttgttactcacgccattctgtacctggcattaaattaatggcatgaaatattattagcggcaagttacttaatcaattaaactcagctcatatgtgattatcattaagtacacagcttatagtactagctagttcatatatttaattgtgatgatatttcatgacggccggccagtgtaggagggatctcagttgggtaacatctatcctacacggaacaacatatttgtctcatatagagttagaatttagagcttttcagtgtatctatatataaagagtcgccgcagaactatcatgcacaaggaattatttttcacataaaatatatagcttctagtcaaaaacaaacaaacaaacaaacactaaaagaaacatatataggtgacataacacaggaatttaaaactgaatatgtatgtatgcatgcatgaataatacgtagatgaatcagcatagaaagcaaagaggccgtgacatataaattgtgattaaacaccacaaataatttgccatgttcagttaacgatccaaatttatatatctttgcagggtggtgttgggtgtatatgacgagctgacgtgtctcggagaaaggggtgtcaagtacgtcaaccaaacaacaaagaaaaaatcggtgcaaattaaaatggcacagtatgaaacaaaagactgggggagagggggaaggcggatttcgtactggatcagcaggggggctgtgaggactggatctgcatgatgcgtgatgacgacgcagcgctgcttctcttcatttccaatgtccgctgaacgatctagaggaggaaggcgagcgagaaaggaccgtggtgcttccttctccgccatgtccctccttctccttcccttcttctgcgcaaggatgaaaaacaattaccatgcaagaaggaagcatatgcaagaatgggtgtggtctagtcatcggattgactacccttagaaagagtgtgggcaggggcggatctacgaccggggctgcctgggctgcagccccggtcgcggcccagtacaagtgaataggcccagtacaagtagtgtctccgcctccagcttccagccgccagccgcgtaactgcgtcggcgcgtcgcgtaatcgcatccagccgccagcccgccagcggagcaactcagcagcgtcgaagtggagacgaaaacaggaactaccgaagtggaaacgagcaggaagcgtcgaagctgagcagcacggagacaagcggaacagcgctgcgtccagtggcagatctgaattttgcttcatcctggtctccaggaagccaagcaccagccaccaggccagggttttggatctggccgaccgacagactcaagttgttcctgttcgttctataaaggtaggaatatgttatatttcactcgagattggtcactgtaataatacaattcactagctaaaaatatgtttgtagatatttaaaatgaaaatattttgaagcatttttaaggcttaagaactcggaaaataaatttatcttgcagcatcaactcatgaacaatatgtattgattattgtatttctagaattcgtatcgacttatttttaggctacatatttcttaaatgtttaaattatatcttgtttctggtgtcatattaaatatcaattatattttttgtttgatttaaaaaattttatagacttagcttattagtccctctcttggatcaatcctggatccgccactgagtgtgggttatcatctttttgttgtttttaagctgtatgttgtttaagcagaggctagctagaagacgtttcaagggtgtgtatcacctccatgtaatgcacttgaaagttgaaactatctatgaatataatcttccttcatacaaaaaaagaatgaatgaatgaagaacgctatcctttaacttgaagcgcctacaaaattaagaacgagttggcgaacttcgaagcctagctagatcgactacgattcgtcttgagtcggacggagtcggtagtagaatcaacttgaaactcccggatcggttgcgcccgttctcggactcgtctccgtattcgcgccatgcatcgcacgctccccccgctactacaccctccctccgggctccggccgtccctgccggcgtcatctcagacgccgccggccggcccgctgtgcccggtcacacacacgctagctagctcccctaaggcctcaacaaaataagggcttggtggtctggaagacatgaaatcacccaccaccggctaccgaaagctttcgactttccacctttaatttcagtcgcctgaaagcacgaagaatagagaggtgaggaggtaaggaactcacacagtagcagcctagcaggtagccaattgcagatcgaggaaggacctagcgagatgggcaacggcggcagagccgcatgcagcttccactctccgctagcttccactctcctcccccagccagccctccgctaccttttacctccgttatgaaacaggtctaccttatattatcttagtaattcagatctctgtcagctcaggacaaattcagatctgatcaaaaattaatggaggaaatgagttcatcatgcatgcatggaaggtcatatgaaaggaaacattatattcaaaggggatattggaattacaatcgaccctaaggagaactttaattatttagttaccactacatct

SEQ ID NO: 137594 - DNA, 406 bp, Zea Mays
ctaccgaagtggaaacgagcaggaagcgtcgaagctgagcagcacggagacaagcggaacagcgctgcgtccagtggcagatctgaattttgcttcatcctggtctccaggaagccaagcaccagccaccaggccagggttttggatctggccgaccgacagactcaagttgttcctgttcgttctataaaggtaggaatatgttatatttcactcgagattggtcactgtaataatacaattcactagctaaaaatatgtttgtagatatttaaaatgaaaatattttgaagcatttttaaggcttaagaactcggaaaataaatttatcttgcagcatcaactcatgaacaatatgtattgattattgtatttctagaattcgtatcgacttatttttaggcta

SEQ ID NO: 137595 - DNA, 1307 bp, Zea Mays
ttgatttatcaaataaattgtaaaatggctccagctactttatggaagccaaaggagcttgagctgaaactattttcagattaatctgagctctgccaaaggaggtctaaataacgaaatggtacagagtactccattcttgttgctccagctcatgccacgatctgatagaagagagtgtcagcgtccaatcctcggcccagcccacactcaacagcttcgagcgttcatgcgctcgtgggctggcccagccagaaagctcatcactcacatctcaaaagccaggctgatgagaggaggggactcttctttttaagctgtccacaacccctttggctagctgatgtgagactaaaaccgaggcactgactaccggcccctgacatcccatctccttgggaagccccccaaggcaggcatgggccaaccgggctctgataccagatgtcagtgtccaacccccggcacagcccacactcgatagcttcggtcgttcatgcctgccttgggacactcgcatgaacgctcgaagggggtctgctaatctgctatggcgtacattgtgccaagcgtgaccttgccttcctcctccgtgcgcccgccgcgagcgtcaggcacggagcagaattcgacgagctagcacccacgcggcaacgccggcgcgatgaccgggaacatggcgccgacgacgtacgaggaggccgtgcaagatagtttcagcgagcacgagggcagccgacacaatgcacggcagccatgacgatgtttgctgcagcgagtactgccctctggcctctctgccatgtcgttcccagcttcttgtcattgctggacaacagcctgcacagaagcaatgcaaacattccggtgacgcttcctccgagcatgagccaagaggcacaccgtgactttgacgtgcggaagtgctgcgccgaggctatctgccttgtggtagatagcaagcagaacgccgccgaaccccgagaacgacgtagagaccagcgacaaggtgagttgggctgcacacttcagttccttcttccgaactttgctctgctctggatcactgatctccccgttaattacctgcaaattaaaaccagtgtcgtcctcgcgataatagaggaagtggaagccgccaaaaaggagtgatgggatcaatgcaagatcgaggcaggaagtagtaggctgtgggcaggagggaataggtgatcgatatgcttgtcgagaagagcgaaaccacggcaatgccgaatgaagaggatcttagaaaccctgagcctgactcctggtgatgaacagttccg

SEQ ID NO: 137596 - DNA, 332 bp, Zea Mays
gttgcttccatgcattgttggtgcaggagtatagagatggctttctagcaggagagaacggcccctccttttctctaacaccattgcagaggcagtacctggccggatggaatgctgaaagcctgaaaccactgagtaattgactagtctgatagtctccgatcctgagtagctagggatgcaggttttagttactttgggtcattgggacgacccaagaacttctcaaatgaactataaggatttgtaggtgtggagccataacccatgcaagtttataggctactatgagaagatgtaccggagtgtacggtaacatgctacgctagaac

SEQ ID NO: 137597 - DNA, 2187 bp, Zea Mays
gtcctcctcttcgccggtttccacacgttcgccggccgccgccctccccgctccctctcccgtccgcttggttgtttacgcctgcacccaggctagggcaggacatccaacgcgccaccttgtacggctgctgcctgggcctggtttgagtctttgacgaaaccgcagaagcatccggcgcccgcgctagcctcctcctcccccaagcgttgtttcgccgccgttcgatagctgagggcagaggcgggcaagtataggagatgtcggtgctcatcgtcaccagcgtgggcgacatcgaggtggatctccacaccgaccggtgcgcgctcaccaccaagaacttcctcaagctctgcaaaatgaagtactacaatgggtgtctgttccacaaggtggagaaggatttcttggcacaaactggcgatccaactggaactggcaccggtggtgattccgtatacaaatttctctatggtgatcaagctcgattttttgatgatgaaatccgtccagagttgaggcattctaaaactggaaccgttgctatggccagtgctggtgaaaactgcaatgcctcgcagttctacattaccttgcgggatgacgtggattaccttgatgataaacacactgtgtttgggatggttgccgaaggttttgatacgctgacaaaaataaatgaagcttatgttgatgataatggaagaccattcaaggacataagaattaagcatacatatgtcttggatgatcctttcgatgatcctcctcaacttgctgaacttattcctgagaattctcctacaggaaagccacgtgatgaggttgcagaagagcgcttagaggatacttgggttcctttggaccaaacagttgctcctgaagaacttgaggaaatgatccgctctaaagaggcacacacaaatgcagtaatacttgagagtctggcagatattccagatgctgaggttaaaccgccagataatgtcttatttgtttgtaagctcaacccagtaacacaggatgaagatttatacacaatcttttctcgttttggaactgtgacatcagctgaaataattcgtgactacaagactggagatagtttatgctatgcttttattgaattcgatacaaaggaggcttgtgagcgtgcatatttcaagatggacaattgtctgattgacgatagaaggatccatgttgattttagtcagagtgtttcgaagctgtggggtcaattcagacaaagcaaaagaaatgcaaagaaagatgggtgttttaagtgtggcgcccctgatcacctagccagagactgcgatcaagacggtgagcagaaaaacaaaggcccaagttatgttctaaaagatgaaaatacacaacgtggtggaaatcaccgtagaagctatgatctagtatttgacgaagacgaagctgattgttctgaagagagagatcatgaaaatggccacagaagaaagaatcgaagaatagatgatcgaaaatcagagctaccacctcgtggtggtcgtgatagaaatagccatgagagaacacacagtgatgagaaaggaagcaagcatgggaaagatgataggaaccgaggggatcggaaacatgatgactaccacagttacagtagatccggtgacagaagctctggtagaaacgatgatcgtgattatagcaagcgccacgacagaagcagaagtggggaggaagagaagggctacagacgaagggataagtctgatggtgagcggcaccatagagacgatggctacgatcgccgcaggagagatgaagacagccacaggaaaaggagcccagatagtaaacatagaagagaagacggagggcaccatgtgagaaaccagcagtctgatgataggtcctacaaggagagaaggcacagagatggtagataagaaagtttctgcacgactcggttttcttgcctgctttccactgatgtctctataagctggtattcttagctcaacttttttttttgtaagtcaatgtaactgcctggaatatgttgaattgttgtagtgtccagatctgaatctttttttgtgtgtttacagtttttgctggataatttattgcaatcaaaaaattgctgacttagactgtttgcgcttattctattgtaaggattggcatgggcccataaataattct

SEQ ID NO: 137598 - DNA, 1164 bp, Zea Mays
atgaccatttcgagcgagcgtgcaagagcaagactcttcggagttactgttggctgccgagattgcgaagaagcaggtgctttggtcgtgaacggtggcgccgccgagcagcggaaagcaccggcaccgaaacgccatctgcgcgctgtagctgtacagcagcgatcaccggccctgccgccgggcaatgcacgcgaccaacccgacggcctcgccgcgcaggctgctggctgccaagctgccatccgccgaccgccgcccatccctccaggctccagcgatggcataggctgtcaggcatcaccgcgtcagctactcaggtcaggcaggggcgctaggttgtcatccctccaggaaccgatcagccgagtagttgctgcctcgctggtcaggttgctgtctggctatttacttttattgatggaatcggctgtggaaggaaaggggaggactgcaagtgatggaactgattcagaaagtaattcgtttgacaagagggatgatatgtctgaagatgaactggtagtgcttggtggaaaaattgatgattcagtggacaatgtcaatattgatgaatctgaggacaacagaagtaaacaaggggtcaagagaaggcgcaaaagggtgaagatgaaggctacaactgaaactgaaaggagcaaaaaggcaaaatctaaagtttgggatgcctttactaaggtgactgtgccggatacgacagagaaggggaagatgatatcaaaggcaaaatgtaactattgtaagaagctatattcttacatacaaggatcaacaacatctcatttgtcaaggcacatgagaatttgtgccgtgtatttgaagcatgtggcaaagcagcaggatcaatctcttctaaattttgctccatcaacagcagatgttcgtagtgagttagaaaaactttatggggattttgaggtgcagcatagagagagaaaagagtctcaaagcaaatctaatgcttcctcatctttgagtgttgaaagatcatgtagtttgccatccgcttcatgtcaatttccgtctttcttgtcatcaactcagtctaacccatcaaagagcgagttgcttatctatttggaggagactaatgaagaagatgatgaggacaatgttgtgaacataatgttcccaaaagcttga

SEQ ID NO: 137599 - DNA, 1034 bp, Zea Mays
actcccccagcccacaggacaactacaaacgcaaacgcactgtgtgctgctgcctgctgctccgtgctgtgccgtggtgtcctcctctcacctgctccaaccaagcaccgccgtcccagcgtccctcaccggccatccagccagccgccgcacggcccgtcgaccccaccgcagggctccctcccgcgctgtcctctccagtctccagcgatgaagcgcctgctgcggcgcctctcccgcgtggccgcggccgacgcctgcgcctgcgccgccgccgcggcgtaccagccgctccggccgggcgccaaggcggccgcgctctccggcgcgcggcggctgggcggcggcgcgcgcgcgccgggtggccacgtgcccgtctgcgtcggcgaggagggcgggcccctggagcggtacgccgtgcgcgccgagctcctcgcccgccccgccttcgccgcgctgctccgccgcgccgcgcaggagtacggctacgcccgccccggcgcgctccgcatcccctgccccgtcgccgacttccgcgacctcctcgtccagctctcctccacctccgcggaccagcccgacgacgacgcggcgctctgctgccactactgctaggcgattctctggcgccaccgctctcattccacccatccaatccggcggaaaggacaaaaaaaaaagaaagaaagaaagaaacattcgccgcagttgccgcggagggcgtaattgcgatttgcccttgccccctcggtgactgcagcgccaagtgctgctttgcttgtacatacgggagggttagttaagttaactgtgccgtggatccttggatggatgtgggcacggcagggattttctcctgcagctcaacaacagttttttgcgcctgctgtctgtctgataggacttttttttttgctcctcccgtgtttttgagtcttcgtctcgatctagctatggcagtcttgctcttgctcaagctccagctccagtggttgttgtaatggagtagtagtgactgaacacttcgttcgcct

SEQ ID NO: 137600 - DNA, 678 bp, Zea Mays
ttggttcctggtcaggcgttgagaagggtgaacataaaaacccttccaactgctacaattttttgggaaagcctgcatgattaatcgtactaccttagctgctaaagtttagctactgatataacccacccaaatgttcatagattagcacctggtgtggcaattgatttacattaatcttactactatacaccaccccgccaatgtcttgtgcgcatctgagcaagtttagctttcaacttcatttgcagcaggaatcggtgaaatcctggggtttcaaatccagttcaatgaggtactgcctgagctccagcaggccatccccagaaacaatcgtgaaatctcactttcgttgaatgatacagatacatcaaatcagcaggaacatgtctttcttatgcagtcacagaccactattctcaccgtcttcagcagcatgttgaaatggcatcttatatgcctctttgcgtgactgttttgccgcttttgcactgggtgctgtagtggccttaccagcatccttgaattcaccagtaaccctgtaggaaaacaaaggttaaatttgatgattcaccaagactgggtaaagaaatgttggtaaatatagaatcaaagccaatgacaaaaacttcaatatagagcataaaaaacacaccggtcatatgtcaggaaagcatc

SEQ ID NO: 137601 - DNA, 82 bp, Zea Mays
gttatgttaacccatataattccattaatcaaatatgcacaaagaagagaaaaccaattaactcccaagggttccataatcc

SEQ ID NO: 137602 - DNA, 2103 bp, Zea Mays
tctctctctctctctccacacttcaccccagttcgccgtctacgcgctccgtctcccccaaaccccacctcctcgccggaaccctagcccccgccgacgcggcgccatgagggagatcctccacattcagggcggacagtgcggtaaccagatcggtgcgaagttctgggaggtgatctgcgacgagcacggcatcgaccacaccggcaagtatgccggcgactccgacctccagctcgagcgcatcaacgtctactacaacgaggccagcggcggccgcttcgtcccgcgcgccgtcctcatggaccttgagcccggcaccatggactccgtgcgctcggggcccttcggccagatcttccgccccgacaacttcgtcttcggccagtccggcgccggcaacaactgggccaagggccactacaccgagggcgccgagctaatcgactccgtgctggacgtcgtgcgcaaggaggccgagaattgcgactgcctccaaggtatgtcttgtctgtctatctatcccaccggatctgatgttttcccacaatttcccctccggggttatggcgacacccgcccttttggatctagggattatgcgccattgccattgttctgagcttgtagatctgaacagtctcgcctagatctaagttgttcatcattttgccgtatgattcctgtacctctcagtgattgtcgagttagacgcctgaccgtcatagtgatggattactatgcatctcctctcttaccgcagggttccaggtctgccactcgctgggaggaggtactggttcaggaatgggcaccctgctcatctctaagatcagggaggagtacccggatcggatgatgttaacattctctgttttcccgtcgcccaaggtgtctgatactgtagtggagccctacaacgcaacgctctctgttcaccagctcgttgagaacgcagacgagtgcatggtgctcgacaacgaggctctctatgacatctgcttccgcacgctcaagctttccacaccaacctttggtgatctcaaccacctcatctctgcaacaatgagtggtgttacatgctgccttcgtttccctggtcagctgaattctgaccttcggaaacttgcagtgaacctgatccccttcccgcgcctgcacttttttatggttggattcgctccactgacctcacggggctcccagcagtaccgtgccctcactgtgccagagctgacccagcagatgtgggactccaagaacatgatgtgtgctgctgaccctcgccacggtcgctacctcacggcatctgctatgttccgtgggaagatgagcaccaaggaagtggatgagcaaatgctgaacgtgcagaacaagaactcttcctactttgtggagtggatccctaacaatgtgaagtcgagtgtgtgcgacatcccacccatcggcctgaagatgtcctccacattcatcggcaactcgacctccatccaggagatgttccgccgcgtcagcgagcagttcactgccatgttcaggaggaaggccttcttgcattggtacacgggtgagggcatggatgagatggagttcactgaggcagagagtaacatgaatgacctggtggccgagtaccagcagtaccaagacgccacagctgaggatgaggagtacgaggaggaagaagaggaagatcctgctgcctaagccatcatcccaagtgcttggtaaagatatgatgtcccttgtatcgctgctagtcagcactgagtcgtttgaggtgctcgtggtgatgttaggtactagatgggtgtcattacttatgaatgcgatgttgctgtgacagaactgcatttccttttgtactatggttgtccaagttgtcattaccatgatgtgaggtagcttaactggttgttgctataccttatgcagcattttgctgaagttatcaccatgaggtgaggtagtttgagtgatttatgtggtattagagaattcaactgtgtcaagttcgtgcaacgtcagtttgttcagagttttatttttttattggcgtgttatcttggtatgttttgatcttcttcgattgcttttatgtat

SEQ ID NO: 137603 - DNA, 1828 bp, Zea Mays
aataaatgctctctctctctctctctctctctccacacttcaccccagttcgccgtctacgcgctccgtctcccccaaaccccacctcctcgccggaaccctagcccccgccgacgcggcgccatgagggagatcctccacattcagggcggacagtgcggtaaccagatcggtgcgaagttctgggaggtgatctgcgacgagcacggcatcgaccacaccggcaagtatgccggcgactccgacctccagctcgagcgcatcaacgtctactacaacgaggccagcggcggccgcttcgtcccgcgcgccgtcctcatggaccttgagcccggcaccatggactccgtgcgctcggggcccttcggccagatcttccgccccgacaacttcgtcttcggccagtccggcgccggcaacaactgggccaagggccactacaccgagggcgccgagctaatcgactccgtgctggacgtcgtgcgcaaggaggccgagaattgcgactgcctccaagggttccaggtctgccactcgctgggaggaggtactggttcaggaatgggcaccctgctcatctctaagatcagggaggagtacccggatcggatgatgttaacattctctgttttcccgtcgcccaaggtgtctgatactgtagtggagccctacaacgcaacgctctctgttcaccagctcgttgagaacgcagacgagtgcatggtgctcgacaacgaggctctctatgacatctgcttccgcacgctcaagctttccacaccaacctttggtgatctcaaccacctcatctctgcaacaatgagtggtgttacatgctgccttcgtttccctggtcagctgaattctgaccttcggaaacttgcagtgaacctgatccccttcccgcgcctgcacttttttatggttggattcgctccactgacctcacggggctcccagcagtaccgtgccctcactgtgccagagctgacccagcagatgtgggactccaagaacatgatgtgtgctgctgaccctcgccacggtcgctacctcacggcatctgctatgttccgtgggaagatgagcaccaaggaagtggatgagcaaatgctgaacgtgcagaacaagaactcttcctactttgtggagtggatccctaacaatgtgaagtcgagtgtgtgcgacatcccacccatcggcctgaagatgtcctccacattcatcggcaactcgacctccatccaggagatgttccgccgcgtcagcgagcagttcactgccatgttcaggaggaaggccttcttgcattggtacacgggtgagggcatggatgagatggagttcactgaggcagagagtaacatgaatgacctggtggccgagtaccagcagtaccaagacgccacagctgaggatgaggagtacgaggaggaagaagaggaagatcctgctgcctaagccatcatcccaagtgcttggtaaagatatgatgtcccttgtatcgctgctagtcagcactgagtcgtttgaggtgctcgtggtgatgttaggtactagatgggtgtcattacttatgaatgcgatgttgctgtgacagaactgcatttccttttgtactatggttgtccaagttgtcattaccatgatgtgaggtagcttaactggttgttgctataccttatgcagcattttgctgaagttatcaccatgaggtgaggtagtttgagtgatttatgtggtattagagaattcaactgtgtcaagttcgtgcaacgtcagtttgttcagagttttatttttttattggcgtgttatcttggtatgt

SEQ ID NO: 137604 - DNA, 1527 bp, Zea Mays
tctctctctctctctctccacacttcaccccagttcgccgtctacgcgctccgtctcccccaaaccccacctcctcgccggaaccctagcccccgccgacgcggcgccatgagggagatcctccacattcagggcggacagtgcggtaaccagatcggtgcgaagttctgggaggtgatctgcgacgagcacggcatcgaccacaccggcaagtatgccggcgactccgacctccagctcgagcgcatcaacgtctactacaacgaggccagcggcggccgcttcgtcccgcgcgccgtcctcatggaccttgagcccggcaccatggactccgtgcgctcggggcccttcggccagatcttccgccccgacaacttcgtcttcggccagtccggcgccggcaacaactgggccaagggccactacaccgagggcgccgagctaatcgactccgtgctggacgtcgtgcgcaaggaggccgagaattgcgactgcctccaagggttccaggtctgccactcgctgggaggaggtactggttcaggaatgggcaccctgctcatctctaagatcagggaggagtacccggatcggatgatgttaacattctctgttttcccgtcgcccaaggtgtctgatactgtagtggagccctacaacgcaacgctctctgttcaccagctcgttgagaacgcagacgagtgcatggtgctcgacaacgaggctctctatgacatctgcttccgcacgctcaagctttccacaccaacctttggtgatctcaaccacctcatctctgcaacaatgagtggtgttacatgctgccttcgtttccctggtcagctgaattctgaccttcggaaacttgcagtgaacctgatccccttcccgcgcctgcacttttttatggttggattcgctccactgacctcacggggctcccagcagtaccgtgccctcactgtgccagagctgacccagcagatgtgggactccaagaacatgatgtgtgctgctgaccctcgccacggtcgctacctcacggcatctgctatgttccgtgggaagatgagcaccaaggaagtggatgagcaaatgctgaacgtgcagaacaagaactcttcctactttgtggagtggatccctaacaatgtgaagtcgagtgtgtgcgacatcccacccatcggcctgaagatgtcctccacattcatcggcaactcgacctccatccaggagatgttccgccgcgtcagcgagcagttcactgccatgttcaggaggaaggccttcttgcattggtacacgggtgagggcatggatgagatggagttcactgaggcagagagtaacatgaatgacctggtggccgagtaccagcagtaccaagacgccacagctgaggatgaggagtacgaggaggaagaagaggaagatcctgctgcctaagccatcatcccaagtgcttgcactgagtcgtttgaggtgctcgtggtgatgttaggtactagatgggtgtcattacttatg

SEQ ID NO: 137605 - DNA, 514 bp, Zea Mays
aaaaaaatctatcgtcgttttctttctcagatatcctcccaccgctcactgcctttgctctatcccggccaccgccgctcaagcacctggatgaggatcgatgccgtcgccaggatttttcctcgtcgtgctcttctgctgaaatcggtgcccagccactcctcctctacagccgttgccatctccctcttgtagctcgtcttctccctctactctccgctcaagcttgccgaccgtccgtcttcctccctggccggcgtactgcctccggctcgccgctgcgcgcgcccatctccctccgcgccgcacatccgggtgtctgctcgccccctgtgccgcgtcgtggtctccctccctgcgcacagccaccaccggccgagctcgccccggccccttcgctcctcccatggcgagctcgccgggatgcccctgtcccagttcgctgcgccctgctcggtcccgggcttatctgctgctcggccgcgtccctcccttgttcctccagccgagctgc

SEQ ID NO: 137606 - DNA, 862 bp, Zea Mays
gagccacgcccagggcaagtcttcttctccagactccaaccgtccgagttcccttgcccacgtcgccccaaaacaggaattggcactcccgttgcctcgtccctcgcgtccagctccgccagaaccacccacaaccgcgcctcgcccgttctcgcccagctccggccgcccgcgctgcgcatcaacatgcagggagccgtgccacgctgctcctcgtcgtgccgcgctgcatcctcgtggctgccttggctgggcgagcatgcccctgcagccccatccccgcgctcctcctcagtgcgcagcgcggcacccccggccgtgtcctggcctcccttgccgagttgtgttgccgctgtagccttttcatcttctccctgcaagcctgagcgcgccactgcgctggccgacgattcgcccaacatcggcccctccccaggcgcagtctcctgcaccggtgagcaccctagcgaccacgtctcgtctcgctcctccctgctccctgcaacgcagaccgcgtggagcactggagcccccagcccccacgcgtgcgtgtattcttgcccagccagccatctctccaagcaccgtgaacagaggagagagagaaaaacaaccgctcatgtgaggtgttgaggaagatggaaccaagtgtctcattggtctgcaagaccttctgtggccatgtactctatagtcctctgcgtggccccgacgcaacagcaatcttgccgttctcatgcctcgccgttgactagtctggtcgtccgctgtcgttgcgaggtgagcatcgtctacacattggtaactttgtttcactatgtcacgcattttaaataattaattatatttttgtttaactaac

SEQ ID NO: 137607 - DNA, 512 bp, Zea Mays
aaaaaaatctatcgtcgttttctttctcagatatcctcccaccgctcactgcctttgctctatcccggccaccgccgctcaagcacctggatgaggatcgatgccgtcgccaggatttttcctcgtcgtgctcttctgctgaaatcggtgcccagccactcctctacagccgttgccatctccctcttgtagctcgtcttctccctctactctccgctcaagcttgccgaccgcccgtcttcctccctggccggcgtactgcctccggctcgccgctgcgcgcgcccatctccctccgcgccgcgcatctgggtgtctgctcgccccctgtgccgcgccgtggtctccctccctgcgcacagccaccaccggccgagctcgccccggccccttcgctcctcccatggcgagctcgccggggatgcccctgtcccagttcgctgcgccctgctcggtcccgggcttatctgctgctcggccgcgtccctcccttgttcctccagccgagctgc

SEQ ID NO: 137608 - DNA, 822 bp, Zea Mays
atggagcaagaaattttgaagttcattcatgaccctagtcgtacagagtatgaattcaatggccttccaacttcgtatctgcgtcttgctgcacatcgcctggcacagcattacttcctgcagtccattgccataccagacaacagtttgcctgatggaactggttcacatatcatccttcgtaagacaacattcgactgccgactgcctgctgtccgccttgcagatattccagttaatctgccacaagaagacatctctgtggcgaaagtttatattatcaacacaccagcacattccatacagagagaacaagaacttgactggaacagcaagatatgcaagtgtaaatacccaccttggaattgccttccatggcagggcctgaaagctggaaacaaaaaacaaaagtatgaaaagatcaacgaaaggaaaattgcatttaatacacccaatatttgggaaggttttcagtttgattatgtttttaactggaccattctaaagtaccaacaggcacagatgaccactgctccacctcgtgcaattgctccagcagtaggacaaagctctgggatggctcctgtgctccaaggacgagaagctactcgtgtacgattactacagtcagggaagcgtgtccaacatgctccatgccttcccatggcagggcctgaaagctggaaacaaaaaacaaaagctccagcagtaggacaaagctctgggatggctcctgtgctccaaggacgagaagctactcgtgtacgattactacagtcagggaagcgtgtccaacatgctccatggtatgatccgcgctga

SEQ ID NO: 137609 - DNA, 1674 bp, Zea Mays
tattctttgcaggtgctgttaattgttcgttttctccagcatgagcatcatcttggtcgacctattaataaaaatctgggcagccttttgatggatttcttgtacttctttgggaacatatttgatccacgccatatgcgcatttctatccaaggaagtggaatttatttgaatcgagaaagagggcaaagcattgacccgattcacatagatgatccacattgccctgctaacaatgtgggcaggaattgtttccgcattcaccaatgtattaaggcatttgctgatgcgtttgctgttcttgagaatgagctactgcagttcagttcagaatgtagcatgcctgtatcttcattcaatatactaaagaaaataatcccaagtattgattctgatgagctgtagctataaaaaagaggtacgattccacagaatacaattgatgacagggtggaatgacctgtgctgccttctagacacactgatgtctatgcagctgctcagaagcctcagtgtggcaagtttgatacctctggaatagaccaaaaaatagaccggcaagatggcaatattcaaacgtgagctcttgtgtgttcatgcaatggcacatgatgccttgctccctgatcgagcttcttgatgttcagatctctgactgaggtaaattggcttactcaagaacaaggtggtgaattggctttctcatgaacaaggcgttgctgcacacagactactgacgtggctgttcttgcacctttctgaataagcccattcatgtaatgtttggtaaatgcaaaccgcatgattatccgcttgatactgtgattgatagatgcttcacctcgtgccaatattctgtgttccaatgccaagtcacatattctgagcagcaactggagatttgctcatgtaccgattcttcaaggtcctaggatcatttggggtgatgaagattgtgaaatacatgtggaggggtacttatatggagatgcatggtcttagtaattaagcggtcaagaacttatggtcacctgatgaaaacaaggatggttgtgaagagaacggagtagtggcatcagctatcagggaaagggaagtgctattgacatcatggctgacccctttcagattatcgcgctgagatcttcctggcgaggattgggagctacgagccagatatccttgacggaaatgtttgcttggacagcgtaaaccggaaagtaccggcgatgatattgatgatgataatcgcactgctctctattgtcatactgttgtctgcactcttcagcgacatgtcttgtgccttttcaacgtgcgaaatgtgagcaattgctcttgtaaagctgcactatttcactaaaacattattgtttgggttatttagatccatggtattactatttatctatttggaaacttacattacaattttccctggatgtacccgatccatgccatttcctacgcttctccactcggcagattgttgaatcgtatcccaaaatctctcccattgtcgtctccatgaattgctcatctcacctctctaccatggagggtttagggtttatatctttctatcaggttaaactggttggtgtatataacttaatatggtattagatgtctcgaatttaaatcctagttagtataattaaataaaaataaata

SEQ ID NO: 137610 - DNA, 102 bp, Zea Mays
tgaaatacatgtggaggggtacttatatgatgaaaacaaggatggttgtgaagagaacggagtagtggcatcagctatcagggaaagggaagtgctattgac

SEQ ID NO: 137611 - DNA, 4347 bp, Zea Mays
agcatggcctccaccgccgccgcgccgcgcaccacgaaggagctcatggacgccctcaccgcgcacctctctctctaccacgccgccgcgaaccctagccccgccaccgctgctgcctctacctcctcctcgtcaccgcgcgctgcgatcctccggtggctcgcctccctctcccccgccgcgcgcgctgcggctgccacctccctcctctcccccgccgcggctgccgcgctgctctccatggtccgccggctccgcctccgcggccactcctccttcttcgtgctccactcctcgtccccgtccacctccgcgcgcggagccgaggagccaaccgtcctctcgcgcctctcccggggcctcctcgcccgcgccgccgccagctcccgggcgcaggcgctcctcttcgccaacaccctcctcttcccctcgtcgcccgcatcgtcgcggcgccccgacgtgatcaccgtcgccgaagccttcgtcgctgacctcgacggctttgtcgcagccatggatgagatctctggcgggaggttcctctgctgcggggagggggaagtggacctggccgcgctggcgtgtcaagatttcccggagctgccctggcttaatgccaaggggtactacgtgatcgaggagtttctggccaataggttggatatcgcactgcgaatgtcgtgggcagcggcagggggtgggtcagctggagggagaaaggcggtgagaattgggaagagtgcgaaggagaaggctgggcttgctgcaaacgcgttctggagggagaagggcattctgtcttgcagcaagaagtctgtattttataaagagttgaaaagactgaaactagttgaggagatagtctgtttgaagagcaacattacttgctgcagcggtgatgcaatctttttcacttcattagtgtcggctgctactgctgctggtgatgtacttatgaaattacaagggcttctcatggtggtgtcgacagaaagtataaatcttgaacttattggggatgaagcccccaaaaagaaagatgttgaaaagaccagtggaggttctcggaaaggaaagaagaagtctaacaccttgaaaaagctaacgacatctgctaagccatctaaggataatggatgcagtagttcagataatcgcaattgtagtcctttaccaaaccattgtgctccatctgttgaaggcactgctgctggacctccatctgaaaaaactccttacaaggaaattgtaccaacaacgaaggttgaacaaactgtctcgttggatggttgcaaaaatcaatgtaacaaaaagaagaacaagcggaaagggaaaacaaaactatcaaatccgatgaggcctgagagcccaagatctaccaaattaaaaacagttgttccccatagtgctgcagaggccttgcatgaagctgctaaagaggctgatgtctcacctcatcacccatcgtatgtccatccttccaagaacgagatctctgaagctgttagctgttctgacccttccattttatctaatggaacaaaggtaatatccaccagtaagggcacaaaacttgaagacacattgtattctcctagagttcactcatcacttgctacagaacgttttcagagtgcccatgatgatgccttcaaagtggctgtgcaggcctcatcgtaccttagccaaagtgaatccttggttcagtcatcctcttgtctaccttccagaagcaatgaggtctcttctactaatctgtatggaagttcagttgactccttggtaagatctgcacaggaaaaaactgaatgtgatgggaaacatgtggatcataaatctgaagtgacaaaggacagaattttaccttctgctattcctactgacatgcttcaaagtgctataagtaaaaatggtggagttatgaaaaatggtggtggtgaatgttatgtatacaataggaacctactgggaggaacgtcgtatgaatggcctagtgtaacaccatctcattttgtatctcctcaaatgcaacaacgtccagctgcagcagacaggttgcatcttgatgttggttacagatggccaactcaatttaaccaaccctttcttcctgccaaccatcaggtgaggaatccgccaattgatgctggacacaatcaaatgttaccttctctagcagttccactaagttttgactggcctccagtttttagaggttatggtaaaaatgcttctgtaagctatgatccattgtataccccacagatgcaatcttctgcttggtcagggttccctgctcaactagtgcaaagagggggtatttgcagtgacagtgatgttgcggatgatactgaaagctattggttttctgaagaagaatcagatagtcgtgcacattctggaagagatattaatcaatactttggtggaggtgtgatgtactggagtcctgcagaacatgcaggaactggtttttccaggccaccatctcttagttcagatgatagtgcctgggcttggcatgaggctgatgttatacgagttgttgatgatgtagctaatggtattccatctacatacacaaatggtgtatcatcaccaccctccactccatcttgttctcaaaatgaatctttggatccagctgctcacttgataacagggaatgagatcaataatgaagctctgacttctccatcttcggtgcaagatagtcctgaagataaaataatgcaagttgcaaaggctgtgtcttgtggcagtgaagtagttaaggcagatacattgccatatgccatgctgcggccgatagttgttcctagtatatcacgaaggtcatcacgatctgagattaagggtgctcatgatcacaggaggagcccatgtgtaccatcaacaaggagggacatacctattctaagaagacctccatcaccagtagtacttagtgttcctcgcgtacctaggccaccacctccttcacctgctggagagtcaagaaaacgagggttccctatcgttagatccggcagctcaagtcctcgacattgggggatgagaggtttattttctgaagacaaaatttttcatagggctcagttttgcttggatggtcctgaagttgtatggccttcatggggtaacaagggtacttctggtacattggtgcaaacaattgaggatactgttttgcaggaccaccttgttaagatttcacagctatcttgtgatcaacatccagatgtggcattgcctgtacagccactagatatgctaaatggttcgtctcacaaggcatccctctctttgatgcacaatgctctacatgaagaaatagatcaattctgtaagcaggttgctgctggtaatctggtgaggaggccctatataaactgggctgtcaaaagagtcacccgttgcctgcaggttctgtggcctcgctcccgtacaaatctatttggctcaaatgccactggtctggctcttccaactagtgatgttgatcttgtggttagtcttcctcctgtccgaaacctggaacctattaaagaagctggaattttggaaggccgtaatggcatcaaggaaacatgtctacagcatgcagcaaggtgtcttactaaccaggactgggttagaagtgattcccttaaaacagttgaaaacacagctatacctgtgatcatgcttgtagcggatgtaccctgtgacacgaatatgtccaatgagtattcttcagtactagatggctcacaagactattcagttaacatgcttggagaacaagggagtcctcctcggtctgacacctctagttcagaaggcagcaacatgctgatgtgctcaaaattgaataaggatgattgtgatattgtgcagtcaattcgtcttgatataagtttcaaatcgccatcccatacaggactgcagactactgagttggtacgtgagttgagccagcaatttcctgcagttatacctcttgccttgattctcaagaagtttttggctgaccggagtttggaccacccctattcaggtggtctgagctcttactgtttggtccgcagccacccttcgccgtgttgctgcagcaaccacaaacatctccatcctcttgcaaccatggtagggacctcatcgtatgttgaggagtgcgcccacgtcaaggaggtcgtggtctttcgcaagaagattgacgacatgctcgctgcgactcaggccggaaaaggaggctgccaacgcatgcgctcacatcaaggcagccactttctcctcgaacaggagaaaattgtcgtcgccctagagcagatggtcgtcgtcgcccgccagggtatgggcctataa

SEQ ID NO: 137612 - DNA, 2535 bp, Zea Mays
tcgactatcacctcttcaccgacttctcgactagtcgtcgactagtcgcccgactttaaaaccttgccatatactctttagtaaggtcacaaagacttgaatcacgcctgtgcttgtttcaattgaattgaattgatggtatagaacgatgaaccaagctcctagatgaacttttgtgtgtgtgtgctttgcaacaattgttcttttcactcattgacaagatctctctccacttttcagtaagaaaagatggcgctgccatccatgagtcttgtggcaaagggtgtgcttcccttctcagcacgtacctcgagtggtgtcacacaaaggccggtgtcagtgactgcttccttggagcacaaaaccagcgatgccagaaggaagttcctaaaacttgcgcttgggaaccttggagttggactgcccaccttgttgggcgctaagaaagctctcgctgatgagcaaggcgtctcgtcctcgaggatgtcttattcgaggttccttgagtatcttgacaaggatagagtgaagaaggttgatttgtttgagaatgggacaattgctattgtggaggccatttctcctgagcttggtaaccgcgtgcaaagagtccgtgtgcagcttcctggtctaagccaggagcttcttcaaaagttgagggagaagaacatcgattttgctgctcacagcaaccaggaggactctggttctcttctgttcaaccttattggaaatttggcattcccgcttatccttatcggtggtctgtttttactttcaagaagggcacagggtggcctcggtggacccaatggtcctggctttccccttggttttggtcaatctagggccaagtttcagatggaacccaacactggtgttacatttgatgatgttgctggtgtcgatgaagcgaagcaagacttcatggaagtggttgagttcttgaagaaacccgaaaggttcactgctgttggtgctcgcattcctaagggtgttctgcttgtcggtcctcctgggacgggtaaaactttgcttgccaaggcaattgcaggagaggctggcgtgccatttttctcaatttcaggttctgaatttgtggagatgtttgttggtgttggagcttccagagttcgtgaccttttcaagaaggccaaggagaatgctccttgcatagtgtttgttgatgaaattgatgctgttggaaggcaaagaggtacaggtattggtggtggaaatgatgaaagggagcagactctcaatcaactactaactgagatggatggtttcgagggcaacactggaattattgttattgctgccactaaccgggctgacatattggattccgctttacttagacctgggcgttttgatagacaggtgtctgtcgacgttcctgatgtacgtggaaggacagagattctaaaagtgcatggtagcaacaagaaatttgattctgatgtttctcttgatgtcatagcaatgagaacacctgggttcagcggagcagacttggcaaaccttctgaatgaagcagccattctggctggaagacggggaaggacagcaatttcttcaaaagagattgatgattctattgacagaattgtagctggtatggaagggaccgtgatgacagacgggaagagcaaaagtcttgttgcttaccatgaagttgggcatgcaatttgcggaactttgacgcctggccatgatcctgtccaaaaggttaccttagttccaaggggtcaagctcgtggtcttacatggtttatcccgatggatgacccaacactcatctccaggcagcaactttttgccagaattgttggcggccttggtggtagagctgctgaggaggtcatatttggagagcctgaggtgaccactggagctgctggtgacttgcagcaaattactggcttagccaagcagatggttgtgacattcggtatgtctgaaattggtccatggtctctgatggagggtggagcgcagagtggggacgtcatcatgagaatgatggcaaggaactccatgtcagagaagctcgcggaggacattgattcggccgtgaagcagttgtcggatgaggcctacgagatcgctttgaggcacattagaaacaacagggaggccattgacaaaatcgttgaggtgctcattgagaaggagacagtgaccggagacgagttccgggcgatcctttctgagtttgccgagatccctgttgagaaccgggttcccccagccacaccggcggccgcgctcccagcctaaaccctagccttgtaggggaggattttcttgttgtatggtgttcatattttggattcttggtgtacactaactctactaaatctgccggattttcggtacacgacatgtaagatgtaacttactcatggtgaattaatagtaaaatgtaattagattaaaataataggcctggcgcaacattttcagtttgtagcttcgcttctggcgagcgaaatctcttgctatatgttccacggttcctacttcataaaa

SEQ ID NO: 137613 - DNA, 2872 bp, Zea Mays
ggttaactgatatgcggtcctcagaccctgcatgtgttgcaagtcgtggagtggcttcatgccacccaaacacaggagttgcaatgtgaaatcatgaattcgtctggaagtagaaacgggcgctctgggttacaattacaaacagctaccgctgctaccagccactagccgtcgccctccttccaatcttacgcgaatcaagtcattaaaaataaaaaaacataataaaaaacgacacaagaaaagcacaaactccaatcgctctggacatttcatagatttttgcactggccaggaggaattccggacatttcacccgcctcaagacctggcgactactcccgtctatgtcatgtgggctcatctcttccttatcgacgctgtggccgcccagccgcccacgttgcctcctccccgagacaatccccacgccaccgcgcaccggagacgaacctgaggagagaaaaatctgcgcccgtcagtgtgctcgcctacttctacgctccgctcgttcccccaaatagttcctcggcttcgctcctttcccctccctgctccggctccggttcgcacacagtaagaaaagatggcgctgccatccatgagtcttgtggcaaagggtgtgcttcccttctcagcacgtacctcgagtggtgtcacacaaaggccggtgtcagtgactgcttccttggagcacaaaaccagcgatgccagaaggaagttcctaaaacttgcgcttgggaaccttggagttggactgcccaccttgttgggcgctaagaaagctctcgctgatgagcaaggcgtctcgtcctcgaggatgtcttattcgaggttccttgagtatcttgacaaggatagagtgaagaaggttgatttgtttgagaatgggacaattgctattgtggaggccatttctcctgagcttggtaaccgcgtgcaaagagtccgtgtgcagcttcctggtctaagccaggagcttcttcaaaagttgagggagaagaacatcgattttgctgctcacagcaaccaggaggactctggttctcttctgttcaaccttattggaaatttggcattcccgcttatccttatcggtggtctgtttttactttcaagaagggcacagggtggcctcggtggacccaatggtcctggctttccccttggttttggtcaatctagggccaagtttcagatggaacccaacactggtgttacatttgatgatgttgctggtgtcgatgaagcgaagcaagacttcatggaagtggttgagttcttgaagaaacccgaaaggttcactgctgttggtgctcgcattcctaagggtgttctgcttgtcggtcctcctgggacgggtaaaactttgcttgccaaggcaattgcaggagaggctggcgtgccatttttctcaatttcaggttctgaatttgtggagatgtttgttggtgttggagcttccagagttcgtgaccttttcaagaaggccaaggagaatgctccttgcatagtgtttgttgatgaaattgatgctgttggaaggcaaagaggtacaggtattggtggtggaaatgatgaaagggagcagactctcaatcaactactaactgagatggatggtttcgagggcaacactggaattattgttattgctgccactaaccgggctgacatattggattccgctttacttagacctgggcgttttgatagacaggtgtctgtcgacgttcctgatgtacgtggaaggacagagattctaaaagtgcatggtagcaacaagaaatttgattctgatgtttctcttgatgtcatagcaatgagaacacctgggttcagcggagcagacttggcaaaccttctgaatgaagcagccattctggctggaagacggggaaggacagcaatttcttcaaaagagattgatgattctattgacagaattgtagctggtatggaagggaccgtgatgacagacgggaagagcaaaagtcttgttgcttaccatgaagttgggcatgcaatttgcggaactttgacgcctggccatgatcctgtccaaaaggttaccttagttccaaggggtcaagctcgtggtcttacatggtttatcccgatggatgacccaacactcatctccaggcagcaactttttgccagaattgttggcggccttggtggtagagctgctgaggaggtcatatttggagagcctgaggtgaccactggagctgctggtgacttgcagcaaattactggcttagccaagcagatggttgtgacattcggtatgtctgaaattggtccatggtctctgatggagggtggagcgcagagtggggacgtcatcatgagaatgatggcaaggaactccatgtcagagaagctcgcggaggacattgattcggccgtgaagcagttgtcggatgaggcctacgagatcgctttgaggcacattagaaacaacagggaggccattgacaaaatcgttgaggtgctcattgagaaggagacagtgaccggagacgagttccgggcgatcctttctgagtttgccgagatccctgttgagaaccgggttcccccagccacaccggcggccgcgctcccagcctaaaccctagccttgtaggggaggattttcttgttgtatggtgttcatattttggattcttggtgtacactaactctactaaatctgccggattttcggtacacgacatgtaagatgtaacttactcatggtgaattaatagtaaaatgtaattagattaaaataataggcctggcgcaacattttcagtttgtagcttcgcttctggcgagcgaaatctcttgctatatgttccacggttcctacttcataaaa

SEQ ID NO: 137614 - DNA, 1817 bp, Zea Mays
acaccgggccgccacacaaaatccccacacctgcctgcgtatcgcgctgcccacccaccgcacatccccgcctcccgccggccggccgcccgcctaacgactcgcggtcaccgcctgcgggccaccgtccgcccccagctcgcttacgatattgtacgttcgtggcgcggagcaccgtggtgttggcctagtacgtcgatttcacggtgacttcaccaccattgccgcccagtggctgcagaagctccccgccagcaacaagttcacctacaactgcgacggccacaccttcagttacctcatagagaaaggatttagtgagtagctttcatcccgtcgctccgctccgccttattccatcggaatctgcaccgccgcgggctcgaatcgggttcggcttgcttggatctcgcggggttcgcctcgatccgctagatggtatcaggtgtgggattaatctggacttggataaatgaagtataatgcaagaaatgtgggcaaataataccttgggaatcccattaagtttactgctgctaccatttaaagggcagaactgccggtcttcaagctctttgttactcctgatcatctgtggcacaattgtcatcgggcaaaatgccatcagtttatctctacatccctaacattatcgggtattttaggatcatcataaatttcattgcatttgcggtttgctattccaacaaggctctctttgctgtcttgtacttcttcagctttgtccttgatggtgtggatggttggtttgcacggaagtttaatcaagcatcaacatttggagcagtgttggacatggttacagatagggttagcactgcttgtttattggcccttctttcccagttttacagacctggtttagtcttcttgatattgctcgggttggatattacgagccactggtttcagatgtacagttctttcttgtcaggtaagactagccacaaggatgtaaaacacacaggcaattggcttctgaaattatattatgggtacaggccattcatggccttctgctgtgtttcttgtgaggttttgtatattatcctctttctctttgctgatgagaagtcaacaagcttgcttagtgcatgcaaaggtctcctgaaccaaagccccatcattatcttggtgtttatttccacattagttggctgggcagtgaaacaagtcaccaatgtcatccagatgaaaacggctgcggatgcatgtgttgtgtacgacctgaagcgcagcaaatgaaaagcatgaagggaaaactctacggtttaactcagtcctgtgtggacgtatccaaagggaaaaactctccgaggggatacgtcttacgttccttgacatctttctgatgatgccttacgtggggccagaggatgacatgccgtgggaagagcagcatgtcataaagagaaccaacgcaaacaattgttttgtgaaggcggctattgatttgttgtcaagagtgttttattatgtcatacaaatgatgaattgatgatggtacctttgttacctgggctagccctttgtgtcaacatgaaagatgcttacgagccacatgttcccttctgaaatgaaggttttgagttgcaaaaatttacatattcccttctgaaagccagcaactgcacctcgagagggtttaatggttacttttaccccccaaaataggcactagctattattcggatgatttcccttttgctccttattaaacatcctttggttcagttttattgatagttttaatttttttacatgatctcccttagttcaaaaaaataaaattaaaa

SEQ ID NO: 137615 - DNA, 1506 bp, Zea Mays
gttttttttgtttgtaaaaggtacaagggttatagtagcactgtgttaattggactcatattttgattcccttgtaaaaacattattttttggtttaatatataaacgatacacttatctgacaggaatcccattaagtttactgctgctaccatttaaagggcagaactgccggtcttcaagctctttgttactcctgatcatctgtggcacaattgtcatcgggcaaaatgccatcagtttatctctacatccctaacattatcgggtattttaggatcatcataaatttcattgcatttgcggtttgctattccaacaaggctctctttgctgtcttgtacttcttcagctttgtccttgatggtgtggatggttggtttgcacggaagtttaatcaagcatcaacatttggagcagtgttggacatggttacagataggtactccttgaatgaatctttaaaatctgcaggttttacaggtatcaaaagcagaagagcttgtattgatttgtcttgaatctcaatgtctagtacaaatcctaattgcaaacattgtaacagacctggtttagtcttcttgatattgctcgggttggatattacgagccactggtttcagatgtacagttctttcttgtcaggtaagactagccacaaggatgtaaaacacacaggcaattggcttctgaaattatattatgggtacaggccattcatggccttctgctgtgtttcttgtgaggttttgtatattatcctctttctctttgctgatgagaagtcaacaagcttgcttagtgcatgcaaaggtctcctgaaccaaagccccatcattatcttggtgtttatttccacattagttggctgggcagtgaaacaagtcaccaatgtcatccagatgaaaacggctgcggatgcatgtgttgtgtacgacctgaagcgcagcaaatgaaaagcatgaagggaaaactctacggtttaactcagtcctgtgtggacgtatccaaagggaaaaactctccgaggggatacgtcttacgttccttgacatctttctgatgatgccttacgtggggccagaggatgacatgccgtgggaagagcagcatgtcataaagagaaccaacgcaaacaattgttttgtgaaggcggctattgatttgttgtcaagagtgttttattatgtcatacaaatgatgaattgatgatggtacctttgttacctgggctagccctttgtgtcaacatgaaagatgcttacgagccacatgttcccttctgaaatgaaggttttgagttgcaaaaatttacatattcccttctgaaagccagcaactgcacctcgagagggtttaatggttacttttaccccccaaaataggcactagctattattcggatgatttcccttttgctccttattaaacatcctttggttcagttttattgatagttttaatttttttacatgatctcccttagttcaaaaaaataaaattaaa

SEQ ID NO: 137616 - DNA, 1935 bp, Zea Mays
acaccgggccgccacacaaaatccccacacctgcctgcgtatcgcgctgcccacccaccgcacatccccgcctcccgccggccggccgcccgcctaacgactcgcggtcaccgcctgcgggccaccgtccgcccccagctcgcttacgatattgtacgttcgtggcgcggagcaccgtggtgttggcctagtacgtcgatttcacggtgacttcaccaccattgccgcccagtggctgcagaagctccccgccagcaacaagttcacctacaactgcgacggccacaccttcagttacctcatagagaaaggatttagtgagtagctttcatcccgtcgctccgctccgccttattccatcggaatctgcaccgccgcgggctcgaatcgggttcggcttgcttggatctcgcggggttcgcctcgatccgctagatggtatcaggtgtgggattaatctggacttggataaatgaagtataatgcaagaaatgtgggcaaataataccttggctgtgtggtggagaacaaggtgttttgcaactaacggctcttacgtttacaagtttgtgttttctttaacccttgaacattgaagtgaattgtgttgccacattgtttatgcattataggaatcccattaagtttactgctgctaccatttaaagggcagaactgccggtcttcaagctctttgttactcctgatcatctgtggcacaattgtcatcgggcaaaatgccatcagtttatctctacatccctaacattatcgggtattttaggatcatcataaatttcattgcatttgcggtttgctattccaacaaggctctctttgctgtcttgtacttcttcagctttgtccttgatggtgtggatggttggtttgcacggaagtttaatcaagcatcaacatttggagcagtgttggacatggttacagatagggttagcactgcttgtttattggcccttctttcccagttttacagacctggtttagtcttcttgatattgctcgggttggatattacgagccactggtttcagatgtacagttctttcttgtcaggtaagactagccacaaggatgtaaaacacacaggcaattggcttctgaaattatattatgggtacaggccattcatggccttctgctgtgtttcttgtgaggttttgtatattatcctctttctctttgctgatgagaagtcaacaagcttgcttagtgcatgcaaaggtctcctgaaccaaagccccatcattatcttggtgtttatttccacattagttggctgggcagtgaaacaagtcaccaatgtcatccagatgaaaacggctgcggatgcatgtgttgtgtacgacctgaagcgcagcaaatgaaaagcatgaagggaaaactctacggtttaactcagtcctgtgtggacgtatccaaagggaaaaactctccgaggggatacgtcttacgttccttgacatctttctgatgatgccttacgtggggccagaggatgacatgccgtgggaagagcagcatgtcataaagagaaccaacgcaaacaattgttttgtgaaggcggctattgatttgttgtcaagagtgttttattatgtcatacaaatgatgaattgatgatggtacctttgttacctgggctagccctttgtgtcaacatgaaagatgcttacgagccacatgttcccttctgaaatgaaggttttgagttgcaaaaatttacatattcccttctgaaagccagcaactgcacctcgagagggtttaatggttacttttaccccccaaaataggcactagctattattcggatgatttcccttttgctccttattaaacatcctttggttcagttttattgatagttttaatttttttacatgatctcccttagttcaaaaaaataaaattaaa

SEQ ID NO: 137617 - DNA, 1807 bp, Zea Mays
acaccgggccgccacacaaaatccccacacctgcctgcgtatcgcgctgcccacccaccgcacatccccgcctcccgccggccggccgcccgcctaacgactcgcggtcaccgcctgcgggccaccgtccgcccccagctcgcttacgatattgtacgttcgtggcgcggagcaccgtggtgttggcctagtacgtcgatttcacggtgacttcaccaccattgccgcccagtggctgcagaagctccccgccagcaacaagttcacctacaactgcgacggccacaccttcagttacctcatagagaaaggatttagtgtgggattaatctggacttggataaatgaagtataatgcaagaaatgtgggcaaataataccttggctgtgtggtggagaacaaggtgttttgcaactaacggctcttacgtttacaagtttgtgttttctttaacccttgaacattgaagtgaattgtgttgccacattgtttatgcattataggaatcccattaagtttactgctgctaccatttaaagggcagaactgccggtcttcaagctctttgttactcctgatcatctgtggcacaattgtcatcgggcaaaatgccatcagtttatctctacatccctaacattatcgggtattttaggatcatcataaatttcattgcatttgcggtttgctattccaacaaggctctctttgctgtcttgtacttcttcagctttgtccttgatggtgtggatggttggtttgcacggaagtttaatcaagcatcaacatttggagcagtgttggacatggttacagatagggttagcactgcttgtttattggcccttctttcccagttttacagacctggtttagtcttcttgatattgctcgggttggatattacgagccactggtttcagatgtacagttctttcttgtcaggtaagactagccacaaggatgtaaaacacacaggcaattggcttctgaaattatattatgggtacaggccattcatggccttctgctgtgtttcttgtgaggttttgtatattatcctctttctctttgctgatgagaagtcaacaagcttgcttagtgcatgcaaaggtctcctgaaccaaagccccatcattatcttggtgtttatttccacattagttggctgggcagtgaaacaagtcaccaatgtcatccagatgaaaacggctgcggatgcatgtgttgtgtacgacctgaagcgcagcaaatgaaaagcatgaagggaaaactctacggtttaactcagtcctgtgtggacgtatccaaagggaaaaactctccgaggggatacgtcttacgttccttgacatctttctgatgatgccttacgtggggccagaggatgacatgccgtgggaagagcagcatgtcataaagagaaccaacgcaaacaattgttttgtgaaggcggctattgatttgttgtcaagagtgttttattatgtcatacaaatgatgaattgatgatggtacctttgttacctgggctagccctttgtgtcaacatgaaagatgcttacgagccacatgttcccttctgaaatgaaggttttgagttgcaaaaatttacatattcccttctgaaagccagcaactgcacctcgagagggtttaatggttacttttaccccccaaaataggcactagctattattcggatgatttcccttttgctccttattaaacatcctttggttcagttttattgatagttttaatttttttacatgatctcccttagttcaaaaaaataaaattaaa

SEQ ID NO: 137618 - DNA, 1748 bp, Zea Mays
acaccgggccgccacacaaaatccccacacctgcctgcgtatcgcgctgcccacccaccgcacatccccgcctcccgccggccggccgcccgcctaacgactcgcggtcaccgcctgcgggccaccgtccgcccccagctcgcttacgatattgtacgttcgtggcgcggagcaccgtggtgttggcctagtacgtcgatttcacggtgacttcaccaccattgccgcccagtggctgcagaagctccccgccagcaacaagttcacctacaactgcgacggccacaccttcagttacctcatagagaaaggatttagtgagtagctttcatcccgtcgctccgctccgccttattccatcggaatctgcaccgccgcgggctcgaatcgggttcggcttgcttggatctcgcggggttcgcctcgatccgctagatggtatcaggaatcccattaagtttactgctgctaccatttaaagggcagaactgccggtcttcaagctctttgttactcctgatcatctgtggcacaattgtcatcgggcaaaatgccatcagtttatctctacatccctaacattatcgggtattttaggatcatcataaatttcattgcatttgcggtttgctattccaacaaggctctctttgctgtcttgtacttcttcagctttgtccttgatggtgtggatggttggtttgcacggaagtttaatcaagcatcaacatttggagcagtgttggacatggttacagatagggttagcactgcttgtttattggcccttctttcccagttttacagacctggtttagtcttcttgatattgctcgggttggatattacgagccactggtttcagatgtacagttctttcttgtcaggtaagactagccacaaggatgtaaaacacacaggcaattggcttctgaaattatattatgggtacaggccattcatggccttctgctgtgtttcttgtgaggttttgtatattatcctctttctctttgctgatgagaagtcaacaagcttgcttagtgcatgcaaaggtctcctgaaccaaagccccatcattatcttggtgtttatttccacattagttggctgggcagtgaaacaagtcaccaatgtcatccagatgaaaacggctgcggatgcatgtgttgtgtacgacctgaagcgcagcaaatgaaaagcatgaagggaaaactctacggtttaactcagtcctgtgtggacgtatccaaagggaaaaactctccgaggggatacgtcttacgttccttgacatctttctgatgatgccttacgtggggccagaggatgacatgccgtgggaagagcagcatgtcataaagagaaccaacgcaaacaattgttttgtgaaggcggctattgatttgttgtcaagagtgttttattatgtcatacaaatgatgaattgatgatggtacctttgttacctgggctagccctttgtgtcaacatgaaagatgcttacgagccacatgttcccttctgaaatgaaggttttgagttgcaaaaatttacatattcccttctgaaagccagcaactgcacctcgagagggtttaatggttacttttaccccccaaaataggcactagctattattcggatgatttcccttttgctccttattaaacatcctttggttcagttttattgatagttttaatttttttacatgatctcccttagttcaaaaaaataaaattaaa

SEQ ID NO: 137619 - DNA, 1688 bp, Zea Mays
acaccgggccgccacacaaaatccccacacctgcctgcgtatcgcgctgcccacccaccgcacatccccgcctcccgccggccggccgcccgcctaacgactcgcggtcaccgcctgcgggccaccgtccgcccccagctcgcttacgatattgtacgttcgtggcgcggagcaccgtggtgttggcctagtacgtcgatttcacggtgacttcaccaccattgccgcccagtggctgcagaagctccccgccagcaacaagttcacctacaactgcgacggccacaccttcagttacctcatagagaaaggatttagtgtgggattaatctggacttggataaatgaagtataatgcaagaaatgtgggcaaataataccttgggaatcccattaagtttactgctgctaccatttaaagggcagaactgccggtcttcaagctctttgttactcctgatcatctgtggcacaattgtcatcgggcaaaatgccatcagtttatctctacatccctaacattatcgggtattttaggatcatcataaatttcattgcatttgcggtttgctattccaacaaggctctctttgctgtcttgtacttcttcagctttgtccttgatggtgtggatggttggtttgcacggaagtttaatcaagcatcaacatttggagcagtgttggacatggttacagatagggttagcactgcttgtttattggcccttctttcccagttttacagacctggtttagtcttcttgatattgctcgggttggatattacgagccactggtttcagatgtacagttctttcttgtcaggtaagactagccacaaggatgtaaaacacacaggcaattggcttctgaaattatattatgggtacaggccattcatggccttctgctgtgtttcttgtgaggttttgtatattatcctctttctctttgctgatgagaagtcaacaagcttgcttagtgcatgcaaaggtctcctgaaccaaagccccatcattatcttggtgtttatttccacattagttggctgggcagtgaaacaagtcaccaatgtcatccagatgaaaacggctgcggatgcatgtgttgtgtacgacctgaagcgcagcaaatgaaaagcatgaagggaaaactctacggtttaactcagtcctgtgtggacgtatccaaagggaaaaactctccgaggggatacgtcttacgttccttgacatctttctgatgatgccttacgtggggccagaggatgacatgccgtgggaagagcagcatgtcataaagagaaccaacgcaaacaattgttttgtgaaggcggctattgatttgttgtcaagagtgttttattatgtcatacaaatgatgaattgatgatggtacctttgttacctgggctagccctttgtgtcaacatgaaagatgcttacgagccacatgttcccttctgaaatgaaggttttgagttgcaaaaatttacatattcccttctgaaagccagcaactgcacctcgagagggtttaatggttacttttaccccccaaaataggcactagctattattcggatgatttcccttttgctccttattaaacatcctttggttcagttttattgatagttttaatttttttacatgatctcccttagttcaaaaaaataaaattaaa

SEQ ID NO: 137620 - DNA, 1620 bp, Zea Mays
acaccgggccgccacacaaaatccccacacctgcctgcgtatcgcgctgcccacccaccgcacatccccgcctcccgccggccggccgcccgcctaacgactcgcggtcaccgcctgcgggccaccgtccgcccccagctcgcttacgatattgtacgttcgtggcgcggagcaccgtggtgttggcctagtacgtcgatttcacggtgacttcaccaccattgccgcccagtggctgcagaagctccccgccagcaacaagttcacctacaactgcgacggccacaccttcagttacctcatagagaaaggatttagaatcccattaagtttactgctgctaccatttaaagggcagaactgccggtcttcaagctctttgttactcctgatcatctgtggcacaattgtcatcgggcaaaatgccatcagtttatctctacatccctaacattatcgggtattttaggatcatcataaatttcattgcatttgcggtttgctattccaacaaggctctctttgctgtcttgtacttcttcagctttgtccttgatggtgtggatggttggtttgcacggaagtttaatcaagcatcaacatttggagcagtgttggacatggttacagatagggttagcactgcttgtttattggcccttctttcccagttttacagacctggtttagtcttcttgatattgctcgggttggatattacgagccactggtttcagatgtacagttctttcttgtcaggtaagactagccacaaggatgtaaaacacacaggcaattggcttctgaaattatattatgggtacaggccattcatggccttctgctgtgtttcttgtgaggttttgtatattatcctctttctctttgctgatgagaagtcaacaagcttgcttagtgcatgcaaaggtctcctgaaccaaagccccatcattatcttggtgtttatttccacattagttggctgggcagtgaaacaagtcaccaatgtcatccagatgaaaacggctgcggatgcatgtgttgtgtacgacctgaagcgcagcaaatgaaaagcatgaagggaaaactctacggtttaactcagtcctgtgtggacgtatccaaagggaaaaactctccgaggggatacgtcttacgttccttgacatctttctgatgatgccttacgtggggccagaggatgacatgccgtgggaagagcagcatgtcataaagagaaccaacgcaaacaattgttttgtgaaggcggctattgatttgttgtcaagagtgttttattatgtcatacaaatgatgaattgatgatggtacctttgttacctgggctagccctttgtgtcaacatgaaagatgcttacgagccacatgttcccttctgaaatgaaggttttgagttgcaaaaatttacatattcccttctgaaagccagcaactgcacctcgagagggtttaatggttacttttaccccccaaaataggcactagctattattcggatgatttcccttttgctccttattaaacatcctttggttcagttttattgatagttttaatttttttacatgatctcccttagttcaaaaaaataaaattaaa

SEQ ID NO: 137621 - DNA, 602 bp, Zea Mays
acaccgggccgccacacaaaatccccacacctgcctgcgtatcgcgctgcccacccaccgcacatccccgcctcccgccggccggccgcccgcctaacgactcgcggtcaccgcctgcgggccaccgtccgcccccagctcgcttacgatattgtacgttcgtggcgcggagcaccgtggtgttggcctagtacgtcgatttcacggtgacttcaccaccattgccgcccagtggctgcagaagctccccgccagcaacaagttcacctacaactgcgacggccacaccttcagttacctcatagagaaaggatttagaatcccattaagtttactgctgctaccatttaaagggcagaactgccggtcttcaagctctttgttactcctgatcatctgtggcacaattgtcatcgggcaaaatgccatcagtttatctctacatccctaacattatcgggtattttaggatcatcataaatttcattgcatttgcggtttgctattccaacaaggctctctttgctgtcttgtacttcttcaggtgagtgtcgtatatctgcggactacttgagtttgtcaatgatttaatttatgtatgt

SEQ ID NO: 137622 - DNA, 1514 bp, Zea Mays
ttccccggctcggctcggcacaggatccggccggccttttcactaaactcgcttcatccgctcagcctccaaccaaccgagagaagccagagaaaaggttactccgcagaaagcaaaaccctagcccactccggcgcgccaccggccgatggtttcgatgagcaccacgccgaagccgcttgactccgccgtcgtcagcgcagccgttgacggcggggatgagggtggtggtggaggcggtggcgggaagaagcaggcgcacggggcggtgatggcgccgccaccgatggtggtcccggccgcggcgcccgcggccgaggaggaggttcggaaggtcaggaagccgtacaccatcaccaagtcgcgggagagctggacggagccggagcacgacaagttcctcgaggccctgcagctttttgatcgtgattggaagaaaattgaagcatatgttggctcaaagactgttatacagataaggagccatgcacagaagtacttcctgaaggttcagaagaatggtacgggcgagcatctgcccccacccaggccaaaacgaaaggcagctcatccatatccacagaaggcatctaaaaatgtttctcaagctattttatcacaagaacaacctacccagagggagcaaggttctgtcatgcctatggatactgctactgtgagaaacacaaatgcgaatgtggcggtgccttcctgggacaatactcttgctcaacctttcagcgctggtcatgttcaaggtgcagctgcaacaaataactgttcaagtagcatggagagtccatctggtacttggccaacttctgaagcagtcgagcaagaaaatatggttccaccactccgtgccatgccagattttgcccaagtatacaacttcctgggaagcatatttgatccggatacaagtgggcatttgcagaggttaaaagcgatggatccagttgatattgaaacggcactactacttatgaggaatctttccatgaaccttaggagtcccgactttgagcaacatcggaggttgctatcatcatatagctatggtggcgcggaccatgtcaaatctgaagccatggaaaatcttggatctcctcagagtggccatcttccatccctggtaacaagcgaatgagagcacacttccaatttgcggtcggagctttggttgtttacacgggacattcctgtgcgctcccagcaatggagttgtggagacggctggtctgtttatgaatgctagagacgtatcgtggcagtaacatctgtatagcttccaataaatggtctgaccctaggcaagttttgctttttcgcgtacgtgtagatagccagttttgtgtgctcatgcaattttttcctgggtggggcctagatcgtatgtttttttatatacacactattggacgcgtgatgtaaatatgtgcaatctttgtaatgcttgaggtactataattatataatggatatgttatgatcgaaaatcagaaaggtaaaac

SEQ ID NO: 137623 - DNA, 1522 bp, Zea Mays
ttccccggctcggctcggcacaggatccggccggccttttcactaaactcgcttcatccgctcagcctccaaccaaccgagagaagccagagaaaaggttactccgcagaaagcaaaaccctagcccactccggcgcgccaccggccgatggtttcgatgagcaccacgccgaagccgcttgactccgccgtcgtcagcgcagccgttgacggcggggatgagggtggtggtggaggcggtggcgggaagaagcaggcgcacggggcggtgatggcgccgccaccgatggtggtcccggccgcggcgcccgcggccgaggaggaggttcggaaggtcaggaagccgtacaccatcaccaagtcgcgggagagctggacggagccggagcacgacaagttcctcgaggccctgcagctttttgatcgtgattggaagaaaattgaagcatatgttggctcaaagactgttatacagataaggagccatgcacagaagtacttcctgaaggttcagaagaatggtacgggcgagcatctgcccccacccaggccaaaacgaaaggcagctcatccatatccacagaaggcatctaaaaatgctcctgcagtttctcaagctattttatcacaagaacaacctacccagagggagcaaggttctgtcatgcctatggatactgctactgtgagaaacacaaatgcgaatgtggcggtgccttcctgggacaatactcttgctcaacctttcagcgctggtcatgttcaaggtgcagctgcaacaaataactgttcaagtagcatggagagtccatctggtacttggccaacttctgaagcagtcgagcaagaaaatatggttccaccactccgtgccatgccagattttgcccaagtatacaacttcctgggaagcatatttgatccggatacaagtgggcatttgcagaggttaaaagcgatggatccagttgatattgaaacggcactactacttatgaggaatctttccatgaaccttaggagtcccgactttgagcaacatcggaggttgctatcatcatatagctatggtggcgcggaccatgtcaaatctgaagccatggaaaatcttggatctcctcagagtggccatcttccatccctggtaacaagcgaatgagagcacacttccaatttgcggtcggagctttggttgtttacacgggacattcctgtgcgctcccagcaatggagttgtggagacggctggtctgtttatgaatgctagagacgtatcgtggcagtaacatctgtatagcttccaataaatggtctgaccctaggcaagttttgctttttcgcgtacgtgtagatagccagttttgtgtgctcatgcaattttttcctgggtggggcctagatcgtatgtttttttatatacacactattggacgcgtgatgtaaatatgtgcaatctttgtaatgcttgaggtactataattatataatggatatgttatgatcgaaaatcagaaaggtaaaa

SEQ ID NO: 137624 - DNA, 766 bp, Zea Mays
aaaagacagacacaattagacctgctatgttgtatggtgttgaatattgacctacaaaaagacgccatttagtagataagtgttgcgaaaatgtgtatcttgcattggatttatgggtatacaataagagattgagcccggaacgatatatatgtgataagctaggtgtggcataagttgaacaaaagtttgtttaacaccgattgagatggtttggacatatccaacggaaacctccataggcagtgcaatcctaattcctaaggtgcgacagtaataggagaagagcggaggttgctatcatcatatagctatggtggcgcggaccatgtcaaatctgaagccatggaaaatcttggatctcctcagagtggccatcttccatccctggtaacaagcgaatgagagcacacttccaatttgcggtcggagctttggttgtttacacgggacattcctgtgcgctcccagcaatggagttgtggagacggctggtctgtttatgaatgctagagacgtatcgtggcagtaacatctgtatagcttccaataaatggtctgaccctaggcaagttttgctttttcgcgtacgtgtagatagccagttttgtgtgctcatgcaattttttcctgggtggggcctagatcgtatgtttttttatatacacactattggacgcgtgatgtaaatatgtgcaatctttgtaatgcttgaggtactataattatataatggatatgttatgatcgaaaatcagaaaggtaa

SEQ ID NO: 137625 - DNA, 312 bp, Zea Mays
atgcctcccatcctcgtcgccgacgtagctgtcgtccggctcaccatatcccgcagagcggccgtgaagatcgtcgcactccgcctgcagctcgagaacaaggaccgggaggaggctgagaagcactcggcaaggtcgtgctttgacgaggacggatactgctcttcccctaggacgtcggggttcaacgaggatactgcttcctctctggagtgcagcattggggaagctgagacaccaaactacggtagcccagacgaaatgttcagcaaggatcttaatccttgcctgaccaattactttggcgaatga

SEQ ID NO: 137626 - DNA, 795 bp, Zea Mays
gggggcccccctcgaggtctgagatgctcaagttccaagtaccgttcctgcacgattaatggtgggagggatcgcctctgtagggatactcgaagcaaacttagttttgtgaatgaaggacagctgcttcttgtttctgaagaaagtatatctgatctcaacagccgattaagttcaagtcatggaaatggtaagcaaggggtgttggttgatgcaatgagatttcgtccaaatattgttgtctctgggtccacaccgtacaatgaggataactggaaaaggcttcgcataggggaggcctattttacttccatgggaggatgcaaccgttgtcagatgatcaaccaatatcagagctcagggcaggtgatcaagtcaaaggaaccgctggcaactttagcatcgtatagacgaaaaaaggggaagattttgtttggtgtcctgttgaactatgaagacggcatggagggagaagatgatgccgttgtagagagatggatcaaagtggggcaagaggtacatacatacctcaatgatgacttgtgcacatacatacccggaagtttcacctgcacaagaggctgacgggtaacagttgtcacaatacgtgaaaaaatatagactttcagatgttattaacaagaaagtggtgccatatgtatgtaacaattttcttttcatgcctgtatgtgacacataaggccttgaagcctgtattcagacacaaatacatagaaaacaaatgtacgtttcactcatgtcagtgctggtgcgaccatagagtgagctacagac

SEQ ID NO: 137627 - DNA, 1250 bp, Zea Mays
gtcacaaaagaaaacctggtggttctgttcctggacatgttgttatttatcgagatcgacaagacgggcatcaaaggatgtttcaagattatttggcggctaatccgacatacggtccacatttatttcgtcgaaggttggtgtttattaacctttgattagctccttactatatgtattatatgtgttgaaggttattatttttttggtttagatataggatgaagagagaccttttcctacgcataatgaatgctgttgaagcacacgatgattactttgtgcaaaaaaggaatgcagccaatgtacttggattgagttgcttccagaaagtcactgctgcatttcgtatgctcacttatggggttccagctgatttaacagatgagtacgttcgcattgccgaaagtactgcacttgagagcctacgtaggtttgttgctgcagttgttgatatttttgaagatgaatacctgagatatcccaatgaggcggacacagcacgcttactggcactaggtgaccaaaatggctttcctggaaatttagggtctatcgattgtatgcattggccgtggaagaactatccggttcaactacaaggtcaatacaaagggcatgtggacaagcccactatcattttggaggctgttgctttggacgacctttggatctggcatgctttctttggaatgcctgggtctcataatgatataaatgttcttcaccggtctcctttgtttgcaaacttagcggaaggtacagctccacaggtgaactttactgttaatgagcatgattatacgatgggttattatcttgcagatggtatatatccctcatgggctactttagttaagactatctctaagcctattgggaacaagaacaaatattttgcaaaagcacaggaagcagcaaggaaggctgtcgagagagcttttggggttcttcaatctaggttcgccattgttcgaggaccagctcgcatttgggacacagagacactaggaatgatcatgagggcttgtgtgatcatgcacaacatgattgttgaagatgaacgagtcgtggaccctgatgagcgattcgaggacggtggtgaaaatgtgcgacctggtcacgggcaggctactcgtacacttgatcaatttattgaagcacacaaaaagatcagagacaaggaaatacatgtgcagttgaaagaagacctcatcgaacacctttggaaccatcatcctgatttgtat

SEQ ID NO: 137628 - DNA, 330 bp, Zea Mays
atgaagcgaagcatggacctgaacacagcagcctccatgcctttgacctccacagaagcggagctgcgttcctccatgcctccgaagaactcggccttaaaaacaggggaccttgcggcgagtatggccctgtgggcggcgaaggactccccggagacacggaacgtgacgtccgctccgtcctcgctctgcaggaggtcgccgaggtgctggtgtaggtccgagggtggcggcactggcagggacgacagcgccttatccgtggcggcgtccaagtcgcgtagcacggtgaccgtgcattccacggtcagtgaatcgtccacgagataa

SEQ ID NO: 137629 - DNA, 865 bp, Zea Mays
acgtctcccgggcacgtctgcggcagcaccactccacacccacactccgcccatcggctgccatggcgaccagggcggcggcggcagccacgctcacggcggctacgtcctctcttcttaggcgctctacctcgctgcggccgcagggtctccgggtcccccaccgcgtgcctccccaaaggtttgtgcgccatattgcttcatcatcaaacgaggaagctgctgccagagcagccgccgccactgctgacgctggaggaccaaccattttcgacaagatcattgcgaaggaaatcccttcgagcatcgtatatgaagatgaaaatgtgctggcatttagagatattaatccacaagcccctgtgcacgttctagtcatcccaaaagcgagagatgggctaaccggattagacaaggctgagccaaggcatacagaaatcctgggccggctcctttacgcagcgaaagtagtggcagaaaaggaaggtgtagcgagtgggtaccgtgttgtcatcaacaatggtgctgaaggatgccaatctgtctatcatctgcacctgcatgtacttggtggaaggcagatgaagtggccccctggttaaattacgaagggtgacatgtttgatttcctgtacccctctgtgagttgagtttgctgcttgtatgactgttgttgcaaagggagaaagagtggttggtgtactagtatctgcccctgtgatgatggcccctttgagcactcatctctggaagtactgagcttatgcagcattttgctaagggaaaaaaaaacttgtgcagtagattctctgagatattaaacaggttttagaattatcatggcaaacaattagccgtgcacata

SEQ ID NO: 137630 - DNA, 1872 bp, Zea Mays
ggtgttttggctgacgcttgggaacctgcggtgcggcagacgacgaagaagcggcgcgacggtcagttttcctttttcccgctcccgcttttcaacacccccactccctcctcgtcgcttgccacaagtcctcgggcgtccgtcgatcataccgcataccgccggcgcagtcctcgccggcgctggacggggtgaagttttagatcaccagaggggcatttttctctcatcgggcagtagaagttttggatcttatccagctagcctccaatccatcatggatcatgacggcacgaacctggctgtcaatgaggctgtgcgctcggtgcagctgctcaagattgacggctacagcgccaccgctaccatgagcgagttggatttcatcaaatccagaaggaacctcgctggccacgagtgggaggtccttttctatcctcagttcagccgttacggtggctgcatagctttgaagctcgtccttgtcagtgaacccccgagggacaaggacaagctgctgagggcgagcctgagatgccgccttgtatgccctagccagccgcatctccatgcctccatagagaagagcgtgtcccatgtatttaccagtgactctagatgctcgtctgaagttatcctcatcccaaaatatgagctaccatcatcaggttacctcgtgaacgattcactgaccgtggaatgcacggtcaccgtgctacgcgacttggacgccacggctaaggtgctgtccctgccagtgccactgccaccaccctccgacctacaccagcacttcgatgagctgttgcagagcaagaatggagcggacgtcacgttccgtgtctccgggaagtcattcgccgcccacaaggccattctcgccgcaaggtccccggttttcatggctcagttcttcggaggcatgaaggaaagaagctctgctcatgtggagatcagagacatggactctgctgcgttcagttccatgcttcacttcatctataccgacatggtcccagagctcgacggtgcccaggagcctgaggcggcagcgatcatggctcagcacctactggtagctgctgacatgtatgggctgaacaggctgaagctgatatgtgaatgcaagctctctggtggcatcgacatcggcacggcggcttcgacgttggctctcgccgaacagcacgactgctcgctgctcaaagccaagtgtctcgagttcatcaccaggtcgcctgagacacttgaagctgtcctggcaactgatggatacgcgcatctggcggcaagctgtcccttggttctggctgaactactgatggctgcgcgtggaaggaagatctgagctggatgatggttttcgttgacagtcctattattactagtttttaattatcccttcctcgtatgatgagttgcttggcttctcatattttggttatggtttcccaagatgtatggcctaaagcatgatgaactagtgcttgcagttgatttcccccgtttaagtctgagcttattttccacttgtgcttgtcatgcatgcacagacaaacgaaccgggcagctagcattttctgtggctagatctcagtctccgttttgtgcctgtcatttggtgcttaattgtatcagttgccttttctactgcttgacatgcaagtatgcgcacagcgcacgcatgacattagcagactgctgctgcgggcttcagtagcaagtagtacaaaagatttagattaaaattctaacgtatttaaccctagattttaattgaatatattagatccgcatagttatattggacaggatgacgtaacatatttacttagttttctaaaatacttattttttggtcttggtcacatc

SEQ ID NO: 137631 - DNA, 1694 bp, Zea Mays
agaccgcataccgccggcccagtcctcatcggcgccggacgggtaaagagttttatttttacatcaccggaggcattttttttttcttcatcaggcttctggatcttacctggcctccatcatggaacatgacggcacgaacctgctggctgtcaatgaggttctgcgctcggtacagctgctcaagattgacggctactgcgccaccgctaccatgagcgagctggagttcatcaaatccagatggtgcaccaatggccacgagtgggaggtccgtttccatcctacttacaagtggaacgggcggtgggtagcggtgaagctcatacttatcagtgaacctctgagggacaagctgagggtgagcctgagctgccggatgagacccaacaacttccagcgggatctcggtgcctcttatgagcagagtttgtcccatatatttcccagtgactccaaatgctcgcctgtacttctcctcatgtcaagggctgagctaggatcatcagattacctcgtggaggattcgctgaccgtggaatgcacgctcaccgagctacgtggcttcgacgcctctgtgaaggatccgcccctgccagtgccacagccacagccactgcgctcggacctacaccagcacctcggcgagctcctgcagagcaaggacggagcggacgtcacgttccgtgtctccggggagtccttcgccgcacacagggtcattctcgccgcgaggtccccggttttcaaggccgagttcttcggaggcatgaaggaaagaagctctgcttatgtggagatcagagacatggacgctgctgtgttcaggtccatgcttcacttcatctataccgacatggtcccagagctcgacggtgcccaggaccaggagcctgaggcggcggcgggcggcggccatggctcagcacctactcgtagctgctgacaggtatgggctgaacgggctgaagctgatatgtgaatgcaagctctctggtggcatcaacatcggcacagcggctgcgacgttggctctcgccgagcagcgcaactgcccgctgctcaaagccaagtgtcttgagttcgtcactaagtcgcctgagactcttgatgctgtcctggcgactgacggctacgcgcatctggtggaaagctgccctctggtgctgactgaactagtgagggctgcgcgtggaaggaagatctgagctcgcgatgatggttttcattgacagtcctagtattactagtatcttcctcatataatgattgagttgcttggcttcacatgcatgctatggtatggttatggtttccctaagatgtaatgaacctggagttatggttatggtttccctaagcatgatgaactagtctttgcagttgattccctccccactttcaatctgagctgcttaattcagcccttgttagccacctgtgcttgtcatgcacatgagatgggcagctagcattcattttctgtggctaagatctcgtctctgttttgtgcttattatcatttggtgcttaattgtatcagctgccttttctcgtgcttgacatgcatatataatatgcgcacgcatgacatgagcagactgctgctgcttcagttgcaagttgcagctagtgcaaaaagattcagaaaacccgttttttattagagcagtcagtttgggggagaagggcga

SEQ ID NO: 137632 - DNA, 1318 bp, Zea Mays
cacgctttcgctccgaggagaatttaagaaccgagtaggcagacagggaaggctaggaggggactaggggagagagagagggggaaggccaagaagaggcttcctctccccccattctccaatccgtgccctagtcgagccagccgcgaggaaggaggcgtctcgcctagcgcccgcccgtcggccgaccttctgctgcaccttcgaactctggaaagatcatagatttttgggcaatagcaagtggacatggaaccatcctctcagcctcagcctgcgatgggtgtcgccgccggtgggtcacaagtgtatcctgcgtctgcctacccgcctgcagcaacagtagctcctcctgctgttgcatctgctggtttacagtcagtgcaaccattcccagccaaccctgcccatatgagtgctcagcaccagattgtctaccaacaagctcaacagttccaccaacagctccagcagcagcaacagcagcagcttcagcagttctgggtcgaacgcatgactgaaatcgaggcaacagctgatttcaggaaccacaacttgccacttgcgaggataaagaagatcatgaaggccgacgaagatgtccgcatgatctcagccgaagctcccgtggtcttcgcaaaagcttgcgagatattcatactggagctgacgctgaggtcgtggatgcacaccgaggagaacaagcgccgcaccttgcagaagaacgacattgccgcagccatcaccaggaccgacatttacgacttcttggtcgacattgttcccagggatgagatgaaggacgacggaatcgggcttcctaggcccgggctgccacccatgggagccccagctgacgcatatccatactactacatgccacagcagcaggtgcctggtcctgggatggtttatggcgcccagcaaggccacccggtgacgtatctgtggcaggatcctcaggaacagcaggagcaagctcctgaagagcagcagtctctgcatgaaagggactgaggatgtcgctcaagctatcacctgatttttcagagctctcattttaggttctctaaactgcaggttttcgttggctaatatcgttgggtatcaaactgaaacaggtagggtgtagcatcatggtagtttgatttctgctgtggtgttagttggagggataatgattagcggctagtggattaaagttacccataccgtttcctttcgttccaaaagttcgccttcatgaggcctctgatatgaaaaatgctgggtgttaatgcttctatgctctgcttgtgttgtgcagttcatgcttctc

SEQ ID NO: 137633 - DNA, 341 bp, Zea Mays
ccacctcccgtacattatccttggtcttcacctccacctacatctccacctaccgaacatcagctaccttgccgacgcaggaatgagaagacgggttagactttgtcgaaaccctcttcactagtggaggtatcgaccatcactcatcactgtatcccgatggtgatcaacgattgtgagcttccatgttatgtgttgtgatacttgagacttttattatgactatgtatgagatattgtctcttattatgactggatgagatgtgtcttatgactatggatgagacttttgtgataaaattgatgagactatggatttaaatattgttatgtgattgtgt

SEQ ID NO: 137634 - DNA, 1182 bp, Zea Mays
attcctcttccgacacacacacataacaacgagcagcacagctcacgctcggctacgactacgatccgcgcgcatcgatggcgatgagtgacaccggctcgagcttcgcgcagtgggccgcgctctaccaccaccacgaccccgccggcggcccggtcctgcccgacgacgacgcggcggacgctggcaacggcatcggcagcggcaccgccaccgccgcgagcccgacgtcgggagggtccagcggcgggagccccaccaccaaggcagcgtgggggcagcagcatctgcttcacggggtggaggggccccgggtcgccgggaagccggcggcggcgcggcggcggtcccgcgcgtcgcggcgggcgcccgtgacgctgctcaacacggacgccgccaacttccgcgccatggtgcagcagttcacgggcgtccccgcgcccctcgccggcgcgttcagggtcggggacggggccccggtcatcagcttcgccgccgactacggcttcccgcccgcttcttcttcctcggccgtcaacgtgtccttcttcgaccaccagctccaccggagccaacaacaccctgcagcgccgccggtccacaggcagcagcagcagtacgccggcgcgtcgccgttcggcggctacagcagcggcctggtgcaaggcggcggcgcaagcgacgtcttccccgcgtcggcggaggacaggatgctcctgcagagcattctggccgcccagatgccgcacatgccgccggtgtccggcgctaacaccagctctcatggcttctttgcttgaataagtaagtagctgaccaaggtactacgacggcgtcatccatgccagtatgccacatgcatggaagctagagaacatgggggagatggagtgaggattagcagcctagcagtagcaaagaagaagaagaagaaggggtaatcacaagtttccctggttgcgtttgattagttttcttatccgcgcgcgcagcttcatttgtttctccgctagctgcagcgatgtaaatatctttatcttgtttttaaaagatgcagtagtctctgtacacgtactagctcatccgagatttgcatagctttcgatcgtattcggtggcggcgaacattatctcgttttgattgcgcccggttgcccggttgcggaagcaaaggtcgtggcg

SEQ ID NO: 137635 - DNA, 385 bp, Zea Mays
aacgaactccgccatgcgcgcaaccgatctcccttctccggctgcataaacattggtccccatccgcctctgttcttgattctcctggccgtgtttctcgccatccgcgcagactcggcttcgccaccaacctcgaatcccgatcggccgtcgatcccgattccggatctctccctatgcccttgacttctccgtcgggtctctgccactctgctcctccctccgcctctcccgttacgcctctacgccctaccgcgccgcgccctcaccaggtcttcgcgggcgaagaagcgatcggaggcgccatcaatttctcgccgttagtctgacgccgccgctaatcctctcccaaccgttgacagccccagcgttgctacaatcggag

SEQ ID NO: 137636 - DNA, 1580 bp, Zea Mays
cagagaaatggctacatatctctcttagacttggctgctggggcggcgctatccatggcgaagtgggcgtcggccgcgagggctacgacgacgacagaccgacttgacgctctcaacagagctgccttgccatgagatacgaggcactgttgcttagagatgctaaatactgcaacgaccttcacttgcaagtgtcccgtcaggagtggttaacttttgcaatggattgtcttgataatggcttctacaccattgcctccaaggcacttggactctgctaattccattgaggagaaggacaagatcattgagataacaggactccagaacttggccaagtcattatctacacaacattgtgacacgcgcagcgatagatcatcagcgcgcggttctagacttcactggcatgagttcattgcgaccaaccagcctcttcgtgagtattgcgacgcttccagaggctgtcgagcgataaacagagaaaaggctatatatctctctcagacttggctgctggggcggcgctatccatggcgaagtgggcgtcggccgcgagggctacgacgatgacgatagaccgacttgacgctctcaacaggtttgggatgttactaggagtcaagtttttgttgagatgagggagcatgagcgacgtgtgtggtcggtggacttctcaattatggacccaacaaaattggtcagtgggagtgatgatggatctgtgaagctgcgggatatgaatcaggcaattttattcttgcacctactgctgggagtattggcactattaaaacaagggcaaatgtgtgttttgtgcaatttcaacctgatactgctcgctccattgccatcggctctgcagaccacaaaatttactgctatgatctacgtcacatacgagctccttattgtacactagttgggcacacaaagactgtaagctatgttaagtatctggatgcatcgacaatagtatctgcatctactgacaactcattgaagctttgggacttatcgatgagtacaggaaggataattgacagtccagttcaaacatttaaggggcatacaaatacaaaggaactgggccatgctgatgttcaaaagagttgtcagaagttcatgacatctggtatttattatatcttcttttgtagtgggctggtgtggtctgcttagcagcaggtagcactacaaccagcaatgtatggatgaattgaaggtagtaaagaacgcagacaatcttatagaaactctgcatcttgaaactggcatgattgacaaagaagctggatgaatcctttggattggtgtcttcttatcaccaagcagtaatgtgaagcaagtttatttgttgactaagaacagatgagcacaaatcagtgaagagttcgttgcactagagatggaggatggataggtggtagatttcaatatggctttgatactattgtttccctttacaatctttgtacagaacaagaaaaatgacgttgtatgtggatactattgtaattcaagaatttatttctgaataataaatatatttgtttataatttgtgtatggatttggcat

SEQ ID NO: 137637 - DNA, 1557 bp, Zea Mays
cagagaaatggctacatatctctcttagacttggctgctggggcggcgctatccatggcgaagtgggcgtcggccgcgagggctacgacgacgacagaccgacttgacgctctcaacagagctgccttgccatgagatacgaggcactgttgcttagagatgctaaatactgcaacgaccttcacttgcaagtgtcccgtcaggagtggttaacttttgcaatggattgtcttgataatggcttctacaccattgcctccaaggcacttggactctgctaattccattgaggagaaggacaagatcattgagataacaggactccagaacttggccaagtcattatctacacaacattgtgacacgcgcagcgatagatcatcagcgcgcggttctagacttcactggcatgagttcattgcgaccaaccagcctcttcgtgagtattgcgacgcttccagaggctgtcgagcgataaacagagaaaaggctatatatctctctcagacttggctgctggggcggcgctatccatggcgaagtgggcgtcggccgcgagggctacgacgatgacgatagaccgacttgacgctctcaacaggtttgggatgttactaggagtcaagtttttgttgagatgagggagcatgagcgacgtgtgtggtcggtggacttctcaattatggacccaacaaaattggtcagtgggagtgatgatggatctgtgaagctgcgggatatgaatcaggctgggagtattggcactattaaaacaagggcaaatgtgtgttttgtgcaatttcaacctgatactgctcgctccattgccatcggctctgcagaccacaaaatttactgctatgatctacgtcacatacgagctccttattgtacactagttgggcacacaaagactgtaagctatgttaagtatctggatgcatcgacaatagtatctgcatctactgacaactcattgaagctttgggacttatcgatgagtacaggaaggataattgacagtccagttcaaacatttaaggggcatacaaatacaaaggaactgggccatgctgatgttcaaaagagttgtcagaagttcatgacatctggtatttattatatcttcttttgtagtgggctggtgtggtctgcttagcagcaggtagcactacaaccagcaatgtatggatgaattgaaggtagtaaagaacgcagacaatcttatagaaactctgcatcttgaaactggcatgattgacaaagaagctggatgaatcctttggattggtgtcttcttatcaccaagcagtaatgtgaagcaagtttatttgttgactaagaacagatgagcacaaatcagtgaagagttcgttgcactagagatggaggatggataggtggtagatttcaatatggctttgatactattgtttccctttacaatctttgtacagaacaagaaaaatgacgttgtatgtggatactattgtaattcaagaatttatttctgaataataaatatatttgtttataatttgtgtatggatttggcat

SEQ ID NO: 137638 - DNA, 1560 bp, Zea Mays
cagagaaatggctacatatctctcttagacttggctgctggggcggcgctatccatggcgaagtgggcgtcggccgcgagggctacgacgacgacagaccgacttgacgctctcaacagagctgccttgccatgagatacgaggcactgttgcttagagatgctaaatactgcaacgaccttcacttgcaagtgtcccgtcaggagtggttaacttttgcaatggattgtcttgataatggcttctacaccattgcctccaaggcacttggactctgctaattccattgaggagaaggacaagatcattgagataacaggactccagaacttggccaagtcattatctacacaacattgtgacacgcgcagcgatagatcatcagcgcgcggttctagacttcactggcatgagttcattgcgaccaaccagcctcttcgtgagtattgcgacgcttccagaggctgtcgagcgataaacagagaaaaggctatatatctctctcagacttggctgctggggcggcgctatccatggcgaagtgggcgtcggccgcgagggctacgacgatgacgatagaccgacttgacgctctcaacaggtttgggatgttactaggagtcaagtttttgttgagatgagggagcatgagcgacgtgtgtggtcggtggacttctcaattatggacccaacaaaattggtcagtgggagtgatgatggatctgtgaagctgcgggatatgaatcaggcagctgggagtattggcactattaaaacaagggcaaatgtgtgttttgtgcaatttcaacctgatactgctcgctccattgccatcggctctgcagaccacaaaatttactgctatgatctacgtcacatacgagctccttattgtacactagttgggcacacaaagactgtaagctatgttaagtatctggatgcatcgacaatagtatctgcatctactgacaactcattgaagctttgggacttatcgatgagtacaggaaggataattgacagtccagttcaaacatttaaggggcatacaaatacaaaggaactgggccatgctgatgttcaaaagagttgtcagaagttcatgacatctggtatttattatatcttcttttgtagtgggctggtgtggtctgcttagcagcaggtagcactacaaccagcaatgtatggatgaattgaaggtagtaaagaacgcagacaatcttatagaaactctgcatcttgaaactggcatgattgacaaagaagctggatgaatcctttggattggtgtcttcttatcaccaagcagtaatgtgaagcaagtttatttgttgactaagaacagatgagcacaaatcagtgaagagttcgttgcactagagatggaggatggataggtggtagatttcaatatggctttgatactattgtttccctttacaatctttgtacagaacaagaaaaatgacgttgtatgtggatactattgtaattcaagaatttatttctgaataataaatatatttgtttataatttgtgtatggatttggcat

SEQ ID NO: 137639 - DNA, 202 bp, Zea Mays
ccgtagtgctggcccggcccgacacgattatattttttattttacaaaaaacatatatacacatatacaatttatattcaatattaaaaacatttaagcatgatgttctaatagttagacagctttacctagtatcttccgtccttcttccatcagggcatgggttcgaaccccaccttctgcaccgtttttaacattttac

SEQ ID NO: 137640 - DNA, 1741 bp, Zea Mays
atggggatgctggcttctgctctgagttctttcaacaagaaaagcacgttgttgcagatgcttacctcactggcgaagacagtaggcaggattccagcttcgtgggggagacatgcgtggagcatcggaagcgaagatccaaggagagcggtccatgctctcaaggctgggacggctctcacgctggtgtccctcctgtacatactcgagcctttcttccaagggatcggaaagaacgcaatgtgggctgtcatgaccgtagtcgtcgtgctcgaattcactgcaggagcaaccatatgcaaagggctgaatagagggctgggaacagtgctggcaggctgtctagcacttctcatcgagctcgtagcagccggaaccgggaaggttctgcgcgctttcatcgtgggggcttcggtgttcatagtaggatttgccgccacatataccagattcttcccagcgatcaagaagagctacgactacggtgtgctgatcttcctcctgaccttcaacctgatcacggtgtcaagctaccggcagcaggacgtggtgtcgttgacgagagaccgcctgagtactatcgccattggctgcgcgatatgcctgttcatgagtctcttggtgttgcccaactggtccggagaagacctccacagtagcaccgttggcaaattccaaggattggcgacgtcaattgaagcttgtgtgaatgagtatttccgagaccaggatgaaggcgacgacgttcttggcaagcaggaagcaagagcttccattcagatcggctatagagcagtcttggactcaaagtccagtgatgagaccctagcacactatgcgagctgggagccaagacactcgatgcattgttacagctacccatggcagaagtacgtgaagctcgggtccgtgctcaggcacttcgcctacacggttgctgcacttcatgggtgtctggaatctgaggttcagactccgccgtccgtgagatcgctgttccgaggcccatgcacaagagttgcacgagaagtagccaaggtcctgcaggagcttgcagcgagcataaagcatcaccggcggtgcgcccccgacgtgctctccgaccatctccacgaagcgctgcaggatctgaactccgccatcaggtcacagccgcggctcttcctcggctccaagcacgcgtgcgccgccaacaagcgggtgctgctgatggaactgaactccgggtccgggaagctttccgcgtcgagagcagctcttcgctcgttcaagaccgacgcgacagcgctgtccgagacgaggaacgcccggtcagaccaaccgccgccgccgtcggatcgcagcgagaggagcggcggcttgctgcggccgacgctcagcaagatcgccatcacgagcctcgagttctccgaggcgctgccgttcgccgcgttcgcgtcgctgctggtggagatggtggtgcggctggagctggtgatagaggaagtgaagaacctggagcgggttgcgaacttcagagagctcgctactgggcataatcacctgatcgtcgatctcggtagcaaggagaagacgaggaacagtaatgctgcggcgttacaccctgtttctgctgcagctgaatgagggctccattctgagattgtaggctggaatatttctgttcatttcctatataaaaagcagccgtctgggaagagagatgcattttactctttttcatagaaaacatggatagtgg

SEQ ID NO: 137641 - DNA, 905 bp, Zea Mays
accataagaatgattgttttagggcttctctgtgcttgttaaaatgtctgtctatcattatatttcattgacaccctacacgagtggaaatgctaatccagtctgtgccttctgcaggaaactgggagaccacaactacttatcctggaacagacgccatgcaggacgctaagatgttttggaaccccaagtgtcctaactacttaagtgcaacttgtatgaaatgaaatgccctgaaccagaaatctcgttgggcacagactggatcagactagaacttcatgtacatttttttacaaagggtctaggtggctacgtgattttgtttcttttgttctatagagctgcatgtagcagtgatcatgagaatacatattgatgtctaatggcttgcttcgtggtacgtgcactctgagggcctgttcggtccagtggatttgagcattcggaacgactcctagctggattgtttgtctaatttatataaggtttgatcggttggaacgatttttagtgaaatccggcgtaaacgaacatgccacaaacggtttcctctaatagtgttttgtgtaatgtccgcaatgggggaatattacaaacttctgtataaattgaccactgtatgatgtttgtttgtatactacgatttctctactacttattaatgcggtaaggggtagactgccattctcattctctgttctgccttttcgattccccatccccacacagtctattctctgttctgcctttccgatgttcggtacgatttctctactacttattaaggcggtaaggggtaggcattctcatgttcggtcaccattctctgtttcctttctcattctcccctccccacaaagtttattctcattcctacgtacatctcatgcctagctaaaatt

SEQ ID NO: 137642 - DNA, 1880 bp, Zea Mays
cgcactcccagcttcctttaccttcgcagcaagcaagccggtagcagcaagctagatcgcggggaagcgactcgcctccaccatcggcgctgctccggcgcggagaagcgtcctctcgcggcggctgggaagaccagtctccgccagtcccggcggctgcttccgtgaggtgcccttggattccaagttcacacagcaggagttgccagcttgcaagccgattcttactccaaaatgggttgtctctgttttcttcatcgtcggggtcatctttgttcccattggtgttgtttcactgctagctgcgagagatgttgttgagattattgatcggtatgatgaggcatgtgtgccaggcaacatgactgagaacaagcttgcttacatccagaatgagaccttatccaaagagtgcataaggaatcttacggttacaaaggatatgaagcagcctatttttgtgtattatgaacttggtaacttctaccagaaccataggaggtatgtaaagagccgaaacgatgcacagctaagagatgctagtaaagctaaccagacatccgcttgtgaacctgagaagaccacagctaatgggcaaccaattgttccttgcggcctcattgcttggagcttgtttaatgatacatataatttcactcgtggtaatgagaacttgacagtggacaagaaagatatttcctggaagagcgatagggaacataaatttggtaaagatgtctatccgagcaacttccagaatggcgcacttaaaggtggagcaacacttgacccaaagatcccgttgagtgagcaagaggatctcatcgtttggatgcggactgcagcacttcctacattcagaaagttatatgggagaatatacattgacctcaaggagaatgacacaataacagtgacattgaataacaactacaatacatatagcttcggtggcaagaaaaagctggtcctctccactgcaacttggcttggggggaagaacgattttcttggctttgcataccttatagttggcgggctctgcattttcctggcatttgcattcaccttgctgtacttcgtaaaaccaaggaaactgggagaccacaactacttatcctggaacagacgccatgcaggacgctaagatgttttggaaccccaagtgtcctaactacttaagtgcaacttgtatgaaatgaaatgccctgaaccagaaatctcgttgggcacagactggatcagactagaacttcatgtacatttttttacaaagggtctaggtggctacgtgattttgtttcttttgttctatagagctgcatgtagcagtgatcatgagaatacatattgatgtctaatggcttgcttcgtggtacgtgcactctgagggcctgttcggtccagtggatttgagcattcggaacgactcctagctggattgtttgtctaatttatataaggtttgatcggttggaacgatttttagtgaaatccggcgtaaacgaacatgccacaaacggtttcctctaatagtgttttgtgtaatgtccgcaatgggggaatattacaaacttctgtataaattgaccactgtatgatgtttgtttgtatactacgatttctctactacttattaatgcggtaaggggtagactgccattctcattctctgttctgccttttcgattccccatccccacacagtctattctctgttctgcctttccgatgttcggtacgatttctctactacttattaaggcggtaaggggtaggcattctcatgttcggtcaccattctctgtttcctttctcattctcccctccccacaaagtttattctcattcctacgtacatctcatgcctagctaaaatt

SEQ ID NO: 137643 - DNA, 2098 bp, Zea Mays
atgtccaccccccaccccccaaactgtcgacgccgactcgacacgaacccaaccggccaaccacctcccctgctggtcagaactccgcaagtccgcatcaattcgcactcccagcttcctttaccttcgcagcaagcaagccggtagcagcaagctagatcgcggggaagcgactcgcctccaccatcggcgctgctccggcgcggagaagcgtcctctcgcggcggctgggaagaccagtctccgccagtcccggcggctgcttccgtgaggtgcccttggctcctgggcgacgggctcgtggcggccggcgagatgaacagccatgcggccggaacaagcaacgggggacccggggatgcggccgcagccaggaggaacaccaggatgcccaagtattccaagttcacacagcaggagttgccagcttgcaagccgattcttactccaaaatgggttgtctctgttttcttcatcgtcggggtcatctttgttcccattggtgttgtttcactgctagctgcgagagatgttgttgagattattgatcggtatgatgaggcatgtgtgccaggcaacatgactgagaacaagcttgcttacatccagaatgagaccttatccaaagagtgcataaggaatcttacggttacaaaggatatgaagcagcctatttttgtgtattatgaacttggtaacttctaccagaaccataggaggtatgtaaagagccgaaacgatgcacagctaagagatgctagtaaagctaaccagacatccgcttgtgaacctgagaagaccacagctaatgggcaaccaattgttccttgcggcctcattgcttggagcttgtttaatgatacatataatttcactcgtggtaatgagaacttgacagtggacaagaaagatatttcctggaagagcgatagggaacataaatttggtaaagatgtctatccgagcaacttccagaatggcgcacttaaaggtggagcaacacttgacccaaagatcccgttgagtgagcaagaggatctcatcgtttggatgcggactgcagcacttcctacattcagaaagttatatgggagaatatacattgacctcaaggagaatgacacaataacagtgacattgaataacaactacaatacatatagcttcggtggcaagaaaaagctggtcctctccactgcaacttggcttggggggaagaacgattttcttggctttgcataccttatagttggcgggctctgcattttcctggcatttgcattcaccttgctgtacttcgtaaaaccaaggaaactgggagaccacaactacttatcctggaacagacgccatgcaggacgctaagatgttttggaaccccaagtgtcctaactacttaagtgcaacttgtatgaaatgaaatgccctgaaccagaaatctcgttgggcacagactggatcagactagaacttcatgtacatttttttacaaagggtctaggtggctacgtgattttgtttcttttgttctatagagctgcatgtagcagtgatcatgagaatacatattgatgtctaatggcttgcttcgtggtacgtgcactctgagggcctgttcggtccagtggatttgagcattcggaacgactcctagctggattgtttgtctaatttatataaggtttgatcggttggaacgatttttagtgaaatccggcgtaaacgaacatgccacaaacggtttcctctaatagtgttttgtgtaatgtccgcaatgggggaatattacaaacttctgtataaattgaccactgtatgatgtttgtttgtatactacgatttctctactacttattaatgcggtaaggggtagactgccattctcattctctgttctgccttttcgattccccatccccacacagtctattctctgttctgcctttccgatgttcggtacgatttctctactacttattaaggcggtaaggggtaggcattctcatgttcggtcaccattctctgtttcctttctcattctcccctccccacaaagtttattctcattcctacgtacatctcatgcctagctaaaatt

SEQ ID NO: 137644 - DNA, 498 bp, Zea Mays
atgtccaccccccaccccccaaactgtcgacgccgactcgacacgaacccaaccggccaaccacctcccctgctggtcagaactccgcaagtccgcatcaattcgcactcccagcttcctttaccttcgcagcaagcaagccggtagcagcaagctagatcgcggggaagcgactcgcctccaccatcggcgctgctccggcgcggagaagcgtcctctcgcggcggctgggaagaccagtctccgccagtcccggcggctgcttccgtgaggtgcccttggctcctgggcgacgggctcgtggcggccggcgagatgaacagccatgcggccggaacaagcaacgggggacccggggatgcggccgcagccaggaggaacaccaggatgcccaagtgcaagggacggcgcgataatacatgctggggttagtggtttgctgttgatttggccccctttgggtttgtagatgctgctagcttatgctctcctttggcg

SEQ ID NO: 137645 - DNA, 789 bp, Zea Mays
gggaggaacatgaggaagaagtacactgacatcgcacaggcgatcaggccaggggatcgacgccaaccccagggactacctcacttcttctgcctcggcaaccgggaggcgaagaagccaggagagtacgtgcccacggaggaaggctgagctgacactggctacatcaaggcccagcaaaaacagaaggttcatgatctatgtccacaccaagatgatgatggtggatgacgagtacatcatcgtggggtcggcgaacatcaaccagcgttccatggacggggcgcgggactcggagatcgcgatgggcgcgtaccagccgcaccacctggcggcggcgagcaggccggcgagagggcaggtgcacgggttccggatgtcgctgtggtacgagcacctgggcgcggtggacgacgcgttcacccggccggacagcgtcgagtgcatccgcaaggtgaacgccatggcagacaggtactgggacctgtacgccggcgacgggcctgagcgtgacctgccggggcacctgctcacctatcccgtcgccgtcggcactgacggctcggtcaatcagctgccggggatggagttcttcccggacacgcaggcgcgggtgcttggcgccaagtccgactacctgccgcccattctcaccacgtaggcgtgtgctctgagcctctcacaatcttttggatttactgttttccccattctggacctgaataagagcagaactagtttggtattttttaaaaaagtaaataaaaggtgcactaatgcagtgtgcat

SEQ ID NO: 137646 - DNA, 1190 bp, Zea Mays
aggccggccaccacctccccacacgtttccctcagaccgagcaaagacgaaaatggcggcggcggttcctctcccctgaccagagccagggcgtgccactgccatgtcgccactgacaaaggcggcgtcggcggcggcggcggcggagtttctcatctcttccggattggatacagggcgtgccatgcctgcgtctcagatctcacgattggcatgcgccctgacttctcgctcttcgtatctccccctccctctcccggcccgtgctagcgtcggaggaattgtattgtcgtagatctgttgctccataaatgccttccctatctgtggccgagcgcaaccaagaaacgaggtatggccggagggagaggtagggctggtcggctggacctggtcggctggacgttgccggactggacttttccctgttggagagggggtagcgaggagggctgccgcaccgacgcgagcacgaggacgccgcggagggccgcgacccgaggccactggcgaggacggactgcagagcgctcgcagcggacgacccacgagcagagaagcgagctgcttacgaagctagatagaggatttggaacggcggcggccggcggacaagcgggctgaaggagtgcggcttgtgggtgactcggcaaggctacgagcttcatcgaacaagaagacacgcgggtcaagatttggtttggtaggtttcgagatgaagacgagggcaaggtctagcagtgccaactctaggtgtgctgctgcttacactgcgcggtggtggagctggtcatgttggcggccgtgcaatgcaagtgcccgccacgcccgcgtccaggaaggagacagggttttgacaggaaaggaagatgttcgtgcaataacaaaggaagctcgatctgtggtagaaccacacactaacaaaataaaaaggtgatctcccttcactcctaatctattgtccttaaagctagacaataatcccttggtagaggtaactgtaactcaaccttcagtattttttcttgaacgcatagggtaactatgtatcattgtattaagaagatgaaaggggtaaagagccttggaaggtacaaaatggcacaccacacactttctctttttcttatttatcttctagcatgtatttggcatatagatgcagatgaatctcaatttgttaagtctca

SEQ ID NO: 137647 - DNA, 1581 bp, Zea Mays
aggccggccaccacctccccacacgtttccctcagaccgagcaaagacgaaaatggcggcggcggttcctctcccctgaccagagccagggcgtgccactgccatgtcgccactgacaaaggcggcgtcggcggcggcggcggcggagtttctcatctcttccggattggatacagggcgtgccatgcctgcgtctcagatctcacgattggcatgcgccctgacttctcgctcttcgtatctccccctccctctcccggcccgtgctagcgtcggaggaattgtattgtcgtagatctgttgctccataaatgccttccctatctgtggccgagcgcaaccaagaaacgaggtatggccggagggagaggtagggctggtcggctggacctggtcggctggacgttgccggactggacttttccctgttggagagggggtagcgaggagggctgccgcaccgacgcgagcacgaggacgccgcggagggccgcgacccgaggccactggcgaggacggactgcagagcgctcgcagcggacgacccacgagcagagaagcgagctgcttacgaagctagatagaggatttggaacggcggcggccggcggacaagcgggctgaaggagtgcggcttgtgggtgactcggcaaggctacgagcttcatcgaacaagaagacacgcgggtcaagacgtgtactgatcggccggagtggaagaacaactcacatttgtgcagccagcccaagggatcttcagtgccgtcatattttgggaatccaagcttctgcgctcctggagggggtgggccgtgcctgaagtcagcgccattggaggttttggaggaatcgctgaaggtctgtttcttgtctgctaacacctgggattgtagacggttcacagtgacagagatgcggccttgttctgcttgtggtgtattcacggtgtcgttgagagcgcaattgtactgtccaaggggctctgggtgatgacgggatcctctcctggcgctgagtcgttcatcgtgagaacaggccgaccggcggcagcagaagagaagatcaggcggaaggattgtctagtccaataccaaatgataggcacagggttacgagcagatttggtttggtaggtttcgagatgaagacgagggcaaggtctagcagtgccaactctaggtgtgctgctgcttacactgcgcggtggtggagctggtcatgttggcggccgtgcaatgcaagtgcccgccacgcccgcgtccaggaaggagacagggttttgacaggaaaggaagatgttcgtgcaataacaaaggaagctcgatctgtggtagaaccacacactaacaaaataaaaaggtgatctcccttcactcctaatctattgtccttaaagctagacaataatcccttggtagaggtaactgtaactcaaccttcagtattttttcttgaacgcatagggtaactatgtatcattgtattaagaagatgaaaggggtaaagagccttggaaggtacaaaatggcacaccacacactttctctttttcttatttatcttctagcatgtatttggcat

SEQ ID NO: 137648 - DNA, 2217 bp, Zea Mays
gtcaccacagccgcatctctcgctcttctttcttgtcccgggctcccggctccatagtcgccgttacatcggacaagggcatcttgcggtgaagcatctaatctgagcagtcagtcgtccccccgctcgcggccgggctactgctggtcgtcaagtactcaagttgtaggcgtgcagccggggcgccggccgctagctgctgtcagcacgcgcacacagcagcagggtggtcgcccgcggccggtagccggcacgcggtcgcgacaagccgatagcaacagcaagccaggcccaagttcagtccccagagagcggcaaggtctgtcatcttctctggagggttcagaaccaccgagaattagctgtctttgaggagtacaataggaatggatgatgctcaagggtatcaagaaggagatgatcatgagttagtgctgaagaaacaagaatggatcaaaacacaagacatgctcaagagtaaacttattcttgaagatgaatttgcctggagtttaccttcggtgggctcaggtttagatgaacctgagtggtgcaaactgaagtatattggtgggactgacatcagcttcttgaaggaagacccatccacagcatgtgccgcggtggtagtcctcaatgccgatactttagaagttgtccatgaagagttcaatgttgttcgactgcaagtgccatatattcctggttttcttgcattcagagagtctagagccaagggattctagtatgatcaatccaaaatcatagatcttgagaaaggctccagttcttcttggactcttggaaaagctgaagatcaatgcacctcatttctgcccacagttgctcatggttgatggaaatggattgctccatccgcgaggttttggtttagcttgtcatctcggcgttcttgcagacattcctactattggagttggaaaaaatctacatcaggtagatggccttaaccaatcagaagttagaagactgctcggatcaaaagagaactgcaacagggaactggttttgttgacgggacagtctgggacaaaatggggcatggtacaacctaccatcatggtgggcatgctattgaacgccggccgcagcaatggccgcggcggcaggaggactagcatccagtcaccgccgcaggtcctctcctctgttcccttactcgtctacgagtacgaggatcccgccggctctactcctaccgctgccgcaaagatgctcatgtacagcctgcctgagcggagcatcgtctacacgcacgacagcaggcctcaggccatggagggcaacttcttcagcacgcctcaaggctggctggtcatccttgggcatggagaagtgacgtcggaggcctccatgtggcatccgctcaccggggagaccatcaccctcccacccatacatgacgaccaccacatccccaccaactgcaagtgcctgctcacccacaactccgccgcccacccggactgcgccgtcgtgcttctcgacgtcgccgatcctctcatgtggttctgccgtgtcaatggcggggctgaccggaggtggggacagcacacctacgacattggcgactacgagttccccgatgagttccgcaccccctctacgcccaccaagaacgtcatcagaagcgtcgccgcgcttaaagggaagctgcatttttgcttcatggaatcgcaccaaaacaagatgtgcgtcgttgacttagatttcccgtccgatcatggccaccctcccaccgcagagttccacgagtttgatgtctccccagagttcggcatcaagtttcctgacggcgtctgctctgccagcatccacttggtagagtccatggacgagctttttgccgtctgcgtcttctatgtcggttttgatcccaccaacgttagtgccgctggaatcttcaagatggaggactcctgcggcgaggaaaccgtggcctggcaccgggtggatgatatcggtgacagggcttttctcttgatgggcaccaacatggcaacttggtgctctgcaagcaccaataacctgaaaggcagcaccctctacttcttcctccacttcttacttggcgacagggacctatacatctatgatgtacaggagcagtccctggagactgtccaggttcacgaccagctagatttgaaggtcgtgcacacagaaccatactggattaatgtacctccgttttag

SEQ ID NO: 137649 - DNA, 3629 bp, Zea Mays
tcgccgctcggcgaacggtgatcgcgtggcccgtggcgacgctggggaggacggcggggggcacgcacggcacggccggctggcatgggttccgggacgtggcgcaaggcctacggcgcgctcaaggactccaccaaggtcggcctcgccaacttcaacagcgagtacaaggatctggacatcgccattgtgaaggcgacgaaccacgtggagtgcccgcccaaggagcgccactttaggaggatactcttcgcgacgtcggcgcaccggccgcaagccgacgtcgcctattcgatatgcacgctggctaggaggctgtccaagaccaagagctggatagttgcactgaaaacgttgatagtgatacacaggctgctcagagaaggcgacggcacattcaaggaggatttcctcacgtattcgtatagaggaaacgttctgcagatcccgcagttcaaggacgactccagcccattagcttgggactgctccgcctgggttcgcacgtacgcgctctacctggacgagcggctcgagtgcttcaggatcctcaagtacgacgtcgaactagatcggctgctcaagttaccccatgcttctggcaaggcgcacagcagaacaagatccctgccgctcgcggaacttctggtccagttgccagcgttgcagaagctgcttctcaggcttatttactgccagcctgaaggtgcagcctgcacaaactacctcgtacaatatgcgctggctcttgtaagtctgaagcttgttctggcaaataattttttttggcgcaatgtagtgtgtgtgttcccttatatcctcaagtcttacagaggtcttgtgtgccataggttttgaaggaaagtttcaagatatactgctcaatcaatgatggcatcattaaccttgttgacatgtattttgagatgccgaagtatgatgcaatcaaggcccttgaaatctataaacgagctggtcagcaggcagaaaaactctctaacttctatgaccactgcaaacttcttgagctggccaggactttccaatttcccactctgaggcagccgcctccttcatttcttgtgacaatggaagagtatatcagagaagcaccccgtgccgatactgagagcaagagtttggaaaactatgaagagaatcaacctagtgataatgaagcagcatctccacagggagccgagaaaccagtggaagatgaaaagtatgaacctgcagagcctgaagcggagccacaaccatctgttgatcctttggaagaagcagtggaacctcagccacgggcgactactgggaatctattaaacttggatgaagaagtaaaccccatgattgcagaccttgaaacaagcaatgcactggctcttgctattgtggcaccaggtaatgaaaacaagatgccaacttctcaagacttatttgcccttgacaaggctggatgggaattggcactggttactgcaccaagtaaccacacaaatcaacaagtggacaatcaattggctgggggatttgacaagctattgctagacagtctttacgaagacgaggcaaggaggcagcaaatagccagtgtgacctacactggaagtactgcagcaaacccatttgaccacaatgatccatttgccatgtcaaacagctttgcaccaccatcaaatgtgcagttagctatgatggcagagcagcagcaatattaccatgcacagcagcagcagtattatcagatacagcagcagcaccagatggtgatgttgccgcctcaaacataccagcagcagtcgcagtattctgccccttctcaatctggattatccaatccttttggtgatccattcagtagcctcgtcacgatggctaatccaccaaagcaaagcaattcaaatttagtctgaattgttttttttttgtgtctactgctcccactaattcagaccatacacaacattgacaattttgaggagcaacttgtacagttcaaaaactttgaatactgtatcttaacgatgcgctgtactgcagtagtgctcacatttggaaactattatgatctgaaatgttaatataatacacagttttgagttgtacaccatatcagctaatatgagagcatgtttaccatcatacattccagatgccggatagcatagagaagacggtgaaatcgtagtttttatttaagactagtcttattacaagatcacatgaattcaggacaaatttattttatacagtagctcacaaattcagaaggtcaggcctgatgcagtgatgggagctgtctgaggtcgtgggttcgcagcagctggggagccctttctccagaaggtactcatgtggggagccttcggcactggatttgcccacaagtagctcacgaattcattacttcatgacaccactaaatgacatgaaagtgacaccttttccagacccccttcatccagtgcaataacatagctcatccattcattcctcttgaacttgattggcatccatatttgggatctccacttcatctggaaagcagcctgcatatatgtcgatactccgtgtaaggcagatgctatagaaactgttagagtatattaggcatgttataatatattaggcaactactaatatggttggtttaggattgattataatcctggataacatttcttgtatctaagataacattccttgtatctaagataatcttccttatctctaggatagccttcttgtcttcaagtcatgtactcctatatattctctctaaagacttgttccatatggattgagtaggtttagatccatagcaagtcaaaatacaactcaatcagttcaatccacatcgaattgaaataaccaaacaaggcctaaaggctcgatgcaatacatccaacatattatacgcaatctctccttgcagaaacaaagcataacgataaaatgtctcgaaattgttctgatttctagaagttcttatgcacgcgtttcagttcagaattgagcacatccgaatagcgaaatggagatcccaaatagtcagataccttcgatgaaataggtcgagcacgggtaaccgcgggaggaggcggcgacggcgcgggcctcgtcggcagagagtccccgcctcggcgctgccgaggagcccatgaacccgccagcgtggccgataagcgcgagaacccccagggccgcgccggcgggccggggcggagcgaagtaggatgtcccgggccggaagggcgcccagtcgggctcggccatccgcgccatggcgctgtcgatcgcctcctccaaccgccgggactgctcggaggcgtccgtcgcaggtgaagaaggccccgcggcgtcctcttcaagaaccttcaccgcgcgccggcgagtgtggttgtgccggcggctcagaaccacgccgggctggggctggggctgggccccgaggcggcgcgccaggaccgctgaccgggagcagagcacgcgtgccatggatgccttcacgtaacgcgtacggagtcagagttggcgcccgggagacggagcagcagcagcctgtgagcgcttgcgtccgacggcgagctggtgtgcgcgtcgcgaaggttgggggatcgttgggattt

SEQ ID NO: 137650 - DNA, 3761 bp, Zea Mays
atcaaatttaggtgagactgtgagagagtcccgcggcgcccacgcgcgcgacctgcgcgggagacccgatcaagccgaaaccgaaagcgaccgtacgccaccaggcctaccaaaacgacgcgagcccgtgcctctcccgtccccacttcggccttcccttcgcctccccgtccgtccgcccgtccgtccatccgccgcgcgctaaacttgggggaggtgcccagctggctggttcgccgctcggcgaacggtgatcgcgtggcccgtggcgacgctggggaggacggcggggggcacgcacggcacggccggctggcatgggttccgggacgtggcgcaaggcctacggcgcgctcaaggactccaccaaggtcggcctcgccaacttcaacagcgagtacaaggatctggacatcgccattgtgaaggcgacgaaccacgtggagtgcccgcccaaggagcgccactttaggaggatactcttcgcgacgtcggcgcaccggccgcaagccgacgtcgcctattcgatatgcacgctggctaggaggctgtccaagaccaagagctggatagttgcactgaaaacgttgatagtgatacacaggctgctcagagaaggcgacggcacattcaaggaggatttcctcacgtattcgtatagaggaaacgttctgcagatcccgcagttcaaggacgactccagcccattagcttgggactgctccgcctgggttcgcacgtacgcgctctacctggacgagcggctcgagtgcttcaggatcctcaagtacgacgtcgaactagatcggctgctcaagttaccccatgcttctggcaaggcgcacagcagaacaagatccctgccgctcgcggaacttctggtccagttgccagcgttgcagaagctgcttctcaggcttatttactgccagcctgaaggtgcagcctgcacaaactacctcgtacaatatgcgctggctcttgttttgaaggaaagtttcaagatatactgctcaatcaatgatggcatcattaaccttgttgacatgtattttgagatgccgaagtatgatgcaatcaaggcccttgaaatctataaacgagctggtcagcaggcagaaaaactctctaacttctatgaccactgcaaacttcttgagctggccaggactttccaatttcccactctgaggcagccgcctccttcatttcttgtgacaatggaagagtatatcagagaagcaccccgtgccgatactgagagcaagagtttggaaaactatgaagagaatcaacctagtgataatgaagcagcatctccacagggagccgagaaaccagtggaagatgaaaagtatgaacctgcagagcctgaagcggagccacaaccatctgttgatcctttggaagaagcagtggaacctcagccacgggcgactactgggaatctattaaacttggatgaagaagtaaaccccatgattgcagaccttgaaacaagcaatgcactggctcttgctattgtggcaccaggtaatgaaaacaagatgccaacttctcaagacttatttgcccttgacaaggctggatgggaattggcactggttactgcaccaagtaaccacacaaatcaacaagtggacaatcaattggctgggggatttgacaagctattgctagacagtctttacgaagacgaggcaaggaggcagcaaatagccagtgtgacctacactggaagtactgcagcaaacccatttgaccacaatgatccatttgccatgtcaaacagctttgcaccaccatcaaatgtgcagttagctatgatggcagagcagcagcaatattaccatgcacagcagcagcagtattatcagatacagcagcagcaccagatggtgatgttgccgcctcaaacataccagcagcagtcgcagtattctgccccttctcaatctggattatccaatccttttggtgatccattcagtagcctcgtcacgatggctaatccaccaaagcaaagcaattcaaatttagtctgaattgttttttttttgtgtctactgctcccactaattcagaccatacacaacattgacaattttgaggagcaacttgtacagttcaaaaactttgaatactgtatcttaacgatgcgctgtactgcagtagtgctcacatttggaaactattatgatctgaaatgttaatataatacacagttttgagttgtacaccatatcagctaatatgagagcatgtttaccatcatacattccagatgccggatagcatagagaagacggtgaaatcgtagtttttatttaagactagtcttattacaagatcacatgaattcaggacaaatttattttatacagtagctcacaaattcagaaggtcaggcctgatgcagtgatgggagctgtctgaggtcgtgggttcgcagcagctggggagccctttctccagaaggtactcatgtggggagccttcggcactggatttgcccacaagtagctcacgaattcattacttcatgacaccactaaatgacatgaaagtgacaccttttccagacccccttcatccagtgcaataacatagctcatccattcattcctcttgaacttgattggcatccatatttgggatctccacttcatctggaaagcagcctgcatatatgtcgatactccgtgtaaggcagatgctatagaaactgttagagtatattaggcatgttataatatattaggcaactactaatatggttggtttaggattgattataatcctggataacatttcttgtatctaagataacattccttgtatctaagataatcttccttatctctaggatagccttcttgtcttcaagtcatgtactcctatatattctctctaaagacttgttccatatggattgagtaggtttagatccatagcaagtcaaaatacaactcaatcagttcaatccacatcgaattgaaataaccaaacaaggcctaaaggctcgatgcaatacatccaacatattatacgcaatctctccttgcagaaacaaagcataacgataaaatgtctcgaaattgttctgatttctagaagttcttatgcacgcgtttcagttcagaattgagcacatccgaatagcgaaatggagatcccaaatagtcagataccttcgatgaaataggtcgagcacgggtaaccgcgggaggaggcggcgacggcgcgggcctcgtcggcagagagtccccgcctcggcgctgccgaggagcccatgaacccgccagcgtggccgataagcgcgagaacccccagggccgcgccggcgggccggggcggagcgaagtaggatgtcccgggccggaagggcgcccagtcgggctcggccatccgcgccatggcgctgtcgatcgcctcctccaaccgccgggactgctcggaggcgtccgtcgcaggtgaagaaggccccgcggcgtcctcttcaagaaccttcaccgcgcgccggcgagtgtggttgtgccggcggctcagaaccacgccgggctggggctggggctgggccccgaggcggcgcgccaggaccgctgaccgggagcagagcacgcgtgccatggatgccttcacgtaacgcgtacggagtcagagttggcgcccgggagacggagcagcagcagcctgtgagcgcttgcgtccgacggcgagctggtgtgcgcgtcgcgaaggttgggggatcgttgggattt

SEQ ID NO: 137651 - DNA, 1049 bp, Zea Mays
gggggacagaccttcgctgtggttttgcctgaagaaaaggatctcaacacagggtcatgaaaagggactgctgggcgtcggctggactgcccaggaacacgttgaaagcaacataactctgggagtttcttttttttagaggggggcttgaaccctggttgttggtatcataactggaagcaaaatcaccacaatagcggtgtcttctcaactttaatattatcaaatagtctctaatgttaataccacattctttatgcagtagagaagatgagtttgctgagcccactgaacttgatcgtagtaaaacgacaatgctgagtttcgaggataagaaaaccagtatcggtaactggatccagtgccgggaagttctagacacaggagttgtttgtggcaaatggcggagggcaccattgtttgttgttcaatcaagtgactgggactgttcgtgctcagttgtttgggatcctatccatgctgattgtgctgttccacaggaattggagaccgttaaagttcacgagcaactgaagtacataaataagctgaagaatcgtctaggtgacagcaatcagaaacgctgaaaaacggtactcttgctgtcctgcaccagtgctgtccacagatgggtgtcgataccgtgtaccaattttcctcggatgcctcggatgaagtgagagccagtagatatgaaatccgtgtctacgcatgacatcttgacacataaaaatgctccttccagtcaaccggcatacgttatacgagtttcagtgtcgtgtgtaaataagagaaagaaaaggcattttaaaaacaaaagccatagcaaaagcaaaaaaaggaggaggagaagaaaatactcgatgctgctggagaactacaactcggtgagatggaaacagaaaggtctgggttgtatcatgaggtgtaaactggggtggtgggcgtgtggccgtgtttgtgtgtgtgtttacagttttgtcacctccgctgcttgaattatgatgaccgaagaatggatcacaatgctatagtttgatttcttttac

SEQ ID NO: 137652 - DNA, 1313 bp, Zea Mays
tttctcagcaccttcttgtgccgttcttcacccgtcgtctcctttccgcagcaaccatcagcgtccaacctcctctctcaccctctccgtttgcaacaaccgcccaacgccaggtgcccagatcggcgtcccttccagccattttccgcgtccttcgccggtgtcgaagcacccatcagcagtgtacctgcttcagttaatagttatctgatatctacccttggccaaagcaagctatctattgtgcctgtgatttttgttgggagctgtcatagttcagtttttggtaggaacggtcacagctctactcaactgaaggcatggctgtaaaatctagtagaagttcagatgaaagctatatagagcctctcctatgctggaagaaggaattcagatcatctgtaattaaaattgttgattcgtccttaaactcgagtttgatgtctgccgacagtatttgttcaattcctgcttcagaatatggtttctattttaataaacgaatgaagatggatgaggaatatgatcaccttctgacaaatggaaatatgaaagatagtagcacggcaaacttcacaaccactggatatgtctcatctccagagcgcaacatggatggtcaatcatgtatggttagttcaactacagaatttttagcaggatcacattctaatgttaatactggtcagccatcatcctcatcaagtgcaccatcttatatcagtcagagtattaaagaagcttgggagtgttcattgcctgatacaaatactccaaaaccattaacagagttaatatcagcgagggacctttgcatctccatcctcaaaaggaaaatatgttccgccaaagactcagaactaagcagaacatcaagtactatagaccgtgatgataatctaaacaatcctttatttgaatgcacaaaatgcggtctgatggaagatccatccaaaatgttaatttgtgattgttgtgaaggagcatttcatttattgtgttgcaatccacatgtcaagaaaataccagaggaagagtggtattgtttggcatgtaaaagaaagaaacctaagagacaacgtggaaagtttgcaaatcccaaagttgaatcatccaagggcattcaaagaccccgccgaggtcttggtcctattcgagatatgttactggattctgaatcatatgaaagtggggttcggattggtactaagtttcaagcagaagttccaaaatggtctggtcctatttctaggtatgctcgcttactcttgataaagttactttaagttttcatgttaatgcaattaatgcga

SEQ ID NO: 137653 - DNA, 1310 bp, Zea Mays
tttctcagcaccttcttgtgccgttcttcacccgtcgtctcctttccgcagcaaccatcagcgtccaacctcctctctcaccctctccgtttgcaacaaccgcccaacgccaggtgcccagatcggcgtcccttccagccattttccgcgtccttcgccggtgtcgaagcacccatcagtgtacctgcttcagttaatagttatctgatatctacccttggccaaagcaagctatctattgtgcctgtgatttttgttgggagctgtcatagttcagtttttggtaggaacggtcacagctctactcaactgaaggcatggctgtaaaatctagtagaagttcagatgaaagctatatagagcctctcctatgctggaagaaggaattcagatcatctgtaattaaaattgttgattcgtccttaaactcgagtttgatgtctgccgacagtatttgttcaattcctgcttcagaatatggtttctattttaataaacgaatgaagatggatgaggaatatgatcaccttctgacaaatggaaatatgaaagatagtagcacggcaaacttcacaaccactggatatgtctcatctccagagcgcaacatggatggtcaatcatgtatggttagttcaactacagaatttttagcaggatcacattctaatgttaatactggtcagccatcatcctcatcaagtgcaccatcttatatcagtcagagtattaaagaagcttgggagtgttcattgcctgatacaaatactccaaaaccattaacagagttaatatcagcgagggacctttgcatctccatcctcaaaaggaaaatatgttccgccaaagactcagaactaagcagaacatcaagtactatagaccgtgatgataatctaaacaatcctttatttgaatgcacaaaatgcggtctgatggaagatccatccaaaatgttaatttgtgattgttgtgaaggagcatttcatttattgtgttgcaatccacatgtcaagaaaataccagaggaagagtggtattgtttggcatgtaaaagaaagaaacctaagagacaacgtggaaagtttgcaaatcccaaagttgaatcatccaagggcattcaaagaccccgccgaggtcttggtcctattcgagatatgttactggattctgaatcatatgaaagtggggttcggattggtactaagtttcaagcagaagttccaaaatggtctggtcctatttctaggtatgctcgcttactcttgataaagttactttaagttttcatgttaatgcaattaatgcga

SEQ ID NO: 137654 - DNA, 657 bp, Zea Mays
agcgaaggacctaacctacgtagcaccgctcagctccgctccgcggcgatgggtcaccgccgccacgaggggtcgtgccgctgcgagctctgcggcgcgcccgcggccgtgcactgcgcggcggacgaggctttcctctgcgccgcctgcgacgccaaggtgcacggcgccaacttcctcgcgtcgcggcaccgccgcacgcgcctccgcctcgcggccgcgggacccccgccgccggacgacgaggccgggtacgggtccgccgcgagctcctgcgtgtccacggccgactcggcgccgcggccgaggcgtggggcccgcgcgccggccgggagcgtgcgccccgaggccgtgctcgaggcctgggccaagcggatggggctcggggcgggggcgcgccggcgcgtcccgccgcgcgtcgccgtggccgccgctctctggtgggaggcggcggggcggggcggggtcgggggccacgcccaggcgctgcggcggctggaggcgtgcgcgcacgtgccggcgaggctcgtgctggccgtcgccgcgtccctcgcgcgcgcgcgcgcgctcttgcggagggccgccacggacgccgtggagggctgggacgagtgcgcgtgggcggggcccaagtccagcccgtcacgctcttgatcc

SEQ ID NO: 137655 - DNA, 777 bp, Zea Mays
atggcgttcaattactataaaatgacttggtgtgacactgcagcagcagcctcctcacgcaatgaagaagaaattaaaaaatgtgttgttgttgttgcaacactgcgcaagaagcgtcattggggaggctctgttattggtcacaagacctacaaccgtgaccgtattggtggccatattcgactaatgaatgactacttcattgagaggcatttgtttgatccaaatatattccacagaaggtactttcagtctctcttcttggagactgaggataagatcatagttgcaaatggctttttcaaacaagagaggaatgcagcaggtgtgttgggcttctctggtagacaaaagatcacagtggcattaaggatgttagcttacggagggccagcagatgctctagatgatggattgcgtatgggaaaaagcacagtgcttaagactctcaaggagtttgttagcacaatcatcacagtgtttggagatgaatatcttaggcctccttcaccagctgaattagaacacattctatcagtgaatgaggcacgtggtttccctgtctcacgtcgcgctggcatgggcgctccagaaaactcgtggctcaggttggccactgttgattctgggctccccgttctgcccctgcccgcttctggaccgaccgcagatcctggggccgaaatggtcgttctccctaggccaaatctgatccgccgacgaggtgccgccacgtcggaggagtttctgttaggttctcgtagcagtcgccagtag

SEQ ID NO: 137656 - DNA, 153 bp, Zea Mays
atggatctactctcagcagtcgaagaaaaattgttcggccatttacttcttgtagagaatagagatgatttggttactgctgtaaaacccagttgtattctcctttcagctcttgcctgttgaaatttgaatgtttatctgtggatttattcc

SEQ ID NO: 137657 - DNA, 679 bp, Zea Mays
gccgaggctcgtgcgcgcggtcaccgacgctgccgacgtctttgcaataaatgggctgtacatttcactgggatcaccacctcttcctggatggactggagatggtggagacccttgtggtgagggctggcagggtgttctgtgtaccggctcttctataactggaataaccatgaatgctgcaaacttgggaggacagctgggaagtttaggaaacttcaatgccatcaccagcattttcctctctgctaatcaaattactggaagcataccaagttcactgtcaaaactcgaaaacttatcagccatgtcagtcaacggcaaccatctaagtggaggcctaccagacacttttgattcactcaatagacttgtaaatttggatatttcttcgaataacttgactggcgtgttaccgtcgtcaatgaaaagtttggcatctttaacttcattgcacatgcaagacaatcaactgtctgggacccttaacgttttgcaaggtctcccactgaaagacttgaacatagagaataatattttttctggaccggtgcctgcgagcttgcttaacataccaaacttcaaaaaggacgggaatccattcaataccacatctgcatctccgccttcaacaggacccgacccaactctaacaccagcacctaacacttcaaattca

SEQ ID NO: 137658 - DNA, 1457 bp, Zea Mays
ctcctctccacctctcaatttcccaaattgaatcctcctcctccccgcctagggttccgattccgcaccgtccgagaaccacccaagcggcggcaactgtcccttctcgtcggccaccgccgcacaactcagttgcttgttcagccgctccgctgccgacccgcctatcgcctgaggttcttacggtgccacggagttgcaactgcacaaaggccttttgtggtcacaaagggtgctattgtgttacaacaacagttctagttgaagtaataagacattttttaaactgtctgctacattgcttccatggcaaccaatgagaacctcccaccaaatgtcatcaggcaattggctaaagaactgaagaatcttaatgagtcacctgcagaaggaattaatgtgactgtcaatgatgatgacttcactactatttttgctgatattgaaggccctgctggaactccatatgagaatggagtgttcaggatgaagctattattgtctcatgatttccctcaatctcccccaaaaggattcttcttgacaaaaattttccatccaaacatagctactagtggtgagatatgtgtaaacacactgaagaaggattggaatcctagccttggattaagacatgttcttctggtagtgagatgccttctggtcgaaccatttcctgaatctgcacttaatgaacaagctgggaagatgctactcgaaaattatgaggaatatgcacggcatgcaaggttatacactggcatccatgccctcaagaataagtccaagactggagctatatctgagtcgaccacagctctgaatgtcgacaagtcaagcactgctcccaacgagaacgcaccatcgatgccaccggcaatacctacctccgctgcatccagagcacttggcacaaatttgcaggatcagagccctactgtatctgatcctactgtaggagcggcggcggcggcggcggcacgaaggaaggatggcccaatgccttccaaagtacctgttgataggaaaaagatggatgcacggaagaagagcttgaagagattataggcggaaccttcatagtccagcatttaaatctgtcggaaatttagcagatgcctagcgaagctgggagagagacaattagttgggaggcatctgatgacctggcttccgggaggtaggggtcctgggctgggacaaaagtgaataatgtggcctgggtgagtccttcgggacaactgtatgtgcaatgtccaatcatttggaagaacacctgcctatttccttctgtcctctgtattttgttagcttagcggtagtgttagctagctcataggggcaattccctgtctagccatgggctgctgctccgtactctgcttgaataataatttgtccgtgcaattacagctattgttttgtttggaggaatagttgcctttttctgttgattc

SEQ ID NO: 137659 - DNA, 2585 bp, Zea Mays
cgacatcctccgctccgcgctttcatcgccgccatcaacggtcgtcgctatcccgtccgtgatgctcgccgcccctgctcccccacgctctgccatcctcgccctcctccgcgcacgcgtcggacgctcgccatgctcgcctccctcccctccggcccttccctcgcgcgggctcggaaaaaagtctagccccaaactccccagcggggggcgagcctaggagctgaaccaaccgtacaacagtttctccccaattcctccgccgtctgcccccttcggaaacccaatggcgtcgcccgacgacgagaccgcgcagccaccatcgaagcggccccgacacgatgccgaacctgaggtggacgccgctgagccatcaccgcgcgtggtgctcaacccagcgttctgcgatctcgacttcgatgtaggcgggggcggtctccgggggagcgcgcttcacgagggcggcttcgcctactgctggtccggcgcgcgcgcgatggtgggcgccaggggcggcgggcggtactgcatcgggtgcagaatcgtcgctgagcagccggtggagatggatcccacgacctccggggagcgccacctctgccgcattggggtctcgagaggggatgatctcgtaggtgcgctcggggagtcccagcacagcttcgggttcgggggcacggggaagttctcccaccagcgcaggcttatcaactacaacgtcaagttcggcgtcggcgacacggtcgtctgcgccgtggacctcgattccaagcccatggcatcgatagggttcgcgagaaatggcgaatggcttggtattgcgaggcattttgatgcggggtgagaaagggcttggtctggttgacactcctctgaggccgatgcgatggggatccgcactgtttccccatgtcctgctgaagaatgttatcgtggagatgcagttcagtagggaggatgggctgctgcctgttgatggttatgaaccctgggcctcagctttttctcaaaggaattcagaatttggcccttcgtttgagcaaaataaatgtgaggtcatgatgatggtcggtcttccggccactggcaagtcaacatgggcagagaaatgggtcaaggagcatcaggagaaacgttatatccttctcggaactaaccttgtattggagcaaatgaaggtgccaggattattgcgtaagaataactatggtgagcgttttgaacgactgatggattgtgctacatggattttcaacaaactgctgactagggctgcaaatacccctcgcaacttcattatcgatcaaacgaatgtttacaagaatgctcgcattcgcaagttgaggccatttgctaactaccgcaagactgatgtggtcatgttcccaactccaagtgaactgaaatccagggcagcgaagcgtttcaatgagatgggaaaggaaataccagctgaagcagttaacgaaatgacagccaattttgtcctaccactctcgaaggatatgcctcattcgaaggagccttttgatgaggtaatcttcacagagctttctagggatgaggctcagagaaccctagatgatatgcagcgtgtgttgccaagaaatgtgaccccaagctatggaaactctggcaaccaaaaacatgtaatggtgcctttattgttatttttgaaacagtgccttgtatgttttatgtcatcatggatcagattagtgtaaatatgcaacgctatacaacaatgttctgatgttctgggactgctgctccacttgatcctgaagccactttgcaaatcaaggtgcacagttttcaaacaaccaacgtaaaccaattttattaggctacttagtagcagggatataaattaatataaagaatggaagttgttaacttacataaactactgtgttgaattcatgttcattttagccttgtctgcacctgttaactatccatttgtctatacaactaagtgcagttcatagtccaaactaaggtatcaccattttgtcttaattattgcatacaaaactaatgaaacatgattatgtttctgcattttaacgagtgagtagtcccataaaatatcaagaacgacatccaaaactaatccgtttttttcacgaggtttgctgacataagtggcttttgtttttgtagtagccagttgtcctttctgaaccctctcatgcattgaaccctctcatctgttgttatgtttgtacaacagtgttgtacgagtgcccgcgacaggagcttgtacgccagtgtgttttcttccggctgattgttttgctctgtgaagtcgttggtgccaccatcacactgctagcgtgcagaaactcctctgttgatttaatcctatctccatcagtgatataaaggtacaagttgaagtaaaagacatggatatgatgcagcaagtcaagtctaacaattttttatgtctcggttccttcttgtcctggcgcatatgtgctcttccttttatttatgatctttctagaagataacctatctaattggggatgctttcaccatagccgagttattctttaatcattgattattgtgaccgt

SEQ ID NO: 137660 - DNA, 1703 bp, Zea Mays
cgtgatgctcgccgcccctgctcccccacgctctgccatcctcgccctcctccgcgcacgcgtcggacgctcgccatgctcgcctccctcccctccggcccttccctcgcgcgggctcggaaaaaagtctagccccaaactccccagcggggggcgagcctaggagctgaaccaaccgtacaacagtttctccccaattcctccgccgtctgcccccttcggaaacccaatggcgtcgcccgacgacgagaccgcgcagccaccatcgaagcggccccgacacgatgccgaacctgaggtggacgccgctgagccatcaccgcgcgtggtgctcaacccagcgttctgcgatctcgacttcgatgtaggcgggggcggtctccgggggagcgcgcttcacgagggcggcttcgcctactgctggtccggcgcgcgcgcgatggtgggcgccaggggcggcgggcggtactgcatcgggtgcagaatcgtcgctgagcagccggtggagatggatcccacgacctccggggagcgccacctctgccgcattggggtctcgagaggggatgatctcgtaggtgcgctcggggagtcccagcacagcttcgggttcgggggcacggggaagttctcccaccagcgcaggcttatcaactacaacgtcaagttcggcgtcggcgacacggtcgtctgcgccgtggacctcgattccaagcccatggcatcgatagggttcgcgagaaatggcgaatggcttggtattgcgaggcattttgatgcggggtgagaaagggcttggtctggttgacactcctctgaggccgatgcgatggggatccgcactgtttccccatgtcctgctgaagaatgttatcgtggagatgcagttcagtagggaggatgggctgctgcctgttgatggttatgaaccctgggcctcagctttttctcaaaggaattcagaatttggcccttcgtttgagcaaaataaatgtgaggtcatgatgatggtcggtcttccggccactggcaagtcaacatgggcagagaaatgggtcaaggagcatcaggagaaacgttatatccttctcggaactaaccttgtattggagcaaatgaaggtgccaggattattgcgtaagaataactatggtgagcgttttgaacgactgatggattgtgctacatggattttcaacaaactgctgactagggctgcaaatacccctcgcaacttcattatcgatcaaacgaatgtttacaagaatgctcgcattcgcaagttgaggccatttgctaactaccgcaagtgaactgaaatccagggcagcgaagcgtttcaatgagatgggaaaggaaataccagctgaagcagttaacgaaatgacagccaattttgtcctaccactctcgaaggatatgcctcattcgaaggagccttttgatgaggtaatcttcacagagctttctagggatgaggctcagagaaccctagatgatatgcagcgtgtgttgccaagaaatgtgaccccaagctatggaaactctggcaaccaaaaacatgtaatggtgcctttattgttatttttgaaacagtgccttgtatgttttatgtcatcatggatcagattagtgtaaatatgcaacgctatacaacaatgttctgatgttctgggactgctgctccacttgatcctgaagcc

SEQ ID NO: 137661 - DNA, 126 bp, Zea Mays
atttctaaaattcatttatgcattcgagaggcacttttaattacccaaaaacttaattattgctacaaaaatcctaaaactattcctagcaaaaactacaggattttgcggattcaacaaaatggg

SEQ ID NO: 137662 - DNA, 327 bp, Zea Mays
atgtcgcggtcgccggtgatgactgacgatgagggggctctggagctcgctctcgcctaccggccggcagcgtgcagaggtatattttttggtgtctatgacatgtggggccagtggcatacaaggaatgagtatatttccgatcgactcatttctgccggaagtacctgccccaagcgtgacgagatgatcaccctgctggatggagattgcctggtggtcttccagctgattgagcaaacaaagctcagggtctacataattagagcaagttcctactacggaaataagcgaggactgattgagcaaataagcgagaaccagtga

SEQ ID NO: 137663 - DNA, 1584 bp, Zea Mays
gcttccccgatgccgtccacgccgtggctcccctggcgcctcgccgtcccgatcgcagccgcattggcctctgtcccgttcatcctcccgctcgtgctccctctcctcctccgttccaatgcctccccgcgggcgctctccgtgaaccgcctcacctggctcccgtccccagcgatccggacagctacgacggtttcgccgccacttgctccgttactatcaccgtcacaaccatccgcgccctcgccgccagtgatacatatgtcaccttcaccttccccacccccgccgtctccccctgcctcgttggcgcccccatcgccaccgatgatacaggcgccgcgttcgccgccgccgccgccgccgatacaggcgccgctttctccaccttcacaatcgatacaagcgccgcatccacctcccccaccgcattcttcctctccgccaccgcccgagtccatggcgacggacgagaaagcgggtgaaactgaaacgagaaggtgcgacgtgtacgacggggagtgggtgcaggacgaggaggcgcggccgctttaccctccgggaacgtgcccctacgtggacgaggcgtacgcgtgcgcggcgaacggccgaccggactccaggtacacgcggtggcgctgggcgccgcgccactgcagcctccccaggttcaacgcgacggacttcctgcataggctgcgcggcaagcggctgctgctcgtgggcgactcgatgaaccggaaccagttcgagtccatgctctgcgtcctgcgcgaggccctgccggacaaggccaggatgttcgagacgcacgggtacaggatcagcaagggccgaggctacttcgtcttcaagttcccggactacggctgcaccgtggagttcgtgcggtcgcatttcctggtccgcgaaggggtgcgcttcaacaggcgggggaactccaacccgatcctccagatcgaccgcatcgacaagacggcgaaccggtggaagaaggccgacgtgctcgtcttcaacaccggccactggtggacgcacggcaagacggccagaggacagaactactacaaggaaggcggcacgctgtacgctcgattcgactcgactgaagcttacaggagagccctcaagacatgggctcgctgggtcgacaagaacatggacccggcgagaagcgtcgtcttctaccggggatactccactgcgcatttcaggggaggcgactgggactccggcggctcgtgcaacggcgagacggacccggcgttcagaggcgccatcgtcgacagctaccctctgaagatgaggatcgtgcaggaggccatcgcccggatgcggttcccggtgcggctgctgaacgtcaccaagctgaccaacttccgtaaggacggccacccgtcggtgtacggcagggccggggacaagaagctgtccaggaggaagcaggactgcagccactggtgcctccccggcgtgccggacgcctggaacgagctcatctacgcatctcttgtcatggaacccaatcctgtcgcgtggggaaacagatgagagctagctatcgtttttctttgttcagttttc

SEQ ID NO: 137664 - DNA, 656 bp, Zea Mays
gggccgacgcgcgagcacgcggcagcgtgcgcaatttgggctgagcagtgagaacggcccgactatcgtgcatggggcagccttgtttaggttaagtaaccctagttagggttatgtggacaaatatctgctttatctctgaggggtttcacatctctatataaggaacttgtacaccacctcataatacaaagaagagaaagaggccaatggcccaacactatatcctgtgtctcgtgtgttactctgtcgtgcttctgggaagggagacgggttctctacagcttcttgtgcctctactgctgacgggagggaagggagcagatctggtgatctgcggcaacgtagttctcaacacgttatcagcactgctctaccccgactcgtggatcctatcggcaccgactctccgtcacgccggcaggtcccggccttgccgaactgtcctacgcgacaggcttcgttcccgtttgtcgaaccaggaatcacggtatgaaattttgagtggatctgcaatttactgttcatcgcgtatatcgcttgtgagcccgtatgcatgctgcctgtcagatctgatggcggctcgaccgcccactagcccagcgagtagatccagcggcgggccgccctcaagccccaggccccagcgcacagat

SEQ ID NO: 137665 - DNA, 1426 bp, Zea Mays
gagaatgaagcaccagatggcacaagccatatataggatacaggagtagcgcgctgtacatacccaaaccaaactgtacagtaggcaggaaagcggcaagcccttatactacctacacgcgatccattcaggcctgggatgggagtctcacactcacgatcttggtaggcctcgcctgggaggtggacgacgacgtgccatggtcaggacgatgtcctcctactcgcccatgggaaaccaaccaggagtaccattccgtcggcgatgctgctgctgccgccgcctcaccccggggcggcgcggggcgaccggacgggccagagcggcagcctccagaccgacgacggtcgcttccgccgcggcggcttcggcagcgcgccggccgcggcctccttctccgagctcagcatgttccacatcacctgcacgtcctggtacccgcaggtctgcacgtcccggtggaggctcaggacgccaccacactctgcattgctccaatttgtttgggaaaagattagggtgggggaaaaggattaagagattacttattttttactgctcaaatcaaaacttcagtaaaaaaatcaaaacttgaggttaaaaaaaaagagattattccggtgaggggagatgaaagatcggacgatgagccacaagaatcgcgaaggggattgggtggtccacggtctagttggctgcgtacactgactccactccagacgggcggttgggacttgggagcgagatagatagcaagcatatcatggatcttggcgcccagggaccattaccccatcgcctcaaataatttgtttgtttgttgtgatctatttttttttcatctctctccttttgttgctgtgtcgagaaacaaggtaaagtttttttgttgcgttctactgctgcagtagatctgctgccgacgttgcaagcagtttcgtgctcgtcgcccaaaaaagcatacaccaccaattctatgaaaaaagagctccaaaagcttccgatggcgttgtgcgaatccttaaaaacgtggctagtggcttcgcgttcgcgcaggagattcgtgtcatgactaataagcttctgctcgaacgaacacggttacgccgctgccgtgcggtgcgtgccgtgcataggaactgagaaggaagctagaaggcctgcttaccgcccttgcggacgcgcgcgcgcgcggcggcgacggcgacggcgagccaggcgcggcgcacggacgcgaccaccctcgcgcgccaccaggccatgacgcgcgtcccgatctgctgctgctgctggtggtggcgccgccgcctacccgccggcgcacggctcggctggccgccgccaccgccgctgcctttgcttatatctgaccgaccggagccgatcggtctctcgcgaagcactagtactactagcactacctttg

SEQ ID NO: 137666 - DNA, 639 bp, Zea Mays
ccgcgtccatccctggcctctgtactaagctcccccggcacctctggcgagcggcggcggcgtcggcaagcgccggatagagccgacatggcgtggcgggcgatgggggcggcgcctccagcatgcatcacgccggccacggcaacaaaccctccagctagcaaatccacttcgcttccctctttctccgcgagatccacaacagccggatgcgccacagtctgcattcaccttccctctgcacttctgcagcccgcgccgccgccgtcaactgatggtttgtcgcccagatctggcggtagcagtggagcaggtcactctacctgcgaatatgtggcagtctacttattgttgaatgaatttcaagtgttgcactctactctgtaaccatgtgcatttctgaatgcagtgaaattgcttctatatacttcctccgttcttttttattatttgtcgctgtttagttcagaaatgaactagcgagtgacaaatattcaaagacggagtgaggtagtacattgttagtttctttttttcacaaagtatgaatctgtatcaatgctgccatttggggatgtacagatgttcctggctaaatagctagatggactgcacatcaatgtagctgttctgtttggt

SEQ ID NO: 137667 - DNA, 2139 bp, Zea Mays
ctctcacaatcactcaaccactgcctccagctccagcagcagctagctcagctcgatcgtcctcccgacccgatccatccaccccactccccgtgctccaccatctcggcatctcgctcgctcacttagctcgagctgcggcaaacagccggccggcagtccggcacacgggagatgatgaccgggaggctgaacgtggccacgtcgtcctcgccaggaggagacgacttcctgttcatgcccatgcagcagcatcagccgccgccgcctcctcctccgccctacgtcgggttcgagcacggccacggcgtggcgggaggcggcagccagcgcgttgccggaggggtgcagcaccacctctacgacggcctcgacttcgccgcctcggcgctgcagttccagcaggcggaggcgccgcacctgcaccagcagcagctgctcacgctgccgtccagtctcggccccatggcgccgcctccgccgccgccgccgctgcccatgcctatgcccgtgcccgggatgcccggcgaccacgtgtacccggcgctcgggatggtgaagcgcgagggcggcggcgcggacgggaggatcgggctcaacctcggccgccgcacctacttctccccaggggacatgatggccgtggaccgcctcctgatgcggtcccgcctcggcggcggcggcggcgccttcgggctcggcttcggcttcggcttcggcggcgcgcaccacctgcaggctcccccgcgctgccaggccgagggctgcaaggccgacctctccggcgccaagcactaccaccgccgccacaaggtctgcgagtaccacgccaaggcctccgtcgtcgccaccggcggcaagcagcagcgcttctgccagcaatgcagcaggtttcacgtgctgtcggagttcgacgaggtcaagaggagctgccggaaacggctggccgagcacaaccgccgccgccggaagccgcccaccaccgcctcatccaaggacgccgcgtcgccgccggctaacaagaagcccaactgcggctccatcacaagctcttactccactgacaacaagaacctgaacacggccaagtcgaccatgtcatcgaacacgggcagcgtgatcagctgcctggaccaggccgcgggcaacaagcagctgcaggcgaggccgacgctgaccctcggcgcgtcgccggacagggaccagctccaccaccagctgagagccatgctccaggcccaagcagcggccggcggcggccaccaccaccaccaggagcagcacttcataacctctctgcaggttcacaacaacgacggctgcggcggcggcaacagcagcagcagcaacaacaacatcatcctgtcgtgctcctcggtgtgctccagcgcgctgccgtcggccaacggcgaggtctcggaccagaacaacggcaacgctggtggtatgcataacctgttcgaggtggacttcatgtagaccgtccagatcggtgcaaagcaaaaggcaagcacgggagtacgtccttctggcaaggtgtccttggtgtgtatcagtgtaggtaaaaaggaataggagagagagagagagagagcaaaacagctaggcatggagtgggaggagaaacaaggcgagaaaagacacagatagagagagagaagggcgcaaggattctatccatccatctatctatccatcagtccatcacactccatgcatcagtagctagctaggtagcagcaagctgcagagcctgcagcaggctgctgctggtctacaacctcttgttgcaaggttcaatggccatagcaaagccatgcgtccgtcccgttgcattggctctctctctctgtctctatacctgtacgtactatgctgcagctgctgccattgcaagcctttctacctttccatttcaagcggggaataatgtgtctgctatttcactattttttttttgtctttactagttttgttttcttgctgcaaggttgcgtgaggggtgtagtgtgttgtacacttgtactgatactccctgtttctttttagttgtcgatagatagttcaattttgcattatccagcgacaactaaaaaaacggaaggagtaccaaactacctgttgtgttttactgtctcc

SEQ ID NO: 137668 - DNA, 1674 bp, Zea Mays
ctctcacaatcactcaaccactgcctccagctccagcagcagctagctcagctcgatcgtcctcccgacccgatccatccaccccactccccgtgctccaccatctcggcatctcgctcgctcacttagctcgagctgcggcaaacagccggccggcagtccggcacacgggagatgatgaccgggaggctgaacgtggccacgtcgtcctcgccaggaggagacgacttcctgttcatgcccatgcagcagcatcagccgccgccgcctcctcctccgccctacgtcgggttcgagcacggccacggcgtggcgggaggcggcagccagcgcgttgccggaggggtgcagcaccacctctacgacggcctcgacttcgccgcctcggcgctgcagttccagcaggcggaggcgccttcgggctcggcttcggcttcggcttcggcggcgcgcaccacctgcaggctcccccgcgctgccaggccgagggctgcaaggccgacctctccggcgccaagcactaccaccgccgccacaaggtctgcgagtaccacgccaaggcctccgtcgtcgccaccggcggcaagcagcagcgcttctgccagcaatgcagcaggtttcacgtgctgtcggagttcgacgaggtcaagaggagctgccggaaacggctggccgagcacaaccgccgccgccggaagccgcccaccaccgcctcatccaaggacgccgcgtcgccgccggctaacaagaagcccaactgcggctccatcacaagctcttactccactgacaacaagaacctgaacacggccaagtcgaccatgtcatcgaacacgggcagcgtgatcagctgcctggaccaggccgcgggcaacaagcagctgcaggcgaggccgacgctgaccctcggcgcgtcgccggacagggaccagctccaccaccagctgagagccatgctccaggcccaagcagcggccggcggcggccaccaccaccaccaggagcagcacttcataacctctctgcaggttcacaacaacgacggctgcggcggcggcaacagcagcagcagcaacaacaacatcatcctgtcgtgctcctcggtgtgctccagcgcgctgccgtcggccaacggcgaggtctcggaccagaacaacggcaacgctggtggtatgcataacctgttcgaggtggacttcatgtagaccgtccagatcggtgcaaagcaaaaggcaagcacgggagtacgtccttctggcaaggtgtccttggtgtgtatcagtgtaggtaaaaaggaataggagagagagagagagagagcaaaacagctaggcatggagtgggaggagaaacaaggcgagaaaagacacagatagagagagagaagggcgcaaggattctatccatccatctatctatccatcagtccatcacactccatgcatcagtagctagctaggtagcagcaagctgcagagcctgcagcaggctgctgctggtctacaacctcttgttgcaaggttcaatggccatagcaaagccatgcgtccgtcccgttgcattggctctctctctctgtctctatacctgtacgtactatgctgcagctgctgccattgcaagcctttctacctttccatttcaagcggggaataatgtgtctgctatttcact

SEQ ID NO: 137669 - DNA, 434 bp, Zea Mays
tcaagaatataccattgtattttgctatatatgtggtgcaatgcatgctattttcataagggttgcaacattcaagtatcattctaaaacctctgaaaggacttaccttttgttttcattgagtagtcgcattactaacaggacattttctttttttcatatagcgtctctcgctatgctggtgcgcgcagatgtacttgggcgagaagatctgcctcaacatgcatttctagctgttgtgggtcaagaactgtccgaggtgcagcctcacgcacacgttgtgccttggcctcacgcagtggatggcgtaggaggcccgattctagtggacttgggcatggagaaacacaactgcacaatgatgacgaggtggctccgaccgaggcttctgcctctactgctcctgatttgtatggtaaaccaagaacctgcgc

SEQ ID NO: 137670 - DNA, 363 bp, Zea Mays
atgcgggtggacctgcacacgacgacgcccacgaggatgctggaggacgtcgccgccgccgcgctcgacattagggcctctgacgctccttttggcctagaaacggaggaggcgatgtggcgccgtctcgcccctcagccggcggccgcaccaatgagttccacgccgccacgccacaccttcctcatcgtcggtgtcctcctcgaacctggtggagatgggggtggcaggggagaagttccagctagaacggtgggtgcactcatcctctcggtgatatcctctgtctccatcgtcatctgcaacaaggctctcatgagctctattcgcttcaactttggtatgagatccaatcttgtctga

SEQ ID NO: 137671 - DNA, 2903 bp, Zea Mays
atcaggtccagacctcttccataccaaacagcggggtgagtcgcctcgccggccctcctcccgccagccaactccccgtccacccgctcccgccaccgtatccgtaaacccaatcccccatttcccctagggggcatgctgcgcgcgggcctcccctccacgctcaccagctcgtagccgtttcctgccgctcctggctcctgcaccgagcggcaaacccgcgccgccgccgccgccgatggaggccaccggcagggggctgttcccgaacaagcccaccctcccggcggggccgaggaaacggggcccgctcctcccggccgcgcccccgccaccgtccccctcctcgctcccgctcgactcgctcctgctccacctcaccgcgcccgcccccgcgccggcccccgcgccgcggcggtcgcaccagacgccgacgccgccgcactccttcctctcccccgacgcgcaggtgctggtgctcgccatctcctcgcacccgctccccacgctggcggccttcctggcctcccgccgcgacgagctcctccgcgcggacatcacgtccctgctcaaggcgctggagctctcggggcactgggagtgggcgctcgcgctcctccggtgggcaggcaaggagggtgccgccgacgcgtcggcgctcgagatggtcgtccgcgcgctgggccgcgagggccagcacgacgccgtctgcgcgctgctcgacgaaacgccgctcccgccgggctcccgcctcgacgtccgcgcctacaccaccgtgctgcacgcgctctcccgcgcgggccggtacgagcgcgcgctcgagctcttcgccgagctccggcgccagggggtggcgcccacgctcgtcacctacaacgtcgtgctggacgtgtacgggcggatgggccggtcgtggccgcggatcgtcgccctcctcgatgagatgcgcgccgccggggtcgagcccgacggcttcaccgccagcacggtgatcgccgcgtgctgccgcgacgggctggttgacgaggcggtggcgttcttcgaggacctcaaggcccgcggccacgccccgtgcgtcgtcacgtacaacgcgttgctccaggtgttcggcaaggccgggaactacacggaggcgctgcgcgtgctcggggagatggagcagaacggctgccagccagatgctgtgacgtacaacgagctcgccggaacgtacgcccgggctgggttcttcgaggaggctgccaggtgcctggacacaatggcatccaagggtctgttgccaaacgcattcacgtacaacaccgtgatgacagcctatgggaatgttgggaaggtggatgaggcgctcgctctgtttgaccagatgaagaagaccgggttcgtgccgaacgtgaacacgtacaatcttgtccttggcatgcttggcaagaagtcaaggttcacggtgatgctagagatgcttggagagatgtcgaggagcggatgcacaccgaaccgggtaacatggaacacaatgcttgcagtctgtgggaagcgtggcatggaggactacgtcacccgggttctggaggggatgaggtcttgcggggttgaactgagccgagacacctacaacaccctgatagctgcgtacggccggtgtggctcgaggactaatgccttcaagatgtacaacgagatgaccagcgctggattcaccccctgcatcaccacgtacaacgcgttgctgaacgtgctgtcgcggcagggcgactggtccaccgcccagtcgatcgtaagcaaaatgaggaccaaggggttcaagccgaacgagcagtcgtattcgctgctgctccagtgctacgcgaaggggggcaacgtggcagggatagccgcgatcgagaacgaggtgtacggatcaggtgccgttttcccaagctgggtgatcctgaggacccttgtcatcgccaatttcaagtgccggcgactggatggcatggagacggcgtttcaagaggtgaaggccagaggctacaacccggacctcgtgatattcaactccatgctgtccatctacgcgaagaacgggatgtacagcaaggccaccgaggtcttcgactccatcaagcggagcgggctgagccccgacctcatcacctacaacagcctgatggacatgtacgccaagtgcagcgagtcgtgggaggccgagaagatactgaaccagctcaagtgctcccagacgatgaagcccgacgtggtgtcctacaacacggtcataaacgggttctgcaagcaggggctggtgaaagaggcccagagggtcctctcggagatggtcgccgacggcatggccccctgcgccgtgacctaccacacgctcgtcgggggttactccagcctggagatgttcagcgaggccagggaggtcatcggctacatggtccagcacggcctcaagcctatggagctgacctacaggagagtcgtcgagagctactgcagagcgaagcggttcgaggaggctcgcggcttcctgtccgaggtctcggagaccgacctggattttgacaagaaggcgctcgaagcctatatagaggatgcgcagtttggaaggtagagagagggagagtggctgtgctaagaggtgggcttaggtacagttcgtacggttttctttggttacaggcaactgtcggtttgcaattcgcttgttatatatatatgctcaagttttgatagccacattctgaagcaagtttcgatcagcgcatagtgtgtacctacctatagccacattctgctggtgcatactttttagattgcgacaacctgaagcaagcctgaagaggggcacctgatgttatgtatgtatgtatgtatgatgtgtcattcgttctgaatacaaactacgccattcagtt

SEQ ID NO: 137672 - DNA, 1115 bp, Zea Mays
ggatctggatccggactcgactcgaagccaaaaccaactcgctctctctcgctctcgcacacggtagacggtacgtcccgctcccgcgcgcggccggccacgcgactggtcaggcgcgaggcgagcgttcacgcgccccgcgcctgctggttgcggacggaggggatatccacgatcagagcggggccagccagcgcgggcgctgcggtcgacgacggtctctgtgcgcgcgcgatggtggccgcggcgagggtggtgtcgggggtgaaggcggagggtctgctgcggggcgcgtgcgcggcgctggccgcggcggccgcgctgctggtggggctcagcacgcagacggagacggtgctgctcgtccggaagaaggccaccgtcaaggacgtccaggcgctctgggtgctggcgatggcggccgcgtcggcggcgggctaccacctgctgcagctgctcaagtgcctctacctcggccgccgccgcagcggcagggctctggcctggacgtgcctcctgctcgacaaggcgtgcgcgtacgcgacgttcgcgacgacggtggcggcggcgcaggcgtgcgtggtggcgctggacggcgcgcacgcgctgcagtggaccaagctctgcaacatctacacccgcttctgcgagcaggtcgccggcagcctcgcgctcgggatgctggccgccgtcggcaccgccgtcctctccgccgcctccgcgcgcaacgtcttccgcctctactactgctcgtcgcacgcctcgccgccgccgcgggagacctgcgccgcgcactagacctctcggcccagggcgtcagctgggccgggcgtgcttctccggagaatctaacactgggccgtcacgaagcgcaggtgcaggcccagatgaaggatgattgagttgtgctctagagtgtactcctcctacctgtgtttccctctctcttttgtctttgtctctctaaggtgtgtacttctattttcatttaattttgttgcatttggtacgttagttgtgacgtgagtatgtatgttcgtcagtgtattccgtacataatataataataataataataataataataataataataataatatgttgcctcttta

SEQ ID NO: 137673 - DNA, 832 bp, Zea Mays
actaaaactcggatagatcttagtgcagtgcttccctgttccctccatcaagaaacagcaaagatccagtgcagagagacagaagcgccatggcactctgaacaagaaaagaaaagaaagagctagagagagatctcactcagccagtctctcacaacacaataccggcaaccaccaagctgatcttgctcccaagggcgtgggcagcagcgccactcctgctgctgctgctcgtcctgcacgggagaggaggccacggcgtcgggatggaggcggcggagctggagatggactcggaggcgcaccgacggctgctgtgggaggcgaccacggggcggaggtacatcagctacgacgccctgcggggcgacgtggtgccgtgctccaggaccgggtggtggcgatgcagcggaggagatcccgggcacatggcccgctccggcaaacctcgaggcgggcggcggcgacgcagtggaggagagcctgggcgcatggtccgctctggattcggggggaggagcgatggtttcggcctttcaagtgatggtgtgagctgtctgcggggctggttggtgagagcggatgatggtgcgtgatcgtgcggcttagactatagaacagtagaacgggtggctgagatcgtctaacggcagaacggcaggctacccttacaggcttaataggtagtagagattgcaaagtggctagacacctgtagcatctcaaaaattcaaatcttaaaattttctcaaactcgctctaaattcaaaatgaatttcaaatttcatttcaaaatgtttgtttgcgagtttatatcagcaaataaaatata

SEQ ID NO: 137674 - DNA, 103 bp, Zea Mays
tttctcaactggagaagcgcaacaaccaaggcatccaatctatattcatatctctaataactactttcacagacaaatccaatagtaagcaaaatactaacaa

SEQ ID NO: 137675 - DNA, 76 bp, Zea Mays
ttccccatccttattttctagtgttggtgttcagcatttgcataacacctttgttggcaccgtctgtcagtcaaat

SEQ ID NO: 137676 - DNA, 771 bp, Zea Mays
taagcgacaatccgcccaaacgtctatatttttttttcgtttctcacagaagcaacagtctacagttcggctcagatatactaaaacattaaaccaccaaatcgcgcttaccatcgccgagagagctgtagacaacaacaaaaatagcttaatggaacaacaaaatggaactttctttccaagactggctgcttcatcaaggattcaaggtctactcagaatccacatccagacatcctgaagccttgtcgttcaacgatttactccagaaacacaaccggaaaaaaaatgtcattaacaatactattccaaagaccaagatcctcgctatcccttgctctcaaaagtatcgcactactcccatgctagtcgcgccctgagcctgcacagaacacaggagaagttactagcacgctcattgtactcagagcaggaaattattacttagctactcgaattgtgcattgcttctattttcaagtgacctgaaatggaaacgcttgatacattctattgtaatgccatcggtaacagagcatatatgttcctttttttactcactagtaggtaccaagactgatcatgtctacaaagccatcaatcatggtaagatatagtcagggaatcacagcgtctcaaattccaatcatattttcccaataaattcaaaattctagcagcatggcaagagtgggacatgtgcctccgtaatagaaatactgaaatagttaggaaggcaacttttccaccaaatggcgatgtttccactta

SEQ ID NO: 137677 - DNA, 520 bp, Zea Mays
tttcctgttgacgactgagcgggcgagcgccggcgccctttgccaggtccgtcggcccgttagccggcgactagcgcctccctttgccaggtcttcgacgtccccttcgccgtcgactggcgcccagcagccagcagatccttttctatctgtcgtgttctgtctgcctggtacatttggaagaatgggggtttaccttagcactccgaaaactgagaaggtatccgaagatggggaaaatgataaacttaaattcggagtttcatctatgcaagggtggcgtacaactatggaagatgctccttatgcgtcttacctggatactgacacaccgacacaagtgatggaatccgactcagactcggatatccaactcagcatgattttactcaacttcccaattgtgacttggaatccaattgggtgtgaagagtctgattcgccaaaaataaatgtgctttcaatgtccaggttactgggtgtgcttatatggaaacttgtagaatgtcctaggaagtag

SEQ ID NO: 137678 - DNA, 648 bp, Zea Mays
tttcctgttgacgactgagcgggcgagcgccggcgccctttgccaggtccgtcggcccgttagccggcgactagcgcctccctttgccaggtcttcgacgtccccttcgccgtcgactggcgcccagcagccagcaggtccggtcgccccttctcgtccttcctgcagttcgaaagcgagcatcgaaaccctaaagcaagctacttgtatttgaatctggcacaattgcaagtgtacacatgtattgtgcctactaacttaaattttctatttttttgggatttccttaatccgttgcacaattcatgcgggttgcttcaatttaggtttgtattctgcagtctgctgcatacttgtagcagtagcaccattgaattgtttcatggtttacttttgaaaataatatggatagcttgttattgagcagcagatccttttctatctgtcgtgttctgtctgcctggtacatttggaagaatgggggtttaccttagcactccgaaaactgagaaggtatccgaagatggggaaaatgataaacttaaattcggagtttcatctatgcaagggtggcgtacaactatggaagatgctgtaagtttctattcatcatttacatttgcttcttgtgattttctttgttgcttg

SEQ ID NO: 137679 - DNA, 1709 bp, Zea Mays
ccaacaacaggccgactccatccctcgactctactctacgcggcacgcgagcgcaggggcccgtccgcgaaaaagaccccacaccgcccactacaccggccaatcacccgccggcgcgccatggccgccgccaccgctaccggggactccgtcaaggagccgctcctccaccgcgcgtacccgtcccaggtcgcgtcggcctcctcgcccgcgctcccgtccgcgcccccggggtccgccggccgtcgcttcccgggggtgctcgacgtccccaacctcaagaagcgcggcggcggcacgcgcagctggatccgcgtcgaggccgtcacggcctccgtgcagacgttggagatcgacaaggccaccatgatgcggcgctgcgaactccccgcgcgggacctgcgcttgctcgacccgctcttcgtgtacccgtccacggtcctgggccgcgagcgcgccatcgtcgtcaacctcgagcagatccgatgcgtcattacagccgacgaggtcctcctgctcaactccctcgacagctacgtcctccagtacgccgccgagctccagcgccgcctcctccagcgcgctgagggcgaccagctaccattcgaattccgggcgctcgagctcgccctcgaggccgcatgctccttcctcgatgcacaggcagcggaactggaaattgaagcatatccattattggatgagctgacatccaaaatcagtactctcaatttggaacgtgtccggcgattaaaaagtagactagttgcattgaccagaagagttcaaaaggtcagagatgaaatagaacaattaatggatgatgatggtgatatggctgagatgtatctcaccgaaaaaaagatgaggatggaatcatctgtctttggtgaccagtctttgttgggctacaattcagcaggtgctgctggggcatcagtttcagctcctgtatcgccagtctcatcacccacggaatcacgaaagctggagaaagctttcagtttgtgtagaagcaggcatgacagcacgaagagctccgataacacaacgacagatcatatccaagagttggagatgttactggaagcttatttcgttgttatcgacagcactctcaacaagctgacatcgcttaaagagtacattgatgacactgaagacttcatcaacattcagctggacaacgtgcggaaccagctgatccagtttgagttgctcctaacgactgcaacatttgttgtggccatttttggagtggttgctgggatatttgggatgaactttgagacatcagttttcaaaatagagaatgcattccagtgggtccttgtaattacttcagtggtgggcgttttcatcttctgctccttcatttggttcttcaagtacaagagactgatgcctttgtagagtgtatatatgccctcctcctcctcctcctcctcccatatagcaccgatgaatcagttcaccgtgtagaccttctaccctgttgaggaacttgatcagatccctgaatttctgccgatgtgaattaccattcttatagaggttcagggcatgcctgccgagaattcgggtgaaaattgtaactttcttgacatgatcccttgctgcgtaagactgtctaagcttcctctaaattttatcctctaaagaaatattttctttcctttacaacactctctaaaagatttcgttctcta

SEQ ID NO: 137680 - DNA, 1243 bp, Zea Mays
ggaaggacgaaggagaaggagcttgccccaacatcggataggaacgatatctgctattgctcaaccgcgcaggccttgaccaagctaactctctgatggtgattcaaacacatgttatcaatgagaaattatgttttgtatcagttatttcttccaactgtataaagattagcagatccgcctccttatccttttaggcagcggaactggaaattgaagcatatccattattggatgagctgacatccaaaatcagtactctcaatttggaacgtgtccggcgattaaaaagtagactagttgcattgaccagaagagttcaaaaggtcagagatgaaatagaacaattaatggatgatgatggtgatatggctgagatgtatctcaccgaaaaaaagatgaggatggaatcatctgtctttggtgaccagtctttgttgggctacaattcagcaggtgctgctggggcatcagtttcagctcctgtatcgccagtctcatcacccacggaatcacgaaagctggagaaagctttcagtttgtgtagaagcaggcatgacagcacgaagagctccgataacacaacgacagatcatatccaagagttggagatgttactggaagcttatttcgttgttatcgacagcactctcaacaagctgacatcgcttaaagagtacattgatgacactgaagacttcatcaacattcagctggacaacgtgcggaaccagctgatccagtttgagttgctcctaacgactgcaacatttgttgtggccatttttggagtggttgctgggatatttgggatgaactttgagacatcagttttcaaaatagagaatgcattccagtgggtccttgtaattacttcagtggtgggcgttttcatcttctgctccttcatttggttcttcaagtacaagagactgatgcctttgtagagtgtatatatgccctcctcctcctcctcctcctcccatatagcaccgatgaatcagttcaccgtgtagaccttctaccctgttgaggaacttgatcagatccctgaatttctgccgatgtgaattaccattcttatagaggttcagggcatgcctgccgagaattcgggtgaaaattgtaactttcttgacatgatcccttgctgcgtaagactgtctaagcttcctctaaattttatcctctaaagaaatattttctttcctttacaacactctctaaaagatttcgttctcta

SEQ ID NO: 137681 - DNA, 1348 bp, Zea Mays
ccaaagggcaaaggcccaaaaacccagccggccagagccagtcccccaccccccagcagccatggagttcggcttccgcgcaggaaacagcacgcagcgccgcccttcccccgatcgacgcgtcacagcacagcaagccggacccttccacggcgaccacccgccgccctcgccgttgcagtgggaggctgcggcccggcgcgagcggatcaaacgcgaggtggagcgccggctcatcgaggaggaggtccgcctggagctcgcccttgagcgcgcccgcctccacggtggttttggccccgccccgttcctcgggaccgacggctccgtcgtgccggtgccgcctccacctccacctccaggccggttctccagggccgacggcccatcgatgacgccggcaatgtcgtgggacagccctcggcggctcgcgagatttgagcaaccgatgctcctcagtgagacgggaacgtggtccctgctgccgaagccgaggcatacgctccggctgcgcgagatcgcgcccagcgagagctccgaggttctttcatcagcaacaaaggcttctggcgtgaagaggaaagcagcagctgcgatttccgcaacaacgactgaacaacaaccaacgggagtacaagacccgagttccgggcaatggagctgcgcaatctgccaggtgagcgcgaccagcgaggccaacctgaacgagcacctccaagggaaaaagcacagggcaaagctggcccgatgcggagcgaccaaggcgacgacggatcctcctcctaacagaagcggcgatggcgcagtagcagtagcagcaggcccgagcgacgcgccgaagaggatccagatcctggtcgacggggaggcgcaccaggtcgtccagaggagcagctgcgtgtggtgcgagcgctgcagggtcggctgcaccaacgccgccgccatggtcgaccatctgcggggcaagaggcacagcctgtcgaacaaggtctggacggcgataaaggccgtgaggaggagcagctaatacggcgataaaggccgtgaccgtgaggaggaggcacaatcttgtcgaatacggttgagcagggcctgtgttgagctttggaaagaaagggcacagacactagttgtttgacaactaatgaagtgtgggttttcatagaccctcttaatttagcagcggaaagaaagacggtatattccttgcttgttatcacttatcagacaatcacttattccctaatcccgaacctcgcgtgtgggggctaatcgttgggagtgtgtgtgtgtgtttttggatgggctttttccttgtgatgtttatgcggcagggtgtgttcctcct

SEQ ID NO: 137682 - DNA, 1563 bp, Zea Mays
atgggtgagataggcatggaccagctgggtctggccgaggctgccgccgccgtgaaggaggagggcatcctcgacgatgacgaggagacgtcaccgatagagcaagtgcgactgacggtgccgacgacggatgactcgtcgctgccggtgtggatgttccggatgtggagcatcgggcttctgtcgtgcgcgctcatgagcttcctcaaccaattcttctcataccgaacggagccgctggtggtgacgcagttcacggtgcagtatcctatgcaatttctaagcctctatgcaattttccagcactcggctttgctagatctcgacaatgacactgcgttttttggtgtttttgatggacatggaggaaaagtagtcgccaaattctgtgcaaaatatctacacagagaagttctcaggagtgaagcctatgcagctggtgacctgggtgctgctgtccacagagcttacttcagaatggatgaaatgatgcgaggtcaaagaggatggcgggaacttcaagcacttggagataagataaatcagtttagtggcataatagaaggcttaatttggtctcctaaagcaagtgattcaaatgatagacatgatgattgggcttttgaggagggaccacactctgattttactgggccaaattgtgggagtacagcctgtgtagctttgatcagaaataagcaactcgttgtggcaaatgctggtgactcccgctgtgtcatctcaaggaatggtcaggcatacaatttgtctagagaccataaaccagagctcgaggcagagagagagaggatacggagtgcaggcggtttcgttctaatggggcgtgtaaatggaaatctaaacttgtcaagagctatcggagacatgaagttcaaacaaaacaagttcttgccccccgataagcaaatcctgactgcgaaccccgacataaacattgtcgagctatgtgatgacgacgaattcattgttttggcatgcgatggcatctgggactgcatgtcaagccagcagttggtcgatttcatccgcgagcatatagacacagaggaaagcctctcggcagtatgcgagagagtgctcgatagatgcctggctccgtcgaccatgggcggcgagggatgcgataacatgacgatgatcctggtgcagttcaagaagccgattgctcaggtcgaggacgccagcggtgcagaaccagctggagacgctgggtgctgtgagacccatggggcccacgagaacggctctggtaagcaggtgtagcgaagacgtggcatgcatggctctcggagtcttggactcttggtacatataggcctgacgctggacatgggtaaaacgggagtacgatagatgacaccctctgttcctcaatacaacccgctgttgtgattttttggttacctgaccacctatctgtacatttttgtggaaatgatgttacagtaattattgtccggtcaagcggaccccttttgagttttgtcatctacatgtacttactctcgtagcagaatgactgcatgagctgacaattgcact

SEQ ID NO: 137683 - DNA, 1568 bp, Zea Mays
atgggtgagataggcatggaccagctgggtctggccgaggctgccgccgccgtgaaggaggagggcatcctcgacgatgacgaggagacgtcaccgatagagcaagtgcgactgacggtgccgacgacggatgactcgtcgctgccggtgtggatgttccggatgtggagcatcgggcttctgtcgtgcgcgctcatgagcttcctcaaccaattcttctcataccgaacggagccgctggtggtgacgcagttcacggtgcagtatcctatgcaatttctaagcctctatgcaattttccagcactcggctttgctagatctcgacaatgacactgcgttttttggtgtttttgatggacatggaggaaaagtagtcgccaaattctgtgcaaaatatctacacagagaagttctcaggagtgaagcctatgcagctggtgacctgggtgctgctgtccacagagcttacttcagaatggatgaaatgatgcgaggtcaaagaggatggcgggaacttcaagcacttggagataagataaatcagtttagtggcataatagaaggcttaatttggtctcctaaagcaagtgattcaaatgatagacatgatgattgggcttttgaggagggaccacactctgattttactgggccaaattgtgggagtacagcctgtgtagctttgatcagaaataagcaactcgttgtggcaaatgctggtgactcccgctgtgtcatctcaaggaatggtcaggcatacaatttgtctagagaccataaaccagagctcgaggcagagagagagaggatacggagtgcaggcggtttcgttctaatggggcgtgtaaatggaaatctaaacttgtcaagagctatcggagacatgaagttcaaacaaaacaagttcttgccccccgataagcaaatcctgactgcgaaccccgacataaacattgtcgagctatgtgatgacgacgaattcattgttttggcatgcgatggcatctgggactgcatgtcaagccagcagttggtcgatttcatccgcgagcatatagacacatgcaggaggaaagcctctcggcagtatgcgagagagtgctcgatagatgcctggctccgtcgaccatgggcggcgagggatgcgataacatgacgatgatcctggtgcagttcaagaagccgattgctcaggtcgaggacgccagcggtgcagaaccagctggagacgctgggtgctgtgagacccatggggcccacgagaacggctctggtaagcaggtgtagcgaagacgtggcatgcatggctctcggagtcttggactcttggtacatataggcctgacgctggacatgggtaaaacgggagtacgatagatgacaccctctgttcctcaatacaacccgctgttgtgattttttggttacctgaccacctatctgtacatttttgtggaaatgatgttacagtaattattgtccggtcaagcggaccccttttgagttttgtcatctacatgtacttactctcgtagcagaatgactgcatgagctgacaattgcact

SEQ ID NO: 137684 - DNA, 1051 bp, Zea Mays
cccccgagtcccctggcttcgaatcggagatggcactggggcccacatgcagcggccgcaacctgacacggaggacctcgatgcgaacatgaacacctccaggtgcaaatatgcaaaacaaccacacgccctcttcgcttcctcattcctcaatcatcatattcttctttaatcaacactgcgagagcctccctcctcgttcggttcggacttttgcttcggcgacttcacgcggtaggccaccgtaaaccctagccccagaccgcgggtcgtagccaacgagatgcagctcttcatcttgacgctgacggggaagaccatcacggtcgaggtcgagagcagcgacaccatcgataatgtcaaggccaagatccaggacaaggagggcattttgcctgaccaccagaggctgatttttgctggcaagcaattggaggatgggaaaactttagctgattacaacattcagaaggagtcaacactccctttggtcttgaggctcaagggtggaactatgatcaaggtgaagacactaactgggaaggaaatcgagattgacatcgagcccaatgacacaatttataggatcaaggagcgtgttgaggagaaagaaggcatcccacctattcagcagaggctcatttatgctgggaagcaacttgctgatgacaaaactgccaaggattacaacattgaaggtggttcagtgctccatcttgttcttgctctgaggggtggttgctagattaaaaagttcttgtagtttctgcttatggtatctgttacatggagttgtttcagaattgaagccttgtattgggtggttgattgtaccatgtgattagcagactactagagtcaggtgtcatctgtactgtttaagaaatgcttgaactagttcattcagttgtcaactcattcttattgccccggtctgccctttcacctaaatggctacatcaatcgtgttgtggtctattttctggttcccttgaattctcatcacttgcagactaagattgttggctaaataaattgtgtgtgtatctaa

SEQ ID NO: 137685 - DNA, 7999 bp, Zea Mays
atgacacaagtcacctccattaaaaaaacagttatcacccacaaaaatgaggatgggtcccaccgtgcaccaagagaaaacgacgcttatggagatcctcgccattctgaccacaggcctttgatcattgacacaggaggaagggggaagagtctgaatggaagatcatatgaatcataccttaagtttgaggcaaagtggctggaggaggaagactgtttggaaagggtaaagaaagcatgggttggtgcaatggattcaggagctgatagagttgtggaggcccaaaaaattctgctgagggagctccatgactgggataggaatgttttggggatgctggagaagaggatctgtaaggtaaaaaaggagctagagaggtgtaggaggcagcaaatctgtcaagagagtgtatcccgggaacatcttttgaggtataagatggagcgtttacaggatcaactaaatatttattggaagcagcgatctcataccgcgtggctcacaaagggggaccggaatacacaatattttcatgctgcagcctcagaaagaaggagaagaaatgcaattaagaagttgagaaaggatgatggagcagaagtagaagggagtaggctgaaggagttcattgctaaccattatcaaaatctctttctttcttctgcaggtcattctacggttgaagtgttgcgttctatctcaccacgcattacggatgagatgaatgaagcacttattaagcctttctctcaggaggagatttgggaagctctccaatctataggagatctcaaggcgcccggaccggacggaattccttcaatattctataaaagattctggtctattgtgggtgagcaagtcaaaaaagaggtgctagcagtcctcaatggtggccaaatgcccagggggtggaacgacacaatcatagtcctaatcccaaaggtcaagagcccagaaaaagtcaaagaccttcgcccaataagcctctgcaatgtgctgtacaagctgattgccaaagttcttgccaaccgactcaagtccattctaccagagattattgctccatcacagagcgcctttgtgccaggtcgcctcataacggacaatgttctccttgcatatgaactgactcaccatctgcgaaataaaagagaagggaattatggtctagctgcctttaaattagacatgagtaaagcatatgatagggtggaatggtcctttttggaaagaatcatgaggaggatgggtttctcggagaagtggatcagcttaattatgctctgtgttactactgtatcatataaaatcagagtgaatggggagtttacaagaactatatggccacaaagggggcttcggcggggtgatcctctatcgccatatttatttattatttgtgctgaagctttctcagcattaatggagaatgcgggaagaagagggcagttagaaggagtaaggatctgtccaggtgctcctcgtgtcagccatctattttttgctgatgactctctgattttcatcaaagcatcagtttcaggggctgcacatctgcaacagatcctatctttgtatgaaaatgcctcaggccaggtgataaacaaggataaaactgcggtttttttcagcaagaatacacctccaccaataagggctcaaatgatggctgaactaggcatcacccagattgctagtaatgacaagtaccttggactcccggtccatattgggaagtctaggaaatcggcctttgaatatataaagcaaagagtgtgggcaaaaattcaaggatggcaacagaaacttctatccaaggctggaaaagaaatccttattaaggctgtggcacaagcgatcccaacttatgcaatgtcttgttttgatcttacgaagggcctttgtgatgagctgagttctatgatagggaaatactggtggagcaatcaagacaaagtaaataagattcattggattggttggcagaaacttacaagatcaaagtctttagggggactggggtttagagatctgtatgcttttaacatggctatgctggctaggcaagggtggcggctcataactcaaaataactctctttgtgcacgggtcctaagagctaaatacttcccctcatcaaatgttcttgaagcaagagcaaaaaaaggcatatcttacacttggcgcagtgtcctgaaaggactacatttattaaaagaaggattaatttggaggattggagatgggaaccaggtgaatatatgggttgacccatggattcctagaggggaaactagaagggtcattactccaagaaatggctcactcttacataaggtggctgagctaattgaccccatcacaggtagctgggattgccgtcttgtccgtgatactttcctacaagaagatgcagattgtattctagctatcccaatccaagaaggaatggaggatacacttgcgtggcatggagatcctaaaggaaatttctctgttaaatcagcatatgccttggcaagtaggagacgtgaccatcacaataatgcagatgcatcctcctcaattagcgggcgaggggagaacgtttggaagtcaatatggaatgtaaatgtgactaacaaaataaaaatgttcttatggaggttagcccacaatagccaccctgtcagagtaaacatagcaagaagaggtattaaaattgaaactctgtgccccatgtgtttccgtcttgatgaagatggtggccatctctttttaaaatgcaaaaaagtgaagcaggtctggaggtgtttatgtctggaggacacaagaacactcctggcaagcaaagcgtcggctttggaggtcattgaatccatcctaactctccgagaagaaaccaagattaaggtcgtgctgttgttatggtgctggtggtcagctcgcaataaggcaatccaaggggaaaggtgtggatctactgaagaggtgtgcaatactgttgcctaccatttgatgaatatggagaaacttcagataggaaaatctgctagagccccacctatgaacctaaaatggcagcctcccccagcaggcttttacaaaataaattgcgatggctcatatcgggcgaaatcaggtttgggcggctggggatgtattatcaggggccacgatggcggttttttggctgcgggggcgggcgctttgactggcatatcctctgcccttcatgctgagagcgtcgcctgtatgaaaggtttggagctggctgttttccttggaatgcaaaatgtgatgattgaaaccgatgctgcgatcctgaagacggcgttgacctcacaagaatatgacctctctgctttgggcgtagtgttcaaggaaataaggagtaggatgttttctgagtttgcttgttgtattgtgtctaaatgtcaaagaacctgtaatttagttgctgactgtttagctgctcatggagcaaactcaggtgacgttgactctagtttatggctagatcatgcaccggacttcatttgtaatcttgtctccggcgatgtgcctggagctgcttaatagccatggaatgcgtttccatttcaaaaaaaaaaaaaagagaaaacgacgcacggaacaaaaccgaacccgcccggagccccggaaggaggagtcgcttcctttccctccctgtcctccctccctcaccccgaccacgacgaactcgccgccgcgtgatcgtccccgtccatgccccggccctgcctcgccacaccctatttccctgaccgagcgcccgcgccgcgcggccatggcgcccgcggccctccacttcctcctcgccatcctctgcctagcttcgcgtctcgtctggacggtagcggcggggtgcggatcgaacacaaacctagcggggtacagcgcggacctgcgcatgtcgcagcaccaactccgcggccgcgtggagattctcgacggctgctcgttccgcgtcgctgcactcgacctcctcccgggttcctcctccgcgcggtggtggcgcgcggatgggaccgacctcgagtccctatcccgcggcgagcccgcggccgccgacccgctggaccgcaccttcctgtccgagtccctcgtgttccgcctcctcccgggcctctcctggccgctcgtccccgtcctcgcagccttcgaccccctcacttcctccctcttcggcttcgtgcgcctctccggtgccaacgcctccgactcatcctcttcgtccgcagcggcggtgcccaccatgctcgactcctgcgttcagctctccccgcgcttccgcgtgcggtggacgctccacgaggcgaacaattccatcgacatcgccctcgaggcggcggttggatcagagtactacatggcgctcgggtgggcgaagcctggcacggccaaaccgtccgtgatcggcgccgacctcgccgtcgccggcttcactgaggacgggctccccttcgccgaggacttctacgtcaccaattacagcgagtgcttgctgcgcaaggacggcctcgtcgagggcgtctgcccggacacgatctacgaccgcgacaactccaccgggctcgtcaataacacgcggctggtctacggccaccgccgcgacggcgtctccttcgtgcgcttctcgcgcccactggtgtccgcggacaataagtacgacgtccccgtgaacgccaccaggaacatgactgtgatctgggcgatcgggctgctgcggccgcctgactcgctccggccgtactacctgccgctgatgagtcaccgcggcgggtctccggggacagcattcaccttcgccaggctcaacctgtcggacgcgagcagcgggtgcgtcggtccgttggacgccgaggataaggaggaccaggccaggatcacgacggagcgcaatacgccgctggctgtgacggttgggccggcgctccattaccccaatccgcccaaccccgacaaggtgttctacatcaacaagaaggaggcgcctctgctcaaggtggagcgcggcgtgccagtcaccttctccatcgaggccgggcacgacgcaccagtctacatcacgtcggaccccgtcggaggcaatgccactctcaggaactcgtcagagatcatctacgccggtggaagcatggcggagggcgtgccggctacaccaacagaactcgtctggttgcctgatcggaacacgccggacctagtgtactaccaatccttgtatgatcccaagatgggctggaaaattcaggtcgtcgatggtggcctcagcgacatgtacaacaacagcgtgctactggatgatcagcaggtgacattcttctggactctctctggtgactctattaacattgctgcacggggtgagaagaagagtgggtaccttgcaattggatttggtagcgtaatggtaaatagctatgcttatgtcgggtgggtcgatggcaatggcaaggggcatgtcaaatcttattggatcgacggaaaggacgggatgagtgtgcacgagacacatgaaaatgttactcataagcgatgccgattggaaaatggtgcgatcgtgtttgagttcactcgtccattaacaccttcatgcagtggaaaggtggagtgcaagaacataatcgacccgacgactcctatgaaggtcatctgggccatgggtgctcaatggtcacccggccccttaagtttgaagaacatgcactccgacacaagcaatcgtcctatcaggattcttctgttgagcggcttggctgaagcagtggaggacctccgcccggtgcttgctgttcatgggtttatgatgtttgtggcatgggctattctgctgccaggggggatcatggctgcgagatacctgaaacatctgaaaggcgaggcctggttccaggctcacacctatctgcagtattcaagcatagctgtcatgttcttgggtgttgtatttgcagttgctgagctccgaggtttctctttcaaatccagacatgctcgaatcggtgcagtagcactgacattcgcatctatgcagccagtaaatgcgtatcttcgaccgcataaaacagagaatggagagaccccgcctggaaacagagtagtttgggaatatctccatgttttgaccgggagatctgctgcgcttgctggtaccttggcgctctttactggcttgcagcatcttgggcaccgatatggcagtaagactatcaagggacttacatgtgggctaatcttatgggttataagcgttactttgttaacagcttactttgagtatatggcaattaagcgaaggactgcaggtgttgatggtctttcaggaaattgggtgcttggcaacactgaggaagatgatacagtcgaacttttgcaatctaacagggtagtcagtaaaatggagtctaatttgtcacctgaaccaatggaagtacagctcgagccacttaaaggatgagataaaattctcagcatgcatatggacataaaagtatgttaactaaaattctttatagatagaacgagcggcatatacgtctcaggataaaagaagtttcagtttcgcattttttgttgatataaagggaatattagtgagaatctcatctttgacttgctcgagaggtatatcatgccacatggtatagataggtttttcttttgtcttgtggagcttaggtcctcgtctttaatctcctaacttcttagcaacaatctatgtatacctgtacaattttggtatagttatcataattcataactgaaaagaggatacagtttttttctttctttaaatgtcacatgactcgagcattttcacatatggtactagctgacattatttgtttgtcatatgttgtatatgtaaattatgtgacttggaactagaaacagccatccaacgaaaccacagtgctcctacattttctaaaatcagttatccacattttatatgtaggctacagttatcctttgtgctaagttttgccttcttaataccaaacctgtggcatctatgccaacctgatgcattgggccatgtttggtaccaactgaaaggggctcaatgttgtgttgatctgcatcttggtatacctttgtacctgatttcatgatatgtcatgccaaaataccagaaatgcatttacttataaactacatattcatgtctgccttttatctgcaaaagctgctatgacacgcaggagaaagtagttgcccacttgtattccactaacatgctgcagtttgttgaccctggaaataatccaccgcaagtccacaaccattgagttggctctcatctgttccaagcataaaagagcaggtactgcttactctatccccttttgctgttatgttcctattatattgcgttcggtgatatcgacctcaacctgcatgttaggtgtatattgtttgtgttaggtgttggcacccagtcagatctggatcacttgttggttggcttgccaccttgttaagaaaccaggttaggtgctgtctggtgaaggagcaaaatcagcagaacggtacacgagtccctttgtttttaagataagacttggttgtctttcccgtgaagcctagtgcccaacacggatctgctgtgctgatggtatctgagtttctactctctagaccgtcgattgtattggaggaacaaattaaagcacaagctttgccttgtaataattggaattccatgcttgaataatagtttttgaaaaaacgcattattgaataatgctatgtatgtcagactctctagtagataaggtaaaataggagatgcggaacttacagggtggagtttgaaatagtggatctgctggagataggctcagagcctgcctggaataagtgccaacaatacagttcaatctgaaatcacctgtagccaggcaattgtatacggagtatgtcgtaggagctagtagaacagtcctgacgaaaatacagttgatgttttagtcattatatataa

SEQ ID NO: 137686 - DNA, 6531 bp, Zea Mays
atgacacaagtcacctccattaaaaaaacagttatcacccacaaaaatgaggatgggtcccaccgtgcaccaagagaaaacgacgcttatggagatcctcgccattctgaccacaggcctttgatcattgacacaggaggaagggggaagagtctgaatggaagatcatatgaatcataccttaagtttgaggcaaagtggctggaggaggaagactgtttggaaagggtaaagaaagcatgggttggtgcaatggattcaggagctgatagagttgtggaggcccaaaaaattctgctgagggagctccatgactgggataggaatgttttggggatgctggagaagaggatctgtaaggtaaaaaaggagctagagaggtgtaggaggcagcaaatctgtcaagagagtgtatcccgggaacatcttttgaggtataagatggagcgtttacaggatcaactaaatatttattggaagcagcgatctcataccgcgtggctcacaaagggggaccggaatacacaatattttcatgctgcagcctcagaaagaaggagaagaaatgcaattaagaagttgagaaaggatgatggagcagaagtagaagggagtaggctgaaggagttcattgctaaccattatcaaaatctctttctttcttctgcaggtcattctacggttgaagtgttgcgttctatctcaccacgcattacggatgagatgaatgaagcacttattaagcctttctctcaggaggagatttgggaagctctccaatctataggagatctcaaggcgcccggaccggacggaattccttcaatattctataaaagattctggtctattgtgggtgagcaagtcaaaaaagaggtgctagcagtcctcaatggtggccaaatgcccagggggtggaacgacacaatcatagtcctaatcccaaaggtcaagagcccagaaaaagtcaaagaccttcgcccaataagcctctgcaatgtgctgtacaagctgattgccaaagttcttgccaaccgactcaagtccattctaccagagattattgctccatcacagagcgcctttgtgccaggtcgcctcataacggacaatgttctccttgcatatgaactgactcaccatctgcgaaataaaagagaagggaattatggtctagctgcctttaaattagacatgagtaaagcatatgatagggtggaatggtcctttttggaaagaatcatgaggaggatgggtttctcggagaagtggatcagcttaattatgctctgtgttactactgtatcatataaaatcagagtgaatggggagtttacaagaactatatggccacaaagggggcttcggcggggtgatcctctatcgccatatttatttattatttgtgctgaagctttctcagcattaatggagaatgcgggaagaagagggcagttagaaggagtaaggatctgtccaggtgctcctcgtgtcagccatctattttttgctgatgactctctgattttcatcaaagcatcagtttcaggggctgcacatctgcaacagatcctatctttgtatgaaaatgcctcaggccaggtgataaacaaggataaaactgcggtttttttcagcaagaatacacctccaccaataagggctcaaatgatggctgaactaggcatcacccagattgctagtaatgacaagtaccttggactcccggtccatattgggaagtctaggaaatcggcctttgaatatataaagcaaagagtgtgggcaaaaattcaaggatggcaacagaaacttctatccaaggctggaaaagaaatccttattaaggctgtggcacaagcgatcccaacttatgcaatgtcttgttttgatcttacgaagggcctttgtgatgagctgagttctatgatagggaaatactggtggagcaatcaagacaaagtaaataagattcattggattggttggcagaaacttacaagatcaaagtctttagggggactggggtttagagatctgtatgcttttaacatggctatgctggctaggcaagggtggcggctcataactcaaaataactctctttgtgcacgggtcctaagagctaaatacttcccctcatcaaatgttcttgaagcaagagcaaaaaaaggcatatcttacacttggcgcagtgtcctgaaaggactacatttattaaaagaaggattaatttggaggattggagatgggaaccaggtgaatatatgggttgacccatggattcctagaggggaaactagaagggtcattactccaagaaatggctcactcttacataaggtggctgagctaattgaccccatcacaggtagctgggattgccgtcttgtccgtgatactttcctacaagaagatgcagattgtattctagctatcccaatccaagaaggaatggaggatacacttgcgtggcatggagatcctaaaggaaatttctctgttaaatcagcatatgccttggcaagtaggagacgtgaccatcacaataatgcagatgcatcctcctcaattagcgggcgaggggagaacgtttggaagtcaatatggaatgtaaatgtgactaacaaaataaaaatgttcttatggaggttagcccacaatagccaccctgtcagagtaaacatagcaagaagaggtattaaaattgaaactctgtgccccatgtgtttccgtcttgatgaagatggtggccatctctttttaaaatgcaaaaaagtgaagcaggtctggaggtgtttatgtctggaggacacaagaacactcctggcaagcaaagcgtcggctttggaggtcattgaatccatcctaactctccgagaagaaaccaagattaaggtcgtgctgttgttatggtgctggtggtcagctcgcaataaggcaatccaaggggaaaggtgtggatctactgaagaggtgtgcaatactgttgcctaccatttgatgaatatggagaaacttcagataggaaaatctgctagagccccacctatgaacctaaaatggcagcctcccccagcaggcttttacaaaataaattgcgatggctcatatcgggcgaaatcaggtttgggcggctggggatgtattatcaggggccacgatggcggttttttggctgcgggggcgggcgctttgactggcatatcctctgcccttcatgctgagagcgtcgcctgtatgaaaggtttggagctggctgttttccttggaatgcaaaatgtgatgattgaaaccgatgctgcgatcctgaagacggcgttgacctcacaagaatatgacctctctgctttgggcgtagtgttcaaggaaataaggagtaggatgttttctgagtttgcttgttgtattgtgtctaaatgtcaaagaacctgtaatttagttgctgactgtttagctgctcatggagcaaactcaggtgacgttgactctagtttatggctagatcatgcaccggacttcatttgtaatcttgtctccggcgatgtgcctggagctgcttaatagccatggaatgcgtttccatttcaaaaaaaaaaaaaagagaaaacgacgcacggaacaaaaccgaacccgcccggagccccggaaggaggagtcgcttcctttccctccctgtcctccctccctcaccccgaccacgacgaactcgccgccgcgtgatcgtccccgtccatgccccggccctgcctcgccacaccctatttccctgaccgagcgcccgcgccgcgcggccatggcgcccgcggccctccacttcctcctcgccatcctctgcctagcttcgcgtctcgtctggacggtagcggcggggtgcggatcgaacacaaacctagcggggtacagcgcggacctgcgcatgtcgcagcaccaactccgcggccgcgtggagattctcgacggctgctcgttccgcgtcgctgcactcgacctcctcccgggttcctcctccgcgcggtggtggcgcgcggatgggaccgacctcgagtccctatcccgcggcgagcccgcggccgccgacccgctggaccgcaccttcctgtccgagtccctcgtgttccgcctcctcccgggcctctcctggccgctcgtccccgtcctcgcagccttcgaccccctcacttcctccctcttcggcttcgtgcgcctctccggtgccaacgcctccgactcatcctcttcgtccgcagcggcggtgcccaccatgctcgactcctgcgttcagctctccccgcgcttccgcgtgcggtggacgctccacgaggcgaacaattccatcgacatcgccctcgaggcggcggttggatcagagtactacatggcgctcgggtgggcgaagcctggcacggccaaaccgtccgtgatcggcgccgacctcgccgtcgccggcttcactgaggacgggctccccttcgccgaggacttctacgtcaccaattacagcgagtgcttgctgcgcaaggacggcctcgtcgagggcgtctgcccggacacgatctacgaccgcgacaactccaccgggctcgtcaataacacgcggctggtctacggccaccgccgcgacggcgtctccttcgtgcgcttctcgcgcccactggtgtccgcggacaataagtacgacgtccccgtgaacgccaccaggaacatgactgtgatctgggcgatcgggctgctgcggccgcctgactcgctccggccgtactacctgccgctgatgagtcaccgcggcgggtctccggggacagcattcaccttcgccaggctcaacctgtcggacgcgagcagcgggtgcgtcggtccgttggacgccgaggataaggaggaccaggccaggatcacgacggagcgcaatacgccgctggctgtgacggttgggccggcgctccattaccccaatccgcccaaccccgacaaggtgttctacatcaacaagaaggaggcgcctctgctcaaggtggagcgcggcgtgccagtcaccttctccatcgaggccgggcacgacgcaccagtctacatcacgtcggaccccgtcggaggcaatgccactctcaggaactcgtcagagatcatctacgccggtggaagcatggcggagggcgtgccggctacaccaacagaactcgtctggttgcctgatcggaacacgccggacctagtgtactaccaatccttgtatgatcccaagatgggctggaaaattcaggtcgtcgatggtggcctcagcgacatgtacaacaacagcgtgctactggatgatcagcaggtgacattcttctggactctctctggtgactctattaacattgctgcacggggtgagaagaagagtgggtaccttgcaattggatttggtagcgtaatggtaaatagctatgcttatgtcgggtgggtcgatggcaatggcaaggggcatgtcaaatcttattggatcgacggaaaggacgggatgagtgtgcacgagacacatgaaaatgttactcataagcgatgccgattggaaaatggtgcgatcgtgtttgagttcactcgtccattaacaccttcatgcagtggaaaggtggagtgcaagaacataatcgacccgacgactcctatgaaggtcatctgggccatgggtgctcaatggtcacccggccccttaagtttgaagaacatgcactccgacacaagcaatcgtcctatcaggattcttctgttgagcggcttggctgaagcagtggaggacctccgcccggtgcttgctgttcatgggtttatgatgtttgtggcatgggctattctgctgccaggggggatcatggctgcgagatacctgaaacatctgaaaggcgaggcctggttccaggctcacacctatctgcagtattcaagcatagctgtcatgttcttgggtgttgtatttgcagttgctgagctccgaggtttctctttcaaatccagacatgctcgaatcggtgcagtagcactgacattcgcatctatgcagccagtaaatgcgtatcttcgaccgcataaaacagagaatggagagaccccgcctggaaacagagtagtttgggaatatctccatgttttgaccgggagatctgctgcgcttgctggtaccttggcgctctttactggcttgcagcatcttgggcaccgatatggcagtaagactatcaagggacttacatgtgggctaatcttatgggttataagcgttactttgttaacagcttactttgagtatatggcaattaagcgaaggactgcaggtgttgatggtctttcaggaaattgggtgcttggcaacactgaggaagatgatacagtcgaacttttgcaatctaacagggtagtcagtaaaatggagtctaatttgtcacctgaaccaatggaagtacagctcgagccacttaaaggatgagataaaattctcagcatgcatatggacataaaagtatgttaactaaaattctttatagatag

SEQ ID NO: 137687 - DNA, 792 bp, Zea Mays
ctctcgctgcacacagtcaaacacatctggtcttttcattcgtgtggtttcggcgccgtgaacatgaattttcagctcctctctctactactcaccttcgtcgacctctcagatgtacgtacgcaggtaggggtggagagaagaggacgacgctgctgctcgttatactgatggaaagtgctgctgcatatggatatgagggagcatcatgaactaatggggaacgtcatttgcagattttacttgaccaaggtgatcttcggggggaacataatggcttaggttttggaccaagctacagaaaaggcttaggttttgaaccaagctacagaaaagtgaagaggaagatgaccaaataaagaccgcttgtcgacaattagagacagtggcaatggagatttctgctcatcatagatgggggtttacaaatagaattgcattgtaaccaaattatctatccctttgtttttctagttatccagtttagaggtttgtccctcccacttgtgcagaccgatgagctgatgagctgttagttctgtaataagtttggccctatcctcgctatgaggtgaaagtcggaaattttggttccattatttaaaaaaataaggatctatattatattagttattcataaaagtatctagaaacatcgatgtaattgctctgatgtctttgtcaagactcaagaatggttgaagaagcaataatagaattggccattgagtttttgcttcctcttgtgtaccctttcccttcatttgttgattaatgatcaataaaactgaa

SEQ ID NO: 137688 - DNA, 2163 bp, Zea Mays
agcgtcctctagcttcttgcccagcccgggtagtacaatacaacccccgtcccatcagctggcagaggccaggccatcagcacccacacccacacccactccctccgttcctcctccatcctcctgcccccaagtacggccgccgccgccgctcaccggatccaagaagaacagccgaggggttcggtctccctcccagcagtgacgagctagctgctccgtgcgttgattgcgtgtttgttattacgtgtacgtcgtgtaccggccgtgtttagctgcagaaaatatagtcgattgggcttaggccccgaagagattgacagaagagagcgagcacctggcgcggcgaccggcatggaacgcatgccgtccccgccgcgtgctcgcttctctttctgtcagcctctccctcgtcctgagccgacgccgatcgagcgtcgtgtgtgtgtagctagctataccttgctctgggcagcatcagtcgctgcctgcctagtggctgctggcgctagtggggcggcagacgctgagacgccaccaccgatactggaaggcaaggagccaaggagggagggggaagggaagggggagagagaggaattggcacgggcgggtgcggtggaaactgtgccacgcagccgcgcgcgcgcagagatgggcaaggacgacacgcatgctgcgaggggacgacggcttttgcaggcaccaagggcatgtcacctcattatcttctagagatacgcacagatttctcgcattttttttgctcgttcctttcggtcaggttgtcggggggttactaccgaggaagaggatgaggctgggaggggggcatggagacttggagaggagcagccaagaagagtagtagtagtactttccttccacttccacgcctctcagtacactgagaaaaccacttcggagcgcgagttcgtggttggttttgcggtacactgaaaaatgattgctagttttattcgccgtttatttatttatctatatttttgctcgcatgctcgcaagatttccttctcttccgctccactcccgggtctctcttgctgcctcagctcacctcgcctcaccttggtgggatgctggcagtacactgcggcactgtaaggatttaacagaacgaagactagtgctgcatcatctctcgctctcgctctcgctctctttctctttcctttctccctccctcgtggtgcaggttcagctcatctttgaacactgtagccattattccagctagctcgcgctgtttctgctcttgcttgctcgggggttctcttctcgctctctcgagttcttgctcggttcctcctgcggccatggcggtccgggtggttgcgcgcgccggcgctagcaagctcctgtttgcacaaaaatggagcgtggggggcaccatgtgatgacccaaatttggcaaagaccgtggactcgccttgccctttgccagatctggtctgcatctgagatgtacgtacgcaggtaggggtggagagaagaggacgacgctgctgctcgttatactgatggaaagtgctgctgcatatggatatgagggagcatcatgaactaatggggaacgtcatttgcagattttacttgaccaaggtgatcttcggggggaacataatggcttaggttttggaccaagctacagaaaaggcttaggttttgaaccaagctacagaaaagtgaagaggaagatgaccaaataaagaccgcttgtcgacaattagagacagtggcaatggagatttctgctcatcatagatgggggtttacaaatagaattgcattgtaaccaaattatctatccctttgtttttctagttatccagtttagaggtttgtccctcccacttgtgcagaccgatgagctgatgagctgttagttctgtaataagtttggccctatcctcgctatgaggtgaaagtcggaaattttggttccattatttaaaaaaataaggatctatattatattagttattcataaaagtatctagaaacatcgatgtaattgctctgatgtctttgtcaagactcaagaatggttgaagaagcaataatagaattggccattgagtttttgcttcctcttgtgtaccctttcccttcatttgttgattaatgatcaataaaactgaa

SEQ ID NO: 137689 - DNA, 2216 bp, Zea Mays
agcgtcctctagcttcttgcccagcccgggtagtacaatacaacccccgtcccatcagctggcagaggccaggccatcagcacccacacccacacccactccctccgttcctcctccatcctcctgcccccaagtacggccgccgccgccgctcaccggatccaagaagaacagccgaggggttcggtctccctcccagcagtgacgagctagctgctccgtgcgttgattgcgtgtttgttattacgtgtacgtcgtgtaccggccgtgtttagctgcagaaaatatagtcgattgggcttaggccccgaagagattgacagaagagagcgagcacctggcgcggcgaccggcatggaacgcatgccgtccccgccgcgtgctcgcttctctttctgtcagcctctccctcgtcctgagccgacgccgatcgagcgtcgtgtgtgtgtagctagctataccttgctctgggcagcatcagtcgctgcctgcctagtggctgctggcgctagtggggcggcagacgctgagacgccaccaccgatactggaaggcaaggagccaaggagggagggggaagggaagggggagagagaggaattggcacgggcgggtgcggtggaaactgtgccacgcagccgcgcgcgcgcagagatgggcaaggacgacacgcatgctgcgaggggacgacggcttttgcaggcaccaagggcatgtcacctcattatcttctagagatacgcacagatttctcgcattttttttgctcgttcctttcggtcaggttgtcggggggttactaccgaggaagaggatgaggctgggaggggggcatggagacttggagaggagcagccaagaagagtagtagtagtactttccttccacttccacgcctctcagtacactgagaaaaccacttcggagcgcgagttcgtggttggttttgcggtacactgaaaaatgattgctagttttattcgccgtttatttatttatctatatttttgctcgcatgctcgcaagatttccttctcttccgctccactcccgggtctctcttgctgcctcagctcacctcgcctcaccttggtgggatgctggcagtacactgcggcactgtaaggatttaacagaacgaagactagtgctgcatcatctctcgctctcgctctcgctctctttctctttcctttctccctccctcgtggtgcaggttcagctcatctttgaacactgtagccattattccagctagctcgcgctgtttctgctcttgcttgctcgggggttctcttctcgctctctcgagttcttgctcggttcctcctgcggccatggcggtccgggtggttgcgcgcgccggcgctagcaagctcctgtttgcacaaaaatggagcgtggggggcaccatgtgatgacccaaatttggcaaagaccgtggactcgccttgccctttgccagatctggtctgcatctgagatgtacgtacgcaggtaggggtggagagaagaggacgacgctgctgctcgttatactgatggaaagtgctgctgagtgactcttgtgctctttgctgcttttccatcgccgtcgtcttcctccccagcatatggatatgagggagcatcatgaactaatggggaacgtcatttgcagattttacttgaccaaggtgatcttcggggggaacataatggcttaggttttggaccaagctacagaaaaggcttaggttttgaaccaagctacagaaaagtgaagaggaagatgaccaaataaagaccgcttgtcgacaattagagacagtggcaatggagatttctgctcatcatagatgggggtttacaaatagaattgcattgtaaccaaattatctatccctttgtttttctagttatccagtttagaggtttgtccctcccacttgtgcagaccgatgagctgatgagctgttagttctgtaataagtttggccctatcctcgctatgaggtgaaagtcggaaattttggttccattatttaaaaaaataaggatctatattatattagttattcataaaagtatctagaaacatcgatgtaattgctctgatgtctttgtcaagactcaagaatggttgaagaagcaataatagaattggccattgagtttttgcttcctcttgtgtaccctttcccttcatttgttgattaatgatcaataaaactgaa

SEQ ID NO: 137690 - DNA, 216 bp, Zea Mays
cacagtttttccaaactgcagtttttcaaatactaaagtatactttagtcatgacattactacagtctacaatgcttcagttttcgaatacaacagtatctaatacatcaaggtgtttgggaaaatctttggttgagaccaatcagccagagcgggaccaagctggcgctctctttacagagaaaaactttggctgagaccaaagtttccaaaact

SEQ ID NO: 137691 - DNA, 97 bp, Zea Mays
tcctcatcacatgcctctgcccatctatctctcgtactccttcctgttaaatgccttttttgacagacacaccaccagcagtgacgccgctttactc

SEQ ID NO: 137692 - DNA, 231 bp, Zea Mays
gaatagcaattgcaatgcaccagcaacagttacatacaatgaatctctacctctctccatgttccagagcttaaatactgggaacaagctacatactacattgctacaaacaatacattttatgccgactaaattgaaaagaaaccatggacatgttgagcatcagactgtcaacatcctaaactctaggcttagtaacttcgctttagctacaattcacagccaatgggc

SEQ ID NO: 137693 - DNA, 894 bp, Zea Mays
ctcggcctttcgggtctttcgctccccggctcttcgtctccctctcttgccgaatccaagccctaaaccatagggcttgcctggtgcccgggtgggctccccatggcggcaatagaggacgaggagatggagaagaaggtgcagcagtacctgcaccgcaaggggttccgcctcaccgagctcgcgctccacgaggagcgcagtcgcctctccacctccgacgtcgcgcttacccggtctgacaataatccagcaagataccatgagggatacagcagattaatagcatgggcgtatagttctcttgatcaatataagtgcactgcttgtagataaattgtacttaatattcagccaaagcatatcacgccttcaaactatttctaactgttaccttcaagtgatgcattttatgaatcctctgtgttctatggcacaaatttacttggcagacctcctctccttttatgaatcccatatctgtcatataagcatgattttgcacttgacaacttatgtaattctagtttttcaaaagggcgtttggttgtggcaggcaaactattttatgttgtgatctgattttttaacttacagtcttacgctccattctgttcttaaacttggcaatataattcatatttcttaattcagatattttttgtagcatgaattacttcgcgtcctttacccagtttttatccattgcttcatggatctagtggcagagggacatatgcacaatgctcggtcatttttccatacatttcgggaagctcataaggtgatgcattcaagggatcttcagaagctggaaggcatcctctctccttcacacttggaggttatttagctctgcactacattgtgccattatgttgtgaatggacccat

SEQ ID NO: 137694 - DNA, 880 bp, Zea Mays
ctcggcctttcgggtctttcgctccccggctcttcgtctccctctcttgccgaatccaagccctaaaccatagggcttgcctggtgcccgggtgggctccccatggcggcaatagaggacgaggagatggagaagaaggtgcagcagtacctgcaccgcaaggggttccgcctcaccgagctcgcgctccacgaggagcgcagtcgcctctccacctccgacgtcgcgcttacccggtaggtttgcccgtcccgcttccctggcctacattgggctgcagctctcgccctggccagtgacggtagcttctctggtaccaggaaatctagtggcctcgtgtgaagtcgaactggtgcgttttatttggctgctcggtgtctgaacctctgtctgcgtgctctcgccttggctgtcgattttactaatttggttgcttggatgtggaccgttggcttagatagtcaattaggtactcatgttgcggattgaagggtataaagttatgccaattcagttttcatgaagatccatgttttacattgctgccagctgccagttacatgccattgttcaggcccgttacggtagcaaccctgattaaaattgtattactatttgaatattgcaataagtttgttctgaaaaaatgaataactttagctacacagttattttgaggaagagtgtgtgggctgtgttgccatcgtaccattttattctatctcctgaatcctgatacaatgccatgtagttctcctgcgtgtttgaggcaaaaaagatactgctaattttcctttagcagtaagtgccatagtttgctgtcttaggttgtttccacatgtatcggatatctgttctttggagaggaagaaatgagcta

SEQ ID NO: 137695 - DNA, 291 bp, Zea Mays
tggattgctaacaagggaacaacacatagaaaaaatcttctaattggagtggcggcaatgttttggtctatttggctttgtcgcaatgatgttgtttttacttttaaaccaaaaccatcaattatgcaggttcttttcagggcaacatactggctcagattctggagattgttgcagaacgaacaacctcaacacgagatccttgcggtatgtcaatccttagaggtggtggctatggagatctttgcaagccatggatggaggtccaatgctagattagaaggagcttga

SEQ ID NO: 137696 - DNA, 486 bp, Zea Mays
gcgcagttaactaacagctcactgacagctcattaatccccaacctgtagcctcctaacagggtacaagatgaagacgcacaaggcgtcggcgaagcggttccgggtaacggggaggggtaagatcgtgcgccggtgcgccgagaagcagcacttgctcgccaagaaaaacaccaagcgcaagaagaggctctccaagatggtccaagtcaacaagagtgactacgacaatgtgacgggtgcacttccctacctcaaagtgaataggaaagcaaactgagatcttcgtggtcttccaaaatcattaagtttcattccaccaaattgtacttttgtgtatcttccactgtatttcgttttaaaaaatattgaggcatcatttcaaagcaagcaaaaaacaactcctgttatcaacagtttagcgatatttcagaggtgcactgcttgctatagttgttatttagtcaaaaacatgtgcaaataggag

SEQ ID NO: 137697 - DNA, 1001 bp, Zea Mays
ggataataaggtcataagaacatgggtaacttttagccattgcgtcgatttcagggaagctgactgaaaaaagcgatgtatacgcatttggagtggtgcttcttgagctactaatgggaaggaagcctgtcgagaagatgagtcaaactcagtgccaatcaattgtgacatgggtacggtacaaaaaaaatacactaaacctagaatatctctaattgccacaatttggaactttagtgatgaacaattgtcaactcccattcacaatttggaattttattttatcatatactggaatacatcggcttcatcatcagtgctaacaattaaggagtcaatgcaatttctttgtgtgctgaaaaaatcataaacaggccatgccgcagctgactgaaagaacgaaactccccaacatagttgacccagtgatcagggacacgatggacccaaagcatctgtaccaagtggcagcagtggcggttctctgtgtgcaaccagaaccaagttacaggccgctgattactgatgttctccactcccttgtccctttagtgcccgtggagctcggagggacgttgagggttgcagagccaccttccccaaacctaaaacattctgcttgttgagatgtcatggtcggtcgaagatgacagttacgtgctgatgagcttggacgatgcttatcagtaacttatcactctagctgtgtgccagaggatgacggttccaacctgccggtcgctgagaattctggtttgcaaagagttgtctcctatgtctttgcttgtacaaagaagtgaaagaagcaacaccctttcccttagaatttagggtccttctgtacagatcaaagtttctccaacactataacataaagaatttgagaacgacgtgcataaagaatttgagaatgacgtgctttgggttccacaggggtacccgagcacctttgctttgctgcaatattttgcttcctatcgtactctgataaaactgaaaat

SEQ ID NO: 137698 - DNA, 1849 bp, Zea Mays
gagccagctccgtctctctcgcgctcgctcctggtctcgtggccttgttgttccgtgcccaattccagttccaggggtataggagcaggatctcctctcgcgaacaacccagtaaacaactccgcacagcatgaggccaccgccacctccattgccgtccctgcgctcttccgtcttggtcctcgtcctgctgccgctgctggccgcgtgctcgtccccggccagtgggagggccgtgccgttgtctcctgggaccgcctccgttgctcccgcgccgcctcccgtcgtgatcatagtggagcggcgcaatcgtttccaccgggagctagtcgtcgcctccgccctcgcctccatcgccatcgccgcgattatcctttccgcgctgtacgcgtgggtcctgtggcggcggtctcgccggctgccccgcggcaataagggcgccaggagcgcagacaccgcgagggggatcatgctggcgccgatcctcagcaagttcaactcgctcaagacgagcaggaagggggttgtggcgatggcgatgatcgagtacccgtcgctggaggcggcgacagggaagttcagcgcgagcaacgtgctcggtgtcggcggcttcggttgcgtctacaaggcagttttcgatggcggtgtcgccgcggcggtcaagaggctggaagcaggcggccctgaatgcgagaaggaattcgagaatgagctggatttgctcggcaggattcggcaccccaacattgtgaccctgctgggcttttgtgttcacgaggggaatcactacattgtttatgagctcatgcacaagggatccctggacacacagctgcatggggcttcacgtggatcagccctgagctggcatgtccggatgaagatcgcactcgacatggccagggggttagagtatctccatgagcactgcagtccaccagtgatccatagggatctgaagtcatctaacatacttttagattctgacttcaatgctaagatttcagattttggtcttgcagtgaccagtgggaatattgacaagggaagcatgaagctttctgggactttaggttacgtggctccagagtacctattagatgggaagctgactgaaaaaagcgatgtatacgcatttggagtggtgcttcttgagctactaatgggaaggaagcctgtcgagaagatgagtcaaactcagtgccaatcaattgtgacatgggccatgccgcagctgactgaaagaacgaaactccccaacatagttgacccagtgatcagggacacgatggacccaaagcatctgtaccaagtggcagcagtggcggttctctgtgtgcaaccagaaccaagttacaggccgctgattactgatgttctccactcccttgtccctttagtgcccgtggagctcggagggacgttgagggttgcagagccaccttccccaaacctaaaacattctgcttgttgagatgtcatggtcggtcgaagatgacagttacgtgctgatgagcttggacgatgcttatcagtaacttatcactctagctgtgtgccagaggatgacggttccaacctgccggtcgctgagaattctggtttgcaaagagttgtctcctatgtctttgcttgtacaaagaagtgaaagaagcaacaccctttcccttagaatttagggtccttctgtacagatcaaagtttctccaacactataacataaagaatttgagaacgacgtgcataaagaatttgagaatgacgtgctttgggttccacaggggtacccgagcacctttgctttgctgcaatattttgcttcctatcgtactctgataaaactgaaaat

SEQ ID NO: 137699 - DNA, 750 bp, Zea Mays
cctccaactccaactccaaggctccaacgcatctgcacttccttctcctacaaaatcgcagcagcacttcttcctccacttcccaaatcaaagcaggaccagcgcgcgcgcagtgatctagggcgaagcaaagcgaggaacagggaccgtctcgttgggcccggaaaactggcgagatcgatggacgctgccgcggaggcctcaacgccgtcgtccccgtcgaagctgcgcgacaagctgcggaccacggtgtgctgctgcttcggcgtggagagggctcggtggcggcggcggcggggggcggcgacggccgcgggcgagttccgctacgacccgctgagctacgcgctcaacttcgacgagggcgaggacgacgacgcctacgcggaccccgccgcggccttccggtacaggaacttcaacgcgcgcctcccgccctcgccggccgccgctgccgcggtgaggacccagcggccgcagcgggccacggccaccgcctgaccgcccatcgcttagagttaagatcgtgctccgcgatgtctctctctttttggtttgtttgtttgtttggccctcctctcttgcaattgtacgatctactgagcgagcgacatacagctacttacttttagtgaattattatcgtgttatagatacagtgtactcttgtaacatgtaggaatgttccgatgtgttcagtacgaagcgggagtgatgaaccctagaaattggggctttgattccagaaag

SEQ ID NO: 137700 - DNA, 900 bp, Zea Mays
ggtctctgattcgtgctgaagcttagatactgcaaaaccgacgggggaaattacacattttcgacattatttgctcaacattacgaaacacgcattcttccttctcttctcagggaactgaaaacgacgaacaccacggttgagagtttactaaaatcctctccaccacaattccacaaaagcaaagctatgacaacgactgacgcagcagcaccgaacccgagctgccggagatcggagaggagacaagcaaagcaactttatcttcacgtgggtttgaggtcctgaaacatggagtcccacttgatgtcgtcattgccggtgcccgcgccgccctcctcctcctcctccgttccgcactcctcgtcgtggaacatcaggctcgccttcgccgacgacagcctcgcgccgccgccgccgctgaggccgcccgctccggcgacggcagcggcgccgtcggtgatcatgagcaccatcttcttggcggcgctaccggtgctcttccgctgcacggcgccgacttggacggcgtcgtcgccgctgcagatcctcgggacgacggcggcgaccgacgacggcgcgccccgccttgcgccgcctccggccagccggcgcacgcaccgcgacaggcacctggtggccctgcgcgcgagccgcgagcccgacgacgcggcggcctgctccttggccagcttgaggatctcgaggcggtgcttggcgacggcgatgcccatgctcttgagcaggtcgtggtcgaagtgcgccgcgtccccgggctccagctcgttccggctgaagaggcgcccgtactcgtgcgccagcgccggcgccagccccgtccgcgccagccacgcgcaccagtcgtcgtccatggccttccctgtccaccaacctacactt

SEQ ID NO: 137701 - DNA, 857 bp, Zea Mays
ttgccattaatatgctactttgtctatagtttggctaatctctttctgctaacatccctatattgcttttgttataggcgacgttttagtcattttagatctacgagctgaccagtcattgtttgaagctggagtggctcgagaggttgtgaacaggatccaaaaattacggaagactgctcagcttgaacctgctgatccagttgatgtgtattacgaatctgtgggcagtgacaaaaacacactggaagagattttgaagtcacaggatcagtatattagggacgcacttggttcaccaattatgccaaaagaaatggcaccaacagatgatgtaatacttggcgaggagtctcacaatgtacatgacatgtcatttgtcatatgcattgcaaggtccacccctattcttgcaccagatcttctttctcatgcctcaggcaaaagcaatcatgtggaggcgttgagagtatatcttctgtcaaggtctctttccagattgaagaaccagttccaagctggaaagggcatgattacagttgactgcatcgaaggttatccaccggtcagtttactgctaggaaagcacgttttcctaagtgcaggggatttttatctggctagtcgatcctagtttcgtttgctgcatcccaattttgagctgcttcacccattgttttgccgcaatcagcttaaaacagcttggttccatttatgcatctcaccaaagtcatgtattcagtaaaggtgaaagtctcaatgtatgctaatatgctatagcatgacatgtaagctaagattttcaaatacctggctatgggttcccataggtgatagcatgtttgtttgcaatctct

SEQ ID NO: 137702 - DNA, 1643 bp, Zea Mays
cgagggtcttgcctcattttctccgatggaacaagcggtacttctgaagtcatccaatgtgttggatcactggataaactcagcaactgaaagtctagttagctttgttcaccaggagatggatgcatatcgtctttacacggttgtgccatatttggtaaaatacattgactatcttactaacatatatgtgcgcttgaaccgcaaacggttcaaaggacgtactggagaagaagactgcagaatttctctctcaacactctaccatgttctcgtaacaacttgcgtggtgatggctccatttacaccattctttactgaagttctttatcaaaatttgcggaaggtatcaagtaaatctgaggagagcattcacttctgcaagttcccttccacaactggtgagagagatgagcgtgttgagcaaagtgtaaataggatggtgaccatcattgatcttgcacgtaatattcgtgagcggcataacaaagctctcaaaacaccactcaaggagatggtggttgtgcatccagacaatgactttcttgaagacataactggtaaactaaaagagtatgtcatggaggaaatcaatgttaagactgtcactccatgcaatgaccccttgatgtatgcttctctgcgagctgaacctaatttcagtgtgctgggaaaaagacttggaaaggacatgggcaaagtatcaaatgtggtgaagaagatgactcaggaacagatcttagacttcgaaaaaagtggagagatttcattcttcggtcattgcttgaagctagatgatattaaggttgtccgacaattcaagcgtcctgaaaacgtgtcggagaaggagattgatgctgcaggagatggcgacgttttagtcattttagatctacgagctgaccagtcattgtttgaagctggagtggctcgagaggttgtgaacaggatccaaaaattacggaagactgctcagcttgaacctgctgatccagttgatgtgtattacgaatctgtgggcagtgacaaaaacacactggaagagattttgaagtcacagtatattagggacgcacttggttcaccaattatgccaaaagaaatggcaccaacagatgatgtaatacttggcgaggagtctcacaatgtacatgacatgtcatttgtcatatgcattgcaaggtccacccctattcttgcaccagatcttctttctcatgcctcaggcaaaagcaatcatgtggaggcgttgagagtatatcttctgtcaaggtctctttccagattgaagaaccagttccaagctggaaagggcatgattacagttgactgcatcgaaggttatccaccggtcagtttactgctaggaaagcacgttttcctaagtgcaggggatttttatctggctagtcgatcctagtttcgtttgctgcatcccaattttgagctgcttcacccattgttttgccgcaatcagcttaaaacagcttggttccatttatgcatctcaccaaagtcatgtattcagtaaaggtgaaagtctcaatgtatgctaatatgctatagcatgacatgtaagctaagattttcaaatacctggctatgggttcccataggtgatagcatgtttgtttgcaatctct

SEQ ID NO: 137703 - DNA, 1649 bp, Zea Mays
cgagggtcttgcctcattttctccgatggaacaagcggtacttctgaagtcatccaatgtgttggatcactggataaactcagcaactgaaagtctagttagctttgttcaccaggagatggatgcatatcgtctttacacggttgtgccatatttggtaaaatacattgactatcttactaacatatatgtgcgcttgaaccgcaaacggttcaaaggacgtactggagaagaagactgcagaatttctctctcaacactctaccatgttctcgtaacaacttgcgtggtgatggctccatttacaccattctttactgaagttctttatcaaaatttgcggaaggtatcaagtaaatctgaggagagcattcacttctgcaagttcccttccacaactggtgagagagatgagcgtgttgagcaaagtgtaaataggatggtgaccatcattgatcttgcacgtaatattcgtgagcggcataacaaagctctcaaaacaccactcaaggagatggtggttgtgcatccagacaatgactttcttgaagacataactggtaaactaaaagagtatgtcatggaggaaatcaatgttaagactgtcactccatgcaatgaccccttgatgtatgcttctctgcgagctgaacctaatttcagtgtgctgggaaaaagacttggaaaggacatgggcaaagtatcaaatgtggtgaagaagatgactcaggaacagatcttagacttcgaaaaaagtggagagatttcattcttcggtcattgcttgaagctagatgatattaaggttgtccgacaattcaagcgtcctgaaaacgtgtcggagaaggagattgatgctgcaggagatggcgacgttttagtcattttagatctacgagctgaccagtcattgtttgaagctggagtggctcgagaggttgtgaacaggatccaaaaattacggaagactgctcagcttgaacctgctgatccagttgatgtgtattacgaatctgtgggcagtgacaaaaacacactggaagagattttgaagtcacaggatcagtatattagggacgcacttggttcaccaattatgccaaaagaaatggcaccaacagatgatgtaatacttggcgaggagtctcacaatgtacatgacatgtcatttgtcatatgcattgcaaggtccacccctattcttgcaccagatcttctttctcatgcctcaggcaaaagcaatcatgtggaggcgttgagagtatatcttctgtcaaggtctctttccagattgaagaaccagttccaagctggaaagggcatgattacagttgactgcatcgaaggttatccaccggtcagtttactgctaggaaagcacgttttcctaagtgcaggggatttttatctggctagtcgatcctagtttcgtttgctgcatcccaattttgagctgcttcacccattgttttgccgcaatcagcttaaaacagcttggttccatttatgcatctcaccaaagtcatgtattcagtaaaggtgaaagtctcaatgtatgctaatatgctatagcatgacatgtaagctaagattttcaaatacctggctatgggttcccataggtgatagcatgtttgtttgcaatctct

SEQ ID NO: 137704 - DNA, 312 bp, Zea Mays
atggccctgtttggtttcgaagaaaaaagatttcacaactggcttgaaggtgcacgtgattgggccattagcagaagtagattctggggtactccacttccactgtggatgagtcaagatcgtaaagaaattgttgttatggattctatcgaaaagcttgaaaaattatctggagtcaaggtcactgatcttcaccgacactatgttgatgatattacaattccctctaagaggggacccaagtttgggacgctcaaacgtgttgatgatcttccattaggcattaagatatttagatggaggataggttga

SEQ ID NO: 137705 - DNA, 1410 bp, Zea Mays
ggttgcattcggaccgtccgtagcgcccagctgacctctaaacccttgtctccctcccccaagtgaatccgtgttgtacctctcgccgccgccgtaccatcgcccgaaatcctagccccattcaccgcctcgctcggaatccaagccccattcggcgccgccgcgaccgccggacaggaggtcatggacgacgtgtgcgaggggaaggacttctccttcccggagcaggaggagcgggtactcgagctgtgggcgaagctcgacgccttccacgagcagctccggcgcacggagggcggtgaggagttcgtcttctatgacggcccccccttcgccactggtctgccccactacggccacatactcgccggcaccatcaaggacgtggtcacccggcaccagtcgatgcggggccgccatgtctcgcgacggttcgggtgggactgtcacggcctccccgtcgagtttgagatcgacaagctgctcggcatcaccaaccggcagcaggtgttcgacctcggcatcggcaagtacaacgagacgtgccgcagcatcgtcaccaagtacgtctctgagtgggaggccatggtcacacgtacggggaggtggattgacttcaagaacgactacaagaccatggacctcaacttcatggagagcgtctggtgggtgtttgcgcagctctgggagaaggacctcgtctataagggcttcaaggtcatgccttacagcacaggatgcaaaactgcactgtcaaactttgaggcagcactggactataggactgttcctgacccagcggtgatggtatccttccctattgttggtgatatggacaatgcagcttttgttgcatggactacaacaccctggacacttccaagtaacctagcgctgtgtatcaatgccaatctcatgtatgcaaaggttagagacaagtcaaatggaaaagtatatgttattgcagaatctaggcttgggcagttaccagttaaggccaaagcttcaggaaagaagcaggcaccttcaaagggaagcaatgctgaagctgctcaggatggtttggataaggaatcatatgagctgctggtaaagattcctgggccatatttggttggcttaaaatatactcccctatttgattttttcattgaactacaagagactgcctttagagtgattgcggataactatgtcaccgatgatagtggaactggcgttgtccattgtgctcctgcatttggtgaagacgaccatcgtgtttgccttgctgctgggatatttgagactgctggacttgttgtcgctgttgatgatgatgggtgctttattgaaaaaatatctgattttaaagggcgatatgtcaaagaagctgacaaggatatcatcagtgctgttaaggcaagttga

SEQ ID NO: 137706 - DNA, 2798 bp, Zea Mays
aacgcacagtcaaacactccgacgaccccttcctccctcacccctagccgcttccccggaccccgcgccgatcccaccgaacccatggcgtcggagatcgaggtgctcgaggacaccaccacctcctcgacctccctcgtcgcggccgcgtccacggccccttccgccgcggagggcgcaggggcgccggcggagaacgagtcgctgaagaacgacgtgtacaccgcagcggcgtacggagatctggagaagctgcagcggctggtggagggggagggccgcccggtcaccgagcccgacggcgggggctattacgcgctccagtgggccgcgctcaacaaccgcgtcgccgccgcgcagtacatcctcgagcatggagcagacacaaatgctgtggatcacactggacaaacagcacttcactggagtgctgtacgtggtcatattcaagttgccgaactacttctgaaagaaggagctaagatggatgctgctgatttatatgggtatcaggccacacatgttgcagcacagtatggtcagactgcattcatttaccgcattgttgcgaaatggaatgctgatccagatatccctgataatgatgggaggagccctttacactgggctgcttataagggatttgcggactccatacggcttcttttgtttttggatgcttataggggacggcaagacaaagaaggttgtactcctttacactgggctgctattcgggggaaccttgaggcatgcactgtgctagttcaggttggcaaaaaggatgatttgatggtgaaagacaaaactggcttaactccagcacagcttgctgccgataagaatcatcggcaaattgcgtttttcctcgacaacgctagaagggtacatgacagaggatgtggtgcgaacaccagatttgggaaattgtcaaaattaggccttgcaccttttctttggtgcaccattattggcatgcttattacatacgtacactctgttatattaggacaatatgtcatgactatgacagcaccatttgggatgttcgcatggtcaggagtttttcttgcaactgctgggttggtcatgttctataaatgtagcaggaaagatccgggttacatcagcataaatacaaggggctcgcaaaatcaaagggacgatgaaccactgctgaagatggagttagaaaatcctgcgcttctttttggcaactggtcacaactttgtataacctgcaaaatagtcagacctgttcgttcgaaacattgttctacatgtgatcgttgcgtggagcagtttgatcaccattgcccttgggtatctaattgcataggaaagaagaacaaatgggaattcttcatgttcctcaccttagaagtttttgcaatgatcattactggctctgctgccattataagacttgtaagggatccagattctccatcatcttttggtgcttggattcattattctgcgtttcagcatcctggggttgtttcatttctcgcattggattgtttccttttctttggagttgcagttcttacagtttctcaagcatcacagatagcaaggaacattacaacaaatgagatggcaaattccatgagatatgcatatctcagaggcccaggtggcagattcaggaacccgtatgatcatgggattcgcaagaactgctctgacttcttgttaaatggatacaatgaggacactgaacggctagaccagacattgcacactgatgaggagatgggaatgatacagatgacaagagcggtttcgcagaatggtgacaatcatttacatcatggtaatggcacggaacatagttgcgctgattcacaggcaagcccaaaacctcatagccaagtgggttcgcctcagtgttgtgatcacagtaagaggactgataggacactgttgggcctaggtttgggccttgggcgaaacagtgcatcccggcagtatgttcggtctcttatcccattgtgatctatcatttggatatcatgtgttcgtttcagtgtagattggatttgttcactgctccggccccatcttttatacgtgcccttgacatggttcaccatgtaccattggctggtcagggacattgttgggccattagcacaggaatactgagatatatctagtgtttgtagttttggggtgaactcagagaagttgaaggtaacgacttggcttgcgaatatcagctgatctgcactcgggaaatatcagagagcttgtgcagaaaaggtaacagttatgggcttatggcagatgcagtagcatgagatgtcttcataattgttgtgtacatcaggttcagtggtcttgggggcctccttcttctgaaggtcttaaaaacacggttaaccatttattttcagtatgttattaagtattacaggagcttcgttactagaaaaacttcgacatagatcaatgaaagcacgacgaagcaagctttgttacgttgtcacagtaagtcgatgtagggagaatgtgttgttcaagctgctgagtgcaaatgataatattgtccctgtgacatttgtaaatcttgtatgtaatctttgagggtatgaatgtaatatcgtacgaattgtacgattgcttataaatagatgaacaatactgttcacactgaattgagattgcattcacgctttcgctttcaagcaagccgaatatacaaatgtaatgtacatcatgtatctctttgttaatatatgagatgtatcttgatgttgtttgacatttgatatgaaataaataatcagcat

SEQ ID NO: 137707 - DNA, 2584 bp, Zea Mays
aacgcacagtcaaacactccgacgaccccttcctccctcacccctagccgcttccccggaccccgcgccgatcccaccgaacccatggcgtcggagatcgaggtgctcgaggacaccaccacctcctcgacctccctcgtcgcggccgcgtccacggccccttccgccgcggagggcgcaggggcgccggcggagaacgagtcgctgaagaacgacgtgtacaccgcagcggcgtacggagatctggagaagctgcagcggctggtggagggggagggccgcccggtcaccgagcccgacggcgggggctattacgcgctccagtgggccgcgctcaacaaccgcgtcgccgccgcgcagtacatcctcgagcatggagcagacacaaatgctgtggatcacactggacaaacagcacttcactggagtgctgtacgtggtcatattcaagttgccgaactacttctgaaagaaggagctaagatggatgctgctgatttatatgggtatcaggccacacatgttgcagcacagtatggtcagactgcattcatttaccgcattgttgcgaaatggaatgctgatccagatatccctgataatgatgggaggagccctttacactgggctgcttataagggatttgcggactccatacggcttcttttgtttttggatgcttataggggacggcaagacaaagaaggttgtactcctttacactgggctgctattcgggggaaccttgaggcatgcactgtgctagttcaggttggcaaaaaggatgatttgatggtgaaagacaaaactggcttaactccagcacagcttgctgccgataagaatcatcggcaaattgcgtttttcctcgacaacgctagaagggtacatgacagaggatgtggtgcgaacaccagatttgggaaattgtcaaaattaggccttgcaccttttctttggtgcaccattattggcatgcttattacatacgtacactctgttatattaggacaatatgtcatgactatgacagcaccatttgggatgttcgcatggtcaggagtttttcttgcaactgctgggttggtcatgttctataaatgtagcaggaaagatccgggttacatcagcataaatacaaggggctcgcaaaatcaaagggacgatgaaccactgctgaagatggagttagaaaatcctgcgcttctttttggcaactggtcacaactttgtataacctgcaaaatagtcagacctgttcgttcgaaacattgttctacatgtgatcgttgcgtggagcagtttgatcaccattgcccttgggtatctaattgcataggaaaggacttgtaagggatccagattctccatcatcttttggtgcttggattcattattctgcgtttcagcatcctggggttgtttcatttctcgcattggattgtttccttttctttggagttgcagttcttacagtttctcaagcatcacagatagcaaggaacattacaacaaatgagatggcaaattccatgagatatgcatatctcagaggcccaggtggcagattcaggaacccgtatgatcatgggattcgcaagaactgctctgacttcttgttaaatggatacaatgaggacactgaacggctagaccagacattgcacactgatgaggagatgggaatgatacagatgacaagagcggtttcgcagaatggtgacaatcatttacatcatggtaatggcacggaacatagttgcgctgattcacaggcaagcccaaaacctcatagccaagtgggttcgcctcagtgttgtgatcacagtaagaggactgataggacactgttgggcctaggtttgggccttgggcgaaacagtgcatcccggcagtatgttcggtctcttatcccattgtgatctatcatttggatatcatgtgttcgtttcagtgtagattggatttgttcactgctccggccccatcttttatacgtgcccttgacatggttcaccatgtaccattggctggtcagggacattgttgggccattagcacaggaatactgagatatatctagtgtttgtagttttggggtgaactcagagaagttgaaggtaacgacttggcttgcgaatatcagctgatctgcactcgggaaatatcagagagcttgtgcagaaaaggtaacagttatgggcttatggcagatgcagtagcatgagatgtcttcataattgttgtgtacatcaggttcagtggtcttgggggcctccttcttctgaaggtcttaaaaacacggttaaccatttattttcagtatgttattaagtattacaggagcttcgttactagaaaaacttcgacatagatcaatgaaagcacgacgaagcaagctttgttacgttgtcacagtaagtcgatgtagggagaatgtgttgttcaagctgctgagtgcaaatgataatattgtccctgtgacatttgtaaatcttgtatgtaatctttgagggtatgaatgtaatatcgtacgaattgtacgattgcttataaatagatgaacaatactgttcacactgaa

SEQ ID NO: 137708 - DNA, 1385 bp, Zea Mays
ggtatacctgccaccccaccaaaggcgatagacacctatttctgtttcttttatcatttataaaattttcgaacattttaaacataaaaaaaatgaaaagctacacagatcccacggtttgccgggccggatcactagcctagcccaacagacccaaatagtacacattgagtttgggcccaaatataatgagcccgccgtctccttgaccgaagcccactctgagaaacagatcgaacagaagcgcagccatccatcagctattcattcagctatcacaaaagaaaaaaaaaaggccgcgacgagccgacgagcaacgacgaccatggcgacgatggccgcttcttcctgccacgggcaacttctcctgtttctcctcgtggccgtcgcgtcggcctgcctcggctccgcggcagcgcatcaagccggatctggagagggctacacgatcgctggccgcgtcaagatcgatggcacgagcgtgaagggctttggtcttgcaacaaagacatcaaacacaaaagtgatacttaatggcggccagagggttacatttgccaggccagacggctactttgcattccacaacgtgccagctggaactcatctgattgaggtctcctcaattggttacttcttttccccagttcgcgtagatatcagtgcaaggaatcctggttatattcaagcagcattgactgaaactagaagagttctaaatgagcttgtcctggaacctctgaaagaagagcagtactatgaggttagggagcctttctccgtcatgtcacttttgaagagccccatggggttgatggttggttttatggtcttaatggtctttgtgatgcccaagatgatggagaacatagatcctgaggagatgaagcaagctcaagaacaaatgaggaacaaccccgtatcattgtctggcttgctagccagagcgcagggctagaagtagcacatgaggatgctgcaagggtctagattctataatgtgtttaagggcagtactgaagtgcttgacatgccatgtcactcggagtaatttcctggggacaaggtggaaactctttcccctgtttttactgtattttaacttgcagtttttctgttagggcttgttcggttattttcaatccatatgtattggaggggattgatacggattggaggggattttgactttgaatccccctcaatccatatggattggggcagaaccgaacatggccttatgtagaaccttctgaaacctctagctgagctagtcatttggcacatcatataaccacacattgagatattcttgttcaatttgtattgtatgaatcagctgaatctaacacattgattagtcatcggaccgcggctgcacccag

SEQ ID NO: 137709 - DNA, 1487 bp, Zea Mays
ggtatacctgccaccccaccaaaggcgatagacacctatttctgtttcttttatcatttataaaattttcgaacattttaaacataaaaaaaatgaaaagctacacagatcccacggtttgccgggccggatcactagcctagcccaacagacccaaatagtacacattgagtttgggcccaaatataatgagcccgccgtctccttgaccgaagcccactctgagaaacagatcgaacagaagcgcagccatccatcagctattcattcagctatcacaaaagaaaaaaaaaaggccgcgacgagccgacgagcaacgacgaccatggcgacgatggccgcttcttcctgccacgggcaacttctcctgtttctcctcgtggccgtcgcgtcggcctgcctcggctccgcggcagcgcatcaagccgggtaggtgtacctgtcctaaacctcccctcgttccgtgatctgatcggccggatgctttgctgacggctctcccgatttggctcatgtgcttggtggctctagatctggagagggctacacgatcgctggccgcgtcaagatcgatggcacgagcgtgaagggctttggtcttgcaacaaagacatcaaacacaaaagtgatacttaatggcggccagagggttacatttgccaggccagacggctactttgcattccacaacgtgccagctggaactcatctgattgaggtctcctcaattggttacttcttttccccagttcgcgtagatatcagtgcaaggaatcctggttatattcaagcagcattgactgaaactagaagagttctaaatgagcttgtcctggaacctctgaaagaagagcagtactatgaggttagggagcctttctccgtcatgtcacttttgaagagccccatggggttgatggttggttttatggtcttaatggtctttgtgatgcccaagatgatggagaacatagatcctgaggagatgaagcaagctcaagaacaaatgaggaacaaccccgtatcattgtctggcttgctagccagagcgcagggctagaagtagcacatgaggatgctgcaagggtctagattctataatgtgtttaagggcagtactgaagtgcttgacatgccatgtcactcggagtaatttcctggggacaaggtggaaactctttcccctgtttttactgtattttaacttgcagtttttctgttagggcttgttcggttattttcaatccatatgtattggaggggattgatacggattggaggggattttgactttgaatccccctcaatccatatggattggggcagaaccgaacatggccttatgtagaaccttctgaaacctctagctgagctagtcatttggcacatcatataaccacacattgagatattcttgttcaatttgtattgtatgaatcagctgaatctaacacattgattagtcatcggaccgcggctgcacccag

SEQ ID NO: 137710 - DNA, 2111 bp, Zea Mays
gtgcgccgcggggaccaccccggacaggcccatgccgacgaacagcagcgcgcggcgggcgcggtagcgcggcgcgctcaggcggggcgacatgagcgcgtacaccgtgcccgccccggccgccgtgatcgccgacaggtacgccgcccgccagcgcggctcgcactggaagatgtagtagatgggcgggaagaaggagaccacgatcatgaccgcgatgcccgtgtagtcgaggcggatcagcagcaggttcagccggtgcgagtggcacgacagcaggtggcacgcgctgctgctcagcaggcagaacatggcccccgccaggaacacgaagaagggccaccgcgtcgtctgcgacgccaccgccgtgccatgcgaggccaggctcgggttcgtctggatgaacatggccgcgccctggacgtacggatatggcgcatggcatggcatgcatcgaattcgaatcccaagttaatatcgttattgatttgatggcatgtaaaggctatcaaaaaaatcaactaaaaagagatgactaccctactactagcagtacgtagtagcatgttggaattaacatctgaaagcaatataataggctgcatgctctaagtgactgtcaaggtacaccctgaatactacatccaaccatatatattctttccattgaggtttgtactgattgaatacttaatttagttgcaaagcagtgaaagttactaaaaggccatgccagcataccatgtaaacggtcgtgcaaattactgttttgcacggtaaattattgttttaagagtgatgtttcaaatatggaatcggatatgtagtgaggtagaaagtatgttggagatagtctaagttcgtctacactaagtcaggactcatgacagcagaggctcacccacccacccttgcctaccatatcatgcacatcagaacaaacaaacagcaccaaaccagtacaaaacaaaactgatgcattcagagtagcaggcaggacaggatctcctttcctgctcatgcggatctaaccagggcacttcttttttttttttactgcaatccagtatatatattctcctagctagaactaccagcagcaagagagagacggggtgggagttttactcactgataggacatctccaatattgctggagacattttcagcgaccttcgagattggcctgcacagcaacaaaggggcccaacaaaaaaaagcagagaagatcagtttttacaagtaacaaggtaacttctcaattatggaatacaaaatctcatcctagctgaagcaaagtgttttggaacggaaccgaaagtgaattggtgagacttttagaacacagctgaagttactagctcagaaattaagaaggttcagtacaaacgcacaagaaccgtgtgcctctggaccagagcctaacgctacgcgtggtgttctcatctcaatcgccactggataatggcatggctgggggatggatgggagcctcgaaacgccgagcaattcgcacagtagctgaattaatctgaagaggagtaggaggaggaggaggagcagcagcagctcaccaggagagatgcccaatcagatcagccacctgggggaagtactggccgaggtgcaccagggtgagaccgaagaagagcatgaacccgagcaggtacgtccagacgttgatggtctcgttgtgccaggagaagaggctgagcacggcgttgaggacgggccactcggagcggtagtagttgaggatgaactcgttctccttcatgtactcgggcagctcgtggtagctcaccagcgcgtacttcttcctcccgccttcctcctctcccttcctcggctgcctcctccgccgcctcttgccccttcctccttcctccttcatggccgccgccgccgccgccgctgcttcttggtcggcgtcggcacacactgtggtggcgacctcctcactcgccatgtgtgcccacagcccacgccttgccgctcctctctctgcacctccctagctgcgcgccttctctctctctggaattatcaaggggggcagggaaggcttgataaaggcctggagctagcaccgcagagcgatatggtgtga

SEQ ID NO: 137711 - DNA, 1117 bp, Zea Mays
gccccgcgtcgccatcctgctccgccatggaatagcttgttcgtgtgcaggacctgcagccgcgccttcacctcgttccaggcgctcggcggccaccggaccagccacctgcggggccgccacggcctcgagctcggcgtcggcgccagggcgctcaggcagcagcacaagcatcatcagcaggccggcgacggcgtcggcggcggcggaggcggaggaggagacagggagccgcaggcgcagcacgagtgccacgtctgcgggctcggcttcgagatggggcaggcgctgggcggccacatgaggcggcaccgcgaggagacgacgacgggcgccgccgatgcctgggtctggcgcgccgccgacgcgctgcagcgggcccgcgggggcgccgccgacccgcccgtcttgctcgagctcttcgcctagctagctagattcgtgcgagcgggacgatggaggaaggagggcgaggccgttgatgggcggcgactgtcacggcggggcatcgcgtgcgagaccggggaggaggggggcggccgcgccagagcgcccacggcggggcatcgcggcgtacgtccggcccgcggctccgagcgctgtcggctggtccccggcggtgacggagggcagcacgggtgcctcgccccagccgacggcgccgctgcggagatcgacgcgcacgacgacgttggagagcgcggcgaggcgcgaggacgcgatggtgaagggcgcgacaagcgggacgcgaagcgggcgcgcgccggtcgccgacacgtccacggagaaggtctccttgagcgcgtcgaagccgaacgagcccacgcgggagggcgaggacggggacggcaagacggcgcagaggcgggtggtggcggtggcgggctgttggcggtggatcggcctcgtgccctcgtgggcgacgccgccgaagggtgggggcggggtggttgccaaaggctgggacgggggaggggagggggcggagcacggtcgggcgagggccaagcacctcggtcaagtaactccgtagagagccgcgtgccttctccacgcgcaagtggtgctgagaacacctagaggggggggggtgaataggtgatcctgtaaaacttga

SEQ ID NO: 137712 - DNA, 409 bp, Zea Mays
catcttccggagttctgttcacgggacagctcacttgtagtcaaagaaatctttggagttacagatgaggatgcagatagcctacggattcactccctctcagcaacaggtgatatcgaatctatacagaagatggtggacaatctagacctggaacaaggtcccccatcatcgtcttgagttatggtggtggaataatgctaaacatcttcgttgatagtattgcaaatttagattgatgtgagtttctcaaatcttttcggttagttttttcagttgttgaagtaggacttgggcctgtgaacacaggacactttcgacgggagcctagagattttgtaaattccttctcgattaggctagtaatatctaccagacctgcccatgattgagtaaacgccgaaacttc

SEQ ID NO: 137713 - DNA, 1479 bp, Zea Mays
tcggcaacccggccggccgtgtcctccaagacttcgccttccgcgacccgaccgccgcgaccactatatataaccgcgtacgcccccaccccacgagcggccgtgaaatcgcgctccgatttgtgcttctgcgacttcaatcggccagtccgaaaaatccaaggacattgccgggcggaaccctcccctccacccacatcatggcggcgacgactgtggcaagccggaagcgagggacggcggccttcctcgatgaccccttctccttccccggcgacctgccgtgcctgcagacgaagcgcggccggtgctcgtcgtcgattgttgccgccgacctcggcctcagcttcccgctggagttcgacccggtcgaggcactccatctcatcttcccgggcgaggatcggcaggttctacaaaaccatttacaagcgtcaggaaatgtcctggatgctgcgatcagagcatacaaagattatttggcagaaagaagcaaagaatctgcttctgccatcaactatgttccatccgacaacgaggaaggagatagcattctatctgaatctgaatctgatgtttacctaaaagaagaaaccattcccaccaattgctctggatgggctgaggtcatcgtcaaggagatgtcctctgcttcggatttgaccgatgccaagaaccgcgccttcaagatactcaaactgtttgagaaatcggctgacaggagcagtagcccagatgaaaagagagaagtgaacaaggagcacgagatagtgaagcagatgctaggatccctgctccaccagaacggcgttctgaagcgcgcgttcctcatacagcacaaccgactcaaggagtaccaagagatggtgcaggagcggtctcagttcaaccagattctcgagaagtaccgggagcaaatcaaggcgttagaggagaagaacagtgccttgtcatttcatcttcaaaatatgaaccagtgcagaaacacctattggcatcacaatccagatgtcttctaatctatactgttgtcagcaaggacattccgctaatccctacatgctgctacatctgcatgctacaacatgtgtcgagcttgggagaaagatagggagtgcaaaatcctgaaactgcaaaatatccttttctctcctccagctaaggagaaagataatcaaagaaaggactcgtccatgtggtagcaattatttgaaaggactagtttacgctagtctgaattgtctgtagagggcgataatgaaagaaagggcatgttcatatgttgcaattattttgtattagtctggtctctctttagattttagttgctctcaatgtaagtgagcagagtttgacggagttcgaaaatccatgtactatttgttttaaattatcgatcgaattgagactgttccccaccaaagctcactgacaagggaactaataagcaccttttaacattgggcaacataataaaca

SEQ ID NO: 137714 - DNA, 1533 bp, Zea Mays
atggcaatggcggcgcttccggtccacccattcctcctcctccccctcgtggccgtcatctccttcctgtggctccgccttgcagctttgtcccgtcgaggcagcggcccgcggcttcccccatcgccgtgggcgctcccgttgatcggccacctgcatcacttcgcgggcgcgcttccgcaccgcgccatgcgtgacctcgcggcgcgccacgggccggtgatgctgctccgccttggcgggctccccgtcgtggtcgcctcctccgcggacgccgcccgcgaggtgatgaagacgagggacctcgagtttgcgacgcgccccgtgacgcggatggtccggctggccgtccccgagggcgcggaggggatcatcttcgcgccctacgatgacaggtggaggcagatccgcaagatctgcaccgtcgagctgctcagcgcccggcgcgtccagtccttccgccccgtccgcgaggaggaggtctggcggctcgtccgctccgtggcggcggcggcgccgagcgcgcgggcggtgaacctgagcgagctgctggccgtgtacgccgccgactcctcggtgcgcgccacgatcgggagccggttcaaggaccgggacacgttcctgtccatgctgcagcgcgggctcgagctgttcgctaacatgagcttgccggacttctacccagcgtcgcgcctcgccctgctcgtcagccggatgccgggccggatgaagcggcaccggcaggaagtggtcgcgttcatggacgccatggtccaggagcacgcggagagcagagtacctgacggcgacgacgacaaggaagacttcctcgacgtgctgctgaggattcagagggagggagacctgcagattccgctcaccaccgacaacatcaagtcagtggtcggggacatgttcgccggaggcagcgagacgcctgcgacggcactgcagtggatcatggccgagctcatgaggaacccgagagtgatgaagaaggcgcaagatgaggtccggcaagcggtcgccgccgccggccggcagagagtgacagaggacgacctcagcaacctgcgctacatgcacctggtcatcaaggagggccttcggctccacccacccttgccgctcctgctcccacgggagtgccggagctcgtgccaggtccaggggttcgacgtgccggcgggcacgatggtgttcgtgaacgcgtgggcgatcgctagggaccccagccactgggacaggcctgaggagttcgtgcctgagagatttgaaagcagcagcgtcgacttcaaggggacggacttcgactacctaccgttcggggcaggacgaaggatgtgcccgggcatggcgtttgggctcgtgagcatggagcttgcgctcgctagcctcctctaccattttgactgggagctgccgcctgggatgacggccgcggatgtagacatgaccgagaagatgggggtcacggctcgacggctccaccacctcctgcttgtcccctccgcccgagtgcccgtgacctag

SEQ ID NO: 137715 - DNA, 154 bp, Zea Mays
gcaatcgctcaaattatgtattttatagtacaatataaaactacaaagtttccatcaagtccacagatcccacatggcaatgccaacacgcaccttcaagcatttaacagtatctacaaatctaccaaacatgaatatgtcacaggacaatggg

SEQ ID NO: 137716 - DNA, 2021 bp, Zea Mays
ctcgtaagctctaaacataagagctactagtagcaacgttgtcgttgggcttggaagcatcgtcccgtgcgcgcacgccgatggatgaccactactacgtctacctcggactggcgctggtgtcgctgctcgttgtcgtgctcgcgaagcgccggcgcggcccggtggacggccacggcctgcggcttccgccggggccgtggcagctgccaatcatcggcagcatgcaccatctcgcgggccagctccctcaccgcgcgatgcgcgacctggcgcggcgccacggggccgtgatgctgctccgcgtcggcgaggtgccgacgctggtggtctcctcccgcgaggcggcgcgcgaggtgatgaagacgcacgacaccgcgttcgcgtcgcggccgctgagcgccacggtgcgcgtgctgacgaacaacggccgggacatcatcttcgcgccctacggggagcactggcgccagctgcggaaggtggccatcacggagctcctgagcgcgcgccgggtgctctccttccgcgccatccgcgaggaggaggtcgcggccacgctgcgcgcgtgcgccgccgccgcggcggagtcgccgccgcgccccgtggagatgcgcgcgcggctgtccgcgctcgtggccgacgccacggtgcgcgccgtgatgggcgaccggtgcagggaccgcgacgtgttcctgcgggagctcgaccgctccatcgggctgtcggcggggttcaacccggccgacctgtggccgtcctcccgcctcgtcggcctgctgagcggcgccgtgcggcgcgccgaggagtgccgggacacggtgttcgggatcctcgacggcatcatcaaggagcacctgcagaggatggacagcgccggcgccggcgccggcgccggcgaggctgcaggcgaggaccttctcgacgtgctgctcaagatacacaaggatggcagcctccaaatcccgctcgacatggacgtgcttaaagccgtcatctttgacatcttcggcgccggcagcgagacgtcggcgaccacgctggagtgggccatggcggagctgatccggaaccccaaggcgatgcagcgggcgacggccgaggtgcgcgaggccttcggcgcgcgcggcgcggtggccgagcacgagctgggcgagctgcggtacctgcacctcgtgatccgggagacgttccggctgcacccgccgctgccgctgctgctcccgcggcagtcccaggagccgcgccgcgtgctgggctacgacgtgcccgcgggcaccaccgtgctagtgaacgtctgggcgctgggccgcgacggcaggtactggccgggtgaccccgaggagttccggcccgagcggttcgaggccgaggccagcgaggtggagttcaagggcgccgacttcgagctcctgccgttcggcgccggccggaggatgtgcccgggcatggcgttcgggctcgccaacgtcgagctcgcgctcgccagcctgctgttccacttcgactgggaggcgcccggcgtgtctgaccccgccgagttcgacatggccgaggcgtttggcatcaccgcgagacggaaggccgacctcctcctccgccccatcctccgcgtgcgcctccccgttcccggtgtctaatcgccgcgccgataatggtttgcaagctcgttacttgtgtcagtgtgcattcacgtgatcgacaagctgctctggccgaggatttggccaccggcgagcggcgggcgcggacatggtgtgtcgtttcccccctatggcctactataagctagtagtttaagaacgataggtccaaagcccatctacattatgggcctacctgtgggctttcaaagaaggatgacacaacctataattttatgtcttttacgtagcgatgacaatcttaccgtgaatatgtatacctgcgggttacgtatgtaatgggtgtgattacaagcacgatatcgtaaatatgtgggtacggtgaagctatcaaattttccgcaattgaaaaatata

SEQ ID NO: 137717 - DNA, 1738 bp, Zea Mays
taggttttgagagcgaggtgcccgtctgaataggttgcgcacgaggagagcccaccggccaccgcctaccgcaatggaagccgcaggcggcggagccgaggatgagcaggtgatgagcgaggtgcacttgggctgcccgccgcacttctctggcctcctcgtctcccatttcagcttctcctcacggcccctagggccatatggacacaaaggaggcggcggcggcggcggcgggagcgagctagtcgcagcaactagcggttctggtgattcccctgacgcagtcgccgtggatgaggatggggatctcgttctggaccggaggagaagaaacaaatatgctagaggtgaccgccatctgttcactattcagcatggtgttaccagctcgcttaagagcgttgggcttcaggtttggaaagcggccttactattatctgactttattctgcacgaaagcttttcatcgccaaactttgatggtgttactgccattgagataggtgctggaacaggtttggtaggtttagcactagctcgagttgctagaaggatttttgttacagatagaggcactgatatccttgataattgcttggctaatctccatatcaactctggtatgctaaggttcgatgaagctaaagtctgtgtacgagaactggactggaaaatggcatggcctccacctgtgggtacatatgacccttctgatccaagtcggtatttatggtctgcaagtgaagttgaggaggctgagaaagcaacagtcctgtttgctgcagatgttatttacagtgatgatctcacaaatttgttcttcaacacggtgaagaaattgatgtcggtcggtgctaagaaggtgctatacttggccctggagaagagatacaacttcagtgtagacgaactagatgtcgtggccaatggttacacgcacttccgaagtttcttcacagcccaagatgagcacggtgatccgagcaacagatctggaccaggttttgttggaaagcagatagaccctgcagagattcctcagtacatcagagagtatgagaggggcaaggatttagagatgtggatgatcatgtacagtccggaggagaaacagcacagtaactctacaaaaaccgtcttttccttctaggaggacgaagagagcaatgagtgcttggtgcaaaaagacgaattccgttaaaaagacgggaccccctcccacgggcatccatactatcttgacaaaaatgaaaactgctgcttggtgcaagatccgtgtggtgtcgaagaatcgcagttcggcatcttctctgcggggaccgcgacagaaacgaggtcatcagaagagagaaataagttacacctaattgcggcagggcagggcagtggtggctggcatatattaagtggtggacaatcaagaacatgctctgcatgcttagcttaagtatatcatacgtatataataacgccgttgggactcgttttctttgtcgcccggaaacagcatctgtttggtccaagattcttggcacgccattgcgatccaaccctgtcgtgctcaaacatactctctccgtcggctggtgctctcgtttcatttcatcacaagttaattaattttaattttaactaaatatgtataaaaggttagtaatttcaatgatgtatactaataaatattattagatcgattatttaatctattttttctaataaaattatttgcagatataaa

SEQ ID NO: 137718 - DNA, 1863 bp, Zea Mays
taggttttgagagcgaggtgcccgtctgaataggttgcgcacgaggagagcccaccggccaccgcctaccgcaatggaagccgcaggcggcggagccgaggatgagcaggtgatgagcgaggtgcacttgggctgcccgccgcacttctctggcctcctcgtctcccatttcagcttctcctcacggcccctagggccatatggacacaaaggaggcggcggcggcggcggcgggagcgagctagtcgcagcaactagcggttctggtaactgagtgggactgtggatcagtggatgtgtatttgcgttagttcgtgttgacgtagaggttagtttggtgcatatgtgttgaattgctcgttggggtaacatgatttactctgttgaggaggtgattcccctgacgcagtcgccgtggatgaggatggggatctcgttctggaccggaggagaagaaacaaatatgctagaggtgaccgccatctgttcactattcagcatggtgttaccagctcgcttaagagcgttgggcttcaggtttggaaagcggccttactattatctgactttattctgcacgaaagcttttcatcgccaaactttgatggtgttactgccattgagataggtgctggaacaggtttggtaggtttagcactagctcgagttgctagaaggatttttgttacagatagaggcactgatatccttgataattgcttggctaatctccatatcaactctggtatgctaaggttcgatgaagctaaagtctgtgtacgagaactggactggaaaatggcatggcctccacctgtgggtacatatgacccttctgatccaagtcggtatttatggtctgcaagtgaagttgaggaggctgagaaagcaacagtcctgtttgctgcagatgttatttacagtgatgatctcacaaatttgttcttcaacacggtgaagaaattgatgtcggtcggtgctaagaaggtgctatacttggccctggagaagagatacaacttcagtgtagacgaactagatgtcgtggccaatggttacacgcacttccgaagtttcttcacagcccaagatgagcacggtgatccgagcaacagatctggaccaggttttgttggaaagcagatagaccctgcagagattcctcagtacatcagagagtatgagaggggcaaggatttagagatgtggatgatcatgtacagtccggaggagaaacagcacagtaactctacaaaaaccgtcttttccttctaggaggacgaagagagcaatgagtgcttggtgcaaaaagacgaattccgttaaaaagacgggaccccctcccacgggcatccatactatcttgacaaaaatgaaaactgctgcttggtgcaagatccgtgtggtgtcgaagaatcgcagttcggcatcttctctgcggggaccgcgacagaaacgaggtcatcagaagagagaaataagttacacctaattgcggcagggcagggcagtggtggctggcatatattaagtggtggacaatcaagaacatgctctgcatgcttagcttaagtatatcatacgtatataataacgccgttgggactcgttttctttgtcgcccggaaacagcatctgtttggtccaagattcttggcacgccattgcgatccaaccctgtcgtgctcaaacatactctctccgtcggctggtgctctcgtttcatttcatcacaagttaattaattttaattttaactaaatatgtataaaaggttagtaatttcaatgatgtatactaataaatattattagatcgattatttaatctattttttctaataaaattatttgcagatataaa

SEQ ID NO: 137719 - DNA, 1807 bp, Zea Mays
taggttttgagagcgaggtgcccgtctgaataggttgcgcacgaggagagcccaccggccaccgcctaccgcaatggaagccgcaggcggcggagccgaggatgagcaggtgatgagcgaggtgcacttgggctgcccgccgcacttctctggcctcctcgtctcccatttcagcttctcctcacggcccctagggccatatggacacaaaggaggcggcggcggcggcggcgggagcgagctagtcgcagcaactagcggttctggtaactgagtgggactgtggatcagtggatgtgtatttgcgttagttcgtgttgacgtagaggttagtttggtgcatatgtgttgaattgctcgttggggtaacatgatttactctgttgaggaggtgattcccctgacgcagtcgccgtggatgaggatggggatctcgttctggaccggaggagaagaaacaaatatgctagaggtgaccgccatctgttcactattcagcatggtgttaccagctcgcttaagagcgttgggcttcagccgtgcaggtttggaaagcggccttactattatctgactttattctgcacgaaagcttttcatcgccaaactttgatggtgttactgccattgagataggtgctggaacaggtttggtaggtttagcactagctcgagttgctagaaggatttttgttacaggttcgatgaagctaaagtctgtgtacgagaactggactggaaaatggcatggcctccacctgtgggtacatatgacccttctgatccaagtcggtatttatggtctgcaagtgaagttgaggaggctgagaaagcaacagtcctgtttgctgcagatgttatttacagtgatgatctcacaaatttgttcttcaacacggtgaagaaattgatgtcggtcggtgctaagaaggtgctatacttggccctggagaagagatacaacttcagtgtagacgaactagatgtcgtggccaatggttacacgcacttccgaagtttcttcacagcccaagatgagcacggtgatccgagcaacagatctggaccaggttttgttggaaagcagatagaccctgcagagattcctcagtacatcagagagtatgagaggggcaaggatttagagatgtggatgatcatgtacagtccggaggagaaacagcacagtaactctacaaaaaccgtcttttccttctaggaggacgaagagagcaatgagtgcttggtgcaaaaagacgaattccgttaaaaagacgggaccccctcccacgggcatccatactatcttgacaaaaatgaaaactgctgcttggtgcaagatccgtgtggtgtcgaagaatcgcagttcggcatcttctctgcggggaccgcgacagaaacgaggtcatcagaagagagaaataagttacacctaattgcggcagggcagggcagtggtggctggcatatattaagtggtggacaatcaagaacatgctctgcatgcttagcttaagtatatcatacgtatataataacgccgttgggactcgttttctttgtcgcccggaaacagcatctgtttggtccaagattcttggcacgccattgcgatccaaccctgtcgtgctcaaacatactctctccgtcggctggtgctctcgtttcatttcatcacaagttaattaattttaattttaactaaatatgtataaaaggttagtaatttcaatgatgtatactaataaatattattagatcgattatttaatctattttttctaataaaattatttgcagatataaa

SEQ ID NO: 137720 - DNA, 1615 bp, Zea Mays
taggttttgagagcgaggtgcccgtctgaataggttgcgcacgaggagagcccaccggccaccgcctaccgcaatggaagccgcaggcggcggagccgaggatgagcaggtgatgagcgaggtgcacttgggctgcccgccgcacttctctggcctcctcgtctcccatttcagcttctcctcacggcccctagggccatatggacacaaaggaggcggcggcggcggcggcgggagcgagctagtcgcagcaactagcggttctggtaactgagtgggactgtggatcagtggatgtgtatttgcgttagttcgtgttgacgtagaggttagtttggtgcatatgtgttgaattgctcgttggggtaacatgatttactctgttgaggaggtgattcccctgacgcagtcgccgtggatgaggatggggatctcgttctggaccggaggagaagaaacaaatatgctagaggtgaccgccatctgttcactattcagcatggtgttaccagctcgcttaagagcgttgggcttcagccgtgcaggtttggaaagcggccttactattatctgactttattctgcacgaaagcttttcatcgccaaactttgatggtgttactgccattgagataggtgctggaacaggtttggtaggtttagcactagctcgagttgctagaaggatttttgttacagatagaggcactgatatccttgataattgcttggctaatctccatatcaactctggtatgctaaggttcgatgaagctaaagtctgtgtacgagaactggactggaaaatggcatggcctccacctgtgggtacatatgacccttctgatccaagtcggtatttatggtctgcaagtgaagttgaggaggctgagaaagcaacagtcctgtttgctgcagatgttatttacagtgatgatctcacaaatttgttcttcaacacggtgaagaaattgatgtcggtcggtgctaagaaggtgctatacttggccctggagaagagatacaacttcagtgtagacgaactagatgtcgtggccaatggttacacgcacttccgaagtttcttcacagcccaagatgagcacggtgatccgagcaacagatctggaccaggttttgttggaaagcagatagaccctgcagagattcctcagtacatcagagagtatgagaggggcaaggatttagagatgtggatgatcatgtacagtccggaggagaaacagcacagtaactctacaaaaaccgtcttttccttctaggaggacgaagagagcaatgagtgcttggtgcaaaaagacgaattccgttaaaaagacgggaccccctcccacgggcatccatactatcttgacaaaaatgaaaactgctgcttggtgcaagatccgtgtggtgtcgaagaatcgcagttcggcatcttctctgcggggaccgcgacagaaacgaggtcatcagaagagagaaataagttacacctaattgcggcagggcagggcagtggtggctggcatatattaagtggtggacaatcaagaacatgctctgcatgcttagcttaagtatatcatacgtatataataacgccgttgggact

SEQ ID NO: 137721 - DNA, 276 bp, Zea Mays
atgcttatttgaagcatatacacaataccaactagccaatggatagatgagctcgccaagggtgacattgtaaagaattcaactctctgcgcaattgttgtgcccagcatctttagagtgcaaacatcaagccaccaaccacacataagaggaaatacaccaagctcaatgaccagaaggaatgcaactttgaccatagtcataaggtgcttcattccagcaaagaactgtctgcatagagaagggatggcctctaatatagtagctataccgtag

SEQ ID NO: 137722 - DNA, 609 bp, Zea Mays
tcatctacctacgcgctcatctaccgcaacatggccatcctcggcgtggagggcttctcggcgctgcccaggcactgcatgcagctgtgcgcggggttcttcgcgttcgcggtgctggcgaacctggcgcgggacctgctgccgcgccggctcgcgcggctcgtgccgctgcccatggccatggccgtgccgttcctcgtgggcgccagcttcgccgtcgacatgtgcgtggggagcctcgtggtgttcgcgtggcacaggctcgacggcaagaaggccgcgctgctggtgccggccgtcgcctcggggctcatctgcggcgacgggatctggacgttcccgtcgtcgctgctcgcgctggccaaggtcaagccgcccatctgcatgaagttcacgccagggagctagagagcacggtgacgatgcgtacagaacagagggcatcgttcgtcgtttgtggggtggaatccgtgtagtagaattacataccaatcaggcctgttctaatgtccatatgagcttaatgtacggtgtatatatgtaaaacggaaatctgaaggatgacaggatgaattgcctgttgtctagtagcacgcatattattattat

SEQ ID NO: 137723 - DNA, 710 bp, Zea Mays
aacgccgctcctgcgcgccatcactccactcgatcgaccgcctccgtgtccgtgccctacagctggtcatgagcgcccgcccaaccatggcggcggcggcgcccgtgcgcgcctgggtggtggcgctggcgctggtgctggcgtgcgcgctgctccagccgcggccgtccgacgccgcggcgcagcccgccccgcagtcgccggcgacggcggtgtcgtcgggcgccgccaagcccaagtgcgtggccggcgccaggaacgaccacgcgtgccgcgtcggcgccgtgcacgacccggacagccaggaggaggagggctccagcgtcaccatcgacgcgcccgccgccgcgcccgacgacgtcggccacgacgacggcagcgactacaacgaccccgacgtgcccaacaacgaccagctcgtcgtcgtcggccactgaaagctgccgcgcgcgcgcgcgcgccgacccgtggaccatgcgtgcatgaagaagaatgcagggggtgggcctgggcctgtaacctgttaatggatcggattctcggtgccaattcgtgatcttgaccggtctaagaagatggggacttgcgtctttgtttcattggttattatttctactagtgtgtatatggtaaagtcgtgtgctgtgaacctgcgatcatttatcctctgttcattgaattgaagcaatcccctctcccgtcacaaaata

SEQ ID NO: 137724 - DNA, 889 bp, Zea Mays
ggagaaacagaccaccagatcgatcgagacctcgccgtcgtccggcagggttaatttggttcttctccggccgggtgtgcatggcaaaacgacccacggtgcccaagttcggcacctgggacagcggcgatgccgggtacacggcctacttcgacaaggtgcgcgagaacaagggcgccacggcgccgccgctgcgccggccgcgcagccccaacgaccccgaccccgaccgcgagcccgagccagaggaggggccaatgaggagagtccccccgccgtcgtcgtcgaggccggcgaccgcaggaggccaccgcgagccgccgccgccggggcggcgccacgggcagagccaccggcgaacggagagcagcggcagcgcgccgtccgaccgccagagcaagttcgcgccgccgccgcagtactaccagcaacagcaacgcgcgagcccgcagcagcagccccgtcatcaccacggcggcggcggcggccaccagcagcagcaccccccgtccgcgcacgggcacggccacggccacggccaccgagctccgcacgcgcacaggcagcaccacgcggcgccggggccacgggcgcggtccgcctcgccgcagagcaacgccccgcgggcgtcggccgtgcccaggttcggcgtgtgggacgagcagaccgcttcgtcggccgcgcaggggttcacggtgcagttcgagaacgtgaagcggaaccgggaggtggccaggtccggggtgccggctgtgccgcgcgtgccgtcgccgccggagggcgccgcgctgaggcgcgcccatcagaagacccctttcgtgtccaagatgtttggatgtttccttcccaccactgcaaaaggctgacaacgatgcacgtatatatgtat

SEQ ID NO: 137725 - DNA, 1615 bp, Zea Mays
cgtgctcatgcttctgagagaaaacaatagccgataagtaagcctgttctataagttagtgtcgttccttacaacgcatgcatgcagtgatgaagctagaaacccagtgtcattcagaggccatccctgcagaagtttcagttctagtgccggaaatcatagttctcaacagatcgatcgatcgagatggctcagaaggatctctatctaccgttcctggctctttccatcattgcctgctgcttgatgaacctgcaaactgttctcagctcaagcagcaggatgcggaattctacagacgatattagtgatgacaaatgccccccacaacctcatcccttaggtatgtgcaggtcccgagtagcagcttacggctatccatgtgaggaataccatgtgacaacggaggatggctacatccttagcttaaagaggatcccctatggtctctctggtgccaccgagatgacgaggacaccagtactactgttccatgggctactggtggatggtttctgctgggtactgagcacaccaaaacaatcactgggcttcatcttggctgatggtgggtttgatgtttggatcgccaactctcgcggaacagagtccagccgcaggcacaccaccctctccccacaagacccggccttttgggactggacatgggaccagcttgctgactatgatcttcctgctgtgcttgagttcgtctataacagaacaggaggcatgaaagtccactacgttggtcactccctggggaccttgattattcttgcggccttctcggagaacaggttaacagacattgtgcgatcagccgcgttgctctgcccaatcgcttatctcaacagcatggaatcgaggctcatcctgctcgccactcgcatcttcctcgcagaaacgattcacatgctaggttatcacgagttcaaccctgttgggccagtggcaaaggaagtgttgggaaaagtctgcgtcgacccagaggtcgattgctatgatttgttttcagctgtagcaggaccggactgctgcctcaacacctcgaccacatgcatcttcttgcagcacggtccacagtcaagctccatcaagaacatgatccacatgtcgcagctggtcaggaaagagacgatcaggaagtacgactacggaagcgagaaggagaacacgaagcgctacaaccagacgcggcccccaacctacaacctctcgtccatcccaagccacgtccccctcttcctcacccacggcggccaggacttcctcggcgacgtcgccgacaccaggcacctcctgcggacgctgctcagccagcacgacagcgacgacatcgaggtgctgtacatgcctgactacgcgcacggcgacttcatcatgggctacaacgccccgcagctcatatacaagcccatggtggagtttttcaagcgccactgagaacttgctagcaataagctgctgctgctatatgcagcaacaactgtttcatatagccgatttgattggtgtattattgccgtaagtaagtaaaaaaaaaaagagaacttcatgggttgtgactcttgaaattgtgaaaaggcaaccactgggttctgaaacaccaaaa

SEQ ID NO: 137726 - DNA, 189 bp, Zea Mays
atgttgtgtcttttaaagagttatctaaaatatgttgaaattgctaccgagagtactaagtttttcatcatttgtctgaaacatgttgaaattgctactaagagtagtgagtgttgcatcatagcctctcaaatcagtggtgtatttaaagaatggtatgtcatgtgtagaaattgctactatagttga

SEQ ID NO: 137727 - DNA, 368 bp, Zea Mays
gtttatgaaatggatgaacttgaggctcttgcaagaaatatttcatttgaggatgaagacctagatgatgatgatcatgatgatggacctgaggcatcgttgtaagcttgttgatgaagatctagatgataataatgtaccatgaatgctatgaatgtttcttattgtacttgctccgtaatgttttgtgaccttgcgaacttgggacttttggctttgtgaactttatgatgaacttattatattgtgtacttgtgttctttgtgatcaacttatcatattgtgaacttgtgatctatgttatcaattggtattattgtgaacttgtgatatttgtgatcaaactgttatattgtgaacttgtggtc

SEQ ID NO: 137728 - DNA, 492 bp, Zea Mays
tattgcatgttgagtgatgcactacattatagggctgcttttgaaaggcttgtgtcatatgaacgtcgcacgtatgagaaaattgcaccttcctttgaagaatgggatttggcaaagactcttttaccatgtttgagaaaattctttgacttgactgagttattttctggtacactatatctgactgccaacttgttttttaaagggttctgtgagattaagtttttacttgttgattggtgtgatagcatccatcccactattagtaacatggcaaaaactatgatggtcaagtttgacaagtactggaataagtcaaatattgctcttgctgtggctagtgtccttgatcctagatacaagaggaaaatcatagaattttacttgaagaaggtgtacccatatacatatcaaactgaactggataaatttaatggtgtcatgaaaaagatgtatcaatactatgtctctactacaccctcagcatcatct

SEQ ID NO: 137729 - DNA, 647 bp, Zea Mays
atggcgccaatgttctgcccgagagctggaggcgtggaggcaaaccgcaatgccgagacaatggcacgcatgctgctagctggtaagtctcagaagaccgtgttggctgtctctccagaattactctcagtaactggcagcaaggggggagcagatatcaagctggaactcagtgttggcaagatcaggacaggtgaggagaccgccagaagcaacgtactgacaggtcgaaggctggctttcggagatgcagtcatggagcagaaggaaacagagaattccggaatcagaacagactcaggtgcaaaatatgctgttggaaaatgcggacatggaggagggaaggacttaagtatgaattgtagcaaacatacaccgaaggtttacttcgatggacacattcccttcactgctgattaccgttcaccccggaaacaccctcccaagaacaactagaagtagatagggtatacccatgtagcatataactagcatgttttcctctcatttttcttttggtttgccatcctaaatgtcgaatatggctttttccttcttgttagatacatgtgtttagttatggctaaaaaaaataactggtccttctcctcctatgtggtgaatcatgatacttatgttccacttct

SEQ ID NO: 137730 - DNA, 1010 bp, Zea Mays
aaaaggccaacaaaattatatttggaagccggctagcacgaatgtgacgtgagacgaaaaagaaataaagcacgcacgcagccgcagccgcagccgccgccgcaccatcgcacagcagtcagcagctgggcagcaaggcgcagcaccttgtggccaggtgatgagggagacaggcaactcaccaaagcaagcagcagaggattgcaaaggtttcttctcccgtctgccctcctccttccttcccggcctatatataccctccccgccacacctgttcccatcacatctctcccagccaaaggcaattaagcaaccattacgcagccacaacagcaacgcagcaagctaagctagagggagtagtgagtgggagagagagagagagagacaaatgaggccggaaagagttggaggtgtggcgccgacgacgacggtgctattggctggcggcgggcggccgagcctgtggaggacgccgacgccatatctcttcctggggttcgcgacgatgatggtcctcatcgcggtggcgctggtcgcgctcatgtgcgcgcgccgcaaggcctcttcgtcgtcgtcgtcgtcggccaacggcggcgacgagaagccggcgtcggtgcgggtcctggtgccgctcgaccgggagccccccaaggtcgtggtcgtcatggccggcgacgccctgccgtccttcatcgccgtcgccagcgcgaggaagccgctcgccttcgccgccacaccggccgcgccggccgagggcttgtaggcgcatatgcaggggcgggcgagaagagaacccgcgcatcgcgagttcgcgacgcgcgcgggggccaattttgtcgagaggtttttgtttgttcttttgctttggagctcggtggcgtagcgtaggtgaacggtgaactgtgagctagggcgcccacgcgccgccaccggccggcagctggttttggtctgtttcgggaaaagcttgcagcttgaataaaacgcgcacggctttcttttcgcta

SEQ ID NO: 137731 - DNA, 683 bp, Zea Mays
caccagctagcagcagcagtttcctagtgagcttaccgccgctgctagtgcctgacaactgtcgtgtgctgtgctagctccgagaagcttagcgcgagccaaagccaagaggaagcttcggccggccgggtgatcgagatcgccggaatgggagccagcctgtcttgcttcggctcgggagctggcgggtactactacgccgacgagccggggtacgagcagccgcggcggtcgtccaggaaggtgcggccgagcgacgaggacgggctgtggtacgttggcgagcgcgacgtcgacatgaaggcgtcggcgttcatcgccaggttccatgcgtccgcgtcctcgtccgcgtccgcgagctagtttcgtggagggtggaggcctgtggttccatgcatgcccatcaccatgtgaacctttggtctattagctatcgtctgggcctctgtcaggctctcatgcatgtctctctattctagctaatcgatctctagtctctagctagcgctagcttctctgcttccccagttgatgactagttggctagtactactctacttgggctcatttcccattaattagcacgtgcttgacgatataattataagccccgtgcatgtcagtagacctgttcctcctaaataaaggcaatgctggaccagcttgtggttttcaaattaagt

SEQ ID NO: 137732 - DNA, 339 bp, Zea Mays
atgggcagcgtgggcgtggaggcggatgacgacggcagcatcgtcaaggagtccctgcagcggtgcgagccctctggcgatgccgcctacggcgagctcagggctctgctggcgcgcctccatgacccggccaccaggcgcgacgcgcgcctcatcctcactgcgctccaccgccaccagcagcacagctcgtcgcgggcgggggtgtctgcgggctggggcgaagcgggcgtgccggcggtgcggggaggggcgcggcgggggcaccagcaggcgggcgtgggggcgcggcgggcggcggtgcctggcggctgcaacgaacgggagcgagaaagatga

SEQ ID NO: 137733 - DNA, 1231 bp, Zea Mays
ggttgatcgtgttaattaggttcatcgtgttgggtagtctatgatcaacaaacgaactctattttggtttgccttacgtatggttcgctggtgttgctgtcaagtggggtgaaaaaaataaataaatggatgcctatgattcccatggaactaaaacaaaaacccagtagccataacgtatccaaaatagttgaggaaccaagggagttaagtgctaaaggacaaaaagaaaaacattccagttcgcgtcaacctcttttccctccactttcggccgtcgctcggtcgctcctctatatatacagcctccttttggtcaactcctctccattccaaactctcccaacagtccaaacccgtgtccaccgaaagtttgatgggatcaggcctctcaagcagccaccaccggagcagcggcgcgtcgtcgtcgcttcaccagccaccggcggcggccccggccctggtcgtcgcggccgacggctcgctgcgggagttcgtcacgccggcggcggcgccgctccttctccccgtctccgtctccgacgtgctgggcgcgaatgcggacgacgacggcggccggtacttcgtgtgcagctccagcgcgctctacttcgagaccgacgtcccggcgctcggcgccagcgagctgctccggccggggcaggtctacttcgtcctccccgcggccatgctcggcaggccgctctcgggcgccgacatggccgcgctggccgtgcgcgccagccaggcgctggcggcgggagcgaggccgccgcgtggcgggcgacgccctcgcgggtccaccagggcgcgcgtcgtgccggcggcggcggcgcaccacgcgcacgcgcacggcgacgaggaggctgtcaacgagaagctcaaccagaggactcttggcggcttcgagacggctcctccacgtggtccggccaggaagcccgctgtcgcggcgcgaccggccccgcctgtgactgtgactgtgactgagaggagggcgctcagcaccatcgaagagggtgccgagtgatcgataaaatggctacaaggcgcgcgtgttcgattgattgatgattaggtttagttttttattgggttaattaaagacttaatgacacgcaaatagtttgaaaggatagggaaacttgttacttggttgatcgacgtctgtgtactactcacactaattacaaaattaaatgggaattttggttttcgacctggttcttta

SEQ ID NO: 137734 - DNA, 2947 bp, Zea Mays
atgccctgtttgtctgctctcactagccgaccctccttggctcccataccgcatcatgacatctttgtccgcatttatttatgtactcttgttgccatctcggccgacgaagaaaagcgcaggaataacggccacacaaacaaaccgggattccggtcagtgcgcaggctctctgctccagtaaacttggcagcggtttcaggaagctgctggctgctgctagctctcagtctcagtctcagtctcagtctcatacatacatacatatacagcagctggtggggtgtctaggtctctcgtactcgtcggtacacgcttgccaatccatccaaacccgctgtatctgcgctagctggtgtccgaccgtgtctgccatggcttcttctccacgcacagccatgttcttcctcgcgctgtccctggcgctactgggcgacgaccttcgccgctgctctgcctctcaggtgtacgtggtctacatgggcaaagcgccgcagggcgacagggcaccccgtcgacgacgacacgccgggctgcaccgccagatgctgacggctgttcacgacggcagctcggagaaggcgcaggcatcacacgtctacacttacagcgccggcttccagggcttcgcggccaaactgaacgaaaagcaggccatcagattagccgagatgcctggcgtcgtctcggtgttcccaaacacaaagaggcgactgcgcaccacccattcctgggatttcatgggcttgtccaccagtgcagagggtcaggtccctggactgtccaccgagaaccaggagaacgtcattgttggattcatcgatacaggaatctggccagaatcccctagtttcagtgaccacgggatgcctccggttcccaaaagatggagagggcaatgccaaggaggagacgcgaactcaccgtcaaatttcacctgcaacaggaaggtaataggaggcagatattacctcagcggataccaaacagaagagggtggcgccatcaagttcgtatctccaagggacagctcggggcatggcagccacactgcctcgatagcggccggaaggtttgtcagggacatgagctacggaggtggtctgggcaccggaggagggcggggaggagcccccatggcaaggattgcagcctacaaggcctgctgggaaactggctgctacgatgttgacattctcgcggcgttcgacgatgccatcagagacggcgtcgacattatatctgtgtcgctaggcccagactacccccagggcgactacctcagcgacgccatatccatcgggtcgttccacgcgacgagcaacgggatactggtcgtttcctcggcggggaacgccgggagacagggctcggcgactaacctcgcgccgtggatgctcacggtggctgcaggaacgactgacagatcgttctcttcgtatgtcagcctggcaaacggtacctccgtaatgggtgagagcctgagtacgtaccgcatggaaactcccgtcagaaccatcgcagcttcggaagtcaacgcaggctatttcaccccttaccagtccagcttgtgcctggatagctctttgaacaggaccaaggccaagggaaagatccttatctgccgccgtaaccaaggctcctccgagtcacgtctatcgacgagcatggttgtgaaggaagctggtgcggctgggatgatcctcatcgatgagatggaggatcatgtcgctaatcgctttgctgtgcctggagtaactgttgggaaagccatgggtgataaaattgtttcttatgtcaagagcacaaggcgtgcctgcacactgatcttgccggcaaagacggtcttagggctgcgagacgccccgcgagtagcggcgttctcttcgagaggtccgagctcactgacacctgagattctgaagccagatgttgctgctcctgggctgaacatcttggcggcgtggtctcctgccaagaacggtatgcgcttcaacgttctatctggaacttccatggcatgtccgcacgttacaggaatagcagctctcgtgaagagcgtgtatccgtcatggtctccttcaggcatcaaatcggcaatcatgacaacagcaaccgtactggacaccaaaaggaaaaccatagcaagggaccccaatgggggggctgcaacgccgtttgactttggctcgggttttatggaccccgtcaaagctctcagcccagggatcatcttcgatacacatcctgaagactacaagtcattcttatgtgccataataagccgcgatgaccactccgtgcatctaatcaccggagacaacagtagctgcacccacagagcctcctcttctgccactgctctgaactacccgtcgatcaccgttccgtatctgaagcagagctattcggtgacgcgaacaatgactaatgtgggcaatccaaggagtacttaccatgctgtggtgtcagctccgccaggaaccagcgtgagagtgacaccagaagtcataaatttcaagagctatggtgaaaagaggatgttcgcagttagcttacacgtggatgtgcctcctcgaggttacgtttttggctctttgtcttggcatggaaatggaagtgatgctcgcgtgacgatgccgctggtagtgaaactacagacttctggcaaggcctgaccgagttgatccccctggaaagatgcttggaagaggttgctagaatgctagatcaggctacaaatctaggtggtactagaactggaaatactgaccatatcagaagctaaccgcgatcaatctgtgaaaaatatcatattaactatggtatttcatttgtaaatgtcttggctagaacgcaagcactcccagaacaagattcttttttcctcctgatgattgttgtaaaattatttcgtgcctaaatgcaaatcttaagaatgcaggaa

SEQ ID NO: 137735 - DNA, 891 bp, Zea Mays
taaatgcaatgattttcttttgtcctgcttgtgtcaggccccagccaaaagttacaagattacatgtttgcacacttgtggaaccagctgtgaactcagcacctgttttgtacttaccacacccctaaccaacttgtctctctttcaggtttaccgtatgggtggggattattttgttgtgacatgagcttagaatttctcaccctgaccgtcgccaaaaactaggtccttgctgattctaatgcttcaagactcttccgtgctagatctcgcctgtatcaagttaaactcattagttgacatagttctgtgtgtattcgggtgcgcccattggctgtgaattgtagctaaagcaaagttactaagcctagagtttaggatgttaatagcctgatgctcaacatgtccatggtttcttaatttaaccagcacaaagtgtactgtttgtagcaatgcagtatgtagcatgttcccattatttgagctctggaacatggacacaggtaggctcgttgcttgttgccggtgtattgctaattttgctattcaacttgtattgtcaaaagctatggcctccccctgtaacctgccttcttattgtgcgactttgtgattaccaagttagctcttaagatattttacatgatgggctttccgtcaggtctgaatgtgtgtgaggtttgacttacaggccgtgctgtgttggtacaagggcttgttttgtttccatagtgctaaagtttatcacatgttaaattttgctgaagtttagcacttgagggcttttaaaaaaataaaaggctgtagggaaaaccctacaacatgattttattaaataatgagaagagggaacaagaaatggaccaagagaaggaaacacacacaaaaaaa

SEQ ID NO: 137736 - DNA, 2081 bp, Zea Mays
aagcacggtttcagttcaaaaccattctccactgttcctccgctccctctgtctcgtcgtctcccatctccggctagggtttgccctttccaccgcgtccgacgcctacctcgcccgcgccactgcagggaccaaggatgtcgcaacagcaaggtgtggaggagccgccgccggcaccgctgccggcggcggaaggcgaggcacaaccggccgccgatatccccatgagcgaggccgcggaggtggaggatgaggaggaggaacccgtcgtgggggagggggaggacggtgcagacggggccgccgacgccgtcgattccgtcaatgcttcagcgaaacccgaagcagagggcgcggaggaggaggggggcagcgacaggaaggagcggaatggtggcccgacggcggatttggttggcgaggttgtgaagttggagaatggggacgggcctgtgacggtgggcggctcggtggacgagggtcgaggtggagatggcggtgacgacaaaggcctggctggtcagaatcagcctgctgtgaaccagcttttgctggcgccggctgaggaggatctggcattgtccaagatctcagataattccttcatgttcgattacaccactggtggcgatgactcggggactgaggaggagcaggctgccttcatgaaggagctcgagcgtttccacagggagaaaatgttggagttcaagcctccgaagttttatggcgaaggattgaattgcctcaaattgtggagacaagttactggattgggtggctatgatcaggtgacatcatgcaagctgtggcgtcaagtaggagagtcattcaaacctccaaagacatgcacaactgtttcatggactttccgtaacttctatgagaaggcactccttgaatacgagaaacacaaaatcgaaacaggagagttccaagtagcttcatctgctctaccagaccggtttggttctgagagtcaggtgggtggaagccatgtatctggttctggaagagccagaagagaatctgcaactcgtgcaatgcaaggttggcattctcagcgcctactagggaatggtgaaatcgctgaccctataattaaggataaagggcatattgtcttaaagaaggataaaactcctaaaagcagtggttctgccaagaggaaaaggacactatccctggaagatgacagggtgataccttataaatctgatcagctacacagaaatgactcgatggttattgacatgggcccccctgctgattgggtgaaaataaatgttaggaaaactaaagattgctatgaagtctatgcgttggttcctggccttctgagggaagaggtacatgttcagtccgacccagctggtcgtttgatagttactggagagcctgagcaattggataacccatggggtgtcactccattcaagaaggtcattagtttgccttcccgcattgaccctcaccaaacctccgcagttgtcaccctccatgggcagctatttgtgcgtgcaccatttgaacaatcaaaataatgttgatgccacaatgaataatacaagtttaccgtatgggtggggattattttgttgtgacatgagcttagaatttctcaccctgaccgtcgccaaaaactaggtccttgctgattctaatgcttcaagactcttccgtgctagatctcgcctgtatcaagttaaactcattagttgacatagttctgtgtgtattcgggtgcgcccattggctgtgaattgtagctaaagcaaagttactaagcctagagtttaggatgttaatagcctgatgctcaacatgtccatggtttcttaatttaaccagcacaaagtgtactgtttgtagcaatgcagtatgtagcatgttcccattatttgagctctggaacatggacacaggtaggctcgttgcttgttgccggtgtattgctaattttgctattcaacttgtattgtcaaaagctatggcctccccctgtaacctgccttcttattgtgcgactttgtgattaccaagttagctcttaagatattttacatgatgggctttccgtc

SEQ ID NO: 137737 - DNA, 1882 bp, Zea Mays
aagcacggtttcagttcaaaaccattctccactgttcctccgctccctctgtctcgtcgtctcccatctccggctagggtttgccctttccaccgcgtccgacgcctacctcgcccacgccgtcgattccgtcaatgcttcagcgaaacccgaagcagagggcgcggaggaggaggggggcagcgacaggaaggagcggaatggtggcccgacggcggatttggttggcgaggttgtgaagttggagaatggggacgggcctgtgacggtgggcggctcggtggacgagggtcgaggtggagatggcggtgacgacaaaggcctggctggtcagaatcagcctgctgtgaaccagcttttgctggcgccggctgaggaggatctggcattgtccaagatctcagataattccttcatgttcgattacaccactggtggcgatgactcggggactgaggaggagcaggctgccttcatgaaggagctcgagcgtttccacagggagaaaatgttggagttcaagcctccgaagttttatggcgaaggattgaattgcctcaaattgtggagacaagttactggattgggtggctatgatcaggtgacatcatgcaagctgtggcgtcaagtaggagagtcattcaaacctccaaagacatgcacaactgtttcatggactttccgtaacttctatgagaaggcactccttgaatacgagaaacacaaaatcgaaacaggagagttccaagtagcttcatctgctctaccagaccggtttggttctgagagtcaggtgggtggaagccatgtatctggttctggaagagccagaagagaatctgcaactcgtgcaatgcaaggttggcattctcagcgcctactagggaatggtgaaatcgctgaccctataattaaggataaagggcatattgtcttaaagaaggataaaactcctaaaagcagtggttctgccaagaggaaaaggacactatccctggaagatgacagggtgataccttataaatctgatcagctacaaaatgactcgatggttattgacatgggcccccctgctgattgggtgaaaataaatgttaggaaaactaaagattgctatgaagtctatgcgttggttcctggccttctgagggaagaggtacatgttcagtccgacccagctggtcgtttgatagttactggagagcctgagcaattggataacccatggggtgtcactccattcaagaaggtcattagtttgccttcccgcattgaccctcaccaaacctccgcagttgtcaccctccatgggcagctatttgtgcgtgcaccatttgaacaatcaaaataatgttgatgccacaatgaataatacaagtttaccgtatgggtggggattattttgttgtgacatgagcttagaatttctcaccctgaccgtcgccaaaaactaggtccttgctgattctaatgcttcaagactcttccgtgctagatctcgcctgtatcaagttaaactcattagttgacatagttctgtgtgtattcgggtgcgcccattggctgtgaattgtagctaaagcaaagttactaagcctagagtttaggatgttaatagcctgatgctcaacatgtccatggtttcttaatttaaccagcacaaagtgtactgtttgtagcaatgcagtatgtagcatgttcccattatttgagctctggaacatggacacaggtaggctcgttgcttgttgccggtgtattgctaattttgctattcaacttgtattgtcaaaagctatggcctccccctgtaacctgccttcttattgtgcgactttgtgattaccaagttagctcttaagatattttacatgatgggctt

SEQ ID NO: 137738 - DNA, 1965 bp, Zea Mays
ttcaaaaccattctccactgttcctccgctccctctgtctcgtcgtctcccatctccggctagggtttgccctttccaccgcgtccgacgcctacctcgcccgcgccactgcagggaccaaggatgtcgcaacagcaaggtgtggaggagccgccgccggcaccgctgccggcggcggaaggcgaggcacaaccggccgccgatatccccatgagcgaggccgcggaggtggaggatgaggaggaggaacccgtcgtgggggagggggaggacggtgcagacggggccgccgacgccgtcgattccgtcaatgcttcagcgaaacccgaagcagagggcgcggaggaggaggggggcagcgacaggaaggagcggaatggtggcccgacggcggatttggttggcgaggttgtgaagttggagaatggggacgggcctgtgacggtgggcggctcggtggacgagggtcgaggtggagatggcggtgacgacaaaggcctggctggtcagaatcagcctgctgtgaaccagcttttgctggcgccggctgaggaggatctggcattgtccaagatctcagataattccttcatgttcgattacaccactggtggcgatgactcggggactgaggaggagcaggctgccttcatgaaggagctcgagcgtttccacagggagaaaatgttggagttcaagcctccgaagttttatggcgaaggattgaattgcctcaaattgtggagacaagttactggattgggtggctatgatcaggtgacatcatgcaagctgtggcgtcaagtaggagagtcattcaaacctccaaagacatgcacaactgtttcatggactttccgtaacttctatgagaaggcactccttgaatacgagaaacacaaaatcgaaacaggagagttccaagtagcttcatctgctctaccagaccggtttggttctgagagtcaggtgggtggaagccatgtatctggttctggaagagccagaagagaatctgcaactcgtgcaatgcaaggttggcattctcagcgcctactagggaatggtgaaatcgctgaccctataattaaggataaagggcatattgtcttaaagaaggataaaactcctaaaagcagtggttctgccaagaggaaaaggacactatccctggaagatgacagggtgataccttataaatctgatcagctacaaaatgactcgatggttattgacatgggcccccctgctgattgggtgaaaataaatgttaggaaaactaaagattgctatgaagtctatgcgttggttcctggccttctgagggaagaggtacatgttcagtccgacccagctggtcgtttgatagttactggagagcctgagcaattggataacccatggggtgtcactccattcaagaaggtcattagtttgccttcccgcattgaccctcaccaaacctccgcagttgtcaccctccatgggcagctatttgtgcgtgcaccatttgaacaatcaaaataatgttgatgccacaatgaataatacaagtttaccgtatgggtggggattattttgttgtgacatgagcttagaatttctcaccctgaccgtcgccaaaaactaggtccttgctgattctaatgcttcaagactcttccgtgctagatctcgcctgtatcaagttaaactcattagttgacatagttctgtgtgtattcgggtgcgcccattggctgtgaattgtagctaaagcaaagttactaagcctagagtttaggatgttaatagcctgatgctcaacatgtccatggtttcttaatttaaccagcacaaagtgtactgtttgtagcaatgcagtatgtagcatgttcccattatttgagctctggaacatggacacaggtaggctcgttgcttgttgccggtgtattgctaattttgctattcaacttgtattgt

SEQ ID NO: 137739 - DNA, 1455 bp, Zea Mays
aatgagctagtaagaatccacaaaccgataacatcaatagcaactattctcaagttcaacagactcacaatgatctgccagccaagagtgcctaagaaacggtacaaaaacaggatagataaaagggatagataaaagggtgaccaatacggcaatcctacaaatcctaaataaacggccattgcttaatctccatcgaggagagtttgttacagcattaagatcaaatacgagccacagggaaatgctctctctcaggcagcatgtggctcagcacacttcaccatggcgctggcgccactgtccttggtcatggtgttattcagccatacaggcagattaatcaccacaggccacaataagcatgcctgtcaagcagcagcaggtttgcgcagctcaccttcgccatgggcgaagtggcacctgtctccaaaggtgcaggagcctttgttgaagttctcgcacaatttggttttgaagttgcttccaggacccccggcatgagaaccaggccccctacctgggttgttcttggcttgtggaggcggcttaccactgatgcggacaatcaactctgtgaccattgcgctagcgtgcttgatctggtcaaatgttccctcgagctcgatgtttttatggttgggatcagcctcgttgtcccggatggctaacttggccccagtcactcgggatatatgctttgtgttggtaccacccttcccaatgatggcaccagcaagggatgcatcgacgctgatcttggctgtggcggaagcaccgaatgtggagggaggaaccatgtctgggaaaggcattggcggtggcatgaagtgcccgttgggccctggccccattggaggaggtcccatcgggttgtccatctgcaggggctttccaagctccctctctccatgagcaaagtggcacttgctcccccatttacatccttcggcagtgttgtacttgttacacatgcgagtcttcacagcaggtgaaggtggcccatcaggaccaccaggtcccataggcattcttcctggtggagccggaacaggcggtccacccaagttggtcatctttgaaacggcctggtagccacccgggaagttatggagaaaatggcaacttgcaccaaaggggcaacccgcaaacctgaaaaatttggtgcacggcttggatttgcttcctacaccaagctagagaagctgctcacctctcgcgcgcttggggccgcccgcgccgttggcgccctccggtgcggtccgcttgcggcccgtgtccatggcggtgttgcgggaagcctggccgcgtctggatcgaaggcggcggcggcggcgggcagaaccctagctagggtttcggtcccgcgggggcggcgggtggaggagagaggtgtggggggaggctttgccgcagcgcaacggcacgagcgcgcggccgcaactgatgggggct

SEQ ID NO: 137740 - DNA, 561 bp, Zea Mays
atgaaggtgaatgaatcacatttagctaaagacctggagcaaacttgggaggtccttgctgagccaatacagacagtgatgcgtatatatgggatacctgaaccttatgagaagctgaaggaactgacgagaggccaagctgtcaccaaggacaacatgcagcaattcattaatggtctagacataccggaggaggtccgatcgaagctttcgaagctaaccccgcattcctacactgggccggcggaggatttggccagagacatcatgaagtgggttgatcttgaatctggatttcagatcaagtgagctcccatttaaaaatggatgatgctctccatagtttttctttttgacaacgatggagaaaataaataacagacgggaaccataggaaacgagaatccaatgcgccgtggcctctgacctgtctaccgagataatctacgtgctgaccatttatataattctggcacatgtaaaatgtgcctcaaggaattatgcaagctgtatcttgactggaaaattgtcgagctgaaaaagttgactgttcgatttctt

SEQ ID NO: 137741 - DNA, 321 bp, Zea Mays
tgtatcatcattcttctcttccttcaccaaaccaggcgcctcttccaccgtctcaactccactttcttctacaattctctccacattttctttctcagccatatcctgtctgactttttctttgatcggctcttgcctatgttctgctagctcctccgtgttgtctctctgctgctcttcctcttcgtcgtcatcgacctcccagttcaagtcctcctcctcctcctgcgcaatcacacgctgcacgagcttcaccctggcgtcctccttctgcttcagcgtatggacgtggtaaaagtacctcgactagaacacctcgcc

SEQ ID NO: 137742 - DNA, 1576 bp, Zea Mays
cgtttccttcccctgcacaccaccgcctccaaacccttcaaaaaccaccaccgcccccagcttccctaccgccctcgttccggagcctagggtttgggaagtcgaaggcctcggcgcttcgtttgccagcgcaatgccggatacgggagcgagaggccgcggcgatgagccggagcctgtgacgccgcagcagcaggcggaggagacccaggcggtggacgatcggcggttgctgcgctcgcagtacctcgccgtgaagggccttatcagcgacgagaaggatgaaatggcgagcgcggactctgataagttctgctccattatcaacagagtggagagcctgcaccagcttgttcagaggcccagggagcaaatagctgacgcagaaaccctgctggaccttactgctagtttggtagcatcagtaaggtcccaatcagttctgggaatcacaccttctgattttattgctggactgctgaagaaatttggaaagaaaggaggttccaatgataatgtttcattggactgggctcgtcttgggcttgctacctcacgtgttttcatgtctgcatctggatgtgccaccatgattggtcccatgacgacagaagtgaagccacgaagagtttgtattaggaagaagaggactgcgaggccacatggaaacgcttgccctgaacagcttgctgatccatctgagaaaacaaagtctgatactgacaagaacatgtctgctatatttgatctcctgaggaggaagaaaagtgcaaggctggaacacattattttgaacaggacatcatttgctcaaacagtggagaacatatttgccttgtcattccttgtgaaagatggaagagttgaaatcaaagtgaatgaccagggacatcattttgtctatccaaggaatgcaccagtggcaagtgctgttgcctcaggagatgtggtctataaccactttgtcttccgatttgattttaaagactggaagctcatgaaaggggttgttccagagggagaagagcttatgccgcacaggtcctctcagaccatagccaacacaggaggaaacaatcctacccagtctgaggcacctttggccacaccaagcacaacgatcaggaagctttgcaggaaccgtggcctcatcttgcaagatgagttgatcgcgacaggtgcatatggagtcatggaacaggagatgttagccatgggcacgaacgacgccatggaagatgagatggtagctgccatgggtgtgacggaagctatgggagagaagaggaagtacaagcgcaagcgtctgttccaggacgtctgatgcgttgatccagctgaccgttgctgatggtgtacatgtctaggtagtaggtagagatgccaacccggctcacttcagcttagcttaccttagatgcatttgggtcaaagcaccccatttggtatgggttatggtggctcttggaatggctgagcgtcacgttattttggaggtgttcttaatgttagtttctggcgtacttaagactgaagtaaccatagtgaaggtgttggatgcttgggttgaattgca

SEQ ID NO: 137743 - DNA, 2254 bp, Zea Mays
acagatctctgtttgtctctgcctcctctggcccattcagtcagttaccctcaatggccgacgaccccctggactcgtccccgtcggcgtccgccgccgccgctgctggcggagtctcctccggcccccgcccagcgctccggccccggcgggaggcatttgagtacgggctcctgccgatccccaagctggtcttcccagaaggcgcgctgacgcaaaccctatcccagctgaaggagaggctcgcgccgggggggccgcgggtgggcgccgcagcgctcgctgaggcgctgcagatccctgccgagcaggcagcgctggcgctcggaacgctcgctgcggtgctacccgcggaggattcggcgctcggcgaggacggctcggggagtgctgacctccgcgacctgcttcttttcctctacatccaatcctacaagcgcctcgtgccgcgcgtgcacaaggactcgcccgccgtcacggatgtttggccgtcgacctccgccttcgatggatacctctccgcgctgtcgccgatccagtttgtacggagcaatagtcgccgttttatgccttcacaagcagatgaagaagctcatcagctatcgtatttacaaaagcatatgaccaacattctaacacttttagcagattctattgatggcgagggagatgattctatggtattgacaatggagacttttgagcaccttggattttttttgcagctctctgaaggaactccattaagccaagcagctaccttttttgcgaattcggatccagacatgcccgctgctcctgtacctgctgctttggtacatgattgggtcttgcagcatatagcttcagcattagaatttatggcagagaagactgtggcaaaagaaaacagccaacataatgcatttgatcctgatgtcacaatgtctgatgctgtcacgaatacaagaattcatagcagttcaccaactggcagttctgcaccaaactatcctggatactaccgaaatgcatcatttgtggagggttgctcgaaaacttcagttgtcaaacaagcatcggatctgaaagggcattcaataaaggttttgaactgccatgattctgtaatttacattttagccccacttaagtatgcaactgtctatggatgttctgacactaccattattcttggtgctattggtaaggttgttaaagtggagcattgtgaacgtgtacaaattattgcagcttcgaaacgaatttgtattgccaattgtcgtgaatgtatcttctacttgggagtaaatcaccaaccacttattgtaggggataaccataaattacaagttgccccatttaatacttattatccacaactcggggaacatttggcacaagttggtgtggatcctaatgtcaacaagtgggaccaaccttttgtgttgggagttgttgatctgcatgactcattatctcatcctgccggggtttctgatgtccaggctgagtccaccacttgtctagatcctgatctatttacgaactttttgattcctagttggtttgaagtagaaggacctaccaaatacaatccatttaccctgcctgaagtttattgggcgtcccaaaggaaaaagcatgcttctctggaagatattcaaaagaatatccgggagctggagatcgatgatatccggaagaaagaattggcatgtgcccttcatgctcaattcaaagattggttatatgcctcagggaatatccgccagctatactgtttgcaaggcgaatgagcataagatggggttcttgtgtaagcgcgagatgcagcagtacgcgtctgcaagtgcaatccaattccgggcgcctccgaaatctgaaagtgacttccaagctgagttggtgtcgcctgccctgatgcacttggtatttcagctgtagcgtttgtggaggcaagtaactgtaacgtttttgtttgttccaattagtttttaccacttttcccattcagttggccgcaaggtttctgtaaatctttcggtactgttggtttcatatttagaaaattcacaaagcggccactcaattctctttttggaaagtaactttatttttttttcaaatggtgtttggtttttagggactaatgtttagtcccttcattttattccattttagtctctaaattgctagaattttagtttttgtatttgacaatctagggactaatatagaataagatgattagtccttacaaatcaaactcctt

SEQ ID NO: 137744 - DNA, 2554 bp, Zea Mays
cagatctctgtttgtctctgcctcctctggcccattcagtcagttaccctcaatggccgacgaccccctggactcgtccccgtcggcgtccgccgccgccgctgctggcggagtctcctccggcccccgcccagcgctccggccccggcgggaggcatttgagtacgggctcctgccgatccccaagctggtcttcccagaaggcgcgctgacgcaaaccctatcccagctgaaggagaggctcgcgccgggggggccgcgggtgggcgccgcagcgctcgctgaggcgctgcagatccctgccgagcaggcagcgctggcgctcggaacgctcgctgcggtgctacccgcggaggattcggcgctcggcgaggacggctcggggagtgctgacctccgcgacctgcttcttttcctctacatccaatcctacaagcgcctcgtgccgcgcgtgcacaaggactcgcccgccgtcacggatgtttggccgtcgacctccgccttcgatggatacctctccgcgctgtcgccgatccagtttgtacggagcaatagtcgccgttttatgccttcacaagcagatgaagaagctcatcagctatcgtatttacaaaagcatatgaccaacattctaacacttttagcagattctattgatggcgagggagatgattctatggtattgacaatggagacttttgagcaccttggattttttttgcagctctctgaaggaactccattaagccaagcagctaccttttttgcgaattcggatccagacatgcccgctgctcctgtacctgctgctttggtacatgattgggtcttgcagcatatagcttcagcattagaatttatggcagagaagactgtggcaaaagaaaacagccaacataatgcatttgatcctgatgtcacaatgtctgatgctgtcacgaatacaagaattcatagcagttcaccaactggcagttctgcaccaaactatcctggatactaccgaaatgcatcatttgtggagggttgctcgaaaacttcagttgtcaaacaagcatcggatctgaaagggcattcaataaaggttttgaactgccatgattctgtaatttacattttagccccacttaagtatgcaactgtctatggatgttctgacactaccattattcttggtgctattggtaaggttgttaaagtggagcattgtgaacgtgtacaaattattgcagcttcgaaacgaatttgtattgccaattgtcgtgaatgtatcttctacttgggagtaaatcaccaaccacttattgtaggggataaccataaattacaagttgccccatttaatacttattatccacaactcggggaacatttggcacaagttggtgtggatcctaatgtcaacaagtgggaccaaccttttgtgttgggagttgttgatctgcatgactcattatctcatcctgccggggtttctgatgtccaggctgagtccaccacttgtctagatcctgatctatttacgaactttttggtacgtgagctatatattcctttcattattgctatcttatgctagacttgaaaaaactcaaatgcagttaaaaaagttttatgatgagatatctcttgctttgacaacatgttgcgtctgatgcatctgcattaataaggttactcgattttttgcagtattattgtgtccataacagctggagtaggaacctatattccatatttttgtaatactatgttactaattgatcaatcaattgacattaatttttagtttctgaatgttctcacctaaatatgggtggtaatggggctttggcctctccagattcaataaaatattgtgggtggtaatatattgtgttgtggttctgtaaaagttacatctgatgcattttaaatgactacagtgtgcattttttcttgcaaaatattaaaaatggcagccagctaattctctatgcagattcctagttggtttgaagtagaaggacctaccaaatacaatccatttaccctgcctgaagtttattgggcgtcccaaaggaaaaagcatgcttctctggaagatattcaaaagaatatccgggagctggagatcgatgatatccggaagaaagaattggcatgtgcccttcatgctcaattcaaagattggttatatgcctcagggaatatccgccagctatactgtttgcaaggcgaatgagcataagatggggttcttgtgtaagcgcgagatgcagcagtacgcgtctgcaagtgcaatccaattccgggcgcctccgaaatctgaaagtgacttccaagctgagttggtgtcgcctgccctgatgcacttggtatttcagctgtagcgtttgtggaggcaagtaactgtaacgtttttgtttgttccaattagtttttaccacttttcccattcagttggccgcaaggtttctgtaaatctttcggtactgttggtttcatatttagaaaattcacaaagcggccactcaattctctttttggaaagtaactttatttttttttcaaa

SEQ ID NO: 137745 - DNA, 1553 bp, Zea Mays
atgacaaaaggtgcaaatgattataaaaactcaactgcgggagtgctatccgcaaacagcgagacacggactataatgaaagggataaagcacggggcctgtgattatatcgtaaagccagtgcgcctcgaacagcttaggggcatatggacacatgtggtgaagaacagtaggactgatccacggaccagcatcatcgacagtggcagtgatgatgatgtacagaagctgccatctggggatggtggtgaaggtgacaaggttggagcaaaccgcagaaagaagaagtgttcaaagaagaacaaaccggctgtggatgttgctggtgggcacagcgagaacacatcagcccagaagaagccaagggtccagtggtgtggtcaactacaccgcaagttcgtagaagctgtccatcagattggcatcgacaaggctgttcccaagaagatactagaagccatgaatgtggaaggcattaccagagagaatgtcgccagccatttgcagaagtaccgaatctacctcagaaagctcatcgagggcacattggggaactctaattcatttgctgacgaaaccgaagcattgtggagatacttgaatgtcccatccttcattacctctccgagctcaagcaaccattttacaaatgccggttcctcatctgcaattagaacccaaactttgctacccccacagccaccagttcatgtcatgagctcccagaaaaacttgagcactcctcgctcctatgcgagcatactgcgtggcaagattctgggatcgagcagaggtattcctttcgaagacacgccagatggtgagatgctggctcctggtaatttgtcatcgcagtctcctgagcttcagtctgtttgggctggttctgcaagcaccagatctgaccttcagatagacaattcgacccaggcgctgaatggcggcggggcaagtgacaatagcctccgtgaaggaggcagcactgttgatcagcaagctgttgttagtgaccaagtgaataacatcaatgcggagagtgatggcttggatgatttccttgcttacatggttaatcgacgggatttcatcaacaatggtgattctttcatcctcggggaccaggactttgccccttgaatctggaagggagatgtttctgcatcgcctagctactgaccaattcatggttgtaataaggctagctaggagcaggccatcttggatggaatcaccatgtttctctagtgtactcatgtttttagcctgtggtgttaagtttggcgggaggtgtggctgtgccactgtcacccctgccaaccccccaagccatgtgttactcttcggcttgaattttggtggtcatttttacttttatattaaacaatctagcccctcttaggggtctttttttatatatagttgtgatcatagacggagttatgtcagatagatccagtttccatatgcagtgatatgattttcatgaagtatttgaactgttgtatgtcatctgttttttgaatcaatgaaatgttgcttttttcttgaaattg

SEQ ID NO: 137746 - DNA, 321 bp, Zea Mays
atggacgtgaaaaccttcccagcagggctgcgcgtgctcgtcgtcgacgacgatcgcgtctgcctcaaggtcctagagaggcagttgaagtgttgcaactacaacgtgatggtggtgacggacgccaggacggcgctggaaatgctcagggagaggaaggatgacggggaccagtttgacctggtgatcagcgacgttgtcatgcccaacatggacggctttgagctcctcgagctcatcggcgtggagatggatctcccagtcattagtaaagcccttgcccttcccatttttatgcatggcattcttttgatcatttag

SEQ ID NO: 137747 - DNA, 4619 bp, Zea Mays
taccctcggaaattaagagtttaaattatatagacaccactacataacattattacgggtgacaaatcatataaactgaccttaattccgagggcataataattaccgtcggaaattaaaaattaaaattatctaagcaccactaattaaatttaggccctcggatataataaaataaactacaaaacaatattaatatatacaaaatattaataatacattaataccttacggcgggcgggcggggcgggcgtcgacggcgggctgtgcgtggcggccgacggcggggcggcgggcggcgggcggcgggcggccgcggcggggcggcggacggccgcggcggggcggcgggtggccgggcggcggggcggcgggcctcgacggcggcggcggcgagcgtcgacggcggcggcggggcggcgggtggccgggcggcggggcgggcgggcctcgacggcggcggcggcgagcgtccgacggaggcggcggtgagcgggcagagagagagaagcgagaagcgagcgcgcgcgcgtgaaaatgaaccgcgccgggacggtccgtgtgttaaaaaaaccttatgtccgacggaactttcttcgtttactgtagtgcctgtccggccgtcgccttgctccggcacgtgaagagcgccactccacctgcacacttccttccagctttgagccctctctccctgcctagcccagtactcgaccagtacggctccgacggcgatgctaaccgctcagtcagtgttcatgcatgcagctaacgaactgcacgagctcatccacatgatatatacatgacaataatgccgtgcagtaactatctatctatatatcgatggatcatccgctccaaaccaataaccccaccgtcggatgcacgcagatgcacatgtggggccacgggtcgcagtaccgcaagggcccggagtcgctgcggggcacgcagccgacggcgatgctgcggctgccgtgctactgctgcgcggcgggctgccggaacaacatcgaccacccgcgggcgcgcccgctcaaggacttccgcacgctgcagacgcactaccgccgcaggcacggcatcaagcccttcatgtgccgcaagtgcggcaagcccttcgccgtgcgcggcgactggcgcacccacgagaagaactgcggcaggctctggtactgcgcctgcggctccgacttcaagcacaagcgctccctcaaggaccacatccgggcgttcggccgcggccacgccgcctgcggcgtcgacgactgcttcgacgacgacgacgaccgcgacgacccgtcgtcatccgaggtcgaccacgcagccaccaacactactagtaacagcaccactactaccgctgccgccgccaatgctcaccaccatcaccacaccagctggaagccgccgccgccgccactgtcgtcgtcgagcagaggctccggcgacgaccgactactatagatcgacaagggtgagtacgtacggtcctactacatacatcctacacagcaaccagtcgatctgtagccaaatgcaaacgtatgcttgtgtgcgtgtgtgtataaccatgcatatcatccatctgtccgtgtcttactcagtgtttaaaatagcgggctaaggcatttatcctcggccttttttaacagctagagaaggatatatctagatatcgccgcagctaaatgttttagcggttttcagaacatagaacaatcgagtagcattacctatgtaataaactaattaaccaaagcaaaaatatacaataggcggttcagacttcagaaccaaaaataatagcaagaaaaacaacattcatttgctaagttttatagtctactggttgcaacaatcactggttgcaacattcagtgtactgagcagcaaaacatacagcatactgagcagcaaaagtacttcaaaaggagttgctaagttgctaagttccaagacattaatttgataaaatggcagcagtctacactatgaacatctgtgaatgaaggtctaggcagtagctattagctaacaaatgagatcaaatcaaaatgagacgcccacctgcggcctcccgtgcgtgtccgcccaggcgcccaaccgtggagatcgcgatggagacttggagagccgattgcgatggagactggagagccgaacagcgccaggagcagcagcatcctcgtctcgaccaggaggaggagcagcagcgtcctcgtctcggccggggacggtcctcggtccctcggcggctgctgctggacaaagggcgaggagaggaacaagtaacaacgggagttgtgagtgtgacacaggcggcggctagggttagcaacaggagcaactgggcacgacaggttattttgttttgggcccaaatttcatttggcccacaacgcacaacaacttctttagcgggctaaatgatgtagtgtttagctgttttagcgggctaatatccgctattagcggttctgtccgtttagcgctaaattgtgattatcttatccctaatcttatgcaacagctatatccggatatagcggcggctatatccagctattttaaacactggtcttacttagcttgaggtgtgccgatccgatcgagaggagagctgatttattagtaggtgcaagagagagcatgcacgcaagggttcgttctattaaaatagatggaggtataagcatgcagccgggtttatgtattatgcatacaaaagatctaattgagtagctagctagcttcattgtatgtgcagactttgatccatctggtatatatggtcaacggtgcaaatacagatttgttaatgctaacttttgagaaaataatcgtgcagtgcagtgcagtgcatcatgcatatgcatgcaagtggtgaaagcatgttaatctattatatatctttagagatgaagtgttatataatgatttcttagtaattggggatatacatgcatattggggttatctggattagaatgggtttttccctccttagggagaatcatatttttccgagggatttccattttcataagggaaattagtttattttcctctagtaaaacagaaatctcttggtaaaatagagttcctatactagcccttatgaaactattttttttaccaaaaaccggcacaaaattaattattagcaataattaggggtgtttgaatgcactagaactaatagttaattaattggctataaattattagtggaattagctagctaacaaatagttacctaactattaactaatttaccaaaaatagctaataactgaactattagctaggatgtttggatgtctcaactaattttaaccactaactattagctctagtgcattcaaacacccccttaatccatgtcagctgcacatttctcttttcaagatgttttactctatttttcgtccatatgaaacataacttgtaagaaaaaaatattgatgtaagatgttaaattgaggtacagcttgtgagaaaaaaaatccatgcaaacagattattgcagatatttggcaagctaaggtagtttaaacttgtgcatcaccactactgcaagtgcactagttgatccttggaattctaattttttaatgcacttaaataaataactttagtgatgaagttttttcatgcacttaaataaatgtctttagtgatgatgttatgccactctttattgagataaattatacataaaaaagaaaaccttttgtactcccgcattattaattctgaaaagtcaacgtttttcttaataaaactgattgattttctatatatatgtttgagaaaacttgtgccgaggacgtaagaactatgatatatgtatattagagtccataattacttttagtatgttttagattctagattttaacatacaaattacaatggtcattgccttttcccaaccaaataaatggaaatctgttttcaaagttttctttcagaacgtatcagtatccaaaactaatttgtgacagttggaagaattatgccaatcaatcaaaaaatggaggggggttttgaaattaatattatttctgaaaatttataacatccaatgtttttaagaatacttgtaatgtgtggtttttaattctccttggatgctaggtatttcttgtggaaagacaatgtgcactattttttgtgtttattctatgaagttcaatcaagtaacagaatatgccttttaatgaaatttatgacgagcttacattttcttcttttgatgaagaagtgaaaccagcttagtatgtagcaaatacggaaagcgcatattactctctccgttcttttttatttggcgccgtttagttcaaaaataaactagcggatgataaatattcgagaacgaaggtagtacattttaaaaaaactatgtttagcttataattgatcaagattctaaatctcctaccatctcgaggaatagttgtttgcaagtgacaaagttatttgctcttatgtatatagtttagctgctatttgccgtagcctgacttagcttgatattagctgtttgaaaaggaagattgctaaattttttatcccactatttataacacactgattataatttggca

SEQ ID NO: 137748 - DNA, 786 bp, Zea Mays
tagcaagaaaaacaacattcatttgctaagttttatagtctactggttgcaacaatcactggttgcaacattcagtgtactgagcagcaaaacatacagcatactgagcagcaaaagtacttcaaaaggagttgctaagttgctaagttccaagacattaatttgataaaatggcagcagtctacactatgaacatctgtgaatgaaggtctaggcagtagctattagctaacaaatgagatcaaatcaaaatgagacgcccacctgcggcctcccgtgcgtgtccgcccaggcgcccaaccgtggagatcgcgatggagacttggagagccgattgcgatggagactggagagccgaacagcgccaggagcagcagcatcctcgtctcgaccaggaggaggagcagcagcgtcctcgtctcggccggggacggtcctcggtccctcggcggctgctgctggacaaagggcgaggagaggaacaagtaacaacgggagttgtgagtgtgacacaggcggcggctagggttagcaacaggagcaactgggcacgacaggttattttgttttgggcccaaatttcatttggcccacaacgcacaacaacttctttagcgggctaaatgatgtagtgtttagctgttttagcgggctaatatccgctattagcggttctgtccgtttagcgctaaattgtgattatcttatccctaatcttatgcaacagctatatccggatatagcggcggctatatccagctattttaaacactggtcttacttagc

SEQ ID NO: 137749 - DNA, 1593 bp, Zea Mays
cttaattccgagggcataataattaccgtcggaaattaaaaattaaaattatctaagcaccactaattaaatttaggccctcggatataataaaataaactacaaaacaatattaatatatacaaaatattaataatacattaataccttacggcgggcgggcggggcgggcgtcgacggcgggctgtgcgtggcggccgacggcggggcggcgggcggcgggcggcgggcggccgcggcggggcggcggacggccgcggcggggcggcgggtggccgggcggcggggcggcgggcctcgacggcggcggcggcgagcgtcgacggcggcggcggggcggcgggtggccgggcggcggggcgggcgggcctcgacggcggcggcggcgagcgtccgacggaggcggcggtgagcgggcagagagagagaagcgagaagcgagcgcgcgcgcgtgaaaatgaaccgcgccgggacggtccgtgtgttaaaaaaaccttatgtccgacggaactttcttcgtttactgtagtgcctgtccggccgtcgccttgctccggcacgtgaagagcgccactccacctgcacacttccttccagctttgagccctctctccctgcctagcccagtactcgaccagtacggctccgacggcgatgctaaccgctcagtcagtgttcatgcatgcagctaacgaactgcacgagctcatccacatgatatatacatgacaataatgccgtgcagtaactatctatctatatatcgatggatcatccgctccaaaccaataaccccaccgtcggatgcacgcagatgcacatgtggggccacgggtcgcagtaccgcaagggcccggagtcgctgcggggcacgcagccgacggcgatgctgcggctgccgtgctactgctgcgcggcgggctgccggaacaacatcgaccacccgcgggcgcgcccgctcaaggacttccgcacgctgcagacgcactaccgccgcaggcacggcatcaagcccttcatgtgccgcaagtgcggcaagcccttcgccgtgcgcggcgactggcgcacccacgagaagaactgcggcaggctctggtactgcgcctgcggctccgacttcaagcacaagcgctccctcaaggaccacatccgggcgttcggccgcggccacgccgcctgcggcgtcgacgactgcttcgacgacgacgacgaccgcgacgacccgtcgtcatccgaggtcgaccacgcagccaccaacactactagtaacagcaccactactaccgctgccgccgccaatgctcaccaccatcaccacaccagctggaagccgccgccgccgccactgtcgtcgtcgagcagaggctccggcgacgaccgactactatagatcgacaagggtgagtacgtacggtcctactacatacatcctacacagcaaccagtcgatctgtagccaaatgcaaacgtatgcttgtgtgcgtgtgtgtataaccatgcatatcatccatctgtccgtgtcttactcagtgtttaaaatagcgggctaaggcatttatcctcggccttttttaacagctagagaaggatata

SEQ ID NO: 137750 - DNA, 207 bp, Zea Mays
atggcccaaccgagcagatcagattattctacgttgcttgaagcgacaaaggagagcttccgcaacaggtctggtgaaacagacttcaagctagaacacatggtgaacaagttgtacaaggctagtgagaagataaatcactccaaattatatgactacttcaccaagttgtttgatcaatccactgccgacatggatgatgactaa

SEQ ID NO: 137751 - DNA, 1700 bp, Zea Mays
gttatttaatttaggctatccacagtggttagtggttacgtctgaagggtccaaacaatgcatgaagagtttgaggacgggaagtctgccctaaaaatagcaatgcaaacacatggtgtccatgccatacatatagcacactaattttatcagtagaacatggtatttataggtcctagtgcccaggcaacaagagacacgaataaagcatcgatcacaataagatggcgtgtatagacaatgcaatgagagccttgttccttttagcgctcttctgtgtcgtgcatggtgagaaggcaaagtcaaaggacaacgatgcaaaagcgtccgggcccggtgggtccttcgacatcaccaagttgggcgcctccggcaatggcaagacggatagcacgaaggctgtgcaggaggcgtgggcatcagcgtgcggcggcaccgggaagcagacgatcctcatccccaagggcgacttcctcgtcggaccactcaacttcacaggcccatgcaagggcgacgtgaccatccaggtgaatggcaatctgctggcgaccacggacctaagccagtacaaggatcatggtaattggatcgagattctacgcgtggacaaccttgtcatcaccggcaagggaaagctcgacgggcaggggccagccgtgtggagcaagaactcctgcgtcaagaagtacgactgcaagatccttcccaactcgctggtgatggacttcgtgaacaacggggaggtgtccgggatcacgctgctcaactccaagttcttccacatgaacatgtacaagtgcaaggacatgctgatcaaggacgtcaatgtgacggcgcccggggacagccccaacacggacggcatccacatgggcgactcgtccggggtcaccatcaccaacaccgtcatcggcgtcggcgacgactgcatctccatcggccccgggacctccaaggtgaacatcaccggcgtgacctgcggccccggccacggcatcagcatcggcagcctagggcggtacaaggacgagaaggacgtcacggatatcaacgtcaaggactgcacgcttaagaagacggccaacggcgtccgcatcaaggcgtatgaggacgccgcctccgtgctcaccgcctccaagatccactatgagaatatcaagatggaggactcgggctaccccatcatcatcgacatgaagtactgccccaacaagttatgcaccgccaatggtgcctccaaggtcaccgtcaaggacgtcaccttcaagaacatcaccggcacctcctccaccccggaggccgtcaacctgctctgctctgccaagatcccatgcaccggcgtcaccatggacgacgtcaacatcaagtacagtggcaccaacaacaagaccatggccgtatgcaagaacgctaagggcagcgccaagggttgcctcaaggagctcgcatgcttctagaaccaccatcgacccatctctctagttatacaatgtgtttggttgttggatgctgagagattggttctcagctcagatgcaagctgcgcctagcctgtgtaggtttgtgctggtacattgagagctcttatttatttgctttgattgcaattaaccaggatgaccatagcccttgtttggtttgctgtttttataagttgcatgaacacaacttctgtttggttaaccaggatgaccatagcc

SEQ ID NO: 137752 - DNA, 1583 bp, Zea Mays
ccatgccatacatatatcacaataattttatcagtagaacatggtatttataggtcctagtgcccaggcaacaagagacacgaataaagcatcgatcacaacaagatggcatgtatagacaatgcaatgagagccttgttccttctagcgctcttctgcaccgtgcatggtgagaaggcaaagtcaaaggacaacgattcaaaagcgtccgggcccggtgggtccttcgacatcaccaagttgggcgcctctggcaatggcaagacggatagcacgaaggctgtgcaggaggcgtgggcatcggcgtgcggcggcaccgggaagcagacgatcctcatccccaagggcgacttcctcgtcggaccactcaacttcacaggcccatgcaagggcgacgtgaccatccaggtgaatggcaatctgctggcgaccacggacctaagccagtacaaggatcatggtaattggatcgagattctacgcgtggacaaccttgtcatcaccggcaagggaaagctcgacgggcaggggccagccgtgtggagcaagaactcctgcgtcaagaagtacgactgcaagatccttcccaactcgctggtgatggacttcgtgaacaacggggaggtgtccgggatcacgctgctcaactccaagttcttccacatgaacatgtacaagtgcaaggacatgctgatcaaggacgtcaatgtgacggcgcccggggacagccccaacacggacggcatccacatgggcgactcgtccggggtcaccatcaccaacaccgtcatcggcgtcggcgacgactgcatctccatcggccccgggacctccaaggtgaacatcaccggcgtgacctgcggccccggccacggcatcagcatcggcagcctagggcggtacaaggacgagaaggacgtcacggatatcaacgtcaaggactgcacgcttaagaagacggccaatggcgtccgcatcaaggcatatgaggacgctgcctccgtgctcaccgcctccaagatccactatgagaatatcaagatggaggactcgggctaccccatcatcatcgacatgaagtactgccccaacaagttatgcaccgccaatggtgcctccaaggtcaccgtcaaggacgtcaccttcaagaacatcaccggcacctcctccaccccggaggccgtcaacctgctctgctccgccaagatcccatgcaccggtgtcaccatggacgacgtcaacatcaactacagtggcaccaacaacaagaccatggctgtatgcaagaacgctaagggcagcgccaagggttgcctgaaggcgctcgcatgcttctagacccaccattgacccatctctgtagttatacaatgtgtttggttgttggatgctgagagactggttctcagctcagatgcaagctgcgcctagcctgtgtaggcttgtgcaagtacattgagagctcttgtttggttgctttgattgcaattaaccaggatgaccatagcccttgtttggtttgctgtttttataagttgcatgaacacaacttctgtttggttaaccaggatgaccatagtcta

SEQ ID NO: 137753 - DNA, 1673 bp, Zea Mays
cccaagaacgagaggccgtaaaaccatgcatgctcggagcaatccgtgatgccaactgcatgttaggcatgtagcttaattttattcgatctgttctcttccagatcgagctgaggtaaggtaccgacgcagccatgccactgcgtttagccgctctgcttctcctggctactacggcgacgtggaccgcaggggtcaccgccgctgccgccggccgcgtcttcaatgtgtcggacttcggcgcggtcgcggacgggcgcacggacgactccgaggccttcctgagggcgtggacggaggcgtgcgcgacgccggggaggccggcggtcgtggtccccaggggcgactacctgctccacccgctggtgttccggggcccgtgcaggggctacgtggaggtccacgtcggtggcgtcctccgcgcgccgccggggctcgccgccttccgtggctgccgcgagtgggtccacttctccagcatcgacgggctgctggtcaccggcggcggcacgttcgatggccgcggcgccaccgcgtggccgctcaatgagtgcccgcagaagcgcgactgcaggcttctcccaacctccatcaagctcgggctggtgaggaacgcgaccatcacgggcgtgacgtcgctggacagcaagttcttccacgtggccgtggtgggcagccaggacgtgcgcatccacggcgtcagcatccgcgcgccgcgcagcagcccgaacacggacggcgtgcacatccagggctcgtcgaacgtgcgcgtgacggactcggccgtggccacgggcgacgattgcgtgtccgtggggccgggcagctcggacgtgctggtgtccggagtggcgtgcggcccgggccacggcatcagcgtgggcagcctgggccggtaccccggcgagggggacgtgcggcggctgcgcgtggccaactgcaccgtcgccggcacgtccaacggcgtgcgcatcaagacgtggcgcggcgggtcgtggccgcccacggccgtggccgggctcgtcttcgaggacatcgtcatgaggaaggtccgcaaccccatcatcatcgaccaggagtactgcccctacccgtcctgccgcgagtcggagcagcggccgtcggcggtgaggataagcgacgtcaagttcaggaacatccggggcgagtcggcgaccaaggtggccgtgaagctgtcgtgcagcgaggccagcccgtgccgggagctggagcttagggacatcgacctgcgctacgtcaagcgcggggtcgccacgcagtcgcgctgcgcgcacgtcgccggcggtgtggtcggcggcacgctggtccctccctcttgcatatgaacgccggccgctcgctcgcgctacgtcaagagatggcttgctgctgactagctatgtggactgaaatacgggttagctagtgaaagaacgatgtacgggcacaacagtgccgtattgtaggttgtagtcgagttttttttttcttgaattttgtggctagtagtggttctcacctccgctccaacgcgacctggatttgctgacgactcagctgttgactgcatctggatctcgtcaccctccaggatgataggatatatgcatgtgctcaatgtagaaatggagctcaaatcctgaaatttgcgaagcagtagaacttcttcagtc

SEQ ID NO: 137754 - DNA, 1182 bp, Zea Mays
atggcgtacacagacaatgcgatgagagccttgttgcgctcttctacgtcgtgcatggtggatggcaatctgctagcgaccacatacctaagccagtacaaggaacatggtaattggattgagattctacgcgtggataacctggtcatcaccggcaagggaaaccttgacgggcagggcccattcgtgtggagcaagaactcctgcaccaagaagtacgactgcaagatccttcccaactcattggtgatggacttcgtgaacaacggggaggtgtctggggtcacgctgctcaactccaagttcttccacatgaacatgtaccagtgcaaggacatgctgatcaaggacgtgaccgtgacggcgcccggggacagccccaacacggatggcatccacatgggcgacacatccgggatcaccatcaccaacaccgtcatcggcgtcggcgacgactgcatctccatcggccccgggacctccaaggtgaacatcactggcgtgacctgcggccctggccatggcattagcattggcagcctagggcggtacaaggacgagaaggatgtcacggacatcaacgtcaaggattgcactcttaagaagacgaccttcggcgtccgcatcaaggcgtacgaggacgccgcctccgagctcaccgtctccaagatccactacgagaatgtcaagatggaggactcgaccaaccccatcttcatcgacatgatgtactgccccaacaagttgtgtactgccaacggcgcctccaaggtcaccgtcaaggacgtcaccttcaagaacatcaccggcacctcctccaccccggaggccatcagcctgctctgcactgccaagatccaatgcaccggcgtcaccatggacgacgtcaacgtcgagtatagtggcaccaacaacaagaccatggatatatgcacgaacaccaagggctgcaccaagggttgcctcaaggagcttgcatgcttctagaccctccgtcgactgaccaatctctctagttataatttttctctcgtccttgcattgcccattagttgctatccattggtaacacacaacagtaaaacgacagacatccgacagctatattatgttcgacggtgtaacaccctgaatttgagggtataaaatttcttctctaaatgccaaccaaattcaggtgtt

SEQ ID NO: 137755 - DNA, 1252 bp, Zea Mays
acgaataaagcatcgatcacgacaagatggcgtacacagacaatgcgatgagagccttgttgcgctcttctacgtcgtgcatggtgagaaggaagagtccaagggcatcgatgcgaaagcgtccgggcccggtgggtccttcgacatcaccaagttgggcgcctccggcaacggcaagacagacagcacaaaggcagtgcaggaggcatgggcatcagcgtgtggcggcactgggaagcagacaatccttatacccaagggcgacttccttgtcggacaactcaacttcacaggcccgtgcaagggcgacgtgaccatctaggtggatggcaatctgctagcgaccacatacctaagccagtacaaggaacatggtaattggattgagattctacgcgtggataacctggtcatcaccggcaagggaaaccttgacgggcagggcccattcgtgtggagcaagaactcctgcaccaagaagtacgactgcaagatccttcccaactcattggtgatggacttcgtgaacaacggggaggtgtctggggtcacgctgctcaactccaagttcttccacatgaacatgtaccagtgcaaggacatgctgatcaaggacgtgaccgtgacggcgcccggggacagccccaacacggatggcatccacatgggcgacacatccgggatcaccatcaccaacaccgtcatcggcgtcggcgacgactgcatctccatcggccccgggacctccaaggtgaacatcactggcgtgacctgcggccctggccatggcattagcattggcagcctagggcggtacaaggacgagaaggatgtcacggacatcaacgtcaaggattgcactcttaagaagacgaccttcggcgtccgcatcaaggcgtacgaggacgccgcctccgagctcaccgtctccaagatccactacgagaatgtcaagatggaggactcgaccaaccccatcttcatcgacatgatgtactgccccaacaagttgtgtactgccaacggcgcctccaaggtcaccgtcaaggacgtcaccttcaagaacatcaccggcacctcctccaccccggaggccatcagcctgctctgcactgccaagatccaatgcaccggcgtcaccatggacgacgtcaacgtcgagtatagtggcaccaacaacaagaccatggatatatgcacgaacaccaagggctgcaccaagggttgcctcaaggagcttgcatgcttctag

SEQ ID NO: 137756 - DNA, 1161 bp, Zea Mays
atggcgtacacagacaatgcgatgagagccttgttcctcctagcgctcttctgcgtcgtgcatggtgagaaggaagagtcaaagggcatcgatgcgaaagcgtccgggcccggtgggtccttcgaaatcaccaagttgggcgcctccggcaacgggcccagccgtgtggagcaagaactcctgcaccaagaagtacgactgcaagatccttcccaactcgctggtgatggacttcgtgaacaatgggggaggtgtccggggtcacgctgctcaactcccaatttcttccacatgaacatgtaccggcgcaaggacatgctgatcaaggacgtgaccgtgatggcgcccggggatagccccaacacggatggcatccacatgggtgactcatccgggatcaccatcaccaacaccgtcattggcgtcggcgacgactgcatctccatcggccctgggacctccaaggtgaacatcaccggcgtgacctgcggccccggccacggcatcagcatcggcagcctagggcggtacaaggacgagaaggacgtcacggacatcaacgtcaaggattccactcttaagaagaagatattcgacgtccgcatcaaggcgtacgaggacgccacctccgttctcaccgtctccaagatccactacgagaatatcaagatggaggactcagccaaccccatcttcatcgacatgaagtactgccccaacaagttgtgtactgccaacggcgcctctaaggtcaccgtcaaggacgtcaccttcaagaacatcaccgacacctcctccaccccggaggccgttagcctgctctgcactgccaagatcccatgcaccggcgtcaccatggacgacgtcaacgtcgagtatagcggcaccaacaacaagaccatggctatatgcacgaacgccaagggcagcaccaagggttgcctcaaggatcttgcatgcttctagacccttcgtcgactgacccatctctctagttataatttttctctcgtccttgcattgcccattagatgctatccattggtaatgcacaaaagtaaaacgacagacatccgacagctatattatgttcgacggtgtaacaccctgaatttgagggtataaaatttcttctctaaatgccaaccaaattcaggtgtt

SEQ ID NO: 137757 - DNA, 2258 bp, Zea Mays
tcatgtctgatgagaattaacataaaggctcaattgggtcctgaattaataatagagtgaaaattaatccagaggctctattagaaccttcaattagtaataccaagatatatataagatagtagagtatagtttaaatgttggcattgttcattctttcttttgttatttaatttatgctttccacagtggttagtggttacgtctgaagggtccaaataatgcatgaagagtttgaggacaagaagtctgccctaaaatagcgatgcaaaggcatggtgtccaagccatacatatagcgcactaattttatcagcagaacagtggtatttataggtcctagtgcccaggcaacaagagacacaaataaagcatcgatcacgacaagatggcgtgcacaaacaatgcgatgagagccttgttcctcctggtcctcttctgcatcgtgcatggtgagaaggaagagtcaaagggcatcgatgcgaaagcgtccgggcctggtgggtccttcgacatcaccaagttgggcgcctccggcaatggcaagacagacagcacgaaggctgtgcaggaggcatgggcatcggcgtgcggcggcactgggaagcagacaatcctcatacccaagggcgacttccttgtcggacaactcaactttacaggcccttgcaagggcgacgtgaccatccaggtggatggcaatctgctggcgaccacggacctaagccagtacaaggaccatggtaattggatcgagattctacgcgtggataacctggtcatcaccggcaagggaaaccttgacgggcagggcccagccgtgtggagcaagaactcctgcaccaagaagtacgactgcaagatccttcccaactcgctggtgatggacttcgtgaacaacggggaggtgtccggggtcacgctgctcaactccaagttcttccacatgaacatgtaccggtgcaaggacatgctgatcaaggacgtgaccgtgacggcgcccggggacagccccaacacggatggcatccacatgggcgactcatccgggatcaccatcaccaacaccgtcattggcgtcggcgacgactgcatctccatcggccccgggacctccaaggtgaacatcaccggcgtgacctgtggccctggccacggcatcagcatcggcagcctagggcggtacaaggacgagaaggacgtcacggacatcaacgtcaaggattgcactcttaagaagacgatgttcggcgtccgcatcaaggcgtacgaggacgccgcctccgtgctcaccgtctccaagatccactacgagaatatcaagatggaggactcagccaaccccatcttcatcgacatgaagtactgccccaacaagttgtgtaccgccaacggcgcctccaaggtcaccgtcaaggacgtcaccttcaagaacatcaccggcacctcctccaccccggaggccgttagcctgctctgcactgccaaggtcccatgcaccggcgtcaccatggatgacgtcaacgtcgagtatagcggcaccaacaacaagaccatggctatatgcacgaacgccaagggcagcaccaagggttgcctcaaggagcttgcatgcttctagaccctccgtcgactgacccatctctctagttataatttttctctcgtccttgcattgcccattagttgctatccattggtaacgcacaacagtaaaacgacagacatccgacagctatattatgttcgacggtgtaacaccctgaatttgagggtataaaatttcttctctaaataccaaccaaattcaggtgttagctcttgtctctctctcttttccttttgattaaaagtaagtgaattaggcgaggttttaattatttattttgtcaaaacttatgtgagtcatgaaatgttgcatcatgctgagcctaaattattcttttgtttgatgcacatgtttgaattgatttgaatttgaaatttggtttgagtttgatttgaaaaccatagagaaattaaaatagaaaagacattagaaatttcaaaaaaagaaaaggaaagcagctcgaacctcctccctcctcggcgtttcggtccatccagcccaattaactgcccgcattcgctgacaagcgggccccacctatcggcgccatgccccgctcgccctctccctctcttctcagtgggaccgccccgtcagcaccacgccctactcgcccgcacgttccctcgctgactcccgacccctattg

SEQ ID NO: 137758 - DNA, 1312 bp, Zea Mays
acacgaataaagcatcgatcacgacaagatggcatgcacagacaatgcgatgagagacttgttcctcctggtcctcttctgcatcgtgcatggtgagaaggaagagtcaaagggcatcgatgcgaaagcgtccaggcctggtgggtccttcgacatcaccaagttgggcgcctccggcaatggcaagacagacaacacgaaggctgtgcaggaggcatgtgcatcggcgtgcggcggcactgggaagcagacaatcctcatacccaagggcgtttttttttgtcggacaactcaacttcacatgcccttgcaagggcgacgtgaccatccaggtggatggcaatctgctggcgaccatggacctaagccagtacaaggaacatggtaattggatcgagattctacgcgtggataacctggtcatcaccggcaagggaaaccttgacgggcagggcccagccgtgtggagcaagaactcctgcaccaagaagtacgactgcaagatccttcccaactcgctggtgatgtacttcgtgaacaacggggaggtgtccggggtcacgctgctcaactccaagttcttccacatgaacatgtaccagtgcaagaacatgctgatcaaggacgtgaccgtgacggcgcccggggacagccccaacacggatggcatccacatgggcgactcatccgggatcaccatcaccaacaccgtcattggcgtcggcgacgactgcatctccatcggccctgggacctccaaggtgaacatcactggcgtgacaaggacgagaaggacgtcacggacatcaacgtcaaggattgcactcttaagaagacgatgttcggcgtccgcatcaaggcgtacgaggacgccgcctccgtgctcaccgtctccaagatccactacgagaatatcaagatggaggactcagccaaccccatcttcatcgacatgaagtactgccccaacaagttgtgtaccgccaacggcgcctccaaggtcaccgtcaaggacgtcaccttcaagaacatcaccggcacctcctccactccggaggccgttagcctgctctacacagccaaggtcccatgcaccggcgtcaccatggatgacgtcaacgtcgagtatagcggcaccaacaacaagaccatggctatatgcacgaatgccaagggcagcaccaagggttgcctcaaggagcttgcatgcttcttgaccctccgtcgactgacccatctctctagttataatttttctctcgtccttgcattgcccatttgttgctatccattggtaacggacaacagtaaa

SEQ ID NO: 137759 - DNA, 2009 bp, Zea Mays
agtggtatttataggtcttagtgcccaggcaacaagagacacgaataaagcatcgatcacgacaagatggcgtgcacagacaatgcgatgagagccttgttcctcctggtcctcttctgcatcgtgcatggtgagaaggaagagtcaaagggcatcgatgcgaaagcgtccgggcctggtgggtccttcgacatcaccaagttgggcgcctccggcaatggcaagacagacagcacgaaggctgtgcaggaggcatgggcatcggcgtgcggcggcactgggaagcagacaatcctcatacccaagggcgacttccttgtcggacaactcaacttcacaggcccttgcaagggcgacgtgaccatccaggtggatggcaatctgctggcgaccacggacctaagccagtacaaggaacatggtaattggatcgagattctacgcgtggataacctggtcatcaccggcaagggaaaccttgacgggcagggcccagccgtgtggagcaagaactcctgcaccaagaagtacgactgcaagatccttcccaactcgctggtgatggacttcgtgaacaacggggaggtgtccgggatcacgctgctcaactccaagttcttccacatgaacatgtaccagtgcaagaacatgctgatcaaggacgtgaccgtgacggcgcccggggacagccccaacacggatggcatccacatgggcgactcatccgggatcaccatcaccaacaccgtcattggcgtcggcgacgactgcatctccatcggccctgggacctccaaggtgaacatcactggcgtgacctgcggccccggccacggcatcagcatcggcagcctagggcggtacaaggacgagaaggacgtcacggacatcaacgtcaaggattgcactcttaagaagacaatgttcggcgtccgcatcaaggcgtacgaggacgccgcctccgtgctcaccgtctccaagatccactacgagaatatcaagatggaggactcagccaaccccatcttcatcgacatgaagtactgccccaacaagttgtgtactgccaacggcgcctccaaggtcaccgtcaaggacatcaccttcaagaacatcactggcacctcctccaccccggaggccattagcctgctctgcactgccaaggtcccatgcaccggcgtcaccatggatgacgtcaacgtcgagtatagtggcaccaacaacaagaccatggctatatgcacgaacgccaagggcagcaccaagggttgcctcaaggagcttgcatgcttctagaccctcagtcgactgacccatctctctagttataatttttctctcgtccttgaattgtccattagttgctatccatttgtaacgcacaacagtaaaatgatagacatccaacagctatattatgttcgacggtgtaacaccctgaatttgagggtataaaatttcttctctaaatgccaagcaaattcaggtgttacctcttgtctctctctctcttttccttttgattaaaagtaagtgaattaggcgagggtttaattatttattttgtcaaaacttatgtgagtcatgaaatgttgtatcatgctgagcctaaattattcttttgtttgatgcacatgtttgaattggtttgaatttgaaatttggtttgagtttgatttgaaaaccataaagaaattaaaatagaaaagacattagaaatttcaaaaaaagaaaaggaaagcagctcgaacatcctccctcattggcctttcggcccatccagcccaattaacctcccgcatccgctgacaagcgggccccacctatcggcgccacgccccgctcgccctctccctctcttctcagtgggaccgccccatcagcaccgtgccctgctcgcccacgcgttccctcgctgactcgcggcccctattgtcagacccatcccctcccctgcaactgtcgcgctcgcgcccatggcgtgcgcccatgcggtcaaagcacgc

SEQ ID NO: 137760 - DNA, 2278 bp, Zea Mays
tcatgtctgatgagaattaacgtaaaggctcaattgggtcctgaattaataatagagtgaaaattaatccagaggatctattagaaccttcaattagtaataccaagatatatataagatagtagagtatagtttaaatgttggcattgttcattctttcttttgttatttaatttatgctttccacggtggttggtggttacgtctgaagggtccaaataatgcatgaagagtttgaggacaagaagtctgccctaaaaatagcgatgcaaaggcatggtgtccaagccatacatatagcgcactaattttatcagcagaacagtggtatttataggtcctagtgcccaggcaacaagagacacgaataaagcatcgatcacgacaagatggcgtgcacagacaatgcgatgagagccttgttcctcctggtcctcttctgcatcgtgcatggtgagaaggaagagtcaaagggcatcgatgcgaaagcgtccgggcctggtgggtccttcgacatcaccaagttgggcgcctccggcaatggcaagacagacagcacgaaggctgtgcaggaggcatgggcatcggcgtgcggcggcactgggaagcagacaatcctcatacccaagggcgacttccttgtcggacaactcaacttcacaggcccttgcaagggcgacgtgaccatccaggtggatggcaatctgctggcgaccacggacctaagccagtacaaggaacatggtaattggatcgagattctacgcgtggataacctggtcatcaccggcaagggaaaccttgacgggcagggcccagccgtgtggagcaagaactcctgcaccaagaagtatgactgcaagatccttcccaactcgctggtgatggacttcgtgaacaacggggaggtgtccggggtcacgctgctcaactccaagttcttccacatgaacatgtaccagtgcaagaacatgctgatcaaggacgtgaccgtgacggcgcccggggacagccccaacacggatggcatccacatgggcgactcatccgggatcaccatcaccaacaccgtcattggcgtcggcgacgactgcatctccatcggccctgggacctccaaggtgaacatcactggcgtgacctgcggccccggccacggcatcagcatcggcagcctagggcggtacaaggacgagaaggacgtcacggacatcaacgtcaaggattgcactcttaagaagacaatgttcggcgtccgcatcaaggcgtacgaggacgccgcctccgtgctcaccgtctccaagatccactacgagaatatcaagatggaggactcagccaaccccatcttcatcgacatgaagtactgccccaacaagttgtgtaccgccaacggcgcctccaaggtcaccgtcaaggacgtcaccttcaagaacatcactggcacctcctccaccccggaggccattagcctgctctgcactgccaaggtcccatgcaccggcgtcaccatggatgacgtcaacgtcgagtatagcggcaccaacaacaagaccatggctatatgcacgaacgccaagggcagcaccaagggttgcctcaaggagcttgcatgcttctagaccctccgtcgactgacccatctctctagttataatttttctctcgtccttgcattgcatattagttgctatccattggtaacgcacaacagtaaaacgacaaacatccaacagctatattatgttcgacggtgtaacaccctgaattttagggtataaaatttcttctctaaatgcaaaccaaattcaggtgttacctcttgtctctctctctatcttttccttttgattaaaagtaagtgaattaggcgagggtttaattatttattttgtcaaaacttatgtgagtcatgaaatgttgtatcatgctgagcctaaattattcttttgtttgatgcacatgtttgaattggtttgaatttgaaatttggtttgagtttgatttgaaaaccataaagaaattaaaatagaaaagacattagaaatttcaaaaaaagaaaaggaaagcagctcgaacctcctccctccttggcctttcggcccatccagcccaattaacctcccgcatccgctgacaagcgggccccacctatcggcgccacgccccactcgccctctccctctcttctcagtgggaccgccccattagcaccgtgccctgctcgcccgcgcgttccctcgctgactcgcggcccctattgtcagacccatcccct

SEQ ID NO: 137761 - DNA, 2280 bp, Zea Mays
tcatgtctgatgagaattaacataaaggctcaattgggtcctgaattaataatagagtgaaaattaatccagaggctctattagaaccttcaattagtaataccaagatatatataagatagtagagtatagtttaaatgttggcattgttcattctttcttttgttatttaatttatgctttccacagtggttagtggttacgtctgaagggtccaaataatgcatgaagagtttgaggacaagaagtctgccctaaaatagcgatgcaaaggcatggtgtccaagccatacatatagcgcactaattttatccgcagaacagtggtatttataggtcctagtgcccaggcaacaagagacacaaataaagcatcgatcacgacaagatggcatgcacaaacaatgcgatgagagccttgttcctcctggtcctcttctgcatcgtgcatggtgagaaggaagagtcaaagggcatcgatgcgaaagcgtccgggcctggtgggtccttcgacatcaccaagttgggcgcctccggcaatggcaagacagacagcacgaaggctgtgcaggaggcatgggcatcggcgtgcggcggcactgggaagcagacaatcctcatacccaagggcgacttccttgtcggacaactcaacttcacaggcccttgcaagggcgacgtgaccatccaggtggatggcaatctgctggcgaccacggacctaagccagtacaaggaccatggtaattggatcgagattctacgcgtggataacctggtcatcaccggcaagggaaaccttgacgggcagggcccagctgtgtggagcaagaactcctgcaccaagaagtacgactgcaagatccttcccaactcgctggtgatggacttcgtgaacaacggggaggtgtccggggtcacgctgctcaactccaagttcttccacatgaacatgtaccggtgcaaggacatgctgatcaaggacgtgaccgtgacggcgcccggggacagccccaacacggatggcatccacatgggcgactcatccgggatcaccatcaccaacaccgtcattggcgtcggcgacgactgcatctccatcggccccgggacctccaaggtgaacatcaccggcgtgacctgcggccctggccacggcatcagcatcggaagcctagggcggtacaaggacgagaaggacgtcacggacatcaacgtcaaggattgcactcttaagaagacgatgttcggcgtccgcatcaaggcgtacgaggacgccgcctccgtgctcaccgtctccaagatccactacgagaatatcaagatggaggactcagccaaccccatcttcatcgacatgaagtactgccccaacaagttgtgtactgccaacggcgcctccaaggtcaccgtcaaggacgtcaccttcaagaacatcaccggcacctcctccaccccggaggccgttagcctgctctgcactgccaaggtcccatgcaccggcgtcaccatggatgacgtcaacgtcgagtatagcggcaccaacaacaagaccatggctatatgcacgaacgccaagggcagcaccaaaggttgcctcaaggagcttgcatgcttctagaccctccgtcgactgacccatctctctagttataatttttctctcgtccttgcattgcccattacatgctatccattggtaacgcacaacagtaaaacgacagacatccgacagctatattatgttcgacggtgtaacaccctgaatttgagggtataaaatttcttctctaaataccaaccaaattcaggtgttacctcttgtctctctctctctctcttttccttttgattaaaagtaagtgaattaggcgagggtttaattatttattttgtcaaaacttatgtgagtcatgaaatgttgcatcatgctgagcctaaattattcttttgtttgatgcacatgtttgaattggtttgaatttgaaatttggtttgagtttgatttgaaaaccatagagaaattaaaatagaaaagacattagaaatttcaaaaaaaagaaaaggaaagcagctcgaacctcctccctccttggcctttcggcccatccagcccaattaaccacccgcatccgctgacaagcgggccccacctatcggcaccacgccccgctcgccctctccctctcttctcagtgggaccgccccgtcagcactgcgccctgcttgcccgcgcgttccctcgctgactcgcggcccctattgtcagacccatcccct

SEQ ID NO: 137762 - DNA, 125 bp, Zea Mays
atttactttctgtgatcataattactgtattttaagtaggctaatcactgttcatgctatggaaaataggaagtttaatttaaaattccgttatgctattgattcacgtagttaattgtttaccc

SEQ ID NO: 137763 - DNA, 1770 bp, Zea Mays
taccaagatatatataagatagtagagtatagtttaaatgttggcattgttcattctttcttttgttatttaatttatgctttccacagtggttagtggttacgtctgaagggtccaaataatgcatgaagagtttgaggacaagaagtctgccctaaaatagcgatgcaaaggcatggtgtccaagccatacatatagcgcactaattttatcagcagaacagtggtatttataggtcctagtgcccaggcaacaagagacacaaataaagcatcgatcacgacaagatggcgtgcacaaacaatgcgatgagagccttgttcctcctggtcctcttctgcatcgtgcatggtgagaaggaagagtcaaagggcatcgatgcgaaagcgtccaggcctggtgggtccttcgacatcaccaagttgggcgcctccggcaatggcaagacagacagcacgaaggctgtgcaggaggcatgggcatcagcatgcggcgacaccgggaagcaaacaatcctcatacccaagggcgacttccttgtcggacaactcaacttcacaggcccgtgcaagggcgacgtgaccatccatgtggatggcaatctactggcgaccatggacctaagccagtacaaggaacatggtaattggatcgagattctacgcgtggataacctggtcatcaccggcaagggaaaccttgacggattgggcccagccgtttggagcaagaactcctgcgccaagaagtacgactgcaagatccttcccaactcactggtgatggacttcgtgaacaatgaggaggtgtccggggtcactctgctcaactccaagttcttccacatgaaagcacttacttctaggggaagggtcaaggcagaggcagaagaaatgtaccagtgcaaggacatgctgatcaaggacgtgaccgtgacggcgcttggggacagccccaacacggatggcatccacatgggcgactcatccgggatcaccatcaccaacaccgtcatcagcgtcagcgacgattgcatctccttcagccccgggacctccaaggtgaacatcaccggcgtgacctacggctccggccacggcatcagcatcggcagcctagggcggtacaaggatgagaaggacgacacaaacatcaacgtcaaggattgcactcttaagaagacgaccttcggcgtccgcatcaaggcgtacgaggacgccgcttccgtgctcaccgtctccaagatccattatgagaatatcaagatggaggactcagccaaccccatcttcatcgacatgaagtactgccccaacaagttatgtactgccaacgacgcctccaaggtcaccgtcaaggacgtcaccttcaagaacatcaccggcacctcctccaccccggaggccgtcagcctgctctgctctgccaagatcccatgcaccggcgtaaccatggacgacatcaacgtcgagtatagcggcaccaacaacaagaccatggctatatgcacgaacgccaagggcagcaccaagggttgcctcaaggagcttgcatgcttctagaccctccgtcgactgacccatctctctagttataatttttctctcatccttgcattgcccattagttgctatccattggtaacgcacaacagtaaaacgatagacatccgacagctatattatgttcgacggtgtaacaccctgaatttgagggtataaaatttcttctctaaatgccaaccaaattcaggtgttaccttttgtctc

SEQ ID NO: 137764 - DNA, 2143 bp, Zea Mays
atggaggcagaagtcattattgcatctgtagccatgtgcattcatgggagaggtgtggaatctattatgtggatgtggataatttggacttgtgcatggtgattcttcttggcgttaagaatttagttatttgtttacttgctgcaatttactgttcaaaagaaagaaaggagttctgaaccatgtggttgtgtaagcacagttgatttacaatgtcctatttgttgttgttatgtttacttgctgagatgtattatctcacatcttgcattgtttgatgcaggcacctcacatcttgttattgggaatagaaggatgtagcagcacgaccactacacctttaataaaggaatcaccatttaataatgctgttaatcagaattggtcaagtctagtgaattgccttgttcttggttgagcgtttatcttggggtgggctgagttcctcatcccatctgttttgcttcagttggggcataaatgagtttaccactttgcatttagcttctactatgtgaattatatgtctttatatcctgtatgaacttcatgttttcccctccttattatgttagtttcaaaggaggtgctgccagattttgctgtatgtcctgtcgttattacgcctcttgtgttgagtaagttaggtgggtggggtttttggtaatatccattgtgtgtgactagtggggtgttacatatttataggtcctagtgcccaggcaacaagagacacgaataaagcatcgatcacgacaagatggcatgcacagacaatgcgatgagagacttgttcctcctggtcctcttctgcatcgtgcatggtgagaaggaagagtcaaagggcatcgatgcgaaagcgtccaggcctggtgggtccttcgacatcaccaagttgggcgcctccggcaatggcaagacagacaacacgaaggatgtgcaggaggcatgtgcatcggcgtgcggcggcactgggaagcagacaatcctcatacccaagggcgacttccttgtcggacaactcaacttcacatgcccttgcaagggcgacgtgaccatccaggtggatggcaatctgctggcgaccatggacctaagccagtacaaggaacatggtaaatggatcgagattctacgcgtggataacctggtcatcaccggcaagggaaaccttgacgggcagggcccagccgtgtggagcaagaactcctgcaccaagaagtacgactgcaagatccttcccaactcgctggtgatgtacttcgtgaacaacggggaggtgtccggggtcacgctgctcaactccaagttcttccacatgaacatgtaccagtgcaagaacatgctgatcaaggacgtgaccgtgacggcgcccggggacagccccaacacggatggcatccacatgggcgactcatccgggatcaccatcaccaacaccgtcattggcgtcggcgacgactgcatctccatcggccctgggacctccaaggtgaacatcactggcgtgacaaggacgagaaggacgtcacggacatcaacgtcaaggattgcactcttaagaagacgatgttcggcgtccgcatcaaggcgtacgaggacgccgcctccgtgctcaccgtctccaagatccactacgagaatatcaagatggaggactcagccaaccccatcttcatcgacatgaagtactgccccaacaagttgtgtaccgccaacggcgcctccaaggtcaccgtcaaggacgtcaccttcaagaacatcaccggcacctcctccaccccggaggccgttatcctgctctacacagccaaggtcccatgcaccggcgtcaccatggatgacgtcaacgtcgagtatagcggcaccaacaacaagaccatggctatatgcacgaatgccaagggcagcaccaagggttgcctcaaggagcttgcatgcttcttgaccctccgtcgactgacccatctctctagttataatttttctctcgtccttgcattgcccatttgttgctatccattggtaacggacaacagtaaaacgacagacaaccaacagcaatattatgttcgacggtgtaacaccctgaatttgagggtataaaatttcttctctaaatgccaaccaaattcaggtgtta

SEQ ID NO: 137765 - DNA, 143 bp, Zea Mays
cgtccttgcattgcccattagttgctatccattggaaacgcacaacagtaaaacgacagacatccgacagctatattatgttcgacggtgtaacaccctgaatttgagggtataaaatttcttctctaaatgccaaccaaatt

SEQ ID NO: 137766 - DNA, 2595 bp, Zea Mays
tttgtgaatatgagcaaagaaattttatacccccaaattcagggtgttacaatgatatagagataaagaagcagaaacaactttgtatcggcctagtcaaagcttgtaggtttgtagctaccagagatgtggtatcagatcaaaactccttcagtaatgacaacaagatcgacagaccaaacatacaagattaaaacatagtggtagttctgcaaaatacctccgagacccaattttaatcacacaacacagctgaaacaaaatagctccagactgagcaaaccacaaaggttatgttcaagagatggacacctgcagctgagagcagtagctccaaacctatcagaagtttttttatcttcaaagggggctacatagcacaaggagttgctggatcttctcaacggagggaacgaaatatctgctcgcacaaggtgtcagtaatcacatattgtttgtttcacatattatccaggatactaagtattcttaaaaaatattgaacaatcaacctagtttcctctctgaagttctgtgatcccaatctataattcattgatttctccttttccagcagacaacatcactggctatctatgtaatggtgcttactcacattatccaagcccataataactaatgactttgattactttagataaaaggagtggcaaacttacgttaatgatttcccatgaaatacaattggtggagctatggcagcaattatgcaaaaacaaatgtgtatctgcaccattcttcagcgcctcttccctcctcttgatatcctacagccacaaaacagaaggcatgagaacaccaccgatcaagcacaaccacctaaaagttcgttaatgaactgaaggatcataagcaactgattgtaaaaactatgagtacgtggcataaaaacatacattataagaataaaagattctaaacattgtgaaagctcaattataaaaaacattctaaacatattgtatgtcaaatagtagtggagcagtgaagcttcatcatataagccccatgcgtataaaaagattctaaacattgtgatttgtgaaagccgaactatgctaaacaaccaagttcatcaaggcttgtctaaacagatctcaaatatatgtgaaaaatcaacttcacccaaacaaattttacttatgaaaatgaacacaatattctggaatattacacagtcctttcaaggcattagtacgtaaccccaacaaatgcaattaggcattaatttaagggaaacttgatggccagtaaaacacatgaatattttgtacagtacaaccacctaatctcttacccatcattaaaatagtagtagctatattatgaaatgaaaacacctgagcaaatgcctgaaactctcagctgatgatgcgccgagaggtggcggatggagaagacgccctgtgcttgctagatccagctaccgctgcccgctgtccttctccttgccttccgctgtagccgccggagaagtgggcagtggaggcctggcggggaggcggggcagcgcgcggcagctgaagacggcggggaaagggcggtcggctactcgggcagcgctcgcccatggcagccataggggcagtggaggacgggcggggtggcagagcggcacgaggtggctgggaggcgcggccgacagtgggggccgagtggtgcacggagacgacgacgagaggtgggggcgatggcgactgtggatctggatggaccagagcgagcggtttaggtttttgcgttgttgatggggataggggtggtggtggatggtggattcgtgggctgtgcgggggtgcccaactccatcaacttctgttggattttctggccgtcgatgacaaagaaattacagggacatataacacaattgatgtgaattatacatacctttatgaagtagtggttgatattttgatgtggaaacaagctgctgcttcaataatgtggaaggttgatcgacccccaaccaatccgaagcgtttaatcattgagtcaagtcaagaatgtttcagtgttgacattccgcgctcgactgacattgtagaccctacacatacgcggtccgatggtgatcctccgcagcatagaaagagaggtgttgcagccgatgctaaaaagattcctatgcctaatgtggatgatgatgatgatgactttgagccaccaaaaaagaagtgcaatatctcaatggatgccccaaataagacgcaaagactcaacatcagatgcaacccaggagatgttcttgcgtccattcagatattgaatgaaaggcaacgtcaagctatagtcagaaaaggattctctagtattcttgacatgacaattgatgcaattggatgtcgaacacttctttgttggctcatgcagaagctagaccccagagacatgactcttcgtattggtccagacaaagaactcaaaatcaccaagcagactgtccatcagatattgggtcttccaaatttgggtggtggaaagccactcaatattgatgaagtgaacactgcggcaacacttcgggcctccttgaatattagcaaggatgaatttgttattacaaagctctag

SEQ ID NO: 137767 - DNA, 243 bp, Zea Mays
tataacaaagatggcagatgccatgccataaatcatgtcaatatatgtgcatgctgaaccaataacagaaaacacaattgaaaaaacaaaatcatcagaacacttggcttctgctataaaaatgcttcttatgcttctttgtagcctatacatagttcctccatatgcttttatgattcctgaaagaaataggataagtgagatgaaaatgaaagaatacagtccaaaactttagtaacttac

SEQ ID NO: 137768 - DNA, 2195 bp, Zea Mays
cttttcgccgttctctgtcagtttgtcaccctgcctctgacgaaaactctcctctgactccgctccacccccttctctcacttgtctatcggcggccgtcacctccgctgggctgctggcctccccactttgcagttgctgcacaggcaagacacggaggcaggcaccacgagtccacgacgcccgctcgcgcgctccgtgaatcccctcgtgactcgtgagggctcgaggcccgacgggaggacgaggaggcaagaaccctagccccggcgccggcggcccgtaaggctgctgagtgaaaatgggagtggcaggtcacaacgatccattgttaggtgaaacgacatgtgggtctttgctgcagcaacttcagctgatatgggatgaggttggcgaaagtgatgaagatcgtgacaagatgttacttcagctagagcaagagtgcttagatgtttataggagaaaggttgatcaggcttctagctccaggtcatgtctcctccaacagctttccaactccaaatcggaactgactagactcctttctgcattaggagagtcatctatttctggtgctcctgacaagacatctggtacaatcaaggagcaactagcagctatatcaccatctttagagacactccgcaggaaaaaagagagtagggtgaaagagtttgctcatgtacaacttcagattcagatacttcgtgatgaaattgctggggatctacatattggtgaacagttggaaacaccccatgttaatgcggatgatctttcagtgaggagattaaatgaatatctttctgaactacaagccctgcaaaaggaaaagagtactaggctctcaaggattcttgaatccgtgagttcagtgcacgatctctgttctgtacttggcatggattttgtgggcactgttactaaagttcatccaagtcttgatgactctgttggtgtccaatccaagagcattagtggcgaaacaatatccaagctgtctaaaatggtgattgtacttgaagaagaaaaatcgaagaggtttgcaaagattcaagctctagcttcccagctatctgatctttggaacttaatggattctcctgtggaggaacagcaaccttttcgtcacgtaacatgcataatgtcctcaacattggatgatgtgatagttccaggagctctggctcttgatgtaattcagcaggcggaactcgaagttgaaaggcttgatcagctaaaagctagtaggatgaaggatattgcattcaagaaacagactgaacttgaagatatatatgcccgggctcatgttgcagtagattctagtgctgcaagagataggataatgtctattattgagtccagtagtttcgagccttcagaactactggctgatatggagaaccagatacttaaagcaaatgaggagtccttaagcagaaaggacatattggagagggttgataggtggatgtcagcatgtgaagaagaaagctggcttgaagactacagccgggacgataacaggtacagtgcaactcggggtgcacatctgaatctgaagcgtgcagaaaaggcccgtgttttggtcaataaaattccggctattgttgacacactgcttgcaaagacccgggcatgggaacaagagcatggcgtggccttcacctacgacggcgtccctcttcttgcgatgctggacgaatacaaaatcctgaggcaggagaaggaagacgagaagcgacgaatgagggaccagaaaaagatgaacgaacagctagccgccgaacaggagaagctgttcgggtcaaaaccgagccccgcgcggccgcagtcgtcctcgaggaaggtggctggcgcacggaccaacggcggtggcacgccagctcgcaggctgtcggccctccagagcggcggcaggaccgctagccgggatgggaggagggatgcgagcaggcccgtggcccccgtgaactacgtcgccatcgccaaggaggacgtggcctcgcaggcgtccagcaaccacactgggccgtccaccccctgaccggccgtgccagcagtaactgaactgttgtggcggtgcttagatatatatataccagtgcagtgcagtagtcagagctgattgtagatcggataatggaaaaaaacaaacgaagctggatatggtatcacacattatcagttgt

SEQ ID NO: 137769 - DNA, 2012 bp, Zea Mays
atggctgcgtcctcctgctgccaggcccgctggctgctccccctgctgctgcttgctgctgccgcgggtgctcttggtgcagagggcgcctcctccattgtgcagctggacgtggagtccctgctcccgtccgcagccgctccttgccccacccctcaagcagagcaaaaacaaggtgccgcgccgcccacaaggatgcccgtcgtgcaccagcacggcccgtgctcgccgctggccgacaacaggaacgggaaggcgccgtcccacgcggagatcctcgccgcggaccagcgccgcgccgagtacatccaccgccgcgtggccgagaccaccgggcgggcgagacgacggaagcagggcgcaccggtcgagctccggcccggcacgccgccgtcgtcgatcgtcgtcccctcgtcgtcctccgccacgtcgacgacggacctgccggcgtcgtacggggtcgcgctgggcacgggaaactacgtggtgcccgtccgcctcggcacgccggcggagcggttcacggtggtgttcgacaccggcagcgacacgacgtgggtgcagtgccagccgtgcgtggcctactgctaccggcagaaggagcctctcttcgaccccaccaagtccgccacctacgccaacatctcctgctcctcgtcctactgctccgacctctacgtcagcggctgctccggcggccactgcctgtacggcatccagtacggcgacggctcctacaccatcggcttctacgcccaagacaccctcaccctggcctacgacaccatcaagaatttccggttcgggtgcggcgagaagaaccgtgggctgttcgggagggcggcggggctgctgggcctcggccgcggcaagacgtcgctgccggtgcaggcgtacgacaagtacggcggcgtgttcgcgtactgcctcccggcgacgtcggccgggacggggttcctggacctggggccgggcgcgccggcggcgaacgcgcgcctgacgccgatgctggtggacaggggcccgacgttctactacgtggggatgacgggcatcaaggtgggcgggcacgtgctgcccatcccgggctccgtcttctccaccgccggcacgctggtggactccggcacggtgatcacgcggctcccgccgtcggcgtacgcgccgctgcggtcggcgttctccaaggcgatgcagggcctggggtacagcgcggccccggcgttctcgatcctcgacacctgctacgacctgacggggcacaagggggggagcatcgcgctgcccgcggtgtcgctggtgttccagggcggcgcgtgcctggacgtggacgcgtcggggatcctgtacgtggcggacgtgtcgcaggcgtgcctggcgttcgcgcccaacgctgacgacaccgacgtggccatcgtcgggaacacgcagcagaagacgcacggcgtactgtacgacattggcaagaagatcgtcgggttcgccccgggagcttgctgatccggccatggtttgtgaaaaactccagatcatctgcatccaccaaagtggctgctgagtgaaaatgggagtggcaggtcacaacgatccattgttaggtgaaacgacatgtgggtctttgctgcagcaacttcagctgatatgggatgaggttggcgaaagtgatgaagatcgtgacaagatgttacttcagctagagcaagagtgcttagatgtttataggagaaaggttgatcaggcttctagctccaggtcatgtctcctccaacagctttccaactccaaatcggaactgactagactcctttctgcattaggagagtcatctatttctggtgcttttattttcagcttcttcacaaatttaagccgaagttctgccaaacagacagcttctgcagcagcttatcagttcagctgcttctcaaaatgaaataaaagcagccaacaagcagaagctgctttttaccagcttatcagataagctgctttttcaataagcagcagctgta

SEQ ID NO: 137770 - DNA, 1731 bp, Zea Mays
gctcgcggagccggtagcaccccagacgcggccaaccgctagctaggccggtgccgccatggctgcgtcctcctgctgccaggcccgctggctgctccccctgctgctgcttgctgctgccgcgggtgctcttggtgcagagggcgcctcctccattgtgcagctggacgtggagtccctgctcccgtccgcagccgctccttgccccacccctcaagcagagcaaaaacaaggtgccgcgccgcccacaaggatgcccgtcgtgcaccagcacggcccgtgctcgccgctggccgacaacaggaacgggaaggcgccgtcccacgcggagatcctcgccgcggaccagcgccgcgccgagtacatccaccgccgcgtggccgagaccaccgggcgggcgagacgacggaagcagggcgcaccggtcgagctccggcccggcacgccgccgtcgtcgatcgtcgtcccctcgtcgtcctccgccacgtcgacgacggacctgccggcgtcgtacggggtcgcgctgggcacgggaaactacgtggtgcccgtccgcctcggcacgccggcggagcggttcacggtggtgttcgacaccggcagcgacacgacgtgggtgcagtgccagccgtgcgtggcctactgctaccggcagaaggagcctctcttcgaccccaccaagtccgccacctacgccaacatctcctgctcctcgtcctactgctccgacctctacgtcagcggctgctccggcggccactgcctgtacggcatccagtacggcgacggctcctacaccatcggcttctacgcccaagacaccctcaccctggcctacgacaccatcaagaatttccggttcgggtgcggcgagaagaaccgtgggctgttcgggagggcggcggggctgctgggcctcggccgcggcaagacgtcgctgccggtgcaggcgtacgacaagtacggcggcgtgttcgcgtactgcctcccggcgacgtcggccgggacggggttcctggacctggggccgggcgcgccggcggcgaacgcgcgcctgacgccgatgctggtggacaggggcccgacgttctactacgtggggatgacgggcatcaaggtgggcgggcacgtgctgcccatcccgggctccgtcttctccaccgccggcacgctggtggactccggcacggtgatcacgcggctcccgccgtcggcgtacgcgccgctgcggtcggcgttctccaaggcgatgcagggcctggggtacagcgcggccccggcgttctcgatcctcgacacctgctacgacctgacggggcacaagggggggagcatcgcgctgcccgcggtgtcgctggtgttccagggcggcgcgtgcctggacgtggacgcgtcggggatcctgtacgtggcggacgtgtcgcaggcgtgcctggcgttcgcgcccaacgctgacgacaccgacgtggccatcgtcgggaacacgcagcagaagacgcacggcgtactgtacgacattggcaagaagatcgtcgggttcgccccgggagcttgctgatccggccatggtttgtgaaaaactccagatcatctgcatccaccaaagtggtcagtgtttcacaaatgcagactgaagattcgtacttcgtgtctgtaagatggtacactttgtttgaaaaagaagaacgggataagtttaaaccacctcttcaatagttttttcgtcatctt

SEQ ID NO: 137771 - DNA, 501 bp, Zea Mays
gtcgtgagcggttgacggcgtggaggtcgtcggcgcggggtcgtcggcggtcgtggtcctcttaggtttctacacatagtgtctcacaactttcttcaaatactctaaaatttttatcacagcctatacatatgatatcatgacacggggacaagtttcatgattttctgactttgtttgtgttttatacaatttttaaacacgtggatgccaagttcacggccatgtttagtgagcatgttgctcgaagtttctggtacgcttctgaaatcggtcgtaacttatgctaagtaccatgaatatcatttttcatgcacggttttccaagtttcgagtgacctgcagttcaaatttgaattttccgaagaaattcaaataaacgaactaaatctactaacgattgaatctctgttataattgtccacaaatgatacatgtaggtctacatagtgtaggaacataccacaaaaagtttgggagacaaaatcaaaaaaataaaaa

SEQ ID NO: 137772 - DNA, 1905 bp, Zea Mays
gttctgtcgttctgtggctgagctccaaagtccaaagattagtgaatccaaaaggcgaccaaacagatcccccgctcctgtgctccgctcatgttagagaaccccctgggaaaacgcagcggagaaactctggagatcgaaaccccggcacgcagctaggcgaactgcacgcaactgcaggtcgacgtctgatccatttcttgtcgcttcagcttctggtgctggtcttcttccagttgcatcctggttacctgtgtcaaggggcggttggtgtctggtgtagttggagggcagagcttcgcgggcggcgaagaagaagagcagcagagagactctgctgacactgaccgagggagatatggcgaggaagctgagagagttgctgcagaagagcggcaaccgcgtatgtgccgactgcggcgcacctgatcccaaatgggcatcggctaacattggagtattcatttgcctaaagtgttctggtgttcacagaagcctcgggacacatgtttcaaaggtgctgtcagtcacactagatcaatggacggatgatgagatcaactccatgatagaagttggtggaaactcttatgccaatgctatatatgaagcatttctgccagagggctatcagaagccgcatccagattctagccaagaagagagagctgatttcatcaggtcgaagtatgagttgcaagaattcctgaagccaagcctaaggttagtttccagcaataagggctctttagaggcgaccagctctcgaaagcatatggataattctgtgtctctttctgctagtttcagcagtgaggctggaatggttgagttcattggaatactaaaagttaaagtgataagagggactaaactagctgtaagagacctgatgagtagtgacccctatgttgtactgaccctaggacagcagaaagcaaaaacttctgtgagtaaacgtaatctgaatcctgtttggaatgaagagcttaagctgtcagttccccagcactacgggcctctgaaacttcaagtgttcgaccacgacatgctatcgaaggatgacgagatgggtgacgcagagattgacctgcagccgatgatcagtgcagctacagcgtttggcgaccctgatctgctcgcggacatgcagatcggcaagtggctcaggtccccagataatgcgctggcaagggacagcgccgtcaatgtcgttggtggcaaggtcaagcaggaggtctctctgaggctgcagaacgtggaatcgggggaggtggaactggagctggagtggataccactcaatcagtagagtttaaatccacctgtaggctatatgtgatgcatgtttcatgtgtgcgacacaagtcctgatgctcttgatcatcttcagtttgtcagggtgcctgcagtgttgtagactatctttgcggttgtagaatcagtgtcggagcccgggcaccttgactggctcggcaactcggtacaatgatagtttgaggactcaatgacttgttagtacaagtatgagactgttgtttgtatgcgtttgctggtaatgaaatcttaggtgggggaccctccccctcaactttttaattgacttgttaaaagaaaaggactcaataacttacaagtcataactcatgacaatcttgattcaataaaatttcccttgtcgaaaaagaaacttacaagttataactcacctaatctgttgttcatgagattgtaagcaatggaagattactgttatagctgtaagatctaagcaataagtgtgccacacgtattgagctgtgattgaagctatgccgttatttttttttctaatatccacatcattcattcatgtacacactgttgttttactgaatgttacaggttaataaacaaaaaaaaaaa

SEQ ID NO: 137773 - DNA, 877 bp, Zea Mays
cactggtggacgcatctccggatagagcgtaaaaaccttaagttttgagcataaaatccctcaattataagcgtaaataccgagttaatgagaggttgatagctctagtaggttgttattacgatcctatttttatgacagatccgaaaaacatggcagccgcatgcatgcggtttctatttttatacagatccaaaaattatggcaaaatcgtgggagtttccattgcatgcgcgtaaattacgaacaatataaatcaaggaattgcctttccaatgtgcatgcagtaaactgatatacgaactccgtgttcaagcataaaatcgtacagtttttagcgtaaataatacatgtggtaggcataaaacacaataatcgaaaagaaaattgtgtcggatcggaggatgtcacgcgcgatcatcgctgcgcgcatctcacgacttctgtgacgttgctcgctcgaacatcgtgcctcatgtgtcgccgtcgctattcgcacgtcgatgggcgtcgcttgctcgccggccttggaagtgccgcctcctcggggcttcggggacgccaccgcttgcccgcacaagggccccgctatcgctcgccctctagatcggggaaccgccgccactactccggatcgaggaacctccgccaccgcgcgtcgaagtaatggagttgtggccaccggcctgagaaccgccgccaccgcacaagggcactgccatcgctcgccctctggatcgggggccaccaccggcggcctgggaaccgccgccacctcatgtcgaggtcggagagccacagccaccgcagccactggccaagagggtccaccgccgcgcgcgctatcgggcaactgccgtcgctaatgaatcgagat

SEQ ID NO: 137774 - DNA, 450 bp, Zea Mays
ctatgctacagcaacatataacccatagagataattcagtagatctagtagtttaactccataattgttggatttcaatacattcaggttcttgctaatttgatcggttttaaatgttttgtgatggaatcggttggactgtggaccgaggccggcgaatcaatcaagaacgccacctctcctaggttagggcgtgttggacctgccatgggggacaggccggcgccgatcgagaaggtcgcggtgccggagaagatggccttgttcctccacgccgccgtcacgtcaccgggacaccagcagcagcacggcgcctcgtcgcacgaggcgcccgccgccgcgaacatcacgccgcggacaacaacagccaggaataagcagcagcacctgccggtgagccccggggcgtgcctctgctcgccgaccgtgcacgagggctcgttccggtgc

SEQ ID NO: 137775 - DNA, 1560 bp, Zea Mays
aacgaccgccgccacgtgcccaagtctttcacgaggtcctttcaccggcggggagcacctggtaatctgttcggctgcccctctccatcgcccccttcatggcgatgctccactcatggcggcatttggatcttgtcttgcgatattcttatggatccttgatcatggcaaggagcattggattaaaatgcaagaagcaaagcaagctagattggcaacgccctttctgcgccacaaattatgctcgaggacaacattttgccaccaccaaaatgatgaacagggtggagggtagggaggtaaccaatactgatgaagatgcggtttgtccagtgtctatcattgagaacacaagtcaccgcgatgggtctatataccgcagatgcaatgattttctaacactgtatcgtattacagaccgtggtgagactcggttggagccaatggcgttatcagagcccacaaattgccagcctaatcgagaaaagtgcattaggcatttaccaaagcccatgatgcaaattttctcattaacattgggtaaaattcccatcgaaagagattcagtagaattatatggttacatggcggtgcgggatgatcaggatttattgcttaattacattgtcaatcggagcagggatgaagccattttactgcaaaaggattcccttatcgaaatgactggccctaagcgaggcatctcaatggtttcctctgtacttgttgagtttgatatgaggataaagaatggagatcgagaagaagatgatctacagctcattgatggaatgatagactattctgagctaaggacaccatgctggccaccattcacatatcgcataaacggtgattgtggtgcggttgacatgactgtagcccgcattttatgcggagtggaggccacgatagaagttttcatatcagaagtgcatgcgcaggaaggtgtccgtttgtctctcagttcgtttgtttttgtcagtgattcagaagaagaagaaattcagctcttcaatggcattgttggtgagtcaagtggcttaagatacgcggttgctgtattcgaggatacttggatgcatttgaagttcaaagtgggtaaaaacaatgacttaaaagacgacgctgaacgctgtattcccattgaagtaaacactcatggatgtgtgagtaaaaaagtaaactttgatctcgcctctatgtcggtgaaggtgacttggtcgactttgacaaaccaaattccagcgtggatatcaggcatcgatttcaacaccatgtgatttgttcactccgtttctacatgtacgagaaatatttggtgctcatcaaatacaagattgcaagccaatgagttgtgtcaattactagctagtttcctattactctgattaagagaagctattgttatttattttcttttattgtcaattacaagattagaacagaaccaaaataaattttccataggaattcctcatccgtctttatggaacagaaataaggtctgggcacttatcatcttggaaaaattcctttttgtcaatattcaactaaaga

SEQ ID NO: 137776 - DNA, 237 bp, Zea Mays
atacacattcttgcttccttggcagccagtaaaaaacaccggcgtgttcggctggctacaagccgacactgttgcagctgtttggattgctgcagctgcaatccatagagagaaaaatactgtagaagccgcagccgcagccggattgcagccgcagcaagccgcagcgaacaagctgcacatctgaaactctttgtcatgttgcggcatctggctctggactggaaacagtttgac

SEQ ID NO: 137777 - DNA, 1929 bp, Zea Mays
gccatccgccgactcctcgtcgccggcgtccgccccagcacccacctgccgccgctcaccgtcaagctcctccacgcccgcgtcctccgcctggacatcctcgccgacctatccctgctcctcctccgcgccactacctcctccggcctgcacctccacgcgctccgtctccacgccctcctccccgagccctcccacctcaccttcccgttcgcactcaagtccgcctcgcgcctccccttcccgctccccgtcggcgcgcagctccacgcgcgctcgctcaagctcccctcccactccaacccgcacgtgctcacctcgctcctcggcctctacgcgaaatgcggccgcttgcacgacgcgcagagggcgttcgacgaaatgccccaccccagcaccgtctcctggaccgcgctcatcgccgcgtacatggacgcggggcacgctctcgaagccattggggtcgccaggagggcgttcgcgagcggcatgcgccccgacagcttcacggcggtgcgggtgctcaccgcgtgcgcccgcgtcgcagatctggagaccggggaggccgtgtgggcggcggcgcggcaggaggagggggtcgcggagagcgtgttcgtggcgactgcggcgttggacctgtacgtcaagtgcggggagatggagaaggctagatcagtgtttgacgagatgaagaacagggatgcggtggcctggggcgcgatggtcggagggtacgcctccaacggacatcctcgggaggctctggaccttttcttcgcgatgcagatggagggagcgaagccggattgttacacggtggtcggggcgctctcagcgtgcacgaggttaggtgcgttggatttgggacggcaggcggttggaatggtgcactgggatgaggtccttggcaacccagtcctgggtactgcactgatcgatatgtatgccaagtgtgggagcacaagtgaggcgtggatggtgttccagcagatgttggagagggacatcattgtctggaatgcgatgatcctggggcttggcatgactggccacgagaagattgcatttgcgcttgttggtcagatgaagaagtcgggtgtgaagctgaatgataataccttcattggattgctctgcagctgcacacatactggccttgtaaatgatgggcggcagtactttcataacatgactcatgtataccgtataagccctaggattgagcattatggttgtatggttgacctattcagtcgtgcgggattgctggaagaggctcatcagctgattggtgacatgccaatgctggcaaatgccgttgtatggggagcactcctcggtggttgcaagatccaccggaatgctgaccttgctgaacatgcgttgaagcagctcatccgactggagccatggaattctgggaactatgtcatgctttctaacatatactcgaacagtggaagatgggaagatgctgcaaagcttaggttggaaatgaaggcaaaggggattgagaaggtccctgcatctagctgggttgagcttgatggtaaggtccacaagttctatgttggggacgattcacatcctctctcagataagatttatgcaaagcttgatgaattgggcatggaaatgaaggccatggggtatgaacccactactgaggtggtgatgtttgatgtcgaaaatgaggagaaggaaaacacactagtgcatcacagcgagaagattgccatcgcattcagtctcatcactactgaaccaggagagaccattagggtcaccaaaaacctccgagtttgcactgactgccactctgccatcaagctcatatcgaggataacctgtcgtgaaattgttgtacgagataacaatagattccattgctttagagatggtcattgttcttgcaatgactactggtag

SEQ ID NO: 137778 - DNA, 1471 bp, Zea Mays
gtacccatgcttggattggaccaatcacctaacgaaagcttttgccttttcctgtcgagagaaaacccaagatctacctcctcccggttcctcgccgatcgagatctacccccaatcccttctccccctccaggcgacgggcgccggaggccgacggcgacggggcagcacattgcctctgattgattgatcgacagaagtctcgcgacccggcccccgcttcgccgtgatccggcgacccaacgagccgagccgagccgagccgagcagagcagctcgtcgccgagcaccgaaatggggtcgttcaacggccacgtcctgccggggacgctgttcctggcggtgggcttgtggcgggtgtggtccagcgtcgcgcgcttcgccgccgacccgccggcgttccgcgtccgcacgtggaaccccctccccaagggcccccgcctgctggagctctacttggtggccggcggcgcgttcctggacatgtgcctggagctcggcggcggcatcctcgccggcggcgcccgggtcggcccggacagcctcatctacctcgagcacgccggcatgctgctcatgttcttcctcttcggcgcgctcgccctcctctcccagaagacaaggtctgtcgccacatttctccaccgtggatccgcgcactcttttctcgatggatcgatcgagttcccaaagttggtacagtttgtgtgaaattcgtgccaccgaactgaggcatgcatgatgtgctgtcaaaggtcacatttttgaatgcattgtcagttccagtacgctctcgatatctcataaagctctgcatcacagcaggtacctgccgctgaccgacggcgagctgagcctagtggcagcgacggcattcacgtcagagctgcttctcttctcctaccactccgccacccacacggggctagagggctactaccaccacctcctggtcctcctcatcggcctctgcatcctctccaccgtcctgggcgcgctctcgccggcgagcttccccgccgacctcgccgccggcgtgctcctcacgctgcaagggctgtggttctaccagacggcgctcacgctgtacgggcccatgctcccggccgagtgcggcgtggacgccgacggccacgtcgactgccgcagccgcgccgcggaggagcgcgccgagcagctggccaacctgcagctgttcggggtcgtgttcgtcgctttcgtctacgtgcttgggtgctacgccgtcgcggcagcgaggtacgggcacccggacctcgcggcgatgcatgacgagcacgccgcggcatacgagtgccgtggcggggttggctccaggaccgaggtcgagtgtgtggctgtgtagtgttcggatggagattttgaggccagatgatttaacatctctgcataattctttatttttagaatcactccgtttacgtataatcaatccaaacaataaaaaaaattt

SEQ ID NO: 137779 - DNA, 1210 bp, Zea Mays
gtacccatgcttggattggaccaatcacctaacgaaagcttttgccttttcctgtcgagagaaaacccaagatctacctcctcccggttcctcgccgatcgagatctacccccaatcccttctccccctccaggcgacgggcgccggaggccgacggcgacggggcagcacattgcctctgattgattgatcgacagaagtctcgcgacccggcccccgcttcgccgtgatccggcgacccaacgagccgagccgagccgagccgagcagagcagctcgtcgccgagcaccgaaatggggtcgttcaacggccacgtcctgccggggacgctgttcctggcggtgggcttgtggcgggtgtggtccagcgtcgcgcgcttcgccgccgacccgccggcgttccgcgtccgcacgtggaaccccctccccaagggcccccgcctgctggagctctacttggtggccggcggcgcgttcctggacatgtgcctggagctcggcggcggcatcctcgccggcggcgcccgggtcggcccggacagcctcatctacctcgagcacgccggcatgctgctcatgttcttcctcttcggcgcgctcgccctcctctcccagaagacaagcaggtacctgccgctgaccgacggcgagctgagcctagtggcagcgacggcattcacgtcagagctgcttctcttctcctaccactccgccacccacacggggctagagggctactaccaccacctcctggtcctcctcatcggcctctgcatcctctccaccgtcctgggcgcgctctcgccggcgagcttccccgccgacctcgccgccggcgtgctcctcacgctgcaagggctgtggttctaccagacggcgctcacgctgtacgggcccatgctcccggccgagtgcggcgtggacgccgacggccacgtcgactgccgcagccgcgccgcggaggagcgcgccgagcagctggccaacctgcagctgttcggggtcgtgttcgtcgctttcgtctacgtgcttgggtgctacgccgtcgcggcagcgaggtacgggcacccggacctcgcggcgatgcatgacgagcacgccgcggcatacgagtgccgtggcggggttggctccaggaccgaggtcgagtgtgtggctgtgtagtgttcggatggagattttgaggccagatgatttaacatctctgcat

SEQ ID NO: 137780 - DNA, 1207 bp, Zea Mays
gtacccatgcttggattggaccaatcacctaacgaaagcttttgccttttcctgtcgagagaaaacccaagatctacctcctcccggttcctcgccgatcgagatctacccccaatcccttctccccctccaggcgacgggcgccggaggccgacggcgacggggcagcacattgcctctgattgattgatcgacagaagtctcgcgacccggcccccgcttcgccgtgatccggcgacccaacgagccgagccgagccgagccgagcagagcagctcgtcgccgagcaccgaaatggggtcgttcaacggccacgtcctgccggggacgctgttcctggcggtgggcttgtggcgggtgtggtccagcgtcgcgcgcttcgccgccgacccgccggcgttccgcgtccgcacgtggaaccccctccccaagggcccccgcctgctggagctctacttggtggccggcggcgcgttcctggacatgtgcctggagctcggcggcggcatcctcgccggcggcgcccgggtcggcccggacagcctcatctacctcgagcacgccggcatgctgctcatgttcttcctcttcggcgcgctcgccctcctctcccagaagacaaggtacctgccgctgaccgacggcgagctgagcctagtggcagcgacggcattcacgtcagagctgcttctcttctcctaccactccgccacccacacggggctagagggctactaccaccacctcctggtcctcctcatcggcctctgcatcctctccaccgtcctgggcgcgctctcgccggcgagcttccccgccgacctcgccgccggcgtgctcctcacgctgcaagggctgtggttctaccagacggcgctcacgctgtacgggcccatgctcccggccgagtgcggcgtggacgccgacggccacgtcgactgccgcagccgcgccgcggaggagcgcgccgagcagctggccaacctgcagctgttcggggtcgtgttcgtcgctttcgtctacgtgcttgggtgctacgccgtcgcggcagcgaggtacgggcacccggacctcgcggcgatgcatgacgagcacgccgcggcatacgagtgccgtggcggggttggctccaggaccgaggtcgagtgtgtggctgtgtagtgttcggatggagattttgaggccagatgatttaacatctctgcat

SEQ ID NO: 137781 - DNA, 1183 bp, Zea Mays
atggcagcatcagcagcagcagccacgagactcagcggcggcggcgtcgccctcttgctcctggcgctgctggccgccggcacctccacctcgtcggcgcagctctccaccggattctactcgcactcgtgccccggcgtgcacgacgccgtcaggtcggtgctgcaggccgccatcgccagggagcagcgcatgggagcctccatcctccgcctcttcttccacgactgcttcggctgcgacgcgtcgttgctgctggacgacacgcccagcttccagggcgagaagatggccaagcctaacaacggctccgtcagaggcttcgaggtcatcgacgccatcaagtccgccgtcgacaaggcctgccccggggtcgtctcctgcgccgacatcctcgccatcgccgccagggacagcgttgtcaccctcggaggtccgaactgggacgtcaagcttggccggagggactccaggacggcgagcttcagcggcgccaacaacaacatcccgccgcccacgtctggcctcgccaacctcacctccctcttcgccgcgcagggtctctcccagaaagacatggttgcactctccggagctcacaccatcggccaagcacgctgcaccaacttcagagcgcacgtgtacaacgacaccaacatcgacggcgccttcgcgagagcaaggcgatcggtgtgcccggcagcagcctcatcaggctcaggcggcgacaacaacctggcgcctctggacctccagaccccgaccgtcttcgagagaacgactactacaggaaccttgtctgcaggaaggggctcctgcactccgaccaggagctcttcaatggcgcggccaccgacgcgcaggtccaggcgtacgtcagcagccagagcgcgttcttcgcggacttcgtggctggcatggtcaagatgggcgacatctcgccgctcacgggctccagcggggagatcaggaagaactgcagaaggatcaattaagctagaggcagcgcgcttctaagcgtataccttgtatcgttgaagtttctaattcctccgattcaaattaagttgtcaaatcactgtgctatgctgtaccaatgcgttggcatgtctattcgtttgaataaattagtcctatcccctctcaagcgttctctaaatataatatagagaatgttactccg

SEQ ID NO: 137782 - DNA, 876 bp, Zea Mays
atggcagcatcagcagcagcagccacgagactcagcggcggcggcgtcgccctcttgctcctggcgctgctggccgccggcacctccacctcgtcggcgcagctctccaccggattctactcgcactcgtgccccggcgtgcacgacgccgtcaggtcggtgctgcaggccgccatcgccagggagcagcgcatgggagcctccatcctccgcctcttcttccacgactgcttcggctgcgacgcgtcgttgctgctggacgacacgcccagcttccagggcgagaagatggccaagcctaacaacggctccgtcagaggcttcgaggtcatcgacgccatcaagtccgccgtcgacaaggcctgccccggggtcgtctcctgcgccgacatcctcgccatcgccgccagggacagcgttgtcaccctcggaggtccgaactgggacgtcaagcttggccggagggactccaggacggcgagcttcagcggcgccaacaacaacatcccgccgcccacgtctggcctcgccaacctcacctccctcttcgccgcgcagggtctctcccagaaagacatggttgcactctccggagctcacaccatcggccaagcacgctgcaccaacttcagagcgcacgtgtacaacgacaccaacatcgacggcgccttcgcgagagcaaggcgatcggggctcctgcactccgaccaggagctcttcaatggcgcggccaccgacgcgcaggtccaggcgtacgtcagcagccagagcgcgttcttcgcggacttcgtggctggcatggtcaagatgggcgacatctcgccgctcacgggctccagcggggagatcaggaagaactgcagaaggatcaattaa

SEQ ID NO: 137783 - DNA, 1176 bp, Zea Mays
ccggaaaaagaaacagcagcctctgcccttcgtttttatacgctcacccgacgacaggcgatggggggaacagctatagccctgcagttagtagcatctcgtttcagagctcagaggagggaggaggaagaagaagcagcagcaaggcatggattgctgcatctgcagccccgtggcgtccgtgtacaggctgccaaggaacgccatctgcgctccctgccaccaaggcgccaaggccatcatcggtttcctcgacagggatggtgagcgggaagaggacgacggcggtggccgttctgtccagctccagcctcgcggctcggccaaggggctgagagatgcgtgggagcaggtgaaggagatgagagccagggaggaggagaccaggcagagagctgccttcctccagcacggcttcgcgtcggcgtggaaggagggaatccacaccgacatcgtcgtcaaacctggcaccggtcccgcgattccagcccacaaggccatcctggccgcgcggtcggaggtgttccggcacatgctgtccggcgacgaccgctgcaaggcccccgccggcggctccatctcgctcccggagctctcccacgacgacctgtccctcctgctcgccttcctctacacaggcgctctggaggcgccaggagaaggaggaggagaggccagccaggaccaggagcggcagctgcacgcgctcctcgtcgcggccgacaagtacgatgtgccgttcctgaggcgggtctgcgaggcgcggctggcggcgggcgtggcgccccggaacgcgctgcggacgcttgaggtcgccgagctgagctccagcgccgcgctcatggagcgcgccatgggcgccgtcgtggagcacgccgaggaggtcgtgttctcggcggaatacgagcggttcgccgcacggaacgcggggctgtgcgtcgagatcacccgcgcgctgctggccaggatgccgacgccggcgaggagtgatggcccgtgcttagagcttggaagcagctagctgatgcatgcagttgtattgtatcagatgatgatggatcggaaagaatactactcttgttccagtttcgagtcacgacaatatgtaattgtaaacgcataagttcttctgaaacacgggcgagcacgatgagcaagactgcaagaacaacacag

SEQ ID NO: 137784 - DNA, 1274 bp, Zea Mays
ccggaaaaagaaacagcagcctctgcccttcgtttttatacgctcacccgacgacaggcgatggggggaacagctatagccctgcagttagtagcatctcgtttcagagctcagaggagggaggaggaagaagaagcagcagcaaggcatggattgctgcatctgcagccccgtggcgtccgtgtacaggctgccaaggaacgccatctgcgctccctgccaccaaggcgccaaggccatcatcggtttcctcgacagggatggtgagcgggaagaggacgacggcggtggccgttctgtccagctccagcctcgcggctcggccaaggggctgagagatgcgtgggagcaggtgaaggagatgagagccagggaggaggagaccaggcagagagctgccttcctccagcacggcttcgcgtcggcgtggaaggagggaatccacaccgacatcgtcgtcaaacctggcaccggtcccgcgattccagcccacaaggccatcctggtgagtgggcttccggccgggcctaataatacaagtggtcgacggacgagttggttgggccggaccgggccaggcctcttccgcatattaaaccgatcgagcctctcagctcacgaactccacgcccgatccattcgtgcaggccgcgcggtcggaggtgttccggcacatgctgtccggcgacgaccgctgcaaggcccccgccggcggctccatctcgctcccggagctctcccacgacgacctgtccctcctgctcgccttcctctacacaggcgctctggaggcgccaggagaaggaggaggagaggccagccaggaccaggagcggcagctgcacgcgctcctcgtcgcggccgacaagtacgatgtgccgttcctgaggcgggtctgcgaggcgcggctggcggcgggcgtggcgccccggaacgcgctgcggacgcttgaggtcgccgagctgagctccagcgccgcgctcatggagcgcgccatgggcgccgtcgtggagcacgccgaggaggtcgtgttctcggcggaatacgagcggttcgccgcacggaacgcggggctgtgcgtcgagatcacccgcgcgctgctggccaggatgccgacgccggcgaggagtgatggcccgtgcttagagcttggaagcagctagctgatgcatgcagttgtattgtatcagatgatgatggatcggaaagaatactactcttgttccagtttcgagtcacgacaatatgtaattgtaaacgcataagttcttctg

SEQ ID NO: 137785 - DNA, 1114 bp, Zea Mays
cgagccagcaggaacgaagaagacaaaacagaaggcgggggcctccggtttggttcccctccctccccgttcccaggcttccagtgggcagggcagccactggttccactcgtccgttcagctataagttagtcgagacacggccttgcactcagactcatcatcagttcaattcaatccaatccaatccaatcccaccccgccccttccaagaactctagtatcaaccaaccgtccaacaaaagcaggagtcgcatccgaccccccgcatcagagacaggcagggagggaaccgagatccgtccgtccgtgtcgatggagtcaacggtggagcggataagctcgtcggtgcagtcctgggtgaaggaccacgagctcgcagccatcggaggcgtgtgggctgcggcggtgggcacttcggtggcgtacagccggaggaaggcgccgcagcggggcacgggcctgcgcctcatccacgccaggatgcacgcgcaggcgctcacgctcgccgtcctcggcggcgccgccctcttccactactacggcgacggcgggcgcaggaagagggccgacgacatcgacctcgacttctactcgcagctgccgccggccaccgacgccgacggcaacgagaaccagcggtggagctggtaggaggagaaggaagaactgtagcagactagcagtgggtgcttgcagcaataataattgaggtggggccctatgacgtggcgggcgggagggattagtctgtgctaatcctaatccatccagctcagacaagacgacgggcggcccgtttacttaacattatcggtccatgctgtcatggccggcaccacatccacatctactagtcatctaggagcagccgcccatagctgctgctgctgctgcttctctcctgtgtcacagtactactaccaccaccatttgtttatctgatgaatgaacggtgacgatgatgacgatattgtttatatcacggtttcatttttttttttgcactcttcgtttttctgtacccataatcggccgtctgttttctgctacacgtggcaatcacagctagcgaaacgtgtgtgccgtggagccacgtgtaggtgacgtgaca

SEQ ID NO: 137786 - DNA, 1123 bp, Zea Mays
cgagccagcaggaacgaagaagacaaaacagaaggcgggggcctccggtttggttcccctccctccccgttcccaggcttccagtgggcagggcagccactggttccactcgtccgttcagctataagttagtcgagacacggccttgcactcagactcatcatcagttcaattcaatccaatccaatccaatcccaccccgccccttccaagaactctagtatcaaccaaccgtccaacaaaagcaggagtcgcatccgaccccccgcatcagagacaggcagggagggaaccgagatccgtccgtccgtgtcgatggagtcaacggtggagcggataagctcgtcggtgcagtcctgggtgaaggaccacgagctcgcagccatcggtgagtcagtctcagccagcgagcgaccttgttgcagatatccacaactgctgcttagtgttccgtttccgtcgatgatcttctgctgaaactgaaactgaaaccgctagctgtctgcctgtctatgtgcgcgcgcgcgcccaggaggcgtgtgggctgcggcggtgggcacttcggtggcgtacagccggaggaaggcgccgcagcggggcacgggcctgcgcctcatccacgccaggatgcacgcgcaggcgctcacgctcgccgtcctcggcggcgccgccctcttccactactacggcgacggcgggcgcaggaagagggccgacgacatcgacctcgacttctactcgcagctgccgccggccaccgacgccgacggcaacgagaaccagcggtggagctggtaggaggagaaggaagaactgtagcagactagcagtgggtgcttgcagcaataataattgaggtggggccctatgacgtggcgggcgggagggattagtctgtgctaatcctaatccatccagctcagacaagacgacgggcggcccgtttacttaacattatcggtccatgctgtcatggccggcaccacatccacatctactagtcatctaggagcagccgcccatagctgctgctgctgctgcttctctcctgtgtcacagtactactaccaccaccatttgtttatctgatgaatgaacggtgacgatgatgacgatattgttt

SEQ ID NO: 137787 - DNA, 853 bp, Zea Mays
tccccgatccgcggttcctcatcgcttcgcttccttcccagatcaggcgaaaggcgtgacgggggccaccgctgcggcgccgcccctcgaccctccgctgctccgcctgcgctggagaccatccatctggaagagatctctgatttacgggatggacggagccaagccagtggcggccgggaagcaggacctggaagaggcgctgctccgtatcgtgcagcagcaccaccaccagtccctctgccaacgacaacaaaccgagcgtgcaaagaaggacgccttgaagagcgctgtgcgggtcgccgatctcctcgtggacacggtcgacggcggggtgcgggagctcttcgtcaacgagaagcgcatcgagctcgaggcccgcgcgctgctcggtacgatcgcgcggtacaggaggcagactgatgagtggctggcggccaccagcgagatcaactcggccctgaagctgatcaactctttcatccctagcagattcatctctccggttccaaatacagttgaatttgctgactggattggtcgaacaaagcagaagaaaattcgtgtgacttcgaaatcggagacatcgagaactggatgaagatcatggacttcgattgtaaaagtatcaatgcagccatacgcaatattcaccagtcatgactctgcccgcgattacaatttcacgatttttaggaagtatccgtgtcattacgttctctgattagaattattgggtctggaaaccctctttttatggaaccgtgtctcctgattttcccatgctatgagtgtatgtacccttcaatttcaaagtgatgatatatataggatcaaaatacacctgtctgag

SEQ ID NO: 137788 - DNA, 746 bp, Zea Mays
tccccgatccgcggttcctcatcgcttcgcttccttcccagatcaggcgaaaggcgtgacgggggccaccgctgcggcgccgcccctcgaccctccgctgctccgcctgcgctggagaccatccatctggaagagatctctgatttacgggatggacggagccaagccagtggcggccgggaagcaggacctggaagaggcgctgctccgtatcgtgcagcagcaccaccaccagtccctctgccaacgacaacaaaccgagcgtgcaaagaaggacgccttgaagagcgctgtgcgggtcgccgatctcctcgtggacacggtcgacggcggggtgcgggagctcttcgtcaacgagaagcgcatcgagctcgaggcccgcgcgctgctcggtacgatcgcgcggtacaggaggcagactgatgagtggctggcggccaccagcgagatcaactcggccctgaaggaaatcggagacatcgagaactggatgaagatcatggacttcgattgtaaaagtatcaatgcagccatacgcaatattcaccagtcatgactctgcccgcgattacaatttcacgatttttaggaagtatccgtgtcattacgttctctgattagaattattgggtctggaaaccctctttttatggaaccgtgtctcctgattttcccatgctatgagtgtatgtacccttcaatttcaaagtgatgatatatataggatcaaaatacacctgtctgag

SEQ ID NO: 137789 - DNA, 751 bp, Zea Mays
tccccgatccgcggttcctcatcgcttcgcttccttcccagatcaggcgaaaggcgtgacgggggccaccgctgcggcgccgcccctcgaccctccgctgctccgcctgcgctggagaccatccatctggaagagatctctgatttacgggatggacggagccaagccagtggcggccgggaagcaggacctggaagaggcgctgctccgtatcgtgcagcagcaccaccaccagtccctctgccaacgacaacaaaccggtacgagcgtgcaaagaaggacgccttgaagagcgctgtgcgggtcgccgatctcctcgtggacacggtcgacggcggggtgcgggagctcttcgtcaacgagaagcgcatcgagctcgaggcccgcgcgctgctcggtacgatcgcgcggtacaggaggcagactgatgagtggctggcggccaccagcgagatcaactcggccctgaaggaaatcggagacatcgagaactggatgaagatcatggacttcgattgtaaaagtatcaatgcagccatacgcaatattcaccagtcatgactctgcccgcgattacaatttcacgatttttaggaagtatccgtgtcattacgttctctgattagaattattgggtctggaaaccctctttttatggaaccgtgtctcctgattttcccatgctatgagtgtatgtacccttcaatttcaaagtgatgatatatataggatcaaaatacacctgtctgag

SEQ ID NO: 137790 - DNA, 758 bp, Zea Mays
atgtaaatggaaccatcattagtccactcacaagcgacaagatatatcttagacattttaagtttgataatggatccaagatatgttactttattcatcttcttagtacttgccttacatggagatactactttggcagaaacttgcaggcagtttgttaaagtgcatccattttgctttaaagcaatgtgcaaggcaaattgtgctatagagggaaaattctctgatggttcctatgtaaaggattacagatgtgaatcaggtggatttcactcagtgtgcgtttgcattttatgcaaacattagttatctaaagacaagcgaagatatcttcttgtattcctatatgttatttaggagtattgtccaaataattatacggtagcttagttaactagctagtttgtttatttatagacatatgtagcactagttaactagttgttgtttcttaaattctaagctatataccaggaaacatgttttcagcgcttcaataatatatatttgttctcctttattataaagttcaatactttttgttaacttctggtttataatcttatttactcaaaagttttataaatatatttcaatgtgtccatgatataattgtacaagtagaatcacatgttcatcacgtcccaccccacgcctgtccacgagccgagctgctaccccacgcttgccgaccagcctagccgcatcacccagcactatatgtggtcattcgggttacccgaaaaaatcaggtcagg

SEQ ID NO: 137791 - DNA, 1429 bp, Zea Mays
ctcgcctcgctcggcgcattggagaggtagtagctagcgcacgcccttcgtccgtcaagcccagtagcccacacctgcacctctatggcactattagcacctctatctagttcttctctcttcagcctcggatccaggcgagcaccatacccctgcaaataataaggttaccagcttgcaggcagccacaggcacggtacttcagagcaatacactaatacttcctctgccaggattcaggcacagtattgtatttggaattattgaacagtgtatttcttgtacaattcgactcataagttttttaagattcatcacaggcttcaactacaacttggctagagaaattttaaaagaaggtatgtagctggtttgtttaatttatttatcctcccaaatatggttactgtccagacacaaagatgtgttttgtaggataaataaattaaggaaatctactatatatatataactttctttggaatttgtctcgcatatgttatagttaagccgtgtgataaatcttatggaactcatgagctgaattataagatataccctgtttaataatcctaaatacagaacagacgatcaaactgacatgtagctactggctgaaagggaacgagtagacagaataatgcttggaagctttgctgtctcgcttttgatggtagaggcgatacgcgcgcgtatatacatataggatccgtcggagaatgttgaagacttgaagtcgccctacttttgggggctagattttctctctctttttctttctttctttctttctttctttctttctttcttttttttgcagagaagtgatgcgggtatagttacttcaagataaaagcgtcaaagtaatgtaaatgagctatgggcttttgagcaagcagggagcgagggccactgcctgtggtcttgtttcttcaggtaaagaaaaacagttcttcctgagtgaggggtagccaagatcgacgactggcggcaggtgtacaagcccacaaccacaagtcgtcgtccaggctctcgactcgagggagaagcaactccgatcacttgttcagagttgcatgtcccgtgaactcagggccagaagtccatgcagtggcaaaagcagaacgcgtgttggaagtccaagcgcaagcccatcccgggaagctgcctgtcggatgtcgatgaacgcgtgttggaagtccaagcgcagaacgcgtgttggaagtccaagcgcaagtccatgctgtggcaaaagcagaacgagtcaatggtgatcgatgagacgccgcgttgtgttgttcttgcagtcttgctcatcgtgctcgccgtgtttcacaacttatgcatttacatattgtgccgtctcgtcactcgaaactgaagcaagctagagttctcgatcgtatcgtattccgatccatcttccgat

SEQ ID NO: 137792 - DNA, 1208 bp, Zea Mays
cgcacgcccttcgtccgtcaagcccagtagcccacacctgcacctctatggcactattagcacctctatctagttcttctctcttcagcctcggatccaggcgagcaccatacccctgcaaataataaggttaccagcttgcaggcagccacaggcacggcttcaactacaacttggctagagaaattttaaaagaaggtatgtagctggtttgtttaatttatttatcctcccaaatatggttactgtccagacacaaagatgtgttttgtaggataaataaattaaggaaatctactatatatatataactttctttggaatttgtctcgcatatgttatagttaagccgtgtgataaatcttatggaactcatgagctgaattataagatataccctgtttaataatcctaaatacagaacagacgatcaaactgacatgtagctactggctgaaagggaacgagtagacagaataatgcttggaagctttgctgtctcgcttttgatggtagaggcgatacgcgcgcgtatatacatataggatccgtcggagaatgttgaagacttgaagtcgccctacttttgggggctagattttctctctctttttctttctttctttctttctttctttctttctttcttttttttgcagagaagtgatgcgggtatagttacttcaagataaaagcgtcaaagtaatgtaaatgagctatgggcttttgagcaagcagggagcgagggccactgcctgtggtcttgtttcttcaggtaaagaaaaacagttcttcctgagtgaggggtagccaagatcgacgactggcggcaggtgtacaagcccacaaccacaagtcgtcgtccaggctctcgactcgagggagaagcaactccgatcacttgttcagagttgcatgtcccgtgaactcagggccagaagtccatgcagtggcaaaagcagaacgcgtgttggaagtccaagcgcaagcccatcccgggaagctgcctgtcggatgtcgatgaacgcgtgttggaagtccaagcgcagaacgcgtgttggaagtccaagcgcaagtccatgctgtggcaaaagcagaacgagtcaatggtgatcgatgagacgccgcgttgtgttgttcttgcagtcttgctcatcgtgctcgccgtgtttcacaacttatgcatttacatattgtgccgtctcgtc

SEQ ID NO: 137793 - DNA, 333 bp, Zea Mays
aggtcggtgggaaggatgaagtacctctgcccgctctatagcgcactggccaagtgctctagcgaggagaagatgttggcccagaggatcttctcgaatgcgcaagagttctaccacccaatagcttggagtgttgtggagatcattttgtcgaagcacatcaaagcaagccaagactcttgcttagaccaactccaacagatatctcttagcgattcagttgggtgcaacggggatctggttattgctgctcagtttgcttctttcgcataaaattatcgtctgtcgtggaaacgaaacataggaaaaacttgaggcttgtattgcatcttg

SEQ ID NO: 137794 - DNA, 704 bp, Zea Mays
atgaagaatttggcttctgggccatcgtgttttgtgacatcatggcaagcatatgacatcaatgggtacacattctacactaaatcaaaagacatgaaaagtgttgcacaaaatagcggtgttcgtatcgatgcttttgacctacatggacagaagaccacatattttggattcatagaggaaatatgggaacttgattatggcccaagcatgaaaatacccttatttaagtgccaatgggtacaacatcccgtgggggtgataatggataactacggactcacactggtagacttaaagaaagtaggatataaagatgacccgtgggttctcgccgaatgtgttgcacaagtgttctatgtactcgatccagcagatgagaagatgcatgtagttatttctggaaagcaaaaaattgttggagttgagaatgtgggagaccaagatgaggaatacaataagtatgaagagatgttcgtctttaacggtccagagagaatcaagcgtgtggaaaagaaaattgataagaacttaaagccatacatgcggaaaaatggtagttcatgaaaaattgtatgaatcaaattgtatttgttatcatgtatgatcgactatgaattgtggttgccaattaatttaaaatctctctagttatctatgtgtgctattataattcatttaaattgtatttgcatattattgtt

SEQ ID NO: 137795 - DNA, 267 bp, Zea Mays
atgaaagcacttgtggctgagcccaaagaagggaaagaatctaaaacccctaccgaagcagttgctcaagtgttagcttcatcaaaatttcttcaaaatattggtcttgtacctgccacaaagaaaagtggcaatggtgatcctacatgtgtggcagaacttgaatcagagaagcaaaactcattagaagttagagctcacagttggatgtcatcaagaagaaggatttggttcttgataaatgatatctatgatatgtgttgctaa

SEQ ID NO: 137796 - DNA, 216 bp, Zea Mays
tcgcccggcgctcgcggaactctacgacaacgcggcaaggccggcctgcggcaggaggccgtggtcgcggacgccgtcccgtggctggtgtggatgctggaggccaagcccgcgggcgagcgcgacgccacactaactgcttctgttctctgtcccaagtttgttagccctcacgtttgcctgagatctttcagttacaattcctccggatcttag

SEQ ID NO: 137797 - DNA, 950 bp, Zea Mays
acgacaaacatgtctccacctatattatagcatatcgctgatgcctttctacaattgaggtgttgttaactgatgaaaacatttaatcactctctcattctctaaaagaatcgtcatcctcctcgtcctcctcattattgccagaggtggttggtacctcaaacatttggagttctatggtgtgagacaaaggtgaaggtgacgcctcagagttgtccatctcatccgctgtatgtggcgacggagatggcggaggtgatgattcagaaatgtttatctcatcagataccaacgatacatgtggcggcgaaggtggttcatcagtgtcgtagttgcttatcgaaatggcaccattgttcggcgtctcctcgggtgtcaggtacaatgatgactaagacgatggcactgtgtagatctcatcatatgtggtcatcgtcttctcaactgtcaggtagaatgatgacaaagacgacggcattgtgtatgtctcatcagatgtggccgtcgtctgggattcaccaccgtgcaactcgtcacctgccccaaagatcttggcaaggagatgccggagccagcctattccgaaaattctagcaaacagtacgtattgctactgcaaatgcaatagaggaagagagccgcgtagaggtatctgctttgcttggcttcctgcagcggatatgtatatttcattattcacagtattgctatattttagagaaataggattggcatatatataatcaaattagctactgcatgctagacactggcggagccggccggcataaaactgaagccgcccggtcaccgctgcgctgccgtccgccggagcaggcgatggggcatcggcgcgccgccggccctaggccctgtcgctgcggcgccccgaagagcacctcttcatcgttccgcccacatacgcgcctgactgtgactgtggctccccg

SEQ ID NO: 137798 - DNA, 1900 bp, Zea Mays
acaacggtagctgcttgatcactcgtgtcgctcgttgcattagacagatagccagcacacccccgtcgttcatcgggctcacaactgcactcgcctcgccagttgtattggagaggatagatagctcttcgccagagaaggattgccctcttgagatgggctgttctttcatctctatcttggttccatcctaatggatctaaatctatggtcagttcccttattccctaccgtgacatatgacgacctactatcatatacttactactgttggaagcaaaagcatttcagtgaagaacgaattgattccgataataataacaggaacaacaacattatttgaataactcactggccgccagagttcataacctagtgctagtgatcgaaggaatacgagaatatactacagagaaaggatagatagtttcacagtaaggttgtcggcgccagaacaacacaagataagatgaagtagaccgacgagaaccataacatcggtgtattattctcgtatagcaatagtgtgaataatgaaatatatatccgctgcaggccgccaagcaaatcacggatgacgatgaactgtgtcttctcctgccactgtcagggcctcagccctatgaatgtcagatacctgtatgcggctatcttcctcctggcgaacctgtctgcgtggttcgcacgagagaacaccgtatcatatcacctgaagcagcgactcagcggatgtcagggtgaccggggttgtctcgcggttgaaagcgtgctcgtggcaagccatgccttctttgtatccctagactactaaacagtttaaacaacattgttttttatctaacaattttctgtattatgattgctctgaccttaacaaatcgcccagctcttttttatgaccatgttcttctccactgtacgcaccggcaaggtgaatgagttgagaaattcatggcactccgggtggtggccagtgaagattgccctcttcatggtctgttctctcatctctgtcttggctccatcctggtggatccaaatctatgttatgaaacattgtagagtcagaagacgacgtatcatatgggtatggctttttccatttcgccttcgcggcgggctccatgtacgtcaggatggtgtttgtcggctgggacacacatcatacaatgaagcaatggagcgtggatattgggtggatgagcacgtgggttcatatcgccaatgaggctctcgtagtagtattctacatagcaatacttgttgctagaattttcggaataggcttgctccgacatctccttgccaagatcttcgggacaggtgaccgattgcatagtggtgaatcccagacgacgaccacacatctgatgagatgtacacaacgtcgtcgtctttttcatcattctaccgaacaactgaggagacgatgaccacatccgatgagatgtacacaacaccgtcatctttgtcatcattgtacctaacacccgaggagacgctgaacaatgatgccatttcgataagcaactacgacactaatgatccaccttcgccgccacctgtatcgttggtatctgatgacgtagacatttctgaaccatcacctccgccatctccgccgccacatagagtggatgagatggacaactctgaggcatcctttgtcccacaccatatagctccaaatgtttgaggtaccaactacctcaggcaataatgaggaggaggatgacgattcttttagagaatgggagagtgattaaatgttttcatcagttaccaataccccaattgtagataggcatcgacgatatgttgtaatataggtggaggcatgtttgttgtatggattttttgacatggtaagacatgtttgatgcatatacttctagccata

SEQ ID NO: 137799 - DNA, 1437 bp, Zea Mays
atttgtgctatgaacagtacacggtcgtaacttggtccacaattaaatagcaaacttcataattagtattaatacgttagtattcatacgttggaattttatgcattttaaaaattacaaattcgcattcttctagtacacgacacgagtggcttgcaccacacgactggcttctacagcaagccacgacctcctggcttccttgacacaccgaaagcatctctataaataaggtccccctgcgggcatgctccactcatctagacactcatctcttctctaccatccgccattccatcaaaagtacgtagtacatactcttagttcagctcgtcatggactcattcaaaagcctagtgttgtcttcgtcatccgatgattctgacgatgagatcgataacttcttggtttctcaacatgttgaccaccttggagtaggagccacgagcacgcgtcgtaggctctcttcattgcctcgccgagttatccaaggggaccacgctgctggagaaaatctcatcaagcaccactacttcggacctaatccagtgtatccaccacatatttttcgtcgaaggtttcggatgcatcgtcctttattcctacgtatccttcgtgccgttcagcaagaagacgattatttcactattcgatgtgatgcaacaggtttagctgggctcggtccattgcaaaaagtatgtgctgctttgcgtatccttgcgtacgggttaccaaccgatgcggtcgatgagtacatacagattggccagactacggctagggactgtcttatccgtttctgtcgtgcaatcatctcttcctttagcgaacgctacctccgtatccctaaccacgaagatattgctcgcatactaagtgtaaacgtcgaaagggggtttccgggaatgctaggctccatcgattgtatgcattgggaatggcgcaactgtcctactgcatggcggggacagttttgtgggcgcaattcgaggccaacaatgatactagaggcactcgctgggtatgacctctggatttggcatgcctttttcggaatgcctggtactaacaatgatctgaacgtcctgcatcgttcaccagtgtttgatcagttacttaattggactatgccaccagtgaacttcactattaacggtacgacgtataatttcggatactacttagcggatggcatttatccaaattggccaacctttgtcaaagcaattcgtcacccatttgaggagaaaaaggttcacttcacaaccaagcaggagagttgccgaaaggatatagagcgagcatttgggagtattgcaggcgaggtgggcagttcttcatggcccagcttatggttgggatcgtactcacctcaatcatatgaagaatgctttcattattatgtctaactaatggtctaggacgaaccgagatggt

SEQ ID NO: 137800 - DNA, 838 bp, Zea Mays
tttattttattttctttcttatccacagattttattattacaagttggtggtaatataaagggtgtgccttaaatacgatcaagtctttcttagtcactgatacaattgaatgcatgggttagatagaagatagtttgcacggcgacgaacatgtgattgtacctatagaattatactattcacggacatatttaaaatatatataactctcgagtaaacaagactatagatgaaaagctaacaacgagtcttcacatttataataatggaaaacaaacatatattattgaaatgcttggcaagtaaaaccatgtttctagatataagaaattgacgaaataaggactacttaactagtgctacataactctaaatagtaaacatactagttaactattttaccgaataattatttagacagcactcctagatgacagataggaacaaaaggagatagtcccacatgtcactagataactaatttttacacaaaagacaattacacacgtattcatatccagttgaacaacatctatgcccctttacatagtaaccatcggagaactttccctctataaaacaacttgccttgcaaattgcactaaagcagagtggactccatttaggaaactgcttgcaggtttctgcaagaaatatatctacgcattagtagaaaataacattggagttctatcacaataaaccaaacatcaaattgttagcaataacaacctaatagagtcctatcaacaaaacaaattactaatcataagctagtgaaataatgagttcatgagagtctatcaaaaatacattaatatggtaaaagactatata

SEQ ID NO: 137801 - DNA, 82 bp, Zea Mays
aatcacgagcagttacatacaaaaaggagaataagcatacttatgctaacttgtggcgaaatgtaatcaataatattaaaaa

SEQ ID NO: 137802 - DNA, 107 bp, Zea Mays
gttttagctcttgatttttatgtttatattcaactatataatgatgaattcagtaaataagcaaaacaaattctattttgatatagagagagtattatttactatac

SEQ ID NO: 137803 - DNA, 1089 bp, Zea Mays
atgaggtctgttgatcgccctccatcgaatgcaaaaagattaactattgagtcaagtcaggaggtgttttcagttcacatttctagacgcacaagatctagcagctcatcccaacatgctgataatccccagaccaagcagcagatagatcctcagccattaccagttactcatgtccgtagaaaggcgctagcttgtcagcgcaattccaaatcagctgcagcctccacttcagtaaataaccattcaaagaaaaagtcccgtgtattgaacatggacatcccacccccacaagtccccattatgtcaagcagatcaaagtctgatattgatttcaagtcaaagaacattatgaaaacaagctcacctaagcagaggacacccaaaaaattccagaaattgaatatccgatgcatcccgtatgatgtcattgtgtcaacttggataatgagtgatcgacagcgtgacgatgttgctaggttgggattcaaagtattttttgatttgcgtacgaatgcattagagagtatgtctctcataaggtggttgatggataagcttgatctagatgacatgacaatacgcctaggtgctggtaaagaactcgagatcacaaaagagacagttcgcctcatattgggtttgccaagcgctggaggtggcagagatttcactaattgtcgttggcacaagaggaacacaacaaacataactgcaacagtttatggatgttcattcattattctttttcgtagccgcacagagacttgttatgtcattgctccaaaacggtcggtttctgaagtattcaacatatatgtcccacgcatcaaacatttgattggcaacaagctaaattgtctgcccacccaacatcgccccatgatcgaatcactgtttgatgcacatgacaaggaggttgagtactgtgcttctcttcagcagagccatcagatgcttgtgtccaagcagattgaactatctgaggcatttggagaaatgatagacgaagttctaagggctgccatgcagcgtgatacacaacaagaaggtattaatagttatgcttattttttcttacattattga

SEQ ID NO: 137804 - DNA, 1662 bp, Zea Mays
atggaagtgattgcaaagccgaatgtggccacaaaggatggtgcatcaaagttcaatgtgggcatggaggatacagcatcgaagctgactgtggctgatactgcagcagtagaaccaactttgctggaaaccaccattgcagctggatcaaccgttgacactgccacacctgtggctactgccgagctcaagcctgcaagacgcttcactcgattgctgctcaagaatcatgagccaaacaaagaagagtctgcagcttgtgaaagtcaggcaacaccagatggcagcaaggatacctcatttgattttgctttgctcctggagaagcctcagagaaggtttacaaggtcgttgctcaagacaaaggttgagagcaatttggttggatctgacgatgcgctggacagtgcatctgatgcccgtccatcagtgaagaagatggagatgaaaatgtcagcacacttgatgaaagcagaagctcttagcatatcctgttgtttgccttcccaaagagaacctatccatctccagaatttgatgttttcagctacctcagttgcaacattcagattgccctttctacctgctttcgggttctccatccgcatctggaaagagcagacacagccttattcagatctgagtaggaaataccttgtattttttcttctgaacatcaaagccaagcggctttgcagcttcttcgatctttgtgattatctcttttgtgattatctttgtgattatcttcttcgtgtgtcacggacgagcgcctgcgcggaatcttctaggagacggaggcggcaaaggcggagatggcggccatcagcgacgcactcgattgccttggcggtgttggcggccacagaccggtggcgtgacacgttgatgtgcgaggaggtggaggagttggttgtactggtgagcggagaggcggggaacgacgtcggcgtcagcgtcgacggcgacgtcgaaagcgcactattcctctccctcggttccaacgccaccgcggcggcccaccaacgcgcgctcaccctccgcccccacgttgctggcatcgaggccaacgcgaccgccgcccgctacgtgctccacgccttctcctccctctccttcccagcacacatcaccccttactcggttctcctctcctaccccgtccacaccgctccctctccctcgccgcggcacccggccttgccgccaggccgttccccttggtgcatgagacctacaaaggcgacccgtacgctgaggcctccgcggaggtcctcccgacgtacttcgcctactcgggatccggctccgacaacgccgaggtcgtctacgccaactacggccacaacgaggattatgcttacctcgcctcccgcggggtcgacgtcgcgggcaaggtcgcgctcgtgcggtacggtgacatccactgcgagaacatggtgggcgggcggggattgcgcgttcgcggcggcgattgcggtgcgtgggcggatcgctggcgcgggcgtgcgccattgcgggcgctggcgtgggcgtgctggagctggattcgcggcggctgcggcgcgcgggcgtgaggtgcgggaggcggttgcggggggatttttgctggcgcgtgcggtagggagcgggggcagtctacactgcccccttaatagttag

SEQ ID NO: 137805 - DNA, 2043 bp, Zea Mays
atgcagcggcaagcgggtggtagaggttgttttggaagggaaagagaggagacagggtccaaacgagccgagacggacctgtataggcacagccgcacaggcacagacgaggctgcggggagagaaatggacgacgagcggcggaggaggacgaagcgggaggaggcggacggcgagtggcggcgctgggcggtgctggtggcgtcggtgtggatccaggcgctgacgggcaccaacttcgacttctcggcctactcgtcggcgctcaagtcggcgctgggcgtgtcgcaggaggcgctcaactacctggcgacggcgtcggacctgggcaaggcgctgggctggtcctcggggctggcgctgctgcacatgccgctgcacgccgtgctgctggcgtcggccgcgctggggctcgccgcctacgccgcgcagtactactgcctcgtgttcgtcagcccggccgccctcgccgccgtcccataccctctggtgttcctggtctgcctggtggcggggtgcagcatctgctggttcaacacggtgtgcttcgtcctctgcatccgcagcttctccacgagcaaccgctccctggccctctccctctcgataagcttcaacggtctcagcgccgccttctacgcgctcttcgcaaacgccatctcacccttcaccccaaccatctacctcctcctcaacgcggtcctccctctcgccgtctccgtcctcgcgctcccagcgatcctcctctgccacacaggcgacagcaacaaccacctccgcagcgcgcccaggccgcaggacaggcgcgtcttcctcggcctctacatcctcgcggtcatcaccggcgtgtatctcgtgatctttgggtctttcaccacgaccggccccgccgcgtgggtcatcctcacgggcgccatggtcctcctcgctctccctctcatcatccccgcctgctccagctgctcctatttcgatacacaacatggcacaggcaccactgaccctgcatcgcaactgaaccagcatgatgacccaaacaaaccactccttgtcagtgacagccatcagatcgagcctgatggcgtgacgcagaaagaaccggagcaccagctgcagggcggttgttgtggaaccatactgtacaagggctgcctggcggttcttggtgaggagcatagcgcaaagaaactcatctggagtgtggacttctggctctactacacagcctacttctgtggagccactgttggtctcgtatacagcaacaacctgggccagatcgcgcagtcactgcaccagcaatcgcagctcaccatgttactcgctgtgtactcatcctgctccttcttcggccgacttctctctgcgctccccaacttgcctcacaggatggtatcacttgctcggacagggtggctcgctgctgcattggtgcccatgccaatggcattcttcctgatgtggaaacaacaggacgtaggcgctctggtagcaggaacagcgatggttggcctgagctcaggattcatcttcgccgcagcagtgtcagtgacatccgagctctttggaccaaacagcatcggtgtgaaccacaacatcctgatcaccaacatcccgctggggtcactcctctatgggcagatcgccgccatggtgtacgacgcgaatggacaaaggatgacactgatggataatcgcactggcatcattgacaccatgattgtgtgcatgggggtgaagtgctactcgaccaccttcctcgtgtggggttgcatcacattgctggggttagtgtcgagcgtagttctgttcataagaacaaaaccggcttatgctgctgctggtcggtcgagttgtaagcaccttcaccaagtttccagttaacggggggaacttcttggtcatacccttattgccttacttttgacatcagttagcttgtacaaaattcagtttagttctagctgaaatgtgttagatacaaaacatgaaacgaatagcatcacaaggaagagacaccaagaggataggaaattgtcagct

SEQ ID NO: 137806 - DNA, 185 bp, Zea Mays
tgtgttatattgttataggtatgttcccgtgcgttgcgacggaagtaaaacatttgtatgaaacattgatacggaacgacaaacatcactataatatgcaaaatccgtgtggaaagtattatcattgtcacacaaattatttctaaaaagttaatttagaattttaattgcagacaaatgtgtcg

SEQ ID NO: 137807 - DNA, 222 bp, Zea Mays
agagtgttatgttgtaatgaacgcatattgcgaagcatcgcagttgagcttcaggatctctgcagctgcaggtggcttcttccgtactcgaattagagttagctgtgaattgcaatccttttgttatttttctctaacttgtacgaggaaagcaatccataggaattttcaaatatgcaaacaaaatccataggaatatttggtgcaaggctgattttttca

SEQ ID NO: 137808 - DNA, 1207 bp, Zea Mays
ccgcccctacacaccacacacacctctcaaacctctataaaaaaaccgccagaaaacaccgaaacccgcacgtttctctgcgactcgcacggcccgcgcccaccaccgaccaccccacctggttcggtcggcactcggcaccccgccccgcatacatgccgccgcccagcctcaccgtggcgcgcgacccggccgccgccgccaccatgcggcaccgcaaggtccacccgacgccgggcggaggcgcagggacgacgaaggagatgggcgcggcggaggggtgggcgcggcccgagtggtgctcggcggcgggcgccgcggccgtgctgcggcggcacccggcgcccgcgctcttcgggtgcggcctcctgctcttcatggccgtcgagtacaccatccccatggtcaggccggacgcgccgccgctcgacctgggcttcgtcgccaccaggggcttgcacgccgccgtcgccgcgaggccctggctcaactcgctcctcgccgcgctcaacacggtcttcgtcgcgatgcaggcggcgtacatcctgtgggccatcctcggcgagcagcggccgcgcgccgccgtcgccacgctcatgatgttcacctgccggggcgcgctgggctgcgccacccagctcccgctgccggaggagttcctggggtccgggatggacttccccgtcggcaacgtctccttcttcctcttcttctcgggccacgtcgcgggcgcggtcatcgcggccgccgacatgcgccgcgagggccggctggcgctggcgcgcctctacgacgcgctcaacgcgctccagggggtcaggctgctggcgtgcaggggacactacaccatcgacctggccgtcggtgtcggagcggggatcctcttcgatacgctctccggatggtacttccacgccaagaacgcaccggagaagcactgccgcagctgccagtgccacaaggctctcctttcacgctagctcataggtgtggtgtgtttggtaagttactgtagcggtgctgttttgtaagaaatggttttgattgccagtcgttgtgatagttttcatcgcgggtttataatacgaatcgactgagaactattttcgccaacgattcgatatactaaccgttgtgaaaaatatgttataggtgtatttatcctatttatgggttttgatgaatagatagtgatgcatataattct

SEQ ID NO: 137809 - DNA, 1881 bp, Zea Mays
ccgcccctacacaccacacacacctctcaaacctctataaaaaaaccgccagaaaacaccgaaacccgcacgtttctctgcgactcgcacggcccgcgcccaccaccgaccaccccacctggttcggtcggcactcggcaccccgccccgcatacatgccgccgcccagcctcaccgtggcgcgcgacccggccgccgccgccaccatgcggcaccgcaaggtccacccgacgccgggcggaggcgcagggacgacgaaggagatgggcgcggcggaggggtgggcgcggcccgagtggtgctcggcggcgggcgccgcggccgtgctgcggcggcacccggcgcccgcgctcttcgggtgcggcctcctgctcttcatggccgtcgagtacaccatccccatggtcaggccggacgcgccgccgctcgacctgggcttcgtcgccaccaggggcttgcacgccgccgtcgccgcgaggccctggctcaactcgctcctcgccgcgctcaacacggtcagtgccgcctgcccagattttcgtttcctccacctgccatttcttcaatgcaccgcctcctcttctggttggtgcctgcctggacggctggactggagtgccttccgtctcctctttattgttcaccttaactggacactcgtgtgttcgtcagaaatccgaactaccattaggacatgtacaagtacaacaccgagactatggaccggttttccaagaatgatgccttttttttttggcacggttacaaaactacactagtattccaagtgcttccagcaaccagcaaccagcatgtacaatgccaaggcacatagtttactggattgtatagcagtataaaatactcctacaggtaacccagctttgttcttgtgaacctttggagcttccacaccttggctctctagactcctggcgaggacaacaaagctggcactgtcaatgcacccggatgtggctctcgcacttccccagccaacaatttaattgacaccgtatttctgtgaagccggccctgagccacacgtagtggtcgtagattacacttgacgctgacagatgcaccgccaaatttaaccctctttagtttttccgcgaaatgaacttgaggaatatataaatagtcgtggcgtcgagtgctcatgcacagatttcctgataagattctgcatctcgccagcttctccatggtccccggctcagcacagactgacgctgacgctgacactgacagccaccccacccgctcgtacgcacgcgcaggtcttcgtcgcgatgcaggcggcgtacatcctgtgggccatcctcggcgagcagcggccgcgcgccgccgtcgccacgctcatgatgttcacctgccggggcgcgctgggctgcgccacccagctcccgctgccggaggagttcctggggtccgggatggacttccccgtcggcaacgtctccttcttcctcttcttctcgggccacgtcgcgggcgcggtcatcgcggccgccgacatgcgccgcgagggccggctggcgctggcgcgcctctacgacgcgctcaacgcgctccagggggtcaggctgctggcgtgcaggggacactacaccatcgacctggccgtcggtgtcggagcggggatcctcttcgatacgctctccggatggtacttccacgccaagaacgcaccggagaagcactgccgcagctgccagtgccacaaggctctcctttcacgctagctcataggtgtggtgtgtttggtaagttactgtagcggtgctgttttgtaagaaatggttttgattgccagtcgttgtgatagttttcatcgcgggtttataatacgaatcgactgagaactattttcgccaa

SEQ ID NO: 137810 - DNA, 596 bp, Zea Mays
ggccagcttgttaactggatgcaagcaacgattctacctgacattcaggggcgttttcggacattcaggtttctgctacatacagctgcacggctggagctacacaggctatctacaatagcgttacaaaaaatatatatatacaaacacctggtgctttgagctgcctcgtctgatctaacgaagacagctatggtacatgcatcacctgagaaagcgagatgcagaaatcctcgtgaatcccagctccacgagctatacgctggatttaacagaagtttccccctcttctaacggctacgaaccacgtctcttgttgttggttgccatttacagtagctcagtgctgggctagcaagtggtcgtcctcagcagcttagatttcgcagaaacttcgattggcctccagattatgctgtcaagtctgctgcataggttcttgtaaaactgcagctcgtttaagatgcaggttagcagtcattacaagactcaaatcattagtaaaaggatgggatgcaaacagaacagaccctgtggtattccagggtgtcaccggcgacctttcgaacatcaaccatgaacagagaaggggcaac

SEQ ID NO: 137811 - DNA, 2907 bp, Zea Mays
ggcactccttccccaccccaccaccacctcctctcctctgcccctaacccgtccgttccggctcatccgccattttttccctgtcgcggtaagcgatagggttcggcgtccgtcttctaaatccgcccttcttcgtttcgatttttccggcgttctgggagcaagcttcggcttcatcgacggcgttcttggtcttttgcggctcgacatgtctccgttccagggatacagaggcgatgcggttctctccggcgtccggtcgcggaagcgcgtgttcgcgacggcggccgcggagcccgtgacggcggcgcccaagaggcagaagcgcggggatgagatgcccctggacgcgctgccggacgagtgcctcttcgaggtcctgcgccgcgtgcagggcacccgcgcgcgctgcgcgtcggcctgcgtctcccgccgctggctcgcgctcctcgccggcatccgcgcctctgaggccgtgctggccccggccgcccccgccgtgccggacctcaaccaggagtacctcagcgaggacgacgaggccgatctgatggacctggacggcgacgcccgcgagaggaccctcgagggcatggaggccacggacgcgcgcctcacggcggcggccgtcgccggccgtctggctgccgtctccgtccgcgggagccaccccgcgcgtggcgtcaccgacgccggcatctccgccctcgcccgcggctgcccagagctccgctcccttaccctgtgggatgtcccgcaggtgacggacgccgggctcgccgaggtcgcggccgagtgccactcgctggagcggcttgacatctctggctgccctatgatcacggacaagggcctcgccgcggttgctcagggttgcccggaactgaagtcgctcaccatcgagggatgctccggtgtggccaacgagggtctcaaggctgtaggtcgtttctgcgccaagctacaggcggttagcatcaagaattgcgcactcgtcgatgaccagggtgtgtctggcctcgtctgctctgcgaccgcctcttcgttgacaaaggtccggcttcagggtttgaacattactgatgcttcccttgctgtgatcgggtactacgggaagtcaatcaaagacctgaccctttctcgcctccctgctgtcggtgagaggggattctgggtgatggccaatgccctgggcctgcagaagctcaggcgaatgactgttgtctcctgcccgggactcacggatcttgctcttgcatctgtcgccaagttcagcccaagtttgaggcttgttaacctcaagaggtgcagcaaggtctcagatggatgtctcaaggaatttgcagaatcatctaaggtcctggagaacttgcagatcgaggaatgcagcagggttactcttacgggcattcttgcgttcctcctcaactgcagcccaaagtttaagtctctctccctgtccaagtgcgtcgggatcaaggacatctgctccgcacctgcacaacttccggtatgcaaatcactacgttccctggccatcaaggattgcccaggcttcaccgacgccagccttgccgtggtgggcatgatctgccctcagctggagaacgtcaatttgagtggccttagtgcagtcaccgacagcggcttccttccactgataaagagttcaaacagtgggctggtcaacgtcgatttgaacggttgcgagaatctcacggatgcagctgtttccgccttggttaaggcccacggcgcttcccttgcgcacctcagtctcgagggatgcagcaagattaccgatgcaagcctgttcgccatctctgagagctgcagccagctcgccgagctcgacctttcgaactgcatggtcagcgactacggcgtcgcggtcttggcagcggcaaagcagctcaggctgcgcgtcctctcgctgtccggctgtatgaaggtcacccagaagagcgtccctttcctaggcagcatgtcttcgtccttggaggggctgaatctccagttcaacttcattggcaaccacaacatcgcgtccctggagaagcagctctggcggtgcgacatccttgcttagaggaacacggcggttattcgtcgctggagatgctaggtcaaccttctccggatgcaaatacacgaccgaagcagtagtttagtactcaagtctatgctctgtagttgagtctggtttccggctcgtgtttgtgtcatggtgggtcttctgttcgtcgtcgtcctagggccagttgttttccgaggggggtgtttttttccggaggctcatttttttgcaggaatcctcctgtgaggatctctgtttcttgagcctttggcagccattgctatggcactctgcccccttttgtcccaaactaagccctcgtgatcagtcgttccaccatgcagtttctcaagttgtgtttgaaacccaagtatctgtgtcaagtgtgtgttcttttccggtattcctggttatagagctgcagacatcaacactcttttgattgcaattgtagcaagtccagttgtcggtggttgcaactctccatccagaattgcagacatcaacattcttttgagtgcaattgtatcaagtcccaactgtcggtgtctccattcagagaaacttagctccatgtctttgatgtctgggtgcctgcaatcttgccgagtgcagtgtgttgttggccatgggcggaagtgtcggtatggtttgcctatgtgcttggggatctggcctttgcaaggttcattctacagagccttttgccttcacagccctgtgtggttgtttttcttctgcagagacctgattttgacaggcaggtggtttaaacactgtaatatttgcaaccttcctctgaagataaataaaggttgtgtttcggttct

SEQ ID NO: 137812 - DNA, 947 bp, Zea Mays
gctctacatacctttgagatcgagaggtgctcccatggtgtggtgatgatggaacgtgtgaactaactgcttcttttggttccaaactataagacggtttggtttttccggataaattgcagaaagcaggtgatgacagcctgacactctgctcatcacacagaaaattctcagctcacctcccaagcttggaacatatatgttgagaggaagtgggattggcatatgttgcaggttggctagggattgccgccccagctggctggttatatattaggctgtcgccgccaaagaaagaaaggcctgcttcttcacctcgcgctccaggttcatgttttgagcgtgtacagtgcatgtggtttcagaaatggggacgctggcgtgcccatggagatctggccacctctttgctttcatcaccttcgccgtgctgttcttctcgacttcatttgccgggagacagtacagtttcttgatggatcaagatgccctacgtcaacaagaaggagagggagcacgaactgagcagaaggaagcgctagtgccactggtgcaagctcggcggctcagcgtcaagacgaacgattacagcagctatgacccttccccgtccatggacaagccacactccaagctcataccgaactgatcaatcatgtacccgtccaggttgcagcagtcgagttgccgatgagaaatttaacagcttaaatgtgtgcctgatttatatatacagaagcattatattactaggcttgcttaaactgttctcatgacatctaatatcatattattatagatgtgacatatagatgtttacttcttctttgtattcatacgcagtcacaggcttcttctcaagattagatcaagtagttagtataataagagtagcaactactttgtcaaactctgaatgcaagtctcctaaacaattttaacaacaa

SEQ ID NO: 137813 - DNA, 566 bp, Zea Mays
ctcgctacttaattttcagtgctaaactctactgcctatatggaaagtacgcggggcactattgcttagtttgcctcagactcatcacactagaaaagctctggtgctactgttctagctagcactacagtgtacactggaaagctcccgagtgttgtttcttcgtgtcctgttgttgtcaagggagacagtacagtttcttgatggatcaagatgccctacgtcaacaagaaggagagggagcacgaactgagcagaaggaagcgctagtgccactggtgcaagctcggcggctcagcgtcaagacgaacgattacagcagctatgacccttccccgtccatggacaagccacactccaagctcataccgaactgatcaatcatgtacccgtccaggttgcagcagtcgagttgccgatgagaaatttaacagcttaaatgtgtgcctgatttatatatacagaagcattatattactaggcttgcttaaactgttctcatgacatctaatatcatattattatagatgtgacatatagatgtttacttcttctttgtattcata

SEQ ID NO: 137814 - DNA, 2387 bp, Zea Mays
tcacacggcaggacgaggcttttgggtccgtcatcaatctccatccgtggcagcggcacgagaagatgccacgaggccatgcctgactggagggccaacgccaacccgacgcgaccggcaggcagcggcgcaccaacgcaaaggttaacccacccgcccacccagcagcactcactcacgagaccgtccaccgcgacgcgctctcttgcccgtgcccccgtcctccccttccccctccacctccgcggcgcccgcggtaacctcgccacgccacatcgcgtgcgagcaccaaccgtcgccggccctctaattaagctgcccgcgcggcgcgatccggtgtccaccgctgccccgccggaggaggaggaggaaggggggcggggggtggagcacagggggatgctagaggcgaagccgccgtcgccgggctcctccggcgcggccggggcggcggcacacatccacgctcaccggcggtgggcggcgccgctgctggcctcggtcctgctctcgtcgatcctcatctccgcgtcgctcttcttctcctcctcccgcgcgctgctcctctccttctcgccgctcccctccgcggcctccgccgagcccctcttcgtcgaggccaagctccgccagcagatgcgggccgaggagcgccccgcgcgcggcgccgtgcccaggatcgcctacctcgtctccggctccgcgggggacggagccgcgctgcgccggacgctcagggcgctctaccacccggcaaacacgtacgtcgtgcacctcgacctcgaggctcccgccgccgagcgcgccgagctcgccgctgccgtccgcgccgaccccgtctacgccaggttccgcaacgtcaaggtcgtcacacgggcgaacctggtcacctaccgtggcccgaccatggtggccaatacgctgcacgcggctgccatcctgctgcgcgagggcggtgattgggactggttcatcaacctctccgcctccgactatccactcgtcacccaggacgacctgttgcatgtgctctccgagttgcccaggcagcttaacttcattgagcataccagtgacatcggatggaaggagtaccagagggcgaaaccggtgatcatcgaccctgggctatacagcctgcagaagtctgacgttttctggataacagagaaacggagtgtcccaactgcgttcaagctcttcactggctcggcatggatggtgctcacccaccagtttatcgaatactgcatatggggatgggacaatctcccaaggacagtcctgatgtactacgccaatttcctttcctcgccagagggctacttccacacggtcatctgcaacgtgccggagttccgcaacaccacagtcaaccatgacctgcatttcatttcctgggacaacccaccgaagcagcaccctcactacctcacgctcgctgacttcgacggcatggttaacagcaacgcgccctttgcaaggaagttcgggagagaagaccccgtgctggacaagatcgaccaggagctactgggccgccggcctgatgggtttgtgcccggtggatggacgtatctactgaatgcgacgactgaggaagggagacccttcgccgttgagcgcgtgcaggatctccgcccagggcctggtgtggacagattgaagaaactcgtcacgggcttgctcacacaagaaggctttgatgacaagcactgcctgtgagactgccccccagtaagatgattctggctgggggcggtagattacacggtcaaatcttgagggcattgaagccattttctgggaatatgcctactggctgaagaagcagcacatagtatcatgtgatgtacgcgtggatgcgagcaacggtaagataggtgctcttacagacagccgcctgagttgagctactaccgtacagcaggaggccacggacgtagccggcggagattatacaggaatagtagctcattaggttatgttagatgactatatcagccccttcccaaccgtcaataatgttgggaattttgacatctccgcggcgctgcgggttgtgcaaggcaggcaggcagtccattctttgcttggatgccatggcgcctggtgtaatcaactggtagcgtgtgaggaggcttcgttgtattgactagtgcatatttctgggcaaaacagatgcgtttggttgcacacatgtattcttttatcccttttcctctttgatgatgagtatagcagaaatgatggtgctgtttcctctcgcttgctgcttgcatttggtaagcgcctgcgccctgccgtccagtttcggttgggttagaaatgctgttgcgattttaatatgtgtgattgcatcgctttttggagtctggatcgttttt

SEQ ID NO: 137815 - DNA, 2349 bp, Zea Mays
aaatcttcacacatacactggcctgcctctctgccttctcggtggtgatccctccccttcccaaaaggcattggggttttagtgggtggtaggctggtagctgaagaggccaccaatggcggcgtacggcggcggtccgtggagcacggttccggcccggtcccgcagggcggagccgatcgccccctctcctcgcggcggcagcagaggcggaggcgacgaccgcgtgccgggggttggcgagctcgccgaggcggtggatggacttgagatcggaggcgacggggagaggcggcttgacaagtacgacatgccggtggatgtgagcgggaagggcgcgccgggccccgccgatgggttcgaagcggccgggctggccgaggccgtgcttcggaacgtggctcgctgcggctacgagagccccacgcccgtgcagcgctacgccatgccgatcgtcatggcagggagggacctcatggcgtgcgcgcagaccgggtccggtaagacggccgcgttctgcctccccgtcgtgagcggtctcgtggcgccggcgggaggagggaacgggcacgggccgcgggacagaggctcatttgatcgcgtcgccgccaagccacgggcactcgtcctcgcgcccaccagagagcttgcagcccagattaacgaggaggcaaagaagttttctttccaaacaggactcagagttgtggtagcttatggtggaacaccaatgtttagccagctgcgtgatttagagaagggtgttgatcttcttgttgctacacctggacgccttgtggatttggttgagcgatcacggatctctcttgaggcaattaagtacttggtaatggatgaggctgacagaatgctgaatatggggtttgagcctcagatacgaaagatagttgacatgatgaatatgccaaaaaagtctgtaagacaaactatgctcttcagtgcaaccttcccaccagaaatacagaggctggctactgatttcttgcacaattacatatttgttactgtcggaagggttggatcaagcactgacctgattgatcagaaaattgagtttgttaatggcggggagaaaaggggcttcctgttggatattttgcagaagcagtctgttggtctgtccaaaaacaagcaacccctaacattggtctttgtggagacgaagcgggaagctgattcactgcagtattgtctacaatcaaacggtttctctgcaacatcaatacatggtgacagaacacaacaggagagggagagagcactgaaatccttcaagagtggcgccactcctatcttggtcgccaccgatgtagcttcaaggggtctcgatgtcccgaacgtggcccatgtgatcaattacgacctccccaagagcatcgacgattacgtccacaggatcggaagaactgggagagccggaaaggccgggaaagccaccgctttattcacagagtcgaaccaccacctggcaaaggacctgctggagctgatgactggagcgaagcaggatgtgcctgagtggctcggggactatgcaagcaggccgtgctccggggggtccagctatggcggtagaggccgaaggggtggcggaggttttggcggaagagactatcgcctcagcagtgattatggatacggtggcaacggtggtgtctattccagcagcggtagcagctactctggcggcggcggcggttattccagccgcggtggcggctattctggccgcggtggcggctatgccagccgcggtggtggctactctggtggtgccagccgcggtggcggctactctggtggccgtggcgactactatcgtggtggctctcgtggcggtggtggcagcgacggctcctacagacaaagtgctcctcccctgccctacccgtcgtaccccagggccgccgcggacatcagcgcctctggctgggactaaccaatgcccacgcgtatccttaacgcaagtaccgtatagatacatagcactacgtctgtagtagctcggtcttgcgctggtccttttgccttggcggccctcgttgtgctgtcatatacattgccatggccctgttgcaaagggtaaacttgggtcttggggttggatgattttttttgcgtcagtggtgggagtattgcgactatggaaactcgggacttgctggttgaacttgaaggttatatatatatgcattgttactcatatcttggctataacggtggcaagtgacactgcaatttttgctgctcaatccaagagatgtccagtgcttgctagtactctgaatctctgatgaaaaatggaatcgagattagagagtttggttt

SEQ ID NO: 137816 - DNA, 177 bp, Zea Mays
gcgtacggcggcggcggcttcgccatcagccggccgctggccgaggcgctcgcgcggatgcaggatggctgcctccgccggtacccggcgctgtgcggcagcggcgaccggatccaggcgtgcatggcggagctgggcgtgccgctcaccaagcatccggggttccaccagtacgaa

SEQ ID NO: 137817 - DNA, 1178 bp, Zea Mays
ctgcttgtatgcatgcacttgtcttctcttcctccaccacatgctcacggcgtgaagtaaaccccatggcatgtgccgcagaaatagatgggaaaaaaaggatgtgtttaatattctaatctgatgagttctttcttgtatactgttctacacgcacagataaaataaatataacctatgcagaagaaactccagttagttactggaaaacagacagccccagcgccggccccaggctccattccatggaccatggcaccggttgttgactgctctgctgtctgcacactaatggcagtctctgtcagtctacatatatatataacacagagtgagcctgcagaagcgggcaagttgagcagcaactcagcagaagcacaccactacggccggttcgtcgtccctagataagctggtgcgtctcgcggcgtggtggatcggaggagaggtgggacaggcaggcacccatggcggggctacagaggtcggcgaccacgttcagaaggtccgggtcctcgggcctggtctgggacgagcggttcctgaccgaggccgaggccgaggcgaaggcgaaggccggcggtggcgccgccgccgccgaggacccccagccggagctccggcactccaggagcgtcgggagcatcggcatgctgctccgtggtggagacagcgacgacggcaataagaaggcgaaggaggtggagaaggcgcgcggcgggcagcagcagcgggtgttccggaccaaggacgtggcccccgacatggacccgccctcgccgagggtgtccggctgcatcctctgcgccatcctgggcgggggctctggcggcggcaaggcacgccgccggtccaagcccaagcccaagcccaagcctaagcctaagcccaggaaggatgtagcgacgacggcggcgtaggcgcgtagcagcacgtacgtacgtcgcgttgtctttccgctgtaaaaaaacaagtttgggggtcatggttgtgtgagagtgcacatgtttatacatactggtagcggtaggcagcgtcatatgagcttgctactcgatgtaatgtatgtacaccatttttagtcaggttagtttcctctctttaatttgggtcggttgtggttttctgctcgaaccagatccatgcagcagctactgagatctgaattggtcttgttg

SEQ ID NO: 137818 - DNA, 336 bp, Zea Mays
atgagtccaattacaaaacatgggattaaaaaatgtagaaaaattgcacattgtggtcgtggatcttactgggcacttcgtagcatcaaagttctgaatatactttatatcctagatttggaatataatctatgtgctagtatacttttttaatctaaaatatattctttcatgacaggaatgtgtggggtacaatattagttaattgatagagtgagctataaagatagaaaaaaaatacatctgtgattgggtttgcttttttctggcaaggacgaagccatagagtgaggattggatgagcgtgctttcactgctcgtggtggagtgctcttt

SEQ ID NO: 137819 - DNA, 1651 bp, Zea Mays
ataagtgattaaagcataagggaatacttgcactgcatatgtaattaaagcataagggtttgcatagtttataactgtatttgattgcaattgttacttagtttactgtgtcaattagtagaaattgttggaatgcacctgatcagttctgtactttttgtgtacttgctttgtacagcctgcactagttagcatgaataaatttgtctgcctggttgttattgctgttgatacctcaagaaattttgtgccttaacaagtttggtgggccagttgtttttggttattatggtattgcatttttactgtttgcatgctgttgtttaggtcactaatctcattcaactaatggtactgtttgggttttgctgtttaacagatggatgccaccacacccaagtactccaaggcccgttatgatgagattgtgaaggaagtctcttcctacctgaagaaggttggatacaaccctgacaagatccactttgttcccatctctggtttcgaaggtgacaacatgattgagaggtccaccaaccttgactggtacaagggcccaaccctacttgaggctttggacttgatcaatgagccgaagaggccttcagacaagcccctgcgtctccccctacaggatgtgtacaagattggtggtattggaactgttcctgttgggcgtgttgagactggtatcatcaagcctggtatggttgttacctttggtcctagtggccttactactgaggtgaagtctgttgaaatgcaccatgaggctctccaggaggcccttcctggtgacaatgttggcttcaatgttaagaatgttgctgtgaaggatctgaagcgtgggtatgtggcctccaactccaaggatgaccctgccaaggaggctgctagcttcacgtcccaggtcatcatcatgaaccaccctgggcagattggcaacggctatgccccagtgctggactgccacacctcgcacattgctgtcaagtttgcggagctcattaccaagattgataggcggtctggcaaagagcttgagaaggagcccaaattcctcaagaatggtgatgctggtatggtgaagatggttcccactaagcccatggtagtggagaccttttctgaatatcctcctcttggtcgctttgctgtccgtgacatgaggcaaacggtggctgtcggagtcatcaagagtgtggagaagaaggatccaactggagccaaggtgaccaaggctgccgcaaagaagaaatgatgtgtctggctggttctgtgtttgcttgagggatacctagtggaaacgtaaaatatctcgtcttgttcacgtcattgtctgaactatgctcgcaacgtttgcctggtcgatttagaactgttattttcgttaaaaccagagtgttatttaagacttatccgaacatctggtgagccatatatggttactagttttgttactacccttgttggtgttgtgtgcttctttagcaaatgtgctgtttctaaattgctcattatttgctcgtccatacctgtctgctgcgatcaaatttctcttgcgcttaaatcttttaaacaaaaaagctgccaaatcgcatatcaaggatttagaaattatgattcttccgaaatgtttttttgataaata

SEQ ID NO: 137820 - DNA, 935 bp, Zea Mays
ttataaaacctagctcctcaagctccagacgcagtcgaccgccgcagaccgggagtagtcgacgcgccgtcactgaatcctcagatcacggctagccgtaatcacgccactctgctgactcccggcgagcagtgtaacattttccttcagccatgggcaaggagaagactcacatcaacattgtggtcattggacatgtcgactctggcaagtcgaccaccactggccacctgatctacaagctcggcggtattgacaagcgtgtgattgagaggttcgagaaagaggccgcggagatgaacaagcggtcattcaagtatgcctgggtgcttgacaagctcaaggccgagcgtgagagaggtatcacaattgatattgctttgtggaagttcgagaccaccaagtactactgcactgtcattgatgcccctggacaccgtgacttcatcaagaatatgattactggcacttcccaagctgactgcgctgttcttatcattgactccactactggtggttttgaggctgccgcaaagaagaaatgatgtgtctggctggttctgtgtttgcttgagggatacctagtggaaacgtaaaatatctcgtcttgttcacgtcattgtctgaactatgctcgcaacgtttgcctggtcgatttagaactgttattttcgttaaaaccagagtgttatttaagacttatccgaacatctggtgagccatatatggttactagttttgttactacccttgttggtgttgtgtgcttctttagcaaatgtgctgtttctaaattgctcattatttgctcgtccatacctgtctgctgcgatcaaatttctcttgcgcttaaatcttttaaacaaaaaagctgccaaatcgcatatcaaggatttagaaattatgattcttccgaaatgtttttttgataaata

SEQ ID NO: 137821 - DNA, 1865 bp, Zea Mays
ttataaaacctagctcctcaagctccagacgcagtcgaccgccgcagaccgggagtagtcgacgcgccgtcactgaatcctcagatcacggctagccgtaatcacgccactctgctgactcccggcgagccatgggcaaggagaagactcacatcaacattgtggtcattggacatgtcgactctggcaagtcgaccaccactggccacctgatctacaagctcggcggtattgacaagcgtgtgattgagaggttcgagaaagaggccgcggagatgaacaagcggtcattcaagtatgcctgggtgcttgacaagctcaaggccgagcgtgagagaggtatcacaattgatattgctttgtggaagttcgagaccaccaagtactactgcactgtcattgatgcccctggacaccgtgacttcatcaagaatatgattactggcacttcccaagctgactgcgctgttcttatcattgactccactactggtggttttgaggctggtatctccaaggatggacagacccgcgagcatgctctccttgctttcacgcttggagtgaagcagatgatttgctgttgcaacaagatggatgccaccacacccaagtactccaaggcccgttatgatgagattgtgaaggaagtctcttcctacctgaagaaggttggatacaaccctgacaagatccactttgttcccatctctggtttcgaaggtgacaacatgattgagaggtccaccaaccttgactggtacaagggcccaaccctacttgaggctttggacttgatcaatgagccgaagaggccttcagacaagcccctgcgtctccccctacaggatgtgtacaagattggtggtattggaactgttcctgttgggcgtgttgagactggtatcatcaagcctggtatggttgttacctttggtcctagtggccttactactgaggtgaagtctgttgaaatgcaccatgaggctctccaggaggcccttcctggtgacaatgttggcttcaatgttaagaatgttgctgtgaaggatctgaagcgtgggtatgtggcctccaactccaaggatgaccctgccaaggaggctgctagcttcacgtcccaggtcatcatcatgaaccaccctgggcagattggcaacggctatgccccagtgctggactgccacacctcgcacattgctgtcaagtttgcggagctcattaccaagattgataggcggtctggcaaagagcttgagaaggagcccaaattcctcaagaatggtgatgctggtatggtgaagatggttcccactaagcccatggtagtggagaccttttctgaatatcctcctcttggtcgctttgctgtccgtgacatgaggcaaacggtggctgtcggagtcatcaagagtgtggagaagaaggatccaactggagccaaggtgaccaaggctgccgcaaagaagaaatgatgtgtctggctggttctgtgtttgcttgagggatacctagtggaaacgtaaaatatctcgtcttgttcacgtcattgtctgaactatgctcgcaacgtttgcctggtcgatttagaactgttattttcgttaaaaccagagtgttatttaagacttatccgaacatctggtgagccatatatggttactagttttgttactacccttgttggtgttgtgtgcttctttagcaaatgtgctgtttctaaattgctcattatttgctcgtccatacctgtctgctgcgatcaaatttctcttgcgcttaaatcttttaaacaaaaaagctgccaaatcgcatatcaaggatttagaaattatgattcttccgaaatgtttttttgataaata

SEQ ID NO: 137822 - DNA, 1830 bp, Zea Mays
atgccgctgcgcgactgcaacgtactgatcaggaccctggccaggcgtggcagtttctcacgcgtcatggcggtgtattacgatctccgtgcgcgaggcctcgccgcagacagctacacctacccatttgtgctcatggcaatcagcacgatgaagctgtccgtcgaggggcgcaaggtgcacgcggccgcggtgaagaccggcttccgctgggatgcgtacaccacatgttcgctaatggagatgtacacgatgctgggccggagggtgttcgacaagatgccgcagcgattcctggtgctgtggaatatgatgatgagctacaaggaaaagaggtcttgccagcacaatgatgattctaaaggggaacaagaaaaaccattcctttcagagggtgtctggtctcatatacattcctttatgcacattcgagacgcggggcgagctgcctgtttgtcccggtcttttctacagtcatggagatgtcatccctacctcatttttactgatgaaacattgggttgcaagaaaaacacatctcaagaaaacgaaattgcaagcaatttttacagtagagttgataacattctgaataatcattcaggcattgggatgaaggcactcaaaatccatgttcctataggttacactgcaaaggactcacgttatcttaaccgttggcttcagattgctatcacacatgggattgaagaactcgagctaatttttcctttcatggcaaagtacaaattcccatattcccttctacctatgagtggagactcaatcaaatgtcttgaacttagttgctgttctttttgtcccacttctaagtttggctggttaaaaaatctgacaaaattgtgtcttgatggtgtttttattgagggtgacgagttagagcgccttgtcttctctgcccttgctttggagaggttggagattagatattgtgatcgcatagtctgtctgaaggttccttccatgctacaacggctcacatacctagaggtttatgattgtgacaagcttcgtgttttggacatcgatgctccaaatataacttgcttcaatttcggaagacatcatacgaagacgaaactgtcaattggtgggggagtgtccaaaataaaagaattgagtgcatgcttcgacgatgcagtttattatgtccgtgttgaactcccgtctatgatggcaaacctcgaaactcttaccataaattcaatggttgagatgaatataccaatgcttcccagcaagtatctgcacctgaagtacttaaagatttctcttgcggcgtacacctttccttcaacatttgattatttttctctggcttccttttttgatgcatgtccctctttggaggcttttttcttggatgcatatcagcggaagatgaaacatgtttcgatcattacaaatcctttggttctgagggggactcctgaacaacgccatcacaagctcaagactgttgagatgaatggattcacttccgctaagagcctggttgagctagcatgccacattgctcagtgtgcaacatcgctgcaatccctcaaattggaggtccatcagagtgattttaagtgttatattccggctaataaacataataagtgctccccgctacctgtcgaggttctgatggaatctcgacgagcacacttggccatcatgacgtacattgagcctataattccctccactgtgaagttacaggttgtaggaccttgcagcagatgccatgcccttgaacagtagagtacgtactaccgtagtttcagtatttgggtcattagtaccctccataatattagaatg

SEQ ID NO: 137823 - DNA, 1663 bp, Zea Mays
atggcgacgacgtgccaccatgccatgccgctgcgcgactgcaacgtactgatcaggaccctggccaggcgcggcagtttctcacgcgtcatggcggtgtactacgatctccgtgcgcgaggcctcgccgcagacagctacacctacccattcgtgctcagggcaatcggcacgatgaagctgtccgtcgaggggcgcaaggtgcacgcggccgcggtgaagaccggcttccgctgggatgcgtacactgcatgttcgctgatggagatgtacacgatgctgggccgtgcggattccgcacggagggtgttcgatgagatgccgcagcgattcctggtgctgtggaatatgatgatgaggtgctacatcaggtgcggtcgcttcacagcagcagttgcgttggctgtgcagatggagagtggcggtgccacacctgacagggtgacattggtgaccgccgttaccgcttgctcaagagcaggcgatctgaacttgggaaggaggattcattcatacatggatggagtttttggattcagtctcccagtcgcaaatgcgcttctggacatgtatacgaagaatggttacttggaagaggcggtgaagatgttcgagcaaatgccagagaggaacatcatatcttggactatactagtgtcgggatatggcattgctggtcagttggacaaggcaagagtgtttttctaccaatgcacacagaaggatctaatcctgtggacttcaatgatcaacgcatgtgtacaacatggaagctttgaggaggcattgatattgttccgagacatgcaattacaacgtgtggagcctgacaagttcactgttgtcactctcctcacatgctgtgccaacattggtgctcttgatcaaggtgaatggatccatcagtatgctgaaagcaggaatatgaagattgatgcagttcttggcacagcattgattgagatgtactcaaagtgtgggcatgttgacaagtcactgcaaatctttgggcgaatgcaaggcaaagatgctgcagcctggactgccatcatctgtggtctggccacaaatggtcaggccagcaaggctcttgaactgtttgaagagatgcagagaagcaaaacaaagcctgatggtatcacgttcattggagtattgagtgcttgttgccatggtggcttggtcgatgaaggacagaggtatttccaagccatgaaggaggtctatcatatagagccgagaatcgaacattatagttgccttgtcaatcttctaggacatgctggtctactgtatgaagctgagaagttgatcactgacatgcctgttaacaatgacactatgcctctgtttggtgcactcctcactgcttgcaaagctaatggcaatgttgagatgagcgaatggttgacaaaaagaattgccaaggaagattgttccccaaatcctgacgttaatgtactcatgtctaatgtgtatgcaacagcaagtcgatgggaagaagcaataagagtgagaagtaagatgacaaatcctgcggtcaagaagactgcaggttgcagcatgattgaggtaaaagaatactgttgatggagctcatgctgccataaaactattgtattggagttggaatggttgacaaacagaaaatatgcttgattat

SEQ ID NO: 137824 - DNA, 3581 bp, Zea Mays
ttttttttcatttttttttaccttgcgtgacgcttcgttttcacagtgcggcggcggcggctgcttggctcgttgctcctcccattctgctcagctcagcttctgatgagttcgcctttgccgctgctagttaccagcatactagaccactgactgatcacgttataaggcttccgcgcaggcgagcttctgccgccttgtcgggtaaccaaacggacctcgccggccctctccagtggtcacatcacatcacatcacatgctcgaggtcgtcctggacatgacgccgccgccgccgccgccgcaggcgcggctccaccaggggtcatcagccaagggcgggcacgcggagcggaggaagcaaccgctgcagagcagcgtgacacagcccaaggcagagcccgcggcggcggcggccgtgctgccggtgccggagggaggcaagaggtgcagagggggcgggaggcgccgcggcagggccaaggcgcccggtgagcctcgcgccgcgctactagcgccagcgcaggcgcagacgcaggcgcctccgccgcgcacggtcattgggccgcccgtgccgagcaaggggctgtcattctgccgccggccagggttcgggacggtgggcgcgcgctgcgtcgtcaaggccaaccacttcctcgccgagctcccggacaaggacctcacccagtacgatgtgaagatcacgccggaggtgagctcgcggaccgtgaaccgggccataatggcggagctggtccgcctctaccgcgcgtccgacctggggatgcgactcccggcctacgacggccgcaagaacctctacaccgccgggacactaccgttcgacgctcgcgagttcgtcgtgcgcctcgccgatgaggacgacggctccggcgtcccgcctcgggagagggagtacagggtcgccatcaagttcgccgcgcgcgccgacctccaccacctcaggcagttcatcgccgggcggcaggcggacgcgccgcaggaggccctacaggtactcgacatcgtgctccgcgagctcgccaaccagaggtacgtgtccatagggcggtccttctactcgccggacatcaggaagccgcagcggctcggcgacggcctgcagtcgtggcgtgggttctaccagagcatccggccgacccagatgggattgtcgcttaacatcgacatgtcgtccacggcatttattgaacccctgccggtgatcgagttcgtggcccagatattaggaaaggatgtcatatcaaggccattgtccgatgctaaccgaatcaagatcaagaaggcattgcggggtgtaaaagttgaggtcactcaccgggggaatgtacggcgcaagtatcgcatttcaggcctcacaacacagccaactcatgaattgattttcccgattgatgaacaaatgaatatgaaatctgtcgtggaatacttcaaggaaatgtatggtttcaccattcagcatcctcatcttccctgccttcaggttggaaaccaaaagaaggcaaactatctacccatggaggcctgcaagatcattgaaggccagagatacacaaagaggctgaatgaaaaacagatcacatcgctgctaaaggttacatgccaaaggcctagagagcaagagatggatattctacagacagttcatcaaaatgattatgagcaagatccatatgcgaaggaatttgggatcaacattagtgagaagctaacctctgttgaagcccgagtccttcctgcaccttggttgaagtatcatgacactggaaaagagaaagagtgcttaccacaggttggtcagtggaacatggtaaacaagaaagtgataaatggatgcaaggtgagccattgggcatgtataaacttctcaaggagtgttccagaaaccacagctcggggattttgccaggaattggcacaaatgtgtcaaatttcgggcatggaatttaacagtgagcctgtgatgccaatatattcagctagaccagatcaagttgtgaaggcacttaaaaacgtgtataatattgcattgaacaaacttaagggtaaagatcttgaacttcttttggctatcctccctgacaacaatgggcagttatatggtaagtgccatctgctaattgctttgaatatataattacttcaactcttacatattttatcagatataactttatatatatttaaagcgatataacttcatatgtgtaggtgacatcaaacgtatttgtgaaactgatttggggttgatatcacaatgttgcttaaccaagcatgtttttaagatcagcaagcagtacttggcaaatgtctcactgaaaattaatgttaagatgggaggaagaaacactgtgctcctggacgcaataagttggaggattccgttggtcagtgacatcccaactattatatttggtgcagatgtaacacatcctgaaaccggggaggactcaagtccatcgattgctgccgttgttgcttctcaagattggccagaagttacaaagtatgctggattggtttgtgctcaggcacaccggcaagagctcattcaagacctttacaaaacatggcacgatcctcagagaggcactgtaacaggcggcatgatcagggagctcttaatatccttcaggaaggccactggacagaagccattgagaataatattctacagggacggtgttagtgaaggtcagttctatcaagttctcctttacgagttagatgccatccggaaggcatgtgcatccctagaaccaaattaccagcctcctgtaacatttgtggtggttcaaaaacgtcatcatacaagactatttgcaaataatcacaaagacagaagtagcatggacaagagtggaaatattttgccaggaaccgttgttgattctaagatatgccacccaacggagtttgatttctacctctgtagtcatgctggaatccagggaacgagtaggcctgctcactaccatgtcctctgggatgagaacaatttcacagcagacgaaatgcagacattgacaaacaacctttgctacacttatgcccggtgcacacgctcggtttctgttgtccctcctgcatactacgcacacttggcagcattccgggctcggttctacatggaaccagagatgttggacaaccagacgtccaagacctccaatggcacgagcggagtctcggtgaagcccctgcctgctgtgaaggagaaggtgaaaaggatgatgttctactgctgacaaggagaccacttaaccactcacatgctgtagctaacttgctagagtttagtaaggattagatagctttctcaaggagtgatggatcaatctgatctgttaacgacctctgtaaagtactcggaaatggctgtataatagttgttgtttcaaatgtgaaagcatctaggtccttagttagatttcagtgatcagtgatcaatgacgatactagattattgtgactaatgtatgctagattattatgattaatgtatgttttgcagaaacaatggattttgtgccgccattaatagtattcaattttggtttt

SEQ ID NO: 137825 - DNA, 3326 bp, Zea Mays
ttttttttcatttttttttaccttgcgtgacgcttcgttttcacagtgcggcggcggcggctgcttggctcgttgctcctcccattctgctcagctcagcttctgatgagttcgcctttgccgctgctagttaccagcatactagaccactgactgatcacgttataaggcttccgcgcaggcgagcttctgccgccttgtcgggtaaccaaacggacctcgccggccctctccagtggtcacatcacatcacatcacatgctcgaggtcgtcctggacatgacgccgccgccgccgccgccgcaggcgcggctccaccaggggtcatcagccaagggcgggcacgcggagcggaggaagcaaccgctgcagagcagcgtgacacagcccaaggcagagcccgcggcggcggcggccgtgctgccggtgccggagggaggcaagaggtgcagagggggcgggaggcgccgcggcagggccaaggcgcccggtgagcctcgcgccgcgctactagcgccagcgcaggcgcagacgcaggcgcctccgccgcgcacggtcattgggccgcccgtgccgagcaaggggctgtcattctgccgccggccagggttcgggacggtgggcgcgcgctgcgtcgtcaaggccaaccacttcctcgccgagctcccggacaaggacctcacccagtacgatgtgaagatcacgccggaggtgagctcgcggaccgtgaaccgggccataatggcggagctggtccgcctctaccgcgcgtccgacctggggatgcgactcccggcctacgacggccgcaagaacctctacaccgccgggacactaccgttcgacgctcgcgagttcgtcgtgcgcctcgccgatgaggacgacggctccggcgtcccgcctcgggagagggagtacagggtcgccatcaagttcgccgcgcgcgccgacctccaccacctcaggcagttcatcgccgggcggcaggcggacgcgccgcaggaggccctacaggtactcgacatcgtgctccgcgagctcgccaaccagaggtacgtgtccatagggcggtccttctactcgccggacatcaggaagccgcagcggctcggcgacggcctgcagtcgtggcgtgggttctaccagagcatccggccgacccagatgggattgtcgcttaacatcgacatgtcgtccacggcatttattgaacccctgccggtgatcgagttcgtggcccagatattaggaaaggatgtcatatcaaggccattgtccgatgctaaccgaatcaagatcaagaaggcattgcggggtgtaaaagttgaggtcactcaccgggggaatgtacggcgcaagtatcgcatttcaggcctcacaacacagccaactcatgaattgattttcccgattgatgaacaaatgaatatgaaatctgtcgtggaatacttcaaggaaatgtatggtttcaccattcagcatcctcatcttccctgccttcaggttggaaaccaaaagaaggcaaactatctacccatggaggcctgcaagatcattgaaggccagagatacacaaagaggctgaatgaaaaacagatcacatcgctgctaaaggttacatgccaaaggcctagagagcaagagatggatattctacagacagttcatcaaaatgattatgagcaagatccatatgcgaaggaatttgggatcaacattagtgagaagctaacctctgttgaagcccgagtccttcctgcaccttggttgaagtatcatgacactggaaaagagaaagagtgcttaccacaggttggtcagtggaacatggtaaacaagaaagtgataaatggatgcaaggtgagccattgggcatgtataaacttctcaaggagtgttccagaaaccacagctcggggattttgccaggaattggcacaaatgtgtcaaatttcgggcatggaatttaacagtgagcctgtgatgccaatatattcagctagaccagatcaagttgtgaaggcacttaaaaacgtgtataatattgcattgaacaaacttaagggtaaagatcttgaacttcttttggctatcctccctgacaacaatgggcagttatatggtgacatcaaacgtatttgtgaaactgatttggggttgatatcacaatgttgcttaaccaagcatgtttttaagatcagcaagcagtacttggcaaatgtctcactgaaaattaatgttaagatgggaggaagaaacactgtgctcctggacgcaataagttggaggattccgttggtcagtgacatcccaactattatatttggtgcagatgtaacacatcctgaaaccggggaggactcaagtccatcgattgctgccgttgttgcttctcaagattggccagaagttacaaagtatgctggattggtttgtgctcaggcacaccggcaagagctcattcaagacctttacaaaacatggcacgatcctcagagaggcactgtaacaggcggcatgatcagggagctcttaatatccttcaggaaggccactggacagaagccattgagaataatattctacagggacggtgttagtgaaggtcagttctatcaagttctcctttacgagttagatgccatccggaaggcatgtgcatccctagaaccaaattaccagcctcctgtaacatttgtggtggttcaaaaacgtcatcatacaagactatttgcaaataatcacaaagacagaagtagcatggacaagagtggaaatattttgccaggaaccgttgttgattctaagatatgccacccaacggagtttgatttctacctctgtagtcatgctggaatccagggaacgagtaggcctgctcactaccatgtcctctgggatgagaacaatttcacagcagacgaaatgcagacattgacaaacaacctttgctacacttatgcccggtgcacacgctcggtttctgttgtccctcctgcatactacgcacacttggcagcattccgggctcggttctacatggaaccagagatgttggacaaccagacgtccaagacctccaatggcacgagcggagtctcggtgaagcccctgcctgctgtgaaggagaaggtgaaaaggatgatgttctactgctgacaaggagaccacttaaccactcacatgctgtagctaacttgctagagtttagtaaggattagatagctttctcaaggagtgatggatcaatctgatctgttaacgacctctgtaaagtactcggaaatggctgtataatagttgttgtttcaaatgtgaaagcatct

SEQ ID NO: 137826 - DNA, 1329 bp, Zea Mays
tcgtcttccattccagtacaccgcacgcacgcactcgcctccgacagcgaccgcgcaacgtccttctcccgcgccgcccggccggccggtccctgttccctctcctcccctcggagcagcaggagcaggagcagccgcgttcgtcctctgcgctgcgcggcccgccggcctgaccaagcaaagcttatcggccggagccggacgaacgaacgatgcagcaggacctcagaaactcagagagaagaaacccggaacaggcgcatccagtgatgtcggcgagctcgaccaactccgcggcttccccggccgtgtccggcctcgactacgacgacacggcgctcaccctcgcgctcccgggctcctccgccgagcccgccgccgatcgcaagcgcgcccacgccgaccacgacaagccgccatccccaaaggcgcgggccgtgggctggccgccggtccgcgcgtaccggcgcaacgcgctgcgcgacgaggccaggctcgtgaaggtggccgtggacggcgcgccgtacctgcggaaggtggacctcgcggcgcacgacgggtacgcggccctgctccgcgcgctccacggcatgttcgcctcctgcctcgttgccggagccggagccgacggggcggggcggatcgacaccgccgccgagtacatgcccacctacgaggacaaggacggcgactggatgctcgtcggagacgtccccttcaagatgttcgtggactcgtgcaagaggatccgcctcatgaagagctccgaggccgtcaacctatctccgaggacatcatcccggcagtgattgttgttggtgtggacgccatatgccctacgcggcttatctctccgaattagttcacagagtgtgtgctggaagaggcttggctgctcaggtcctccatgcacacgtcatacaccgtacgtagggtgagggttcagtctgttgctgtgtgttctgtacaggccacaccacacacgcccccatggaaaactttttcagtttcgagtgcccctccctctcggccggacggtttggtttttggacgacgccggcgaggaggcggcgctagcacactagtagctccgtttccgtgtgttctttcatacttggctttggtttccgtttcagtcttcggccctcggtcgtcttgtctcgactctcgagggatccatgtatacacgaacatggtacatgctgtgtgctgtttccattgtataaggtcaaagaatacaagtacgatctgtctctgttcttgtagtttcggcggcagcctgatcgtctggtcgtttggctttaatttataccgacttctattgattat

SEQ ID NO: 137827 - DNA, 1446 bp, Zea Mays
tcgtcttccattccagtacaccgcacgcacgcactcgcctccgacagcgaccgcgcaacgtccttctcccgcgccgcccggccggccggtccctgttccctctcctcccctcggagcagcaggagcaggagcagccgcgttcgtcctctgcgctgcgcggcccgccggcctgaccaagcaaagcttatcggccggagccggacgaacgaacgatgcagcaggacctcagaaactcagagagaagaaacccggaacaggcgcatccagtgatgtcggcgagctcgaccaactccgcggcttccccggccgtgtccggcctcgactacgacgacacggcgctcaccctcgcgctcccgggctcctccgccgagcccgccgccgatcgcaagcgcgcccacgccgaccacgacaagccgccatccccaaaggcgcgggccgtgggctggccgccggtccgcgcgtaccggcgcaacgcgctgcgcgacgaggccaggctcgtgaaggtggccgtggacggcgcgccgtacctgcggaaggtggacctcgcggcgcacgacgggtacgcggccctgctccgcgcgctccacggcatgttcgcctcctgcctcgttgccggagccggagccgacggggcggggcggatcgacaccgccgccgagtacatgcccacctacgaggacaaggacggcgactggatgctcgtcggagacgtccccttcaagtaattcaccgtacccacctacctgacctcgagcttgttcctgctatagtctgctccccatccagtccaaatcggtccgtggaatacctgttgctctgccaagtgtgctgatccctctctcacacacacatgaacgcaggatgttcgtggactcgtgcaagaggatccgcctcatgaagagctccgaggccgtcaacctatctccgaggacatcatcccggcagtgattgttgttggtgtggacgccatatgccctacgcggcttatctctccgaattagttcacagagtgtgtgctggaagaggcttggctgctcaggtcctccatgcacacgtcatacaccgtacgtagggtgagggttcagtctgttgctgtgtgttctgtacaggccacaccacacacgcccccatggaaaactttttcagtttcgagtgcccctccctctcggccggacggtttggtttttggacgacgccggcgaggaggcggcgctagcacactagtagctccgtttccgtgtgttctttcatacttggctttggtttccgtttcagtcttcggccctcggtcgtcttgtctcgactctcgagggatccatgtatacacgaacatggtacatgctgtgtgctgtttccattgtataaggtcaaagaatacaagtacgatctgtctctgttcttgtagtttcggcggcagcctgatcgtctggtcgtttggctttaatt

SEQ ID NO: 137828 - DNA, 1406 bp, Zea Mays
gtgcccacttatttattcatcagattagcaaatacaatggctcatctcatgatatatattatttatttaggaggtatcttttttaacttattcatgacaacaaatgcacaagttggacaaggaatacatctctgagattttagtatatttggttggccacctaggcacctaacaatgtcactgacttgtgttgcttttgtgcaagagcagcctgtgtataaatcaacttagtctttctttgctctaaactacacagaaataagatggggtagagataatgcttatatttgcttgattgatgatatgccgcgtgttgttggctggtccgtcattcacttatttttggctacatgttggctggtccatcattcacttatttttggctacgtgtttggagacagttgtcatttggttttccttcctgcttcatcaattggcagctcttcttccctgtattaatgtgtgtgttgggggtggggttagctctgctatttggtcaactgattctaaaccaaaactggatcagatagaatccaaaaaatatgagacagattagcatattaataagtgccttgtatacaaagactttgcccacatatgcaattaaccttacttttatctttgcctcagagtgcaccgattactatttttgagaatcatgagctggccagcattgtgctggattacaaaagggagtgtgtccgcgatagtgtgctgcagtcacacacctctgtccatgaggattgcaacattgagtctggagaaacaaccttgcactgtgagcatgtgctgagccttgaatcaggtccgaccatagtgaaggcccggaccatgtggaggcctaagggaaccaaggcccaagaaacagcggttccatcttcattctgattttgtcagatgttcgagatggtgactttggcagcaaactatctggcagaagatcagaatggttactagcatcctctattggaagcaaatcacacggaccgtgacctaaactaatttaactatgaagtgtgaccaatagaggagatataagtggggtcacaatggaggagaccaaagcggggagatcgaagacaaaggaggcctcctgtgcatggtttgtttctgtttccgcctttcgagttctttcttacgacaatcttgggtcgcacaaatgggtgttgtaagtattgatctgtagctacaaatgtatgatgggggagtgattgcttctcatacatgttccttctggggctatgtccatatgttgtaagccccatgaaaacagatttgtcgcagccatatccattcagaatctcatactatattgtatttgctgatattaaaattgatactactactattctccaggctgctcaagcgtgttgaaacttcgtgtctgggacaaatattgaaactgt

SEQ ID NO: 137829 - DNA, 2827 bp, Zea Mays
atgggcttcgccaccgtcggcgccctcctcctcggctccgcgcccgcctccggccccagcgacagcggtggggcgcccaagtccgcggagtcgtacatcgggagtcctctacaacatcaacaccgaggagtccagaatcggcctgcacaatggtctacacaagatgtgaagtttatacaattccaactaacggtcaatgtcgcagctctgataatcaatgtagttgctgctgtcagttctggaaacgtgccgttgaatgctgttcagaagtatgctgacgtgatcattcctcgaggtggtgataaccgtgtagcagttgatctgattgttcaacatatccgtacaaaacttggtcagcatgacttgtgcaaaatctatccaaatgttcatgttgttcaatcaacttttcagatccgaggaatgcatactcttatccgtgatagggacatcaccacacctgagattgccttggaagagcagtggcggcttcatgggcaggatgatcctattagcctttctagctatgctgccgacgcgttaagtaccactggtgaggatatgatagagtgtggcggcctcccgaagccgccgcagaactatatattcttagagcagtgccaaacagactctcggataaaaagttttctgacagtatttctctctctcccagatctaataaaaaggaaaatttgccgcctccccagactccatgttttaaaaggtcgcggtgggcaacgagccaacgaccggtgccagcagagacgaccggccccggccccgccccggccgcagctgcccgaagccgccaaacaccgccagtcccccaccacatccgccagaaccctctccctccctccctccctccctcatcggcgcgccgccaatggccgtgtggtgaagcgcacccgacggaagaagcaggcaccaacagccaagccccctttgcccttgcccttgcccttgccctcgccgccgccgtccgcggaaggttgagatcccaggattcagactggtgccattcgatttgatttggcgcggggtactttcctatggccgcctccatcgcggcctcgcccttctttccagggtcgccggcgccggccgctcctaagaacggccttggagagcgcccagagagcctggacgtccgcggcgttgcggcgaagccgggagcctcgtctaatgccgtgagggcgggcaagacgcgcgcccacgctgccgtccccaaggtgaacggtggcaagtctgcggtggcggatgtggaacacgagaccgtaactgtaccttcgtcggtgccgaggactttctacaaccagcttcccgactggagcatgctccttgctgccatcacgaccatcttcttggccgccgagaagcagtggacgatgcttgattggaagcccaggcggcctgacatgctcactgacacttttgggtttggccggatcatacatgatggcctcatgttcaagcagaacttctccattaggtcctatgagattggggctgataggacggcatctatagagacaatgatgaaccatttgcaggaaacggcacttaatcatgtgaagaccgctgggctgctaggtgatggattcggctccacaccagagatgagtaaacggaacttattctgggtggttagccagatgcaggctatcgtcgagcgttatccatgctggggtgatactgttgaagtaaatacatgggttagtgctaatggtaaaaatggaatgcgtagggattggcatatacgtgattctatgacaggccacacaatactgaaggcgacaagtaaatgggttatgatgaacaaactcactaggaagcttgcaagaattccagatgaagtgcggactgaaatagagccatactttgttgggcgttctgctattgttgatgaagacaaccgcaagcttccaaaactgccagagggtcaaagcacttctgcagctaaatatgtgaggacaggcctgactcctcgttgggctgatcttgatataaaccagcatgtcaataatgttaaatacattgcgtggattcttgagagtgcaccgattactatttttgagaatcatgagctggccagcattgtgctggattacaaaagggagtgtgtccgcgatagtgtgctgcagtcacacacctctgtccatgaggattgcaacattgagtctggagaaacaaccttgcactgtgagcatgtgctgagccttgaatcaggtccgaccatagtgaaggcccggaccatgtggaggcctaagggaaccaaggcccaagaaacagcggttccatcttcattctgattttgtcagatgttcgagatggtgactttggcagcaaactatctggcagaagatcagaatggttactagcatcctctattggaagcaaatcacacggaccgtgacctaaactaatttaactatgaagtgtgaccaatagaggagatataagtggggtcacaatggaggagaccaaagcggggagatcgaagacaaaggaggcctcctgtgcatggtttgtttctgtttccgcctttcgagttctttcttacgacaatcttgggtcgcacaaatgggtgttgtaagtattgatctgtagctacaaatgtatgatgggggagtgattgcttctcatacatgttccttctggggctatgtccatatgttgtaagccccatgaaaacagatttgtcgcagccatatccattcagaatctcatactatattgtatttgctgatattaaaattgatactactactattctccaggctgctcaagcgtgttgaaacttcgtgtctgggacaaatattgaaactgt

SEQ ID NO: 137830 - DNA, 1841 bp, Zea Mays
aaaataaaaaagctctggaagcgactggatccacacaatgacacacaaccatatagaaatatcacagccttcccccgctatcacactcacaccctgctctgtttccatataagtagcccactctgctcccgcctcacacaagcacatcgacaacacacggtccaagcacatcgacacacacgagcacagaagagaaacgggcacacgcaactgatcaaggcaaccaatattcaccgtcggcaatgggcgacctgatccctgggctgccggatgaagtggccagggagtgcctcgtccgggtgggcttcgaccagctgccggtggtgcgccgcatctcgcgccagtggaagtcggaggtggagtcgccggactaccaccgccagcgccgggcggaggggctggcgcgcccggtgctcgcgctggtccaggcgcagccgacagcgccgccggatgacgacgacgacgccggccccgcgcacaagcgctcgacggcggccaactcgtaccggctggtgctgctggaaccggccgagggacggtggacgccgctgccgcccccgcctgggccaagccagagcctgcctctgttctgccaggtggccgccgccgtggacggcggcgggcaggggaggaagaggctgctggtggtggtcggcggctgggacccggagacgtgggcgccgacggacgcggtgctcgtctacgacttcctgtcgggcgcgtggcggcgcggcgcgcccatgcccggcccgcgcaggtccttcttcgcctgcgcggccgtgggcggcgccgtgtacgtggccggcggccacgacgccgagaagaacgcgctgcgctcggcgctggcctacgacccgggcgccgacgcgtgggcggggctcccggacatggcggaggagcgcgacgagccgcgcgggctctgcgtcgccggacgcttcgtcgtcgtcggcgggtacccgacgcgggcgcagggccgcttcgtcgcctccgcggagtccttcgacccggcggcggcggcgtcgcccgcctggggctgggcgcccgtccacgaccgcctgctgcccgaggacggcgcgtgcccgaggacctgctgcgccgcgccgcggtccgtcggccgcatgtacatgctccgcgacgggcacctcgtggcgcgcgacggcgccgcggcgtggcgccccgtggcgcgggtgccagacgacgcgctcaccgcgccggccgtctccgccttccctgacggccgcgtcgtggtcgttgggtccgggtgccacggcggggaccagaccgtgtacgtgctccgcgaggagggcgggagacctgcgtcctggtcgcgcgcgccgccgccgccgccggagttcgccgggcacgtgcaggcctcctgcttccttgaactctgaactctgaagtggagggtgtgtacctacacgtacgtggtggctgtgcatacatgacggaactacgctaccgtacttgttgtgccactgctgcagtgctgctagtctgctactcatcacggttgtatatacttagcaaataaatcatcacggttgtatgtacttagcaaataaagcagcggaacgggaatgatgtttattaaagaacatttccaggctagtgtaattaattagcgatgtcttcgttggattggatcacaatttgtttgatccgatctgcatgtaggggactagggacaggaaactgctgctaccggcgcgcttgcaaatggctgctgaaaatgctgtgcactaacagcggaccccggccccagtttagctcagtggtttcagtttctagaaccttttgatggaactgttttggcgggacatgaaaggagagtttctgtt

SEQ ID NO: 137831 - DNA, 2892 bp, Zea Mays
atgccggggcgacaaggcatggagccggcctctgctgcggcgcgggcgccaaggccgccgagcttcgcgtcgcagaccaatgccctcctgcgcaaaaacctcatcttccagaaacgtaacaggaagggaaccattcggctaatcatagttcccatatacctctgcctcataatcagcgtccttcaaagggtcatcaacagcttcctagacaagccaaagttcaggtgtggttgcaagtgcatcgacgatgccaacggcagcacagccccctgccagaacgtgtgtggaatccagtactccacgctggatcaggcgcctagttgccccattccaaatcctccgaaatggcctgccctcgtgcaagtacccctcccggagtatcgcgccgtgcaggactcctcaggcttgtttacaggcttccctgacgcatcatgcagaaagacacaatcttgccctgccagtataccctttgctggagcaaatacaactctatctaatagtatcatgcagaacctgctcacaagctcaccactcttaaatctttctgattacacgagcatatcaagtcttttgcttggtacagatgttccaggatcttctacgggattcgttgaacctgcttttatctcggctcgacccatatatgttcttcaaccacagtgcaagtccggtgattcagttacaatcccaattaccgtcggttctgttaatgcccagaaagcagagataaaatgtgttcaaggtttacccttgtggcggaacagttcaataacaattaatgaggaaacatttcggggctaccgaaaagggaaaactgctaaagggataaatgaaattgcgatgggctatgattttcaagactcaaacgagaatcattttaatgtccttactttgtataactcaacgtatgagaatgcctctttcattccaatgccatttgcacttctgcgcattccacactcattgaatgcggtatcaaacgcctatctccaactaatacaaggttcgggtgtaaaaatgttgctcgacttcacaaaagaaatgcctaagcaagccacccgtctgacatttgatttttctgctgtggctggtgtgaactttttcaagataaacgactacagtatacagtttgttttctttttcagcttcattaatctgcagattgtactggccttcctagcctcatcattcttttcgaaagttaacactgctcaggcaattgcgtacctgtacatatttgggtcagggttgatggctggatatcttattcgcaattttattgaaggggggaaattcccaagacactggatcacagttctggagataatacctgcattttctttatatcgaggactatatgagcttggccagtatgctgttagatcttcagaaacaggaagccctggcatgcgatggagtgatttaaatgaccacatgaatggcatgagagatgtgttaatcataattattttggaatggttggttttgcttcctgtcgcatattatttcgactatgcttcttcagttggacacagatctagtcccctttctataatcaaacatctcttaaagaaggaccccacctggagaaggataactgctaatgaaatagatggtaaggatgttcacatagagatggagaaggtagacattatcaaagaaagagaggctgttgatcaagtgctacagcagcaacaaactagtggctatgctgtagtctgtgatgacctaagaaaagtatatcatggaaaagatggtaatcctgataagtttgcagttcaaggagtatcacttgctttgccttatggagagtgccttggtattcttggtcctaatggcgctggcaaaagctcttttattagcatgatgattgggtttgtaaagccaacatcagggaacgcttttgtacgggggttcagcatacaaaatgacatggaaaagatatacagcagcatgggagtttgcccacagaatgatatgctttgggagacactaactggtagggaacatctccagttttatggccgactgaagggcctcagtggttcatccttggatcttgttgtcgatgagtccttaaggagtgtaaatttgcttcatgggggtgctcctgataagcaagtgaagaagtacagtggtggcatgaggaggcgccttagtgtcgccatctcgttgatcggagatgctaaagttgtgtacatggatgagccaagcaccggattagacccagcttcgaggaagagtctctggagcgctgtgaagcaagcaaagcaggatagagcaatcattctcaccacgcattccatggaagaagctgaaactctttgtgacagactgtgtatcatggtcgatggaaagctccagtgcataggcactcccaaagaggtctgttcaaaacggagattgacatacagaatcatgtggcagctcatagctagatacggagggtactacgtgctgacgatgacgacactgccggagttcgaacaagaggtcgaagatctggtgcgcaggctctcgccaagctccaggaaggtgtaccatctgtcggggacgcagaagcacgagctgccgaagcaggaagcgaggatctcagacgtgttcatggccgtagagagcttcaagaagagggtggaagtccaggcctggggcctcgcggacaccaccatggaggacgtgttcgtcaaggtcgccaaaggggcccagtccagcgaagaactctcctagagtcgtagtctacatgtaatggtgcaagggcaagggcctgctgttgatgctaggtgtatatatatgtacagcacgtaaaattttcttccgttgcaaagcaaatggtttggtttgctcacctttgattttggaattttgataacaaagattatttgattgaattga

SEQ ID NO: 137832 - DNA, 930 bp, Zea Mays
atgaacgacctgttctcgtcgagctcgttcaagaagtatgcggactcgagcgtggcgacgtcggcggggggcgcggaggccggcggcgagagcgtgattaacctcgacaagttcttcgaggatgtggaggcggtgaaggacgacatgcgcggtctggagggcatgtacaagggcctccagtccaccaacgaggagaccaagacggcgcacgacgcccgcaccgtcaagtccctccgctcccgcatggacaaggacgtcgagcaggtgctgcgccgcgccaaggccatcaagaccaagctcgaggacctcgaccgctccaacgccacctcgcgcaaggtgcccggctgcgggccggggtcctccacggaccgcactcgcacctccgtcgtcgccggcctcggcaagaagctcaaggacctcatggacgacttccaggggctgagggcgaggatggccgcggagtacaaggagacggtagcgcggcggtactacacggtgacgggggagaagccggaggacagcacgatcgaggcgctcatctcgtccggggagagcgagtcgttcctgcagaaggcgatccaggagcaagggcgcgggcaggtgatggacaccatctcggagatccaggagcggcacgacgccgtgaaggacatcgagcgcagcctcatggacctgcaccaggtgttcctcgacatggcggcgctggtcgaggcgcagggccaccagctcaacgacatcgagagccacgtcgcgcacgccagctccttcgtgcgcaggggcaccgtcgagctggagtccgcgcgcgagtaccagaagagcagccgcaagtggatgtgcatcgccatcctcgccagcatcgtgctcatcgccgtcctcgtcttgcccgtgctcgtcaacctccgcatcttgacgctccccaccagacgatga

SEQ ID NO: 137833 - DNA, 1173 bp, Zea Mays
gacatgctaggtagagatctacggcaatagaatccagacgtaccaactaaaatgttagggacataggttaaaatgattctaaatcagagctcaaataagagtacgaccaacacttcttgcacctgctcaagatgttttccacctcatagtgtcgttacgaaatgtgtgaacaggagattaataaaaatatcccctcttgcatgtgagcctgcaaccaataaaaaagtgtctatttactggacatatgttcatgttcacgcggcgcttcataaaatctgcataggatacatcgcacttctatctgacctactcaggtctggtgttcagcggttgccacacctaggatatcaaatggattacatctccaaaacggaacctttctatgtctgcatgaactcaagttccttggctgatccatatagaacgatgctacctactaccacaacattaccatctaagcaaattgtgttatttgttcatctacgtcgaaaagcacatttgaccattttgggtgctcacacaagattctaaatgaaattcttggagatagagagcgtatccaatctctgtattctgagattcctgggagaaccacaagcaatgccagtacctccagaagaacttctaatttcagtgtggacgcaactggagatgaaagcctttctgttgaagcacacaattgtatactcgacaatactgcgtctattttatccatgaggagctgcgctgacaagctgtggaagagaagaaaaggttcaaaactttaaaatcagaagataaaccagaggaagcaatgcaggctttcaagtatggtaaagaacttgcaaatcaagctgcaacgctggaattacaactgaagagtagtagtagaatggctacacaagcgtctaatgtctcttctgttgttggtacttcgacgacggctggttctgatgaggctagaataaaaaggacttcaactgcgaaaaagaattaagaaagaaaagaatgatcttgcatgggcttagagatataggttggtcatatgcaggcactgttttgctattttatattggcacaaatgtgtaatttggaaaacacatgtcctatgttgtgcttccttgcgtcctctaaaacaatgttatagacttttatgtcttttctgtaatattttttatctaaatcttttttgta

SEQ ID NO: 137834 - DNA, 2924 bp, Zea Mays
ttttagtttttttttaaaaaaatagatctcgtggaggtggacccgtttagatagaagaagctgaaatagacataaaattgttgacctaaagcttttctaaacatacccttaggtgccgttcggttttcacggaacgaaagactagaacaatttctagctggatttcttctctaaggtatataaattttgattatctaaaacgattctaagtccattattgaataaacgaacaagtccttgactggctctagataagagagcaacttgttaacatgaggcgtgagcgtgagacgccaccgcactgtcgccgccgtgcaggctccaaaagatttttgtacgtattttccttttcagactccggcaaacagaaactcatgttttccctagttctgtgggcatcctgaagttgacgtcccgacccagggcaacccttgctgcgttgccgcgttcgcgtccttcctcagcagccctgtgtctgtgtgctgggccggcggcggcgagtgtgtgcgatgcggtgaccctcacgcagcccacgcctgacgcctccaggggacaggacgggcctctgcctctctctccttcaccttcactttaaaatacaccagcccgcggctcctcagcgctctctctcgctctcgctctcgtcaggcacgcacgcacgagtgaacacagacgcgatctcctgctctctgcctccctcgttctcctctgcccgtgcgcgctccagggcacacacgtacggagcgtgcgagcaccgtcatggaggaggacggcggcggaggcgcgcggcacgtggagcggtgggagggctacgtggactggaggaaccggccggcgaccaggggccggcacggcggcatggccgccgcctccttcgtgctcgtggtggaggtgctggagaacctggcgttcctggcgaccgcgagcaacctggtgacgtacctgatggggtccatgggctactcgccgtcgcagtcggccacggcggtgaccagcttcatgggcacggcgttcctgctggcgctgctcggcggcttcctctccgacgccttcctcaccacctacaccgtctacatcgccagcgccttcgtcgagctcacggggttggtgatcctgacggtgcaggcgcgcacgccgtcgctgatgccgccgcggtgcgcctcgccgggcgcgggcggggctgcgtgcgagcccgtgtcgggggcgaagaaggcggtgctgttggcggggctgtacctgacggccctgggcgtgggcgggatcaagggctccctgccctcccacggcgcggagcagttcgacgagcgcgcgccgcgggggcgcaaggcccgctccaccttcttcaactacttcgtcttctgcctctcctgcggcgccctcgtcgccgtcaccttcgcggtatgggtcgaggacaacaggggatgggagtgggggttcggcatctcctccgtcgccatcctgctctccgtcccgctcttcgccgcgggctccagcctgtaccggaacaagctgcccacggggagcccgctcacaaccatcgccaaggtcctcgccgccgccgcgctcgcgcggcgccgcggcggcggcggcggcggcgcgcagagctccagcaacggcgccgtcatcgaccgcgcgcccagccccgcggggagcgccgacgacatggatgagtactgcaagtccggggacatggaggagatctcgatctccgacgcggcgtcgccggccgccgagccgtcccgcgagctcgcgttactgaaccgcgcggtgcagtgccagccgccgcggcacggccgccgcctggcgtgcacggtgcaggaggtggaggacgtcaaggtcgtgctcatggtgctgcccatcttcttgtccaccatcatgctcaactgctgcctggcgcagctgtccaccttctcggtcgagcaggcggccaccatggacacgcgcgtggggaggctcaccgtgccgccggcgtcgctccccgtgttcccggtcacgttcatcatcgtcctcgcgcccgtctacgaccacatcatcgtcccgttcgcgcgccgcgtgacggggaccgagacgggcatcacgcacctccagcgcatcggcaccgggctggtgatgtccgtcgtcgcgatggccgtggccgccgccgtcgaggtgaagcgcaaggacgtggcgtccagaagcgggatgctggaggactccgggaagccgctgcccatcaccttcttctggatcgcgttccagtacctgttcctggggtccgcggacctgttcacgctggcggggctgctcgagtttttcttcagcgaggcgccgccgcggatgaggtcgctggcgacgtcgctgtcgtgggcgtcgctggcgctggggtattacctcagctcggtgctggtgtccgtcgtgaacagcgcgacaggccgcggcgggcaccggccgtggctgcagggcgccagcctgaaccactaccgcctcgagaggttctactgggtcatgtgcgtgctcagcagcatcaactacctcttcttcctgttcttggccgtcaggtacaagtatagaaacgcgggggtcatcaaagtgatgaggacatcactatgagtacgactacaccagcagcacctccacatcaagcgccacttccttcattagctgggccaatcactcgggcccgtgccagagatcttaacttcgtcatgctactgaagaatgagggcccagaagaatagacgaccagcccaactgcggcccatagtggacgacctagggttggccgcccctaggggctgcgccccctctatttatccaggagctgcgcctcctttattttcgagttttgttttacgttagccttagctactctcgaacacgcgcaaatctgcgctgtcttcgtgtattcagaactccaccctcgagtaatagattagattgctcgc

SEQ ID NO: 137835 - DNA, 972 bp, Zea Mays
ttgattgcttaaacaatcgttattattattaacctgacttaaattatctctacaaaacatacattagttaaaataatcttatgttgtcattaataaccaaaacaacaaacagtctaccaaaacttagaaagagttctaactttcataattcacctcttagaagttacgatctttttaatctcgtccatctccctttcaaacgtcacggtccttcgcctcccacgtcctcatcggcgtgctgaactctatgccaaagcaggcttactcatccagatccagcatggcattagcaccggttggcatgggcgcggcatggtgactgaccttatacagtgatgtcctatatgaaagcattgcaaaagcctagtgtacaacgatgtctacacataaaaagtgaaatcatctttaacagcctgggcaacgttcgacgatgagccgacgtaggttgaacgaccaggttgagtcaaaacagaaacgaaaaatctcacctagcaaggcatcacaatacagacacaacagaacatcgggtccatttcctgcatcttcccctcgtctcttctcttttttttttagccacacctgttttttcctgaaaaaaaacaaaagcagaatatattttgggacaattctattgcagcttctcttctctgctatctcagaatcatacagaatgggggtacaagaggagaaaaaaatctcaacaccaaagaatgagaggtgctacagagcggctagagggaacacatttttgaagatctacaggcagacggcagacgctgcggtagagaagttaaaagaagccaacatgcttactacaaaaagtagtctggtgtcttgcgcgtcatgtccggctcaatttgcctcggagctgggtcgaattggaggaagttctgatccatgttctcgccaatttcgaggatggcagccatgtttccgcatcggtagcagtagttaggcgcgctgaacactgtc

SEQ ID NO: 137836 - DNA, 1082 bp, Zea Mays
actagtagtgctgtgtctaatagttctagtgtcgtgccgggccggacggcagtttggccatctataactgtacaccatatagcaccaatcactccgcagtgcagacgcagcgcatgcaggtagcaatggcgggggagacgaagaagggcctggtgctgctggacttctgggtgagcccgttcgggcagcgctgccgcatcgcgctggcggagaagggcatcgcctacgagtactcggagcaggagctgctgggcggcgccaagagcgacatcctcctccgctccaacccggtgcacaagaagatccccgtgctcctccacgacggccgccccgtctgcgagtccctcgtcatcctcgagtacctcgaggaggccttcccggaggcctcccccaggctgctccccgacgccgcctacgcgcgcgcgcaggcccgcttctgggcggcctactccgacaaggtctacgaggccggcacgcggctgtggaagctcaggggcgacgcgcgggcgcaggcgcgcgccgagatcgtgcaggtggtccggaacctcgacggcgagctaggggacaaggccttcttcggcggcgaggcgttcgggttcgtggacgtggcgctcgtgcccttcgtgccgtggctccccagctacgagcggtacggggacttcagcgtggcggagatcgcgcccaggctggcggcgtgggcgcgccggtgcgcgcagcgggagagcgtggccaggacccttcacccgccggaaaaggtggacgagttcatcaacctgctcaagaagacctacggcatcgagtagtagagcggactactactagcagaggagatggtaccggccgtacgtacgtggctgccatgcagtttttgtttcggtttgtttaaacgggactccatgaatggatggaactcttcttgggctccgtgtgctacatacacatctgtaaaggtgaactaaaatcacggtaaaaactcggaaattagtttgtaaagggtccagcccccctcctttataaatagagaggtatacggctgatttgtaatcatcaatcgaatcaatacaacatctatttcgcatttt

SEQ ID NO: 137837 - DNA, 1694 bp, Zea Mays
gttgtgccgcagaacggaccaccaggttggcgttgctggaagagaaggagctgtcggcggtgcttaaaacctgtgctctacctactggcgtagccaggaagatagtacagcctgccgctgccaagtacagttatgcattccaagtccccagagaagcaatcacttctgggatcgaggagaaacccagcaaataatgggagtacggaggatgaaaagggagacggcgggatcccatggctgacatttctggggttcgtgttcctgaccttcaactcgggcatggcgatctaccgctcggaccgcgaccccgggtcaatagcgttcgtgtcgggctcgtacgtcgacctgctgctgctcttcctctgccttcgcctgttcgagcggacgccgcctgactcgccgcgccgggggtggatcaaggcctgcgtctgggggctgaccacgctgctcaccgtcatgttctcgcagaaggtggccgccatcatgccgccgctgctggcgctcgtcgtgtgggcgatggcgttcgccaccatcggcggtggcttctacgcgttcttcatccacaaggacaaggccgcccttgtggaggcggagaacccgtagatgtctctgccgctgccatgcgctcgtggctgtttcagactatctccagccccggtcctatgattttgaggcctctagtcgaactgatcatggtggaccctctagactataaaaaaaattctatattatacaatagagcatattaatacttcgtaaataaatgatcatgtatattgaaattggttttttaaaaatctaagaagctagataatatacatcggtacaaattagcacttcgcaggttgaaaaataagaacgacgatagctgaataacctaaattctgattgctcgaccatgcgtgtctggaggctagcgcagtggtgctagctccgtggaatcctagagggttggatcgacgagatggcgaacgacgatcacgtggagggtgtggtctcatagacgctcggggacatgagcgtgacgactagtcagtggggcaatacgtgccacattgtccgtgtgcgcggggcgtcagtgtgtccagccctaccgccatgttggctacctatactattttactactagcatataactcgtgctaacgctatgttcctgtgaagaggaggagaggggtggacatttcggtggtggcgcgaggggagggattgatggcggtggagatgcgaggaggggagggctaaaggatgatcaaataatattctttgttagatttgagtgagcaaaatagatgatgttatttaatgatctgaaccattaattttgatgtaatgttaaatatggttccaatttgtttgaaggatttcgtaaatattataggtgtgtgagttatttggttggatgtgttttgtaaagtgtaaactggtgtattatatgatgttataaatactaaatattgggctcctaagaattttgggcccccagctgtcacctccctcgcataggctcagggccagctcagggccagtcctgactatctctatccttgctctgtagattcttattatatctcgtttctctttaataatcagcggcggcggatgacaacataagaataaggtatagccgacaaaaataaggagtggcgaaggacaacataaatataaagtataaataagaaaaggtaaaaaaa

SEQ ID NO: 137838 - DNA, 732 bp, Zea Mays
tgtaggatccgaaacaacatccttgcacgcggacacctggtgacacactacaaaaaagggtcactataacgtggcaaataaaacaatacatgctttctcgtattgaattgatcagtgacatgatctgaaaataacatcgctgactcctactaacaccatccatcatcagatgtaacagcgtcatgcggcagtgtgattgaagctccgagagtactgttcattatgcagcagagagatacacaaacacacatacactaagaaaacacctgtaaatcaggttcactgggttctgcttcccccactatttccaaccactgatcgaggtgatccggcattggcattggcgttgctgagacacgatcagtgagcctgacatcagctcaacccctccagccagggcactagtcgatcagccgtgtgttcttcaacccggccttgatcagacacggcgcgtacaccggcggcaccatgcagttgtgcatcaggcagagcagggccgtggaggggagcgacgacaacggtgatatccgtgcgaggattagaaatgcggcagcattcgctagggttcacgaaggcaatgggaagcagggatgggtcatcggcacagtggagcagacgcgacactgctcaccgagtgtgaatcgtggcaatgtccgcaagaagcaagcaagcaaaaaaaacccctcagatctagagcatgaggatggctcatacctgttcgaagttaagtag

SEQ ID NO: 137839 - DNA, 603 bp, Zea Mays
tactgcagacctgtttgcaccactcgcgccaaaagtatacttgcatatcaagggaacgacgaggttgggaagcaaagagaggatgactcccttgcatgcgaattcatcactattgtgcggcaagcatgcttggtgtcacatgtgttctttctgagaccctctgctgcagttgtagacaaaatccggtgcgcacccatcaacaccaggtcgaggcaattccaagcttttgtagaaattgtgaccagcacactgtttccaagtcagtgcccacaatatttctttacctgcactgtcccccctaggatgatttaaaaatagttgccatgataaaaaaaattgttggagactcatattcgaccaactattcaagatgacagtggtgacattgaatattcgatctgtgtgtctttcccttcctccccttatgtgtggtctggtctgctgatatgaagattttggtttccttgccttactagaacactatcctttcagagaaataggaataattaagcttaaaatgcaaggtgcctgtagcggctattcaagttcatcagtcacattgaattcttggatagaaaacatgcttatgcactatgggcctgt

SEQ ID NO: 137840 - DNA, 272 bp, Zea Mays
ctcacgaagtgcgtctgcataagagctcatatctgtcaagatgacaagtacatgcttcccacattcatatgccaaatattctgctgttgttagagcaatccgaggggtgataatacgttcaatggtgggatcattagcctattcagaaaaagggtgacccgttccatggaaccgttctcttcaaaatcacgtttgaagaattgagctgtttccatgttcactcccatagcagcaaacacaatagcaaagttgtcatcttcaccaccctgcag

SEQ ID NO: 137841 - DNA, 814 bp, Zea Mays
taacaacttcgcacacattagacagaacttctggtgaggcagtagcacatatttcgcagcagtttattgccccttctttattcaccattcacaaatgtacatacagccagttgtgttcgagcatcctggtccagaatgctcttgctaacagttctggaaggtgaaagaaaacaaataactgaaatttaaccatagtccacagatgacacaatatcacaaatattgccgtgaccgcgagtcatctacgaaaaacttgcgctcatcaacagaaaagaattggacctgactacacataaatacagggaaaaggccatgaagccaatctgttcaatttattcaacacttgccaaactattggaacactgatcaacgatcagtgattcagtgggaggcatctctgctatagtactggtccaaggtcttcgccgggatacggtggagaagttcgcgagggaagatccgaagcaatgtccatgcaagatctagtgactggaagatgttccgtgtgtcgtatgctccttgtgtcacaaacttcctctcaaacttgtcaaggaactctaaaccagatcctcagacgagagtgcctcctctccaacgactgccttcatggcctgaacatcctttccaattgcgtagttggcataaagctgaaagagaaaacagcagatgtcaattcatcttgcacatcatgtctgaagggtagcaaagactatggactcccttatcaaaaataacatggactcatagtatgtacctgattagacacatccgaatggtctctacgtgtcatgccctcaccaatagcactctgcag

SEQ ID NO: 137842 - DNA, 1037 bp, Zea Mays
ctgtaggtggtttatgttttaatgttattttattgtgtcgtagccatactggcgatgtatttggtacttatgctttgcgccagaatttgaaaaatccacacgtaccaatctggctccgctcgtcacaaatccgtctgtgcatcgcgtcggcgaccaggaggcgacgaggcaggcagagcgggcggcgactacagcggcagcagatctcacggcatggcggcgaaggcgatctcgagccccgtgccggtggagtggtatccgacgctggccgtcgtcatggtatccgtaggcctcatgttcaccgcctccttcttcatctatgaagctacttcatccaagcggagccgtagcctggcaaaggagatcacaacagcagctgttgcttctgttttactgggctttgggtctctgttcgtgctccttgcaagtggtgtttatgtttgacgactgcgtatggggccgtgttcttggattcagcagacttagggcatgtacaagtctgagactccatttttctatgagacagctaagagactatatgacataactttaagactcagtattataaatgcagttaatagacaacatgcgtagagtcgtaaagaggcgggctcttagcgaagagcttggctcttgtattttttttcatatagtcccttagagaactctcaagagaccatatattaaatagggttgtacatgcacttagtaattgattgtaggatatgccagatcctcgaagcttgtgttgtcctaacggatatggagcatttgaactttcaaactttctagaacaattacttaagcaaccgagttacagtaatactcaaacgtttctccctaggtctccattatacatctttttgtttatctttaattcatacctgcttttacaatgttttctctataaattacagctgcaacagctagctttaatccgaaacgaacaaactttacatcatcaatctaaatcccggttgcctgaatttgagtttgttgcccctcaataaatcgctgctatttattatcacctgcat

SEQ ID NO: 137843 - DNA, 1612 bp, Zea Mays
attgtaagaatccatcgattgctcgagagagggatatctgtttccgcatcggcagcgttctctgcagcggcgatgccgctcctcgaggagatgatggaatcgtcgtacatccgcacgtacctgcagcagatggcagcgtcggtctccacggcgagctgcgacccgtctagcggcgccgatgaggtggagtgccgcgacgaggcggcggcgctgaggcttaagatggtgttcgtcgtggccatactcgtcgcaggcgcgaccggcgtcgcgatcccgctcgtcggccgccgctgccacgggcatggagcctcctcctcctcctccaccggtggggcgttcgtgctcgtaaaggcgttcgcggccggggtgatcctggccacgggcttcgtccacatgctgcacgacgcggacgaggcgctcacggacccttgtctccccgccgcgccgtggcgccgcttcccgttcccagggttcgtcgccatgctcgcggcgctcgggacgctcgtcttcgacttcgtcggcacgcatatgtacgagcgcaagaagcaccacgccgatgcggaggaagccgccgtcgtcgttggcaatgccagtgccagtgccaatgcgagcggccacgacgtgatcgttgcgctgctacaggacggcgcgctcgtggcgagcactggcagcagcattgggagagacgggggaggccacaaggaccccatgcacatcgtggggatgcacgcgcatgccgcagcacataggcatagccacgcccacgggcacggcccatgtgatgactgtcacgatgggcatgatgaggagccgtcccaagctcgtcatgtggtcgtctcccagattcttgagcttgggattgtatcgcactcagtgatcatcgggctatctttgggcgtctcacagaatccttgcaccatcaaacctctaggtgctgctctctccttccaccagttttttgagggctttgcattgggcggctgcatttccgaggctcagttcaagagtttctctgcactccttatggctttcttcttcgctatcacaacacctgctgggattaccgtggggtctggtatcgcgtcgttctacaatcccaacagccctagggcacttgtggtagagggaattctggattccatttcggctggtattctgatctacatggccttggtggacctcatcgcagctgattttctcagcaagaggatgagctgtaacttgaggcttcaagtcggctcatacattgccttgttccttggtgccatggccatggcatctctagccatctgggcttagcaagtagaatggaagtaaggcaaagatttgagagtgctgcctaattgcctttgatagcaggaggttctctccagcagctagttggttgcaattcttgatgagaatgggaggcattttttattttcttatattcttctgtttgtctattggttctcttcatgttggtggtggacagtaagatttagttcttgtgccctgtttggtagagctgttgttgttggaaaagtaacttatctaagaagctagtgaaaaaaacttttgtttatcgcatgcttttagtttattctgagaagaagctgaattgataaattgc

SEQ ID NO: 137844 - DNA, 849 bp, Zea Mays
attgtaagaatccatcgattgctcgagagagggatatctgtttccgcatcggcagcgttctctgcagcggcgatgccgctcctcgagattcttgagcttgggattgtatcgcactcagtgatcatcgggctatctttgggcgtctcacagaatccttgcaccatcaaacctctaggtgctgctctctccttccaccagttttttgagggctttgcattgggcggctgcatttccgaggctcagttcaagagtttctctgcactccttatggctttcttcttcgctatcacaacacctgctgggattaccgtggggtctggtatcgcgtcgttctacaatcccaacagccctagggcacttgtggtagagggaattctggattccatttcggctggtattctgatctacatggccttggtggacctcatcgcagctgattttctcagcaagaggatgagctgtaacttgaggcttcaagtcggctcatacattgccttgttccttggtgccatggccatggcatctctagccatctgggcttagcaagtagaatggaagtaaggcaaagatttgagagtgctgcctaattgcctttgatagcaggaggttctctccagcagctagttggttgcaattcttgatgagaatgggaggcattttttattttcttatattcttctgtttgtctattggttctcttcatgttggtggtggacagtaagatttagttcttgtgccctgtttggtagagctgttgttgttggaaaagtaacttatctaagaagctagtgaaaaaaacttttgtttatcgcatgcttttagtttattctgagaagaagctgaattgat

SEQ ID NO: 137845 - DNA, 1714 bp, Zea Mays
gtggcgcggccctaatttcgccgcgtgtgctctgcaccgtcgcgctttcctgggccacattgcttatcttctcgctgctattattcctttcccttccaaatttgggtcgtgttaattcctccgttgtcgttagtttcccctccatttacgccgctgaattgcgaggcggaatcgcagttttttttgataattcagttgttgcgttgctatgaatcgtaggagatgatggaatcgtcgtacatccgcacgtacctgcagcagatggcagcgtcggtctccacggcgagctgcgacccgtctagcggcgccgatgaggtggagtgccgcgacgaggcggcggcgctgaggcttaagatggtgttcgtcgtggccatactcgtcgcaggcgcgaccggcgtcgcgatcccgctcgtcggccgccgctgccacgggcatggagcctcctcctcctcctccaccggtggggcgttcgtgctcgtaaaggcgttcgcggccggggtgatcctggccacgggcttcgtccacatgctgcacgacgcggacgaggcgctcacggacccttgtctccccgccgcgccgtggcgccgcttcccgttcccagggttcgtcgccatgctcgcggcgctcgggacgctcgtcttcgacttcgtcggcacgcatatgtacgagcgcaagaagcaccacgccgatgcggaggaagccgccgtcgtcgttggcaatgccagtgccagtgccaatgcgagcggccacgacgtgatcgttgcgctgctacaggacggcgcgctcgtggcgagcactggcagcagcattgggagagacgggggaggccacaaggaccccatgcacatcgtggggatgcacgcgcatgccgcagcacataggcatagccacgcccacgggcacggcccatgtgatgactgtcacgatgggcatgatgaggagccgtcccaagctcgtcatgtggtcgtctcccagattcttgagcttgggattgtatcgcactcagtgatcatcgggctatctttgggcgtctcacagaatccttgcaccatcaaacctctaggtgctgctctctccttccaccagttttttgagggctttgcattgggcggctgcatttccgaggctcagttcaagagtttctctgcactccttatggctttcttcttcgctatcacaacacctgctgggattaccgtggggtctggtatcgcgtcgttctacaatcccaacagccctagggcacttgtggtagagggaattctggattccatttcggctggtattctgatctacatggccttggtggacctcatcgcagctgattttctcagcaagaggatgagctgtaacttgaggcttcaagtcggctcatacattgccttgttccttggtgccatggccatggcatctctagccatctgggcttagcaagtagaatggaagtaaggcaaagatttgagagtgctgcctaattgcctttgatagcaggaggttctctccagcagctagttggttgcaattcttgatgagaatgggaggcattttttattttcttatattcttctgtttgtctattggttctcttcatgttggtggtggacagtaagatttagttcttgtgccctgtttggtagagctgttgttgttggaaaagtaacttatctaagaagctagtgaaaaaaacttttgtttatcgcatgcttttagttta

SEQ ID NO: 137846 - DNA, 1922 bp, Zea Mays
acgaaagctactagcaacatctggttccactctcgccggcatctcccccacccatccccaagtccagcacacacccgaagcgccgccgctagggtttggtccgacagccgcgaaacctagactttactgctccgacaggctgccattcactaatctagctagctccggttgggagctagggtttagctgagcttcgggtcgcggcggtgcggcatggcggggtacggggaagagaaccagaacaccatgagcgggtacgaggaagaggaggaagaagaggttgaagaagtcgaggaggtgtacgaggaggaggaggaggaggaggtggaggaggaggaggaggacggggagggggaagcggacgagggggctgtagcctccgagccagcggcgatggcggccgagacgagaagcgttgttggaggccggggcttagcgaaggccgttgggaatgttgataccggtggcgaggatgggagggatgcagattccagtggcggtgacgcctcggggaagattttcgtagggggtgtagcttgggagacaactgaagaaacattcacaaagcattttcagaagtatggagctataactgattctgtgatcatgaaggacaagcatactaggatgcctcgcggatttggatttgttacattttccgatccatctgtgcttgacagggttctagaggatgaacatgtcatagatggaagaacagttgaagtcaaaaggactgttccaaaagaggaaatgtcatcgaaagacggtcctaagacaaaaaagatctttgtgggtggtattccaccatctcttaccgaagataaattaaaggagcacttctcatcgtatgggaaggtggttgagcatcagattatgcttgaccatagcactggacgctcacgtggctttggatttgtcacatttgaaagcgaggatgctgttgaaagggttatgtcagaggggagaatgcatgatcttggagggaaacaggttgaaattaagaaagctgaaccaaaaaaacctggtgtgggtgattcaagctcaaatggaagacacagtcgtggtggtggtcatcgtgattcataccgtggtagtggtggcaatggcttttctgggaacagcagtggtggtggctatggatacagtggtggctaccgatcaactgctgcagcacattatggcagcacagcatatggtgcctatggcagagggtatggatacggtggtactgctggctatggcttaggttatggctctgcatatggtggctccatgtatggaggtccatatggtgcctacgcggcatatggtggtgcctatggaggtggtgcatatggtgctccaggagggtatggcgcgggaggatatggcagctacggtggggctggaggcatgggtggtggtggcagcgctggtggtcggggctccagcagataccacccttatggaaaatgataatccattcactgcctttgccttcctctaggatctgataataaagctatacattcccaccgagaaaatggaacattccattcaccttgttgaatcagcggcatctgaacatttttttcctggaacaaagattctagtctgtagtcgctgaaccctgaactgcctcatcccacccccaccccctgagctttctgtagaaggtgcagctcaaattctcgtaggcatgagccttagaagacccttgaaactacaagctttgtggtaacaatatggtgtcatggaacatatgtattttgatgtaaaacattcgctcactgaccagtgacttcgccatctctgcttatgtatgtagagaagcttagcaaaggattggactgatactattgaattgtgtgggtttctatttgtctccattctgatctgaatgcgtgttatctcgtttcaaaattctgtgttgttgctatcca

SEQ ID NO: 137847 - DNA, 195 bp, Zea Mays
acccgatgaggaatttttccctgccatctctagatcggatgattccgcagaacttcatgactcaaaacaaatgtgccgtagaagatagaactttggcaaatatacagcagatagaaaagaaaacagttaatattaccaaaaccaccgtaaacatcgacgtcaatcgattacaatacatgaattgacaacaatcaa

SEQ ID NO: 137848 - DNA, 3663 bp, Zea Mays
ggcgccgagatgggccgttccggccgccgccggcgggaccgcgtgcggtggagcaatctctacaccttctcctgcttccgtgcccagcaagagcacgccggcgatgcgggcccctcctccgatggggctggcgccgtcggcgggccgggcttctcgcgcgtcgtgtactgcaacaacgccgccctgcagaagccgctcaagtacatcaccaactacatcaccaccaccaagtacaacatcatcaccttcttccccaaggccatcttcgagcagttccgacgcgttgccaacctctacttcctcctcaccgccatcctctcgctcaccccagtgtgccccttctctcccgtcagcatgattgctccgctggcctttgttgttggcctcagcatgatgaaggaggggttggaggactggcgccgcttcatccaggacatgaaggtgaacaaccgctatgtcagcacgcacaagggtgatggcgaattcgactaccggcactgggaggacctttgtgtcggtgatgtggtcagagttgagaaggaccagttcttccctgctgatttactgctactgtcctcgagctatgaggatggtatttgctatgttgagacaatgaacctcgatggtgagacgaaccttaaggtgaagaggtcacttgaggtaacgctgccgctggaagaagacgagtcatttaaggatttccaggcagtgatacgctgcgaggatcccaacccgtccttgtacacatttactggtaactttgagtatgagaggcaggtgtacgcccttgatccgtctcagatacttctgagggactcaaaactaaggaatacagcctttatctatggagtggttatcttcactggccatgacagtaaagtcatgcagaactcaactgagtcgccatcaaagaggagcaggattgagaagaagatggatttgatcatatacatcctgtttactgtgcttgtgttgatatcgctcattagttcaattggattcgccgtgaggatcaagttagatttgccccgctggtggtacttgcagccagagaaaagcaataaattagatgatccatcacgcccagctctttctgggatattccatctaatcacagctctcattctttatgggtatctgattccaatctcgctgtatgtctcgattgaacttgtgaaggtattgcaagcacatttcattaaccaggacattcatatgtttgatgaggacactggcaatactgctcaggcacgtacatcaaatttgaatgaggaacttggccaggttcatactatcttatcggataaaactggcactctgacctgcaatcaaatggatttcctgaagtgttcaattgctggagtatcatatggcgtgggttcaagtgaagttgaacgtgctgctgcaaagcatatggcatcaggtgctgatgaccatgatatccctttacaagatatatgggaggagaacaatgatgatgaaatcgagttggtaggagtcaactttagtgttgggaccaacataaagccctccataaaaggcttcagttttgtggatgaccgtctcatgcaagggaactggaccaaggagccaaattcttccacaattctactcttcttcaggatacttgctctgtgtcacacagcgataccagagataaatgaagcaactggttctattgcctatgaagcagaatcacctgatgagggggcttttcttgtggcagccagggaatttggatttgaatttttcaagcgaacacaatcaagtgtctttgtcagggagaaacacacttcttcgaaagacacagttgagagggagttcaagattctcaatctattggaattcagtagcaaaagaaaacgaatgactgtaattctgcaggatgaagatggtcaaattcttcttttttgcaaaggagcagacagcatcatatttgatagactggcaaaaaatggaaggatgtatgaagttgatacgactaggcatctgaatgattatggtgaggcaggcttgcgaacattggcactatcatacagggtgcttgatgaatcagaatattctttgtggaatgcggagtttcttaaagcaaagacatatattggtcctgatagagagttgcaacttgaacgagtctctgagttgattgaaagagagctgatccttgttggtgcaactgctgtagaggacaaattacaaaagggggttcctcagtgcatagatcggttggcgcaagcaggtctcaaaatctgggttctgacaggtgataagatggaaactgcaattaacatcggatatgcatgcagtttactgaggcaaggcatgaaacaaatatgtttgtccatacccactggtgagcaggtagctcaggatgcaaagaaggttgcaaaggagagtctcctgtcgcaaatcgccaatgggtcacaaatggtcaaactcgagaaggatccagatgcagcatttgctctagttattgatggaaaagctctggcatttgctttggaggatgacatgaagcatatgttcttgaacctggcaatcgagtgtgcttctgtcatatgttgtcgtgtgtctccaaagcagaaagcactggtgactcggctcgttaaagaaggtataggacaaaccactttagcagtaggtgatggtgcaaacgatgtgggcatgattcaagaagctgatattggagttggaataagcggggtagagggcatgcaggcggtgatggctagtgatttttctatttctcaatttcggtttcttgagcgacttcttgtcgttcatggacattggtgctacaagagaatcgcccaaatgatttgctacttcttttataagaatatcgcatttgggcttacaatattttactttgaagcattcgctgggttttctggtcaatctgtatacgatgattggtttatgctgcttttcaatgttgttcttacctcacttcctgttatatcactcggagtatttgagcaagacgtttcatccgaaatctgcttacagttcccagcattataccagcaagggccaaagaatcttttctttgattggtaccggatccttggatggatggggaatggcctctactcctctctggccatattcttcctcaatctctgcatattctatgatcaggcaatccgtgttggggggcagactgcagacattgctgcggtgggaactaccatgttcacctgcatcatctgggctgtcaacatgcagattgccctaacaatgagccatttcacatggattcaacatctctttgtatggggcagcataacaacttggtatctcttcatcctcgcctatgggatgacattgaggtctggcgacaactaccagatcctattagaagtccttgggccagctcccatatactgggcagcgacgcttctggtgactgctgcctgcaacatcccctacctgatacacatatcctaccagagatcgtgcaatccacttgatcaccatgtgattcaagagatcaagtacctaaagaaagatgttgaagaccagacgatgtggaagagggagcggtcgaaggccaggcagaagacaaagattggtttcactgcgagggttgatgcaaagatcaagcagatcagggggaaattgcataagaaaggcccatctttaacaatccagacggtatcg

SEQ ID NO: 137849 - DNA, 215 bp, Zea Mays
aacaacagcttgaacacattatgtatgttaaaccagaacaaactcaacttctggtgtccgctagaatttaaaaaggaagataaaatgctcacattatggcagcccctttaaaccatctgtcatgaattaaaattaagcagaagaatgaatcaaatgagtagctgaattacctcacattgataacatcatcaactcttctagtcagctagtgtcac

SEQ ID NO: 137850 - DNA, 4590 bp, Zea Mays
atgaccattagggcaaggggcacggaaaaccgagcaaaatataataaccgagcatctgatattacaggcgcaaacgcaacaggttacaccactagctggcgttctccgaacccctcgcggaaacccttccggctcccgccgctctcccgccgccatcactcgccgctctcccgctgccaaccgttgccttcaggctccagccgccggcacggctctgcgtacggggggattcacttccatccgacaccatctggccttctcttccatctcgtgggtgtttgttcgtgcgcgtggattgttttgtccgtgtctggtgcccgtgcaagagcccctaagctggtgcgtccgccatgtttccccccaaagggcccaaccactacgggcagccgccgccttacggcgggcagcagccgtacagccaaatccctagtagcactggatttgcagccccgacagcagcaggtggcactgatggtggtcggtttggtgggcgtggaggacaaggggctgctgcacagtatggagggccttatgcatcagtgtatggcacccaacaggttggtggacttggtggcaaaggtccagcttcttcaagtcttcctagcttgccaaatcgtccaacttctctcactgagtcatccaagttcacatctgcacctgtggggtctggcctggcaagaccaaatgatgactatatggctgtgcgaggttatgcacagaagcaagaccaatatggcacagattatccactagagagacgtatgtatggtgaacactcggccaatcttggtagaagggatggtctcagtgatttggatagaagatacactgatcagatagctgctggtcatcagagttcatcaatgcgccatcagcagctcttgaaaggtcagctgcagcctggatctgatacgagacaagccgattactttgcaggaaggtctgctccagttcatcaagcatcccaggaaattggtgtatatggaagagttgatgctgataaccacaacatgtccattcttgggactactccatatggaagacagcaagcagcctcattgttggaaggagctccgaggacaaacattgacagcctctatggacaaagatcatcaagtgctggttttggtgcaggtcttcctcctggacgtgattatgcctcagggaaaggcctgctccatccatcttcggatcctgattaccgagatagcatcttaccccatgtacatccaggtgtatcaatgattgatgaccgtagaattgatcggatcggttctcgtcgtgaattggatctaagagatgaagagcgccgaagggacctaatactggaaagagagaaagagcttgagtgggaacgtgaacgtgagttacgggattttcgagaccgtgaaagagaaagagaacgtgaaagggaaagggaccttgaaagactactaagagaacgcgaaagagaaagggagcgcgaacatgaaagagagcgtgaaagagaacgccttcgtgagcgccgggagaaggagagagagcgggaaaggaagcgcggagctgatccaaggcgggagcacactccatctagaggtcctggtgaccggcgacactcttctcttagatctgagaagcctgtgcggcgaatctcccctcgacgtgatgctgggcataggcatcgttcacctgttaaagaaataaagagagaatatatttgcaaggtgtttccatttcgcttcgtggatgatgagagggattatctgtccttgacaaaacggtatcccagacttgcaattactccagaattttctaagattgtcttgaactgggctaaagaaaacttaaatcttcctctggatacaccagtgagtttggagcacgatatccatgattcagatgatggtgctgatgaaggagcaattatctctactgagaaaacatcaagcttcaatactccggccaccatttggaatgcaaaggtactattgatgagtggcatgagcaaaggtgcctttgctaacataacttcattgagaagtactgaggaacgagttgtgcacttgaacaatatcttaaaatttgctgtattcaagaaggatcgttctctttttgcaattggaggcccttggaatgcagatatagatggtggtgacccatcagctgactgttcttgcttgattcgaactgccatcagatgcgttaaggaaacggttcacgttgatctatctagttgcacccactggaaccggtttgtcgaggtacattacaatagaataggcaaagatggactgttcagtcataaagaaattactgttctgtttgtgccaaacttgttggaatgcttgccttcagtggatatatggaagaataactggattctgtacaaaaaatcaaaggcagaaagggagcagctcactgttaaaaagagccctggtgatccaaaagagcagatgcaaggggagctgaacgatggtaaaaatttagatgctgatcaattaaaagaggctgatgttggttgcagtgatatgaaaaatgagaaagacgatgttgatatcaaacagcaaggcaatgatggagagggtacgggtaaagttgaggaacctgttcagaagatgggtggggatgttgaaggaaaaagtacgggtgactcctctattgaccatgcaacaactggggataaaaagcccacaaaaaagaaaataataaaaaaggttgtgaaagttgttcgaaaaaaaataactggaccttcagttgataaatcttctgaggacaagattgttgtagcagaatctgcaaacaaaactgcagaaggggggcaaagtcaacaaaagaatgatgatgctggaaaacaacaggagggagctggtataagtcaacaaccagaagcaaagaaaactgtgaagaagaaaataattcgaaggattgttaaaaggaaagtttctggttcaggttctcagttgaatacccctactacacctgctgaaactagtaggcaagaagcagaagttcagccagaaaaaaatgttgagagttcggccgacgttggaaactctcagactaagctacaagaagggtccaaaattccatctgaagatatctcaaatcagaagaaagaggagaaaccagcggaaaaggaacacccattgactgatctcagtttaaatgcagataagggcaatcacaaggaagcttttgaacaaaaagacatgaaaaacgatggaaagaaggataaaacaaaggatgataaagagaagaatagagacctcaagatggatttaaagcaaaagctacctcttgacacacaagaaaaaaagaggtctgatgaaccaccaaagtatccaggattcattctccaggcgaaaagaaatacagaatccaaactccgcttaacatccctttcattgcatggcctcctagactatactgccaaggatatagaggagtcagtatttgagctttctttgtttgctgagtcattcagtgaaatgcttcaacacagaatgggttgtgttatcctgtcttttcttgagaaattgcacaggcgatatgttgtgaagaggaatcagcgtaagcgccaaagagaggaagatctaaagaaagaagagaaatcttcagagaagcggtctaagactactcatgagactactaaaactgaaagtgttgataatccaggaggcagctttaaaatgacaaaagagggtgaagaaaagatgagcacagatcaatctgcaaatgtccatgctgaactgtcaaaagagggtcagataaaacttggcaccgatcatccaattgctaaccatggagaaccagcaaaagggggtgatgaaaatatggaggaagatcctgaatacgaggaagatcctgaagaagtagaagtatatgaagatgacgaggacatggatgatgctcacgctgaagaacagattgcagaacagaatgagaacacaaacgacagagagattaagccaaaagaagtagcgacaacagatggtggaaataacaaaagtacaagacagcctgaagtagaaaatgttactaatatccatgaaagagctgcttcaatggaagaaaagcagtccgtgccagagataggagatttggtgggaggtggagaaaaggtagttagtaaagagattaagccagcaaaagatgaggtgatcgacaaggacctattgcaggccttcaggtactttgacataaatggagcaggatatctcaaggttgatgatttaaaatgtattcttcacaacatggggaagtttttatcaagcagggacgtgaaggacttggttcaaattgctcttgttgagagcaattctgcaagggacaatcgcataatctatcctaagcttgtgaagattgttgacctgtaatctggcactgcttggcccgcgtcagtccccttgaagttaaccatgctatgatcgttgagaagtcagttatgagaaactattttgtttacttattaatgggttcactgccatttttgtggctacctgtttctacgattatgctacaaggagctgcatttcgtttctgttgaattttttttacggaaattatcaagtcgtgaacgtagcagccgaaaaagataaacgaacattgtat

SEQ ID NO: 137851 - DNA, 4527 bp, Zea Mays
acaggttacaccactagctggcgttctccgaacccctcgcggaaacccttccggctcccgccgctctcccgccgccatcactcgccgctctcccgctgccaaccgttgccttcaggctccagccgccggcacggctctgcgtacggggggattcacttccatccgacaccatctggccttctcttccatctcgtgggtgtttgttcgtgcgcgtggattgttttgtccgtgtctggtgcccgtgcaagagcccctaagctggtgcgtccgccatgtttccccccaaagggcccaaccactacgggcagccgccgccttacggcgggcagcagccgtacagccaaatccctagtagcactggatttgcagccccgacagcagcaggtggcactgatggtggtcggtttggtgggcgtggaggacaaggggctgctgcacagtatggagggccttatgcatcagtgtatggcacccaacaggttggtggacttggtggcaaaggtccagcttcttcaagtcttcctagcttgccaaatcgtccaacttctctcactgagtcatccaagttcacatctgcacctgtggggtctggcctggcaagaccaaatgatgactatatggctgtgcgaggttatgcacagaagcaagaccaatatggcacagattatccactagagagacgtatgtatggtgaacactcggccaatcttggtagaagggatggtctcagtgatttggatagaagatacactgatcagatagctgctggtcatcagagttcatcaatgcgccatcagcagctcttgaaaggtcagctgcagcctggatctgatacgagacaagccgattactttgcaggaaggtctgctccagttcatcaagcatcccaggaaattggtgtatatggaagagttgatgctgataaccacaacatgtccattcttgggactactccatatggaagacagcaagcagcctcattgttggaaggagctccgaggacaaacattgacagcctctatggacaaagatcatcaagtgctggttttggtgcaggtcttcctcctggacgtgattatgcctcagggaaaggcctgctccatccatcttcggatcctgattaccgagatagcatcttaccccatgtacatccaggtgtatcaatgattgatgaccgtagaattgatcggatcggttctcgtcgtgaattggatctaagagatgaagagcgccgaagggacctaatactggaaagagagaaagagcttgagtgggaacgtgaacgtgagttacgggattttcgagaccgtgaaagagaaagagaacgtgaaagggaaagggaccttgaaagactactaagagaacgcgaaagagaaagggagcgcgaacatgaaagagagcgtgaaagagaacgccttcgtgagcgccgggagaaggagagagagcgggaaaggaagcgcggagctgatccaaggcgggagcacactccatctagaggtcctggtgaccggcgacactcttctcttagatctgagaagcctgtgcggcgaatctcccctcgacgtgatgctgggcataggcatcgttcacctgttaaagaaataaagagagaatatatttgcaaggtgtttccatttcgcttcgtggatgatgagagggattatctgtccttgacaaaacggtatcccagacttgcaattactccagaattttctaagattgtcttgaactgggctaaagaaaacttaaatcttcctctggatacaccagtgagtttggagcacgatatccatgattcagatgatggtgctgatgaaggagcaattatctctactgagaaaacatcaagcttcaatactccggccaccatttggaatgcaaaggtactattgatgagtggcatgagcaaaggtgcctttgctaacataacttcattgagaagtactgaggaacgagttgtgcacttgaacaatatcttaaaatttgctgtattcaagaaggatcgttctctttttgcaattggaggcccttggaatgcagatatagatggtggtgacccatcagctgactgttcttgcttgattcgaactgccatcagatgcgttaaggaaacggttcacgttgatctatctagttgcacccactggaaccggtttgtcgaggtacattacaatagaataggcaaagatggactgttcagtcataaagaaattactgttctgtttgtgccaaacttgttggaatgcttgccttcagtggatatatggaagaataactggattctgtacaaaaaatcaaaggcagaaagggagcagctcactgttaaaaaggtaaagagccctggtgatccaaaagagcagatgcaaggggagctgaacgatggtaaaaatttagatgctgatcaattaaaagaggctgatgttggttgcagtgatatgaaaaatgagaaagacgatgttgatatcaaacagcaaggcaatgatggagagggtacgggtaaagttgaggaacctgttcagaagatgggtggggatgttgaaggaaaaagtacgggtgactcctctattgaccatgcaacaactggggataaaaagcccacaaaaaagaaaataataaaaaaggttgtgaaagttgttcgaaaaaaaataactggaccttcagttgataaatcttctgaggacaagattgttgtagcagaatctgcaaacaaaactgcagaaggggggcaaagtcaacaaaagaatgatgatgctggaaaacaacaggagggagctggtataagtcaacaaccagaagcaaagaaaactgtgaagaagaaaataattcgaaggattgttaaaaggaaagtttctggttcaggttctcagttgaatacccctactacacctgctgaaactagtaggcaagaagcagaagttcagccagaaaaaaatgttgagagttcggccgacgttggaaactctcagactaagctacaagaagggtccaaaattccatctgaagatatctcaaatcagaagaaagaggagaaaccagcggaaaaggaacacccattgactgatctcagtttaaatgcagataagggcaatcacaaggaagcttttgaacaaaaagacatgaaaaacgatggaaagaaggataaaacaaaggatgataaagagaagaatagagacctcaagatggatttaaagcaaaagctacctcttgacacacaagaaaaaaagaggtctgatgaaccaccaaagtatccaggattcattctccaggcgaaaagaaatacagaatccaaactccgcttaacatccctttcattgcatggcctcctagactatactgccaaggatatagaggagtcagtatttgagctttctttgtttgctgagtcattcagtgaaatgcttcaacacagaatgggttgtgttatcctgtcttttcttgagaaattgcacaggcgatatgttgtgaagaggaatcagcgtaagcgccaaagagaggaagatctaaagaaagaagagaaatcttcagagaagcggtctaagactactcatgagactactaaaactgaaagtgttgataatccaggaggcagctttaaaatgacaaaagagggtgaagaaaagatgagcacagatcaatctgcaaatgtccatgctgaactgtcaaaagagggtcagataaaacttggcaccgatcatccaattgctaaccatggagaaccagcaaaagggggtgatgaaaatatggaggaagatcctgaatacgaggaagatcctgaagaagtagaagtatatgaagatgacgaggacatggatgatgctcacgctgaagaacagattgcagaacagaatgagaacacaaacgacagagagattaagccaaaagaagtagcgacaacagatggtggaaataacaaaagtacaagacagcctgaagtagaaaatgttactaatatccatgaaagagctgcttcaatggaagaaaagcagtccgtgccagagataggagatttggtgggaggtggagaaaaggtagttagtaaagagattaagccagcaaaagatgaggtgatcgacaaggacctattgcaggccttcaggtactttgacataaatggagcaggatatctcaaggttgatgatttaaaatgtattcttcacaacatggggaagtttttatcaagcagggacgtgaaggacttggttcaaattgctcttgttgagagcaattctgcaagggacaatcgcataatctatcctaagcttgtgaagattgttgacctgtaatctggcactgcttggcccgcgtcagtccccttgaagttaaccatgctatgatcgttgagaagtcagttatgagaaactattttgtttacttattaatgggttcactgccatttttgtggctacctgtttctacgattatgctacaagcagctgcttttcgtttcgatgaatgttttttgtggaattataagtcatgaacttaatcgatgttgcctcatttcgtaaaagaggtgtttgtgtcaca

SEQ ID NO: 137852 - DNA, 142 bp, Zea Mays
tcttcttgtgatcaaactcaattgtaaccaaggcaagagacaccaattgtgtggtgatccttacgggaactttgtgtttcgtttgattgagaagagaagctcactcggtctaagtgaccgtttgagagagagaaagggttga

SEQ ID NO: 137853 - DNA, 3132 bp, Zea Mays
atgcggcccaccacgtcctgccatcgcttccccctgctgctcgtcttgctcctcttcctcctcgccggcgagggccgctcccagcccgccgccggcggcggccccagtgaccgcgacacgctgctcgccgtcaagaaggcctggggcagccccccgcagctcaagtcctgggaccccgccgccgcccccgaccactgcaactggaccggcgtcacgtgcgccaccggcggcgttggggtcgtcaccgagcttatcctgtccaggcagaaactcacgggctccgtcccggcaccggtgtgcgcgctcgcgagcctcacccacctcgacctctcctacaacaacctcacgggcgccttccccggcgccgcgctgtacgcgtgcgcgaggctcaccttcctcgacctctccaccaaccagttctcggggccactcccgcgcgacatcgaccgcctcctctcgcggtcgatggagcacctcaacctctccaccaacggcttctccggagaggtgccgcccgcggtggcggggctcccggcgctcagttccctgcggctcgacaccaacaacttcactggcgcgtaccctgcggccgagataagcaaccgcaccggcctccagacgctcacgctggccaacaacgcgttcgcgccggcgccggtgcccaccgagttctccaagctcaccaacctgacatttctctggatggatggcatgaacctcaccggagagatcccagaggccttctctagcctcgaacagctcactctatttagcatggcttccaacaacctcaccggctcgatcccggcatgggtgtggcagcatcagaagctccagtacatctacctgttccacaatgtcctctctggcgagctgacgcgcagcgtgacggccttgaacttggttcatatcgatttgtcgtcgaatcagctaaccggagagataccgcaagacttcggcaatctcaagaacctcacaacgctgtttctatacaataaccagctcacgggcaccatcccggtgagcatcgggcttctaccacagctgagagacatccggttgttccagaacgagctgtccggagagctcccgccggagctgggcaagcactcgccgctgggcaacctcgaggtgtgccttaacaacctctccggcccgctgcgagggtcgctctgcgctaacggcaagctcttcgacatcgtcgccttcaacaacagcttctcgggcgagctccccgcggcgctcggggactgcgtcactttaaacaacttgatgctctacaacaacaacttctccggcgacttcccggagaaggtatggtcgttcccaaatctgaccttggtgatgatccagaacaacagcttcactggcacgctgccggcccagatatcccccaaactgtcacggattgagataggcaacaacatgttctccggctccttcccggcctcggcagcagggctcaaggtgctccatgcggagaacaaccggctgggcggcgagttgccgtctgacatgagcaagctcgccaaccttactgatctgtcagtgcccggcaaccggatccctggctccatcccaacatcgatcaagctgctgcagaaactgaattcgctcgacatgagaggcaaccggctgaccggcgcgataccgcaggggagcatcgggcttcttccagcactgacgatgcttgacctgtccgacaatgagctctccggcaccatcccatcagacctaaccaacgcgttcaacttgcttaacttgtcatcaaaccagctcaccggcgaggtgccggcgcagctgcagagtgcggcctacgaccggagcttccttggcaaccggctctgcgccagggcgggctcaggcacgaacctcccaacgtgcccaggcggaggccggggcagccacgacgagctttccaagggcctgatgatcctctttgtgttgctcgctgtcattgtcttcggcggcagcatcggcattgcctggctgctcttccggcaccggaaggagagccaggaggcgacggactggaagatgacggcctttacccagctcagcttctccgagtcggacgtgctcggcaacatccgcgaggagaacgtgatcggcagcggcggctccggaaaggtgtaccggatccatctcggcagcggtaacggcgccagccgcgacgaggagggcggcggcgggaggatggtcgccgtgaagaggatatggaactcgaggaagggcgacgagaagctggacagggagttcgagtcggaggtgaaggtgctgggcaacatccggcacaacaacatcgtgaagctgctgtgctgcatctccagccaggaagccaagctgctggtgtacgagtacatggagaacggcagcctggaccggtggctgcaccgccgagaccgggagggggcgccggcgccgctggactggccgaccaggctcgccatcgccgtcgacgcggccaaggggctcagctacatgcaccacgactgcgcgccccccatcgtgcaccgcgacgtcaagtccagcaacatcctgctggacccggacttccaggccaagatcgccgacttcgggctcgcccggatcctcgccaggcccggcgagccccagtccgtgtcagccatcggcgggacattcgggtacatggctccagagtatgggtacaggccaaaggtgaacgagaaggtggacgtctacagcttcggcgtcgtcctgctggagctcacaaccggcatggtcgcgaacgacagcggcgcggacctctgcctggcggagtgggcgtggcggcggtaccagaaaggcgcgccgttcgacgacgtcgtcgacgaggccatccgggagccggccgacgtgcaagacatcctgtcggtgttcaccctcggcgtcatctgcacgggagagagcccgctggcgaggccgtcgatgaaagaggtcctgcaccagctcgtccggtgcgaacagatcgccgctgaggccgaggcgtgccagctggtgagctacggcggcggaggcgcaccggtcgtcgagtcatggaagagaggcagccggcgacgcagcacgtctggctccagccggtggagctacgacgacgaggacagcggcgacttcgttgcgcacgtggtgtag

SEQ ID NO: 137854 - DNA, 3222 bp, Zea Mays
cgaccttccccttacctattcgccgtccctctctcctgctgccctccccccgccgccgccctacggcccaccccgccgacgcgccacctccgtatctctcttccccgcctacgcgggcggcggatctccggatccgcgcgggggagggagatctggattggatggtcctctccggccgcggctagtccggcctgatctgatccgacccgtcccggcggcgcagtccgggcaggttgtctgggaaatttcggactcgggcggtgttgatcccggggagaggtcgtgcctcgctcgatctccgcataaaagctgtgattttgtggcggcgcggctgcgagttaccgggattttcccagggtttccggcggccgatccgcgctagttacgctattctgttccgtcagggcggcctcgtgttgggggctcgtttatttgccgcgtcccggaggagggttttgtgttcttctgtcgttggctccatggccagcggctctgatgccccgaagcagtatggaataaccaagccgttgtcgttgctcggaccggtggaggccgacctccagaggacggaggagctagagaagttcttgctcgagtcgggtctctatgagagccctgacgaatctgctaggcgggaggaggtgctggggaagcttgaccagattgtaaaagactgggtaaaacaattgactagtcagagaggatacactgatcaaatggttgaagaggcaaatgctgtactcttcacctttggctcataccgtcttggggttcatggacctggagctgatattgataccctctgtgttggaccttcatatgtgaaccgtgaggaagatttttttattgtactgcatgggatattagcacaaacagaggatgtgaccgagctgcagcctgtacctgatgcacatgtccctgttatgaaattcaagttccatggaatatctattgaccttctttatgccagtgtctccctcttagtagtaccagctgacttggatatctcccaaggatcagtgctttatgatgttgatgaagctactgtccgtagtcttaatgggtgcagagtagcagaccaaatcattagacttgttccaaattttgagaattttcgcacggcattaagatgtttgaagtactgggcaaaaaggagaggtgtttactctaatgttactggctttcttggtggtgtcaactgggctttactggttgcgcgtgtctgccagctctatcccaatgctgtgccaagtatgctggtctcacggttttttagagtttttacacaatggcagtggccaaacccggttatgctttgttctatagaagaggaagaacttggtttccctgtttgggatccacgcaaaaatcctcgagatagatgtcatcatatgcctattataacccctgcgtacccatgcatgaattcaagctataatgtttccacaagcacactgagggttatgttggaacaattccagtttggtaatagaatttgccaggaaattgaaatgaataagaccagctggcctgctctgtttgagccttttcaattttttgaagcatacaagaattatctacaggttgacatcattgctgaggatgatgaagaccttaggctttggaaaggatgggttgaatctcgattgcggcaactaactttgaagattgaacgtgatacatatggaatgctacagtgtcatccttacccacatgaatatgcagacccttctaggcagtgtgctcattgtgctttcttcatgggcttgtcaaggaaagaaggtgtgaaaatacaggaaggacaacagttcgatattcgaggaacggtggatgagttcaggcatgaaatcaacatgtatatgttctggaagcctgggatggagttagctgtttctcatgttcgtaggaagcaggtcccagcttatgtgtttccagagggttataaaagacctcgcccttcaagacatgtgaaccatcagtctgataaaaatgacactgaagatggcacagcgaccaggtctccagacagtcaactgaagagaaagcatgattctgttggaactgatgatatcaggtatgcaaagaggtcatcgaccagcccagttcatccgaaaaattcacctcaatctggaagcactggcgatgagactagatgtaacaaccaaataaaaagggctcctagcgatgcaagtggtggcagtccggcttcacctcaggcatcagagagaagcccagatactattctgtctgcccctaggtgcacgacaacaggagcagtgtgttctggtgatgcaattagtaagcatagtagtgttcctcttgttgagaactgcaccactccgactgtagcagtgtgcacaactttgaagcgcgtagctgagaaagttgtttcagagctagttggaagtgaaaggctggggagcaacaacagtgcggaattgttggagagtatggaaaaggaggatgtccttgctgaaaatgttcgttttggcgggaatggagttgcgcaaggtggccttccagaagagttagaggtgatgcttctggtgcacccttctcctgtttatgcgctgtctaacatgatctgaacattctctttcgactattgtttttttgatgtataaagccaaacaataggattgaagcggtttcttgagctgatgcaggtatgaacaagtgtacattgtggaagtcgtcactgagggttagtggcatcaaccacacaagattggggaaaaaatggtgtagagatggataagttctacccccttgctggagggaatggtaagtagctcaactcacaagtttccttctggacacagattcgcaattacgggggtttctatgatgatggatgatgggagattatcggatatcatgtcttgcacaacggcatggcaaaaaaaaaacgacgaagaagattttgtggaaggccatggtcgaatgtcatgtcttgctggtacactctagatgagcatgaaccttaagttttcgtttttttttaacttgttgagcagctgactcttgtgtatgaactgagctgcagcgggcttccctgagttgacttgtttgggtctgagatgcttctgccatgttctaggtctagaatagaactagatgcggtggtgtgttctctaccctaagtccccttttgtgccctttccttctgtaatataagatctttgactgtttcttgtgtgtcttctggtccatagattttgc

SEQ ID NO: 137855 - DNA, 3081 bp, Zea Mays
cgaccttccccttacctattcgccgtccctctctcctgctgccctccccccgccgccgccctacggcccaccccgccgacgcgccacctccgtatctctcttccccgcctacgcgggcggcggatctccggatccgcgcgggggagggagatctggattggatggtcctctccggccgcggctagtccggcctgatctgatccgacccgtcccggcggcgcagtccgggcaggttgtctgggaaatttcggactcgggcggtgttgatcccggggagaggtcgtgcctcgctcgatctccgcataaaagctgtgattttgtggcggcgcggctgcgagttaccgggattttcccagggtttccggcggccgatccgcgctagttacgctattctgttccgtcagggcggcctcgtgttgggggctcgtttatttgccgcgtcccggaggagggttttgtgttcttctgtcgttggctccatggccagcggctctgatgccccgaagcagtatggaataaccaagccgttgtcgttgctcggaccggtggaggccgacctccagaggacggaggagctagagaagttcttgctcgagtcgggtctctatgagagccctgacgaatctgctaggcgggaggaggtgctggggaagcttgaccagattgtaaaagactgggtaaaacaattgactagtcagagaggatacactgatcaaatggttgaagaggcaaatgctgtactcttcacctttggctcataccgtcttggggttcatggacctggagctgatattgataccctctgtgttggaccttcatatgtgaaccgtgaggaagatttttttattgtactgcatgggatattagcacaaacagaggatgtgaccgagctgcagcctgtacctgatgcacatgtccctgttatgaaattcaagttccatggaatatctattgaccttctttatgccagtgtctccctcttagtagtaccagctgacttggatatctcccaaggatcagtgctttatgatgttgatgaagctactgtccgtagtcttaatgggtgcagagtagcagaccaaatcattagacttgttccaaattttgagaattttcgcacggcattaagatgtttgaagtactgggcaaaaaggagaggtgtttactctaatgttactggctttcttggtggtgtcaactgggctttactggttgcgcgtgtctgccagctctatcccaatgctgtgccaagtatgctggtctcacggttttttagagtttttacacaatggcagtggccaaacccggttatgctttgttctatagaagaggaagaacttggtttccctgtttgggatccacgcaaaaatcctcgagatagatgtcatcatatgcctattataacccctgcgtacccatgcatgaattcaagctataatgtttccacaagcacactgagggttatgttggaacaattccagtttggtaatagaatttgccaggaaattgaaatgaataagaccagctggcctgctctgtttgagccttttcaattttttgaagcatacaagaattatctacaggttgacatcattgctgaggatgatgaagaccttaggctttggaaaggatgggttgaatctcgattgcggcaactaactttgaagattgaacgtgatacatatggaatgctacagtgtcatccttacccacatgaatatgcagacccttctaggcagtgtgctcattgtgctttcttcatgggcttgtcaaggaaagaaggtgtgaaaatacaggaaggacaacagttcgatattcgaggaacggtggatgagttcaggcatgaaatcaacatgtatatgttctggaagcctgggatggagttagctgtttctcatgttcgtaggaagcaggtcccagcttatgtgtttccagagggttataaaagacctcgcccttcaagacatgtgaaccatcagtctgataaaaatgacactgaagatggcacagcgaccaggtctccagacagtcaactgaagagaaagcatgattctgttggaactgatgatatcaggtatgcaaagaggtcatcgaccagcccagttcatccgaaaaattcacctcaatctggaagcactggcgatgagactagatgtaacaaccaaataaaaagggctcctagcgatgcaagtggtggcagtccggcttcacctcaggcatcagagagaagcccagatactattctgtctgcccctaggtgcacgacaacaggagcagtgtgttctggtgatgcaattagtaagcatagtagtgttcctcttgttgagaactgcaccactccgactgtagcagtgtgcacaactttgaagcgcgtagctgagaaagttgtttcagagctagttggaagtgaaaggctggggagcaacaacagtgcggaattgttggagagtatggaaaaggaggatgtccttgctgaaaatgttcgttttggcgggaatggagttgcgcaaggtggccttccagaagagttagaggtatgaacaagtgtacattgtggaagtcgtcactgagggttagtggcatcaaccacacaagattggggaaaaaatggtgtagagatggataagttctacccccttgctggagggaatggtaagtagctcaactcacaagtttccttctggacacagattcgcaattacgggggtttctatgatgatggatgatgggagattatcggatatcatgtcttgcacaacggcatggcaaaaaaaaaacgacgaagaagattttgtggaaggccatggtcgaatgtcatgtcttgctggtacactctagatgagcatgaaccttaagttttcgtttttttttaacttgttgagcagctgactcttgtgtatgaactgagctgcagcgggcttccctgagttgacttgtttgggtctgagatgcttctgccatgttctaggtctagaatagaactagatgcggtggtgtgttctctaccctaagtccccttttgtgccctttccttctgtaatataagatctttgactgtttcttgtgtgtcttctggtccat

SEQ ID NO: 137856 - DNA, 3163 bp, Zea Mays
cgaccttccccttacctattcgccgtccctctctcctgctgccctccccccgccgccgccctacggcccaccccgccgacgcgccacctccgtatctctcttccccgcctacgcgggcggcggatctccggatccgcgcgggggagggagatctggattggatggtcctctccggccgcggctagtccggcctgatctgatccgacccgtcccggcggcgcagtccgggcaggttgtctgggaaatttcggactcgggcggtgttgatcccggggagaggtcgtgcctcgctcgatctccgcataaaagctgtgattttgtggcggcgcggctgcgagttaccgggattttcccagggtttccggcggccgatccgcgctagttacgctattctgttccgtcagggcggcctcgtgttgggggctcgtttatttgccgcgtcccggaggagggttttgtgttcttctgtcgttggctccatggccagcggctctgatgccccgaagcagtatggaataaccaagccgttgtcgttgctcggaccggtggaggccgacctccagaggacggaggagctagagaagttcttgctcgagtcgggtctctatgagagccctgacgaatctgctaggcgggaggaggtgctggggaagcttgaccagattgtaaaagactgggtaaaacaattgactagtcagagaggatacactgatcaaatggttgaagaggcaaatgctgtactcttcacctttggctcataccgtcttggggttcatggacctggagctgatattgataccctctgtgttggaccttcatatgtgaaccgtgaggaagatttttttattgtactgcatgggatattagcacaaacagaggatgtgaccgagctgcagcctgtacctgatgcacatgtccctgttatgaaattcaagttccatggaatatctattgaccttctttatgccagtgtctccctcttagtagtaccagctgacttggatatctcccaaggatcagtgctttatgatgttgatgaagctactgtccgtagtcttaatgggtgcagagtagcagaccaaatcattagacttgttccaaattttgagaattttcgcacggcattaagatgtttgaagtactgggcaaaaaggagaggtgtttactctaatgttactggctttcttggtggtgtcaactgggctttactggttgcgcgtgtctgccagctctatcccaatgctgtgccaagtatgctggtctcacggttttttagagtttttacacaatggcagtggccaaacccggttatgctttgttctatagaagaggaagaacttggtttccctgtttgggatccacgcaaaaatcctcgagatagatgtcatcatatgcctattataacccctgcgtacccatgcatgaattcaagctataatgtttccacaagcacactgagggttatgttggaacaattccagtttggtaatagaatttgccaggaaattgaaatgaataagaccagctggcctgctctgtttgagccttttcaattttttgaagcatacaagaattatctacaggttgacatcattgctgaggatgatgaagaccttaggctttggaaaggatgggttgaatctcgattgcggcaactaactttgaagattgaacgtgatacatatggaatgctacagtgtcatccttacccacatgaatatgcagacccttctaggcagtgtgctcattgtgctttcttcatgggcttgtcaaggaaagaaggtgtgaaaatacaggaaggacaacagttcgatattcgaggaacggtggatgagttcaggcatgaaatcaacatgtatatgttctggaagcctgggatggagttagctgtttctcatgttcgtaggaagcaggtcccagcttatgtgtttccagagggttataaaagacctcgcccttcaagacatgtgaaccatcagtctgataaaaatgacactgaagatggcacagcgaccaggtctccagacagtcaactgaagagaaagcatgattctgttggaactgatgatatcaggtatgcaaagaggtcatcgaccagcccagttcatccgaaaaattcacctcaatctggaagcactggcgatgagactagatgtaacaaccaaataaaaagggctcctagcgatgcaagtggtggcagtccggcttcacctcaggcatcagagagaagcccagatactattctgtctgcccctaggtgcacgacaacaggagcagtgtgttctggtgatgcaattagtaagcatagtagtgttcctcttgttgagaactgcaccactccgactgtagcagtgtgcacaactttgaagcgcgtagctgagaaagttgtttcagagctagttggaagtgaaaggctggggagcaacaacagtgcggaattgttggagagtatggaaaaggaggatgtccttgctgaaaatgttcgttttggcgggaatggagttgcgcaaggtggccttccagaagagttagaggtatgaacaagtgtacattgtggaagtcgtcactgaggcatggtcttgaactcatcccttgtgcattcggtatctacattgccctgttttctttatactcggctgtttggtatttgtgtgctgctttatggcagggttagtggcatcaaccacacaagattggggaaaaaatggtgtagagatggataagttctacccccttgctggagggaatggtaagtagctcaactcacaagtttccttctggacacagattcgcaattacgggggtttctatgatgatggatgatgggagattatcggatatcatgtcttgcacaacggcatggcaaaaaaaaaacgacgaagaagattttgtggaaggccatggtcgaatgtcatgtcttgctggtacactctagatgagcatgaaccttaagttttcgtttttttttaacttgttgagcagctgactcttgtgtatgaactgagctgcagcgggcttccctgagttgacttgtttgggtctgagatgcttctgccatgttctaggtctagaatagaactagatgcggtggtgtgttctctaccctaagtccccttttgtgccctttccttctgtaatataagatctttgactgtttcttgtg

SEQ ID NO: 137857 - DNA, 3159 bp, Zea Mays
cgaccttccccttacctattcgccgtccctctctcctgctgccctccccccgccgccgccctacggcccaccccgccgacgcgccacctccgtatctctcttccccgcctacgcgggcggcggatctccggatccgcgcgggggagggagatctggattggatggtcctctccggccgcggctagtccggcctgatctgatccgacccgtcccggcggcgcagtccgggcaggttgtctgggaaatttcggactcgggcggtgttgatcccggggagaggtcgtgcctcgctcgatctccgcataaaagctgtgattttgtggcggcgcggctgcgagttaccgggattttcccagggtttccggcggccgatccgcgctagttacgctattctgttccgtcagggcggcctcgtgttgggggctcgtttatttgccgcgtcccggaggagggttttgtgttcttctgtcgttggctccatggccagcggctctgatgccccgaagcagtatggaataaccaagccgttgtcgttgctcggaccggtggaggccgacctccagaggacggaggagctagagaagttcttgctcgagtcgggtctctatgagagccctgacgaatctgctaggcgggaggaggtgctggggaagcttgaccagattgtaaaagactgggtaaaacaattgactagtcagagaggatacactgatcaaatggttgaagaggcaaatgctgtactcttcacctttggctcataccgtcttggggttcatggacctggagctgatattgataccctctgtgttggaccttcatatgtgaaccgtgaggaagatttttttattgtactgcatgggatattagcacaaacagaggatgtgaccgagctgcagcctgtacctgatgcacatgtccctgttatgaaattcaagttccatggaatatctattgaccttctttatgccagtgtctccctcttagtagtaccagctgacttggatatctcccaaggatcagtgctttatgatgttgatgaagctactgtccgtagtcttaatgggtgcagagtagcagaccaaatcattagacttgttccaaattttgagaattttcgcacggcattaagatgtttgaagtactgggcaaaaaggagaggtgtttactctaatgttactggctttcttggtggtgtcaactgggctttactggttgcgcgtgtctgccagctctatcccaatgctgtgccaagtatgctggtctcacggttttttagagtttttacacaatggcagtggccaaacccggttatgctttgttctatagaagaggaagaacttggtttccctgtttgggatccacgcaaaaatcctcgagatagatgtcatcatatgcctattataacccctgcgtacccatgcatgaattcaagctataatgtttccacaagcacactgagggttatgttggaacaattccagtttggtaatagaatttgccaggaaattgaaatgaataagaccagctggcctgctctgtttgagccttttcaattttttgaagcatacaagaattatctacaggttgacatcattgctgaggatgatgaagaccttaggctttggaaaggatgggttgaatctcgattgcggcaactaactttgaagattgaacgtgatacatatggaatgctacagtgtcatccttacccacatgaatatgcagacccttctaggcagtgtgctcattgtgctttcttcatgggcttgtcaaggaaagaaggtgtgaaaatacaggaaggacaacagttcgatattcgaggaacggtggatgagttcaggcatgaaatcaacatgtatatgttctggaagcctgggatggagttagctgtttctcatgttcgtaggaagcaggtcccagcttatgtgtttccagagggttataaaagacctcgcccttcaagacatgtgaaccatcagtctgataaaaatgacactgaagatggcacagcgaccaggtctccagacagtcaactgaagagaaagcatgattctgttggaactgatgatatcaggtatgcaaagaggtcatcgaccagcccagttcatccgaaaaattcacctcaatctggaagcactggcgatgagactagatgtaacaaccaaataaaaagggctcctagcgatgcaagtggtggcagtccggcttcacctcaggcatcagagagaagcccagatactattctgtctgcccctaggtgcacgacaacaggagcagtgtgttctggtgatgcaattagtaagcatagtagtgttcctcttgttgagaactgcaccactccgactgtagcagtgtgcacaactttgaagcgcgtagctgagaaagttgtttcagagctagttggaagtgaaaggctggggagcaacaacagtgcggaattgttggagagtatggaaaaggaggatgtccttgctgaaaatgttcgttttggcgggaatggagttgcgcaaggtggccttccagaagagttagaggtgatgcttctggtgcacccttctcctgtttatgcgctgtctaacatgatctgaacattctctttcgactattgtttttttgatgtataaagccaaacaataggattgaagcggtttcttgagctgatgcagggttagtggcatcaaccacacaagattggggaaaaaatggtgtagagatggataagttctacccccttgctggagggaatggtaagtagctcaactcacaagtttccttctggacacagattcgcaattacgggggtttctatgatgatggatgatgggagattatcggatatcatgtcttgcacaacggcatggcaaaaaaaaaacgacgaagaagattttgtggaaggccatggtcgaatgtcatgtcttgctggtacactctagatgagcatgaaccttaagttttcgtttttttttaacttgttgagcagctgactcttgtgtatgaactgagctgcagcgggcttccctgagttgacttgtttgggtctgagatgcttctgccatgttctaggtctagaatagaactagatgcggtggtgtgttctctaccctaagtccccttttgtgccctttccttctgtaatataagatctttgactgtttcttg

SEQ ID NO: 137858 - DNA, 3196 bp, Zea Mays
cgaccttccccttacctattcgccgtccctctctcctgctgccctccccccgccgccgccctacggcccaccccgccgacgcgccacctccgtatctctcttccccgcctacgcgggcggcggatctccggatccgcgcgggggagggagatctggattggatggtcctctccggccgcggctagtccggcctgatctgatccgacccgtcccggcggcgcagtccgggcaggttgtctgggaaatttcggactcgggcggtgttgatcccggggagaggtcgtgcctcgctcgatctccgcataaaagctgtgattttgtggcggcgcggctgcgagttaccgggattttcccagggtttccggcggccgatccgcgctagttacgctattctgttccgtcagggcggcctcgtgttgggggctcgtttatttgccgcgtcccggaggagggttttgtgttcttctgtcgttggctccatggccagcggctctgatgccccgaagcagtatggaataaccaagccgttgtcgttgctcggaccggtggaggccgacctccagaggacggaggagctagagaagttcttgctcgagtcgggtctctatgagagccctgacgaatctgctaggcgggaggaggtgctggggaagcttgaccagattgtaaaagactgggtaaaacaattgactagtcagagaggatacactgatcaaatggttgaagaggcaaatgctgtactcttcacctttggctcataccgtcttggggttcatggacctggagctgatattgataccctctgtgttggaccttcatatgtgaaccgtgaggaagatttttttattgtactgcatgggatattagcacaaacagaggatgtgaccgagctgcagcctgtacctgatgcacatgtccctgttatgaaattcaagttccatggaatatctattgaccttctttatgccagtgtctccctcttagtagtaccagctgacttggatatctcccaaggatcagtgctttatgatgttgatgaagctactgtccgtagtcttaatgggtgcagagtagcagaccaaatcattagacttgttccaaattttgagaattttcgcacggcattaagatgtttgaagtactgggcaaaaaggagaggtgtttactctaatgttactggctttcttggtggtgtcaactgggctttactggttgcgcgtgtctgccagctctatcccaatgctgtgccaagtatgctggtctcacggttttttagagtttttacacaatggcagtggccaaacccggttatgctttgttctatagaagaggaagaacttggtttccctgtttgggatccacgcaaaaatcctcgagatagatgtcatcatatgcctattataacccctgcgtacccatgcatgaattcaagctataatgtttccacaagcacactgagggttatgttggaacaattccagtttggtaatagaatttgccaggaaattgaaatgaataagaccagctggcctgctctgtttgagccttttcaattttttgaagcatacaagaattatctacaggttgacatcattgctgaggatgatgaagaccttaggctttggaaaggatgggttgaatctcgattgcggcaactaactttgaagattgaacgtgatacatatggaatgctacagtgtcatccttacccacatgaatatgcagacccttctaggcagtgtgctcattgtgctttcttcatgggcttgtcaaggaaagaaggtgtgaaaatacaggaaggacaacagttcgatattcgaggaacggtggatgagttcaggcatgaaatcaacatgtatatgttctggaagcctgggatggagttagctgtttctcatgttcgtaggaagcaggtcccagcttatgtgtttccagagggttataaaagacctcgcccttcaagacatgtgaaccatcagtctgataaaaatgacactgaagatggcacagcgaccaggtctccagacagtcaactgaagagaaagcatgattctgttggaactgatgatatcaggtatgcaaagaggtcatcgaccagcccagttcatccgaaaaattcacctcaatctggaagcactggcgatgagactagatgtaacaaccaaataaaaagggctcctagcgatgcaagtggtggcagtccggcttcacctcaggcatcagagagaagcccagatactattctgtctgcccctaggtgcacgacaacaggagcagtgtgttctggtgatgcaattagtaagcatagtagtgttcctcttgttgagaactgcaccactccgactgtagcagtgtgcacaactttgaagcgcgtagctgagaaagttgtttcagagctagttggaagtgaaaggctggggagcaacaacagtgcggaattgttggagagtatggaaaaggaggatgtccttgctgaaaatgttcgttttggcgggaatggagttgcgcaaggtggccttccagaagagttagagccaaacaataggattgaagcggtttcttgagctgatgcaggtatgaacaagtgtacattgtggaagtcgtcactgaggcatggtcttgaactcatcccttgtgcattcggtatctacattgccctgttttctttatactcggctgtttggtatttgtgtgctgctttatggcagggttagtggcatcaaccacacaagattggggaaaaaatggtgtagagatggataagttctacccccttgctggagggaatggtaagtagctcaactcacaagtttccttctggacacagattcgcaattacgggggtttctatgatgatggatgatgggagattatcggatatcatgtcttgcacaacggcatggcaaaaaaaaaacgacgaagaagattttgtggaaggccatggtcgaatgtcatgtcttgctggtacactctagatgagcatgaaccttaagttttcgtttttttttaacttgttgagcagctgactcttgtgtatgaactgagctgcagcgggcttccctgagttgacttgtttgggtctgagatgcttctgccatgttctaggtctagaatagaactagatgcggtggtgtgttctctaccctaagtccccttttgtgccctttccttctgtaatataagatctttgactgtt

SEQ ID NO: 137859 - DNA, 2887 bp, Zea Mays
cgaccttccccttacctattcgccgtccctctctcctgctgccctccccccgccgccgccctacggcccaccccgccgacgcgccacctccgtatctctcttccccgcctacgcgggcggcggatctccggatccgcgcgggggagggagatctggattggatggtcctctccggccgcggctagtccggcctgatctgatccgacccgtcccggcggcgcagtccgggcaggttgtctgggaaatttcggactcgggcggtgttgatcccggggagaggtcgtgcctcgctcgatctccgcataaaagctgtgattttgtggcggcgcggctgcgagttaccgggattttcccagggtttccggcggccgatccgcgctagttacgctattctgttccgtcagggcggcctcgtgttgggggctcgtttatttgccgcgtcccggaggagggttttgtgttcttctgtcgttggctccatggccagcggctctgatgccccgaagcagtatggaataaccaagccgttgtcgttgctcggaccggtggaggccgacctccagaggacggaggagctagagaagttcttgctcgagtcgggtctctatgagagccctgacgaatctgctaggcgggaggaggtgctggggaagcttgaccagattgtaaaagactgggtaaaacaattgactagtcagagaggatacactgatcaaatggttgaagaggcaaatgctgtactcttcacctttggctcataccgtcttggggttcatggacctggagctgatattgataccctctgtgttggaccttcatatgtgaaccgtgaggaagatttttttattgtactgcatgggatattagcacaaacagaggatgtgaccgagctgcagcctgtacctgatgcacatgtccctgttatgaaattcaagttccatggaatatctattgaccttctttatgccagtgtctccctcttagtagtaccagctgacttggatatctcccaaggatcagtgctttatgatgttgatgaagctactgtccgtagtcttaatgggtgcagagtagcagaccaaatcattagacttgttccaaattttgagaattttcgcacggcattaagatgtttgaagtactgggcaaaaaggagaggtgtttactctaatgttactggctttcttggtggtgtcaactgggctttactggttgcgcgtgtctgccagctctatcccaatgctgtgccaagtatgctggtctcacggttttttagagtttttacacaatggcagtggccaaacccggttatgctttgttctatagaagaggaagaacttggtttccctgtttgggatccacgcaaaaatcctcgagatagatgtcatcatatgcctattataacccctgcgtacccatgcatgaattcaagctataatgtttccacaagcacactgagggttatgttggaacaattccagtttggtaatagaatttgccaggaaattgaaatgaataagaccagctggcctgctctgtttgagccttttcaattttttgaagcatacaagaattatctacaggttgacatcattgctgaggatgatgaagaccttaggctttggaaaggatgggttgaatctcgattgcggcaactaactttgaagattgaacgtgatacatatggaatgctacagtgtcatccttacccacatgaatatgcagacccttctaggcagtgtgctcattgtgctttcttcatgggcttgtcaaggaaagaaggtgtgaaaatacaggaaggacaacagttcgatattcgaggaacggtggatgagttcaggcatgaaatcaacatgtatatgttctggaagcctgggatggagttagctgtttctcatgttcgtaggaagcaggtcccagcttatgtgtttccagagggttataaaagacctcgcccttcaagacatgtgaaccatcagtctgataaaaatgacactgaagatggcacagcgaccaggtctccagacagtcaactgaagagaaagcatgattctgttggaactgatgatatcaggtatgcaaagaggtcatcgaccagcccagttcatccgaaaaattcacctcaatctggaagcactggcgatgagactagatgtaacaaccaaataaaaagggctcctagcgatgcaagtggtggcagtccggcttcacctcaggcatcagagagaagcccagatactattctgtctgcccctaggtgcacgacaacaggagcagtgtgttctggtgatgcaattagtaagcatagtagtgttcctcttgttgagaactgcaccactccgactgtagcagtgtgcacaactttgaagcgcgtagctgagaaagttgtttcagagctagttggaagtgaaaggctggggagcaacaacagtgcggaattgttggagagtatggaaaaggaggatgtccttgctgaaaatgttcgttttggcgggaatggagttgcgcaaggtggccttccagaagagttagagattcgcaattacgggggtttctatgatgatggatgatgggagattatcggatatcatgtcttgcacaacggcatggcaaaaaaaaaacgacgaagaagattttgtggaaggccatggtcgaatgtcatgtcttgctggtacactctagatgagcatgaaccttaagttttcgtttttttttaacttgttgagcagctgactcttgtgtatgaactgagctgcagcgggcttccctgagttgacttgtttgggtctgagatgcttctgccatgttctaggtctagaatagaactagatgcggtggtgtgttctctaccctaagtccccttttgtgccctttccttctgtaatat

SEQ ID NO: 137860 - DNA, 1228 bp, Zea Mays
ctcgcaagtcgcagccatcaccagttcaccaatcaccactgccggaatattttaactcgaccccgccctacctctcgccgtcgaccacaagtccacaacccacaaaatgcacgggaggacccagggcgccgccgtcggcgacatgacccagcgccttctcctcgccctctcgctcatcgcatcagcgaccgccgtgcccgctgtcatccgcacggtcccggacgaccccaccgcgggctcctctggcgcggcagacgccgcggacgcgctcttctgtgacagctggaggctgtcggtggagacggccaacgcgggcccctggagcgccgtgccctcgcgctgtggggctttcgtgcgggactacatggagggacctcgctacgcgtctgactccgccgtcgccgacgccgacgccctagccttcgcctccgaagccctggccgccgccgagtggggcggctcggcgagcgcgaggcctgcgtgggtgttcgacgtcgacgagacgctgctctctaacgcgccgtactacgcggtcaacggatggggatcacaggaattcaatgagacctcatttgatgaatgggtagatgctgcaaaggcaccaacattaccatcgagcttgaatttgtacaatcaacttcagggacttggtttccatgttatcctattgactggccggagtgaattccaacgtaatgccacagaattgaatcttttgtttgctggctacaactcatgggaaaaactcatactgaggcaaccttatgatattggcaagaacgctgtgcagtacaaatcagagagacgagcagcaatggaagcggaaggtttcaagatacttgggaactcaggggatcagtggagtgatttgataggatcgcccatggcaacgagatccttcaagctaccaaacccaatgtacttcatcagctgattttattgttagagcagtggacgaaggagcaggttttcatagggtgttcatatggtcccggtgtgaaactgcttttgttagacatccctcgggacataaatttagatttttatcttcaagcatgttgaaattcaactgaggcttgggtccgtcgaatctgccctatgatgatctgtaattacacacttcttttcccacactactggaagcatttgtggtaaggcaaattgtgaggtcatttggtgttcgttccttcagtcaccatctaagctttagtcgttaaattttagtttt

SEQ ID NO: 137861 - DNA, 218 bp, Zea Mays
catccatgaccgctgtccgtcgtcgagtccctacgtgcgcaccagctccctgtgtcgcgttccattcacctaaaccggagtttgccagtcgtccctgcttgtcggtgtgctgctgctctagtttggatctcgcccaagtcgctgccatggttatacggtgtttggccccgcgccgattcgcgttcgctcatatcgccatcatagtgttgtcgcgggtg

SEQ ID NO: 137862 - DNA, 217 bp, Zea Mays
catccatggccgctgtccgtcgtcgagtccctacgtgcgcaccagctccctgtgtcgcgttccattcacctaaaccggagtttgccagtcgtccctgcttgtcggtgtgctgctgctctagtttggatctcgcccaagtcgctgccatggttatacggtgtttggcccgcgccgattcgcgttcgctcatatcgccatcatagtgttgtcgctggtg

SEQ ID NO: 137863 - DNA, 1974 bp, Zea Mays
cgcagcccaacacccgcatcaaaacacgcacctcggctcctcccctccccaccaggcaccaaggtcgccaccgccaccgctgccccaaagtatcgcacccccaaagccccgctccctcaccttctggaaccttcctcgcatggccccgcccccctccatgcctgccgcctccgatcgcgccggccctggccgcgacgcgggcgactcgtcctcccttcgcctccgccgcgccccctcagccgacgccggcgaccttgccggcgattcctcggtaggcttgcgggagaacggcgagccgcaaccgccgacgaatccgccgccgcaggagcagcagcagcagcacgagatgctatactaccgcgcgtcggcgcccgcccaccgccgcgtcaaggagagccccctcagctctgacgccatcttccggcagagccatgctggtcttctgaatctatgcattgttgttctgatcgcagtgaacagcagactcattattgagaatttaatgaagtatggcctgttgataagagctggattttggtttagtgcaagatcgctgggtgactggccccttctaatgtgctgcctcactctaccagttttcccactagttgcactcatggctgagaagctgatcacaagaaagctcattggtgaacatgtggttattctactccatatcattattacaacatctgccattgtctatccagttgttgtgactcttaagtgtgactcagcagtactatctggatttgtgctaatgtttcttgcgagcatcatgtggatgaagcttgtctcttatgcacatacaaattatgatataagggtattgtccaaaagtactgagaagggtgctgcatatggaaattatgtcgatcctgagaatatgaaagatccaacctttaaaagtctagtgtacttcatgttggccccaacactttgttaccagccaacttatcctcaaactacatgtattagaaagggttgggtgacccagcaactcataaagtgcgtggtttttacaggcttgatgggcttcataattgagcaatatataaacccaattgtgaagaattccaaacatccactgaaagggaattttttgaatgctatagaaagagtcttaaaactctcagtgccaacattatatgtatggctttgcatgttctattgcttttttcatttatggctgaacattgtagctgaactcctctgtttcggtgaccgtgaattctataaggactggtggaatgccaaaactgttgaagagtactggaggatgtggaacatgcctgttcataagtggatcatcagacacatatattttccatgtataaggaaaggcttttccaggggtgtagctattctaatctcgtttctggtttcagctgtattccatgagatatgtattgcggtgccgtgccacattttcaaattctgggcattttctgggatcatgtttcagataccgttggtattcttgacaagatatctccatgctacgttcaagcatgtaatggtgggcaacatgatattttggttcttcagtatagtcggacagccgatgtgtgtccttctatactaccatgacgtcatgaacaggcaggcccaggcaagtagatagttcggcagagacatgtacttcaacatcgaccatcagaagcagactggagcgacgcggcaggaagcagcagtagcccctcacttgccattgtttaccatcagctagcagctggtcagcctgaaaatgcttctattccaggcggccgtgctgggatgcagcgtgtacattaccagcgatgcaacgtcaacggttaccaagcgcggataagcagtgctcgtggcatgtgaactctgtacacattgaagtctatatgtccgcggtgctgtgtgcataatgtcgtggtagatgtaatatgtacaatgtatgccacgacttaagaggtcaaaatgaggctcacgtcttgggatgga

SEQ ID NO: 137864 - DNA, 1880 bp, Zea Mays
acacgtcctgctgtcccgcatgccaccggccgggggagaaaaccaacagccaagccaagcccacattgtttccgcagctaggtagaggggcaaaggaggagtatagcggagaggttgatgcgtgacggaggaggcgccatggacgtcgacatgcaagcccgcggtggcggtgctagccatggcggcgaacttgacgacgacggcaaggagaagaggacagggacggtgtggacggcgtcggcgcacatcatcacggcggtgatcgggtccggcgtgctgtcgctggcgtgggcgatggcccagctgggctgggtggccgggcctgtgatcctgctgctcttcgcggccatcacctactacacctcctgcctcctcaccgactgctaccgcttcggcgaccctgtcaccgggaagcgcaactacacctacactgaggccgtcgagtcctacctaggtactaagctagtacttgttacttgcgattgcaaattcatcagaagatagatgagaacaatgagtgcctggcatgcatgttgtgcaggcggcaggtatgtctggttctgcggcttctgccagtacgccaacatgttcggcaccggcatcggctacaccatcacggcttctgccagcgctgctgcagggctatcctcaagtccaactgcttccactggcacgggcacgacgccgactgcacccagaacacgggctcctacatcgtcggcttcggcgtggtgcaggtcatcttcagccagctctcaaacttccacgagctctggtggctctccgtgctcgcggccgccatgtccttctgctactccaccatcgccgtcgggctcgccctcggccagaccatctcaggtcccacgggcaagacgacgctctacggcacgcaggtcggggtggacgttggtagcgcggaggagaagatatggctgacgttccaggctctcggcaacatcgcgtttgcctactcctacaccattgttctcattgaaatccaggacacgctgcgatctccgccggccgagaacaagacgatgcggcaggcgtcggtcctgggcgtggcgacgaccacggcgttctacatgctgtgcggctgcctgggctactcggcgttcggcaacgcggcgccgggtgacatcctgtcgggcttctacgagccctactggctggtggacttcgccaacgtctgcatcgtgatccacctcgtgggcggcttccaggtgttcctgcagccgctgttcgccgcggtcgaggccgacgtggcggcgcgctggccggcctgctccgcgcgggagcgccgcggcggcgtcgacgtgttccgcctgctgtggcgcaccgcgttcgtcgcgctcatcaccctgtgcgccgtcctgctgcccttcttcaacagcatcctgggaatcctcggcagcatcggcttctggccgctcaccgtcttcttccccgtcgagatgtacatccgccagcagcagatcccgcggttcagcgccacgtggctggcgctgcaggccctcagcatcttctgcttcgtcatcaccgtcgcggccggggctgcctcggtacagggcgtgcgcgactcgctcaaaacctacgtgcccttccagaccaggtcgtgatgagcactgcacgtacggtcccatatgtagctcaaaaacttaattacgtgctcatcaagcagtcaggctccttcattcaattccaaagcaggattaatttgggatacgtggcttaattatattggtgtgtttgcgatggtatggtacgatgggtaggagcagatcctcttaggcgtgtttcgcaatcctcctccaacattattgtaaatatgtgaatgattgattgtattccaatacagggaatatgagtacatatataca

SEQ ID NO: 137865 - DNA, 1750 bp, Zea Mays
acacgtcctgctgtcccgcatgccaccggccgggggagaaaaccaacagccaagccaagcccacattgtttccgcagctaggtagaggggcaaaggaggagtatagcggagaggttgatgcgtgacggaggaggcgccatggacgtcgacatgcaagcccgcggtggcggtgctagccatggcggcgaacttgacgacgacggcaaggagaagaggacagggacggtgtggacggcgtcggcgcacatcatcacggcggtgatcgggtccggcgtgctgtcgctggcgtgggcgatggcccagctgggctgggtggccgggcctgtgatcctgctgctcttcgcggccatcacctactacacctcctgcctcctcaccgactgctaccgcttcggcgaccctgtcaccgggaagcgcaactacacctacactgaggccgtcgagtcctacctaggcggcaggtatgtctggttctgcggcttctgccagtacgccaacatgttcggcaccggcatcggctacaccatcacggcttctgccagcgctgcggctatcctcaagtccaactgcttccactggcacgggcacgacgccgactgcacccagaacacgggctcctacatcgtcggcttcggcgtggtgcaggtcatcttcagccagctctcaaacttccacgagctctggtggctctccgtgctcgcggccgccatgtccttctgctactccaccatcgccgtcgggctcgccctcggccagaccatctcaggtcccacgggcaagacgacgctctacggcacgcaggtcggggtggacgttggtagcgcggaggagaagatatggctgacgttccaggctctcggcaacatcgcgtttgcctactcctacaccattgttctcattgaaatccaggacacgctgcgatctccgccggccgagaacaagacgatgcggcaggcgtcggtcctgggcgtggcgacgaccacggcgttctacatgctgtgcggctgcctgggctactcggcgttcggcaacgcggcgccgggtgacatcctgtcgggcttctacgagccctactggctggtggacttcgccaacgtctgcatcgtgatccacctcgtgggcggcttccaggtgttcctgcagccgctgttcgccgcggtcgaggccgacgtggcggcgcgctggccggcctgctccgcgcgggagcgccgcggcggcgtcgacgtgttccgcctgctgtggcgcaccgcgttcgtcgcgctcatcaccctgtgcgccgtcctgctgcccttcttcaacagcatcctgggaatcctcggcagcatcggcttctggccgctcaccgtcttcttccccgtcgagatgtacatccgccagcagcagatcccgcggttcagcgccacgtggctggcgctgcaggccctcagcatcttctgcttcgtcatcaccgtcgcggccggggctgcctcggtacagggcgtgcgcgactcgctcaaaacctacgtgcccttccagaccaggtcgtgatgagcactgcacgtacggtcccatatgtagctcaaaaacttaattacgtgctcatcaagcagtcaggctccttcattcaattccaaagcaggattaatttgggatacgtggcttaattatattggtgtgtttgcgatggtatggtacgatgggtaggagcagatcctcttaggcgtgtttcgcaatcctcctccaacattattgtaaatatgtgaatgattga

SEQ ID NO: 137866 - DNA, 864 bp, Zea Mays
agattcagcccacaaggccataacaaaatagccccgccccccctcccctagggtttcactacatatgtaaccctctcgcgcaaacactcctctttccgcgccgcctcccctcccgccctcttgctccgccggcgcggccaccgccaccgccaccgcaacagctagtcagcagatcgtaaccatggcggattcgaaggccgctgcggcggtgacgctccgcacacgcaagttcatgaccaaccgtcttctctcccgcaagcagttcgtgctcgaggtcatccaccccggccgccccaacgtctccaaggcggagctcaaggagaggctggcgaagatctacgaggtgaaggacccaaactgcatcttcgtgttcaagttccgaaccaacttcggaggcggcaagtccaccggcttcggtctcatctacgacaaccttgaggccgccaagaagttcgagcccaagtaccgcctcatcaggaacggccttgctaccaaggtagagaagtcacgaaagcagatgaaggaacgtaagaacagggcgaagaaaatccgtggtgtgaagaagacaaaggctggagatgccaagaagaagtaagggaggaagttacttgccttgctctttctctcatcataggctttggtttgtttagggtggggctccttccggcaatgctgaatgtttagttagaagtagagaagattttgccaattacccatcatgttgagtttctcgtcgcaccttctgttcagttttgaggcactttgtcagacacaagaatatatatatacctggtcatcacggcttttgtcctgctattatcattttgatttcagttttgtgcactcggtacactgaagttggat

SEQ ID NO: 137867 - DNA, 819 bp, Zea Mays
agattcagcccacaaggccataacaaaatagccccgccccccctcccctagggtttcactacatatgtaaccctctcgcgcaaacactcctctttccgcgccgcctcccctcccgccctcttgctccgccggcgcggccaccgccaccgccaccgcaacagctagtcagcagatcgtaaccatggcggattcgaaggccgctgcggcggtgacgctccgcacacgcaagttcatgaccaaccgtcttctctcccgcaagcagttcgtgctcgaggtcatccaccccggccgccccaacgtctccaaggcggagctcaaggagaggctggcgaagatctacgaggtgaaggacccaaactgcatcttcgtgttcaagttccgaaccaacttcggaggcggcaagtccaccggcttcggtctcatctacgacaaccttgaggccgccaagaagttcgagcccaagtaccgcctcatcaggaacggccttgctaccaaggtagagaagtcacgaaagcagatgaaggaacgtaagaacagggcgaagaaaatccgtggtgtgaagaaggtgaacaaaggctggagatgccaagaagaagtaagggaggaagttacttgccttgctctttctctcatcataggctttggtttgtttagggtggggctccttccggcaatgctgaatgtttagttagaagtagagaagattttgccaattacccatcatgttgagtttctcgtcgcaccttctgttcagttttgaggcactttgtcagacacaagaatatatatatacctggtcatcacggcttttgtcctgct

SEQ ID NO: 137868 - DNA, 1626 bp, Zea Mays
tcctttaactcctacacgttagagattatgaatgccagccaacccaatgggcttgtcgttcctgatgcaacggtgcatcctgttaattcaacatccgatgttattgagttaatgagaataggacatgcaaacagagcagtgggttcgacaatgttgaatgaaagaagcagcagatctcacaggtttattttcattattgttaccatacacattcgaggtgtagatttgaaaacaggagctactctgtgtggtgcactacatcttgttgatcttgctgggagtgagagagtggaccgatcttctgttacaggcaatagacttaaagaagcacaacacataaacaaatctttgtccgctcttggagacgtcatattttctctaccgcagaagaatgctcatgtaccctaccggaacagcaaacttacacaagtcctacagagttctttgggcggccatgcaaaaaccttgatgtttgtgcagatcaacccagatgtctcatcttattcggagactttaagtactttgaagtttgctgaaagggtttctggagtggagctaggtgcctcaaaggcgaataaagaaggcaaagatattagagaatttatggaacagctctcactgctcaaacataaaatggcaaagaaagatgacgaaattaacagattacaacaactcaagacgcaaactccaagggtcaggactgcaaaacgtgcagattccccattgaaacattcgtcgtcgtccccaggcatatctaatttaggaagcaaaatccaacatagaaggacagtatcaagtggaaaggcaatgagcattgccagtagagctgggtctgataccttctctgacaccagtgacaggcactctgaatctggttctatgcagtctgttgatgatatcctaccacgtagggggattatgggtcttccgaagctctctattggtgaaatgggtcagaattctgctgaccctgagcttgtttgctttgactatgctgattcagaagagagattaagtgatatatcagatagtggtctttccatgggtacagagacggatgtttcagtaagcagtatagttgagttgacacgttttcaggagcaggaaaacatacctagcactctgaaagaacaagagagtgcacgaaaaattccaaatgatcagttgtccaaggtggccacccgagttcagaagacaacagtacccaaactagctcaaacttccttgtggcctaaactaagagatcctccagcccttagatccccagggagaatcacaacacaaacaatatctgtaccaaggacgtccatgacttcgaagagatggacataagtcaagtttgatcaacatgttctaacactagtttatggttttgtacagcacaatcgaaaagtaattcattccaattgatgaactttgtacagcacttgattctttcaggaaaaaatggcagttagttttctatatcttttttgaagatagattatatgatgttaactttctttgtgcatacacgatatccgagaagtttgctgattgttggataaaagtggtacttctcttgatattgttaatagaatcaacaattcttgcttaatcgttacaaaccaaaacaataaagaaaaa

SEQ ID NO: 137869 - DNA, 90 bp, Zea Mays
ttgggtgacgtggctggcgcaccggacagtgttcggtgatgcactggactgtccagtgcgcccatcgacagcagccttccccgacggcta

SEQ ID NO: 137870 - DNA, 153 bp, Zea Mays
atggaggtgaggtggaaagggcctagggcctctgcgctcgtctcgatgctgcgtgccgtgacactgggcagggccgccgtcatcgtggagaagcgaggaggatgtggaccacgagatgggagtgagattggatttgaggcagggtcagggtga

SEQ ID NO: 137871 - DNA, 459 bp, Zea Mays
ggatgggaggcaaagggactgtggcttgttcaaagaggaaaaagtggaagccgccagtcatctccgccatgtcgtcctcgcttctgtcggtccatcggcggtcatgctatcgacacctccacagtcttcccatcctccaatacattttatcaactgctcgcgcgatagggaaggcagagggtgggcatgtcgtcctctcctctacaccacgtcatccacgacgatggtggaggagactgcttcagtcgccattcgtcggtctccgctgctcctccacacgcttggtcgtcgtctctacggttggcaaaggaatggaggtcgtcgattcaggtcgagtaggagcactctatggctttgcattgctactagtggtccaatattcacaccttcacgatttagtggatttccctcatccatatctccactgacgttagaatattccttatcccgtcgtcatga

SEQ ID NO: 137872 - DNA, 730 bp, Zea Mays
acaaaaccaaatttatacaattataaattacaataacttatcctttacatatcctttacaaaattataaattacaattataatattgatactgaggcacaagaacactttacaaaattgtagtttacaagtatgcattagcagtttaccagcgtccattgcagccactcattctgttttcagttctgaaacaccaaaaacacttgtaaacaaaacagctcaattctcgattcaatttacaaaaacaccaaaaacaccagatcatgtgtacaatcaaaatacttgtaaacaaaatagctctctgtttagcaaatacttgtaaacaaaacagaccaaaaacaacttggttgtttgatggcaaagtaaatgtaaaaaattcatgaagagaaggtacaccacttccatttaaatgtgtcacgagcttgaatcaggagacgatcaagccaacgacatgcgtagaaacagaggattacagatgatctcagatatcaggaggcggactagctccttaccggagtactcttttctgaacaatttgatcaatgcttctcctcttctgcatgatctagctcttctctttcccaaaggtttgccccacacggaagtctaatacaaagaaatgtatgtgataggctgcagactgcagtatgatcctacgacaattgtatggcacctcctcatctggtttcgagctcaaaagtgaaccaatcagcggatcccgagcctcaaat

SEQ ID NO: 137873 - DNA, 647 bp, Zea Mays
ccgccatggtctggcggggcgaggtatacgtcccttcccaactcccaggtcccagccgccgagcccagctggtcgctccggacccggcgtggctggccgggttccaggatttcgtccgccggcccttcgtccccactgtaatccctgacaccgccgaacccgttcggtgtgtccaggccccagggagaccggcggcggcgcctcgaggatgtgcaccccagctgggaagagcgggggacgtgttctcctgtgatgggtggcgtgccgatccgtcacgacgatgtccagatgaccgatggcgccccagacgatttcgccttcgggagcggcggcggcggcagcgcaacggcaacgctggccgctgggtcgcctagctggtcttctgaaggcgtgtgagggggagcggatacacgagtgcgcctcggacgagcatgagctggagctcacccttgggacctcaaagactcgtgcagcagatctctcctgatatcatgctgcaggagtcaagtcttcgcctctttttttttttttttactttcatcgttatgctcctcgagttcagtgtttgtagaaggagagaagggattcagagaccttgtcgcggtgctctggagatgacatcgatcctctttcactgcctacttgtt

SEQ ID NO: 137874 - DNA, 456 bp, Zea Mays
atgaccgtctccgacgatgaaactgttgagattgatgacaacgaggagaggcggttgtgtgggttgaccggagattacaatgaggatgaccttcgggaggatgctgcagcgctcttaggccatagcagtgagcatcccatccatgttggtgatgaacaacaaggcggtggtgaggaaggtcaaggtgaaggggacgaacacaacgccaagcattgtcgtccttctacttctccagtctggttagatttcgagaaacttttcaaaattgtgaacgtatatctcagattgccgcagttttctcatgcattcccattcacgtacgagctacagagcgtggcggcacaaagggcacgtgttgcttcgccgcaaccaattcgcaatgcagcggtggtggaactcgtggcggccggggcacggcgtgacgacgacctccacgccgtcctcgtagtcctctag

SEQ ID NO: 137875 - DNA, 857 bp, Zea Mays
gtcacctcttttcctcactatccctctctgttccctcgacggtcaggcctctccttaaccgcggatgccgatctctgccaccagcgcacggtagaccatcatcctcctcccttttgctgcgtgcctaggtcagacctcaccttgccaccgtgtcgtaatatctctggcgcatgcgcccagcaccgcgcaccgggcgctcggctactccttgcctcatctacaccaggtcatggctccctgatgtactccccattccggccatcgatccctggtgttggtgctccctttctcctgtgctcgctaggtattcggtgggacgcctgagccatatgattgacgtcgttcttgtgtattcggaattgattgatgttggtaagatgaattgttatttcctgctattgaattagcgagtaaattagataaataaattagtggtaatgattctttgtccttagcagatgtgctctgggataacctcatgatccgtagcagtgcttgcgtgctagtccattgagttatacatggaaggattctgtcctctcttttgtttgtagatattgtggtggtattaagtatttgttgtgcttatattagatgatcgttgaagtgcctcgccataaagtgtttgtttagttgtcccattatttataatgatacgacaaagtctaggtttgaggtatgctctagcttagggaaatatagagcgtatgcatagttgtgatttctttttttaaataaattaagttgaacaggaggaactcgagtgttgaacttggtatgtatagtttgctatttctcgatgtttgagttagaacccgtggtcgtcattgttgtactcagtcatttgtggcgtctag

SEQ ID NO: 137876 - DNA, 1380 bp, Zea Mays
atgggttcggtggtgtttgttcttggcgtgcgtgatttgggcgagtccggagctacccgcgagttctgcggacggttgaagaagacgcggtcctgggtggcccacgcgacaatgctgcgcgatgaagagctggcgcggcatggcaatgactggcgtccacacagtagcgggggtgcacggttctgcctgcctcaacgcccgcgctcctcaccaacgccgcaatcatcgcccacgcgcggatcccccacgatcctccccaccaccgccgccacaatcatcgctcacgcgcggatcccccatgatcctccctaccgtcgccgcaatcaacgcccacgcggatcctccccacgatccccaccccgcacacccccacccttccatcgccggccggaatcgatcgatccaaagctccctttagagctcgagctctatccaacccacgaacgggatcccgatgcccatggcggcctcggttcgtctcgccgcaccggctgcctcgcccccgctgacgtggtggaggtgggctcctcttctcgccgcgtcacatccacgggcgaacccgccgcctcccgcaccgcgcctgcgggcgcccgctctcttctccgggcctcccctgttccccgcgattccagcgccggagccatcgtccggaggacaccgtgtgcggcggcggcaataggtggaggtgtggaggcggagtccacggagcgggaggcgcccgatcgggatactctgaagcgggtggcgctgctcgcgcttggctgctgcactgcagccgccgctctcggcgtggcgcgggcagcggcgggggactccatcaaggcgtcaggattcaggctatgggtggcggagtcgctgcggaggctcggatggcccgatgacaccgtcgtgttcgcgctcgcaacgctgccggtgatcgagctgcggggggcgatcccgttgggtattggctgtggggcccatccccactgcccctctgtcgcaaaccccgcgcacgccgcctccactgcacacccccgccttccatcatcgggcctctgccgcaaaccccgcacacgtcgcctccaccgcacacctcgcccttccatcgtcgccaccgcgcactcaccctccacaccatcctcgccccaaatcgctcagcctaagcatagatggaagtccccccgcatccgctcccgcgcatcccgacatcagtggattgcggcagaggcccttcgtgcacgatctgtttccccctccacgcatggcggttccgcctccacctaccgtcgccccatccactcaaggccaattgcatccaaatgtcacgcaggccgcacgtcatcctcatccttgtggcgtcaacaaccatgtgcggcaagcagcggatgcggtagatga

SEQ ID NO: 137877 - DNA, 749 bp, Zea Mays
gagagacactagacacattatcctgctgctatactataccgccaccgcaacagcccacccgccgccgccgccggtgcaagttcgtatttggaacttgcatgcccgcgtcgtcgtcgtcgtcgtcgcccaacatcctgagctgctccgccctggaggaggatccgtggtcgcctacagcaacgatgatgaccgccggcgacgacgacgacgacttgttggtgcagctggtgccgagggacgtctcggacgggctcctcggcaagttcgcggacaccagcgccttcgacttcgactacggccgcagcgggctctggtcgcccctgctgctgcgccccgaggccatgctgcttgcgcagtccccggccgccggccggcgcccacgacggcggcggcgccggaagcggaggaaggtgctctgctgctgctggcgatggtggtgacgcgaccgcgacgtgcagtgcagtgttccctacggacgaaacatctgctctgctctgctctgctcttaataataatgctgctgaatcttggatttcttcattcttcagtacatgcaaaagagtcattctctgtatggaccatgagaagctgagtatttatgtatgcgtgcagtgcagcgacgtatataaggaccagattgcaagacgacatgattgttttttggtattgctttttggagccatccccaacatggatgaatcctgtaattaccttgttttgttggaaagtacgtactactttttgatcca

SEQ ID NO: 137878 - DNA, 94 bp, Zea Mays
cacaattatgtctctggcagtttcatttcaaaaaacggaccctatgctcggcgccatcatcatttgcgcctagctagggtgtgcttgcgccaac

SEQ ID NO: 137879 - DNA, 916 bp, Zea Mays
atggccaccgggcggcccgtacgactcgtgctggatgcctccctcctcctcgacccctcctccaccagggaggcggcggcggtggctctgcggcccggggtagaggagctgttgcggcggttgcgctactccaacctgaatgtgtatttgcttcctcttgccatacttacccatcatggcccatggggtgtctatcttatcatgccatcttcaaagaatggcatcatgttaacaaaaatgaatgagaaatcagtcatttctaatggaaagtcaggctttcttgaaaaggtcgcaagctcacacttgtttggctctatagcacttcttgcgaaaagtgggaatctttctctaactgaattaatgttagaatggagccaaacaagtttatgtttttatgcgacttcaagagttgacaaaggtttaagttctgagctccagaatcagaattggagagttctttctgtagctaatgaatgtagcatagaggttcctggtgttttaaatgttcaaaggcttcagcagttgcttctcaccttggctactctaataaaagggaactatgtgactcatctgttctggtgattggatatataatgaaaatattctgtgaggaagacttcgcaaggagatgtggttctgtcacttatgtgaccgttgtcgtgtatggagacgtgtatggagacgaggacaagccagcgcttataatgtttacagagatgtggttctgtgactgttgccgtgtactcaggctttatttcaacaagatttaaatatgagatgtagagtgattgatgtacatcacttcactaatcatgaaatctgtagaaggcgaaactactagccatatatgatatgcataatccgtgtggtaaacattatcaatatcacacaaattatttctaatgggttttgaatt

SEQ ID NO: 137880 - DNA, 1257 bp, Zea Mays
agatagttgtttaaaagtcaaaatccttgctggtggccgagggctgggaactttcaaaaagcggactgcaaggtggtgtccatattgttaaggctgaggaagctgaattgattgcaagtaaaatgttaggccagattctgataacgaaacaaactggtccagagggaaagattgtgagcaaggtctacttgtgtgagaaactatctcttactaatgagatgtactttgccatcacccttgataggaaaactgctggtccgctcattattgcttgcagcaagggaggaaaacactatagttgacctcaatgttcaaaggatggccagggctacatcatcttgttgttgacgggttccgtgtgttcaatcgccgagcagaaagccaggaacagaacttaggcgttggcgattggcatctccctcccctaagccatggccaccgggcggcccgtacgactcgtgctggatgcctccctcctcctcgacccctcctccaccagggaggcggcggcggtggctctgcggcccggggtagaggagctgttgcggcggttgcgctactccaacctgaatgtggcaatctgctatgcagagggcatgccaactaatgagtcaggctttcttgaaaaggtcgcaagctcacacttgtttggctctatagcacttcttgcgaaaagtgggaatctttctctaactgaattaatgttagaatggagccaaacaagtttatgtttttatgcgacttcaagagttgacaaaggtttaagttctgagctccagaatcagaattggagagttctttctgtagctaatgaatgtagcatagaggttcctggtgttttaaatgttcaaaggcttcagcagttgcttctcaccttggctactctaataaaagggaactatgtgactcatctgttctggtgattggatatataatgaaaatattctgtgaggaagacttcgcaaggagatgtggttctgtcacttatgtgaccgttgtcgtgtatggagacgtgtatggagacgaggacaagccagcgcttataatgtttacagagatgtggttctgtgactgttgccgtgtactcaggctttatttcaacaagatttaaatatgagatgtagagtgattgatgtacatcacttcactaatcatgaaatctgtagaaggcgaaactactagccatatatgatatgcataatccgtgtggtaaacattatcaatatcacacaaattatttctaatgggttttgaatt

SEQ ID NO: 137881 - DNA, 1062 bp, Zea Mays
agatagttgtttaaaagtcaaaatccttgctggtggccgagggctgggaactttcaaaaagcggactgcaaggtggtgtccatattgttaaggctgaggaagctgaattgattgcaagtaaaatgttaggccagattctgataacgaaacaaactggtccagagggaaagattgtgagcaaggtctacttgtgtgagaaactatctcttactaatgagatgtactttgccatcacccttgataggaaaactgctggtccgctcattattgcttgcagcaagggaggaaaacactatagttgacctcaatgttcaaaggatggccagggctacatcatcttgttgttgacgggttccgtgtgttcaatcgccgagcagaaagccaggaacagaacttaggcgttggcgattggcatctccctcccctaagccatggccaccgggcggcccgtacgactcgtgctggatgcctccctcctcctcgacccctcctccaccagggaggcggcggcggtggctctgcggcccggggtagaggagctgttgcggcggttgcgctactccaacctgaatgtggcaatctgctatgcagagggcatgccaactaatgagtcaggctttcttgaaaaggtcgcaagctcacacttgtttggctctatagcacttcttgcgaaaagtgggaatctttctctaactgaattaatgttagaatggagccaaacaagtttatgtttttatgcgacttcaagagttgacaaaggtttaagttctgagctccagaatcagaattggagagttctttctgtagctaatgaatgtagcatagaggttcctggtgttttaaatgttcaaaggcttcagcagttgcttctcaccttggctactctaataaaagggaactatgtgactcatctgttctggtgattggatatataatgaaaatattctgtgaggaagacttcgcaagggcaagttactttagagtttacagtgtaaatgaatattaacagctacttatgtattgtttaacaacatgaacatcacgctttttcatcttgcttac

SEQ ID NO: 137882 - DNA, 293 bp, Zea Mays
aactctgctcgagcttgttctaagcacagtttctggatcggaggagcatccccgcctaggtctctgcagccatggttcgcggatcgctcggcaagcttgcatcgcgcgccctctccgtcgccgggagatggcagcaccagcagctccgccgcctcaacatccacgagtaccagggcgcggagttgatgggtaaatacgggatcaacgtgcccaggggcgcggcggctgggtccgtacatgaggtcaaggacgccttgaagaacatgttccccagcgagaaagaggtgatgacg

SEQ ID NO: 137883 - DNA, 1006 bp, Zea Mays
cgactgcctttggcaaccaccccgccccaaaatctctttctccgctgcgccgcaaacccaccgcttccaccatcgccacccgtcaccccttgctcccatagtccccataccatgcccgacctccacccgccggagcaccaagtcgccggtcaccgcgcctccgccagcaagctgggcccactcatcgacgactctggcctcttctacaagccgctccaggccggcgaccgtggggagcacgaggtcgccttctatgaggcgttctccgcccacgccgccgtcccggcccgcatccgagacaccttcttcccccggttccacggcacgcgactcctccccaccgaggcgcagcccggggagccgcatccgcacctcgtcctcgacgacctcctcgcggggtttgaggcgccctgcgtcgcagacatcaagatcggtgccatcacgtgaccacgagcgttctgctcggattccgcgtctccggcgtccgagtcgtcggccccgagggcgccgtgtggcggacggagcgcccggaggtgaaggctatggacattgtcggcgtccgccgcgtgctccggcgctacgtgtcatccgcttgccgacgaggggatggactgcgcgctcgcggcggcggtgtacggaggaaaaggtggagtcttgtcacagctgcgcgagctcaaggcgtggttcgaggggcagactctgttccacttctactcggcgtcgattcttctgggctatgatgctgctgcagtcgcagcaggcggaggtgggggtggggtaacagtgaagctggtggactttgcccatgtggccgagggtgatggggtgattgaccacaacttcctgggcgggctctgctagctgatcaagtttgtttctgacattgttccagagactcctcagacgcagcctttgggtccttcttaagagaggatcctggcattttcgatttgataacaaaggtaatgctcacccttgatatattaattgctctttttgtttgtta

SEQ ID NO: 137884 - DNA, 1849 bp, Zea Mays
ttctgggctgctggcccaagcccagtacacccaaactacactcccacgaaccacgaccaaaaatgccccgctcggacaaaatgaaactgaagaggcattcttttgccaacgggcagaagggagaagaccaggaataaaaaagaggcgtggtagtggacagtgagagctgacagggacagtgcccaccaatggtccccttctcacggtcacgctagcagcagcagccctcccccatcaccgaggagagagaagcctgtcgccgcgcgaccgccccacatggccaccgcgctcggtggggggcccaaccccaccgccgacgccatggaggtcgaccctccgcgcgcctccgccgacgagaagcatgtcgccactattattgcggggggaagtgatgcagtgacaggccacataatatcgactacgattgggggaaagaatggtgaaccaaagaggaccatcagctatatggctgagcgagttgttggaactggatcgtttggggttgtcttccaggcaaaatgcattgagactggtgaaaccgttgcaattaagaaggttctacaggacaaaagatacaagaatagggagttacaaataatgcgatcaattgaccattgcaatgtcatttccctgaagcattgtttcttctctaccacaagtagggatgaacttttccttaacttagtcatggagtttgttccagagtcactttatcgcgttctgaaacactacaaagacatgaagcagaggatgccccttatatatgttaaattgtatatgtaccagatattccggggactagcttatattcatactgtaccaggaatttgtcaccgagatattaagcctcagaatatcttggtggatcctctttcccaccaagtcaaggtttgtgacttcgggagtgctaaaatcttgattaaaggtgaagctaatatatcatatatatgctcacgctattatcgtgctcctgagctcatatttggtgcaactgaatacacaacatctattgatatatggtcagctggatgtgttcttgctgagcttcttcttagtcaaccattatttcctggggaaagtgctgtggaccagctggttgagattatcaaggttttgggcaccccaacacgagaggaaattcgttgtatgaatcccaactatacagaattcaagtttcctcagataaaagcatgtccatggcacaagatcttccacaagagaatgcctccagaagcaatagatcttgtttcccgtcttcttcagtattcgccgaatctgcgatgtagcgcacttgaggcgtgtgctcattcattctttgacgaattacgagaatcacatgcaagactccctaatggacgcccatttcctccactattcaactttaagcaggaactagcaaacgcaccaccggagcttgtcagcaggctattaccagagcatgctcgacggcattcaggattcggttccttatttgggagtggaccgtagcccgtaggaaaatctcgttttaatgttgggctgctgtacgccgtcagagggcaatctgcatatcccaaatctaagttttagaacctgaccatcttgttgagaagttgccagccttagaaaaacccgaggtggcctcttgtgtccatgctctgccagtagcggcacataatgctggggggatggttaggtttgttaagcacagagggtaactgactgagctaatgtattttcacgttttatgtctgtatcgaacttgtacctgtgtaccctgtaccaatcgcagctgatgtaatcatgtaaatgcttctaaactacttcaagctattatgatggccaattcgcaattttacagtacaccaaa

SEQ ID NO: 137885 - DNA, 834 bp, Zea Mays
atgacggcagtggctgggtgccactgtctctggccgttctgggctgtggcggcctgcagaggtcaggcaaaaaccgaaggtgggagttggatcatgatcgctagtgaagaatcggagctgcctagagtgtgggtaactgaacagaaacttgctgaagatttttcaatctgtggacaggcagataatgctattcttgctcttaaccgcagtggcattgttcttgaaacgcttcctgttaggcaagaacatattttctgcatgtgttggagactcctgactaaggtacggacgggtgtctgttgcccatttcttgcttactttgttcggttgcaccattcccggctgggatgcggtggcaaacctcgtggatcagctcgcatggaaacaagcctggtccatgcaggaacatctgttcggttagccctcgtaggtttctaccccagtccaatcccagtgaaatcccttcaccgtggcctggtattcgacccacgactcctgactcgtggaatttttcctcgtcagtctcaggcccgcagcaagtgcggagacgagacccgagtgctaggcgacgtaagcggcggcgctgcaatctccctggcggcatctgtcctctccagtagccaaaactttcttgcccgtgagagatgtcgtcgcgtgcagtgtgctccatctgtagcagaatacgtcgaggaccaaaacaatgctcccatggcaggcattctggaagaagctgtgtcaaccgtcaagtatggacatttgctggagctgaaaagtgaagatgcttatgcaagctgtggggagcgcctgccagggttcccggtgctgtgctcgtga

SEQ ID NO: 137886 - DNA, 2929 bp, Zea Mays
tgttagtggagtccaacacgggccgagtttaaattttaaataagatcaagcctaacagatctgtccacgggccttcgcccaactcgtcccattatttctctaaaaatccaacaaataaatccttgtgccagcagaaattatagatcgtgttagctaaaacacatccgcgatgacgtcgacagcgatggggggcgagccggcggcgggccacgggtactggcggtggagcaaagccgactttttcccggagccctcgttccagagctggcgcgcgtacggcggcgcgctcttgtccactgggccacggctgcgcgaccgcgtcacgagtcgctcctccgaggccgtcgaggcggggacgctgctcgcccagagcgagaatcccctccggcggtgcctgtcgtgggtggatctcgccttcctcggattcggctccgtcgtcggctcgggcgtcttcgtgctcaccggccaggaggcgcggttcgacgccggcccggccatcccgctggcctacgccgccgcgggcttctcggcgctgctctcgtccttctgctacgcggagctcgccggcgagatcccgtcggctggcggctcgttctcgtacctgcgcgtcgagctcggggacctggccgcgttcatcgccgccgggaacatcctgctcgaggccgtggtgggcgcggccggcctgggccggtcctggacgtcgtacctcgcggcgctcatcggccgcgacagcgacgcgctccgcatccacgtccccgcgctcgccgacggcttcaatctgctggacccgatcgccgtcgtcgtgctgtgcgccacttccgcgctcgccgtgtccggcgcgcgcctcacctccaccgtcaactcggtggcgtccgcggtcggcatcgccatcatcgcgttcgtgctggccgcggggttctcgcacttcgagccagccaacctcgcgccgtcattcttccccttcggcgccgcgggcgtcttccgcgcggcggccgtcgtgtactggtcctacacgggattcgacatggtggccaccatggccgaggagaccaagaaccccggccgcgacgtgccgctgggcctcatctcgtccatgtccgccatcaccctcgtctactgcgccatgtccctcgcgctcgtggggatgcagcgctacagcgacattgacgccaacgcggcctactcggtggcgttcgcggcggccgggatgaagtgggcgcgctacgtcgtggcgctcggcgcgctcaagggcatgacgagcggcctcctcgtcggcgcgctcggccaggcgcgctacaccacgcagatcgcgcgcacgcacatgatcccgccctacttcgcgctcgtgcaccccaggaccggcacgcccatctacgccaccatcgccgtcacgctcggcgccgcctgcgtcgcgctcttctccagcctcgacgtgctggcgtccgtctcctccatcagcacgctcttcatcttcgcgctcgtcgccgtggcgctcctcgtccgacgatactacgtcgcgggcaccacgtcccccgcgcaggcccgcaccttcgtcggcttcctggcgctgatcgtgctgtcgtccatcgggctgtccgtgtactacaactcgggctacgctgctcggtggcccgggtacgtagcgttcggcgccttgtgggcggccggcacggcggggctggcgctattcgcggagcagcagcgcgcgcccagggtatacggcgcgccgctcatgccgtggctgccggccatgtccgtcgccacaaacctcttccttatgggctctctcggctccctcgcctacatgcgctttggcatctgcacggcggcgatgcttgtgtactacgtgctcttcagcgtgcacgccacctatgacatggtgcactctgaaggtcagacgacatcggcgcccgacgctgccaccgacggcgtggagcagaggaagataatgccggtgtgacacagaggatgccatttcttggttagttgagcaaaagacacgcagctgatggagactggcagaaaggagaatgataaccaatcgtatcaactgttcatatggatggtcgactcaatcagtgcattgaaagcaaagaaaaaagtacgccaattttgcggattgagatccactgactgcagtggctgccactttctcggctcagcgctgttaataataaataaaaggataattctcgatttcctcgcgaattttttttccggtgagcggcggcgatcggcttcggatcagcggagtttggctgcgcggctatggttaccgtacgtggcggcggaggccccaatccgcggcgaggacaccatgccggcggcggttgcggagatggcggtaagcgggaatcggggaacgaggaggacagggagtatgagaccaacatgaggaagcttgccgcgtggacggcggcgctcctcgcgtctcggctgatgcatccgttttcctctcgccgtcgccggcgatcgaccactacatgcgtgtgacgacccgttgccccaacgcgccttcgtcagacgtgagccagcgcagtggatcgccggagagcgaggcggcgatggcgagggcacgctgtgacagccggagggctgccaggtgcgtcctctactgctcttctatttccagatggtgggtgaatcgtgcttagagtccagtcactgttagtcatgctacacacgaagcagccaaagcaggcaacgcatgtgacaacgacacctgaaaaagagaactagggatgtgaacaggggcgttaacaggagaagtcagagcgtaccaacgttcgagttaatgggtccgagtgatcgtgtcaggggattggactggaccgttgtcacgggagtataagagagataaatgaacgagaggttgtaacgcatcgaagaacagatacttacgtaacacatttcccctcgtcgctacact

SEQ ID NO: 137887 - DNA, 665 bp, Zea Mays
agcgcatcagctcagagacgacgacggagcagcagcatctcgtcgatcgcagctgcagcgccgccgccggcggcatggccgctgctttcgtacccacaccgaatatctcagaaccggagcaccgcccggcgaccaacaaaggtacgctggtcttcagctacacctgcgtcggcctcacgggcacagcgctcgtcgccgtcctcctcttctactgctaccaccagctgctccgcagacgggcgccagtcaccgcggccgccgccggagcagcagctgagaccaataatccaccagggccggacggccaccatgtcggcggcgtggacatcagcaagcttcctgggttcgcgtacgccgcgccgtcgtcgaggcgcaggggaaacggcggcgacggggcgcagtgctccgtgtgcctcggcgcggtgcaggccggcgagatggtgcggcggctgcccctgtgcaagcacctgtaccacgtggagtgcatcgacatgtggctggcgtcgcacgcgacgtgcccgctctgccgatctgacgtcgaaccgccggggatagcgtcgtcgacggagccgccggagactctgccagtgtaattcgtcgttaaatcgtagcttgtcaactgtgtaatactagctaatacaattgtgtatatacatcaagacttt

SEQ ID NO: 137888 - DNA, 890 bp, Zea Mays
ccagtattctgctcaagccgagcaccgcagaaaaagaaaaagaaaagccaaaggcaaaggcaaaggaatcccaatcaggcaagcaaaaggaagaaccagctgctgcggccggagatgtcgtcgcagctgatcgaggagcaccggtcgggcgcggaggtgcacgtcgggcacgagctgtgcgagcgcaagtcgcgcgagttcatggtggagctgggcctccccgacgggctcctcccgctgcccagcctggacgaggtgggctacaaccggtcgacggggttcgtgtggctgcggcaggccgccggcctgacccacaccttcggctccatcggcaagcaggtgtggtacgacagggaggtgacggcgttcgtggagcccgggcggatgcacggcctcgccggggtgaagagcaaggagctcctcatctgggtcaccatctccgagatcgtcctcagcccctccggcaccaagatcgtgttccgcacccccgcggggctcggccgcgccttccctgtcaccgccttccagctcgagcccgcggcggcggagggggaccacaaggaggaggccgaggacgccgccgccgccgccgccaactgatctgctctagcttccggcggcggcggccgtgcgtgggctgctcgatccggtagtggcagtggctttgtgagacagtcgagtcgattgtggtttcccctcctccgccatgtgcgtgtagtggatgatgatgcaggaataaacggtgtccctggatccagaactcacggttcgatccatccagtttatctcatgcttgtgtatctctatgtatgcattgcctgtttgttcgctggaatctactacttgcagcggcctcgtctcttcagatcttgggtcttcacaatgcatgg

SEQ ID NO: 137889 - DNA, 764 bp, Zea Mays
gccgagcaccgcagaaaaagaaaaagaaaagccaaaggcaaaggcaaaggaatcccaatcaggcaagcaaaaggaagaaccagctgctgcggccggagatgtcgtcgcagctgatcgaggagcaccggtcgggcgcggaggtgcacgtcgggcacgagctgtgcgagcgcaagtcgcgcgagttcatggtggagctgggcctccccgacgggctcctcccgctgcccagcctggacgaggtgggctacaaccggtcgacggggttcgtgtggctgcggcaggccgccggcctgacccacaccttcggctccatcggcaagcaggtgtggtacgacagggaggtgacggcgttcgtggagcccgggcggatgcacggcctcgccggggtgaagagcaaggagctcctcatctgggtcaccgccttccagctcgagcccgcggcggcggagggggaccacaaggaggaggccgaggacgccgccgccgccgccgccaactgatctgctctagcttccggcggcggcggccgtgcgtgggctgctcgatccggtagtggcagtggctttgtgagacagtcgagtcgattgtggtttcccctcctccgccatgtgcgtgtagtggatgatgatgcaggaataaacggtgtccctggatccagaactcacggttcgatccatccagtttatctcatgcttgtgtatctctatgtatgcattgcctgtttgttcgctggaatctactacttgcagcggcctcgtctcttc

SEQ ID NO: 137890 - DNA, 758 bp, Zea Mays
gccgagcaccgcagaaaaagaaaaagaaaagccaaaggcaaaggcaaaggaatcccaatcaggcaagcaaaaggaagaaccagctgctgcggccggagatgtcgtcgcagctgatcgaggagcaccggtcgggcgcggaggtgcacgtcgggcacgagctgtgcgagcgcaagtcgcgcgagttcatggtggagctgggcctccccgacgggctcctcccgctgcccagcctggacgaggtgggctacaaccggcctgacccacaccttcggctccatcggcaagcaggtgtggtacgacagggaggtgacggcgttcgtggagcccgggcggatgcacggcctcgccggggtgaagagcaaggagctcctcatctgggtcaccatctccgagatcgtcctcagcccctccggcaccaagatcgtgttccgcacccccgcggggctcggccgcgccttccctgtcaccgccttccagctcgagcccgcggcggcggagggggaccacaaggaggaggccgaggacgccgccgccgccgccgccaactgatctgctctagcttccggcggcggcggccgtgcgtgggctgctcgatccggtagtggcagtggctttgtgagacagtcgagtcgattgtggtttcccctcctccgccatgtgcgtgtagtggatgatgatgcaggaataaacggtgtccctggatccagaactcacggttcgatccatccagtttatctcatgcttgtgtatctctatgt

SEQ ID NO: 137891 - DNA, 683 bp, Zea Mays
gcaccggacatgtccggtggcacaccggacagtccggtttggacggccatcacccagctagcgcaccatggaatgcttttcgtcccaattggctacacctttggttcaggcatgttcgacatggatggtatcagaggaggcaacccctatggcgcgggggtatttgccggcgatggcagcagacaacccagtgagactgaacttgccctcgcagagcaccaggggcaagtacatggcctccatagtgaaaaagctagctctccatgcttgagacagccacccctgtgcagtagaagtcacatggtcaccttcctctggtgctcggcttctcctattgtttctggatacatccgtcccgtcgtatatgtgcacagcttgccctatcatttgtgacaatagccacccctaaattaaggttcatttgtacattgtcgacatattcatattgttgtccatttgagcaataagagtgtcataataaacatcatatgccatattggttttggtgtttgttttgttgcacggaactgttcttatactataaaagaagagtaattttgttctgatgtttttcttgtctgcttcaatctacctatgggtgtgtgaagctgctatattagagttactttttgtctaaagtctgaacaattttaaagaatctgaatatctaaacatttgaatat

SEQ ID NO: 137892 - DNA, 1709 bp, Zea Mays
ctgcactggaactactactaccttaccttatcggatccagtttggtgtcacgcacggtgtgtgctattgtggcacactcactctagaggtgcaagaacagcagggaggagaggctgggtgtactgtactcaactcaagatgcttgtacaacaggctggtctgcgaacggtccatgaagccagcctctggcaatgtgcagatacgcggcttctgtcaagtgaataccatcccagctccagtgcgtcttaggatcagcgcaagccgaggcaccaggctcaccgcacttcgctgtcaggttgaaattgtaaggacccctcccaggcgcgccacaacatgcccttggtggttgtttgagctcaccgaatttcttgggctggagtatgaactggatgattggcgtgaagtaatcgccatagatgatcctcgcgccagggtgcttcgctcggagcttcacgagcgcgcgcttcagcatcgcattgtgcacccaagagaaagtgttgaaccgcttgaggcagccggtgcgcgagccatgcccttccttggggtcagcgtacatggtcaggtagaccggaaagcaccctgatggcatcacaccgggcacgatcaaatcctttgccccctcggcgatcagttgctgcaagcaggccaggagcagagcagggcacatacaatacaagggatcggtgaacaaaatcccacggagcaagcacgccgagctagctagctagtagcagagcgaaggcgcagttcttacttcgactccatcggagatggctcggatcacgtgggacgtcagcttgtatgcctccctgaggtccttgccggcgaacagcggggcgttgtagtcgttcccaccgaattcgcctacgacgaacaggcactcggcgaagaactccttgcatccttcacgacccaaggatagcagcggggacaaaaaggatagcagcgtcaacgaaattgaatttttactttaagaaagaaagaaagagatggtaaaggatcggcgaaaatttgcgttcttgggtgtgtacgtgtgccttgcgcggagctgcagagcgatggcttgaggtctcgcagccactggatttgcgtgcggagggagccggagttccacacggtgctgccgagccctcgcttccggaagaagtcggtgtcgagcgcggtggcgccggtgatggcgaagttggcgccctgcgcgaagctggcgttcttggccttggacggcggcggcagcgggaggcccaactcctgcgctgcaggaggagaaggccagaaagaatcagacccatcgaattccgtccgaacagaggcgactcccaagaacgcacgcacgcacgcacgcgaaaaggttaggggagcctggaatcggcgaaatttaccgatgaaatcgacgacgaggcggccgtcggagcacctgccggtggggtagccgaagtaggtctggccgtagggcgggcgcgcggtggcgaggtagtccgggatgccctccgtgaccaggttgccggcgtccaccagcgagtccccgaaactgaacaccgcgcggtaccttccctgggccgccgccgctagaagcgggaacaccgaaaggaccgcgcaaacccacctcgcgcttccagctgctcccccgtctcccggcatggcctgtttcccgaaattggcgcgaggagtcaagcgaggcatgaggagccaggaggagaagggcggtttgg

SEQ ID NO: 137893 - DNA, 1396 bp, Zea Mays
attgtaccatcaccttcctcctgtttttcttgcctgtctccatactcaccagttgcttttgaggagctgatcgagctacaagcaatcgggcaaaggatatttccgaggtattattgcaaggaagaattaatatgcatccaggaggtggaccactgtcggtgccaccaggcttccgcttccacccgaccgacgaggagctcctctactactacctgaggaagaaggtttcctatgagcccatagatcttgatgtcataagggagattgatctcaaccagcttgagccatgggatctcaaagaaaggtgcaggataggcaccgggcatcagaacgagtggtacttcttcagccacaaggacaagaagtacccgacgggaacaaggacgaaccgcgccacgacggcggggttctggaaggcgactgggcgagacaaggccatcttcctcggcaacgcctccaggaggatcggcttgaggaagaccctggtgttctacatcggcagggcgccacacggcaagaagactgactggatcatgcacgagtaccgcctggaccaagagaacgttgagattcaggaagatggttgggtggtgtgtagggttttcaagaagaagagctatcaccagagaggcctcaatccggctgaaatggccgccgcactggacgacgacgagctccagcctttccctgttcctatccccggcagctccctgcagccaacagagcacaagaccaaccctactcacctcatgcaatatgactatccttccttcgacccttccatgcagctcccacagctgatgagcgatgaccaggaacaggaacagcccgtgcggccaaccctcctccccggccatcccggcgttgctatggcctccatgagctcactcaacattgagtgctcgcagaacctgacgaagctcacatctaacggcagcgacgagatgctccacgtcggccacggcggtggggctggaggtggtgtagtcgtcgaccgcttcgctggcacgacgacagattggtcgatcctagacaagctcctcgcctcgcaccagaacctcgaccggctcttccacggcaaggtcgtcaccacggcatctgcctccccaatggcggtaccggtataccatcagcagctcatggaactcggtggctcgtcgtcgtccttgcagaggcttccactgcagtacctcggcggcgagacggccgatctcctcaggtaccccaagtaattggatcgacctcaagtttagctacctctctcttgttgagcagtgaccagatcagggtttttggttgactactagatcgatcgactgcttaattaattcggtctactttgtatggagagtttagtgctcctaaatgtatatatatggtgcaactgttttgggca

SEQ ID NO: 137894 - DNA, 1750 bp, Zea Mays
tctccgacgattccctctctaccggatcccccccctccctcctcagcttccattccctctcctccgttaattctccgctctccatttattcctttccagttccgccgctccattcccagctcccaccaccaagggcaatccctctccgacatccaatccaatacaatcacgcctgcgcacacgcaaccccagctcaagccccaagtccaaaccctaacccggcggcggaagatatggccgacacggggcgcgacgccttccctgacgaggcggagcccgcgttcaccctcgacgagtacatggaggacatcgaggccgtggagctggaggcggatttggtgctgggcggggacgagggcaaggagtgcacctacgccggcggatacctcaagcgccaggccgtcttctcctgcctcacctgcgtgccggatggagtcgccggggtctgtaccgcctgcagcctcgcctgccacgacgggcatgagattgttgaactttggacaaagcggaagtttcgttgtgattgtggcaactcaaagtttggtggtcacctttgcaaactctgccctgagaaagattatgagaattcagcaaatacttataaccataacttcaaaggttcctattgcacatgtgggcggccttatcctgacccagaagctaaggagcaagttgaaatgatacaatgctctatatgtgaggactggtttcatggggatcatattggtcttaactctattgaagagataccaagagatgaggaaggggagccactctatgaggaattgatatgccacaaatgctcatctgtctgccatttcttgaaattgtatccagatacaatttgggcttctggtaagccaaatctggcagtggaaactgatgcaagtgactcgaatgtgatgaaaaaaccttcagggcatgctgaccctgagaaacatgaaaatggtgctcttgttgataatacggttggcgagaagacctctgttgagaatgattctacaaaagctattgcagttcctgaggaggccaatttgggtagcagttctggcaacaactgcaagttaggagtggatgtgaatacaatgccagctattacagataaaagtgagccttttttcatgtctaaaggttggagggagacactatgcaggtgtgaaacatgcttcaacttctatgcacaacgaggtattgcatatcttattgacaaggaggattctattgaggaatacgagaagattgccaagcagaagagggagatgaaactggagcagcagcaaggagctgagacaaattttctgaattcacttaatcatgttcagaagatagagatgataagtggcatcaatgacatgaagaatgagtttcagtcctttctggagtccttcgatgcatcaaaaccggtaacatctgatgatatacattcattcttcgagaatcttgctaagaagaagaaacagaggttatcttagcttttgtgaccgcatcggaccctacccgaggcaaccgttctgctggacagaggtcctagtttgttgggctagtaaatgtaatgttatcttaggtggtacttactaatcgggccagtaatgttgaattctagctggaacgcggtaatgtttgatgcaccgaagtcgcttgcagtaggttccgatggcccaagccaccaaaaacctgtttgctccatgaacctcaatcctgttaggtgataatataatatacattgtgttgccaccgtgctttttttctt

SEQ ID NO: 137895 - DNA, 1440 bp, Zea Mays
tatgtgtgttttttactcttgacaatgtttcacccctatttgcagacctatttgcagtcagcctctttgagagtagaagaaatgagagtgaaaagccgtgacactgatcagtggatgtcatatcgacatcttcctgagaacctcaaggaaagaatacggcgttatgaacaatatagatggcaagaaacaagcggggttgatgaagagcaactccttatgaacctccccaaagatcttaggagggatataaaacgacatctttgtttgaaacttctcatgagggttccactgtttgaaaatatggacgaacagcttttggatgccatgtgtgactgcctaaagcccattctgtacacagaaggtagctgcgttattcgcgaaggagatccggtgaacgagatgctctttgtcatgaggggaaacctaatgagcatgacgacgaatggtggaagaaccggcttctttaactccgatgttctgaaggccggagatttctgcggcgaagagctcctcacctgggctcttgaccccacgtcaacatcgagcctccccagctcaacaaggacggtgaagacgatgtctgaagtggaagcctttgccttgagggctgaagacttgaggtttgtggccacccagttccgacgactccacagcaaacagctccagcacactttcaggttctactcgcagcagtggaggacctgggccgcctgcttcatccaagctgcctggcaccggtactgcaggaagaagatcgaggattctttgcgtgagaaggagaagaggctgcagttcgcgattgccaacgacagctccacttcgctcagcttcatggcagcgctgtatgcttcgcggttcgctgggaatatgatacggatcctgaggagaaacgccacgcgcaaggccaggctgcaggaaagagtgcccgcgagactgctgcagaaaccggctgaacccaacttttccgcagaagagcagtagtatttcgcttctctgacttctcgttttgcagatacagatatgggaaattgtttgcgtgacttgcaagcccgaggatggcatgcccagattaaaaagaagaagaagaaaaaggggaatgaaatctcgatagaatgaccactgagtgatagtaatgtagtgattgatatacagtacattactgttcgtttaagaacgtccaagtggcgtttgtatgtgcttgtgtaatagcatagttagataggagtgatagtaatgtagtgatatacattcatccaccgaagctatgtgtgtatagggatcgaccatttccgtgcttacactcacgcactgtaaacgcagctggtgactgctaagtggcatccataagtgcgcgcaagagatcaacagaaactggctagggtagttggcatgtagtgcttgcacaggaagaaagcgctgaaatggctccatgatttcaat

SEQ ID NO: 137896 - DNA, 547 bp, Zea Mays
atgggaccgggactgcccttttgacgcggagcggaacccacaccacaccacggcggctgcacgcgcgcgccaccaccaggcaccagccaccagatcccggcgtcataaaattccccgcgcggccgtgcctcccaccagccacctctgctcactcagcttccttccttcctacacaccaccaaccgaaggccgcgcgcgccatccagccatgggcaactgcctgaacacggccgccaagcggggtcaccgcggcatgcttctgccggaagaggaggagagcctctcggagatgagaaggataagccagctgctgcgggaggaggaggaggagatggtggccgtagctccggcggagggcctcaaggtgaaggtcgtgctgacgcgcggcgagctcgagtggctcgtggcgcagctcaagggcggcgagcggcgcctcgaggacgcgatccaccacatgcaggccgccaaccacgccaagggagtcggcgacggcggctggcggccgtgcctcgagagcatcctcgagtgcccggagacccagagctga

SEQ ID NO: 137897 - DNA, 324 bp, Zea Mays
cagtcgaccacggcaccaccatcatgcggcgaagaccgaagaccgaagaccgttagcgccagcgggaagcttcgttgcatttctcccccaactccacccgcctaccccgccccgcctcgaaggggaaagggcactcccgcgcccccaagtcgaaacgcaaggacagtttgcttaccggttttgtgttcttacttggttgtgattataatcacccgagaccttgtcgtatgtggatatcatgcttgaagatttgatatactcgtgttagcagctaaattcgaagaaaatggtgatgggaagagaggacaaatatgtgaggttagc

SEQ ID NO: 137898 - DNA, 1066 bp, Zea Mays
gattgttttgtttggtttattatatgtgcagatttcaggactggagatcagagcagtctgttagttcagagaacatagttgctccacatagagatgatgtttcattattcagttcacttaaagaaaggactgccacggtttttacatttctaggaaatattttgcacacagaaacctcaaataaatcaatgctcgatgaaagaaagtccacaacaggaacacttcatcctcaagggccatttctgcaaaaatggaacaggatatttgtgatatcatgtatatttgcagtttcagtggatccattgttcttgtatatcccagttatcaatgatgaaaaaccttgctggtatttggatagaaagttggaaaaggcagcaagtgtcctgcgttttttcacagatattttctacatactccatatcatatttcagttccggacaggctttattgcatcatctcatacaacctttgggcgaagtgtcttaattgaagatagatatgcaataacaaagcgctacttatcaacatattttttcattgatgtctttgctattctacccatccctcaggttattattttggtcgtgctacctaatcttcatggctcgaaggttatgaaagccaaaaatgtgttaatgcttataattatatgccagtatgtgcctcggctaatccggataaggccactatacctccaaatcacaaggtctgctggtgtaattacagagacagcacgtgctggtgctgctttcaaccttttgctttacatgcttgccagccatgtccttggagctctttggtacttgctttctattcaacgccaagattcctgctggagacagtattgtagaggcaattcgacatgtgatcctgcatatttgtactgtggagattatgataaggatgggaaaaatgctttcttaactacaaattgcctactaagtaatcagtcaaaccttccagatccgtactttgggatttatgcaccagctataaaaaatgtatcgcgatcaaaaagtttctttgcaaattgttctctgtgtttgttgggtcttctaaattctta

SEQ ID NO: 137899 - DNA, 1026 bp, Zea Mays
atggccgaggagatccaccagaaccaggaggaggaggaggaggaggaggttgtggctgcgtccaccgccaagcgcagacgcaaggcggcgtcttccgggaagaagcccaagccgacgcccaagaaggctaaaccggccgtcgacggcggcccagggatgtgcccccgcgccattgcccccggcctcgcgttgtccgcgtcgctcacgaagtcgcccccagcccctgcgtcagaaattataatttgggtcagagaaatacagttcattcttataagtcccacaatctacatgttcattctgttaagcccctcgactctcgatggcgatggtgagcaggctgctgccacgctgaggagccaatgctccccgcagcacccgcggtcctggaaggtgcaacaaataactgttcaggcacctttgaaggatgcagagtcccagaaagatgttgggaagggtgataaatcaggggataaaggaactgctgagaagtttgcaatatatcagaagcatcgttcttcgttggcagacattgttcagttcaggaggccagctgctccaacttccagtgtgaatgctgatattgtgggaacatccactctgcagtctgcatctctaccgaaacaagaatcctcaacagctacatccaagagctatactttcagagaaggctgttatatttccatagctgaatcacttcgcccagacttttctgctggtgaagaagttgagaggctagctatgaccgagctaatagaggtcatttcagaagagaacaaatctggacctctgattgtgttacttaaggatgtagagaaatcattcattggagttaccgagtcactttcatctttgcggagcaaatttgaatcgcttccatctggtgttcttattataggatcccacactcagatggacagccgcaaagaaaaggatgaggctctacttacagattggaagcagcagttggatcgtgatgttgaaacccttaaagccaaatcaaacattggtagcattcgcacgcattga

SEQ ID NO: 137900 - DNA, 588 bp, Zea Mays
taccacaaaaccacaaccgcgcggttttctccctcccacggctcccgcggcgcaagcgcagcccaaccaagcgccatggccgcccccccgacgccgacgtctacgatattccgtggctggagaagtaccgccccgcccgcgtcgctgacgttgtcggaaactccgatgccgtcactcgcctagaggtcattgcccgcgatggcaacgtgcccaacctcatcctctccggaagcgccattccgtcgaacaccttcaccgcgcatcacggaacagcgactcatccttttcccttttagcgcaggggcctccggggactgggaagacgacgagcatcctggcgctggcgcatgaactccacgggcccaactatcgtgatgctgtgctggagctcaatgcctcagatgacaggtttctgccaccgtgacctgattttgtatcggcgattcggggctgcctcgagtggtgtttgggttggatgcttgatggtcgattcgtgcttttgcaggggttggatgttgtgcggaacaatatcaagatgtttgcacagaaggaggtcaccctgcagccaaggcgtttccaccatcagtg

SEQ ID NO: 137901 - DNA, 614 bp, Zea Mays
ggagctgcgggagacggggagagactgacggactgacagtcgaggtcgcggtcggaaacagacagacatactgaaccgattccgtggtggcggatggagtgggacgacgactgggtggcccccgacaagctgcagcacgccgtggcctgcctcctcatcgccctgctctccgccgcgctcgccgcccgcagcgcccgccctggcctccgccgccgcgctgcggctgtcggctccgcggcctcgctcgcggccggcgccgccaaggaggccgcggacgaggcccggctcttcggctccgccggcgcctcgcccaaggacgccgcggccgacctcctgggcgtcgcggccgcggcgctggcgctcgccctgctccgccgcctgcgccgccgtcgcgagaggaaggcgcgcgaggacggggacggggacggccgcggcggcgccgccgtctccatggtgtgactgtgacggcgaggtcagctgctccgatctgttttaaaggctgttgggtactgatttagtttgcgatactctgcccggattgatgcgacttaactatatctatatactcgttgcatcattatacaatattcgagtatatttttgcaacatccaga

SEQ ID NO: 137902 - DNA, 1680 bp, Zea Mays
gtcgcacttgcaagatacaagtacacgtctatttaaaccaccgaacaaccgtcaacactcaccggctgctgcctgctgctcagcaccacacgcttgagagcttgttacgaggcaatggcgccgacggtggaggtgttgacgtcagaggtggtcgtcccggctgaagagactccggcgggcagcatctggctgtccaacctggacatcgccgcgcgccgcgggtacacgcccactgtctacttcttccggcccaacggtgatccggggttcttcgcggcggatgtcgtgaagggcagcctcgccagggcgctggccgcgttctacccgctcgcggggcggctcggactcgacggcaccgggcgcgtccaggtcgactgcaccggcgagggcgcggtgttcgtgaccgcgcggtcggactacgcgctcgacgacctgatgcgcgagttcgtgccgtgccgcgagatgcgggacctgcttgtgcccccgacgcccgcgccgaacccgccgtgcgcgctgctgttcgtgcaggtcacgtacctgcgctgcggcggcgtcgtgctggccctgtccatgcaccactcggcgtgcgacgcgcggggcgctgcgcacttcttggagacgtgggctagcatcgcgcgcggggacgacgccaccaccgagaacgctcccgtgccaccgtgcttcgactacgggcggctgctcgccgcgcgcccgggcccggcgcgcgcggtgctgtacgaccacccggagtacaagcccgagccggagcccgtggacgccgacgccgtggccgcgtccgacgactacgcgagcgccatcatcgtcatgaccaaggcgcaggtggcggcgctcaaggcgcggtgcccgggggcgtccacgttccgcgccgtggtggcgctggtctggcagtgcgtgtgcctcgcgcgggcgctgccccccgaggcggagacgcggctctactccatgatcgacatgcgcgcgcgcctggacccgccgctcccgccgggatacttcggcaacgcggtggtccgcacgtcggtgtccgccacggccggcgaggtgacgtccaaccccgtgggccacgccgcgcggcgcgcgctcgcggtgacgagccagggcgacgactacgcgcggtcgctggtggactacctggagggcgtggacgccatgaacctgcccaggagcggcatctcgcgggcgcacctccgcgccatcagctgggttggcatgtcgctgtacaaggccgacttcgggtggggcgcgccggtgttcatggggccggcgctcatgtactacagtggcttcgtgtacgtcatgaacgcggcggggaaggagggtgccctcgcgctcgtgctgtcgctggaaccggagagcatgccggagttcaggaaggtgttcgccgaggagctcgcgagcctggaggtcatgtagtgcatacatatacctcaagtacgtagcagctagccgctagtgcacagctgcacgcgtagaacgtactgtactacatggttggttatacgtgtgtgtgtgtgcgcgtgggcggaactatgtattaatttctgtccatgccatgtgcacgtgtccagctgtgaagtatttggatgccaagtcatgtatgactactatatatatactgtttagatgtttgagtcccacgttttcaatttgtcactatcacct

SEQ ID NO: 137903 - DNA, 666 bp, Zea Mays
atggccgagctccaagacgaccaccgccccgaggggtacgatcccgactcccgcgccagcgccggtgccgaaccggtcggcatcgagattcgccgctcgcgggcagggctcggggcggaggagcctgtgttggctccgacgccgacgctggcgccggtggagaagcctcaggaggtgtcggagcgggagtattgggatggcatcagaaatcttgtaagtgccttgccacagacaatcaagagactggttcttgtgtcatctattggtgttacaaaatacaatgagataccatggagcatcatgaatctgtttggtgtgctcaagtacaagaagatgggagaaaacgttgttcgcaattcaggaataccattcacgattatcaggcctggaagattgacagatggaccctacacttcatatgatcttaatacacttcttaaagctacagctggggagcaacgagcagtagtcataggcaaaggcgacaagcttgtgggggaagttattagacttgtggtggcagaagcttgtatccaagctttagacattgaatctactgaaggacagatatatgagattaattcagtgaagagcaccataccacaagctagagaggagataactctgtgtggcattggcatccctgcttggaggatgaccctatag

SEQ ID NO: 137904 - DNA, 125 bp, Zea Mays
ccccccggagtcgaaacgccgataacttcataaaactcatgtaccagtatcggataccatatcggatacggatacttcccgatacgtatttaggacgtattagaattttctatggatttaaataa

SEQ ID NO: 137905 - DNA, 94 bp, Zea Mays
aggtatttctacattatattcatgtctatcctgttaaatccacatgtgcacattcctattgtcgctaattgtttaatatcaatgcaccgactac

SEQ ID NO: 137906 - DNA, 774 bp, Zea Mays
ctagaagcagtcggagctccctgagcaggtcctctgctgcgtcaggctgaacaagatcgtttcgctgaccaagaagttccaacaatagtcaccgttgatgccgaagtgccagagctgacccttttgcggggatgaggttgtcctcgcagtccaccgccacgtcgagcgccagtgccgcgacgacgtagatcgtccccatccgcatccctcccccttccttgtggcatctggcggcaccatcggcaatgacggggcagtggatggggcggagctagagagcgtgaggcggaggttacctaggcttggaggttgagggggggggagggagtggggactgggtggacccaggtctcgcacgatctggggaagacggtggggcagaccaggtagcgagcacgacaaaaaacttgggagtggggcggcgggcgcggttctgcgggcgagctgcagcaggaaacagacactcaaagatgggcccacctgtcgagtgtgggcagaaccgcagaacagcgcgatggtgaggcggtcggcttccgtgctgccaagcccgagccaggaggccaaggtcgaggccggcttgaccgtcttcttctccggctcctccgcgggggacgacgggcgggcgtagggcgcgtgctcgacgagacaggccttgcgcttggccaggaaccgctgcaacgacgccttccgggcgatggacaggtcatcgccggtcgcgaggcgcatgacctcggccgccttctccgccgggaagtcctcgaacaccaccaccat

SEQ ID NO: 137907 - DNA, 2023 bp, Zea Mays
attagcccaagcaggcttctccgactcccgtcccccattccgtccgccaccgccttccccctccctcgaatcattcgattcgcctcccgtcgtctcgtccgcctgattctactcggccgtcacggtgatcggagccggctagggttagggttccgtacttccgttgatctccacgcccatggtgcagctgccgagctccggtaagcggcacgcggaaccggccgagcagacgatggctccggcgcggcgcgcggcggcggtcaagctggaggtggaggagctcggggccaacgagcgcggcccgctcagcaagcgcgccaggccagctcagccgatgcccccgacgcctccgcagccgcagcaggatatgtaccacaatgtacttgatgaacctagcccattgggtctgcggctgaaaaaaagcccatcactcttggatttgattcagatgagactttctcaagcatccaacgctggggagtcttccatggacaacagtggttctgagccttccaagaagaaagacagtaaatccggtgtgtcttcagcaggcgaacggctaaaagcttcgaattttcctgcaaatatattgaagattggttcatgggagtatgtctcacggtatgaaggtgatttggtggcgaagtgttactttgcaaagcataaacttgtgtgggaagttctggaaggtggccttaaaagtaagatagaaattcaatggtcagatattgctgctttgaaggcaatttgccccgaaaatggccaaggaaccttggacgtggtgttggccaggccacctcttttctttaaagagacagatccgcagccaaggaaacacacactgtggcaggctgcctcagatttcactggtgggcaagcaagtatgcacaggcggcattttctgcagtgcccttcaaccttgttaagcaagaattttgagaagcttattcagtgtgatcagcggttatatcaattgagtcaacagccagagatcacattagaccctacattgtttgaacctaggtgcacaatatttgaggatccggttgaatcaaaatgcgctggttttactaatttgaaagatgaacatcgggctttgcctggctattcagattcggtgtcaccatgtgccggttcctccatatctgctaagaaagaaaacaatgattccataagaatgccagcagaatatcctcctcagacagtaggaataggcatttttacaggagttggtgctgtaggtgcacaagctgtcagcagaaatgtgaatggtgcagcaccagaattcaatatccccaactggtggagtcaattgaaggtgcctgggcttagaccatccatgtcagtggatgatctggtcaaccacctaggcaactgcatctcagagcagatcacttcaggcgatccggcattggccaacaacgaggtgccaaccaaagaaacactcgaggggattgctcagtaccttcttggtgacacacaaggcccgccggttactgctgcagtcgagagatcactgatggccagggtggactccctctgctgtttgattcagaaagacacagcaccagttgccaaaccaaagcccgagccaaatgacggggacagcatcggcgtggaagcctcagatggttccgacgaagaattcacctccgcgccaacagggaaacctacagatgccaccaacccgccagccatgtcaagaaaggattcgtttggagagctgctgacaaacctcccccgcatcgcctcgctaccacagttcctcttcaagataccagagggtactgagaactgaacgtggaagttaagatccctggaataggtagtttgctgtaagcctgtaaagattgtatccaagcaataagaaagccccttatcacctcctcggaggcgtgttccccgctctgtaaatttgacaccggtaggttgctccagttgtatgttttgcgaatcatgggtagtggaaaattgaaatgttcattggttctttaactcaatcgtgccccattccaaactgctt

SEQ ID NO: 137908 - DNA, 2011 bp, Zea Mays
attagcccaagcaggcttctccgactcccgtcccccattccgtccgccaccgccttccccctccctcgaatcattcgattcgcctcccgtcgtctcgtccgcctgattctactcggccgtcacggtgatcggagccggctagggttagggttccgtacttccgttgatctccacgcccatggtgcagctgccgagctccggtaagcggcacgcggaaccggccgagcagacgatggctccggcgcggcgcgcggcggcggtcaagctggaggtggaggagctcggggccaacgagcgcggcccgctcagcaagcgcgccaggccagctcagccgatgcccccgacgcctccgcagccgcagcaggatatgtaccacaatgtacttgatgaacctagcccattgggtctgcggctgaaaaaaagcccatcactcttggatttgattcagatgagactttctcaagcatccaacgctggggagtcttccatggacaacagtggttctgagccttccaagaagaaagacagtaaatccggtgtgtcttcagcaggcgaacggctaaaagcttcgaattttcctgcaaatatattgaagattggttcatgggagtatgtctcacggtatgaaggtgatttggtggcgaagtgttactttgcaaagcataaacttgtgtgggaagttctggaaggtggccttaaaagtaagatagaaattcaatggtcagatattgctgctttgaaggcaatttgccccgaaaatggccaaggaaccttggacgtggtgttggccaggccacctcttttctttaaagagacagatccgcagccaaggaaacacacactgtggcaggctgcctcagatttcactggtgggcaagcaagtatgcacaggcggcattttctgcagtgcccttcaaccttgttaagcaagaattttgagaagcttattcagtgtgatcagcggttatatcaattgagtcaacagccagagatcacattagaccctacattgtttgaacctaggtgcacaatatttgaggatccggttgaatcaaaatgcgctggttttactaatttgaaagatgaacatcgggctttgcctggctattcagattcggtgtcaccatgtgccggttcctccatatctgctaagaaagaaaacaatgattccataagaatgccagcagaatatcctcctcagacagtaggaataggagttggtgctgtaggtgcacaagctgtcagcagaaatgtgaatggtgcagcaccagaattcaatatccccaactggtggagtcaattgaaggtgcctgggcttagaccatccatgtcagtggatgatctggtcaaccacctaggcaactgcatctcagagcagatcacttcaggcgatccggcattggccaacaacgaggtgccaaccaaagaaacactcgaggggattgctcagtaccttcttggtgacacacaaggcccgccggttactgctgcagtcgagagatcactgatggccagggtggactccctctgctgtttgattcagaaagacacagcaccagttgccaaaccaaagcccgagccaaatgacggggacagcatcggcgtggaagcctcagatggttccgacgaagaattcacctccgcgccaacagggaaacctacagatgccaccaacccgccagccatgtcaagaaaggattcgtttggagagctgctgacaaacctcccccgcatcgcctcgctaccacagttcctcttcaagataccagagggtactgagaactgaacgtggaagttaagatccctggaataggtagtttgctgtaagcctgtaaagattgtatccaagcaataagaaagccccttatcacctcctcggaggcgtgttccccgctctgtaaatttgacaccggtaggttgctccagttgtatgttttgcgaatcatgggtagtggaaaattgaaatgttcattggttctttaactcaatcgtgccccattccaaactgctt

SEQ ID NO: 137909 - DNA, 1378 bp, Zea Mays
agcccaagcaggcttctccgactcccgtcccccattccgtccgccaccgccttccccctccctcgaatcattcgattcgcctcccgtcgtctcgtccgcctgattctactcggccgtcacggtgatcggagccggctagggttagggttccgtacttccgttgatctccacgcccatggtgcagctgccgagctccggtaagcggcacgcggaaccggccgagcagacgatggctccggcgcggcgcgcggcggcggtcaagctggaggtggaggagctcggggccaacgagcgcggcccgctcagcaagcgcgccaggccagctcagccgatgcccccgacgcctccgcagccgcagcaggatatgtaccacaatgtacttgatgaacctagcccattgggtctgcggctgaaaaaaagcccatcactcttggatttgattcagatgagactttctcaagcatccaacgctggggagtcttccatggacaacagtggttctgagccttccaagaagaaagacagtaaatccggtgtgtcttcagcaggcgaacggctaaaagcttcgaattttcctgcaaatatattgaagattggttcatgggagtatgtctcacggtatgaaggtgatttggtggcgaagtgttactttgcaaagcataaacttgtgtgggaagttctggaaggtggccttaaaagtaagatagaaattcaatggtcagatattgctgctttgaaggcaatttgccccgaaaatggccaaggaaccttggacgtggtgttggccaggccacctcttttctttaaagagacagatccgcagccaaggaaacacacactgtggcaggctgcctcagatttcactggtgggcaagcaagtatgcacaggtgaattacttctaattattgagtgttcataattaaaatagatttcatacgagaagattgctcctatatatctggcagtacctcatacaatttgttactattatttctgttggagtataatgcgtagcttatctgctttatgtttagaggctctggtagcattcggaagatattgacagtgtttacctaggttctgtagtactatgtgccacatgatttttactttatcgttccatatttgtggcctctggacgcatttcaagatatttatgatgtttacttggggttctgtagtactatgtttctggctttttatttgttattagaacagaaagaactgtttgccccttttgggagcaattgggtactgagggaccagttatttagttgtggatcactttgacttgagttgtatcatatctggattctatctgcttaggagtcacttataaattcaagaagataaggagacattgtcaccctttctagt

SEQ ID NO: 137910 - DNA, 1353 bp, Zea Mays
attagcccaagcaggcttctccgactcccgtcccccattccgtccgccaccgccttccccctccctcgaatcattcgattcgcctcccgtcgtctcgtccgcctgattctactcggccgtcacggtgatcggagccggctagggttagggttccgtacttccgttgatctccacgcccatggtgcagctgccgagctccggtaagcggcacgcggaaccggccgagcagacgatggctccggcgcggcgcgcggcggcggtcaagctggaggtggaggagctcggggccaacgagcgcggcccgctcagcaagcgcgccaggccagctcagccgatgcccccgacgcctccgcagccgcagcaggatatgtaccacaatgtacttgatgaacctagcccattgggtctgcggctgaaaaaaagcccatcactcttggatttgattcagatgagactttctcaagcatccaacgctggggagtcttccatggacaacagtggttctgagccttccaagaagaaagacagtaaatccggtgtgtcttcagcaggcgaacggctaaaagcttcgaattttcctgcaaatatattgaagattggttcatgggagtatgtctcacggtatgaaggtgatttggtggcgaagtgttactttgcaaagcataaacttgtgtgggaagttctggaaggtggccttaaaagtaagatagaaattcaatggtcagatattgctgctttgaaggcaatttgccccgaaaatggccaaggaaccttggacgtggtggtacgcttatctgggagatgtttgtttcttttttcttcttagttcactacctctgttttgattctgaggtgtcttccttttcctgaagttggccaggccacctcttttctttaaagagacagatccgcagccaaggaaacacacactgtggcaggctgcctcagatttcactggtgggcaagcaagtatgcacaggtgaattacttctaattattgagtgttcataattaaaatagatttcatacgagaagattgctcctatatatctggcagtacctcatacaatttgttactattatttctgttggagtataatgcgtagcttatctgctttatgtttagaggctctggtagcattcggaagatattgacagtgtttacctaggttctgtagtactatgtgccacatgatttttactttatcgttccatatttgtggcctctggacgcatttcaagatatttatgatgtttacttggggttctgtagtactatgtttctggctttttatttgttattagaacagaaagaactgtttgccccttttgggagcaattgggtactgaggg

SEQ ID NO: 137911 - DNA, 1437 bp, Zea Mays
cgcgtgccggccgcctccgctcatcgtcgtgcaccatgccaactccgagaagacgatcttgcaaggaaagcgcatgcaagaacgtcgtcacatatatagaggagtagcagccagcaagaggtggaatcgacggcttgatcccgagaccgaccgagaccagctgcaaaagctcctagctagcgcattggccgccggagtgggctgcagtgcagtacaggtggatcgcatgcgaggaggatgcgagtgctggaggaggacctgtacccgtcgacgccggggaaggtgaaggtggagcgggcgggggcgatgagccggtacctgcaccgttgcttcgcgtccacggggaccatgttcctgtgggcgctcttcctggtggccatgacggccacgtacctgagcgtccactccatcgtggacacctcctcccgctacttcgcggcgtcctggggcgggctgcactgggagcggcagatccgggctgtccgtgctcgtcacgggcgccgccggcttcgtgggcacgcactgctcgctggcgctgcgcaagcgcggcgacggcgtcctgggcctcgacaacttcaactcctactacgacccctcgctgaagaaggcccggcgcgcgctgctgggctcccacggcgtgttcgtggtggagggcgacatcaacgacggccgcctcctggccaagctcttcgacgtggtgcccttcacccacgtgctccacctcgcggcgcaggccggcgtgcgctacgccatggagaacccggcgtcgtacgtgcactccaacatcgccggcctcgtgtccctcctcgaggcctgcaaggacgccgacccgcagccggccgtcgtgtgggcgtcctcctcctccgtctacggcctcaacgaccgcgtccccttctcggaggcgcaccgcaccgaccggcctgcgtcgctgtacgccgccaccaagaaggccggcgaggagatcacccacacctacaaccacatctacggcctctccgtcaccggcctccgcttcttcaccgtgtacggtccgtgggggcgccccgacatggcctacttctccttcacccgcaacatcctccaggggaagcccatcacggtgtacaggggcagggaccgcgtcgacctcgcccgggacttcacctacatcgacgacatcgtgcgcggctgcctggcgtcgctggacacggcgggccggagcaccggcaccggcggcaagaagcgcggcccggcgccgtaccggatcttcaacctggggaacacgtcgcccgtcacggtgcccacgctggtgtccatcctggagaggtacctgcgggtgaaggccaagaagaacgtggtggagatgcccggcaatggcgacgtgccctacacgcacgcaaacatcagcctggcccgggagcagctcggctacaagcccacgacgagcctggagatggg

SEQ ID NO: 137912 - DNA, 1852 bp, Zea Mays
gagaccaccacgacatcacatgccagtatccttcttcgatcgtatcctgttgctcgacatgggcaccggaggtgtagggctggtagccgccgccctcaccgtggtggtggttacgatgctgtggacggtgctggtgcgcctggtgtggcgaccgtacgccgtcgcgagggcgttcgcgcggcagggcatccacgggccgccgtaccgggtcttcgtgggcagtagcaaggaggttcaggcgatgcgggcggcgacgagcggcgacacaatggaccggacctcccacgacttcatcccgcgcgtgatgccgcagtaccacgcgtggatgacactctacggcaaggtgttcctgatgtggtccggctcgactccgacgctggccgtgggcagctacgacatggtaaagcgggtcctcttcgacaagtccgggctgtacagcaagacggacccgggacccactatcctgtccttgatggggatgggtctcaccttcaccaacggcgaggactggtcgcgtcaccgccgcgtcgtgcacccggcgttcaccatggacaagctcaagtcgatgacgggggcgatggtggcgtgcgccgcggagctgatccgggcgtgggaagcgcgcgccgcggctagaggggagaaggtgacgacggtggaggtggggcagcagttcaaggagctcaccgccgacgtgatctcgcagacggcgttcggcagcagctacagacaggggaaggaggtgttcgtggcgcagtgggagctccagtacatcgccttcagcgtcttcaacaacgtgcgcgtgccgggcatgcagtacgtgcccaccaaggccaacatgcgccggtggcagctagagcgcacggtgcggggcacgctcatggccatcatcgacgagcgccttgccgctgcaaaggaggggtggggttacggcagcgacctgctcggcctcatgctggaggccaacaacgccggcgatgacggcaaggggcagcagaccatgagcatggacgagatcatcgacgagtgcaagaccttcttcttcgccggccatgacacgacctcacatctcctcacctgggccatgttcctcctcggcacgcacctcgagtggcagcagcggctcagggaggaggtcatccaggagtgcggcagcgccgaggtgccgctcgacggcgacgccctcaacaagctcaagctcgtaacgatggtgctgtacgagacgctccggctgtacggcgcggcaacgatggtcgggaggcaggcgacggcggacacggacctctgcggcgtgaaggtgcccaagggcaccatcatcttcatcccggtcgcgatgctccaccgcgacgaggaggtgtggggtgaggacgtcggcgtgttcaacccgctccggttccgggacggcataggcagggcggcggcgcacccgaacgcgctgctgtgcttctccttgggcccgcggtcgtgcatcgggcagaacttcgcgatgctcgaggcgaaggccacgatggcgctgatcctgcggcggttcgagttcgaggtggcgccggagtacgttcacgcgccggttgacatcctgacgctgcagccgtccaaagggctcccggtcgtgctcaagctcttggatgccagtacaaaagattggaagccatcacaagctccgtccaaatgtcctacaatgctcatgtgacctgccaagtcattgattaggcttctatcctgcggtgtgtgttgtctcagacttgttatcgtattccatttttctgaccaagttatcgtatttcatagtggaactaaagattgtgattttggggatggaggcttcatatatgtggtgtggcacttcgacacaaag

SEQ ID NO: 137913 - DNA, 1741 bp, Zea Mays
tgattgtatcctgttggtcgacatgggcaccagaggtgtagcgctagtcgccgccgccctcggcgtggtggtggtcacgaggctatggacagtgctggtggtgcgcctggtgtggcggccgtacaccgtcgcaagagcgttcacgcggcagggcatccgcgggccgccgtatcggctcttcacgggcaacagcaaagaggccatggcgatgcgggcggcgacgagcggcgacacgctggacctgagctcccacgacttcatcccgctcgtgatgccgcagtaccgcgcgtggatgtcactctatggcaaggtgttcctgacgtggtccggcttgactactccggcgctgttcgtgggacgctatgacatggtgaagcgggtcctctttgacaagaccgggttgtacggcaagacggacccgggccccattatactgtctctgcttgggaggggcctcgtcttctccgacggcgagtactggtcgcgccaccgccgcgtcgtgcacccggcgttcgccatggacaagctcaagtcgatgacggggtcgatggtcgcgtgcgcggcggaggtgatccgggcgtgggaggcgctcgccgtggcgagaggggaggaggaggtgacagtggaggtggcgcagcagttcacggagctcaccgccgacgtgatctcgcacactgcattcggcagcagctaccgacaggggaaggcggcgttcctggcgcagcgggagctccagtccatcgccttcgcctccttgaacagcgcgcgtgtgccgggcatgcagtacctgcccaccaaggccaacgcgcgccggtggcagctcgagcgcacggtgcggggcacgctcatggccatcatcgacgagcgcctagctgccgcacaggaggcgaggggttacggtaccgacctgctcggcctcatgttggaggccaataatggcggcggcgacggcaagagtccgcagcaggccatgagcatggacgagatcatcgaagagtgcaagaccttctttttcgccggccacaacacgacctcgcagctcctcgcctgggccacgttcctcctcggcacgcaccctgagtggcagcagcggctcagggaggaggtgatccgggagtgcggcggcgccgaggtgctcctccacggcgatgccctcaacaagctcaagctcgtgacgatggtgctgtacgagacagtccggctgtacggcggggcgacgatcatcgcaaggcaggcaacggcggacgcggacctctgcggcgtgaaggtgcccaaggccaccatcctgttgatcccgatcgcgatgcttcaccgcgacgaggaggtgtggggcgcggacgccggcgacttcaacccgctccggttccgggacggcgtgggcagggtggcggcgcacccgaacgcgctgctgtccttctccctgggccctcggtcgtgcatcgggcaggacttcgcgatgctggaggccaaggccacgctggcgctcatcctgcggcgtttcgcgtttgaggtggcgccggagtacgtgcatgcaccggccgactttttgacgctgcagccgtccaaggggctccccgtcgtgctcaagctattggatctgtagtagaagagaggatcagaagccaccgttgtcacagcttccatttgaactaaaagtaggagtataaatttcatacaacgttcatctgtgagagttgtgacctgccaagtcaataattgggcttttccgcttttatcctca

SEQ ID NO: 137914 - DNA, 1364 bp, Zea Mays
gccgtcggacccgcccgccgccgccgccgccgccgcggcgaacgtgtcgcgcacctgctccgtcgtgtaggggaagcccgaacgggtcatggagttgagcagcgcggcggcgccctcgcgcagcagcgcgcccgcgccgtccgaccgcgtgttcgccagcgcgtcctggatgctcacgtccgtcccgcctaccctgccagccgcgccgaagaagtggcccatcgtccccatcgacgacgacgtgcccgggaaccgcccgccgatcgccgaccagatctccatcgggtgcgacctccagtagctgctcggtggtcacgtcacgatgaagagtagacgacagagcaacttttggtcagtggctgcatgcatggcgagttggccacaccgacgtacgcgtcatgaatcatgatgtatgactatgagcagtggcttactcgcaggagcccgggagagagccgaagctgtgggggtcgaacggcgtcggcgacgaggtccctatgccgccgtgcgagggggcgtcgccgtacgccggcgtcggggagctcccgtaggcgccgccaccatgggccggcgagggagacccgcctccgtaggcgccaccgctgccgggagtggacggagacccaccgtacgcgccgccgccgtgggacggggagccaccgtagccgccaccggtggacggggctgtcggcgaggacccggagccgccgtgagacggggagccgccggtggagggcgacgtcggcgtggacccggagccgccgtgggacggggaaggcagcgttgtccctccgtgagacggcgatggcaagtccccaccgctgccgccgtgggacggggaaggcagtgttgtccctccgtgcgacggcgacggcaagtccccaccgccgccgccgccgccgtgggacggcgtcccggtggagcctccgtgcgagtgcgacggcgtcacgggagtgatgccgccgccgtggctgccgctgccgattcccgggaacgagcgcgggtccatccccggcacgcagtccggcttcttcacgtcgtcgcctgcatgcgccgacgccatctcaaaggtaaaaaataaaataaaatgcaagcttgctcgccacggcgccgccctcatgggacatcggcattggtgcttgtttcatctggagtgggcagagctcaagaagatgtactataccttggctagccttctccgcggggctggccctggactccaccacggccacgaatgcctgcgcggccaacgccgcgagcacgaagctcgcgaggagatctctgcccgtcctccgcgcctccatagcagctgctgcctctgctcgcttgctcctcctcctgtcctctgctgtggagcgagcggc

SEQ ID NO: 137915 - DNA, 1383 bp, Zea Mays
gaatctccaagcacatcatgcgcccccccgaaaaaaaattccccacgtactagaccaccacccgttggctttctcccctcgcaccggggaacgcggctgccgatccgctcccgatcccctgccctcctccttccagccgactgagattccaccaaatcggcgcccgtgcagtccccgattcgattggcaagcacgattggccgctcctgatcagctacgggacagggctggatttgatttgatcggatccccaattgggtgtccgggtccgcgcgttcgggcgggcgggcgtgcgggcggggggattgctttagggtttcagcgggtgcggtcgctgtgtaggcgggtagggttttgccatggcggagaaaggctgcctgaagcggctccagaaggagtaccatgcgctctgtaaggaaccgccgccgcaggtcgtggctcgcccactgcccaacgacatattggagtggcactatgtacttgaaggaagtaaaggcacaccctttgaaggtggatattactatgggaaactcaaatttccaccggattatccttttaagcctccaagtatcagcatgacaaccccgagcggcagatttgcgccacacaaaagaatatgcttgtcaatgagtgactttcatcctgaatcttggaatccgatgtggtctgttgcaagcattctcactgggcttctgtccttcatgatggacgatgcactgacaactggaagcatcaagacatcagatgcagaaaagaggcgtttagcaaaagcttcccttgtctacaattgtgagagcaaaaactgtccgcacttcaggaaacttttcccagagtatgttgagaagtacaatcaacagctacaattggagaacactgctgcagagccggtgcctcaggagaatcctgcacctgctccatcccctgctgtccagcaagccccgaccgtggccaatagggcacaaccactggcggaggcgcgccgtgacaagaaccagaagaaggcggtgcccttctggatggtgctggtcatgttttcagttttcggggccgtgatggcgttgcccctaatgcaactttgacaataataaagacaataagaacgtgtgatgccagggccgtaattttgtatagttttccattggtttgtctgagtgactcagttggtcccctagactacctaccacctcggagtcgtattgatgaacctgtgatggtatatctgaagaacttttgttctcagttctcactcttgagtagcagcgccagaaggtccttcgtttttgctttctgtttccgaaatcgtttttttgggttgcctcccagtccgtctttgcgatgtgtgctgacttcaaggttgagttcacattttcacatcctctttcc

SEQ ID NO: 137916 - DNA, 1568 bp, Zea Mays
gaatctccaagcacatcatgcgcccccccgaaaaaaaattccccacgtactagaccaccacccgttggctttctcccctcgcaccggggaacgcggctgccgatccgctcccgatcccctgccctcctccttccagccgactgagattccaccaaatcggcgcccgtgcagtccccgattcgattggcaagcacgattggccgctcctgatcagctacgggacagggctggatttgatttgatcggatccccaattgggtgtccgggtccgcgcgttcgggcgggcgggcgtgcgggcggggggattgctttagggtttcagcgggtgcggtcgctgtgtaggcgggtagggttttgccatggcggagaaaggctgcctgaagcggctccagaaggagtaccatgcgctctgtaaggaaccgccgccgcaggtcgtggctcgcccactgcccaacgacatattggagtggcactatgtacttgaaggaagtaaaggcacaccctttgaaggtggatattactatgggaaactcaaatttccaccggattatccttttaagcctccaagtatcagcatgacaaccccgagcggcagatttgcgccacacaaaagaatatgcttgtcaatgagtgactttcatcctgaatcttggaatccgatgtggtctgttgcaaggtacacatataccaataactagcttattacatgaacagtaatgtttttttggaagacatagcatacctttagcacaaattcttaatttactgcggcaaatcaatgctctcaatcatttcaacttctgttgccacgagatgagagaactgaaatgatagtctcattgttagtactttaactgtgctgttctatggatccttcactatctagcagtcaatatgcttcagttcaaattgtttgcattttctttcctttgttggtctgacatgtaaaactttatgctgcagcattctcactgggcttctgtccttcatgatggacgatgcactgacaactggaagcatcaagacatcagatgcagaaaagaggcgtttagcaaaagcttcccttgtctacaattgtgagagcaaaaactgtccgcacttcaggaaacttttcccagagtatgttgagaagtacaatcaacagctacaattggagaacactgctgcagagccggtgcctcaggagaatcctgcacctgctccatcccctgctgtccagcaagccccgaccgtggccaatagggcacaaccactggcggaggcgcgccgtgacaagaaccagaagaaggcggtgcccttctggatggtgctggtcatgttttcagttttcggggccgtgatggcgttgcccctaatgcaactttgacaataataaagacaataagaacgtgtgatgccagggccgtaattttgtatagttttccattggtttgtctgagtgactcagttggtcccctagactacctaccacctcggagtcgtattgatgaacctgtgatggtatatctgaagaacttttgttctcagttctcactcttgagtagcagcgccagaaggtccttcgtttt

SEQ ID NO: 137917 - DNA, 808 bp, Zea Mays
attaaaataaaatgtggctgtagtagccggttcacggcccctttctgccatgtccatcccccctataaatgcattcttttcagcctagtggaagcggaagcccaccatttggtttggttgtttgtttggtggacgccttgcttttcacttcaccggaaaccaaaatggcagccagcaggatccctccttgccatcttcacccttcttcttcttcctcctcctcctcctccatggccacgatctgcccaaggccaggcacaaggcagtcgtcggccttcaggttcagggcctctgctcatgggagcggttcctcaccaaacctctcctccttcactgctgtgacaggcaagaaggttaaggtgttcgaggaccagctgagagggatcgtgtgctacagagacgaggacggggagatggtctgcgaggggtacgacgaaggccccaggctcggaatgcggctgccggagaaggcctccttcccatggcctgtgggggttcggatcacggacttcatccagctggcgacgctccaggtcttcgacgacgacgtcgatgttcttcagctcacgggtgaccagaactaaagcatgtaagcatagtggtgtcgtagtacagtacagtgatgggtatatgcaagaataatgcgtggtgttgctcttatttgctcaggcttacttgtttgtacataatcacttactgcaaggatgagattgttgtttaaagcacaacctttatgtatgcatatatatactatatgaattgagaaaattgagatctgaatacaaggatgagatcgcttgtactcata

SEQ ID NO: 137918 - DNA, 950 bp, Zea Mays
attaaaataaaatgtggctgtagtagccggttcacggcccctttctgccatgtccatcccccctataaatgcattcttttcagcctagtggaagcggaagcccaccatttggtttggttgtttgtttggtggacgccttgcttttcacttcaccggaaaccaaaatggcagccagcaggatccctccttgccatcttcacccttcttcttcttcctcctcctcctcctccatggccacgatctgcccaaggccaggcacaaggcagtcgtcggccttcaggttcagggcctctgctcatgggagcggttcctcaccaaacctctcctccttcactgctgtgacaggcaagaaggttaaggtacgtatgtgtctcgcagcagctagccctttcatttacatgcatgccggagtacatgtacatgtacatcatcaagagggaggaggaggaggtatgatgcatagaggctcccgatctgatctgttcttgggatgatggctcgtaggtgttcgaggaccagctgagagggatcgtgtgctacagagacgaggacggggagatggtctgcgaggggtacgacgaaggccccaggctcggaatgcggctgccggagaaggcctccttcccatggcctgtgggggttcggatcacggacttcatccagctggcgacgctccaggtcttcgacgacgacgtcgatgttcttcagctcacgggtgaccagaactaaagcatgtaagcatagtggtgtcgtagtacagtacagtgatgggtatatgcaagaataatgcgtggtgttgctcttatttgctcaggcttacttgtttgtacataatcacttactgcaaggatgagattgttgtttaaagcacaacctttatgtatgcatatatatactatatgaattgagaaaattgagatctgaatacaaggatgagatcgcttgtactc

SEQ ID NO: 137919 - DNA, 2016 bp, Zea Mays
tttgtataaaaggaaaccttctggacaactactattctctttaatcactaactgattttctcttctgaatgctggcatcagcatattgtcaactgtgcgtattttcagtctgtagaagccatcttttaaagaacattttgggcagaaattgccagtagcatttcttgtggttaacatggacttctcagctggttcctacttctcatcatggcctatcaattctgcttctgagagctacagtttggctgatggttcagcggaatcatatggagaaggaagcatgccaccgtcaacctatttcatgacagctagatcagatcacaatttaaatttcagtgtgcatgaacaggattccactatgcttccaaacgaacagttgacctatgctggtgctggccagattgatctattacctgctgagactctatctagggataagcttcctgaaaatcttctggagcttcaaggacttcagaatatcagcaacctacagagtaatttagtggccccaggggtgtttcagcacaatttaacacctggggtctttcatccacagttgaacactcctggactttcagaactgcctcatgccttatctagttcaattgacagtaatggaagtgaagtttctgcttttctcgctgatctaaacgctgtttcttcagcgccaactttatgttccacattccaaaacgcttcttcgttcatggaaccagtgaatctagaagctttcagtattcaaggcgcacaaagtgattgtgttttgaacagaacaagtcatccgaatgggaatatctcagtatgtgacagtgctgccttggcatcactacatgatagcaaggagtttatcagtggtagtctcccttcttttgctagtgtccaggaaacaaacctagctgctagtggcttcaagactcagaagcaggttatttatataaacagtgccattaaagagaatatctgaactgcatcttactgttaatttgaactgtgccagtaaaactcaactttcatactgcaggagcaaaatgcagtgtgcaatatccctactttcactgcacggaatcaaatgtcagttgctgcaatgcaaggagcacttgtccctcaaaagattccttcacggatcaatgataataaaagtgagggtcctgttagccatccttctgatgtacaaactcaaccaaattcagctgttaatggtgttggtgtgaaaccacgagtaagggctcgtcgtggacaagcaactgatcctcatagtattgctgaacggcttcgcagagagaaaatttcagataggatgaaaaatctgcaggatcttgtcccaaattccaataaggcagacaaggcatccatgctggatgaaattattgattatgtgaagtttcttcagcttcaggtcaaggtcttgagcatgagtagggtaggagctccaggagcagttcttccccttctcacagaatctaagactgagggttaccacggccaacctctgccacaaggattactggacgcactagactcggaagacagcttcgtcttcgaggaagaggtcgtgaagctaatggagaccagcatcaccagcgcgatgcagtaccttcagagcaaggggctctgcctgatgccagtcgcccttgcttccgcaatatccacccagaaaggtgtgtccgctgctgcagtccctcctgaacggtgagataaagacacgctcctcccccatgagcacgaggaaacagccgcagatgacagaactcagacggctgaagaatgcagcaatgcaaagcccgtagagtgcagcataggaagttagtctgtgaccagagcgcatggcctcgtctactaatttcgctctcagaatcagctttttttttcgtacctattgcgcatcagttgattttgcctttttgccttctctcttttctttttggccgtatttcatcaggttgcatataaaaaaaagtaaaatctactggttctggcgttctgctatatgggatcttgtgatcaggcatctccaaa

SEQ ID NO: 137920 - DNA, 1815 bp, Zea Mays
tttgtataaaaggaaaccttctggacaactactattctctttaatcactaactgattttctcttctgaatgctggcatcagcatattgtcaactgtgcgtattttcagtctgtagaagccatcttttaaagaacattttgggcagaaattgccagtagcatttcttgtggttaacatggacttctcagctggttcctacttctcatcatggcctatcaattctgcttctgagagctacagtttggctgatggttcagcggaatcatatggagaaggaagcatgccaccgtcaacctatttcatgacagctagatcagatcacaatttaaatttcagtgtgcatgaacaggattccactatgcttccaaacgaacagttgacctatgctggtgctggccagattgatctattacctgctgagactctatctagggataagcttcctgaaaatcttctggagcttcaaggacttcagaatatcagcaacctacagagtaatttagtggccccaggggtgtttcagcacaatttaacacctggggtctttcatccacagttgaacactcctggactttcagaactgcctcatgccttatctagttcaattgacagtaatggaagtgaagtttctgcttttctcgctgatctaaacgctgtttcttcagcgccaactttatgttccacattccaaaacgcttcttcgttcatggaaccagtgaatctagaagctttcagtattcaaggcgcacaaagtgattgtgttttgaacagaacaagtcatccgaatgggaatatctcagtatgtgacagtgctgccttggcatcactacatgatagcaaggagtttatcagtggtagtctcccttcttttgctagtgtccaggaaacaaacctagctgctagtggcttcaagactcagaagcaggagcaaaatgcagtgtgcaatatccctactttcactgcacggaatcaaatgtcagttgctgcaatgcaaggagcacttgtccctcaaaagattccttcacggatcaatgataataaaagtgagggtcctgttagccatccttctgatgtacaaactcaaccaaattcagctgttaatggtgttggtgtgaaaccacgagtaagggctcgtcgtggacaagcaactgatcctcatagtattgctgaacggcttcgcagagagaaaatttcagataggatgaaaaatctgcaggatcttgtcccaaattccaataaggcagacaaggcatccatgctggatgaaattattgattatgtgaagtttcttcagcttcaggtcaaggtcttgagcatgagtagggtaggagctccaggagcagttcttccccttctcacagaatctaagactgagggttaccacggccaacctctgccacaaggattactggacgcactagactcggaagacagcttcgtcttcgaggaagaggtcgtgaagctaatggagaccagcatcaccagcgcgatgcagtaccttcagagcaaggggctctgcctgatgccagtcgcccttgcttccgcaatatccacccagaaaggtgtgtccgctgctgcagtccctcctgaacggtgagataaagacacgctcctcccccatgagcacgaggaaacagccgcagatgacagaactcagacggctgaagaatgcagcaatgcaaagcccgtagagtgcagcataggaagttagtctgtgaccagagcgcatggcctcgtctactaatttcgctctcagaatcagctttttttttcgtacctattgcgcatcagttgattttgcctttttgccttctc

SEQ ID NO: 137921 - DNA, 125 bp, Zea Mays
atgataggaagaaaaataaataatgcaaacagtagaagatttattcactttaggattgtttttgatatttcgaaatctaaagttcaaaataggaatttaaatttagtttgaatccttgaatttgg

SEQ ID NO: 137922 - DNA, 3503 bp, Zea Mays
ctccccgcctggacaccgtcacaccggtcagcctccacgcctcacggatttcgcacccgaaaaaaaaatagaaagcgaaatcaaccaatctcctatcattcacggcctcgccagcgcctcctcctccccctcctccccagaaatttccccacttgcgccgctcgcgatcggcgcccgagctcccggaatcccggcccggtttcgcgaccgttcgccgcgagccttgggccggtccgggctctgattcgcgggcgccgcggccgtggttcgcgcggggaatgctctacctcaagcagccgggcggcgcggacttagggttccggcgggcggcggtggcggctgctgctgctgctgctgcggggctgtgatctgccgctgtggtggatgcgaggttgagccagcacgcgccggggattctgctggcaatggcggaggcggacagctgcctcgagagcttcgagctctacgagtccgagtcgaaattctatattcttggaactaactgtaacaagacaatatggagattactcaagattgatagaatggagccatcagaggtcaatgtacatgaggattctactgtgctctcacagagtgattaccttgatatgctaaaaaatctagacgaacaacacaggtcaactggtggagtcaaatttgtcaccaactgttttggaatcatcggtttcattaagttccttgggccctattacatgttaattattactgagcagagaaagattggggatatatttggtcatatggtgtaccaagtttctaagactgcgatgattgagttatcaaattccactacgagaccaaaattaattaattccaaggacgagaacaggtacaagaagctcttgcagacaattgatcttagaaaagatttcttttttagccactcatatcatataatgagaagtcttcaaaagaactttaatgatccacaagaagggtgggaactatatgacacaatgttcgtctggaatgagttcctaactcgagggattcgtgacattctgaaaactacactctggactgttgcattagtctatggtttttttaagcaggacaaacttgcgatatgtgggaaggatattatgctgactctcattgctagacgctcgaggcattatgctggcaccaggtatctaaagaggggtgtgaatgaggagggcagagtagcaaatgatgttgagactgagcaaattgtttatgaagacatgcttggaccatggcaaataagctctgttgtgcagaacaggggttcgattccactattctggtcccaggagacatcaaagctgaatcttaagcctgatatcatattgcatggaaaggacaaaaattatgaggctaccaggcttcattttgaaaatcttaggaaaagatatggaaatcctatcatcatcttaaacttgattaagacacgtgagaagagaccacgtgaaatcatactccgtcgggaatttgacagagcaataaagattattaatagtggtctaccaggcgaagatcatttgagatatttacattgggatcttcataagaactctcaaagcaaaagtacaaatgcgcttcaagtgcttttgaaggtggcatttgaagctttgaacttgacagaattcttttatcgtcaagtttccccagctcaaagggcagagaattcccctaatttaagccctacactgaaaaatggttttggtcctcatgtgtgtgatgatgacaacaattgtggcaatgcagactatgttgatgatcttgatgacatttcccaagaagatacctgtggcaattatgatcctggcaatggaattgcagaagatagatctgaggtcaatggatctactcaaataaagcctccaaaatttcaaaagggtgtattacgtacaaactgtatagattgtttggatcgcacaaatgttgctcaatatgcctatggcctagctgctctaggataccagttacatgcacttggttctgtagaatctccagaagttcatttagactcccctttgtctcggcatttgatgcatttttatgaacggatgggtgacacacttgctttacagtatggtggttctgctgctcacaataagatattctctgcaaaaagagggcacttgaagttcgccattcaatctcaagagttctttaggactctgcaacggtactacagtaatgcctatatggatgcttacaaacaagcagcgataaacttatttctaggatacttccaaccgcaggtgggaaaacctgcactttgggagccagaatctggtgacgagcatgtacttgatgacgagacaagtaaattgatgaagagggcaagatcagatggcagcattcttaataaaagcaaactatcaatgtccagtaatggcccaaatggagttttaaactcagcacttactggttcaaaaaatgaagggcaacatccaaactggagttctgattcagtgcatgggatgtcttcagcctctgacaattccatgtcaaagtcaaggtatactccgacagtgtctcacattaagcatataagctgtgaactagactattacaatggttctggtgattcaaatttcctggatcttgactggctttcagcttcagacaatgaaaggtcaaaagccataagcactcctgatgtgaatatttcaactgatgatggtgttcatgatgtaatctatgggataacggatgatcaagctgctgagatccaggctcagggattatctaaggattttgtgcagtgggttaatcaaggagagacattttggtactgatattccaagatgggcgtaccatgtaaattcaagccacataatggttgcacttgcaaaaaggggggaaaataagggagaagtctacatgatggcagtccagacctcatttcaaagcatattaactcttaaagaccattgcaaggagggaccatcaatgtgcatgagattgtttgtcaaccatcagcaattcagcattctcttttcggtatacgaatatgatgatgggcttagagtcacacgcactgttagaagacttgtctagggaagtgtaccattctgttcatttattgaagcttgctcaccaggctggtagatagtgcattgttattattttttcttaaaaggaatgaaagaatgtaggtagtttattctttttaagatgtaccattgtccaggcatgatccccatctctccatcgtgtaaatatatatgtcccaagtgttccacttttcccttttccttccatgagagttgaggtgggcatgaaagcaccatttttccctcagtctctttgtatgggttttctgaaatcatgtacatttatattttgtggcaagcggagagattgttgtgtaatttccattgtaccaaacgtccaaacccctcttaccaatagaagtctcttggactgtttgtcacattgcagattgctttaatacttgctttaaactatctgattatgtgtaaaattttcgtgtgattccttagggtccc

SEQ ID NO: 137923 - DNA, 1408 bp, Zea Mays
ctccccgcctggacaccgtcacaccggtcagcctccacgcctcacggatttcgcacccgaaaaaaaaatagaaagcgaaatcaaccaatctcctatcattcacggcctcgccagcgcctcctcctccccctcctccccagaaatttccccacttgcgccgctcgcgatcggcgcccgagctcccggaatcccggcccggtttcgcgaccgttcgccgcgagccttgggccggtccgggctctgattcgcgggcgccgcggccgtggttcgcgcggggaatgctctacctcaagcagccgggcggcgcggacttagggttccggcgggcggcggtggcggctgctgctgctgctgctgcggggctgtgatctgccgctgtggtggatgcgaggttgagccagcacgcgccggggattctgctggcaatggcggaggcggacagctgcctcgagagcttcgagctctacgagtccgagtcgaaattctatattcttggaactaactgtaacaagacaatatggagattactcaagattgatagaatggagccatcagaggtcaatgtacatgaggattctactgtgctctcacagagtgattaccttgatatgctaaaaaatctagacgaacaacacaggtcaactggtggagtcaaatttgtcaccaactgttttggaatcatcggtttcattaagttccttgggccctattacatgttaattattactgagcagagaaagattggggatatatttggtcatatggtgtaccaagtttctaagactgcgatgattgagttatcaaattccactacgagaccaaaattaattaattccaaggacgagaacaggtacaagaagctcttgcagacaattgatcttagaaaagatttcttttttagccactcatatcatataatgagaagtcttcaaaagaactttaatgatccacaagaagggtgggaactatatgacacaatgttcgtctggaatgagttcctaactcgagggattcgtgacattctgaaaactacactctggactgttgcattagtctatggtttttttaagcaggacaaacttgcgatatgtgggaaggatattatgctgactctcattgctagacgctcgaggcattatgctggcaccaggtatctaaagaggggtgtgaatgaggagggcagagtagcaaatgatgttgagactgagcaaattgtttatgaagacatgcttggaccatggcaaataagctctgttgtgcagaacaggggttcgattccactattctggtcccaggagacatcaaagctgaatcttaagcctgatatcatatgtaagcattgaaatccttgttcaatgtgttaaatattattcaaacatttttttttcgtgcagtgcatggaaaggac

SEQ ID NO: 137924 - DNA, 142 bp, Zea Mays
caagataaccagcttgttcgctgcggcttgctgcggctgcaatccggctgcggctgcggcttctacagtatttttctctctatggattgcagctgcagcagtccaaacagctgcaacagtgtcggcttgcagccagccgaac

SEQ ID NO: 137925 - DNA, 347 bp, Zea Mays
cacatttgtcacaaattagttctgtttatgacgttttctgagagctaacccaacatagtgacgcaaaaaatatattcgtcattaaagtcgtcataatttggaagaatcagaccattgtgacgatatttaatgacaatactgaattgtcataagagtgaatcgtcacagtacccttttatgccataactatgacgatatagtgtgtcatatcatgtttcgtcataacttttattattttaatacaaataataatataaaatctatttttacatgcgcaagtattatgtgcatatttggacgcatgtgccggtgctgtgtttcaaaaaatactttaaaaaacaaaaaaa

SEQ ID NO: 137926 - DNA, 710 bp, Zea Mays
atgactgatgtggttatttttctctgtattatgcacagaatctcggtaacatttgttaacaaggatggctcagaaaagacaatacgtgttccagttggaatgtccatgttagaagctgctcatgaaaatgacatagagcttgaaggagcatgtgagggttcacttgcgtgttctacttgtcatgtaatagtaatggatgtaaactactataacaaattagaagatccagcagatgaagaaaatgatatgcttgaccttgcatttgggctcacagagacatctcgcctcggctgccaagtgatcgcgaagcctgaactcgatggtattcggctggcattacctgtagccacaagaaacttcgcggtagatggctatgtaccgaaaccacactgaagacagttatgtacaccacactgaagacagttatgtacaccacactgaggcagtcatcttggggggcacggattcgtacaagtcaattttgtagtttataacctgtataacctaactacacctttgctacttgtagtcggggtagcttaggactaccttgttgagggagggttcgttcattgatgaacccctccattactcccagataacagtgcttccttcatctgggcgaataaacatctttcgttttgtgcgagagtatgtagtgtactcagaaatatttgcattgtagtgctcccaatatttgatcttttgct

SEQ ID NO: 137927 - DNA, 2458 bp, Zea Mays
catttccccgtccgccgccagagcgggagaacacccgcgccgcctccagcagcacttggcggagagggcgcgacctctcttgccgacaaatcggtcctcttcctccgagcgcctaacgaggaataggtattcaagttttgtatcaccaagatggtgcaatacaatttcaagaagatcactgttgtccctcccgggaaggacttcattgacataatcctgtcccgcactcaaaggcagacaccgactgttgtccacaagggatatgctatctcccgcattcgccagttttacatgcgcaaggttagatattcccagcagaacttctatgaaaagctctccaccatcatcgatgagtttcctcgactggatgacatccaccctttctatggtgatctcctccacgtgctctacaacaaggatcactacaagcttgcgctgggtcaaatcaacacagctaggaatatcattgcaaagatatccaaggactacttgaggctgctcaagtatggagactccctttaccggtgcaagtgtttgaaggtggctgcactaggtcgcatgtgcactgttgtgaagaggatcagtcctagtttggcttacttggagcagatcaggcagcacatggccaggcttccatccatagacccgaacacccgtactgtgctgatttgtggatatccaaatgtggggaagagttcgttcatgaacaaggttacaagggcagatgtggatgtccagccatatgcctttacaacaaaatccctgtttgttggccacacagattacaagtacctgcgctaccaagtgattgacacaccaggtatacttgaccggccttttgaagataggaacatcatagaaatgtgtagcatcactgcgctggcacacttgagggctgcggtgttgttctttctagacatttctggatcttgtgggtacagtatcgctcagcaagctgcactcttccacagtataaagtctctgtttatgaataagcctttggtcattgtgtgcaacaagactgacttgcagccacttgaagggctttctgaggatgacatgaagttagtcatggagatgaaggcagaggctatgaagactataactcaagctgttggtcctaatgaagagggtgttttattgactatgagcactttaacagatgatggtgtaatggctgtgaaaaatgctgcatgcgagaggcttcttgaacagagggtggatgtgaagatgaaatcaaagaagatgatggattgcttgaataggtttcatgttgctgttccaaagcctcgtgacaacaaggagcggcctgtttgcatccctccggctgttctggaagctagggcaaatgctgctgctaaggaaaagaagaagcttgagaaggacattgagaatgagaatggaggtgctggggtatattctgcaagtctcaagaaacattatatattggctaatgatgaatggaaggaagatattcttccagagatactggatggtcacaacgttgcagattttctggatccggatatcctagtaaggtgtgaagagttggaaagggaggaagggcttcgcctggaagaacaagctgcagaagatgctttccagattgatggccatgaactaactcaggaacagaaggagattctggctcagattaggaagaagaaggcattacttatccaagaacatagaatgaagaagagaactgcagaaagccgtcctattgtccctagaaagtttgacaaagataggaaattcacaactaataggatgggacggcagctttcctctatgggtgtggatcctattgctgccatcaatagagctcgtagccagtctaggggccgcaagcgtgagaggtcagtgagcagagctgcagctgatggtgacggtatggagatagatggccagcaatccaacaagaaactgcgtcgtacatcaaggtcgaggtcgaggtcacgggctcctgaggaggtcattcctggagaaggattcaaggactctgagcagaagaagaaggctatcaagaaagcaaaggcctctacaaggaacaggaacaaggatgctcgccgtggagaggctgaccgtgttattcctactttgaaaccaaagcatctgttctctgggaaacgcactcttggaaagacaagcaggcgataagctcagcacctcactgcatctggtaataaaggactggtgcactgttggtttgatcaatttgatgaaacgggtgttttttttgtgttcagccagcacttatttatgctactatttacgaaatttgtcttgatgtctctggtcctcttgatatatagttttagtgtttaattctgttgaatggtacaaagttatccatgtcccctactcaacatgtttgtagtttgcccatgagattttactatcgatccttgctcctctgtgctgctgtgtcgctgcaatttctcttaattatgatttc

SEQ ID NO: 137928 - DNA, 2024 bp, Zea Mays
cccgtctccggcgctcccaaagccccgcagcgccaaaagcccaaacccccgtgggcccacgaccccatcctccatatacactgatacacacgggcaacgctccgcctcgcagccagcaggacaccactcatcttcttctcccccgcctcgtttccatcgccaccaccctcttctcctgcggtcctcccccgtcccactcccacccccctcgcctccgcctccactgcagctgccgccatgcagagcctcctcctgcccaccgctgccgtggccccggtggcgcctccgtgcggaaggcggaatctcccgggacgcctctccgtccgcgcctccgcgacggtggtagcggcaccgcggcgggagacggatcccaagaagcgggtggtgatcacggggatggggctggtctccgttttcgggaacgatgtagacgcttactacgaccgcctgctagtcggggagagcggcatcgggcccatcgaccgcttcgacgcttctaagttccccacccgctttgccggtcagatccggggcttctcctccgagggatacatcgacggaaagaacgaccgccgccttgatgattgcctccgatactgcatcgtcagtggcaagaaggctctcgaggcctccggtatcgcccacggctccaagcccatggaaaagattgacaagacccgggccggtgtgcttgtgggcactggtatgggtggcctcacggtgttttcggatggtgtccagaatctcattgagaagggatacagaaagataactcctttcttcatcccatatgctatcacaaacatgggttctgccctgcttggaatggacattggtttcatgggtccaaattactccatctcaactgcctgtgctacctcgaactactgtttctatgctgcagcaaaccatatccgtagaggcgaagctgatataatgatagctggtggcactgaagctgcaattattccaattggtgttggtggctttgttgcatgtagagcactgtcacagaggaatgatgaccctaaaacagcatccaggccttgggacaaggatcgtgatggttttgtcatgggtgaaggagctggagtcctggtcatggagagcctagagcatgcaatgaaacgtgatgcaccaataattgcggagtatttaggaggtgctgtgaactgtgatgcttaccatatgactgatccgagatctgatggtcttggtgtttcatcttgcatcaagcaaagccttaaagatgctggtgtggcgcctgaggaggtcaactatattaatgctcatgcaacatcaacccttgctggtgatctggcagaggtgaatgccatcaagcaagtcttcaaggacccatctgggattaaaataaatgcaaccaagtccatgataggacattgccttggcgcagcaggcggtttggaagccattgctactattaaagcgataactactggatgggtgcatccaagcataaaccaatttaacccagaggaagcagttgaatttgacactgtacctaatgtaaaaaagcagcatgaagtgaatgttggtatctcaaattcctttggatttggaggtcacaattctgtcgtagtatttgcaccatttaagccataaggtgttccttgcctcacaaatcttggtcagaacagtgagatctgatttctgcgttcaattttcatgtgttctcttcgggggggaagtaatgtcagatttgaaccagcaacgttaaaaatgaactaaagatgagatacattgcgttttagatgactccatgttcacttagattgagcgcggctgtacaacattcctttgaaccatttgtaattgattgtactgtttttcatgtaatggaagaggagtcttgtagatgcacatctggaccttctagttaaatagcatacaaatgaatttggaaggcaggaattctgtccctattgctggatctggactcttttatgcatttttttttaaaatggctatatatacaaacgcgcgcttcaattaaacttgcacta

SEQ ID NO: 137929 - DNA, 762 bp, Zea Mays
gtgatccaattatcgctgattaatttgtctctgtatatgcaatccaccagcaagtatgtactcagaatcaaggggagaggctcgtgattttgctagggtccggaatacctgctttgagcaggctagacaggcttacttggttggcaacaaggctcttgcgaaggagctcagcatgaaggggcaggcctacaatgtgcaaatgaaagcggctcatgagaaagctagagaagctatttaccgacaaaggaatcctgtttcttcccaacgtgggggtggtgaccacctgattgatttacatggcctgcatgtgaacgaagcaatccacatcctgaagggtgagctcaccgccttgaagagcgcggcgagggcagcaggggagaggatgcaagtcatggtttgcgttggaacaggccaccacaccaagggctctcgcactgcgaggttgcccatcgctgtggagcagttcctgctggatgaaggcctccagtacacgcagcctcaggcgggtctgctccgagtgatggtgtactaacatctcttaggtgagacatcacggtgaggaaaaaaactccaaaaaaagagaaaagagatgtacgaaaacgcaggaaaaaaaagcgtcgttggagcacgcactgttattccgtgtagctgtatattaaaagaggcagcaggagaatagcctgacaacaggatacagtgtaaaattatacgtagcttccttcattcaattcacattccttttccatccatccgctgctgtgc

SEQ ID NO: 137930 - DNA, 1948 bp, Zea Mays
cgccgctgtaggctgtagcgtcggttggacgtcgtgagcgtgcagagcaattaagcaaagcagggcttgggtaaatcattattgaaagcatctcccttttacatgtaaccttgcatacaatatctgttaagatgagttcactaaataaagttgtttcaaatagtggagatgcatgttcagtcttagctagtaaagtcacatcattaaatcccaatgcagcggagtttgtaccgtcatttgttaaaccatcttttggaaatggtacagttctagataagtcagatttcaggggttcttctggaaaaacaattctagataggcctgagccatcaaagtctaataactcagatgatgaggcacaccagttttggcataagcagcttccggatgacattattccagacttcacttcttttgagaaagttgaacaagggcctgaactgtcccttgctggattatccttgaatgcaccccccttttatgggacaacttccagtcgcttctcaagagaatatcacgaattatcttctccagttaccaagggcctggaactggaactagaacatactaatatgctatatgaagataaaagcaactgggagcaaaattatattggtgatcttcatattgctaatggaaaccaggaccttcattatgattctgaatctggtgtaagcttttctgatagctttgctagtgagtatgttgccccatcagatggcctttttgctcccctggagtacttggcatctcagttccctggattttcagcagagagccttgcagagctttactacgcaaatgggtgtgatttcaaccatactattgaaatcctcacccagctagagatgcaagttgatgctacacccaatcacacactgaatctgccccacagcacaccgaacttcagcactggggatttccctgcacttccaacagctgaggaccaaaatggtttcaatcagggtaatgtggatgtacttggcatgttcaatgggcgcagttcatctgcgatgcctactggagctggtgattttgtttcagccgttcgcaaacttgcatcgcagaactctggccagtggaagtttaaaaaaggtcctgagtatggtaatggcatttcagctctttctgtacccaagcagtacagttctagcactaaacaatcgtctgggaacaagtttcaaagcatcagcagtggaagagttgccccatggcttgagactggtgatgcagtggcaagtatgtactcagaatcaaggggagaggctcgtgattttgctagggtccggaatacctgctttgagcaggctagacaggcttacttggttggcaacaaggctcttgcgaaggagctcagcatgaaggggcaggcctacaatgtgcaaatgaaagcggctcatgagaaagctagagaagctatttaccgacaaaggaatcctgtttcttcccaacgtgggggtggtgaccacctgattgatttacatggcctgcatgtgaacgaagcaatccacatcctgaagggtgagctcaccgccttgaagagcgcggcgagggcagcaggggagaggatgcaagtcatggtttgcgttggaacaggccaccacaccaagggctctcgcactgcgaggttgcccatcgctgtggagcagttcctgctggatgaaggcctccagtacacgcagcctcaggcgggtctgctccgagtgatggtgtactaacatctcttaggtgagacatcacggtgaggaaaaaaactccaaaaaaagagaaaagagatgtacgaaaacgcaggaaaaaaaagcgtcgttggagcacgcactgttattccgtgtagctgtatattaaaagaggcagcaggagaatagcctgacaacaggatacagtgtaaaattatacgtagcttccttcattcaattcacattccttttccatccatccgctgctgtgc

SEQ ID NO: 137931 - DNA, 1873 bp, Zea Mays
acgcaaccaccgcgcggtgcctccgtgcccgtgccctcagctccacctcgccagcgaccgacaccctctctagctccaagtccaaggctccccttcgccgctgctagcttagctccccgaggctgctaactaagagcgtcatggggctgagggagagcctgctggggtgcttcggggccggcggcggcgaccagcaggagcaggggcacgagcccgcggcggcgcggccggcggccagcagacgacccggcggcaagccgacgctgcggcggctgagcacggcgaacctgcggtcgctgtcgctgcaggacctgtcgcggaagctggagaccacgaagctgcacgccttcacgctggacgagctgagggccgccaccaggaacttctccgccgccaacttcctcggcgagggcggcttcggccccgtctacaagggcttcgtcgacgggcgcctccgcccgggcctccagccgcagcacgtcgccgtcaagtacctcgacagcgacggcgtccagggccaccgcgagtggctggccgaggtggtgtacctcgggatgctcagccacccgcacctggtcgagctggtgggcttctgcaaccaggacgaccaccggatgctggtgtacgagtacatgcccaggcaaagcctcgagaaccaccttttcaagaatctccttgcgtccctgccatggtcgacgcggctcaagatcgccgtcggcgccgccaagggcctggcgttcctgcacgaggccgagacgcccgtcatctaccgcgacttcaaggcctccaatattcttctcgactcggactacactgcgaagctgtccgacttcgggctggcgaaggaggggccgcagggggacgcgacgcacgtgacgacgcgggtgatgggcacgcacgggtacgcggcgccggagtacatcctgacgggccacctgacggcgcggagcgacgtgtacagcttcggcgtggtgctgctggagctgctcacgggccgccgctccgtggacaagagccggcgcgggcgcgagcagagcctcgtggactgggcgcgcccctacctccgccgcgccgaccggctgcaccgcttcatggaccccggcctggaggcgcagtactcgccgcgcgccgcggaggcggccgcaaaggtggcgcaccagtgcctgcagagcgtccccaaggcgcgccccaccatgcgcgacgtcgtcgacgcgctccagccgctgctggcgctcgacgacgacgtgcccatcggcccgttcgtgttcacggtcggaggcgccgccggggcggaggcggacggcgtcgctgtcgccgacgacgtcgacgaccaggtggacgcggaggcgggcggccggcagggcagcaagatgcacgtcatgtccgccgtgcacgcggagagcccgctgcggagccggtacgccagcgccgtcaagaggcctgagagcccgccgaccctgatgagcagggcatgagtgcattgcaaattttacaaaaggtgtacatagctagctagctgacagattgttcatggattcttttgttttttttttctgttccttagtgatgctattggttcgttctctcaacaatttcaagggagaggtttttgtttcattttttttcttgtgttattatagtatactgctgaggacacctcaaaagtcgtgaggtgtttgtatactgaaagtttgaggcaacatgtatggcaacatccgctttgacctagaaatgaggcattgaggtggtccaaggacagagcacgagagcactaacatatatgctgtatttcgtcgatcaacagctgccacccgatgaaagcagcaagagtcattccgtccatgttcaatgaaactggggcgtttcaattcta

SEQ ID NO: 137932 - DNA, 1484 bp, Zea Mays
acgcaaccaccgcgcggtgcctccgtgcccgtgccctcagctccacctcgccagcgaccgacaccctctctagctccaagtccaaggctccccttcgccgctgctagcttagctccccgaggctgctaactaagagcgtcatggggctgagggagagcctgctggggtgcttcggggccggcggcggcgaccagcaggagcaggggcacgagcccgcggcggcgcggccggcggccagcagacgacccggcggcaagccgacgctgcggcggctgagcacggcgaacctgcggtcgctgtcgctgcaggacctgtcgcggaagctggagaccacgaagctgcacgccttcacgctggacgagctgagggccgccaccaggaacttctccgccgccaacttcctcggcgagggcggcttcggccccgtctacaagggcttcgtcgacgggcgcctccgcccgggcctccagccgcagcacgtcgccgtcaagtacctcgacagcgacggcgtccagggccaccgcgagtggctggtacgtacactatacgtcgttcccgtcgtccaccaaccaaccaacaccctagctagctagcttgagctagtagccgtgaatcgcgtgctgattgatcgtcgatggtctggttgcgctgccgttggctgtcttgtctctggatggaatggaacggaactgcttcgtcaccgccaggccgaggtggtgtacctcgggatgctcagccacccgcacctggtcgagctggtgggcttctgcaaccaggacgaccaccggatgctggtgtacgagtacatgcccaggcaaagcctcgagaaccaccttttcaagaatctccttgcgtccctgccatggtcgacgcggctcaagatcgccgtcggcgccgccaagggcctggcgttcctgcacgaggccgagacgcccgtcatctaccgcgacttcaaggcctccaatattcttctcgactcggtaaaagcaagcctcaccaagtccaatccatctcagcatcaaattacacgccaaccgtgctaattgctcgcacgttgtcaaccgtgccgagtcgaagcctttgcttcttaagaattctcgtccaggaacagtagacgaatcgtgcctgatcgactgacctcaagttcgttccaggactacactgcgaagctgtccgacttcgggctggcgaaggaggggccgcagggggacgcgacgcacgtgacgacgcgggtgatgggcacgcacgggtacgcggcgccggagtacatcctgacgggccacctgacggcgcggagcgacgtgtacagcttcggcgtggtgctgctggagctgctcacgggccgccgctccgtggacaagagccggcgcgggcgcgagcagagcctcgtggactgggcgcgcccctacctccgccgcgccgaccggctgcaccgcttcatggaccccggcctggaggcgcagtactcgccgcgcgccgcggag

SEQ ID NO: 137933 - DNA, 3388 bp, Zea Mays
cattaaggcaggctcgctgcagcacgtctcgcgctccatcgccgcctgtcctcttcctgtaatgtcactcccccgatgcctgtgcgcagctcagtggccatgacgacgacggccgcccgtgctctcgccgccctcgtgctcgtcaccgccgccgccgccgccgccgccgtcgccgacgatggggcggcgctggtggagatcaagaagtccttccgcaacgtcggcaacgtactgtacgattgggccggcgacgactactgctcctggcgcggcgtcctgtgcgacaacgtcacgttcgccgtcgccgcgctcaacctctctggcctcaaccttgagggtgagatctctccagccgtcggcagcctcaagagcctcgtctccatcgacctcaagtcaaatggcctatccgggcagatccctgatgagattggcgattgttcatcacttaggacgctggacttttcattcaacaacttggacggcgacataccattttcaatatcaaagctgaagcacctggagaacttgatattgaagaacaaccagctgattggtgcgatcccctcaacattgtcacagctcccaaatttgaagattctggacttggcacaaaacaaactgactggggagataccgaggcttatctattggaacgaggttcttcaatacttgggtttgcggggaaatcatttagaaggaagcctctctcctgatatgtgccagcttactggcctttggtactttgatgtgaagaacaatagtttgactggggcgataccagacaccattgggaactgtacaagttttcaggtcttggatttgtcttacaaccgctttactggaccaatcccattcaacattggtttcctacaagtggctacactatccttgcaagggaacaagttcactggcccaattccttcagtaattggccttatgcaggctctcgctgtcctagatctgagttacaaccaattatctggtcctataccatctatactaggcaacttgacatacactgagaagctgtacatgcaaggcaacaggttaactggatcgataccaccagagctaggaaatatgtcaacacttcattacctagaactgaatgataatcaacttactgggtcaattccaccagagcttggaaggctaacaggcttgtttgacctgaaccttgcgaataaccaccttgaaggaccaattcctgacaacctaagttcatgtgtgaatctcaatagcttcaatgcttatggcaacaagttaaatggaaccattcctcgttcgctgcggaaacttgaaagcatgacctatttaaatctttcatcaaatttcataagtggctctattcctattgagctatcaaggatcaacaatttggacacgttggacttatcctgtaacatgatgacgggtccaattccatcatccattggcaacctagagcatctattgaggcttaacttgagcaagaatgatctagttggattcatccctgcggagtttggtaatttgagaagtgtcatggagattgatttatcctataatcatcttggtggtctgattcctcaagaacttggaatgctgcaaaacctgatgttgctaaaactggaaaacaacaatataactggcgatgtctcttctctgatgaactgcttcagcctcaatatcttaaatgtgtcatacaataatttggctggtgctgtccctactgacaacaacttcacacggttttcacatgacagctttttaggtaatcctggactctgtggatattggcttggttcttcatgtcgttccactggccaccgagacaaaccgccaatctcaaaggctgccataattggtgttgctgtgggtggacttgttatcctcctgatgatcttagtagctgtatgcaggccacaccatccacctgcttttaaagatgccactgtaagcaagccagtgagcaatggtccacccaagctggtgatccttcatatgaacatggctcttcatgtctttgatgatataatgaggatgactgagaacttgagtgagaaatacatcattggatacggggcatcaagtacagtttataaatgtgttctaaagaattgcaaaccagtggcaataaaaaagctgtatgcccactaccctcagagccttaaggaatttgaaactgagctcgagactgttggtagcatcaaacaccggaatctagtcagccttcaagggtactcgttgtcacctgttgggaacctcctcttttatgattatatggagagtggcagcttatgggatgttttacatgaaggctcatccaagaagaacaaacttgactgggtgactcgcctacggatcgctcttggtgcagctcaaggcctcgcttaccttcaccatgactgcagcccacgaataattcaccgggacgtaaaatcaaagaatatactcctcgacaaagattatgaggcccatcttacagacttcggcatcgctaagagcttatgtgtctcgaagactcacacgtcaacctacgtcatgggcactattggttacattgatcccgagtacgcccgcacctcccgcctcaacgagaagtctgatgtctacagctacggcatcgttctgctggagctgctgaccggcaagaagccagtggacaacgagtgcaatctccatcacttgatcctatcgaagacggcgagcaacgaggtcatggagacggtggaccccgacgtgggagacacctgcaaggacctgggcgaggtgaagaagctgttccagctggcgctcctctgcaccaagcggcagccctcggaccggccgacgatgcacgaggtggtgcgcgtccttgactgcctggtgaacccggagccgccgccgcagccgcagcagcagcagcagaaggcgcacgcgcaccaccagctgccgccgcagccgtcgccgccggcctacgtcgacgagtacgtcagcctgcggggcaccggcgccctctcctgcgccaactcgtccagcacctcggacgccgagctgttcctcaagttcggcgaggccatctcgcagaacatggtgtaggggaagacgtagacgttcggtgaggcgccttgagtgaggccgattgcagggggagtagtttgactgacattttgtgggacgcagcgcaggagattaacatgggactcagtagctagggtgttgttagctgtaaaaaaagtcatgtgacgcaagagcagcggagcttcttcctcttctttatcccccctccccatttttctttggtggtctaacttactaggaggctgtattgatccatcatcatctctcccgttcctctgcttgatgatcttttgtgactttcgcggtcctctgtattgatccatgatcttttgtgacctctgcttta

SEQ ID NO: 137934 - DNA, 3508 bp, Zea Mays
cattaaggcaggctcgctgcagcacgtctcgcgctccatcgccgcctgtcctcttcctgtaatgtcactcccccgatgcctgtgcgcagctcagtggccatgacgacgacggccgcccgtgctctcgccgccctcgtgctcgtcaccgccgccgccgccgccgccgccgtcgccgacgatggttgccgatctgttccgttctctcttcacccgtttcgctttctttcttctctgggagtcctcttgttgcgtactggggagcaaagattcagggggggcggctggattccgtttgccgagaactgtctgctcggatttctaccactctgtaacccgttctttgtgctaacgcggctggctctgcaccttccaggggcggcgctggtggagatcaagaagtccttccgcaacgtcggcaacgtactgtacgattgggccggcgacgactactgctcctggcgcggcgtcctgtgcgacaacgtcacgttcgccgtcgccgcgctcgacctcaagtcaaatggcctatccgggcagatccctgatgagattggcgattgttcatcacttaggacgctggacttttcattcaacaacttggacggcgacataccattttcaatatcaaagctgaagcacctggagaacttgatattgaagaacaaccagctgattggtgcgatcccctcaacattgtcacagctcccaaatttgaagattctggacttggcacaaaacaaactgactggggagataccgaggcttatctattggaacgaggttcttcaatacttgggtttgcggggaaatcatttagaaggaagcctctctcctgatatgtgccagcttactggcctttggtactttgatgtgaagaacaatagtttgactggggcgataccagacaccattgggaactgtacaagttttcaggtcttggatttgtcttacaaccgctttactggaccaatcccattcaacattggtttcctacaagtggctacactatccttgcaagggaacaagttcactggcccaattccttcagtaattggccttatgcaggctctcgctgtcctagatctgagttacaaccaattatctggtcctataccatctatactaggcaacttgacatacactgagaagctgtacatgcaaggcaacaggttaactggatcgataccaccagagctaggaaatatgtcaacacttcattacctagaactgaatgataatcaacttactgggtcaattccaccagagcttggaaggctaacaggcttgtttgacctgaaccttgcgaataaccaccttgaaggaccaattcctgacaacctaagttcatgtgtgaatctcaatagcttcaatgcttatggcaacaagttaaatggaaccattcctcgttcgctgcggaaacttgaaagcatgacctatttaaatctttcatcaaatttcataagtggctctattcctattgagctatcaaggatcaacaatttggacacgttggacttatcctgtaacatgatgacgggtccaattccatcatccattggcaacctagagcatctattgaggcttaacttgagcaagaatgatctagttggattcatccctgcggagtttggtaatttgagaagtgtcatggagattgatttatcctataatcatcttggtggtctgattcctcaagaacttggaatgctgcaaaacctgatgttgctaaaactggaaaacaacaatataactggcgatgtctcttctctgatgaactgcttcagcctcaatatcttaaatgtgtcatacaataatttggctggtgctgtccctactgacaacaacttcacacggttttcacatgacagctttttaggtaatcctggactctgtggatattggcttggttcttcatgtcgttccactggccaccgagacaaaccgccaatctcaaaggctgccataattggtgttgctgtgggtggacttgttatcctcctgatgatcttagtagctgtatgcaggccacaccatccacctgcttttaaagatgccactgtaagcaagccagtgagcaatggtccacccaagctggtgatccttcatatgaacatggctcttcatgtctttgatgatataatgaggatgactgagaacttgagtgagaaatacatcattggatacggggcatcaagtacagtttataaatgtgttctaaagaattgcaaaccagtggcaataaaaaagctgtatgcccactaccctcagagccttaaggaatttgaaactgagctcgagactgttggtagcatcaaacaccggaatctagtcagccttcaagggtactcgttgtcacctgttgggaacctcctcttttatgattatatggagagtggcagcttatgggatgttttacatgaaggctcatccaagaagaacaaacttgactgggtgactcgcctacggatcgctcttggtgcagctcaaggcctcgcttaccttcaccatgactgcagcccacgaataattcaccgggacgtaaaatcaaagaatatactcctcgacaaagattatgaggcccatcttacagacttcggcatcgctaagagcttatgtgtctcgaagactcacacgtcaacctacgtcatgggcactattggttacattgatcccgagtacgcccgcacctcccgcctcaacgagaagtctgatgtctacagctacggcatcgttctgctggagctgctgaccggcaagaagccagtggacaacgagtgcaatctccatcacttgatcctatcgaagacggcgagcaacgaggtcatggagacggtggaccccgacgtgggagacacctgcaaggacctgggcgaggtgaagaagctgttccagctggcgctcctctgcaccaagcggcagccctcggaccggccgacgatgcacgaggtggtgcgcgtccttgactgcctggtgaacccggagccgccgccgcagccgcagcagcagcagcagaaggcgcacgcgcaccaccagctgccgccgcagccgtcgccgccggcctacgtcgacgagtacgtcagcctgcggggcaccggcgccctctcctgcgccaactcgtccagcacctcggacgccgagctgttcctcaagttcggcgaggccatctcgcagaacatggtgtaggggaagacgtagacgttcggtgaggcgccttgagtgaggccgattgcagggggagtagtttgactgacattttgtgggacgcagcgcaggagattaacatgggactcagtagctagggtgttgttagctgtaaaaaaagtcatgtgacgcaagagcagcggagcttcttcctcttctttatcccccctccccatttttctttggtggtctaacttactaggaggctgtattgatccatcatcatctctcccgttcctctgcttgatgatcttttgtgactttcgcggtcctctgtattgatccatgatcttttgtgacctctgcttta

SEQ ID NO: 137935 - DNA, 2885 bp, Zea Mays
cattaaggcaggctcgctgcagcacgtctcgcgctccatcgccgcctgtcctcttcctgtaatgtcactcccccgatgcctgtgcgcagctcagtggccatgacgacgacggccgcccgtgctctcgccgccctcgtgctcgtcaccgccgccgccgccgccgccgccgtcgccgacgatggggcggcgctggtggagatcaagaagtccttccgcaacgtcggcaacgtactgtacgattgggccggcgacgactactgctcctggcgcggcgtcctgtgcgacaacgtcacgttcgccgtcgccgcgctcaacctctctggcctcaaccttgagggtgagatctctccagccgtcggcagcctcaagagcctcgtctccatcgacctcaagtcaaatggcctatccgggcagatccctgatgagattggcgattgttcatcacttaggacgctggacttttcattcaacaacttggacggcgacataccattttcaatatcaaagctgaagcacctggagaacttgatattgaagaacaaccagctgattggtgcgatcccctcaacattgtcacagctcccaaatttgaagattctggacttggcacaaaacaaactgactggggagataccgaggcttatctattggaacgaggttcttcaatacttgggtttgcggggaaatcatttagaaggaagcctctctcctgatatgtgccagcttactggcctttggtactttgatgtgaagaacaatagtttgactggggcgataccagacaccattgggaactgtacaagttttcaggtcttggatttgtcttacaaccgctttactggaccaatcccattcaacattggtttcctacaagtggctacactatccttgcaagggaacaagttcactggcccaattccttcagtaattggccttatgcaggctctcgctgtcctagatctgagttacaaccaattatctggtcctataccatctatactaggcaacttgacatacactgagaagctgtacatgcaaggcaacaggttaactggatcgataccaccagagctaggaaatatgtcaacacttcattacctagaactgaatgataatcaacttactgggtcaattccaccagagcttggaaggctaacaggcttgtttgacctgaaccttgcgaataaccaccttgaaggaccaattcctgacaacctaagttcatgtgtgaatctcaatagcttcaatgcttatggcaacaagttaaatggaaccattcctcgttcgctgcggaaacttgaaagcatgacctatttaaatctttcatcaaatttcataagtggctctattcctattgagctatcaaggatcaacaatttggacacgttggacttatcctgtaacatgatgacgggtccaattccatcatccattggcaacctagagcatctattgaggcttaacttgagcaagaatgatctagttggattcatccctgcggagtttggtaatttgagaagtgtcatggagattgatttatcctataatcatcttggtggtctgattcctcaagaacttggaatgctgcaaaacctgatgttgctaaaactggaaaacaacaatataactggcgatgtctcttctctgatgaactgcttcagcctcaatatcttaaatgtgtcatacaataatttggctggtgctgtccctactgacaacaacttcacacggttttcacatgacagctttttaggtaatcctggactctgtggatattggcttggttcttcatgtcgttccactggccaccgagacaaaccgccaatctcaaaggctgccataattggtgttgctgtgggtggacttgttatcctcctgatgatcttagtagctgtatgcaggccacaccatccacctgcttttaaagatgccactgtaagcaagccagtgagcaatggtccacccaagctggtgatccttcatatgaacatggctcttcatgtctttgatgatataatgaggatgactgagaacttgagtgagaaatacatcattggatacggggcatcaagtacagtttataaatgtgttctaaagaattgcaaaccagtggcaataaaaaagctgtatgcccactaccctcagagccttaaggaatttgaaactgagctcgagactgttggtagcatcaaacaccggaatctagtcagccttcaagggtactcgttgtcacctgttgggaacctcctcttttatgattatatggagagtggcagcttatgggatgttttacatgaaggctcatccaagaagaacaaacttgactgggtgactcgcctacggatcgctcttggtgcagctcaaggcctcgcttaccttcaccatgactgcagcccacgaataattcaccgggacgtaaaatcaaagaatatactcctcgacaaagattatgaggcccatcttacagacttcggcatcgctaagagcttatgtgtctcgaagactcacacgtcaacctacgtcatgggcactattggttacattgatcccgagtacgcccgcacctcccgcctcaacgagaagtctgatgtctacagctacggcatcgttctgctggagctgctgaccggcaagaagccagtggacaacgagtgcaatctccatcacttggtaactattcttcagtctcctgcatttgtcgagttagaagccggaagtcgcttccttctctttacatcgctttggattccagcagtgctcaataattgctgaacaacgaccattaggcttgtgttcctacaaggggaccagcgacactaaacctagcatgtgagtagatctatctgcactgcagaccagctgtggactgatgcgctgatccattg

SEQ ID NO: 137936 - DNA, 1218 bp, Zea Mays
tttcgttgctgttgttttttgttctcagattatttagctaattgtagctgctcaatgcaacaggatttttttatgtacaacaacactggcaagaacgaatccttttagtcccaaacaagatacagtagggagtaggccagtatcaatagtaaacagagttttatatctaatcttaggtttgaaattttaatttgctgaagttccttttgatttaattttgtaaggctggtataattgaaaatagcagcttgagctagaaagcggaggctgcaagcctcctcacacattactgtagcaccagcagagcgagctgcagcagcagccgtggtataatattagtgtccttagtacttgatagttccatgctgccattagacatagatatggaatgcatgagtcaagcaatgcacctgttttctcatatgaataacagattagactggacttaatttcaactgttgcatgatgttctttggtaatgtgtggttttctgaagggacaaactcagtgtaatactaacgcactatcacagtatcactctttttgtttatatttataactactgcttataatgtaaataatcatctatgaacagggaagaatgatacttgctcatttgtgtgatgaacccaaaggtctaaaatctgggatgttcatgtctctggtgtttctttgttttccaattgcaaatgctctcattgcaaagatcaacgatgggagtcctttagttgatgagcttgttctgctgctgctttattgtgcatatacagtgggtctctacctgcacctcgctgtgtcggttgtgcatgaaatcaaggatgcccttggaatctattgcttcaggataactagaaaggaggcttgaactttgtagtgaagatatattattattacttcacaagtgctagcgaggagcaacacagttcgtcaccgtgcacgctgggagtgtgtgtgcccctctgaaatgccacagccatctgtttgttgagcagagggatctagggattgtattgcgcagttatcttggtcatataacaatatagcagtgtgatgtacactgtagtagggtcgttagaagatatactgtgaaaaacttgcttggagaaagtgatcgtagcatgtgattatcttggttattgtctacaccctccgtttttttttaaaaaaaaaatatgtattatatttcgctataaatctagataaacatctatttagact

SEQ ID NO: 137937 - DNA, 2253 bp, Zea Mays
atggacccgtccactgccaaggcggccgcgccgcccaataatgcggaccacgtcctccacatccagcccgacaacctgccgccgccgcacccgagcaacaaccagcagccgaacccaccgccgccggagaccccaaagctctcgcagaaccccgagaagccgccggcctccagcccctcgcgcccgccgctgccccccgcgctcctccgccgccgctcctccatcgccaagcccaagtcgcgcttcgtcgagccgcccaccccgatgcacccggactccgcccacccctccccggtccaccccgccgccaccgccgccgcctcgctgaccgccaccccgacccatcgcgccgcgagcgtctccaccccgcacacccccgcggaggccgacgacgacgaggacatcttccgcaacaaggatggctcccgcgcgccggcctccgcggcgcggtgccgccgccgggtccgccttggcctcgagctctgcgtgctcgtcctcttcctcggcctgctcgtcgtcagcctcgtcgtgcgccccctgcagggccgcgtactgtgggggctggagatctggaagtggtgcgtcatggtcaccgccgtcttctccggccacctcctcagccagtggctcgtcacgctcatcgttttcgtcgtcgagcgcaacttcctgctgcgcaccaaggtgctctacttcgtcttcgggctcaagaagagcttccaggtctgcctctggctcgcgctcgtgctcatcgcctggtcccagctcttcgacagcgaggtcggccgctcccgcaagaccgccaggaccctcaactacgtctccaggttcctcgcctccatgctcatcggctccgtcatctggctcgtcaagaccttccttatgaaggtggttgcgtccacgttccaccgcaagaccttcttcgaccggattcaagagagcgtgttccatcagtacgtgctgcagacgctgtcgggcccgccgttaatggagctggcggagaatgtggggcgcgagggcagtggccttgggcgggtcagtatcggcagggccaaggaggacaaaggcgtgccggaggtgatcgatgttgtcaagctcaggaggatgagtcaggagaaggtctcagcatggacgatgagagggctcatcacagcaatccgaagctctaggctgtcaaccatatctaatactatcgagagctttgatgatgtagatggcatggaacagaaggataaagaaataaatagtgaatgggaggccaaggccgcggcgtatgccatattcaagaatgtcgcaaagcccagctataagcacattgaggaggtggatctgctgagatttttcaccaaggaggaggtgcacctggtgattccaatgtttgagggagcaccagagaccggaaagataaaaaagtctgcactaaagaattgggtgctccaaatttctggagcagggggcatgggttcaagtgcttgctttaatgtgaaagcatacctcgatcgcaagtcactggcacattctctgaacgacacaaagaccgcagttatgcaacttcacaacctcatcagtgttatagtcatcattataatcatcattgttacactactattgatgggcattgcgacaaccaagattcttgttgtcatctcgtcccagcttctggttgcgggattcatatttgggaatgcatgcaagactgtatttgaggcccttatatttgtattcatcatgcatccatttgatgttggtgaccgctgtgttatcgacggaacacagatgatcgtcgaggaaatgaatatattaaccactgttctcttgaagaatgacaacgaaaagatatattatccaaattctgtgttgtccacaaagccaatcagcaacttttaccgaagccctaacatgtatgacacgattgattttgcaattgatgtttcaacttcagttgagagcattggagctttgaggtccaaaattaaagggtacttggagagcaaaccaacgcattggcacccagtccacactgtaaatctcaaggacatcttggatgtgaacaagattaacatgtctctctcagtgcagcacaccatgaactttcaaaacatccgggagaagaacatcaggaggtctgagctcgttatggagttgaagaaaatattcgaggagatgtccatccggtaccaccttctaccccagaaagttgaactcacctacgtcggctcgaacccactgcccatgggtccttctcatacaagatag

SEQ ID NO: 137938 - DNA, 272 bp, Zea Mays
atggccatcgtgaaggcactcacgtggtgcagagcaacctgctcgccactggcggtggtggcagcgatcggtgcatcaaattctagcacacagacacacacaccgctctatggcaataagtcgttcgtctgcaacacatccgacagaaagctgagtatgtgcttcagagaccaggcattattgaactctgctgccactaatttacatcagatgaactgagttacagcagaatgaatttcttggatcctaaatgcagagaataaataaaaaaa

SEQ ID NO: 137939 - DNA, 3810 bp, Zea Mays
atggaggcggccttcgacgcctacttctgcgccgcggatctggaccgcgacggccggatcagcggccaggaggccgtcgccttcttcaagggctccggcctcccgcagcccgtcctagcgcagatttggacatatgctgataaaaatcggactggtttccttgggcgcgaagacttctgcaattcgcttaaacttgtcacagtagctcagagcggtcgagaattgacacctgatattgttaggtcagcattatttggtccagctgctgcaaagatacctgctcctcggataaatgtttctactgctggtcctcagacaaacagtgtagctagccccccgaatgccactcgagcactagggtctggtcaacagaatcctgctgtaagaggaccacaagtgcttcctggggcatcatcaaatccacaagtgaggccgccacaacctccaaatgcaaacactgtgccccctgttcagggagttgcatcaaggccacccgtgggaggtggtcctagtgggctaaaccataccagctcaaccacaacaaatctcgctacggattggtttagtggtaagaggagtgcaagttcgttgggtgcaacttcacaagctccaaccagaggtatttctccgcagggcaaccttactactgcaggaatttcagcacagaattcaactcctctgccagtctacaattctcatatgccgggtgctacaacacctgccaatgcaaattcaacaaacgtaaacatgatgccttcacaaccatcagttagtgactccaagacattggtacccttgggtaatggattgccatctaactcaacttttggtgttgaccctttttctgtgactctacaagcgaaacaagagtcagctttgacccccaatgttccaaataatcttcccagttctacagctcctgcctcagctgctggacctcatcaccctcctaagccaatgcaggccggtcctttgcagggtatatcgtcgcttccttctcatactagccagttgccacacagtcagccagctcctaggcaacaacaatttaatgctattccaagcactccaggaccagtgggtgcaaatattcctggtggacaaattccttcaaacccataccaatctcaggccccatggccaaaaatcactcaagtggatgtcaggaaatacatgattgtatttatcaaggtagacagagatcgtgatgggaagatcaccggcgaagaagcaaggaatctatttttaagttggaggctgccaagagatatcttaaggaaggtatgggatttgtctgatcaggataaggatgggatgctgtctttcaaggaattttgtgttgccgtgtatttaatggagagacaccgagagcatcgtcctcttcctgatgtactaccagatggtatttgggctgagggcacctcgctaccctctaccggccagtttgcaggaaaccctagtggaccgccttctcatgcaagtacaggattcgcaagtagaggaatgcaaggaccacatcatgggatgcttccctcatccatgaagccaacatctcgaaggcctcttcctttagatgctgacgatactgttaaggcagagcaacaaaagccaaagatccctgtattggaggaacatctagttggccagttgagcaaggaggaacaaggcacactggatgcaaagtttaaggaagcttcagatgctgataagaaagtccaagaattggaaaaggaaatccaggattctagagagaagaccgagttttatcgcaccaagatgcaggagcttattctttacaaaagtaggtgtgagaacaggcttaatgaagtctcagaaagtatgtctgccgataaacgtgagttatcagttctatatcaggttcaatcccttgcagcaaaatatgatgaaagatgcaagaaggagaagaaacttgaaatttataacgccatagttaagctgcaaaaaggggatgaaagtgatgaaaagcttcaggagcgggctaataagatacagtctgatcttgaggagcttgtgaaatcattgaatgaacaatgcaagagatatgggttgagagctaagccaactacattggtggaacttccttttggttggcaaactggaatacaagagacagcagctacatgggatgaagaatgggacagatttggagatgaagttagtcctgtcaagaacagagacgatggttcgaccgatgagcttgatacaaagcaatctggaccaaatgacgtcttaccacgtgccactgagagcgtcagtaaccgtggaatggattcctctgcccatggagataaaacttatgatggacattcatgggccccatcatttgatcatggcactgacaatgactccctatggaactttggtcataagatatactgcactatctggtacttacctccacgatctgtttctcaggatggtgagaatggtgattcagatctcttctttgggccacaaggtcttccaccgataaggactggaggttcctcatctaatagtttgtttgtcaaggaacagaaaccatcttttgattctgttcctggtactccaatggagaaacctttctttgattccatcccaggcacaccagttcagaagtccgtcttcgattactccgtccctagtacaccgatgcaaaactcagtctttgattattccatcccaagcacaccgatgcaaaagcctctctttgattccgtccctggtacaccagtgcagaaatcagtatttgattctgttccgagtacaccgatgcagaaatcagtatttgattctgctccaagtacgccaacgcagaaaccattctttgactcttttccaagcaccccaatgcagagatccatgtttgattctggcccaagcagagcagaatctcctactgctggcagcgtgtacggcaaagagcaaaagggattctttgattcttcagttccgagtacaccaatgtacaactcaaacctcacgcccagatacagtgaagcaggagatgattcatttgacacaatgtctcaatacagctccttcggcatgcacgacaacaattcttttggacagatagacagcttctcaagatttgattccttccggagcaatgctgataatggcggtaatgacgcctttgcgagatttgattctttccgcagcacttcagatcaaggcgggggcaacagcttcatgaggtacgattccatgaacagcagcagtgaccatgacagaacggatacatttgcgaggtttgattccatgaagaacagtgacttcaacaaccagggctactcatttgatgatgacgacccctttggaactgggccgttcaaatcaacagagacatcgaacagcccgacgagacatgggacggatgcgtggagtgcattttgacaggtattgtattatagaggtcatgttcttgtgcaccttactgcagatatacatacacgtacaagggcaagacattattttttttgcatgggcctctgctccgcaccttttggacgggacggggcttgcttgtgtgtttaattttgtacctaggctgggaacatgtgtttggagggatggtgctgcttataaacattctttataccttgtattgtacaagtacacctacaagatgctagtcaacccgttgggttgaagaactctccgagtgttttcttccattgtgtagggttttttttctctctcagtttcttctgtttctgcaaaaagttctgagctctgtacatacattttggctaagtcaacctagttatgaggatattgtgagcaattaagtcggttcagcgagaa

SEQ ID NO: 137940 - DNA, 212 bp, Zea Mays
tttgttgtacaggaaaacatagaatggaattcaaatttggtggccgcaaaagtgtggagacttgaattcatataaagttaggctcaacatagtgcaaacagttgtattttagtttagatttagagtacacttatgtatgcgttgtttgacaatgcttatttatgatatattgaatggtacttatttatattatattaattataatgttgttc

SEQ ID NO: 137941 - DNA, 111 bp, Zea Mays
atgcttcgtttcctattcgcctatcatctactgccaacatatttggctatcaccctttatggcggtggcaatcctactcactccgaaattactagtcgtaatcttctaggg

SEQ ID NO: 137942 - DNA, 304 bp, Zea Mays
gacttgagatgttatggtggcatgtatttatataggctgggaggtaggtggttacatgatagatctaatctagtatttatgtaatacaaccatatcctatatatgtggaagtttgataaacttaaaaccaaatctgttacatgatagatctaatctggtacttatctgttacaatcctatcctatctattaggaactctaacaaacttgaaaccaaatctgttacatgatagatctaatatggtacttatctattacaatcatatcctatctgttaggaactctaacaaactcgaaactaaatc

SEQ ID NO: 137943 - DNA, 219 bp, Zea Mays
atgaagaaaatatacaaatacatgtgggacagcggcagcctcgacgtcttttttgtgcgcctcctcgcagctagcggtggctgcgaactcacagggaagaccaaacaacgcaccggtgttagaggcgacggacgggtgtctgaaggcgagcaacagagtcagaaggatgcaacttctctcatccgtgcagccgcggcagacagcaagcagaagcactga

SEQ ID NO: 137944 - DNA, 1082 bp, Zea Mays
gcatgtgccagtaggtcagaagaagaggatgattttatacatgcatggaacatattgcttgagaggtttgagcttcaaggtaacatttggctgaaatgcctttttgaaaaagatatcattgggcactagtatatggtagaaactcattctcagctgatatgagttctacacaaagaaatgaaagcttaaacaatgaaataaaaggctacatcagtgtaaagtatgacatgcttactttttttgagcactttgacagtctgcttagggacaaacgatatgaagaagttacaagtgacttcaaagcaacacagagcacacctgtgccaaaggcagaattgacaatattaaagcaagcagcaaaagtgtatacaccagtggtgtttagattatttgaggaacaggtgttgcaaactttaaattgttacttcttttgttgtggcgatgatggtgcagagaatgtgtataaagtaaaagttcatggaaagcatcatgaacatactgttaagttctcacctttggagttaaaagtgaggtgcagctgcaagaaatttgaatttgctggaatcctatgctctcatgcactaaagatactggatatcaatagtattaaatcagttcctgaggaatacatactaaagaggtggacaattggtgcaaaagtggtacatatacctagcacacttaccatgcatgatgatcctaaagtccagttatcgaatcgcttcagtaacttaacacgagtttacaattgtatactcgctcgagctgcagaatctgaagaaacttatagtatttgtacacaaacagctgagaaattggcagaagacagagaataatttgaagattaagcctagctcaaacctgaacagttcctctactccacgaggtacctacaatatatcacataaatatattattaacatttcatttaactattgttttcattgttgcacctcctaatgtaattatttacaggctcaaaggaaactgtgcagactacactacaggaaacgcctaaattttcgtgggccaaaaacccacgaaaataagcctaaaccgacgaaaatagagtattttcgtcg

SEQ ID NO: 137945 - DNA, 109 bp, Zea Mays
cccatgcctcctcctgccacatggctatttttattggatttatttcttatgtggacccattctcaaataagaaaggagtctaacggagtagacaatactagacgtcaag

SEQ ID NO: 137946 - DNA, 392 bp, Zea Mays
caggattcgcccgagtcctcttcttctttcttttttttttctttcctccttaggcatcattcgctcgtgcgccaaagatctgtcgaaggctttatgagactgagggagtcaagaacgcaccatgctaccttgtccctttcctccggctgcagccgttttttcccctcgccatgcacccacccacccaccccacacacacttcttccttttcccttagtaaaaacttgcatgcatgctcacatccttgtcatgtcgccattgtcgttggtgctgccgcaacagaggatgaatggttcgggtattgacttctgtccattaatgtaaagccttcaatgaacattcatttcgattataaatggaaaggagaaaaaaaacacaagttctggtaaaaa

SEQ ID NO: 137947 - DNA, 2199 bp, Zea Mays
atggatttcggcgacgaacctgagggctccgacagccagcgccagcggaagcggtaccaccggcacacgccgcgccagattcagcagctcgaggcgtacgatctcgcttcgtttccatttcttttgctgcttctttattctgtccggccgcccttgtggttgttcgtcgtgagacgtgatggtttggcggaaaggaatgtaatggcgtgcgtgctcgcccatgactgcaggatgttcaaggagtgcccgcaccccgacgagaaccagcgcgccgcgctcagccgggagctcggcctggagccgcgccagatcaagttctggtttcagaaccgccgcacccagatgaaggcgcagcacgagcgcgcggacaactgcttcctgcgcgcggagaacgacaagatccggtgcgagaacatcaccatgcgcgaggcgctcaagaacgtcatctgccccagctgcggcggcccgcccgtcgacgaggacttcttcgacgagcagaagctccgcatggagaatgcccgcctcaaggaagagctggatcgggtgtcgagcatcacgtccaagtacctcggccggccgttcacgcagatgcctccggtgccgaccatgtccgtgtcgtcgctggacctgtccgtgggcgggatgggctccctcggcgggccgtcgctggacctcgacctcctcagcggctgctcgtccgggctgccgtaccaggtgccggcgcccgtgacggaaatggagcgccccatgatggtcgatatggcggcgcgcgccatggacgagctcatccggctcgcccaggccggcgagcaaatctgggtcaagggcgtgcccggggacgcgagggaggtgctcgacgtcggtacttacgacagcctcttcgccaagcccggcgccgcgttccgcccgccggacatcaacgtcgaggcgtccagggactcgggcctcgtgttcatgagcgccgtcgcgctcgtcgacgtcttcatggacacgaacaagtggatggaattcttccccggcatcgtgtccaaggcgcaaaccgtcgatgttctcgtgaacggcttgggcgggaggagcgagtccttaatcatgatgtatgaggagctgcacatcatgactccggtcgtgccgactcgcgagctgagcttcctccgctactgcaagcagatcgagcaggggctgtgggccgtcgcggacgtctccctggaggggcagcgcgacgcccattacggcgtgccgtcccgctcccgtcgcatgccgtcggggtgcctcatcgccgacatgtcgaacggctactccaaggtgacctgggtcgaacacatggagatcgagcagatgctcccgatcaacgtcctttaccgcaacctggtgctgagcggcgccgcgttcggggcgcaccgctggctggccgcgctgcagcgtgcgtgcgagcggttcgcgtccgtggccaccctcggcgtgccgcaccacgacgtcgccggagtgacgccggaggggaagcggagcatgacgaagctgtcgcagcggatggtgagcagcttctgtgccagcctgagctcgtcgccgctgcagcggtggacgctgctctctggcaccacggacgtgagcgtccgggtctccacgcaccgcagcaccgactcaggccagcccaacggcgtcgtcctcagcgccgccacctccatctggctgcccgtccccggcgaccatgtcttcgccttcgtccgcgacgagaacgcgcgctcccagtgggatgtcctgtcgcacggcaatcaggttcaggaggtgtcgcgcatccccaacggctccaaccccggcaactgcatctccctgctaagaggtctgaacgcgaaccagaacagcatgctgatccttcaggagagctgcacggacgcgtcgggggcgctggtggtgtactcgccgatcgacatcccggcggcgaacgtggtgatgagcggcgaggacccgtcgggcatcccgctgctgccgtcgggcttcgccatcctgccggggtccggcgcgggcgcgtccagcagcgccgtcgtcccgccgccgggctgcgtggtcaccgtcgcgttccagatcctcgtcagcaacctgccgtcgtccaggctgaacgccgagtccgtcgccaccgtcaacagcctcatcggcaccaccgtgcagcagatcaaggcggcgctcaactgtgccggccattga

SEQ ID NO: 137948 - DNA, 788 bp, Zea Mays
atgcgaagtcgagcctgggctcctatgagccctccgagggataattgggaagatggaaatcctgctacttggggtagcagtccagcttaccagccaggaaccccacaagctcggccatacgaagcccccacacctggatcagggtgggcaaacactccaggagttagtttcaatgatgctcctactcccagggataactatgcaaatgccccaagtccatacgtgccttccacgcctgttggccaaccaatgacgccaaactcagcctcatatcttccaggcacacctggtggtcaaccaatgaccccaggcaatgctggaatggatatgatgtcgccgataataggtggtgagggtgaagctacatggctgctgccggatgttttggtcaatgtgttgagcggaggtgatgacggtcctggtgtggttagggaggtactcggggatggatcttgccgagttgcacttgggtcttcgggcaacggtgacatggtgacggttcttccgaacgaggtcgaggtcatcaggccgaagaagagtgacaagatcaagatactgaatggtagtttccgtgggcacacaggaaaacttataggtatagatggttctgacggaatagtgaggcttgacgacacatacgaagttaagatattagatatggtgattttggccaaactggcgacttgaaatggatgtatattttgttttgtaacgtgtccaccatagaacatattttgtaacaatgccctcgtttgcaataaagctttttgttgcttacgactacaata

SEQ ID NO: 137949 - DNA, 2506 bp, Zea Mays
ctcgcctcttccctcgcacgactcgccgcgaggagtttccccttcctccgcgtgcatccccgcgagagctcgaaaacctagccgccaaatccatggctcgccgcgaccacgacgacgacgacgaggaagaggtcgaggaggaggcatacgacttggacgaggaggaggatgacgaggatgaggaagacgactacgaggaggaggcgaggcgcgggaaggcctcccgcggcggtggcaagggtggcggcgggcggaagcggtcacgcgaagacaacttcatcgacgactcggccatcgaggacgaggacgaggacgacgacgacgacggcgggggccggccgaggaagaagggcggcggcggggtgcgagggttcttcgacgaggaggcccaggtcgacgaggatgaggaagaagaggacgaaggcgagggagaggacgattttattaatgatgctggggccgaccttcctgatgaggatgttgttaggggctcaagacgtcattctattcctatgagagatgaggaagaggatattgatgagattgagagacaagtgcgggagagatacgcacgatccactcatattgagtacggtgaggaagctgcagaagtggaacagcaagctctgctgccgtccgtgaaggatcccaaactatggatggtcaaatgtgcgattggacatgagagagaaactgctatttgtctgatgcaaaagttcatcgatcggtcagaccttcagataaagtcagtcgtggcattggatcatcttaaaaattatatttatgttgaagctgaaaaggaggcccatgtcaaagaggcttgcaaaggtctaagaaacatttatgcttcagcaaaaataacattagtgccgataaaagaaatggcagatgtcctctccgttgagagcaaatctgttgatctttcaagggattcttgggttcgaatgaaattgggcatatataaaggcgaccttgctaaggttgttgatgttgataatgtacgtcaaagagtagacgtgaagctgatccctagaatagatctacaagctttggctagtaaacttgaaggggagtctgtaaagaagaaagcatttgtcccaccaccacgattcttcaatatcgatgaggcgagggagatgcatattcgtgtggaacggaggcgagataaagaatctggggagtactttgagtgggttgataatttgaagttcaaagatggtttcttgtacaaatctgtctccactaaatcgatccacacaaacaatattcaaccgaattttgacgaacttgagaagtttaagaagcctggtgatgacatgaatggcgacatggctagcttgtccactctgtttgcaaacaggaaaaaaggacactttatgaagggtgatgccgtcattgttattaaaggcgatttgaaaaatctggagggttgggttgagaaagtagaggatgaaaccgttcacatcaggccaaaaatatctgatctcccgaaaacattggccttcaatgaaaaagagctttgcaaatatttcaagcctggtgaccatgtcaaggtgatctcaggagttcaagaaggcgctactggcatggttgttaaagtggaagggcatgtcttgatcattttgtctgacacaactaaagaacatatccgtgtgtttgctgatcatgtcgttgaaagctctgaaattaccacaggaatcaccagaatcgggataattgggaagatggaaatcctgctacttggggtagcagtccagcttaccagatgtgtaacccccacatgtcttactccaattatccaaaattttcagccaggaaccccacaagctcggccatacgaagcccccacacctggatcagggtgggcaaacactccaggagttagtttcaatgatgctcctactcccagggataactatgcaaatgccccaagtccatacgtgccttccacgcctgttggccaaccaatgacgccaaactcagcctcatatcttccaggcacacctggtggtcaaccaatgaccccaggcaatgctggaatggatatgatgtcgccgataataggtggtgagggtgaagctacatggctgctgccggatgttttggtcaatgtgttgagcggaggtgatgacggtcctggtgtggttagggaggtactcggggatggatcttgccgagttgcacttgggtcttcgggcaacggtgacatggtgacggttcttccgaacgaggtcgaggtcatcaggccgaagaagagtgacaagatcaagatactgaatggtagtttccgtgggcacacaggaaaacttataggtatagatggttctgacggaatagtgaggcttgacgacacatacgaagttaagatattagatatggtgattttggccaaactggcgacttgaaatggatgtatattttgttttgtaacgtgtccaccatagaacatattttgtaacaatgccctcgtttgcaataaagctttttgttgcttacgactacaata

SEQ ID NO: 137950 - DNA, 95 bp, Zea Mays
gtcacagaaacgagctaacatagtgaatatgcgtgaacatgtacaggtttccaaacacatgagtcatcagtgtcgtaattttcaaacaagggtcg

SEQ ID NO: 137951 - DNA, 474 bp, Zea Mays
gtttgttcatgcttcttttgttcatcgtgatggtcatgatcatggtctgttcatgtccaaccatcatagagttattccaactgaaacatctttggtccatcaatttagtgatttagtcactgttaatacaggtttccccatgataatcaccactgaggacatgcacttctctgacagttatagattaccaaaaaggtgccagttttttctcttctgcaaaaggaaacagctaggacttccagcttctatggaggtgctgcagatgcatggtttgagattagggttgtatagacaaacagaaacaatgcgtatgctaaatgtcgaccccatgttttttgttttgtgtgcacgcgcagattgttacttgatcttcttcagtgaggtatgcaatttctgaacatgttggcagaaatgatgttctgttttattaaaacctaactgtgttctgttaaatcctaattaggcccccgtgcg

SEQ ID NO: 137952 - DNA, 336 bp, Zea Mays
atgcaccggcgcgccgccatcgccgtggccagggagttgaaggagggtggattaaatgttgaagcatctgctcacctccacgagctgggcgaggcagggagctcgagggcgcagggttggcgcaggctgggcggggacctagggcggagggttggtgcaagcagggcagtgttggcggagggttggtgcgggcggcagaaggagaaaggggccgacctcgtacgagggatgggtcgcggcctcgcgagcgagggcgagagaagcatcgagaaggttctggggcaagactgtggagggagagtgctcaacgaggggtggaggccggtgctccgttga

SEQ ID NO: 137953 - DNA, 266 bp, Zea Mays
cttctctgaacctctgtccatagtgattggggatgtttgatatttcagaaagaaggaaggtacaagggaaggaagttcagttcagtatgtcatttctttggatatcaggctcgatgatctacaccatcaaatttcgactgtgactatgcttatgctcttggacgtatctccctgcatatgattgcagttggattgactggctacatgacaactgtggctaatctgaaagaccctgttgacaaatggagatgtgctgctgctccttt

SEQ ID NO: 137954 - DNA, 96 bp, Zea Mays
gtcggctcaaatatatctaggcgtcggatttccaatcaacggctacatcatgacgacacagtcttgccttggacgcatcgcgaacctccttgttct

SEQ ID NO: 137955 - DNA, 87 bp, Zea Mays
cccgtgagcagctccgacagcctcatcgccgtgttgcacctgctcttgtgtcgcaggctcgggttaccgttggtgctcacgctgagg

SEQ ID NO: 137956 - DNA, 1023 bp, Zea Mays
gtgttcgacggttccatgtccagcaccttcaaggccgtcgcttgccccgatcccatctgccggccgagctccggcgtgagcgtttccgcgtgtgctatggaaaatttccagtgcttctacctctgctcttacggtgacagatccatcacggcgggccatatcttcaaggacaccttcaccttcatgtcgcccaacggcgtgccggtagccgtgtcggagctcgccttcggctgtggcgactataacaccggcttgtttgtttcgaacgagtccggcatcgctggcttcggccgcgggccacagtcgttgccgtcgcagctcaaggtcggcaggttctcgtactgcctcacgttagtgaccgagagcaagagcagcgtggtgatcctgggcacgccgccggacccggatggtctccgagcgcacactacgggcccgttccaatccactccgatcatatacaaccctttgatccctactttttactacctctctttggagggcatcaccgtgggcaagacgcggctgccgttcgacaagtcggtgttcgcgctcaagaaggacggctcgggcgggacggtgatcgactccggcacgagcctcaccaccttaccggaggccgtgtttgagctcctccaggaggagctcgtggcgcagtttccgctgccccgctacgacaacaccccggaggtcggcgacaggttgtgcttccgccggccgaaaggtgggaagcaggtgcccgtgccgaagctgatcttgcacctggcgggcgcggacatggatttgccccgcgacaactacttcgtggaggagccggacagcggggtgatgtgcctgcagatcaacggcgcggaagatactaccatggtgctcataggcaacttccagcagcagaacatgcacgtcgtctacgacgtggagaacaacaagctgctcttcgcgcctgcgcagtgcgacaagctgtgagtgaccaactcacttgctagcttgtgcgtacgtacgtacgcgctgcacatgtgcatgtgt

SEQ ID NO: 137957 - DNA, 113 bp, Zea Mays
ggagatctaatttgtgttgttaataaaatttattaccataaaatctacaagagatcaaccttcctttatccatttactggtcacttaatataacttaatgttgtttttttatc

SEQ ID NO: 137958 - DNA, 206 bp, Zea Mays
cacgtggtctgtcatggacggtaaacaccaaaatcgattatagaaaatgtttaagctcatttcccttttacttagttaatagttcaactaactattagttactctcaaatatttattaatttattagctagtttaatcgaactaaaattagctaataattagtcaaaatattactagccagctaattctataacatatcctaaacg

SEQ ID NO: 137959 - DNA, 2341 bp, Zea Mays
atccctcacgcagtcaggagatccccaattccccattcaccaatccccagtattgtagtagggggaaaaacgagagaaaagaaacagcagtagcggaggcaagacgaaatggtggccgccgtcgcgtcgccttcgtcggcggcaccctccgccggccgtccccatccgacatacaaggagatgatcatgcaggcgctgacggagctgcgggacccgagcgggtcgagccgcagcgccatcgccacctacatcgccgaccacttctccggcctccactcgcgccacgatgccctcctctccgtccatctccgcagcctcaagtcccatggccaacttcgcctcgtctctggcaactacttcgtctccaccgccgctcagcggcaggggcgaggctccaacatcccgcccaaccccaaccctgctccggggcagaagcgtggtcgggggcggcctcgcaagtacgcagattcagccccttccgcttcgatcccggcgtttcaggacgccaagcgagggcgtggacgcccacgcaaacgcaagagcgcccaggacccggtggcttcctccccctccccttcgccgctacagggagcaagtgttccgccgcctccatctggggtcaagagggggcgtggacgccctcggaaggacgcccttgtccctccgccttcctcttcttcgccactgctgggagggattgatccaccgcctccatctgggatcaagacgggccgtgcacgtcctcggaaggcccttgtccctgtgcgttcctccttttccgagctgctgggagctgttgttctaccacctccgtctggggtcaagcgtggccgcggacgcccgcgcaagagtgcctaccccgctgtggcgccgttggtgggagctgagaagggacctgctggtggacaaccacagaggaataccactcctctctcaccgacacctgctaccatgtcccacagtggtaagagtgagactgtccggctgcccaaggttgctgttgatatcagtgctttgcgtggttcctccatgaacatatctgcttctagtaacagtttggttggtgcgaagcggggaagagggcgcccacctaaggttgtggttgctgggaaagagaagatgcaacctgaatctgtgcagtccgtggatgcttcattgactaagagagggcgtgggaggcccagaaaggagaaggcattggaaagtggccgcatgaaagcctcgcagatgactgagggtcaacgtgaagctctgactgcagaccaagctggggctgtccaaaatgaagtagaagatagggatttgcaatccttgggtactcctttgacagagaagagaggccgcggtcgtcctagaaagaggccgttggaaatcgaaactgcaaaagcaggggctgctaagcgtgggaggccaagaaaggagaagacatctgaaactggggacttgaaagttgcacagatgactgagggtcggcatgaagctctgcctgcacaagctgtagaccaaactgggcctgtgcaaaatgaagttgaagctatgattttgcaatcccttgctactactcctttgatggagaagaggagtcgtgggcgacctagaaagaggccattggaaactgaaactgcagaaacccaagttgctgcatcggtggagaagcgagggcgtgggaggccaagaaagaagaatccatcggcagggtggtctgcaggaaccagggatactgcattaaaggggattaagagagggcctgggaggccaaggaaggccaggccttttgaaactgagtctgtgaaaactgcacttgaggtgtctagggacttgacagaagatgggcctcaaaaggatggggatcttgtgtcagggaagaaagcagatactcatggtgtggtttggtagtgtcaactgaggaggtagccattgctcccatggatgctgggtgcgcagacgccaagggttgatctgatggatgtgggcaccaagagtcactagtgctctgatggtgcgaacaagaacaaaaaagaaataatgatagtacctgaaaggctaaacagaacatgcagctaataagtgtgttcatggatataattaatagccatactgcaagtattgctatatgtttgcaccagtttgattactcgtatgtttttgagcagttccattggaaactgcgtttgatgggtttcacttttgggggttggatttaaatatctaacccacatcctctttctttgtcaaggactataacatttttgtaattttgttgcttgtactggaaactagccatcataaggttcattttgttttccagtttcaacatcttttagtgatatgttcacataat

SEQ ID NO: 137960 - DNA, 1327 bp, Zea Mays
atccctcacgcagtcaggagatccccaattccccattcaccaatccccagtattgtagtagggggaaaaacgagagaaaagaaacagcagtagcggaggcaagacgaaatggtggccgccgtcgcgtcgccttcgtcggcggcaccctccgccggccgtccccatcgccacctacatcgccgaccacttctccggcctccactcgcgccacgatgccctcctctccgtccatctccgcagcctcaagtcccatggccaacttcgcctcgtctctggcaactacttcgtctccaccgccgctcagcggcaggggcgaggctccaacatcccgcccaaccccaaccctgctccggggcagaagcgtggtcgggggcggcctcgcaagtacgcagattcagccccttccgcttcgatcccggcgtttcaggacgccaagcgagggcgtggacgcccacgcaaacgcaagagcgcccaggacccggtggcttcctccccctccccttcgccgctacagggagcaagtgttccgccgcctccatctggggtcaagagggggcgtggacgccctcggaaggacgcccttgtccctccgccttcctcttcttcgccactgctgggagggattgatccaccgcctccatctgggatcaagacgggccgtgcacgtcctcggaaggcccttgtccctgtgcgttcctccttttccgagctgctgggagctgttgttctaccacctccgtctggggtcaagcgtggccgcggacgcccgcgcaagagtgcctaccccgctgtggcgccgttggtgggagctgagaagggacctgctggtggacaaccacagaggaataccactcctctctcaccgacacctgctaccatgtcccacagtggtaagagtgagactgtccggctgcccaaggttgctgttgatatcagtgctttgcgtggttcctccatgaacatatctgcttctagtaacagtttggttggtgcgaagcggggaagagggcgcccacctaaggttgtggttgctgggaaagagaagatgcaacctgaatctgtgcagtccgtggatgcttcattgactaagagagggcgtgggaggcccagaaaggagaaggcattggaaagtggccgcatgaaagcctcgcagatgactgagggtcaacgtgaagctctgactgcagaccaagctggggctgtccaaaatgaagtagaagatagggatttgcaatccttgggtactcctttgacagagaagagaggccgcggtcgtcctagaaagaggccgttggaaatcgaaactgcaaaagcaggggctgctaag

SEQ ID NO: 137961 - DNA, 1325 bp, Zea Mays
atggacgaagccgcctccgcctccgctgccgccgcgcgcctccgcgcctccaccccgcgctccaagaaacgcacctcccgctccaagtcccgcggccgctccccgaaccctaaccctagctcccgtcgcgagcgcgccgcggaccacggctccgccgcgccctcgcgcaagagcgaccgcaagccgaaccgctccttcccggattctgccacgctcgccacggccatggcctcggtccccgccgcctcggccccgtcgtccggcggggggcgtggtagtgcgggcgccgtccagaagctctggagcgaggtcgatgaggtcgcgctgctcacgggcgctgccgccttcaaggaccgcactggcatcgcgccgcgcctcccggacatgggcgaactgttcgagtccatcaggggctccctcgcgccgcacctcgatcaggccaaggtgtactacaagctcaagcgtctcaagagcaagttccagcactccgtgctgggcgactccagtaccgcgcacgagcaccggctgcgcgacctgggcgcagccctctggggcgccgagctcacgcgccctgaagagaacgccgtcgtgacggctgaggagaccaccgatcccgatgagggattcattgacgaagatagggaggggtccgtgaagcttcctatggttaaggaggtgcttggagagtactggaggttgaacgggcagaccatgtcaggtgtgtcactggagaagggattggtgctacttgggtcgcagcaagctagtgtggttgaggttaaatggaggcgacagcttgaggcagatatgcgcatgcagatgcgccgacatgatctggaaaaggaggtctatggcctactcatcgatgccatcaaaggcctagggccttagcttggatgcggttgatggagtacatagctggatacataggtgggatgttattttgtaggctgatcaacccgacccgacctcgtggttgctaactgacagacctaacacggcgtgaaggggattgtgggggtttgcacgattcagtcgtgtcaatttatgtctagttgttgaactattcaatgtgattgtcaaactcgcttaggtctggagatgtttatttaactaatctatctgagaagaaagctttgcctatgatcagacagctttcacatcaacgctacacttcctgtaaatcattcgccaagatgacgctgtgtttcaggtgtagaatccagtttcctgtagttcagtttctcttcttgattacgctactagattctgtctggacatgtatatatgtatgatttggtcggagctgttcgctctccacttgt

SEQ ID NO: 137962 - DNA, 1180 bp, Zea Mays
ggactcgccttccccttccgcctcggctccccatctgctctccgatttctcgatatacacaccgaaattcgaatcgcccgcctgccgagccctcgcccccacaacgccgatgccttccaagcggcctaccccgcacgccatggacgaagccgcctccgcctccgctgccgccgcgcgcctccgcgcctccaccccgcgctccaagaaacgcacctcccgctccaagtcccgcggccgctccccgaaccctaaccctagctcccgtcgcgagcgcgccgcggaccacggctccgccgcgccctcgcgcaagagcgaccgcaagccgaaccgctccttcccggattctgccacgctcgccacggccatggcctcggtccccgccgcctcggccccgtcgtccggcggggggcgtggtagtgcgggcgccgtccagaagctctggagcgaggtcgatgaggtcgcgctgctcacgggcgctgccgccttcaaggaccgcactggcatcgcgccgcgcctcccggacatgggcgaactgttcgagtccatcaggggctccctcgcgccgcacctcgatcaggccaaggtgtactacaagctcaagcgtctcaagagcaagttccagcactccgtgctgggcgactccagtaccgcgcacgagcaccggctgcgcgacctgggcgcagccctctggggcgccgagctcacgcgccctgaagagaacgccgtcgtgacggctgaggagaccaccgatcccgatgagggattcattgacgaagatagggaggggtccgtgaagcttcctatggttaaggaggtgcttggagagtactggaggttgaacgggcagaccatgtcaggtgtgtcactggagaagggattggtgctacttgggtcgcagcaagctagtgtggttgaggttaaatggaggcgacagcttgaggcagatatgcgcatgcagatgcgccgacatgatctggaaaaggaggtctatggcctactcatcgatgccatcaaaggcctagggccttagcttgggtacagattttatcattctctgttatctgtgggagagatcgatttatttctgctgtttcaattgcttggactaattaggctgctcttttgcttatcatcagtttacaattggatcagggtgcaaatgctgttaaacttacatcgg

SEQ ID NO: 137963 - DNA, 1073 bp, Zea Mays
atgtccacgggcgcgggcgctggcggcggcggcgacgccgttcgccggccccgccggcggacgtggcgactgtactggtgctacgtgtgcggccgcgcagtgcgcgccatctcgtacccggcctcggaggtcttctgcccgcgctgcttcggccgcttcctgcacgagatcgacctgcccgcgccgcggcccgtggtcccgccgcccgaccagttcttccagccgccgttcctcccgcacgaagggcctcgccgctgggtcatatacaccggggccaccgacgccagggacgaccccttggccgacacgggcgcaccgctcccgcgccgccgccggcgcgtcccttcgccgccgccgccaggtccgggcccggcgactcggcgcccagacgaggacgacgacgtcgacgcgccactgccactgccaccgccaccgccacccctaccaccggccgtcgtcggctgggacgagttcttcgccgggccgaacggcctgaacgccctcatcgagcggctcacgcaggacgaccgccccgggccgccgccggcgcccgagtcggccatcgagtcgctccccacggtccaggtctccccggcgcacctgtccgacggctcccagtgccccgtgtgcaaggaggagttcgagatcggggaggccgcgcgggagctgccgtgcaagcacgcctaccacacggactgcatagtgccgtggctccggctccacaactcgtgcccggtctgccggcaggagctgccgcagccggcggatggtgggtcgcaggatgctgcccgcgaagaagggagcggcgagacggaggcgccgccggcgccggggccgctagtgatggccggatgggcgcccctggcttggctggcactgccgcgcgggccggacggcgacggtttggcgaggaatgaaccggatgacggtgacgcccgccgcagcggtgtttgtgcgccggctatcctccagtcctttgccgtcgtcgctgcttgctttttcatcctctcgttccttgtttgacatgtgtcggcttacgagctggaacagaccaaatgtgatgacagcaagac

SEQ ID NO: 137964 - DNA, 2006 bp, Zea Mays
tctccatccttcccttcgttcgtgctcttcttcttgttattccgtttatcggtctggcgcagaaagaaacaagagatgcgatctagtctgctaccggagtccccgtacgtacccagtgctccgcggcttcggcaggggtgctgctggctgcagacgctgatctgtatccaccggccaccgccgttcgtgtttctccatgtaaacggtggaggattttgtgtctgttggctgctgcttccaatgcgctccacgagagacgagaccctctctgccagttcccttgtgtttcaaaacagagctcgagttcaaattgcttatttagtttcctttttctcttcttacttattgacaacttgttcacagggttcatcagcagaagctgcttgctccgccgccgccgccctcttcctcctctactggttgtgtctcccaaatatcttgcctttttgttgcattggactcttctgtggttagaatggcagcacccaagcccatttctcgtcttatttctcacgtcattcttgatttggatggcaccctcttaaacacagattctgttgtaagtaaggtagtaaaaccatttattctaaagaatggaaaaacgtgggatagcaagaaagctcacaagctagttgggaagacaccttatgaagctgcagctgttgttttagaagactatggactcccttactctacagaagagttcctctcgatgattactccgatgttcagtgagcagtggtgcaacttaaaaccacttccaggagctaatcgactgataaaacatttaaagactaacggggtgcctactgctttggcttcaaactcaccaagatgtaacatagaagccaaaattttcttccaacaagggtggaaagagtctttctctgcaattgttggtggagatgaagtagagaaggggaagccatccccgaatatatttttggaagctgcaaagagaatgaactgtgctccttcaaattgcttagtaatagaggattccttgccaggtgttacaggtggaaaagctgcagaaatgcatgtcatagctgtaccttcaatacccaaaaagactgctgagttcagttctgctgatgaggtgatcaattccctccttgatgtgaggcctgaaaagtgggggttgccaccatttaatgattggattgaaggtaccttaccaatagaaccatggtttattggtgggcctgtgatcaaaggatttggccgtggttctaaagtactaggaataccaacagcaaatttacccgcggagaatttttccgacgtagtgtcagaacatacatcaggggtatactttggctgggcaggactttcaacgcgtggtatatataagatggttatgagcattggctggaacccatatttcgacaataccgagaagacagtagaaccttggctgcttcataatttcggcgaggacttctatggcgaggaggtgcgccttgccatcgttggctacataagacctgaggccaactttccttcgctcgagagcttgatagagagaattcacgaggatggaagagtagcagagaaggcactagacctgccaatgtatgccaagtacaaagactcgccttatctgagaaacccttcgaagcacgggagtagtactaccggtgggacccagtctgagatggattccaagtgacaacccccctacagggccactagataatatgttacttattttctctatggtaaatgcgtcggtgttgatgcagaaacaattggactctctgtgagctaactcgcttcttaattttcggaagtagatagtattcctcgaagtggtgtttttactttgtaatatagaaaaaaataaagtggggttgttgaaacttgagagtcaaattccgagacgttatgcacgttttgatttctgaattaatcgattggtatcacttgtactgtttttatacgatgatgcttgaaccattcatttgtcattttaatttgatatacttgaagtcaacaatatgctt

SEQ ID NO: 137965 - DNA, 1688 bp, Zea Mays
cgcatccgtccgggcctcctcgtctccccagccccgctgccgccgggttcatcagcagaagctgcttgctccgccgccgccgccctcttcctcctctactggttgtgtctcccaaatatcttgcctttttgttgcattggactcttctgtggttagaatggcagcacccaagcccatttctcgtcttatttctcacgtcattcttgatttggatggcaccctcttaaacacagattctgttgtaagtaaggtagtaaaaccatttattctaaagaatggaaaaacgtgggatagcaagaaagctcacaagctagttgggaagacaccttatgaagctgcagctgttgttttagaagactatggactcccttactctacagaagagttcctctcgatgattactccgatgttcagtgagcagtggtgcaacttaaaaccacttccaggagctaatcgactgataaaacatttaaagactaacggggtgcctactgctttggcttcaaactcaccaagatgtaacatagaagccaaaattttcttccaacaagggtggaaagagtctttctctgcaattgttggtggagatgaagtagagaaggggaagccatccccgaatatatttttggaagctgcaaagagaatgaactgtgctccttcaaattgcttagtaatagaggattccttgccaggtgttacaggtggaaaagctgcagaaatgcatgtcatagctgtaccttcaatacccaaaaagactgctgagttcagttctgctgatgaggtgatcaattccctccttgatgtgaggcctgaaaagtgggggttgccaccatttaatgattggattgaaggtaccttaccaatagaaccatggtttattggtgggcctgtgatcaaaggatttggccgtggttctaaagtactaggaataccaacagcaaatttacccgcggagaatttttccgacgtagtgtcagaacatacatcaggggtatactttggctgggcaggactttcaacgcgtggtatatataagatggttatgagcattggctggaacccatatttcgacaataccgagaagacagtagaaccttggctgcttcataatttcggcgaggacttctatggcgaggaggtgcgccttgccatcgttggctacataagacctgaggccaactttccttcgctcgagagcttgatagagagaattcacgaggatggaagagtagcagagaaggcactagacctgccaatgtatgccaagtacaaagactcgccttatctgagaaacccttcgaagcacgggagtagtactaccggtgggacccagtctgagatggattccaagtgacaacccccctacagggccactagataatatgttacttattttctctatggtaaatgcgtcggtgttgatgcagaaacaattggactctctgtgagctaactcgcttcttaattttcggaagtagatagtattcctcgaagtggtgtttttactttgtaatatagaaaaaaataaagtggggttgttgaaacttgagagtcaaattccgagacgttatgcacgttttgatttctgaattaatcgattggtatcacttgtactgtttttatacgatgatgcttgaaccattcatttgtcattttaatttgatatacttgaagtcaacaatatgctt

SEQ ID NO: 137966 - DNA, 107 bp, Zea Mays
ttttttttttggagttgtcagctgccgtcagagtccctcgctttgctgctgaaccctagaacttgccaaggcatctgttggtgcgcgtgttagctattattttagcc

SEQ ID NO: 137967 - DNA, 208 bp, Zea Mays
gatccaaggccaacaaacagcatggcgcgcgtgttgagggcatggggaggaggtgcgtggcctccatcaacgctctcctacccatctgctccgcgatccccgccattcttgtcgctcaccttccatcgacgacgccacatcgacctcagcaacctctgcccacctacaagaacaaccggagttgagtggcatgatagtcttctgctta

SEQ ID NO: 137968 - DNA, 583 bp, Zea Mays
atggccggagctcggacggcgctcggtcctgccgcctgccccaacgtcgactatctccagctcgcccccgacctcttctctccctgtcgcgtcgctctctctctgctcgctctcctccatggccgccgtgggctcgccggcgtggtccttgtcctggccgccgtggtgccgcgtgcccatgtgccagcgcatgcccagctcctctccgtctgctcggtcttcttcctggagcgagctctcttctctcccatagcgtccggcatttctccctgtcgctccttccatgccgcgctcggactgaagcttccctgcgcgacctgccgagcctcttcctctgccaagtccctttccccgcaagcccttgccctgctctctgtcagccgcacgctttgcgccctggctccctcgccatcgccggagttcttctgttcggctccagctcgatttggtcttcagctttctgcgcgcgcgaatccgccgtcgcgtcttgctctctggtggtcgagctcgttcagctcgcctcctgtcttcaaccatggatgtagatgtcggccgccctggattgttcgcaaactccgccgct

SEQ ID NO: 137969 - DNA, 583 bp, Zea Mays
atggccggagctcggacggcgctcggtcctgccgcctgccccaacgtcgactatctccagctcgcccccgacctcttctctccctgtcgcgtcgctctctctctgctcgctctcctccatggccgccgtgggctcgccggcgtggtccctgtcctggccaccgtggtgccgcgtgcccatgtgccagcgcatgcccagctcctctccgtctgctcggtcttcttcctggagcgagctctcttctctcccatagcgtccggcatttctccctgtcgctccttccatgccgcgctcggactgaagcttccctgcgcgacctgccgagcctcttcctctgccaagtccctttccccgcaagcccctgccctgctctctgtcagccgcacgctgtgcgccctggctccctcgccatcgccggagttcttctgatcggctccagctcgatttggtcttcagctttctgcgcgcgcgaatccaccgtcgcgtcttgctctctggtggtcgagctcgttcagctcgcctcctgtcttcaaccatggatgtagatgtcggccgccctggattgttcgcaaactccgccgct

SEQ ID NO: 137970 - DNA, 279 bp, Zea Mays
gagatttatagtttaccaagggaaattagttcattttcccttgggaaaatagaaattcctttggaaaatgaagtttccaaattagttctcaagaggtcgttttatcctaataatgtctaaacaaaaaattattgattgtgtactatttagcgtttaagatatgatatttgactttttggaaatggatacatattacatgattaattaaggaccataatatatttatttttataacgttatctagtctaatacacttatcattctagaaaaaaaagaaaa

SEQ ID NO: 137971 - DNA, 1696 bp, Zea Mays
atgagagtcaacctttccaaagacctgttgaggtactccttagtggagaacaaagttcttaaggcgtcacttcgcctaggtgacaaggtgctcactggtgataaggtgccactgatgcctagccaaaagagtggagtgaggaaagaggggcctcagagaagagcaggaggtgaattatcagactatctccagcagctgtcctatctcatcttctgtcccaaactccactctaagtgcaaaagagcgatttgcacggccacatacacgacctgctggacagcctcaggaagcatgactatctttcctcctcgccccatggtttttggttctagcacaggcacagctctgctgaccaaccagtgcaattgcctgtgcagtcgtgcagatctgcccccactcaactgtggcggtggtgttagggactggagaagcagtgcaccagggggagtagattcgagaaggggcccagaccatgagcttttcccagctcaggaagcggtgctgcacattcaaactcatattgtagaccttggcccagacatggataacattatcacaacaagactacttgtacctgcaagtgaaattgcttgctttgatggaagggaggggtcattatctgatatacagaggcagactagtgcaaacgtgcagatattaccaagagaagatcttccgtcatgcgctttagagtctgatgaactcatacagattgttggagagattaaagctgctcggaatgctctgatacaagtaacaacaaaattaaggagttttctataccgtgagatgcctgatcctattcaagttggcaatatcaatttacatggagccatttctccagtagcaggctcacctcgaggaccataccaaggaaatgatatcccaatgggtgcttatcaccaagcatcgcaactggcaacttcatggcattcaaaggatagtggaggcagtgcaagtggatcatttgagcaaggcagcaacattaatgatgatataaggcaaagtgctacaaaaagatttgccgttcctctagtgactagaagcacactagaaattgtcataccaaacagtgctgttgcaagcctcaccatgagagctggtagcaagcttgctcaaataagcgagatatctggtgctgcagtaacgctagccgaggatagatctgacatcttgcagaaagttgttcgaatatctggtacccctgagcaggctagcaaagctgagaatttgctgcagggatttatccttagcattccagatgacattccttcaggttaatcgaagatactctgcatgtcatagttgttaattcgtcaattttcttttatattttcgaggcagaatatgtcgagtcatgtgattatttgtttaattgagcagcatgttttcatgtgcggagacatgcatgccattttctttgtatctttgtagctgtgaccctaaatttcggttgtctccgaagacactctgcatgtcatagttgttaattcgtcaattttcttttatattttcgaggtagaatatgttgagtcatgtgattatttgtttaattgagcagcatgttttcatgtgtgtagacatgccattttctttgtatctttgtagctgtgaccctaaatttcggctgtctccgtttaactggccgatggggctgtaagattagcaagtgttttatagactgattggacattaa

SEQ ID NO: 137972 - DNA, 1771 bp, Zea Mays
gcaccaaatttctatgtacaccgtatatgttctctcggtcaaaatagaatacaaatccttttcccaaatcccacacctatggcgatcgtcggcggcggcgggagctggagcatccacggccgcgctgatgtcacatcccgctacgaggtcctcggccgtgcgggctccggttcctatgctgatgtctaccgcggccgccgccgatccgacggtgctgctgtcgcgctcaaggaggtccacgacgctgtcagcgctcgcagcgaggtcgaggctctcctcgccattcccccttcccccaacgttgtcgcactcatcgaccacttccccggcggcgattgcgacgacgacgtcctcgtcctcgagtggctcccgctcgacctcgccgccgttgtgcgtgacgcgaggaggcgcgcgggcgggggcgagggaggggaaggcatccccgcctcgcaactcaaacggtggatgctgcaggtgcttgagggggtcgccgcgtgccaccgcgccggcgtcgtgcaccgtgacctgaagcctgagaacctgctcatctccgaagacggggtgctcaaagtcgccgattttggtcaggctaggatacttcagcagtcagcacctacatttcaagaaatgtacccacacgagcaaagttcaggcatggaaacatgggttccacaacaacaaccagcagtgctacaagggacagaagaggaaccaacatcttatgaatcagatgctactgctggtcaggagccagagaccctaactgctgctgactacctgcgtgaactggaccaactccgagaaaaatccagcgatgttgacaaaatgagctttcaggatgaacatgcatcctgtcttgccacgtgcagcacaggagacattgaagatgatccatacccagcctcctactctgacgatatggaaggcataggtgaagattctggtgccttcacttcttgtgttggcactaggtggttcagggctcctgagcttttatatgggtcaacaaactatgggctagagattgatctctggtcgcttggatgcattttggcagaactgatgaaattggaggctttgttcccagggatatctgatattgatcagattagtagaatcatcaatgtcctgggcgatataacagaagaaacctttccaggctgttcaaacttgccagattacaacaagatttcctttaacaaagttgagaaaccgacaggccttgaagcatgtctgcctaacagatctcctactgaggttagcatcataaagcagctaatttgctatgacacagcaaagaggaccagtgctgttgatctgctgaatgatcggtactttaccgaagagcccttgccggcacctatagaaggattacatgtcccggcatcaaaggacgaggatgatgacagctcaactgaagaatggggtaattacagggatggtgtctctcgggttgactttgatgagtttggtagtatggatgccaccaaaactgagaagggtttcagcatacagttttcgtgacgaagaaagacgtagacgtacggaccatgcgtgccatgtccaaactaagaccatatcatggtatttatctacatgggagttgaattgctgtcaacatagacgaacatcagtaagcgatcaaaggttgtgcaatgttgctttgggtttaacatttttttagtttctatggaactttgtgattctttgtacggcagaaccagttttttccctggcaagaataaaactgtgtgtggtagtctgaagttcc

SEQ ID NO: 137973 - DNA, 660 bp, Zea Mays
atggatgataatggtgatcaggttataaagaagcaaacaagcgctgttaatagcagttcctcaccatctaatcaagagaatggtggccctgttcctatgcagacaacaagtttttctttgcttgcatctctttcgtcagtgggggtaaccaattcccctcccaggacagaagggcttagtgcaaccttgtctcatcttccacagtccttgatcggctgtcattctgtgcatcttgctggtatcaatccagagcatcaaagtgagaagccagagcagcagtgcatagtagctagtgaggaaactacgcctaaaaaacaaattgtaccaatacctgctatcaaccatcccaaggccgtttcagtgcaaggtgatgggctgaatttgaagcagtatacagcagaaagtgaagatgctatgatcgtctctgatatatgtgctttggatgtgaccatccaacctcatattaacaacttttcagagcagggaagtgatatgatacaggagcaagtcggaacaggcgctgggacggttatagccgaaggtgtcaacaacgatgtgtttgcagcggctactaccactatggaaaaacttgaagtctcaaaggctgaccagaggattgaaggtactgtgcagttggtacagcactctgcaaagcgatga

SEQ ID NO: 137974 - DNA, 109 bp, Zea Mays
ctattggtgtggatatgaaaagctgcaaagtagtggttttacatcctgggtgtatataatattttttctaatatgtagtattagtttttacagctttatctctctcttc

SEQ ID NO: 137975 - DNA, 1536 bp, Zea Mays
caacgaccacctatcagcccattccaagcatcaagcaggggcttccacctgagctcctcccacgcgctgcgcctcgcctcggcctgcgcctccgtctccgcctcgcggcctgcgtcccctgcaaccaaagtttctgaagctcatttgcacgaacaagtggagtggagagaaaaatattttcgttcactttaccgtcgaggcccccggagggctgatcccgttccagctcctcccgctgcttctccctctccagtctcctggcgaagttcttcgccgccgcaaacacgttcccggggcgctcccacccgccgccgaatacgccgtggccttccttcggctgcggccgggacaggaactccagcacgggcaggtcgtggctctcgacccagtggatgcagtccacggggcaggactccacagccagctgcccttgcacaaacaacatacagcagttcaactaatcagcagagaactagccaatgttccaacaggcaagcataaacaaaaaagcattagacgaaggggaaagctcactgattgagtgctgaccatgactagcaagcaacgcacaacactctggtggtcttacctcccttcgcttggagcaacagcgttgcagcacggatcaatgagcggagaggctgctcttggccttgtcatggtcgcccaagcaactatccatgtgccatggctgatgcttgtgataggaactgagcagggcccgcatcatggtcattgttagtgtatatgtagttcctttcttgtattatattttctctagaatttagggttctctctgtaaacttaccctatgtacatttgccctttgtgccctacgcaatagacaagttatcatttcattcctctctaacatggtatcagagctagggctcactacgccaccatcctcgtgccttagtcatctagcatgagcacaaccttagccccaccttatgcagcagcatgacacgatgtcgcacatccataaggatctcttcggccttacctccacaggaactgctgtggagcggtggacttcgtcaccaccgttgcttggccgtgcatgagctcttgcgtgtgagcgtgttgtggcggctgtgcagggtactagggttacgggagaagagaggcagcatgcatggggaatcagggaacagctattggtgggctgagctatatcggaacgacatatcaaacaaacgcaaagagaatctgaattgttgttgattttttttacagatactccagggatacgtatccaaacagtatccatgtcatatacgtatccaacgaggcatactcattcaatcgcatagggtttgtatccggtgctcaaaggggtacggtgctcacgtgcacagtaatgggcataccagggcttttgcacattgtcaaagctagaaacattactattggaagcatataatggacagaacaacatataccattagcagaaaaaggcacactagtatacaatttgtctgtatgttttttacagtaactcatttttttctgaattgatagtatagcacaata

SEQ ID NO: 137976 - DNA, 876 bp, Zea Mays
caacgaccacctatcagcccattccaagcatcaagcaggggcttccacctgagctcctcccacgcgctgcgcctcgcctcggcctgcgcctccgtctccgcctcgcggcctgcgtcccctgcaaccaaagtttctgaagctcatttgcacgaacaagtggagtggagagaaaaatattttcgttcactttaccgtcgaggcccccggagggctgatcccgttccagctcctcccgctgcttctccctctccagtctcctggcgaagttcttcgccgccgcaaacacgttcccggggcgctcccacccgccgccgaatacgccgtggccttccttcggctgcggccgggacaggaactccagcacgggcaggtcgtggctctcgacccagtggatgcagtccacggggcaggactccacagccagctgcccttgcacaaacaacatacagcagttcaactaatcagcagagaactagccaatgttccaacaggcaagcataaacaaaaaagcattagacgaaggggaaagctcactgattgagtgctgaccatgactagcaagcaacgcacaacactctggtggtcttacctcccttcgcttggagcaacagcgttgcagcacggatcaatgagcggagaggctgctcttggccttgtcatggtcgcccaagcaactatccatgtgccatggctgatgcttgtgataggaactgagcagggcccgcatcatggtcattgttagtgtatatgtagttcctttcttgtattatattttctctagaatttagggttctctctgtaaacttaccctatgtacatttgccctttgtgccctacgcaatagacaagttatcatttcattcctctctaacatgg

SEQ ID NO: 137977 - DNA, 436 bp, Zea Mays
gattatggagggggacataggtgaggtcccctcggtcgtagttcctcttggattggaggtctccgcaactggtggcgctccagcggtggggccgtccattggctcaatggccccgccgcccctagcccctcgctattgagtgcgacgaaggcaggctactcgagcaaggtagcatcggtgatggtggtggtcgtcccgactggctcatccagtggcgctgcagtaatggagacagccaaggttctacctcctccacctcctaccacgcaaatggtggtgctccccacgctgcttgccccaagggaaggatctagggatccccctcttttactattgagggctcaaaggcagaggagcagaggttggtcaagggggcctccgtccgggctaccaaaagcttggagataatcgagggctccctcgtcgctattgggga

SEQ ID NO: 137978 - DNA, 592 bp, Zea Mays
atttcatacaattttttagttgcgatttttagtcccattgcaacgataggcacatacctaattttaacttatagattcagctgtttctagttttaacatatagattcagctgtttcttgtgtgagaacagaaacagataaagcttttttcaacaatgatcagctgtgcctaaagccgcaagcaccacagccggagaaatcctctcgtgtggtctcttcagctctcagacggcaagacgatgctgccgccgaggtccgccgccgccgcgccgtgctcggttgcaggacttctgttccaccgattctcatcctactcgtcctcttctgtctattctgtccgccaccacgcctcgtctgctctctcctcccagccctccacccgccccaccaccacctggtcctcttccccccattccagcagccgcaggatcagggggtttgcggcctgggcttcggcgccggggccggcggggtctgcggattccctcgctacaaaggcgctagaggctaagatcaaggagcagctggaggcggacacagtcacggttgtggatacctctggagatggccgccatgtttgtattgatgtataa

SEQ ID NO: 137979 - DNA, 588 bp, Zea Mays
atggtggtggtggtggactttgtggagtattcgaaggctgggagtttggctggtcaacatcgctctgaggtggcggagattgagatgacgactgaggaggagattctctcgacggcgaaggcgaccagcctgacggtgcgggaggggcctggtggagttggcggtgacgaggacgtcgagttgccgccaccgctccaagaagatggcgaaggtggtgggcttggtggcggctgcgaggacggcggtggaggtgacgatcgtgatggcggagggctagaggaggaggacgacggatcttgccaatctgatggtggcgttgatcttgagccctctgagtctgagcttggagttggaggtgggctgctactaggccagccattcctcggtttagggggtgagcttgagcttgatgaaccgcggggtgcaggcgccgtggaattgttgccacctccatttcctccgctcgacggtgacgagctcggcgacggcgctatgtcggacatgctctttttcgtagatatgctgcctcttttattggttcacgatccaataagttggtactacgtagctctgccgccagaaacataa

SEQ ID NO: 137980 - DNA, 113 bp, Zea Mays
caaaatggcatgtacagaaaaattgcagaatccacaattttatcctttaaatgaaacgaaaaaatatcaaatgttgctatcttatcttggcaaaagaaaaaaatataaaaata

SEQ ID NO: 137981 - DNA, 856 bp, Zea Mays
gctattatgttcttattcttctccaaacccgatgatcgctgtcgtctaatctaccgcgcgcaagcctcccctcggggctagatctccggtctccgcttgcccaatttccaccactgaggcgatgcaggaagccaagcacctcaccacctcaaagcttccgccgcaatcccaatcctcatccccatccccttcggctcccgccgcgaaccctcccccataccatcacgactatggtacctttcaccggccgtttcagccgacgctgcccgtcgtaggccccgcctaccatgactaccatgcctctcctatcgggttcggcagccaggggttcgttgcctccccgggcgccgtccagcagcaggtcttcgtggagggcatccccgtccgagagccgcccctaccgttctgcggcgtcggcgtcggctggtttttgttcttattggggttcttcttggcggcaatcccctggtatgctggtgcgttccttctattctttgttgctttggaccacagagagaagcctggattaatcgcatgcaccgttgctggcatatttgcactagttccattcatcctgaacggtatcagattgaaccctttctggtgatcagtgcttgccaatccagatccacatgactaatgttttcagcaccacattcgatatgttcatagctgtattattttgctcaaacttgcgaagaacaaaatatatgagcttatgtgtaaaaaggaattgccatgctgttttatgtccgcagcaggttcatgccctgtgatatgtgtaatcatgaattgtacagtttatctgtaccgcagcagtttacgagaggtctagtaaaagcacattttacccatc

SEQ ID NO: 137982 - DNA, 755 bp, Zea Mays
atgttcttattcttctccaaacccgatgatcgctgtcgtctaatctaccgcgcgcaagcctcccctcggggctagatctccggtctccgcttgcccaatttccaccactgaggcgatgcaggaagccaagcacctcaccacctcaaagcttccgccgcaatcccaatcctcatccccatccccttcggctcccgccgcgaaccctcccccataccatcacgactatggtacctttcaccggccgtttcagccgacgctgcccgtcgtaggccccgcctaccatgactaccatgcctctcctatcgggttcggcagccaggggttcgttgcctccccgggcgccgtccagcagcaggtcttcgtggagggcatccccgtccgagagccgcccctaccgttctgcggcgtcggcgtcggctggtttttgttcttattggggttcttcttggcggcaatcccctggtatgctggtgcgttccttctattctttgttgctttggaccacagagagaagcctggattaatcgcatgcaccgttgctgtaagtacccaattgctaaactaaataacaaaacgagagttcttacatgttcttcatgccggagaagtgttctctagttattgttgtatgtgtgatacatatagttacttatacattgatataattctgtgctcttgcatcctacaattaaaatacaccatctgtactgttgctggatgttagctgccactgccattataggtaccagtgcact

SEQ ID NO: 137983 - DNA, 118 bp, Zea Mays
gttcttatggttgtgaaagaaattgaagtgggtttgatggagttagtacctatatgttatcaaaattacaacaacattacaataaaattgcacaactaaaagtgctcttatttttaat

SEQ ID NO: 137984 - DNA, 590 bp, Zea Mays
aatctgcccactcccacaactactccccctctgccgctgccggaaattcatgttaactatttttttggtgcgtctacatcagaatctcataagtcaatttgtcagtttattgagacatccaacttgcatgagttgatcaacaagcccatccctggttcctgatggaggcatcatcttccttgcatttccaagtttctggttttagtttgtccaagatatggctatgcctttttctggtactcgttcttcagaactgcagcccagcactttcagattcaccatatttggtcggtatggggagctatgacataacagggccagcaacagacgttaacatgatgggatatgcaaatgctgagcagattgcatcaagaattcactttaggctaaaggctcgtgcctttatcgttgctgagcctaacggcaagcgtgtcgtgtttgtaaatcttgatgcttgcatggcatcacagcttgttactataaaggtgcttgaaaggcttaaagcaatgtatggagacctttataatgagaataatgtggctatcagtggaatccatacgcatgctggtcctggtggttatctgcagtag

SEQ ID NO: 137985 - DNA, 1010 bp, Zea Mays
ataaaggggcattggcttgggatcacctctgcatctcgcctgggatctgctagcttgatctctcctagtcctagcccattcgcttctcctgttcgtcgctcttaatttgcttgctcgatccctggcagtggcagctgctgcaatggcttccggtggcgcgtcgtcactggccttggccgcgctgctcctcgtgagctgcgcctcggcggcggtggcgaccaagtacaccgtcggggacgcgtccggctggacgaccaccggcgactacgccacctgggccagcggcaagaagttcaaagtcggcgacagtctcgagttcaaatacgccggcggggcgcacacggtggacgaggtgagcgcggcggactacgccgcctgctcctccagcaacgcgctcagcaccgacagcgccggcgccacgaccgtgaccctcaagacggccggcaagcactacttcatctgcggcgtggcgggccattgcagcagcggcatgaagctcgtggtggacgtggccaaggcggtggccgccccggcgccggccccagccgcggccgcggccccggctccggccgcggacaccgccccagacgcccccgacaccacgccgtcgaccccgacgtccccctcgagctccggcggccgcacgcccaagagcccagacacgacggtcctctcgccgccggacaagaagtccacctcctccggcgccaccgggctcagcgccgcggcgtgggccggcttgggccttgccgggctcgtggccgtgcacctcggcgcgttctaggccagcccgctggcctggccagggaggagacagtgccgtgtgctgttgttaggctgcacgtcatggattggattggtgtattggttgagggacttgactgcttaccagagagagatctcttttggttcagggaactgtgctgtagacctgtagttggataccttggatgttatgctatcagttttgctgttgttatcacatctctttcgtgattttcttttcgata

SEQ ID NO: 137986 - DNA, 1394 bp, Zea Mays
aacacggaactgaaacgggttgacccacatcacaattcacaacaccagttgccaaccccacgcacgctctgcgacgcgcgagttccccttccccactcccagcttccgtttcctcggaccccaccaccgcgcccccattcctcagagctcagatgcagccgcagcccgccgagatggaccccgccgtcgacgcctccgcctccaccgcgcaggccgactccaacgtcagcgccgccgtccccgcacccgatccctccccgcccctgccggcgccggaggctgagacggtcgatccgccgcccccgccgcccgcaccagcgcccaagacggtcacctggagcgagaagctcacgtccgagtcgccgacgcacgtgcacgccgccgctgcggcggagtccagccagtacgtgtcccgcgggcccgcgtcctcctcgtctaaaggcgccgtggaggcgatgagggagacgctgtcgaggtgggggaagtcgtggggggagaccaccaagatggtcgagagcctcagccgcgacacgtggcaacacttcaagactggacctagttttactgaagctgctatgggacgcctagcacaagggactaaagttttagcagaagggggctatgaaaaaatatttaagcagaccttcgaagttcttccagatgagcagctgaaaatatgctttgcgtgctatctctcaacatcggcgggtcctgtcatgggagtcttgtatatttctacagcaaagattgctttctgcagtgacaatcctctgtcatacaaagctggaaataaaactgaatggagttactacaaggtggtcattcctcttcaccagctaagagcagctaatccttcagtaagcaaattaagtcccgcggagaagtacattcaggtcgtatccattgaaggccacgagttctggttcatgggttttctaatgtacgacaaggctgcaaccagtcttcaagaagccttggctagcgcacgtgagttgcaaccgtgaagacaccggggtaaatggtgtttcttccggttacatcagtttccacatcttgagttcaggctgggtcgcaaggattccttagcttctgagtgtctcctgtttcagatccttttagctgaagcctttgacacggtacactcactagcttgcatacgcgtcagaaatgtctgttgttcctgtcaatgttgtaatcatgagatgtatgtggagaaagaatgcatgtcaaacatttaaatgtggcagaactaatgtgggaacttgattatcaagggcctagaaaagttagggggaccagaaggtcgaggagaaacaagcggttggtgatgcgttatatttttgtcgattgacaaagggagccaggatttttaaatgtttctctgcattcacacc

SEQ ID NO: 137987 - DNA, 813 bp, Zea Mays
aacacggaactgaaacgggttgacccacatcacaattcacaacaccagttgccaaccccacgcacgctctgcgacgcgcgagttccccttccccactcccagcttccgtttcctcggaccccaccaccgcgcccccattcctcagagctcagatgcagccgcagcccgccgagatggaccccgccgtcgacgcctccgcctccaccgcgcaggccgactccaacgtcagcgccgccgtccccgcacccgatccctccccgcccctgccggcgccggaggctgagacggtcgatccgccgcccccgccgcccgcaccagcgcccaagacggtcacctggagcgagaagctcacgtccgagtcgccgacgcacgtgcacgccgccgctgcggcggagtccagccagtacgtgtcccgcgggcccgcgtcctcctcgtctaaaggcgccgtggaggcgatgagggagacgctgtcgaggtgggggaagtcgtggggggagaccaccaagatggtcgagagcctcagccgcgacacgtggcaacactgtgagatctcagcacccctgctaagtgataacgttctattttccttcgaaaggtccattgtgttggtttcttcgcatgattcattccttgaggtgcacggattggtaggatgcactagctttctaactatcgaaggaaagaatctccatatatgaagttgcaaatgtaaagtaatgaaagctgtggtagactccttttgagaattatgttgggggttgtggagccggggaagcagaatatttgaacctttggcccaagaaaagaagcgta

SEQ ID NO: 137988 - DNA, 1839 bp, Zea Mays
ggtgcaaaaatgtgaagtctcgcaggccaaaacccaaatggtcccccatgattttagaaaatatgaccataaaaccctccgaacccactccgccgcaacccactagctgctctggctcccccgaggcaatcgagtaatcgacgaaggccaccaccacctccacaccactttgcctcgagaaggttccaccaagcctctcggctagggtttggggactttgggggcgatcgcaatggagggccgcggcgcggaacaagcacccgaggcggcggcggaggtgaaaaatccgaggtgcttcatggacgtcaccatcggcggcgagatggaggggaggatcgttgtagagctctacgcttccgtggtaccgcggacggcggagaacttccgcgcgctctgcacaggggagaaaggcatcggcgccgccagcggcaagccgcttcactttaagggctcatgcttccaccgtgttattaaagggtttatgattcaagggggagacacaactgctggagacggaactgggggagagtcaatttatgggtccaaatttgaggacgagaattttgttttaaagcatgagaggaaaggaatgctttcaatggctaattctggtcccaacacaaatggttctcagtttttcatcactactacacggacacctcatttagacgggaaacatgttgtttttggtagagtgatgaaaggaatgggggtagttcgctctattgagcatgtttctgtcggagaagctgactgccccactcttgaagttaaaattgttgattgtggggagcttcctgaaggtgctgatgatggagttgtaaactttttcaaagatggtgatacgtacccagattggcccaatgatcttgaagagaagcctgctgaggtttcatggtggatggatgctgtggagtctgctaaagcttatgggaatgacaatttcaagaaacaggactacaaggcagctctcagaaagtacaggaaagctctgcgctacttggatctttgctgggagaaagaagagatagatgaagataagagcacagcactgcggaagaccaagtcaataatactcactaatagctccgcatgcaaattaaagttaggagattcaagtggggctttattagacgcagattttgcactgcgtgaaagggagggaaatgctaaagcttttttccgacaaggacaggcacacattgcacttaatgacattgatgcagccgtggagagctttaaacaggcattggagttggagccaaatgatgctggaatcaaaagagagctggctgctgcaaagaagaagattgctgacagaagagatcaggagcggaaggcatttgctaggattttccaatcttctggaaagtctgacaagagcaacgaagagaataattgatctacagttcctttcccccgtctgaaactttgcttagcttaaatctggggcacattggaacaggagtctcatgggagtctgctctgcaaaaaaacgcagattactgatctttagatagaaggaaacatagtggggggaaaggaagcttttgttttcttgtactacagaagtagcaattcgtgcttttgtcccggtcttagtttattcaggaaacggacattgaatttaaatgtgcaatttttagacccaacctgacgattcacatcttttgtgggtagttcgcccgtttcactttcgtggtgttttcttgtagccttttgtctgcttgttgccagactctaaggccatgtgtgccacacttcatctcacagctttacatattcaagcagtttctgcagcagctttttagtccagctgcttatctcaatgaactaaaa

SEQ ID NO: 137989 - DNA, 228 bp, Zea Mays
atggccgaggtggacatcgtcgacggcgagaccgggcgcagcttcccccgcgacgggtccacgatgggcgagatcatgctccgcggcggctgcgtcatgctcggctacctggacgacgacaaggccaccaaggcggcgatacgcgacaacgggtggttctacacgggggacgtcggcgtgatgcatcctgacggtacatggagatctgcgaccggtccaaggacgtga

SEQ ID NO: 137990 - DNA, 1461 bp, Zea Mays
cccgtttcctcccggtttccttggcttgtcctctctccgtctccgtctcaatcctcaccacagctcttaaacgagcggcagccaccacaccaccagacacttctccaagtccgaaaagccaatcagaggcccaccgaaatggagctgaagaagtctcccgcgtcgtcgtcgccgccgccgcctccgacgggctttcggtcagacagcgcggccgccagcccgtacgtcacggcgccgtccagcccacgcgggcgcctggtcccctccgagggagcggcgggggccctattcctgacggcgccgccgtcgcctagtccgttcggcctcctgccgccggccaccccgacgcgcctcaccggcgccgacccgttcgacctcttccagcacttcaccagtgcgccagccagcccccggcgcgccgcggccatatacgcgcacgtcgccgaggggagcggcagcgacgaccaggagtttcagccgcgccgccggctgtacgccgccacaggcggatcgtccgtgccgttcgactgggaggagaggcctgggacgccgaagagggggctcggcgggggcgtgcccgccgcggacgtggcggcatgggacacgggattcgagttcggcacgcgagtcggcaacgccgcgccggcggagacgcttacggcggccgacgagctctttgagaagggcaagatcaggcctttgaagccgaggcccaagaagacggccgacgacgagcccaagattcgtccgttgaagccgccgcccagtggcggtcctaacatttcacgggcccaggacaagatcacatcactagaattgggccctacgaattcgggggcccggggcgaccgcccctctgccccaccctcagggccaccactgccgccgccggggctgctcgacggcgggagcgtcacgccgtcgccgcggtcgccggtcgtggccagaggcgcaggcgccacgtggtcgccgcggcggaggagcagggtcggctccggcgtcgacttcgacccgttcaccgccgcgctcctagaggcaaccaaggcgccatcgccgctcggcggcaaggacgacgagggcggtgttgctgttgccccccatggctcgccgcccacgagaccagccacgcgtcccgcgtcgaggagcgccgggtggagacggtggcggctcagcgatctcctcctgttccggagctcgtccgacggcggccgcgtcaacagctcgacgtgcccgtcaagagggcgagcgcagcagccgccggcggtgacgatcaaagccagcgccacaaagcgcgaggacatgggcaagggctggaaacacggcgatggggacgcggccgcggcggcggacagcgtcgccgggtgcgcccggttgagcccgctgcagcggctggccaaagggctcggcgcctactcgtggcataatcaccgcggcatggccgcgccggcgaccaaagggtga

SEQ ID NO: 137991 - DNA, 745 bp, Zea Mays
aagaaagtgtttttgttttgttgctttgtacacgcaactgatgggttaatcattagcgctcgctgctttctcttcccgtttgcgtttgcgttcaatgtgttttgaccaaacagcagtacgtaacaataagtaacaacacacatccacccggacgtgagagaaaaaaaaaaagtagcaacaacacatccaacccacccagctgtgacaaacaagtgacgatcgagtagtgacaaacccatcgatcgatgccatatgctccatgcctccatattggccgatcgatcggccgacgacggatcagcagtactagtagtacccgagctgggcgatcttgacgcggaggtggctctgcgcgaaggcgaagaggcgggccacctcgtcctcccccagctgcacgccgccgtcgcggtcggcgtcggcggcgcgcacgccgcccctcgccttccaccacgcgaaccgcacgttgaggctccgcagcgcgtgccgcagctcctccctgctgatccgcccgtcgctgtccgcgtcgaactgcgccagccacgcccggaactcctccgctgttagctccccccgcggcagcgcgcggtaccgcatgaacgccatcctctctctctctcgcgacgctggtatcgtgcccggccggcgaccgctgctctgctttgcttccgctagcttggtgagtggttgcgagtgagctgtgggcctactgctgatcgagtggcaggcaagtagtgacgcacacagc

SEQ ID NO: 137992 - DNA, 1729 bp, Zea Mays
atggccttggtgggcgtggtcggcattggcataaccaagcgaccgtcgcagcaatgcctggacgccgtcgagagcgcggcccgacgcgccgaggcagaagagggtacggtggagcagaacacaccgccatggatggcgacaaagaaggtcacagcgctcgccgccatctgcctcgttgcgttgcccatcctgatggtgaccacggttagccggcgggacgtgccgcggacgcccgcgtccttctggcccttggcgaccctcgcgaggcaagagaagcttgtcggcggcctgctcgtgccggggttcgacgagcggtcgtgcctcagccgctaccagtccgcgttctaccgcaagaacctggcgcggtcgccgtccgcgcacctcatcaggcggctgcgccagcacgaggcgctgcagcgccggtgcggcccgggcaccgaggcgtacagggccgcggcggcgcggctcagatcgtcgtcgcaccgcaatggcagcaacgacgacaacgacacccgcggcgcctgcaggtacctggtgctggtgccgtaccgggggctcgggaacaggatcctggccgtggcgtcggcgttcctctacgccgtgctcgccgaccgcgtcctgctcctcggcggcgagacgtcgctgggcgacgtcttctgcgagccgttcccggggacgtcgtggctgctgccgccgcggttcccgatcggcgacctccagaacctgacgggcgacgtgcgggagagctacgggaacctggtgcagcagaacgacagcgcggcggcggcggcggcgtccgggctccggtacgtgttcgtggacctcgaccactcgtgcacgtaccacgacaagctcttcttctgcgacgacggcgagcggcagttcctccggcgcgcggcgtggctggtgatgaggacggacgggtacttcgtgccggcgctgttcctgaacccggcgtaccaggacgagctcgacgggatgttccctcggaaggactcggtgttctacctcctggcgcactacctgttccacccgacgaacgaggtttgggggctggtgacgaggttccacaggtcgtacctgaggggctcggacgaaaggctgggcatccaggtgagggtgttcgacggagacgccccgttccagcacatcctggaccagatcctcgcctgcacttcgcaggaacacctgctccccgacgtggcggtgacgcaagagccgtcggcgggccgcggcgcgcggtccaaggccgtcctgatgaccggcctcagctcgtggtactacgagaagatacggtggaagtactggcagtcggcgacggccaccggagaggtcgtgagcgtgtaccagccgagccacgaggagcaccagctctccggctacacgacgcacgacatgaaggcggtggcggagatgtacctgctgggcatgaccgacaagatcgtcaccagcggctggtcgacgttcggctacgtcgggcacggcctcggcgggctcacgccgtggatcatgttcaggcctgagaaccacaccacgccttacccgccgtgccgccgggccaagtccatggagccgtgcatgcacgggccgccgttctacgactgcagggccaagcacggcgccgacacggggaagctggtgccgcacgtccagcactgcgaagacatgagctgggggctcaaacttgttcatcccgagtgaaacagcaataatagtgaaaagaatatct

SEQ ID NO: 137993 - DNA, 993 bp, Zea Mays
cacgtcagcccagaagacgttcgacgaaggtcctgacgcgagagcgtggtcttcactgacggggtagggacgcgcaggcaggttacggctcccgctctcacgcccgcgcacgcgtaactgccggagcagacacagcggcagcagacgctggggtaccatgactctggaggatttcctggtacgcgccggcgtggttcgtgaggacatggggcagcagaccctcgtgctgcagccgctcgcgcagggtctcttctcccaggggaatgcggtcgcgctcgcgccgcagaccatgcagctggggaacggggtgttgaccggggtcgtcgggcaggggctcggaggagggatgacggtggcggtgccgacgacgccggtcgtgttcaacgtgatgaggaaactggaggcgggggatctttataggccgctgcagctgacgatgcccatcggcactacactgagggtgaggacaagtcgagccgaaaggaaggtggtggagaggatgaagaggaggatgatcaagaacatggagtcggcaaccaataatagtctgaataagcacgcatacataattgagctggaagctgaggtggcaaaactcaaggacctgaatgacgagttgcagaaaaagcaggttgaaatgctgaagaagcaaaaggatgaggtcctggagcgaatcaacaaccaacatggaccgaaggcaaagaaactttgtcttcaccgcaccctgactggcccatggtagcctgctgaagcttgcacagacctcaccgaagtcgagatcgtcggcttagatgtgctcgtgtgtataccagatgatctcaagttgttctgtgacgtgggttgttgtctgtgcctgacagttcaccgtttaggttcagctgcgcaatcctcatataaacaatgaggcgtactatctaatctgttcatttaactccctcctattgccatggtgagatcatgcatgtaacttaggccttgttcgtttgtgtcaga

SEQ ID NO: 137994 - DNA, 2051 bp, Zea Mays
gatataccagttgctgttggtattaaacagcacgcaccaacaatgagccttgccaatgccccgaaatccgccgccgcgctctattcctccctgctccagagctctatgggcgctaacgcgtttcggcaaggcaaatccgtgcaccaccgggccatcatcacgtcttccgcctcacctccggacctccacctgaataccaagctcgtcattttctactctcacttcggcgacgttgcggccgcacgcagggtgttcgacgggatgccgcacaggagtgtcgtgtcctggactgccatggtctctgggtacgccaagaacagccgtccccaggaggcgctggacctgtttgcgttcatgctccggtccggcgccaggccgaaccagttcacgttcgggagcgcggtgagggcatgcacgggcgcccgctgcgcgaggagcggggagcaaattcacgcgtgtgcggctaaagggaggttcgcaggcgacatgtttgtgcagagcgcgctcatggacatgcatctcaggtgcgggtcagtaggggacgcgaggcgactgtttgcggagatggagaggaaagacttggtgtcctggaattccctgatgagggggtttgtggagagggagcattgtaatgatgcgcttggattgtttgattcaatgctgagagatgggatgctacctgatcatttcacatttggaagtgctctaaaggcatgtggagcaatcagtgtgcttttcaatgtggagctaattcacgcttgcatcatcaagcttggttattgggacgaaaacgtcgctattgcatcacttattgattcttatgcaaaatgtcggagcttaagcagtgcgagggtgatatatgattccatgtgtgaaccagacctcgtgtcatctacagcattgatcagtgggtactccatggataggaactatagtgatgatgcaatgaagcttttctgtaagattcatcgaaagggtttaagaattgatgctattctgttaagctccttgcttggtgtttgtgctaatgtagcatcaataaaatttgggacacaaattcatgcttacatgcacaagaagcaacctatgggtgatttggcattggacaacgctcttgttgacatgtatgcaaagtcaggagaatttttggattccagacgcgcttttgatgaaatgcccaacagaaatgtgatttcgtggacttcacttattacttcctgtgcacaacatggttttggagaagatgctgtgaccctttttgctaggatggaggaggatggtgtgaagccaaatgatgtgacattcctttctcttctatcagcatgcagccattctggtatgatgaacaaagggatggaatatttcacttctatgatgagcaagtatggtattgatccaagatttaagcattacagctctgctgttgaccttcttgctcgtggtggtcagttagaagatgcatggatgcttgttcaaaatacgaatactgagtgcaagtcatcaatgtatggtacaatgcttggagcttgcaaggtacatggcaacatgcctcttggagaaactgcggctaagaatcttttgagtatagatcctgagagttctgtgaactatgctgtccttgcaaacatgtatgcagaatcccatttatgggaggatgctcagagaacaagaaaattattggtggagacatccaaaggaaaagaagctggtttcagtgtcatatcaagataggtaacggtcaacaaagatattttcatctgcagaaatgaaagggaatggctatttgcctctaaaaatgatcaagattaatctgaaaccctgatcttcttttgactatggtccaagatcccagatggactttagatccaacgtacatgacagctgttgaattgaaacactgagtcactgaccttgtgaagacttaagagcttcgaccgatctgtatgcagagccacacgatgactgcaactggtgtgcagtgttctctttttctgcttactccctgttttctgggacttcatacactgtaaattgttgtaccttttcaccta

SEQ ID NO: 137995 - DNA, 980 bp, Zea Mays
aaatatttggatgtgcggattgcctcgacgcgagcggccgccgccgcctgcaccacgccgtattcgtgtgtcaaatactcttctgacaagtgacaactgacaagcaacccgccaccagcgccgttgtctacctcgactgcggcaaccttctcccgctgccttcccgcgtgatctcaacttgggcaggatgcgatataccagttgctgttggtattaaacagcacgcaccaacaatgagccttgccaatgccccgaaatccgccgccgcgctctattcctccctgctccagagctctatgggcgctaacgcgtttcggcaaggcaaatccgtgcaccaccgggccatcatcacgtcttccgcctcacctccggacctccacctgaataccaagctcgtcattttctactctcacttcggcgacgttgcggccgcacgcagggtgttcgacgggatgccgcacaggagtgtcgtgtcctggactgccatggtctctgggtacgccaagaacagccgtccccaggaggcgctggacctgtttgcgttcatgctccggtccggcgccaggccgaaccagttcacgttcgggagcgcggtgagggcatgcacgggcgcccgctgcgcgaggagcggggagcaaattcacgcgtgtgcggctaaagggaggttcgcaggcgacatgtttgtgcagagcgcgctcatggacatgcatctcaggtgcgggtcagtaggggacgcgaggcgactgtttgcggagatggagaggaaagacttggtgtcctggaattccctgatgagggggtttgtggagagggagcattgtaatgatgcgcttggattgtttgattcaatgctgagagatggtatgatcatgagttcttttgtccctttgctttctatatgcaactcaatccacaattactcttgtatcttagcgcatcattacatcaaattatatctagccaaaaaagaagaagaataa

SEQ ID NO: 137996 - DNA, 1282 bp, Zea Mays
gcgtgaactcacacacctcacaattaacgactcgcagattaaagcttgatcaacacacctcgttcccgatcttgattggctcgtgaaatccatgggcgggcgcaagatgcgggcgtccatgacgacgctgctgatccgcctcgtgctcaccgtcgccctcctgggcggcgaggcggcgcggcggtgcgcggcgttcaacccacgcgtgctgttcacggtgaagcccgacccgatcgtgctgcgggaccaccgcggcgcgctgctcacggggaaccacaccgtcaacctgctcttctacgggcgcttcaccgcagcgcaacgcgcgatcgtcgtcgacttcgtccgttccctctcggacgcgagcgcgcctcgcccggagccgccgggggcgccaccgtccgtggcggcgtggtggtgcaccatccggctctaccgcggcggcggcgcgcggctgcggctcggcaggcagatcatcgacgagcgcatgtcgctgggccggggccctctctctccgggcaacgtcacggcgctggcgcgggccgcggggcaccaccggggcgccatcaccgcggtgctcacggccgccgacgtccccgtggcgtccttctgcgtgtcgcgctgcggcgcccacggccacgaccgcggcggcgcgcacagcagggcgcggtacgcctacctgtgggcggggaacccggcgcagcagtgccccggccaatgcgcgtggccgttccacctgccgacgtacggtccccggaccccgccgctggtgccgcccaacggcgacgtcggcgtcgacggcatggtcatcagcctcgccgccctcctcgccggcacggtcaccaacccgtacggggacgggtactaccagggcgacgccggcgctgggctggaggctgccacggtgtgcgccgggatcttcgggaccgggtcctaccccggctaccccgggaagctgctcacagacccggccaccggcgcgagctacaacgccgtcgggctaggcgggaggaagtacctgctcccggcattgtgggatccagcgacctcccagtgcaagacacttgtccagacgtgacaggggtgaggggtgacgcccgcggaccgcggtgcggggagaatgtccaatgcaagggagcctgctgcagaagggaggaaaaataaatgcctcatttactatttccattccttattgactgtacttgtagtctgtcctaccagcagagattgtatgatgtatttgtaggatgtctatgttaatggaatttgcacgacatgcttaaat

SEQ ID NO: 137997 - DNA, 766 bp, Zea Mays
gatatcaatgacaagtgcatgtcagtaatcttcaattctgcttcatacacggacaatgataattgtgagggctctacatgattaactgaaaccttcagttctgcatgggtgccaatctaaccaatataagtgctgaagtgacttgcttccagccattttgacaaacaaatatagcagctgttttgacaaacaaataagtggcttgcatgctttcagttttgacaaacaaaaaaaaatactgcttacagaaagagagcagctgtatttgatcttatcaggcagagaagtggctttcagtttttcagcatcagttttcagacaaaaaactgctatcaagcagcaattcacacatcagttttcagcatcagtatgactttgatcctgccgaccatatccttgatgaccaaatgtagcatcccaagaaatccaacaagcaaggacggtcacgttaggagttaagaaaaaataaaaaaagagttcgggtactatttagaaagataaaatcacttataaatactattagtgatcgattaatttgtgagtatggagaaacctgctaaaaaggagtactataatcgtaaaggagtattttttgttgttttgcttcaaaattgtataatttgttcatctatctgttacaaacttacttcatgtaaagatgttttttttggaattatttactattgtttatggtataatgccttaccaagcttaataaataaatgctgacataaagcaacatagagaccaagctatgatttgtgac

SEQ ID NO: 137998 - DNA, 1532 bp, Zea Mays
atagctgtcaccccatccaaaccgtccccctccagcgcaaacccacctgatcatcagattcctcctctccaacgatcattaaggccaccttgatcacagcgtggttttatatagaagtgggctggctggaccgtttccaaaactaagagcgagcgcacggcacggcggcgtgccgcggcgcaggcacaacagcagctccctccgcgctccgccctccctgctcgcaagaccaacaccaccagcagcagcagcagcaccgcgccaacgaggcttccctccggtgtgtgtgtgcgcgcgcgctcgtgatggcagcagccccggcggcgtcgtcgtccacgtcggggtcgccggccgccggcgggccgcggtcgcggttcggcgacacgacgctgacgaaggtgttcgtgggcgggctggcgtgggagacgccctcggaggggctccggcaacacttcgagcggtacggcgacatcctggaggccgtcgtcatcacggaccgcctcaccggccgctccaagggctacggattcgtgacgttccgggagccggaggcggcgcggcgcgcggtgcaggacccgaacccgacgatcgccgggcggcgcgccaactgcaacattgcgtcgctggggccgccgcgccccacccagcctggagttgcaggcaggggtggtccctacaccgtgggaccccaccacttgcaggtcccgcagttcgttcccagggcgccggcctctcctctccagatgatggtgccccagcagcagcagcagcacggtggtgccccagcagctgctatctacccgtctcctcagtttgggtactgctggtacccgccggactttcaataccaacaggccctagccagcccgcaagcgctgcagaactactacgcccagctgtacggtctgacgacctcgccttcggcggcggcggcgccctaccaccaccagtacctcggctacatggcgccgccgcctccaacgccaaggatgatactgccaccaccaccgccgctggcggcgcagcaggtcaccgccgtgcaaccgttggtgcagcatccgccgccgccggcgcagcaggtcacggtgcagcctctgctccagcatcccccgccacagattcatgcccctttcttcccggctccctcgctcccgcagcacaacttcaggctccatccgccgccgcaagctatggcagtattgcctcccaacacaacagcaggcggatcgctgccacctgctgatcaggccgctgcccctgcagctcgcgcgacaaacgcgagcagtactcggccgggtgcgtgatccagagaggcttcaaggagaactcaagataaaaagcatcggattcaccataccttgaaattataactgactttttttttgggaaaaagggggtggcgaagaaaatgaagtttcagtcgatctactatggacgaggttgaggtttaagttactgatgatctgtaactgtaacagtctctcatcatgttttgtctccagaaccaaacaaaagacatttcgtttttttct

SEQ ID NO: 137999 - DNA, 183 bp, Zea Mays
atgaccctggtcagggagttctcatctgtgcctagccccgctatggcctgcctagccaccttctcaaagtacctgtcagggcaactgaagcaccggatgatcgcccgcagcgttctgaggtactcgtcctgggggtcagccttcagatccttgttgattcggtggccaaatgcatcattgtaa

SEQ ID NO: 138000 - DNA, 5724 bp, Zea Mays
atggctgcggcgttggcgtggcggttcaatggcaccaatggtggcgcccatggcagcgcagatctggaaagacacacggacaaagttcaagactcagagccacaaactcctatgtcaatcgtgaaaatgggcaagaaccgagttaatgtggaggacgaggagacactttcaagcgttgctcaatgtattgagcaactacgacagagttcttcatcctcacaggagaaagagagctctttgaagcagttattagatcttgttcaaactcgtgatactgcattcggagctgttgggtcacattcacaggctgttccgatacttgtatctctccttaggtctggaccatctggagttaagatgctggctgccactgttcttgggtctctttgcaaggaagaggagttaagggtgaaagtcttacttggtggttgcatacctccattgcttgctcttctcagatcgaagtcagctgaaagccaaactgcagctgccaaaaccatatatgcagtttcacagggtgggataagggatcatgttggatcaaagattttctctacggaaaatgttgttcctgtactgtgggagcaacttaaaattagtctcaagaatgagagtttggtggatggccttctaactggagcactgaagaatttatcaaagaatacagaggggttttggtcagcaactgtgcaatgtggtggagttgatatacttataaagctggttagttctggacaaacaaatactcttgcaaacacttgctatcttcttgggtctttgatgatggaagactcttctgtttgttctaaagttttatctggagaaacaacaaagcagctcttaaagttacttggtcctggcaatgagacttctattagagctgaggctgctggggctctcaagttcctttctgcacagagtaaagaggccagacgtcagatagctaattctaacggtattccttctcttataaatgctactattgctccatcaaaagagttcatgcaaggtgaatctgctcaagcattgcaagagaatgcaatgtgtgcattagcaaatatatctggtggtctttcctacgtaatctcaagccttggtgagagtctcgagtcatgttcttcacctgcacagattgcagatactcttggtgcattggcctcagccttgatgatatatgacacaaatgcggaatctatcagtgcttctaatcctgttgacattgagaagacacttttgaagcagtttaagcctaaggttccttttcttgtgcaggagcgcataattgaagctttggctagcttgtatggtaacccggttctctgcaagacactagcagattctgatgcaaaacgcttacttgttggtttaataaccatggcagctactgaggtacaagatgacctcacgaaatcactttttgctctctgcaagaaggattgtgatctatggcaagctctgcaaggccgtgaaggtgtccagctattgatttctttacttggtctttcatcagaacagcagcaggagtgtgctgttgctctacttgcgcttctttcaaaggagaatgatgagagcaaatgggctatcactgctgctggtggcatacctccacttgtgcaaattttggaaactggatcttccaaagctaaagaagattcagcaaccatccttggcaatttatgcaatcacagtgaagacataagagcatgtgttcaaagtgctgatgctgttcctgctttactatggcttctgaaaaatggaagtgataatggcaaggagatagcttctaaaacactgaatcatctcatccacaaatcagatactggaactatcagtcagttatctgctcttttaactagtgatcagcctgagtcaaaagtttatgttctggatgctttgaaaagcttgctttctgttgcaccacttaatgatattctacatgagggaagtgcagcgaatgatgcggttgagacaatgattaaaattctaagctcacccaaggaagagactcaggctacatcagcaactgctcttgctggtctatttcattgccgcaaggacctgcgagaaactcatattgcagtgaagacactttggtcagtcatgaagctgcttgatatgcagtctaacaaaatactaacgggggcctcatgttgccttgctgccgtttttctttcgatcaaggaaaataaagaggttgctgcaattggccgggatgccttaaacccacttgtctcacttgcaaattcttcagttatagaagtggcagaacaagcgactagagctttggcaaatcttttccttgatcaggaattgtccctccaggtgccttttgaagaaattctcttccgtgtaacacgtgtactaagagagggaactattgatggaagaactcatgcagccgcagcaatagctcgtcttttacagtgccgaactattaatcagccactttcagatactgttaaccgctctgggtctgtccttgctctagctgggctcttggaagctgcaaatggtgaagctgctgcaacatcagaagttcttgatgcactggtgctgttgtcgcgatcaaaggcgtcaagtgggcacaccaaggctccctgggcaattcttgcagaaaacccccacacaatacttccccttgtttcatgtattgctgatgctgctgcctccttacaagataaagctatagaagttgtgtcaaggctctgttccgacctacatgatgttgtcggtggtctggtttctgaaactccaggttgcatgtcatccatcacacggcgcatcattggctccaacattcttaaagttaaagttggtggttgtgctcttctcgtctgtgctgcaaaagagtattgtcagaagcaaatagaggttctgaatgatgcaagtctgtatattcaactaattcattctttaattggtatgatccatatggcaaacacgcaagctgaaaatgtcagcagtgaaagcatatcagatattagaatttccagacactccaaagaaaacaacagtgatggtgaaactctgtgctgtactgctgtcatctcaggcaacatgattccactatggctacttgctatcttttctcgtcatgacagcaaaacaagagcagaactcctggaaatgggagcagttgaaatgctcatcgagaagatttcacaaaatgcattccaatatgtgaggtctttaataggtgataagatgatggtgtttgttgggttgggtcatggtttgatggtgaagaagataacacctcatgggtcagatgagccagcatacaggtactttgcggcacaagctttgtcaagtctggtctgcaatggtagcagaggaactcttctggctgttgcgaattctggggcagccattggacttatatctttgcttggatgtgctgatgttgatatagctgatcttttggaattatcagaggaattcatgttggtgcctaaccctgatcaaattgcattagagaggctattcagagttgatgatatcagggttggtgcaacttctagaaaatctattcctcttcttgttgatctacttaaacccattcctgaaagacctggtgctcctttcttggccttgggtcttctgacccagttagccgttgattgccccccaaacatgctgctaatggctgaagctggaatcctagaagcacttaccaaatacttatctcttagtccacaagatgcaacagaagaagctacaactgaattgctgggcattcttttcagtagtccagaaataaggcaccatgaatcagcacttggtgttgttaaccaacttgtggcagtccttcgtctaggaggaaggaattcacgttatagtgccgcgaaggcattagagagtttattttgtgctgaccatgtgaggaacagtgagtcaactaggcaggctatccaaccgcttgtggagattctgagtactggcatggagagggagcagcatgcagctatatcagcccttgttaggcttctttctgacaatccttcaagagcacttgcggttgcggatgttgagatgaatgctgtggatgttatgtgccggattctttcttctgattgttcagtggagttgaaaggaaatgctgcggaactatgctgtgttctatttaccaacacaaggatccgttccacaatggcagcagctcgttgtgtggaacccctggttggtttactggttagtgaagctaaccctgcccagctttctgtggttcgtgcattggataggcttctagatgatgagcaactagcagaattagtggcagcaaatggagctgtcattcctcttgtggggcttttgtatggcaaaaactacatgcttcatgaggcagttgctagagctttggtgaaacttggaaaggacagaccagcttgcaaattggaaatggtcaaggctggtgtaattgagagcattcttgatattctccatgacgctccagattttctttgcattgcattggcagaaatgcttcggattttgacaaacaatgctaccatagcaaaaggtccatcctcagccaaagtagtacaacctcttttctctttgctttccaaggcggacatgggtcctgaagggcagtatagcacattgcaggttcttgtgaatattttggagcatcctgaatgccgtgctgattataacttgacacctcgccaaactattgagccagtgataaccttactgaattcatctccaccagctgtacagcaattagctgcagaactcctatcacatcttcttctagaagaccacctccaaaaggacacagtaacagagcaggcgattactcctcttattcaagttctttcttcaggtttgccaaatttacagcagagagctataaaagctctagctaaccttgcaatagcttggccaaatacgattgccaaggagggtggtgtttttgagttgtctaaagtgttgttgcaatctgacccgcctttgccgcatgttgtgtgggaatctgcagcatctgtattgtctagcattctacagtacagtactgagtttttccttgaggtacctgttgcagtactagtgcaattgctcaggtcaggaactgaaagcactgttgtcggtgctttgaatgcccttcttgtattggagagtgatgactcaacaagtgcagaagcaatggctgaaagtggtgctgtggaagcattgcttgatctcctgaggagtcatcagtgtgaggaaactgctgccagactaattgaggcattgctgaacaatgtaagaataagggaggcaaaggctgctaaaaatgctattgcaccattgtccatgtaccttctggatccacagacacaatctcaacagggaagattgcttgctgctcttgctcttggtgatcttttccaaaacgaaggtcttgctcgttctactgatgctgttgcagcatgccgcgctctagtcaatcttcttgaagatcaaccaactgaagagatgaaagtggtagcaatatgtgccttgcagaatctagtcatgtacagccgagcaaataagagagcagttgcagaatccggtggtgtccaggtcctgctggatcttatcagttcaagcaatcctgacacttctgttcaggcagcaatgtttgtcaaacttctattcaataatcacactatccaggaatatgcgaccagtgaaacagtcagagttataactggtaaacaatatccctttcttgttctgtcatattcatttgcatag

SEQ ID NO: 138001 - DNA, 2677 bp, Zea Mays
cgtttgtcatattgtatattaacaatttactgcatgtcttttatgattgcacaggtaccctgctggaggttgttttgtatcatggagagtacagacaagaatgacaaaagaaatgctgtcacagaagagtcttctaatcctggacaaaattgtgaagatgacggggatttttcaatgaaaactgaaatgttaaatgtagaagaagcaccaagtttctcgaatgacaaattaaacaacgaatcagaagtgcagattcaagagggaggtaatgattcagaagagggcttaaacggacaaatgaatgaaaggacaagctcagatgtcatggaatgtgcaagctcaaacgagatcacaaaagagaatctttctgaagataaaactgaagagccagtatttgatggaactgaggttcttgaaatagaagaaatgaggcgttcttccaatcaatctggggaacttgactcagaggctcaggggtctgtactcaatgaccgggctgttgcaataaaaaattttgttaaagaaaggagtgcaattgcagtttcaacatttatgcggcgcctttctggcaaaaaggatgagaatgaatttaaggctgaagctgacaagactattggttcagaatacatggactgcgagaaaaccaggacagatgctgaatccaatcctaaagaggtgcaacagaaatctgtggaaagaactgtctggaacccactgaacttcattaaaattggccgggattctgatacttttgtaactggggaagcgttgaatgaaaatgtgcctggtttgttggagataccaccattgaagggtaggataataatatacacaaaactgggatgtgaagattgcaaaaaggttcgtctattcttgcttcggaaaaggctcaagtatgttgagattaacattgacatcttccctggtagaaagttggaattggagaagaatactgggtcatccactgtaccaaaagtgtattttaatgacctactaattggagggttaattgagttgaggaaaatggaagattctggcatacttgatgagaatatcgatgttctgttcaatgaggaatccccatattctgctccattaccccccttacttggagaagatgatgaatcaggaagtgggaagattgatgagctggcaaccattgtcaaaaaaatgagagagtcaatcactcctaaggatagattctataagatgagaagatttagcaactgctttcttggtagtgaagctgtggatttcatatcagaagatcaatatttggagagagatgaggcagtggaatttgcaaggaagcttgcaagaaaatacttctttcgtcatgttctagatgaaaatgtcttcgaagatggaaaccacatatatcgtttcctggatcatgatcccatagttatgactcaatgttacaacatccctaggggcatcatcgatgttgcaccaaagcccattgctgaagtagcatcaaggctgaggttgctatcctgtgccatttttgaagcttatgtatcagccgatggtagacatgttgactaccaaagcatccaaggttctgaggaatttaaaagatatattagaacagttgaggagctccagagggtggaaattgattatttatcacgtgaagagaaacttgctttcttcataaatctctacaatatgatggctatccatgcattagtgacatgtggccatcctgctggaccattggacagaaaaaagttttttggagattttaagtatatcattggtggatgtgcttattcactgtcagcaatccaaaatggcattctacgtggcaaccaaaggccaccatacaacattgccaaacctttcgggcagaaagaccgaagatccaaggtggcccttccataccatgaacctcttgttcactttgctttgatatgtggcaccaaatctggacctgcacttaggtgttactcaccaggggatatcgataaagaattgatggaagctgcacgtgatttcgtgaggaatggaggactgattgttgatcctgaagccaaaattgcatctgcaagcaagattttgaaatggtatagcacagattttggtaagaacgagatggaagtgctaaagcatgctgcgaactatcttgagcccgcagagtcagagcagctcttggaactgctcgccagcactcaactgaaagtcatgtaccaaaattacgactggagcatcaacatttagaagtagcttgatgtctatccatatgttctttttacatttgcgtacctattacacaaagttccgtggattggaattctctttctgaagcaggacgaacgtctgacagggtggtgcttatcatttttctgaattccgttcagttaactaaatgagaatcgccgacgccgtcttccctaccggagctattaagatttacaaacggtggtgatgttatcagcacggccggtgatgtggagcgagcgagcatgcgtgaacgctgctgcagcgcgcatgattgcttggaacaattaacttctcgccattacgagcgagcgtttgagctgcacgtattttgttttgttgactggctcgatctgaaaaaaaagctgattctacgattttcctcttaccttttaaactctccaaacagtttaaattacctgtctcccatggtttataatggcattttgaactc

SEQ ID NO: 138002 - DNA, 1580 bp, Zea Mays
gcaagagcttcaaaatctgccaaatggcaatagaagacgtagcgaatggccgcccgacggcgaacggcagcggctgcgacgtgaaggcgcacttcgtgttcatcccgctgatgtttcaggggcacctgatcccggcggtcgacaccgcgctgctgctagcgacccatggcgccctcgccagcatcgtcgtcaccccgtccaataccgggcggatccggccgaccgtggacttcgcccgaaagtctggcctggcggtccggctcgtggagctcccgctcgacctcgccgcggaagggctgcccgacggcgccgacgacgttgacaaggtgccgccggatctctggaccaactacttccgcgccctggcgcgcctccgggagcctctggagaggcacctccgcgagcgcgcgccgtacccgacgtgtgtggtggcggacttctgccacccgtgggccagggagctcgcggcgagcctccaggtcccgcggctctgtttcttcagcatgtgcgccttctgcctcctctgccagcacaacgtcgagaggttccacgcttacgacggcgtggccgacgaccacgagctggtcgtcgtcccgggactggagaagagggtcgaggtgtcgagggctcaggctcctggcttcttccgagggatgcccgggttcgagaagttcgcggacgatgtcgagcaggtgctgaccgaggccgacggcatcgtcacgaacagcttcgtcgagatggagccggagtacgtcgccggctaccaggaagccagggcgatgaaggtgtggaccgtcgggccggtgtccctgttccaccagcgcgccgcgacactggcgtcgagagggaacaccgccgccatcggcgctgacgagtgcctccgctggctcgacggcaaggaggcggactccgtcgtgtacgttaacttcgggagcatcgcgcacgcacagccgaagcaggtcgtggagctcggcctcgggctggaggcgtcggggcacccgttcgtctgggtggtcaagaacgccgagcaatatggcgaggaagtgggcgagttcctacacgacctcgaggcgcgcgtcgccagccgcggcctgctgatcagggggtgggcgccccaggtgctgatcctgtcgcacgcagccaccggcagcttcgtcacgcactgcggctggaactcgaccatggaggccatcacggccgggctgccggtggtcacgtggccacacttctcagaccagttcttaaacgccaagttcgctgtggaggtgttggggatcggcgtggacgtcggggtcacggagccgctcatgtaccagcttgagcagaaggagatcgtggtggccagagatgtggtggagaaggcggtgaggaacatcatgcacggaggagacgagggggaggagcggaggaggagggcacgagctcttgcggcgaaggccaagactgccgtggagaaaggcggatcgtcgcatgcgaacgtgttggatttgatcaactgcttcaagacggcataatctaccttcgggagcacttcatgagcatctcgcaacatgtttgagaagacaaagttttcccatttc

SEQ ID NO: 138003 - DNA, 82 bp, Zea Mays
gatccatatttggcttaggtctagcatgccaaatggacagccaaaatggcttctttgtttcataccagattatcctatgctt

SEQ ID NO: 138004 - DNA, 359 bp, Zea Mays
ccacctcctctccagcgcggctcgcgaggcccgcgtgccggtgcagaagacctcgaacaggggctgcatgtgctccaggaatggggaggatgggtccggggagggggagtcgtgcgcgggcacatccagcgcgtggaagtacaccgccgctgcgtcgggcccccagccgtgcaggcgcgtgcggacctccctgaggtgcggctccggcgcggcgaagtggacaggaagcccccgcgatgtgaggagcagggacaggtgcagcagctggttcaggtgaccctgcgccgggacgacactgtcacgatggctacggcggcggaatccatccgccgggctgggggaggccttggattggatct

SEQ ID NO: 138005 - DNA, 1348 bp, Zea Mays
gtctggccctcgaacggcgagacggtgggtggccgcatacgcatacatttcttccgcattgactctgtggggccaccgacggccacagagagaaacgttgagacagggagagagagagagcgagcgagctccagcctccacgcctccactacaccagccaggcagcagcccccaacgactggctcgccgctcgcgagaacccgagtctatttctgcacgcgcttccaggttttagctgcagcggcatcagggcagggggagagcaaaagcaatagttctgttctactggaggaagagcagggagcaagatggggtccggatctttcctcaaggtgctggccaataacttcgatgtccttgccgggccactcatatcacttgcttatcctctatatgcttctgttagagctatagagacaaaaaatcctgtagatgatcagcagtggctcacttactgggtgttgtactcgtttatcactttgtttgagctaacttttgctccaattatcgagtggcttccattttggtcgtatgcaaagctgttctttaactgctggttggtcttgccttggttcaatggtgctgcctatgtttacgaccattttgtgcggccaatgtttgtgaaccgccaaatagtgaacatatggtacattccaagaaatgagaagctaggtaaatctgatgatgttctgtcagctgcagagagatatattgaacaaaacggaccagaagcatttgagaagctcatcagcaagtctacgaagtcttcgaagtcaaggaacacaaagcggttgaacttggaggatggagaggctgaaaatcgagctaaagccgagagagaatcgtggggcgaaaatcccttctacgacaaaaactacagatactaaaccagttcaaaatccactcagcagtttgaagatgaccttgctcacgagcctcatgcaagctatagttgcgtcggactgaagacgacattcccatatttctgactctgaatattgtaccttgttacatccactgctactacataatgatgagttctagagcaattgtggactgtgtaaatggaggtagatgctagcgttaatcgtttatgtgctttttggatggtgtccttatcacccgttttactacatctttagcaaggagcgagccttgattttcagtttggctttcgtatttttgtaattgaatgctacttttagataactgaaatatgagggagttcgagcttctatgaagaaacttaacatgtgctaatgcatagagtgccaacaccgttatcatcgtcacaatttttgtacagggctcttctacaatgacttagagcaaggtggatctttgcagc

SEQ ID NO: 138006 - DNA, 1298 bp, Zea Mays
gtctggccctcgaacggcgagacggtgggtggccgcatacgcatacatttcttccgcattgactctgtggggccaccgacggccacagagagaaacgttgagacagggagagagagagagcgagcgagctccagcctccacgcctccactacaccagccaggcagcagcccccaacgactggctcgccgctcgcgagaacccgagtctatttctgcacgcgcttccaggttttagctgcagcggcatcagggcagggggagagcaaaagcaatagttctgttctactggaggaagagcagggagcaagatggggtccggatctttcctcaaggtgctggccaataacttcgatgtccttgccgggccactcatatcacttgcttatcctctatatgcttctgttagagctatagagacaaaaaatcctgtagatgatcagcagtggctcacttactgggtgttgtactcgtttatcactttgtttgagctaacttttgctccaattatcgagtggcttccattttggtcgtatgcaaagctgttctttaactgctggttggtcttgccttggttcaatggtgctgcctatgtttacgaccattttgtgcggccaatgtttgtgaaccgccaaatagtgaacatatggtacattccaagaaatgagaagctaggtaaatctgatgatgttctgtcagctgcagagagatatattgaacaaaacggaccagaagcatttgagaagcaacttggaggatggagaggctgaaaatcgagctaaagccgagagagaatcgtggggcgaaaatcccttctacgacaaaaactacagatactaaaccagttcaaaatccactcagcagtttgaagatgaccttgctcacgagcctcatgcaagctatagttgcgtcggactgaagacgacattcccatatttctgactctgaatattgtaccttgttacatccactgctactacataatgatgagttctagagcaattgtggactgtgtaaatggaggtagatgctagcgttaatcgtttatgtgctttttggatggtgtccttatcacccgttttactacatctttagcaaggagcgagccttgattttcagtttggctttcgtatttttgtaattgaatgctacttttagataactgaaatatgagggagttcgagcttctatgaagaaacttaacatgtgctaatgcatagagtgccaacaccgttatcatcgtcacaatttttgtacagggctcttctacaatgacttagagcaaggtggatctttgcagc

SEQ ID NO: 138007 - DNA, 606 bp, Zea Mays
gtggccaaagacagtgctgatgtcatcattattgatgacagcttctccgctattgttgtcattgttgcaagatggggtcgatcagtatacatcaacattcagaagtttgtgcagtttcagctcactgtcaatgtggtacatctggtatcctgtattagtttatgctttgaaaatcctcatagtacttgagcgtattttgaatgcccttttgtttatttcataaacctacatctcatcgtttgtattcatgctgattcagggagtgctcctcttactgttgttcaattgctctgggtcaacatgatcatggatacactgggtgcactggcgttggctagagaatctgtccccaaccccaaacgatgaactgatgaagagaacacctgttggaaggaaagggaacttcatcagtaacgttacgtggagaaacaccctgggacaggacttctaccagttcctcgaaacatcccatgtatattggattggtttgaaaaaattaacttgaatacatagggaaagtggctatttggaatcaagggcgataactctgatctactcttgaacacactgatcttcactgcttcgtattctgccaggtaagtccaa

SEQ ID NO: 138008 - DNA, 687 bp, Zea Mays
atggaatcaggattggcctcagtagcccagggtatggaaggctgcgttattagcaacaaagagacgggggcgtatggcatgccatcagccaccaacaatccagatgcctctggtcagtccttcagcgaagcgttgaagagttcgaggaagcatccgttgcagtacgatgcctccgaatctgcagacggtggcctaggtgagactccatctgtgcggtgcgtcgacagcgactgccatggcaccggcaccagcaactccatctatgcggcggctgcggcagcatcagcgcgcgggggcgccagaggatggcgccgcgccaccgcccatcggtcccgactggcgtcgttccgcgcgcagctctacttcaaggagcagcacggtgacccgcccgtggcatcgtcgacgcagctgccggcggtgcagaccggcagcgacaggtgggcgcaccctctaatgaagcccgagaaggggtgcctcttgatcgccacggagaagctggacggctcgcacatcttcgagcgcacggtgatcttgctgctgtcgtcgctgggccccgacggcgtgatcctgaaccgcccctcgctcatgtcgatcaaggaggcgtcggggtccatctgcgcggacgatgccgacatcgcgtgcgccttcgcgggccggccgcttttcttcggtgggaaggcagactga

SEQ ID NO: 138009 - DNA, 1492 bp, Zea Mays
gagaaaagatcgtaaccctaatcggacaaaatcgggctatcttcttcctatatatcccgtcgccgctgcctcggccgtttcatgtccaggtaaaaggaaaaatcgccccatcccctgactatcactggctcactgcccttccacctacaggttccagcggccatggtgaagaagcccaacggtgtcgccaaggccacggcgacctctgctgacgcggcagcccagccatccaaggagaatccgtccacccctgggttggtcaaggcctcgaagtttaagaagagaaaggtcaaggccaaccgtgcgaagcaggcagtcgctgcagcagctattgacgaggtcgcccctgtaggtgcaggcactggtgatggcgatgcatctgcatcagcggctttaccgcaaccatccgatgttgccgaggcattacttgtggtgcaaacgccaaagtcaaccacttttgctgaggcatcacctgtggcacagacgcagaagccagccactgatgctgaaggattggtgcctgcaccaataccaaccactgctgtagcatcagcttcgtcgccaaagccaaaaccagctcaagctaatgctgatgctgcagctgcaatttctgccagcaagggcaatggtgtgggtgctgataatagtaggggtgatggtgagatgaagaacaagaaagagagggccatgagtgacaaggggaaggaggttatggaggaaggaggaagtaagggaaagggtaagggtaaggggaagaaggctgtggtcaagaaggaagaaaggggtgaccgtaaggttgcagggtttatattcatgtgccagagcttcgacatgccccacctgcatattatcgcactttggctccatctggtgattcatactatcggtctgttgagaatctggtgcctgagcgatatgcagacagaaccatggctgacttgaccactagagatccaattattagggatcacacagcactaccaggggaggcacttgctcgagcagaccgcttggatgatctctaccgttctgatcgtgtggaggaactctaccgttctgatcgacttgttaaccgtgctgtggaccgccctcatccagcctattttacagctgcttatgagaccaaccctgcttatgctgaaacgagcattaggcctgtctctgcaagggtcaatggacccagtgcggcagtttcgtcactctattccttcagtggtggcccagtatatcggtaatgaatgatcatggctctgttgaaagccttagccagactaagaagacagggtattcgtctctttaactgcaactgttgtttgccttagcttctattcggtattttcttaaatatccttccctggatgaatgacattcgttatcaagacttgatggtctaaactgtcgaaattatgtactgtacttggcgtgctttgaagctcacttcgttctgtgaatggatcgatgcacgtattggtagcatttgcttgttctgccc

SEQ ID NO: 138010 - DNA, 2185 bp, Zea Mays
gagaaaagatcgtaaccctaatcggacaaaatcgggctatcttcttcctatatatcccgtcgccgctgcctcggccgtttcatgtccaggtaaaaggaaaaatcgccccatcccctgactatcactggctcactgcccttccacctacaggttccagcggccatggtgaagaagcccaacggtgtcgccaaggccacggcgacctctgctgacgcggcagcccagccatccaaggagaatccgtccacccctgggttggtcaaggcctcgaagtttaagaagagaaaggtcaaggccaaccgtgcgaagcaggcagtcgctgcagcagctattgacgaggtcgcccctgtaggtgcaggcactggtgatggcgatgcatctgcatcagcggctttaccgcaaccatccgatgttgccgaggcattacttgtggtgcaaacgccaaagtcaaccacttttgctgaggcatcacctgtggcacagacgcagaagccagccactgatgctgaaggattggtgcctgcaccaataccaaccactgctgtagcatcagcttcgtcgccaaagccaaaaccagctcaagctaatgctgatgctgcagctgcaatttctgccagcaagggcaatggtgtgggtgctgataatagtaggggtgatggtgagatgaagaacaagaaagagagggccatgagtgacaaggggaaggaggttatggaggaaggaggaagtaagggaaagggtaagggtaaggggaagaaggctgtggtcaagaaggaagaaaggggtgaccgtaaggttgcagggtttatattcatgtgcaatgcaaagactaagaaggagtgctaccagagtcgcttgtttgggatgcctagtgggaagattgaaatggtcaagaagattaggccaggggtcaagctgttcctgtatgattttgacttgaagcttctgtatggcgtgtacaaggcagcatcacatggtgggctgaaccttgtccatgaagcatttaatgggaagttccctgcacaggttaagtttaagattgataaagattgccgtcctctccctgagagtagtctcaagcaagccatcaaggaaaattacaatgcaaagagcaaatttgatccagagctcaccacaaaacaagtccaaaggttacttttgctgtttaagcctgttagtgcacctcaatctgtttcaaataatcaccttggagaaaggcgccactatgaaaaacgaaggaagccacgccattttgaagaaaggcggcctattgaagcagcgcgtcggccacgatttgatgaggaaaggcgccctgcggttagacatgttccttttgaggatccatacagggcaccacgctatgctccagttcctgttgactctcagcatggccattctttggctagtgatcaccacagatattatcaaccagcacttacacctgagcctcggcagcttcctcttgttctagagcctcgatatgttccgccggccctagatcatcatcatgtgccagagcttcgacatgccccacctgcatattatcgcactttggctccatctggtgattcatactatcggtctgttgagaatctggtgcctgagcgatatgcagacagaaccatggctgacttgaccactagagatccaattattagggatcacacagcactaccaggggaggcacttgctcgagcagaccgcttggatgatctctaccgttctgatcgtgtggaggaactctaccgttctgatcgacttgttaaccgtgctgtggaccgccctcatccagcctattttacagctgcttatgagaccaaccctgcttatgctgaaacgagcattaggcctgtctctgcaagggtcaatggacccagtgcggcagtttcgtcactctattccttcagtggtggcccagtatatcggtaatgaatgatcatggctctgttgaaagccttagccagactaagaagacagggtattcgtctctttaactgcaactgttgtttgccttagcttctattcggtattttcttaaatatccttccctggatgaatgacattcgttatcaagacttgatggtctaaactgtcgaaattatgtactgtacttggcgtgctttgaagctcacttcgttctgtgaatggatcgatgcacgtattggtagcatttgcttgttctgcc

SEQ ID NO: 138011 - DNA, 2101 bp, Zea Mays
gagaaaagatcgtaaccctaatcggacaaaatcgggctatcttcttcctatatatcccgtcgccgctgcctcggccgtttcatgtccagcggccatggtgaagaagcccaacggtgtcgccaaggccacggcgacctctgctgacgcggcagcccagccatccaaggagaatccgtccacccctgggttggtcaaggcctcgaagtttaagaagagaaaggtcaaggccaaccgtgcgaagcaggcagtcgctgcagcagctattgacgaggtcgcccctgtaggtgcaggcactggtgatggcgatgcatctgcatcagcggctttaccgcaaccatccgatgttgccgaggcattacttgtggtgcaaacgccaaagtcaaccacttttgctgaggcatcacctgtggcacagacgcagaagccagccactgatgctgaaggattggtgcctgcaccaataccaaccactgctgtagcatcagcttcgtcgccaaagccaaaaccagctcaagctaatgctgatgctgcagctgcaatttctgccagcaagggcaatggtgtgggtgctgataatagtaggggtgatggtgagatgaagaacaagaaagagagggccatgagtgacaaggggaaggaggttatggaggaaggaggaagtaagggaaagggtaagggtaaggggaagaaggctgtggtcaagaaggaagaaaggggtgaccgtaaggttgcagggtttatattcatgtgcaatgcaaagactaagaaggagtgctaccagagtcgcttgtttgggatgcctagtgggaagattgaaatggtcaagaagattaggccaggggtcaagctgttcctgtatgattttgacttgaagcttctgtatggcgtgtacaaggcagcatcacatggtgggctgaaccttgtccatgaagcatttaatgggaagttccctgcacaggttaagtttaagattgataaagattgccgtcctctccctgagagtagtctcaagcaagccatcaaggaaaattacaatgcaaagagcaaatttgatccagagctcaccacaaaacaagtccaaaggttacttttgctgtttaagcctgttagtgcacctcaatctgtttcaaataatcaccttggagaaaggcgccactatgaaaaacgaaggaagccacgccattttgaagaaaggcggcctattgaagcagcgcgtcggccacgatttgatgaggaaaggcgccctgcggttagacatgttccttttgaggatccatacagggcaccacgctatgctccagttcctgttgactctcagcatggccattctttggctagtgatcaccacagatattatcaaccagcacttacacctgagcctcggcagcttcctcttgttctagagcctcgatatgttccgccggccctagatcatcatcatgtgccagagcttcgacatgccccacctgcatattatcgcactttggctccatctggtgattcatactatcggtctgttgagaatctggtgcctgagcgatatgcagacagaaccatggctgacttgaccactagagatccaattattagggatcacacagcactaccaggggaggcacttgctcgagcagaccgcttggatgatctctaccgttctgatcgtgtggaggaactctaccgttctgatcgacttgttaaccgtgctgtggaccgccctcatccagcctattttacagctgcttatgagaccaaccctgcttatgctgaaacgagcattaggcctgtctctgcaagggtcaatggacccagtgcggcagtttcgtcactctattccttcagtggtggcccagtatatcggtaatgaatgatcatggctctgttgaaagccttagccagactaagaagacagggtattcgtctctttaactgcaactgttgtttgccttagcttctattcggtattttcttaaatatccttccctggatgaatgacattcgttatcaagacttgatggtctaaactgtcgaaattatgtactgtacttggcgtgctttgaagctcacttcgttctgtgaatggatcgatgcacgtattggtagc

SEQ ID NO: 138012 - DNA, 1760 bp, Zea Mays
ccgtatcgcccgcgcgctccgcagccacaagcgcaaaggcagcgcacagagctgtgcctagcagtgcccaccacctgccgtccccgtccaccgggcccggacgcggacgcctcgcggtctcgctcgcccggctcttccctcgatcgtcacccatctataaataccttggccgcgcgctgcggagctgagagcaagcaagcacacagcgagcacgcaccagcatccttggcacttggcagcgatctgcttgcttctcccagcgcgcgcggccaagctagtaggggtctaggggatcgatcagatatccacgccatggccgccgcctccaccacgtcgaggaccaactcgcgggtgaactactcgaacgagatccacgacctctccaccgtgcagagcggctccgtcgtccccaccttgttctacccggacaagtccatcgccgacatcttcccgccgcaccttgggaagaaggtgatctcggaggtggtggcgacgttccttctggtgttcgtcacctgcggggcggcgtccatctacggcgaagacaacaggcgcatctcgcagctggggcagtcggtggccggcgggctcatcgtcaccgtcatgatctacgccaccggccacatctccggcgcgcacatgaaccccgccgtcacgctctccttcgcatgcttccggcatttcccatggattcaggtgcccttctactgggcggcgcagttcacgggggcgatgtgcgcggcgttcgtgctcaaggcggtgctccaccccatcgccgtgatcggcaccaccacgccgtcggggccgcactggcacgcgctcctcatcgagatcgtcgtcaccttcaacatgatgttcgtcacctgcgccgtcgccaccgactccagggcggtgggtgagttggcagggttagcagtcggttccgcggtttgcattacttccatcttcgcagggccggtgtcgggcggatcgatgaacccggcgcggacgctggcgccggcggtggccagcaacgtcttcacgggcctctggatctacttcctcggccccgtcatcggcacgctctccggggcgtgggtctacacctacatccgcttcgaggaggcccccgccgccaaggacacgcagaggctctcctccttcaagctccgccgcatgcagagccagctcgccgccgacgagttcgacaccgtctaaattaaaacgcccacacgcgcatccacaacactgtcagcctgcaggtcaactcttcgcgcgtacgtacgctggacgctggctgagagagtgagtgagagagagagagagtactgtactactgtgtgctcgctcgctcgctctgttcaaagacctcatcatatcaggtgggagctagagagatagagctgcgtgtatgtatgtgtgtgtgtgtacgtgcttggtgtaccctacctagcgggtgagagcagctagcgtgatgtttatgtatcttcgtcagtgttgcaaaagttaattgatatgcagctgatgtgtctggctttgctggtttgcaaaagatgcatgcatgtgttggaactcggaacacaaatatatatatgggtttttttttgtctactacgtactgtaccttatatatatgttctctttctgtttgggtttattttactgtaccttttcagtatcataaaatgttgttttggttttgcctcaagccagaacttctccttaattccagcaatttaagataaaaattgattaacatctaccataataaaataaataaa

SEQ ID NO: 138013 - DNA, 106 bp, Zea Mays
catattttctcttctttcaaattttaatttctattgttcgatcactagattctatatacagtgttacatctattttataatcttatctatatgttttatgattttg

SEQ ID NO: 138014 - DNA, 2344 bp, Zea Mays
gacacggcactgcactgcactgcaattttgcatcgcttcagtaaccaattaacgcaagaaacaggtagtagatcaagtccgattagttgctgatgtcgccgacgaccatgtccctgacgaccacgacgagccgcctgcccatctgccgggcacgggacgtgtccaagcaggcgcctccagctgccaaggccgcgcctcctccgtcgccgtcagacaccaacggttttagcaggaggaggctgctgcggtccgcggcgctgggtttcgggctcggtctcgccaggagagacccagcgcgggcgcgcgccgagacgacgccgccatcacccgcgctggcgccggaggaggtgacatcgaaccggatgtcctactcgcggttcctggattacctcaacgccaacgcggtgcggaaggtggacttcttcgagaacggcacggtggccgtcgtcgagctggacgacccggcgctggcgtcgagagtgcaccgggtgcgggtgcagctcccggccgggggcctcccagcggagctggtgcgtaagctgcgggacaggggcgtcgacttcgcggcgcaccccgtggaacccaacctcgggctcatgttcctcgacctcctcctcaacttcggcttcccgctcctcttcctcgcctcgctgatctggaggtcggtcaccatgaacaaccctggcgctggcggcggggggcccaacctcccgttcgggctcggcaggtccaaggccaagttccagatggagcccaacaccgggatcacgttcgacgacgtcgccggcgtggacgaggccaagcaggacttccaggagatcgtgcagttcttgaagtcgccggagaagttcacggcggtgggtgcgaggatccccaagggcgtgctgctggtgggcccgccgggcacggggaagacgctgctggccaaggccatcgcgggggaggcaggcgtgcctttcttctctctgtccgggtccgagttcatcgagatgttcgtcggcgtgggcgcgtcgcgggtgcgggacctcttcaacaaggccaaggccaacgcgccgtgcctcgtcttcatcgacgagatcgacgccgtgggccgccagcgcggcacgggcatcggcgggggcaacgacgagcgggagcagacgctgaaccagctgctgacggagatggacgggttcagcggggacagcggagtcgtcgtcatcgcggccacgaaccggcctgacatcctcgacgccgcgctgctccgcccgggccgcttcgaccgccaggtcagcgtcgggctccctgacgtccgcgggcgggaggagatcctcagggtacacagctccaacaagaggctggaccccgacgtgtcgctcagcgtcgtggccatgcgcacccccggcttcagcggcgccgaccttgccaaccttatgaatgaggctgccatccttgccggccgccgcggcaaggaccgcatcggtgtcaaggagatcgatgactccatcgaccgcatcgttgccggcctcgagggcacaagcatgaccgacggcaagagcaagctgcttgttgcctaccacgagatcggccacgccgtgtgcgcgacgctgacgccggggcacgacgcggtgcagaaggtgacactgatcccacgggggcagtcgcgagggctgacgtggttcctgccgggcgaggacccgaccctggtgtccaagcagcagatcttcgcgcgcatcgtgggcgggctcggcgggcgcgccgctgaggaggtgatcttcggggagcccgaggtgacgacgggcgcggcgggcgacctgcagcaggtgacgcaggtggcgcggcagatggtgaccacgttcgggatgtcggagatcgggccgtgggcgctcatggagccggctgcgcagagcggcgacgtcgtgctgcggatgctggcccggaactccatctccgagaagctcgcagcggacatcgacagggccgcgaagcacatcatcgaccaggcgtacgaggtcgccaaggagcatgtcaggaggaaccgcgcggccatcgaccagctggtggacgtgcttatggagaaggagacgctcaccggcgacgagttcagggcgctcttgtcggagcacgtggacattggcagggagcagagggaaacagcggcccggaaaaagctggtcgtcaccgcttgaagcttcactgtagtcctttgtagtgtagaaatatataggggcagcatagcatagtgcaaatatgcagtagtatgttgtacttagacacttgatagtatcagcacatagtactgtatatgcatggtaaacttttttccagggaacaaaaccgaaatctgaagcacatgaatttccgc

SEQ ID NO: 138015 - DNA, 319 bp, Zea Mays
caggccaacaaagaatcgaactgtaacttttcctgatcgaacagaatcatactgcatccaagttctgcgaactgccattcggcgtttgaaattatttgctgtagagaagaccccaatgaaaagatcaaccggtttatccatgggcacaggtggagccttcaatatttctaagtcagtgacatgctcgaagtcctctgttgtaggcaggccacttgctatcacagataacaatttaatgtctcctgcaattcttacttcacctacaaaccctggttccaaatcctggagagatcaatatatgaagtgtaaatgtaataat

SEQ ID NO: 138016 - DNA, 981 bp, Zea Mays
ggttcaccactggtacttggccttgacaaggacgtcctcgtagagctcagccgcgtggtcccagctgaggtcctgcgacatgccgcgcgcctggagactcttccagctctcctcgtagttccggtacgtgtcgaggcagtgcctgagcgcctcgatcagcttgttggcctcggcgcggtcaaaagtccacccgagcccggcgtcgctgaacgggtcgaacggcgccacggtgtccctgagcccgcccacggcgtgcaccacagggacggtgccgtatgccatcgcgtagagctggttcagcccgcagggctcgaagcgggagggcatcaccagcacgtcggcgcccgccgtgatgcgatgcgccataggcaccgagaacccgacccacccgcgcaccttgttgggatgctcccgctccaagtgctgcagcattcgttccaggtcggcgcgcccggtgcccagcatcaccagctgcacgtcctgccccgcgatccacggcatcgcgtccccgatgatgtccacgcccttctgtccatccagacgcccgatgaagccgagcagcggcacgtcgtcgcgcacttccaggcccagctcccgctgcagggccgccttgcactgccgctttccagcgtcgagtgtctcgagggagtagttggtgtagccgtccgaccgcaggtgcacgtccaccttggggttccactcctggtggtcgatgccgttcacgatgccattgatcttccagtcgttagaacggatgatgtcgtggaggccccagccgccttccactgtcttcagctcccacaggtagccgcggctgacagtcaccacccggtctgccatcttcagacccgcggcaaagatgttggcgtgctcgccaccgacgggatcgtacagctcgaaatgttgaaggtagtgttcaggcaagtccatgtacgggaattcatctacaggaccacggccctgcaaacaagagggaagccg

SEQ ID NO: 138017 - DNA, 1128 bp, Zea Mays
cagcaaactgcaaaccagcaacgcatcagccgagccaagcggcagatcgttttcaggcggcgtgacgcgctcacgcctgtctccttgcccccttcggtcctccctcctcccggcgagctcctctaccacgggtgtaccaaccaaccaccagtccaccaagcgcgcgggcgccatcaggtagaccggcccctgcgttagacccaacccaaccctagctaccgtgacgctcgatcggcttcgggttagtttgcggaggaggcgtggaggtggaccgcctgtgccgtgaggctgagtcatggaagtgccgccactgccaacggcgtcggaaggggagcgccgaagcgtagcgacggggtcgtgcctccccaggctggtctccggcgtcctctcgggggccctcaccggcatcttcgccgttgctggaggcctgacgggggcgttcaccggcgcattggccggccgagcttccgacagcggcgtcctccggggagccggcctgggggcctttgcgggggcggtactatccatcgaggttctcgaggcttcgcgcgcctactggagcgcggaccgatcgagcccgcagagcacgtcctccatgggggatttcatagaacagctccttcatgctcgatttgtgcaagaccagtatgagccatcggcatatatggcctatcgttggcaggttggcattgccgacaatgatgatatgtttgatgtccttgaagatgttttatccgaagggctctcacaagatactctaaagaagttgccacatcatgtggttcctgcaccaattggtgaaagcttgtcttgcgctatttgcctgcaggatgttattagcggagagacagcgaggaagttgccaaagtgctctcacaccttccatcagccttgtgtggacagatggttcattgaccatggttcatgcccagtatgtagacaggatgtgtaggtagatcatgatcgattctgggttatcatgcctttgtaaagttgctaccctcgtcatatagaagaaaatacagtacgtagcatgtaaaaagtcctgcacttgttcctattatgaaaaatggtttacacatcagtaattgagttccatgttttctctttttactcggtttgcgtata

SEQ ID NO: 138018 - DNA, 805 bp, Zea Mays
atagaaaacattctctccaattataaccatttcttgtgtaggatgacgactcggatgatgagaagaagcggcgtcattctaagcaccaccaccatggccaccactacgatgactaagcaccagtgccttctgctgggcgttgccctggttcaccgctactgctactatatccattcgcttgcataaataaagacggctgtgtaccttctggacactggaccaccgttgcgacgttgcctctgcattgttacagccgagccgtgagtgtgctgtttattatctaatgttcaaatcgttgtgatgaaccaccgtccacgcctgttgatgccgaaccgaatgtctggatttactttgcgcctgttcttgtggtgtttgtcgccttccctgtcacagttatgtttggtgtcgtgttgttgtttctggaacgttctcgtggtggtggatagatatccccatttctgccagctgctcttgtcgatacctttcaacacctcgttttggtgctccaagtccctccaaacaggtgcccctgatgtaactgcgaacaacaggtgtctctgatgtaaggccggttgctataggtcgtggcagtctgctcagtaacgagcgaagtgattgatctacgcttcctttgggaggtcaattatctagtttcgcaagtgaaggttttgctttgtagttcttgtgtcaaatttgcagcgacgaaccgaaacgattcgtttattgacatatcctattcatcgacatacctcgtaaattgtaattgtgtgtttctatattttgtctcagcgatctgattttacta

SEQ ID NO: 138019 - DNA, 1372 bp, Zea Mays
cctcgctgcccccacactccagaagtccagaccaaagctctaaagtccaatccctcgctagccacttgccatctgagacatacggctctggctacgggaggaagccacaggtagaggagagctacggatcggagtatgggtctgggttcgggaggaagccgcagattgaggagagctatggatcggggtacgggaggacgccgcaggttgaggagagctatggatctggttacgggaggaagcctcaggttgaggagagctatggatctgggtacggcagcaggccgcagggtggggaggagtatggcagtggtggtggtgggtatgggaggaaggcacaggaggagacctatggctcctcggggtatggctatggcaggaagaacgaggagcagagctatggtggttctggctatggttatgagaagaaggcatctgaggaggacgaaggtgcctttggctctggtggttaccggaagccaaaaccctatgacgaggagacacagggttcatacggttatggagaggagcagcccaagtatcagagtggcgggtatgagaggccgagctatggtgggggagaggggtactatggccgcaagaaagatgatgacgactcggatgatgagaagaagcggcgtcattctaagcaccaccaccatggccaccactacgatgactaagcaccagtgccttctgctgggcgttgccctggttcaccgctactgctactatatccattcgcttgcataaataaagacggctgtgtaccttctggacactggaccaccgttgcgacgttgcctctgcattgttacagccgagccgtgagtgtgctgtttattatctaatgttcaaatcgttgtgatgaaccaccgtccacgcctgttgatgccgaaccgaatgtctggatttactttgcgcctgttcttgtggtgtttgtcgccttccctgtcacagttatgtttggtgtcgtgttgttgtttctggaacgttctcgtggtggtggatagatatccccatttctgccagctgctcttgtcgatacctttcaacacctcgttttggtgctccaagtccctccaaacaggtgcccctgatgtaactgcgaacaacaggtgtctctgatgtaaggccggttgctataggtcgtggcagtctgctcagtaacgagcgaagtgattgatctacgcttcctttgggaggtcaattatctagtttcgcaagtgaaggttttgctttgtagttcttgtgtcaaatttgcagcgacgaaccgaaacgattcgtttattgacatatcctattcatcgacatacctcgtaaattgtaattgtgtgtttctatattttgtctcagcgatctgattttacta

SEQ ID NO: 138020 - DNA, 1732 bp, Zea Mays
cctcgctgcccccacactccagaagtccagaccaaagctctaaagtccaatccctcgctagccacttgccatctgatcaaccagccagccgatctcagcgatccgccatggccaccgcgtattacgagaggccccgtggcggcgccgtcgaggaggcggacgacttcgatgagttcgaccccacgccgtacggcggtgggtacgacctcgccgtcaccttcggtcgcccgctgccaccgtccgaggaaacctgctacccgtgctcggcgccctcgacctcctacgacgcaccgcactacgccgcctccgagccgtccccctacggtcaccacgccaagccaaagcccaactatgggttccgcccccagcaggagcaacagccgtcttacggcagcggctacggatccaggcccgagcccgctgcggaggagggcggtggctatggatctggcttcggatccgggtatgggaggaagaagcaggaggaggagagctacggctctggatatgggaggaagccgcagattgaggagagctatggatcggggtacgggaggacgccgcaggttgaggagagctatggatctggttacgggaggaagcctcaggttgaggagagctatggatctgggtacggcagcaggccgcagggtggggaggagtatggcagtggtggtggtgggtatgggaggaaggcacaggaggagacctatggctcctcggggtatggctatggcaggaagaacgaggagcagagctatggtggttctggctatggttatgagaagaaggcatctgaggaggacgaaggtgcctttggctctggtggttaccggaagccaaaaccctatgacgaggagacacagggttcatacggttatggagaggagcagcccaagtatcagagtggcgggtatgagaggccgagctatggtgggggagaggggtactatggccgcaagaaagatgatgacgactcggatgatgagaagaagcggcgtcattctaagcaccaccaccatggccaccactacgatgactaagcaccagtgccttctgctgggcgttgccctggttcaccgctactgctactatatccattcgcttgcataaataaagacggctgtgtaccttctggacactggaccaccgttgcgacgttgcctctgcattgttacagccgagccgtgagtgtgctgtttattatctaatgttcaaatcgttgtgatgaaccaccgtccacgcctgttgatgccgaaccgaatgtctggatttactttgcgcctgttcttgtggtgtttgtcgccttccctgtcacagttatgtttggtgtcgtgttgttgtttctggaacgttctcgtggtggtggatagatatccccatttctgccagctgctcttgtcgatacctttcaacacctcgttttggtgctccaagtccctccaaacaggtgcccctgatgtaactgcgaacaacaggtgtctctgatgtaaggccggttgctataggtcgtggcagtctgctcagtaacgagcgaagtgattgatctacgcttcctttgggaggtcaattatctagtttcgcaagtgaaggttttgctttgtagttcttgtgtcaaatttgcagcgacgaaccgaaacgattcgtttattgacatatcctattcatcgacatacctcgtaaattgtaattgtgtgtttctatattttgtctcagcgatctgattttacta

SEQ ID NO: 138021 - DNA, 1786 bp, Zea Mays
cctcgctgcccccacactccagaagtccagaccaaagctctaaagtccaatccctcgctagccacttgccatctgatcaaccagccagccgatctcagcgatccgccatggccaccgcgtattacgagaggccccgtggcggcgccgtcgaggaggcggacgacttcgatgagttcgaccccacgccgtacggcggtgggtacgacctcgccgtcaccttcggtcgcccgctgccaccgtccgaggaaacctgctacccgtgctcggcgccctcgacctcctacgacgcaccgcactacgccgcctccgagccgtccccctacggtcaccacgccaagccaaagcccaactatgggttccgcccccagcaggagcaacagccgtcttacggcagcggctacggatccaggcccgagcccgctgcggaggagggcggtggctatggatctggcttcggatccgggtatgggaggaagaagcaggaggaggagagctacggctctggatatgggaggaagccacaggtagaggagagctacggatcggagtatgggtctgggttcgggaggaagccgcagattgaggagagctatggatcggggtacgggaggacgccgcaggttgaggagagctatggatctggttacgggaggaagcctcaggttgaggagagctatggatctgggtacggcagcaggccgcagggtggggaggagtatggcagtggtggtggtgggtatgggaggaaggcacaggaggagacctatggctcctcggggtatggctatggcaggaagaacgaggagcagagctatggtggttctggctatggttatgagaagaaggcatctgaggaggacgaaggtgcctttggctctggtggttaccggaagccaaaaccctatgacgaggagacacagggttcatacggttatggagaggagcagcccaagtatcagagtggcgggtatgagaggccgagctatggtgggggagaggggtactatggccgcaagaaagatgatgacgactcggatgatgagaagaagcggcgtcattctaagcaccaccaccatggccaccactacgatgactaagcaccagtgccttctgctgggcgttgccctggttcaccgctactgctactatatccattcgcttgcataaataaagacggctgtgtaccttctggacactggaccaccgttgcgacgttgcctctgcattgttacagccgagccgtgagtgtgctgtttattatctaatgttcaaatcgttgtgatgaaccaccgtccacgcctgttgatgccgaaccgaatgtctggatttactttgcgcctgttcttgtggtgtttgtcgccttccctgtcacagttatgtttggtgtcgtgttgttgtttctggaacgttctcgtggtggtggatagatatccccatttctgccagctgctcttgtcgatacctttcaacacctcgttttggtgctccaagtccctccaaacaggtgcccctgatgtaactgcgaacaacaggtgtctctgatgtaaggccggttgctataggtcgtggcagtctgctcagtaacgagcgaagtgattgatctacgcttcctttgggaggtcaattatctagtttcgcaagtgaaggttttgctttgtagttcttgtgtcaaatttgcagcgacgaaccgaaacgattcgtttattgacatatcctattcatcgacatacctcgtaaattgtaattgtgtgtttctatattttgtctcagcgatctgattttacta

SEQ ID NO: 138022 - DNA, 1786 bp, Zea Mays
cctcgctgcccccacactccagaagtccagaccaaagctctaaagtccaatccctcgctagccacttgccatctgatcaaccagccagccgatctcagcgatccgccatggccaccgcgtattacgagaggccccgtggcggcgccgtcgaggaggcggacgacttcgatgagttcgaccccacgccgtacggcggtgggtacgacctcgccgtcaccttcggtcgcccgctgccaccgtccgaggaaacctgctacccgtgctcggcgccctcgacctcctacgacgcaccgcactacgccgcctccgagccgtccccctacggtcaccacgccaagccaaagcccaactatgggttccgcccccagcaggagcaacagccgtcttacggcagcggctacggatccaggcccgagcccgctgcggaggagggcggtggctatggatctggcttcggatccgggtatgggaggaagaagcaggaggaggagagctacggctctggatatgggaggaaaccgcaggtagaggagagctacggatcggagtatgggtctgggttcgggaggaagccgcagattgaggagagctatggatcggggtacgggaggacgccgcaggttgaggagagctatggatctggttacgggaggaagcctcaggttgaggagagctatggatctgggtacggcagcaggccgcagggtggggaggagtatggcagtggtggtggtgggtatgggaggaaggcacaggaggagacctatggctcctcggggtatggctatggcaggaagaacgaggagcagagctatggtggttctggctatggttatgagaagaaggcatctgaggaggacgaaggtgcctttggctctggtggttaccggaagccaaaaccctatgacgaggagacacagggttcatacggttatggagaggagcagcccaagtatcagagtggcgggtatgagaggccgagctatggtgggggagaggggtactatggccgcaagaaagatgatgacgactcggatgatgagaagaagcggcgtcattctaagcaccaccaccatggccaccactacgatgactaagcaccagtgccttctgctgggcgttgccctggttcaccgctactgctactatatccattcgcttgcataaataaagacggctgtgtaccttctggacactggaccaccgttgcgacgttgcctctgcattgttacagccgagccgtgagtgtgctgtttattatctaatgttcaaatcgttgtgatgaaccaccgtccacgcctgttgatgccgaaccgaatgtctggatttactttgcgcctgttcttgtggtgtttgtcgccttccctgtcacagttatgtttggtgtcgtgttgttgtttctggaacgttctcgtggtggtggatagatatccccatttctgccagctgctcttgtcgatacctttcaacacctcgttttggtgctccaagtccctccaaacaggtgcccctgatgtaactgcgaacaacaggtgtctctgatgtaaggccggttgctataggtcgtggcagtctgctcagtaacgagcgaagtgattgatctacgcttcctttgggaggtcaattatctagtttcgcaagtgaaggttttgctttgtagttcttgtgtcaaatttgcagcgacgaaccgaaacgattcgtttattgacatatcctattcatcgacatacctcgtaaattgtaattgtgtgtttctatattttgtctcagcgatctgattttacta

SEQ ID NO: 138023 - DNA, 2080 bp, Zea Mays
gtcgccgacgccgcgcatccagcgtccctgtctacgttaccgactcctcacgctggccggaccacgtgcccccacgtctcgccgtccccggttctcatccaccccgagctcccccaacgcgttttaccacagaccaataagtggccaatccctcgctgcccccacactccagaagtccagaccaaagctctaaagtccaatccctcgctagccacttgccatctgatcaaccagccagccgatctcagcgatccgccatggccaccgcgtattacgagaggccccgtggcggcgccgtcgaggaggcggacgacttcgatgagttcgaccccacgccgtacggcggtgggtacgacctcgccgtcaccttcggtcgcccgctgccaccgtccgaggaaacctgctacccgtgctcggcgccctcgacctcctacgacgcaccgcactacgccgcctccgagccgtccccctacggtcaccacgccaagccaaagcccaactatgggttccgcccccagcaggagcaacagccgtcttacggcagcggctacggatccaggcccgagcccgctgcggaggagggcggtggctatggatctggcttcggatccgggtatgggaggaagaagcaggaggaggagagctacggctctggatatgggaggaaaccgcaggcggaggagagctacgggtccggcgggtacggctctggctacggcggtcagacccggccggaggagagctatgggtcagcagggtatggatctgccaatccgcaggctgagacatacggctctggctacgggaggaagccacaggtagaggagagctacggatcggagtatgggtctgggttcgggaggaagccgcagattgaggagagctatggatcggggtacgggaggacgccgcaggttgaggagagctatggatctggttacgggaggaagcctcaggttgaggagagctatggatctgggtacggcagcaggccgcagggtggggaggagtatggcagtggtggtggtgggtatgggaggaaggcacaggaggagacctatggctcctcggggtatggctatggcaggaagaacgaggagcagagctatggtggttctggctatggttatgagaagaaggcatctgaggaggacgaaggtgcctttggctctggtggttaccggaagccaaaaccctatgacgaggagacacagggttcatacggttatggagaggagcagcccaagtatcagagtggcgggtatgagaggccgagctatggtgggggagaggggtactatggccgcaagaaagatgatgacgactcggatgatgagaagaagcggcgtcattctaagcaccaccaccatggccaccactacgatgactaagcaccagtgccttctgctgggcgttgccctggttcaccgctactgctactatatccattcgcttgcataaataaagacggctgtgtaccttctggacactggaccaccgttgcgacgttgcctctgcattgttacagccgagccgtgagtgtgctgtttattatctaatgttcaaatcgttgtgatgaaccaccgtccacgcctgttgatgccgaaccgaatgtctggatttactttgcgcctgttcttgtggtgtttgtcgccttccctgtcacagttatgtttggtgtcgtgttgttgtttctggaacgttctcgtggtggtggatagatatccccatttctgccagctgctcttgtcgatacctttcaacacctcgttttggtgctccaagtccctccaaacaggtgcccctgatgtaactgcgaacaacaggtgtctctgatgtaaggccggttgctataggtcgtggcagtctgctcagtaacgagcgaagtgattgatctacgcttcctttgggaggtcaattatctagtttcgcaagtgaaggttttgctttgtagttcttgtgtcaaatttgcagcgacgaaccgaaacgattcgtttattgacatatcctattcatcgacatacctcgtaaattgtaattgtgtgtttctatattttgtctcagcgatctgattttacta

SEQ ID NO: 138024 - DNA, 1241 bp, Zea Mays
cacgggtcagataagcttttctctccccttcgcagctgcaaccgctcgccgcgtgctccctttgtactgaaccgcatcctccccgcgccgacctgctccggcgagttaaacatggccgtcctcctccgcagcacctccgccgccgcctcgactgctggcccctcctcggcgctgctcgccaccaccttccgccgctcccgcggctgccttctgccccgtgccgcgccgcagcgccgcttgtatgtggcccgcgcctcggcccagcccctcgaggtctgcgctaaggagtccatcaccatccctggccgcctcggagactgtcctttcacacagagggttttgttgactatagaggagaagcatctgccttatgatctgaagctagttgatctagctaataagccagattggttatttgaaatcaacccagaaggtaaagtgcctatcgtgaagctcgaggaaaaatggattggtgattctgatgttataacacaagcattagaggagaaataccctgaaccacccttggcaactccaccagaaaaagcttcagttggatcaaaaatattttccactttcattggtttcctcaaaagcaaagatccaagcgatggaacagaagaggcactacttaatgagcttacttcatttgatagttatctaaaagacaatggtccatttattaatggtggaataatttctgctgctgatctctctctgggtcctaaactatatcacatggagataactctgggccactacaagaattggtctgttccagattcactttcttatgtaaaaacatatatgaagtcgattttctcaatggattcttttgtcaaaactcaagctctgacagaggatgtaattgctggatggcgcccaaaagtcatgggttaaattcatttctaaagttagacgttaaggggcggatgtagtacaggtgcatggggatacaggtacaagcagaacagaacaggctcttgatcagttcattaaggataacaaagaagcaaaaaaactcatatgcttacggtgacattggcaatggctatacttgtggataaatgttggtgaattgtatccttatatccgcacacctaactatttaatgtcattcagtcgtcatattacattttgagtgaattgcatcgtttaggtctatgccccatgattgaaatcctgtatctagggatgaaaacggtcggaaacggtatttattcggtaatcagttttttctt

SEQ ID NO: 138025 - DNA, 1120 bp, Zea Mays
cacgggtcagataagcttttctctccccttcgcagctgcaaccgctcgccgcgtgctccctttgtactgaaccgcatcctccccgcgccgacctgctccggcgagttaaacatggccgtcctcctccgcagcacctccgccgccgcctcgactgctggcccctcctcggcgctgctcgccaccaccttccgccgctcccgcggctgccttctgccccgtgccgcgccgcagcgccgcttgtatgtggcccgcgcctcggcccagcccctcgaggtctgcgctaaggagtccatcaccatccctggccgcctcggagactgtcctttcacacagagggttttgttgactatagaggagaagcatctgccttatgatctgaagctagttgatctagctaataagccagattggttatttgaaatcaacccagaaggtaaagtgcctatcgtgaagctcgaggaaaaatggattggtgattctgatgttataacacaagcattagaggagaaataccctgaaccacccttggcaactccaccagaaaaagcttcagttggatcaaaaatattttccactttcattggtttcctcaaaagcaaagatccaagcgatggaacagaagaggcactacttaatgagcttacttcatttgatagttatctaaaagacaatgttcactggtgcagagaccccgaccaaagaggcctccatcgagcgggcccggcattgaggggccgcgccaggcggcaacggaacgacaaagacttcgctacatcccgggagcgaagtccttgtcacccttggcgacgcatcgaaaggggagcccttgctaaacctccgttcagcccagccggccaaagggcatctggggactccatcatactccggaggcgactctttccctaccccttgtctagccgttgactgataggaagctcgcacaaagactcttgaggacaccgtcagcagttatgcttcgtaggcccacctgtcggcgtaacgcgcgagtgtgtaaattagtgtgtgccgtctgctgcatggatggcgctgtaattactctgttacatggaatattctttggatatagttggtagataggggtagggtcgtactttggacc

SEQ ID NO: 138026 - DNA, 2130 bp, Zea Mays
atggccgctggcggcgccggcgcgtgccctccgccggggctgggcttcggcggggagtactactcggtggtggacggcgcgtgcagccgcgacggcagcttcttcggcgggaagccggtgctggcgcaggccgttgggtacgccgtcgtccttggcttcggcgccttcttcgcgctcttcacctcattcctggtgtggctagagaagcggtatgttggatcgcagcacacctcggagtggttcaacacggccggacggagtgtcaagaccggcctcatcgccagcgtcatcgtctcccagtttcagtcacatgtatatcgaatcgagcagtggacatgggcggcaacgatcctgcagagctcgaacgtggcgtggcagtacggcgtgagcgggcctttctggtacgcgagcggcgccaccatccaggtgctcctgttcggagtcatggccatcgagatcaagcggaaggcgcccaaagcgcacaccgtctgcgagatcgttcgcgcccggtggggtcgagcggcgcacgctgtgttcctggcgttctgcctcgccaccaacgtcatcgtcacggccatgcttctgctcggtggctccgccgtggtgaacgcgctcacggccatcaacgtctacgccgccagcttcctcatccctctgggcgtggtcgtgtacacgctcgcgggcgggctcaaggccacgttcctcgcgagctacatccactccgtcgtcgtgcacgtcgtcctcgtcgtcttcgtcttcctcgtctacacctccggcaaccggctcggcagcccccgggtggtgcacgaccacctcactgccgtggccagcgcggtgcggaactgctccgccccgctctcgcaccctgaccaggcatgcggccccgtgcacggcaacttcaagggctcctacctcaccatgctcagctccggaggcctcgtcttcggcatcatcaacatcgtcggcaatttcggcacggtcttcgtcgacaacggctactggatgagcgcgatcgctgcgcgtccgtcgtcgacgcacaaggggtaccttctgggtgggctggtatggttcgcggtgcccttctcgctggccacctcgctgggtctcggcgcgctggctctggacctccccatcacggcagccgaggcggcgaaggggcttgtcccggccgccactgccaccgcgctcatgggcaagtccggctccgtcctcctcctcatcatgctcttcatggctgtgacctcagccggctcggccgagctggtggccgtctcctccctttgcacctacgacatctacaggacctacatcaacccggatgccacaggcgagcagatcctgcgtgtgtccagggccaccgtcctcgtcttcggttgcctcatgggtgtcctggccgtcatcctcaatctggtgggtgtctccctcggatggctgtacctggccatgggcgtcatcattggctccgccgtcatccccatcgcgctgctgctgctgtggagaaaggccaatgccttgggcgccatcctcggcgctgtcagtggctgcgtcctcggcgtcaccgtctggctctcggtcgccaaggtgcagtacgggcgcgtggacctggacagcaccggccggaacgcgccgatgctggcaggaaaacctggtgtccatccctgcctggcgtggccgcagcaatacgactgggagagcagccggcagatcaccacggtggagagcgtccctgccgacagtgacctggcggaggaactcaaggaggagcggctggtgcacgcgaagcggtggatcatcaagtggggtgtggccttcacggctgtgatcgcggtggtgtggcccgtgctgtcgctaccggcggggaggtacagcgccggctacttcaccatgtgggctgtcatcgcgatcgcctggggcacagtcggctcagcggtgatcatcttcctgccgctggtggagagttgggacactatctgcaaggccatcatgggagacatgcccgaggcggaggagcgttaccaggagatgcagaaggagaaggaccttggcaccatggagatggtgcatcctgcatccggtacccgcccatccattgtcgccaatgacgatgaagataatctttcgctagcttaa

SEQ ID NO: 138027 - DNA, 1930 bp, Zea Mays
atactgaagcgattcgtttgctgaccgcctcaccggccctcctcctgctgttaagcccagaggccagagctcccgtcccgagggtttcaggtctgttggcccctagctcctcgtctgcttgccggaccgccgctttttggtgcgacttccacatcttgtcctgacggggatcgctggtttcttcctccagagatcgcatccctggtccgcgggatccgatgagatgcgtgggtactcccgcagtccgaactcgtagcaggcatggctgaagcggccgcatcttcgtcttcgtccggatcctgcgccccgcgccgcctccatggcgccggcatcgtcagggacgcgctcacgtacaatggcctcgccgcactcccgccgcctctgccgccggcgcaggtgcaggttacggcttacggcagcggcggcggaggaggaggaggaggaggaggaggaggagggaagattatccccgcggtgcttttcatcatcgtgattctcgcggtggttttcttcatctccggcctgctccacctcctggtgcgtgtcctcatgaagaagcagcgccgccgagggggcacggcgtcagcagcggcgcgggggtctggaggggagggcggcggggcggacgctgcgttgcagcggcagctgcagcagctgttccacctccacgactccgggctggaccaggccttcatcgacgcgctgccggtcttcgcctaccgcgagatcgtcgtgggcggcggcggcgacggggacaaggagccgttcgactgcgcggtgtgcctgtgcgagttcgacgccgaggaccggctccggttgctgccgctgtgcgggcacgccttccacctcaattgcatcgacacgtggctgctctccaactcgacctgcccgctctgccgcggggtgctcttcgtcccggggctcatgggcgaggacagcccgatgttcgatttcgaggagggcctggaggaagggcggttgtccgaggactgtgacgacggatttggattgcctgggctgaaggcttcagggttggcacagacaccggtggccgagaagaaggtattccctgtgaggttggggaagttcaagaatgtcggaacccatggtgcggtggaaggtggccatgccaatgccaatgccaatgccaatgctaatcccagggtgttgactagggatgaaggggagagtagcagcagcaggttggatggaaggagatgcttctccatgggcacctatcagtatgttcttggcacatctgagctccgggtagctctccagcctggctgtatcaggaatggcactggtggtgcaatgaggggaatgcctcctggtttaagttcaatcaatgctgatattatggaggggaagaagatctgtgcacgcaacaaaggggagagtttctccgtgtcaaaaatttggcaatggtctaatcttaagggcaagctacctgctggttctgatgaatgttcggatgctgggagccttccatggatgaagaaaggaggtgctgtggatacatcgaacttatgactctctgtactggtataatgtgatagtggcctttctttagttagtgttgctcaccgaagttcttacctgtagtcatttttcttatctagttttcatgtgctgattttgattggagtgccaacctcatcgggggcttaacttttggtaatcttgccatgttagtatgttgcgccatgtacattgtgatgacttagaatgatctgattctggtctgcctaatactttgtgttgggtctcatgtatcatttgttccctccatccaaaactataggtcagtttggttatgcatctagatatgcaatgtctagatcagagtatagcttacatcgacatgtgacttctgcactccattcatttgacaaatatgcaacggaaaacatgtactgctatttcgagt

SEQ ID NO: 138028 - DNA, 1124 bp, Zea Mays
ctcagcacacagcattcattcagctagcgagcgagagagaggggaacaaaaaggaggggcgaggaggacagggagccgagcgcaagagctgaggcttcgccgcgaaaccccagacctcgcgccgccccttcccctccgcggcgtcgtcctcgcacgctctccgatccaagatgtataagctggggagaggaaaccgcgacaaggtgcagcagttcatgaccattaccggcgccagccaacctcaggtttctgtggtcaatactcggcatcttgaagatattttcaacagatataaagaacctgatgctgatatgataatggtggaaggaatatctcaattttgcaatgatctgcaggttgatcctcaggatattgtcatgcttgtcatatcatggcacatgaaagccgccacaatgtgtgaatttactcgtcaggaattcattggtggactgcaatcaattggggtagattcaatcgagaagtttcgtggaaaattaccatcattacgagctgagctaaaagatgacaataaattccgtgatatatacaactttgcattcacttgggcaagggaaaagggtcaaaagtctctctcactggagactgctattggaatgtggcagttgctatttgctgaaaggaactggcctcttctggatcattggtgtcagtttttacaggtcagacacaataaagccatatctagagacacatggtcccagctgctggaatttgtgaagacgaccgatccacagttatccaactacgacgacgaaggtgcctggccctacctcatagacgaatttgtggaatatctgactgagaacggactcgtccagcgtaaaagatgaacaacggggagatgcatctccaaacaatggttgggctgtacaaacatgatttatctcggtcagctcgacgcccagggcctgatattggcactcctgctcaattcattcaccaaactgttggcatatcattgaatttgcttataaacgtggggaaacataacttgcctgggaagtggtggctgtcagcctgcgatcgtgaactgtaacttatcgaaaatgcaacggagtttgggactctactatatgatttgtttcagtttttcttagggcttg

SEQ ID NO: 138029 - DNA, 1271 bp, Zea Mays
tccagtcattgtggttatcgggttgggtcgggccgtatcttcgtctgcatacacacacacacgcgctggtttagactcagcacacagcattcattcagctagcgagcgagagagaggggaacaaaaaggaggggcgaggaggacagggagccgagcgcaagagctgaggcttcgccgcgaaaccccagacctcgcgccgccccttcccctccgcggcgtcgtcctcgcacgctctccgatccaagatgtataagctggggagaggaaaccgcgacaaggtgcagcagttcatgaccattaccggcgccagtgagaaggttgcccttcaggcactgaaagctagtgattggcacttggaaggagcttttgacttcttctatagccaacctcaggtttctgtggtcaatactcggcatcttgaagatattttcaacagatataaagaacctgatgctgatatgataatggtggaaggaatatctcaattttgcaatgatctgcaggttgatcctcaggatattgtcatgcttgtcatatcatggcacatgaaagccgccacaatgtgtgaatttactcgtcaggaattcattggtggactgcaatcaattggggtagattcaatcgagaagtttcgtggaaaattaccatcattacgagctgagctaaaagatgacaataaattccgtgatatatacaactttgcattcacttgggcaagggaaaagggtcaaaagtctctctcactggagactgctattggaatgtggcagttgctatttgctgaaaggaactggcctcttctggatcattggtgtcagtttttacaggtcagacacaataaagccatatctagagacacatggtcccagctgctggaatttgtgaagacgaccgatccacagttatccaactacgacgacgaaggtgcctggccctacctcatagacgaatttgtggaatatctgactgagaacggactcgtccagcgtaaaagatgaacaacggggagatgcatctccaaacaatggttgggctgtacaaacatgatttatctcggtcagctcgacgcccagggcctgatattggcactcctgctcaattcattcaccaaactgttggcatatcattgaatttgcttataaacgtggggaaacataacttgcctgggaagtggtggctgtcagcctgcgatcgtgaactgtaacttatcgaaaatgcaacggagtttgggactctactatatgatttgtttcagtttttcttagggcttg

SEQ ID NO: 138030 - DNA, 861 bp, Zea Mays
cattcattcagctagcgagcgagagagaggggaacaaaaaggaggggcgaggaggacagggagccgagcgcaagagctgaggcttcgccgcgaaaccccagacctcgcgccgccccttcccctccgcggcgtcgtcctcgcacgctctccgatccaagatgtataagctggggagaggaaaccgcgacaaggtgcagcagttcatgaccattaccggcgccagtgagaaggttgcccttcaggcactgaaagctagtgattggcacttggaaggagcttttgacttcttctatagccaacctcaggtttctgtggtcaatactcggcatcttgaagatattttcaacagatataaagaacctgatgctgatatgataatggtggaaggaatatctcaattttgcaatgatctgcaggttgatcctcaggatattgtcatgcttgtcatatcatggcacatgaaagccgccacaatgtgtgaatttactcgtcaggaattcattggtggactgcaatcaattggggtagattcaatcgagaagtttcgtggaaaattaccatcattacgagctgagctaaaagatgacaataaattccgtgatatatacaactttgcattcacttgggcaagggaaaagggtcaaaagtctctctcactggagactgctattggaatgtggcagttgctatttgctgaaaggaactggcctcttctggatcattggtgtcagtttttacaggtagctgaagtcaaatgcaatttttatttcattaatttgaatctcagagttgaagcatcaggcgttacttgtatcatagttaaagcataaggtgttacttcctcctcatcttgagctcttc

SEQ ID NO: 138031 - DNA, 853 bp, Zea Mays
tccagtcattgtggttatcgggttgggtcgggccgtatcttcgtctgcatacacacacacacgcgctggtttagactcagcacacagcattcattcagctagcgagcgagagagaggggaacaaaaaggaggggcgaggaggacagggagccgagcgcaagagctgaggcttcgccgcgaaaccccagacctcgcgccgccccttcccctccgcggcgtcgtcctcgcacgctctccgatccaagatgtataagctggggagaggaaaccgcgacaaggtgcagcagttcatgaccattaccggcgccagtgagaaggttgcccttcaggcactgaaagctagtgattggcacttggaaggagcttttgacttcttctatagccaacctcaggtttctgtggtcaatactcggcatcttgaagatattttcaacagatataaagaacctgatgctgatatgataatggtggaaggaatatctcaattttgcaatgatctgcaggtaaggagcatttattttcatctgtaaatatccgttcaccatcttcgcacttcatttccagccataggcatatggagcgcataatccattttattgaaaatagaaggtaccattttaatggttaattgctaccacaaatgtgtttagattttacataatactctctctgtcccaaaatataatttgttttagactacagatacattcattaatcaacatatgaatgtagttggtatgtaactatgtatgtctacattcattattattcattcgaatgtgaacagaaaaaaagagggctagaaagaactatattttgggacagatggagtagattactatactatgaagct

SEQ ID NO: 138032 - DNA, 650 bp, Zea Mays
gcaaatattgtgttgctcctcaataactctactaacctttgtaatttttttatttgtaggatatggagaagggtaagaagtcaggctcgggtaggggctacatttcttggaatgatgatatggacaaggcacttcttgacacatttgtggagtactacaacaagggtgacagatgccaaaatgggtggaagtctcatgtctacacggctgctatcaagaatgtccgagaaaagtgcaatgtggaaatcacaaaagacaacatcatgtcaaggaataagacatttgacaagcaccacactatcatcaatggtatgctagaaacaagtggctttggttgggattggaacaagaacaagatatccgtcgatagtgattctgtatgggaggcttatgtggcgcaatatcccttgcatgttcaagaaggtgatggcaatgctatgacttgggctcttgtgaatgatgctattggtgcaacacatggtctagagggacgtaacttgcctagggctgctgctgctcatgctactgttgccgctcctgtgaggcatacttatgctaggaacaggaagcgcccaaggatgacagtgactcaagatattgatgaagaagatgacgataaagaccaagatcagcatggagaatctgattaa

SEQ ID NO: 138033 - DNA, 3895 bp, Zea Mays
aaaaatgattgtatatttaaaagggcaaaagaaaatattggtttagcttcatatcattcaaacggcaccaagaatgtttatataaccatactaacttcatataggcactggtgtcactgctgaaatataatccctccagttccaaaatattgatttaggttcatgtcgttaaggatcacaaacagcactaagaaagcttatataaccatattagacttcatataggcactggtagtgatcatgcctgcgcctgaccttgaagaaagtgcttcacattcatcagttgggtcatatcctgctgccacggcttcctcagctactctagatattccttccctagtggaaaggactagcagaactatctccagatcttgctgcccaagctgttgacatcaagaggaaggctaaatcacaagagacaggaggccaggatggaagtatggcagtggccagatacttccaaggactttgcgcattacatattttgcaagaagatagtcccttccagcataaaaaagattcaagcagcaccttgctagggggtatggagatgcagtgaaatgccaatgcaccagaattagttaggagggagatggatgcttacttgaaaaataattcaaggactgttcttgtggagatgcctgaagaaggtgaaagagatgcaaatgaacagaaacaagctgttgcagaagaacctgcagctgtagcagtaccaagttctggaacaaaagttaagcaaacaaagaagattgctcaggctgccatcacttctttcactgtttctgctgcagcaaaaccacaaactcaaaaacagtccgggtcagcgacttccatgcgggcgggagatacaagcagaggggcgatgaggagcttaattgtcttcaagagcttcttccctgtcccgtttcagattttccgtagctgtgaacagaacatcagtgatgagaataagcatgaggaggcttggaaggaatatggctgcaccataatatctgatgaatggactgacacaagccaccaccatcttatcaatttccttgctaacattccagcagggacattcttcctagagtctgttgatgcttcaagtgagacagaaaatgaaaatatgttgggtgacatgttggagaagcaaattgataaggttgggaaggaacatgtggtgcagattgtcactgacaatggagccaacttcaaggcagcagagatgcttctaatggagaggatccaacatttagacacaagacaccttgtactgctcattgcttagatgtgatgttggacattgggaagatcaaagaattcaacactcatcaacaaggcaaaggtatgtggattcgtctacaagcatgggaaggttcttgatctaatgagcgacaaaaaaaggtggagatcttgtgaagtcagctgttactcgctctgctacttcatttatcacattggcaagcatgcgtaatcacaggaatggattgagaaatttattcgttagtgatgaatggcatgctaccagcttatctacctctcataaaggccggcaagttgagaacattgttgtttcaatgccattttggaataaagtggaatattgcctaagagcttcacaaccacttcttgatgctctaaggatagcagatggaaattaggcacaagcagctcttgagattatggcagccatggatgttacgaagactgtcattaaggattctttgaaagacaaatcaagttcatttaaaagaagtactagaatactatgagaagagatgggaaaaccaaatggagcaaaagatgtatggagcagccctattcttgaatccaagcaagtactttgccataagggcctgtttgtttagtcggaattgggctgaattagaatttgatacctggccaaacctgtttggcgtacgtggaattggaattcaactttccactcactttcccggcccgaatatgaagtccacgagtgattcctagcctctaaacgtggaaaaggattcttctcaccctcccgacatgtctccgccgctgttgtgacgtccgacatacgacgccgacgatctgcgcactgcatcgctcccgtcgatcctccctaggtaaaccttctcaactagatcgtgctcttcgatccattgtagggagtgtgtgggctagctaggtttgggtctaggcggggcggcggcgtcgtgcagtcgcccatggcgagccccaggaggagggcgccccgggagggagccgcggccagaggaacgctgttagcgagtccagcgtcgcgaacgcgacagacggcgaccgcatcggcacggggtccttggtgcggtggacgggatctcccacacagatctccaacagctgcttccagcaagttccaacagctgcttccacggcgtccgcatcgaagccatacaaatctgttctcttctccatgactctatcccacccactcaccccggctgccctcccatccacacatccattgacgaagagatctgcgtggaggttcagtggacggatttagttgcaggccatccacacatgcatgagtctggagaggtatcagtaagcttgatcagggaactgaggaaggttggagattgatcaggtagctgctgatggactagtctgaaatgaaggccatggatttcccatcgatcgagcaccaacagaaaatgagcagagtgtgtcgaagggcggtgagctagtcatagtcgatgattctctgtcctgctcttaaccgttgttgggtgagcgtattggcacttctagtgaaccaacgctggactagctcaccgagttgtgagcaccaacaaatcagccaactcggcccaggttctctgtcctgctcgcaatgcaaaggcgggggaactacagccaagtatagtctaaagcttaaggcactacagcaggcaagtacaccttcaattgaatggcaaacacacacgcacgcccaaagaaatacagccaagtacagtctaaagcttaaaatatgcatgcaagcgttggtctcaatccagccttttctcctctagaatatcctagccacagatgttggctgttactactctctaattagcaactgcctcaagagaactcaagattatcataccactatatggccattagtttatgtggaagaggctaccgtggttgtcattgttcctttcgttgtttcagattttcttttttcaaacagctatgcattcaatcttataaaatgtatccatatgttttctcaagtgtgtttatgatgtatggtttatctgttgtagatgcctccaaacaacttagaattggttagaacaaatttggaggaaatgagagagagacgtaggaagaagaggctgagagtagcatccttatttgttgcaactatcatgggcatgattgcggactattattatcggaaaagacctagacatcttatggatccctctgaggtgatagagagagatgtagttggtcgtaaacaaatgctaaggaatctgtatcaaggatcaaatgtttattgctatgacagtttgcgtctaactaagagatccttttcggacctatgcaccatcttacgtgagaggtgtggtatgtatgacaccttgaatgtgtcggtagaagaaaaggttgctatctttttgcttgtagtgggtcatggcactaagatgaggatgattcgtagctcatacgggtggtcacttgaaccaattagccgctatttcaatgaggtgttgagaggtgttctatcattatgtcatgaatttatcaagcttcctaaccctttagctgtacaacctgaagattctaagtggaggtggttcgaagattgccttggagcactagatggtacacacgttgatgtttttgtacctttggctgatcaagggaggtataggaataggaagcaacaaat

SEQ ID NO: 138034 - DNA, 678 bp, Zea Mays
atggatgcttacttgaaaaataattcaaggactgttcttgtggagatgcctgaagaaggtgaaagagatgcaaatgaacagaaacaagctgttgcagaagaacctgcagctgtagcagtaccaagttctggaacaaaagttaagcaaacaaagaagattgctcaggctgccatcacttctttcactgtttctgctgcagcaaaaccacaaactcaaaaacagtccgggtcagcgacttccatgcgggcgggagatacaagcagaggggcgatgaggagcttaattgtcttcaagagcttcttccctgtcccgtttcagattttccgtagctgtgaacagaacatcagtgatgagaataagcatgaggaggcttggaaggaatatggctgcaccataatatctgatgaatggactgacacaagccaccaccatcttatcaatttccttgctaacattccagcagggacattcttcctagagtctgttgatgcttcaagtgagacagaaaatgaaaatatgttgggtgacatgttggagaagcaaattgataaggttgggaaggaacatgtggtgcagattgtcactgacaatggagccaacttcaaggcagcagagatgcttctaatggagaggatccaacatttagacacaagacaccttgtactgctcattgcttag

SEQ ID NO: 138035 - DNA, 249 bp, Zea Mays
atgttttaggttgccccggaagatgagcggacaaagagaaattccccactaaagttgtcgctagagtttgggcgagagtcaaacttcgtcgagctggtcatggaggcttatggctgcgagcttagttggcagcgggctactgtagcttggatggcggcggtgctgccgcgagactatagagaagatgagtctatgattgatggcttgaggtgttatggtgacatgtttttatataggctgggagatggg

SEQ ID NO: 138036 - DNA, 1362 bp, Zea Mays
gagatgggagcgcaccagtaccaccagcctcttcatccccacagccataaaccgtcgtcgagcaaaaaccctggctgcttcctgtccaaagccgtctgcgcttggctcgcctgcggcttcctctccttggctctgctccacctcctctgctgcagcccggccggcaaccaacggccggcgttctctcccctgctcagttacatcaacaacacatactccttcgtctcatcggtgcctggagctggaggagccaagagctgcaactactcggaggggcagtgggtgtgggcgccgggccacgcgcgccggtacaacggcagccagtgcgacgtgaaggagagccacgactgcatccgcaacgggcggcctgacacgggctacctcgactggcggtggcagccggcggggggcccgtcgtcgtgcccgctgccggcgttcgacgcgggggcgttcctgtcggcggtgcgcggcaagcacgtggccttcatcggcgactccatggcccggaaccaggcgcagtccctggtctgcctcctcagcgccgcgttcccgagccggctgctgcgccgggacgaggagaagaagcacaccttctggcggtacgcgttccccgcgcgcgacgtgacggtgtccttctactggaccccgttcctcgtccgggccacgggcaaggcggaggacgagagcgtcccctacagccacgtgcacctcgaccagccgggcgaccgctgggcggccgacgccggcacgatcgacgtggccgtgctcgccgccggccactggctgctgaacggggccatctactacagcggcggcgaggtggtcggcgcccacaacgcccccgcggggctcaactacaccggcgtcggctacgcgcggccgctcaggatggtgtaccggaaggcggtcgagcggctgagctcctccgagtccgacggccggccccggaccctggtgctggccacgttctcgccggcgcacttcgacggcagcccgatcgacagccccacggcctgcaccaggatggagccgtacagggaaggcgagaaggaggtggcgtggatctgcaaggaggtcagggacatcgtgtacgacgaggcggaggccgccagggcgaggggcgccagcgcgacaagggtcgaggtgctcgacgtcacgaagctggccaccatgcgcccagacgggcaccccggcgtgtacatgaaccgcgaccccttcaagcacggcgtgccggataagatctactccgactgcctccatttctgcctgcccgggcctgtcgacaccttcaacgagatattactgcagatcctgaggaagaggcggtgaccctcccttgttattcagccagccacgcttttg

SEQ ID NO: 138037 - DNA, 77 bp, Zea Mays
ccgtttagcccgcttttggcccgtttttttcgtgctaaacgggccggtctggctaggcccgctgtgggccggactcg

SEQ ID NO: 138038 - DNA, 4930 bp, Zea Mays
cccgcctgagctgtgctgccctctccttccatttccacactcgccaatcatccaccccatccatcgccgtcgcctctttcttcccccctctcttcttctccctccccgatccttcgcttctctatcgcgagcacgacggagcaggagggcggcgacagcaaggggatgtcgggggcgtggggcggcaccacgcagaagtgcgcgtcgtgcggccggagggtgtaccccgtcgaggagcttgccgccgacggccgcgtctatcaccgcccctgcttccggtgccaccactgcaagagcacactccagtttagtaattattcttccgtggaaggtgtcctatactgcaagcctcactatgaccagatattaaaatcaacaggcagtttggagaaaagttttgaaggtgtggcccgatcagctaagtcagaaaaatcaaatggacataagggccaacaaagcagtagattctctaatatgtttgtgggcacacaagagaagtgtgttgtttgcaacaagactgtgtacccgcttgagaaggttgctcttaatggaaattcttatcacaaatcatgctttcgctgcacccatggtggttgtacgctcagcccatccaatcatatcacacatgaaggcaaactttattgcaagacccaccattctcaactgtttatggttaagggaaatttcagtcagtttgaggacaattctgggaatgcaaaagttactattgagaaactgccagaaacagaagaagccaccaagaatcctgatcaaggtgatgaagccacaaggaaaccggtagaaaatgagcctacagatgagaaaacttcaaaaaataatgttgcagctgagaaacaattgcaaagtggtgttgatgtcacaaaaccatctgagagtaccacagcagaaaatgaacgaggtactgagggtgagtcaaagagtaatgttgtcaacaagaagccgtcagaaagtattgtagaaaagccactacagaacagtgtggttgatgtaaagccatcaggaaacagtgcagccatgagaaaaccctggcaacgaagtatgcaaacagataaaccgtttctgagtagcacaagcactgtgaatccatcatcgagcagtgataccactgagaagctatcatcaagtaatggggttgatatgaaacagtctgaaagcagcacattagtaaaaacaacatgtaaacaaaattcaccaactgagaatccaccacagagcgttttaccatcggataagccatcagcgaccagtgtagatgatgcaaagccatcagaaagcagcaaagtgataaaaaaaccatggcaacgcaatatggctgccgagaagcaattacagaacagtgcaccatcacagaaaagtgtagctactgataaaccatcaccaacaaccggcatgaagtcattagataacaccacagaagttaaaagtccatgggggcgcaggatgttcaataacaagtcactaaagcgcagtgtagatactgagaaatcttctgaaaccagtgtggttgatgtgagacctggggaaaccagtacagtagcccctgtgccacagcaacaaactgaaaatgttgagaaaccttcagctaccagtgcagatgatgcgaagagtgcagatgatacgaagagtgcagatgatgtgaagccatcggttgccagtccagatgcgaagagcacagatgatgtaaagtcatcggagaataatgcggcagtagttagaaagccatggcaacgcaacataggcactgggaagcaacccctgaccactgtagttggtccaaagacgactgaaacaagtggaactgtcaaaaggttgtggcagcgcagtgctgcaactgcatcaaaaagtggtacggctgttgtgacaccattgcaaagcagtgtggttgtctccaagccgttccaaagcaacgtagctgtgaaaaagacatggcaaagaagtgtaactccagaaaaccagctagagagtaatatgtctagcaataagccattgccaagcaaggtggttgttgagagtctactgcaaagcaacaccgttgagaaagtgtttcagagtactgtacctactgaggaaccacagaaaggcatcatggccactgaaaatcaatcgcagaccatcaaagttacaaagaagagcaatgaaacatccatggagctatcagtaacaagtgagacaaccaaaccgccaccacttgctgcaaccgtgttgcaaagtgatgtttccacagaacaaccatcacaaactgatatgcctaccatggcacctagtcagatccctgagcccaccgagaagccatcagaaagtgattttaatgctgagaagttatcagaaagtgttgttaaagctgagaagtcatcaacgactgacactgctgctgagaaaccacttccaagtatgatcactgagaaggtagaaagtgtagcaggcacattgaagccatctcaaagtgatacagcccttcaggagatcttagagaggaatatggctactgaggaaatactgcaaactgccatggctgttgaggatgcacctccaaccaatttgatcaccgagaagtcattaatgaaagatgcttcagaggagccagttcaaactaacgaaccatctgagcagccactgaaaactgaagagattgagaagccacaacaaagtgaaaagattgctacggacacgagagggagtgaagtatctactgaggagatgctagagcttgaaagtaatgccactaaattaaacaaggatcaatcagaacttgaagggctttcatctggtaggaatcctccaaacttccaaagcaatccaaatgctgggcagcgatcagagtccaaaggcattgtggccgagaaggcagctgaccatataatggaagctgaagatgatgtggatgctgagcactcatcagaatctcaaagcgttgcacctgctgaggttcgaaaggagcaaccatcagaacatcaaaaggatgtggatatggagcagctattggaacctcaaaatcaggatcatccttggaatccactagatcctgttagtgatacagctgccaaggattcatcagagcctaaaagtgacatagctacagaaaaacctgcagaatctcaaaacaatgcagaacagtcagttgagcagcaatcagaaccgcaaagcgataaatcaactgagaggccagaagtgcatcaaagtaatacatctaatgatgagctttctaggcttcaaaacgatgcaggtactgataaactatcagtacagtcatcagatcctgagagcaatgcatctgtcagtaagccatcagagtctcaaactgatgtggctaccatggaggcactggaacctcaaattgatgctcctcctgataaggcaactgaccagccagtgaaacctcaagatgatgcatctgctaagaatccaatgggaactgaaagtgatgctgtttgtgataaaccttcagaaagcagctcagatactgaaacacttcttgtatgccatcagaacagcagcataaccactgatgaacctgtacaaggtggcatttcttatgatacaccacatcagagaagtgcacccatagaaacaacaccaggaagtgaaacagttgttgacgattgcatacatcacgaagataccagcagcaaaccatcagaggaaaacaaagctattgaggagccagaagaggtgagtgccaagctgccagatgaccatgtaacttctgagaagtcgtcagaggaagacaaagaaaacgcagaggcatcagtagacagtgctcccctggggaacccattggaggtcaatgaggagagctccaatccttcaggggatactgtaactcctgagaagccactggaggaggataagacgagcgcagagccatcagaaagcgatgcatcctttgggaaaatattggaggccgatgaagtgagtgccaacccatcagaggatattgcaactcctgagaagccactggaggaaggtgtgggaagtgtggaaccatcagaagacaattctgttcttgataaaccattggaggaagaagaggttgatgccaaaccggtgaaggacgttgtaactcccgagaagccattggaggaaggctcaacaactgcagagccattagaagacaatgctgcccatgaggaagcaaaagaagaagatgaggtgattgccaagcccctgtccagtgtggcacttgagaagtcactggagggaagtgaggcaagtgtagagccatcggaagacaatgctgctcttgagaaaccatcggaggacgacgaggcaaatgccaagtcatcagaggacagtgtatatgtggagaagccacaacaggaagaagatgacaacggtgtcaaggcattagaggagggcgtgtcccctgagaaatcagccgctggcaaaccattagaagaagacccagtccatgagaagccagcggacgcagtagctgagccgtcatctcaggacgacactgccactgaaaagccctcagctacaactgacactgcagaaactgcatgagacatcagttagctggttaaagttagttagcaacagttttaaacggagtgtggatcgaatactattggtcatagttcggcgtggcttctgtttgtttttttttttggtggggtgggggtggggtataatgcttgagttgtaaaatttgagggaaagaaactatagtattgatttggtttttttacaagcaataatcccctcctccacatgttaggaggaggataccattgaagttctatacataggatttgtgtgcggtttgattttttgtttggaagttgtactttgtaatcgattttgtgcaaatatgactgtgcttgctcattattcggttttctgcgtgtaaattgatctagcaagattttatgtgcaaatggtgtggctaagctttcaataatactag

SEQ ID NO: 138039 - DNA, 315 bp, Zea Mays
atggcttatcatgattgctgtatccagctatccatacatgatgcagattttgttggacagattgcaagatttgaggaggcagaaatcagaaagctgttattgaacagatgcagagattcggtgctttcctgtaaagctgacaaggggggaggacagcagcagggggagggcattgacgtacctgggggtggcctctggccagcagggcacagccgtgtggtcagccagcaagctgtgatgctcgctcgagcaagagacagccaattgtcgcgacatgcggagagggattgctggagatgggttgccaggaggtga

SEQ ID NO: 138040 - DNA, 90 bp, Zea Mays
gcactctgctttctcagccatgctttaatcaagcaaacaaatatttcactgaattcagttagcataacagatctcgcagccctgctctga

SEQ ID NO: 138041 - DNA, 1798 bp, Zea Mays
aaacccgctttgcccttaaattgccatatggtgtctcactgtctctcatcaagctgtggttcattcaaagttcaaggctgaacaacctcccaccagtcctccttttttgacatcaaatcaaaagcaatgcctttacttcaccatggtggtccatccatggcatgcatcgaccgttgcagaattccaacaaccagaccagaaaatcacttatcactgaaagaggacaaggagatggaactcacggtctttggtccaatccctttgaaccgcgagagctccttcttcacctcatccaccgacagttcccgcaggtactcgaggcaaatcttgcccctccgctccctcacgtccctcagcatggaccgtatcctggccgccttcgtcgccgccaggccgccgcaccggatggcgtcctccaacctctttccctcctcatccaccacctccacaacaaaatgaataggaatagaagagagtgagggtgtttagaccccgggagtttgtagaagcttctggaaggcactggtgcgcagacattgactcgatgctagtagctcacctggtcccaggaggggaaagcggccttgagcgaggcgaaggcgcggcgggagatggcgtcggtagtgttctgggagaggagcgtggtgacgaggccgtcaagcactgtgggggacgaaggccgagggtcacggttaggcgagaggccaccgaggcggaggacgcggaaggccgcgaactcttcggggaacccgtggaacgcgaggagggcgtcgcggactaccaggcattgtgccgagcagggggaggcatgggaagggtagggctccggcgaagggtcgtgcctcgccggtgaggccggagccttccgtttgggcttgcgaggcatcgtagaaagaaggttgcggcggctgccggccggccacggcgatgcggctggaaaaagaaagggaaaattatttctctagcattgaaagttcttcagatttggaaaataccatcaaaatatcgccgttacaggagataacaccaaaaaggtccttccgttccattatacaacactacgttcgtttcttacgccgttacagaaaataacaccaaaaagctctcatttccagtggactgccctcgattcctctccagaccgtgaccgagtactgctgttcatgagtactactcagttagaattgaagactatgtccatgagtactactcagttgaacgtttcaaagctacttatcagtttgatattaacccgatggttgataaggcttagtggcccatggttgatcctgggtttgtcatggttcctccgaagttagagaggcctgcgggtaggccgagagtacgtcgaatcagaagtagtggtgaggctgggaaaagaggcccttaccaatgcaagagatgctttcagtttggtcatattgaaaagacttgtcgtgagccccctgctgaattgggggatgagctcccaccacagcctaaaacacgaaagagaaattgtgatgttgtcctgcacacaccaaaaaggtccaacacggcacaaacaactgcatcaactcctccttcgacaggtccaataacaagaagcatggcagcttcaccttctacttctacaggtgaaggtcctgtcactagaggaatgacaaacatatcacctgggggcattgcaagaagagttatcattagttagtaggtgtaatggagatggctgacttgatgttatgctgaaatggagatggctgacttgatgctaaaaacctactctaatgttttgtgctaaaaaccttctgttgtgttc

SEQ ID NO: 138042 - DNA, 319 bp, Zea Mays
aatacctcttcccatgttaacttcagcattcttcacattgttatcacgtcttacgattccactacgcaccggtggcctctagaggtctttgttggatatgtccaaaccatcccagccggtgttggacaagttttttttaaaattgatgctacccctggcttatcaagtatattatagttctggactcaatatcttcttatatgtccacaaatccaatgcaacatatgcatttcggtaacacttaaaatttccgtatcattcagatctgttgagacacatagattccaaatataatccaatgcaagccctgcatttcatt

SEQ ID NO: 138043 - DNA, 863 bp, Zea Mays
ataaaaagaagggacaactcggtggtatcaatttctacaatcatgaaaaaccacatggaagtagcaaattcttataaattataattgtcacgacaactcggtggtatcaatttctacaatcatgaaaacatgtatttgaggctgtctcctcttaatttatctcttatggtaaaataatagaaagttaaagagtatatttttttatcacatgttagatttaacgcagtacgattcatcagagaagaaaatccttccctttactcctctcccacaatagacataagttgaatactataacatatggtttacaaactattatatattgtggatgccacattgctgtactcgtttttttccatatgataggcatttgctatttttgcagttgaagatggttgaccttcagtcatctgaagcagatttggccaagtcagcactttttaccaaacatcctgaaatgaaggattggccaaagaatcatcatttcaaaatcttcaaaatggaaatcgaaaacatattcttgattgattggtttgggggtcctaaacccatatccccctcccagtaccttgaatttggaagaaatcagggctcattgatgtactcataagcgaagaatgcttcatcgatcaatatcccgtctgtgtatgctcttctcaaaaatgaaatccatattgcacatattgtaaagacatctctgtgcacggaataaacctgtagtgttattaaaatgaaatccatatggcacatattgtaaagacatctctttgcatagaataaagttttagtgttattattattgattatgttgtttaattatcacatcttcgtgaacaattactttacaaaaaagaagtctacag

SEQ ID NO: 138044 - DNA, 987 bp, Zea Mays
gtgattgcgtccgcctccttcaaccctatccacatctggcacagaggaaaattggctacggtacaaaacaccgaggcatcgatggactcttccaccagctgacagctatgatttcccctgctcacctcgccttcgccgccgccttcctcctcgtcgtccggtcgtcggcgcctggcgctgctgccgcccgcccgatcttcgatggcaagccatccccctccgaggccaccgccactgcgaggtggctcgccgcccagaacacgtggggtgtcctcagcacaatatcaagtgacttaagtggagctccatttggcaatgtagtttcatatagtgatggagtaccaggcgagggccgtggaataccctacttttatctgacaactctggatcccagtgcaagagatgcactggaagatgaaaggacctcttttacccttagtgagttccctctgggaacttgtggggaaatagatcctgaaaaccccacttgtgcaaaacttactcttaggttgaagatggttgaccttcagtcatctgaagcagatttggccaagtcagcactttttaccaaacatcctgaaatgaaggattggccaaagaatcatcatttcaaaatcttcaaaatggaaatcgaaaacatattcttgattgattggtttgggggtcctaaacccatatccccctcccagtaccttgaatttggaagaaatcagggctcattgatgtactcataagcgaagaatgcttcatcgatcaatatcccgtctgtgtatgctcttctcaaaaatgaaatccatattgcacatattgtaaagacatctctgtgcacggaataaacctgtagtgttattaaaatgaaatccatatggcacatattgtaaagacatctctttgcatagaataaagttttagtgttattattattgattatgttgtttaattatcacatcttcgtgaacaattactttacaaaaaagaagtctacag

SEQ ID NO: 138045 - DNA, 998 bp, Zea Mays
gtgattgcgtccgcctccttcaaccctatccacatctggcacagaggaaaattggctacggtacaaaacaccgaggcatcgatggactcttccaccagctgacagctatgatttcccctgctcacctcgccttcgccgccgccttcctcctcgtcgtccggtcgtcggcgcctggcgctgctgccgcccgcccgatcttcgatggcaagccatccccctccgaggccaccgccactgcgaggtggctcgccgcccagaacacgtggggtgtcctcagcacaatatcaagtgacttaagtggagctccatttggcaatgtagtttcatatagtgatggagtaccaggcgagggccgtggaataccctacttttatctgacaactctggatcccagtgcaagagatgcactggaagatgaaaggacctcttttacccttagtgagttccctctgggaacttgtggggaaatagatcctgaaaaccccacttgtgcaaaacttactcttaggttaatggaaagttgaagatggttgaccttcagtcatctgaagcagatttggccaagtcagcactttttaccaaacatcctgaaatgaaggattggccaaagaatcatcatttcaaaatcttcaaaatggaaatcgaaaacatattcttgattgattggtttgggggtcctaaacccatatccccctcccagtaccttgaatttggaagaaatcagggctcattgatgtactcataagcgaagaatgcttcatcgatcaatatcccgtctgtgtatgctcttctcaaaaatgaaatccatattgcacatattgtaaagacatctctgtgcacggaataaacctgtagtgttattaaaatgaaatccatatggcacatattgtaaagacatctctttgcatagaataaagttttagtgttattattattgattatgttgtttaattatcacatcttcgtgaacaattactttacaaaaaagaagtctacag

SEQ ID NO: 138046 - DNA, 928 bp, Zea Mays
gtgattgcgtccgcctccttcaaccctatccacatctggcacagaggaaaattggctacggtacaaaacaccgaggcatcgatggactcttccaccagctgacagctatgatttcccctgctcacctcgccttcgccgccgccttcctcctcgtcgtccggtcgtcggcgcctggcgctgctgccgcccgcccgatcttcgatggcaagccatccccctccgaggccaccgccactgcgaggtggctcgccgcccagaacacgtggggtgtcctcagcacaatatcaagtgacttaagtggagctccatttggcaatgtagtttcatatagtgatggagtaccaggcgagggccgtggaataccctacttttatctgacaactctggatcccagtgcaagagatgcactggaagatgaaaggacctcttttacccttagtgagttccctctgggaacttgtggggaaatagatcctgaaaaccccacttgtgcaaaacttactcttagggctaagttgaagatggttgaccttcagtcatctgaagcagatttggccaagtcagcactttttaccaaacatcctgaaatgaaggattggccaaagaatcatcatttcaaaatcttcaaaatggaaatcgaaaacatattcttgattgattggtttgggggtcctaaacccatatccccctcccagtaccttgaatttggaagaaatcagggctcattgatgtactcataagcgaagaatgcttcatcgatcaatatcccgtctgtgtatgctcttctcaaaaatgaaatccatattgcacatattgtaaagacatctctgtgcacggaataaacctgtagtgttattaaaatgaaatccatatggcacatattgtaaagacatctctttgcatagaataaagttttagtgttattatt

SEQ ID NO: 138047 - DNA, 554 bp, Zea Mays
gtgattgcgtccgcctccttcaaccctatccacatctggcacagaggaaaattggctacggtacaaaacaccgaggcatcgatggactcttccaccagctgacagctatgatttcccctgctcacctcgccttcgccgccgccttcctcctcgtcgtccggtcgtcggcgcctggcgctgctgccgcccgcccgatcttcgatggcaagccatccccctccgaggccaccgccactgcgaggtggctcgccgcccagaacacgtggggtgtcctcagcacaatatcaagtgacttaagtggagctccatttggcaatgtagtttcatatagtgatggagtaccaggcgagggccgtggaataccctacttttatctgacaactctggatcccagtgcaagagatgcactggaagatgaaaggacctcttttacccttagtgagttccctctgggaacttgtggggaaatagatcctgaaaaccccacttgtgcaaaacttactcttaaatggaaaggtactaaaaattacatccatgataagatgatcgatcac

SEQ ID NO: 138048 - DNA, 474 bp, Zea Mays
ggcgagaaattgatggcgcctccgatcgcttcttcgcccgcgaagaccctgcgcccaacccaagaacctcgccaagcatcctggggagacaccgaggcttccagatgacgggcgaggacttactggtgagggcgcggcgcggtagggcgtagaggcgcaactggagaggcggagggaggagcagagtggcagaggcccgacggagaagtcaagggcacaaggcaagatccggaatcgggatcagcggccgatcaggattcgaggttgggggtgaagccgagtctacgcggatggcgagaaacacggccgggagaatcaagaacagaggcggatggaaaccaatgtttatgcagccggagaagggagatcggttgcgcgcatggcggagttcgtttctgggtcagcgctgttcttctgtgtatggtccaaggagcaaggtcgatctggtagcgttcagccgcgattcctggcggc

SEQ ID NO: 138049 - DNA, 1372 bp, Zea Mays
acatttggacaaccacgagcaagagcaactaacgggtgggcccacccggaagcgacttgcacaagtcgccagccgggccacccccttcgcctacctcccctgccggcgctcagatccgccgccccgcagcaccctcccgcgccggcagcaaccacgacagacaagcagcccggcgcgcggctagctcacacccttcgcaccatgccgggtctggtcgcctactcgggcctcggtctaggcctcctggccctcgccgcgctcgagtcactgcccctccgcgtcccgccgctccggtccctcccacgccgcctcaccacgccgctgcacctccgccatctcctcgccgcggccgtctccgcgctctgcctcatctccgctctcgtctccgcgcaccacctctcgctccccacgctcgccgcctcggccctcttcctcctctattccctcgcacccttcgcgccgctcgcggcgccgctgccctcccccctcctcgatctcctcctcgccgccgccttcgcgcaggagctgcttctcttcgcgcaccgccgcccctccaccgcggctgggatcgagaaccggtacttcgacctgctcctcgtccccattgcgctctgcctcggcgccacgctgctcgccgcgcaccggccaggggagcccgcgccgcggatcgcccgcgcggcgggcctggcgctgcagggtacgtggatgctgcagatgggcttctccttcttcaccagcgccatcgcgcagggctgtgcgctccacgccgccagccgcgctgactacaccattaagtgccgcacccacgaggattaccaccgcgcgcggtccgtcgccacgctgcagttcaacggacacctcgcactgcttgtgatcgccggcgcggccgcttacgcagcagtcctatccaggtcaaaccgacctccgagcgggtacagtgctctggacaaggaggtccagatggaggggatgccgatgatgtcacagttcacactggattcggatgaggagaaggaagaggaagtgatcacctctacagcagctccagtggcaaatggcggggagtcccatgacgagatcccactgcacgaaccaggttccaagtgacggagatgaaatctgggctgttcttctgtcgattagccaagtggaggagggtgtcgacagagctggcacactggggcttcatgtttgtgtgttttggtacatcattttaatatgggtttcactttctgatatttggttaatatgtggaaagaaatcttgcttagtttgatctgcatagagtttatatctgtgaaatattgtaatttgttgggttcagaacttcagatagatctttcagaaataaagttaacacacttggagatca

SEQ ID NO: 138050 - DNA, 1050 bp, Zea Mays
ccggccattctcaatcgggaaagcgtcgaaaacccaaatccaaacgtcgccgcaaaccgcgcgatccccaggcccaaagcgccgccgttcatgagcttcctcgccggccgcctcgccgccaaggagggcgcgtacttcctccaggagtcaaagactgccgtcggccgcctcgcggagaagctcccgccctccgcttcggcgcccgggggtgcgtcggcgcagccctcccccgacgtgctaccggagatcctccgccactccgtgcccatcaaggggacgccgcccccggccgaagcctccctctccgcgtcctcccgctgggccctcccgccgggcggcggcgaggctgcgggcttgcaccccgacgcgctcaacccgctccgctcctacgtctcgctgccgcaggccaccttcggccccaaaagatggcagcttccgaacgaacaacctaactacttggcgtcaacagcaaatgaaaggcggcgagatcgggccccacctcccttggaccctgagaatttgaaagccgtaattgctggttactcacagattgggaaggcattcattactgcaacttttatggtgtttggaggagcaacagctgtgctgttgtacacagcagataagctacagttgcattcagtagatgatgttaaaactaaaggaaaagatgcactgcagccacgagctgatatgattaaagaacaaatagctccattaagaagttgggctgaagaaatgtcccgaaaatggcatttcgaaggtggtaaagaagctaaggagaagtctggcatcgttaaagaactttcaagaattttgggctccaggactccccctggttgatcaacaatgacatacggctgttgtaaatccaccgtccactttgttgtatgcgtccttatcgtttccatatgtttgtgtataggaaacaaaacatcctgacatctagtttggatgtatatattggagtatagaattggaattggaatcagcttttctaaattttgttgtttggttgcacttggaatttagatttggaatcataggcct

SEQ ID NO: 138051 - DNA, 1166 bp, Zea Mays
ccggccattctcaatcgggaaagcgtcgaaaacccaaatccaaacgtcgccgcaaaccgcgcgatccccaggcccaaagcgccgccgttcatgagcttcctcgccggccgcctcgccgccaaggagggcgcgtacttcctccaggagtcaaagactgccgtcggccgcctcgcggagaagctcccgccctccgcttcggcgcccgggggtgcgtcggcgcagccctcccccgacgtgctaccggagatcctccgccactccgtgcccatcaaggggacgccgcccccggccgaagcctccctctccgcgtcctcccgctgggccctcccgccgggcggcggcgaggctgcgggcttgcaccccgacgcgctcaacccgctccgctcctacgtctcgctgccgcaggccaccttcggccccaaaagatggcagcttccgaacgaacaacctaactacttggcgtcaacagcaaatgaaaggcggcgagatcgggccccacctcccttggaccctgagaatttgaaagccgtaattgctggttactcacagattgggaaggcattcattactgcaacttttatggtgtttggaggagcaacagctgtgctgttgtacacagcagataagctacagttgcattcagtagatgatgttaaaactaaaggaaaagatgcactgcagccacgagctgatatgattaaagaacaaatagctccattaagaagttgggtacgtgttcgtagcgataaaaaataagattgcaacaacaaagtgatggaaactgaaagtagagactccaaaagttttcgagaaaagggccatcaaagagggcacttaaaagaaagaagatgacacaaacaatatatgataacctgtattcagaaggtggcctttatagggtagtcaaagggagtggaggtggagccaaagatacttagtggtggaatgaggaagttcaaaggactattaaagagaggaaaaaaatgctatagatctttgtattatgataggagtgtggatagcataaagaaatacattgtagcaaagaagactgtaaagtgacctataagtatagcaaatggtagggcgtaagttttataggatgacgattagacctgctatattgtatggtgcagaatattggcctaataaaagacatgttcagt

SEQ ID NO: 138052 - DNA, 1946 bp, Zea Mays
tctgtcttacgtttaatgttttagatagcttatttcaataaatggttattatattctccataaataacaatttgagttcaacatcttagtcagtttggcgatatatatcaggaggaatattttatcaaatatctgaaatctgatattcagattgttaaggatcttccagtagagctgcagtcattagacttggaggcgattggtagcctagttaatgatacagatgtcatgaaagaggcgaagcccagtttatacatgaaaaaaatactgccaattttactgagaaacagagttgtgcactttataggattcggcaatcgcttatcttttgacccaataccttctgaccttcagagattgcgatgcagatgtaattttcatgctcttcgttttgtatacaaaattcaagaaactggtgcagttcttgtagagaggttgcatggccatagggcctcttcgtcacctttgaaggataatcttttaggccagtttgccgttaagtctgaccccagggcgaacaagagtgatgcatccaaatatctggctgttcatctccggtttgagattgatatggttgcatactcattgtgttactttggtggtggcaaagatgaggaagacgaactagaagcttatcgccaaattcactttcctgtgttgtcagaactcaagaagatgacaaagttgccctctgctgctttcttacggtccgaaggcaaatgtccccttgcacctgaagaggctgtgcttatgctagcagctattggtttcaagcgcagcacaaatatatacgttgcaggtgctgaaatttatggagggaaggataggatggctgccataagtcgtctttatcctgctttagtaactaaagaaacccttctgtctccatcagagctcgaaccatttaggaacttctcatctcagttggcagccctggacttcattgcatgcgcagctgccgatgcatttgctatgactgacccaggaagtcaattctcttcccttgttcaaggttaccgcatgtactacggtggtggggatcttcccacgataaggccaaacaagcgccggctagccagcatacttgtgaagaatgccacaattgagtggaatggatttgaaaatagagtaagaaaactcatacagcaaactaagcaagttcacgagaggcctgttgcaagaagcgtatttagacatccacggtgtccagagtgcatgtgcagaacagagcactaagatctttttttatagtttcttgtgtctataccaatactcctttttcacaagaaacactataccaatgagatcgccaaaggtagttcttttgtgctttggccgaaatctggatatgtctcttgctcttgaactactttggaaccaaaccataaaagaaaagaaaatacagtgattgagctcttgtttgtatcagagaagcaatatagcagactagcccatccattctcttactgacatgatctactgctaggcatcatgttggattttgagtattaggcagaattttgtttcatgtttgacagaagaagtggaccggggactgatttttgcatctggacaacaatgctgccatattttttttattgagatcagctataccattctgtgtatgaaggtgcatcatctgcagttgactgtcgaagtaatatattggccaaactgagcaacagcattctcatcttttaagagtgcttcaattctactcgggctaccattcaacaaatcaggctgccagagttctgtcaaccgtgtattgccatctccattgttgctaccgttgtgatggagctaagtggcatattgaccccttttttaccattcttttgcccattgtagtaccataaagagatgtatttagttaggtcgtaagtttatatcaactgaaagctttcattatcagcgagagaaacgttccttttttgtgcatgctt

SEQ ID NO: 138053 - DNA, 2498 bp, Zea Mays
cgatcgcaggatccgacgagccaccccgcatctcgtgctcctcttcgcttcccaccgaaccccgcttatcgagatccaaatccagcgccagaatgcccgaggcggcgccgcccccgccgctgccgctcctggcggcggcgagctccccggcggctgctgcactgccgcgggcgaggcggcggcagcagcggagggggtggcggcgcccgcgcaggttgctggtctggggcgtcctcgtggcattcttcttcatcatgaactggtggatgttctcccgacttcaggacccctcggcgcgcccgcacttccggttgaggcgccacccaccccgcgcgcccgctactgtcaattcgtcgctctcgactctggaagaggtggctaatgctgctaaggggaagagggcacatagggttatgctcactcgattgcttgctttggcaggccatgctttggcagagagaccaggcctgaacctaaggatttgtgggaagagccgataaatgctactttgtggcgaccgtgttctgaccaaagggattggaaagcctcagagggaaccaatggctacatcatgatcagtgcgaatggtggcataaaccaacaaagggttgcgatttgtaatgcagttacaatctcgcggttgctcaatgcaactcttgtcctcccaaaattcttgtacagtaatgtttggctggacaaaagtcagtttggcgatatatatcaggaggaatattttatcaaatatctgaaatctgatattcagattgttaaggatcttccagtagagctgcagtcattagacttggaggcgattggtagcctagttaatgatacagatgtcatgaaagaggcgaagcccagtttatacatgaaaaaaatactgccaattttactgagaaacagagttgtgcactttataggattcggcaatcgcttatcttttgacccaataccttctgaccttcagagattgcgatgcagatgtaattttcatgctcttcgttttgtatacaaaattcaagaaactggtgcagttcttgtagagaggttgcatggccatagggcctcttcgtcacctttgaaggataatcttttaggccagtttgccgttaagtctgaccccagggcgaacaagagtgatgcatccaaatatctggctgttcatctccggtttgagattgatatggttgcatactcattgtgttactttggtggtggcaaagatgaggaagacgaactagaagcttatcgccaaattcactttcctgtgttgtcagaactcaagaagatgacaaagttgccctctgctgctttcttacggtccgaaggcaaatgtccccttgcacctgaagaggctgtgcttatgctagcagctattggtttcaagcgcagcacaaatatatacgttgcaggtgctgaaatttatggagggaaggataggatggctgccataagtcgtctttatcctgctttagtaactaaagaaacccttctgtctccatcagagctcgaaccatttaggaacttctcatctcagttggcagccctggacttcattgcatgcgcagctgccgatgcatttgctatgactgacccaggaagtcaattctcttcccttgttcaaggttaccgcatgtactacggtggtggggatcttcccacgataaggccaaacaagcgccggctagccagcatacttgtgaagaatgccacaattgagtggaatggatttgaaaatagagtaagaaaactcatacagcaaactaagcaagttcacgagaggcctgttgcaagaagcgtatttagacatccacggtgtccagagtgcatgtgcagaacagagcactaagatctttttttatagtttcttgtgtctataccaatactcctttttcacaagaaacactataccaatgagatcgccaaaggtagttcttttgtgctttggccgaaatctggatatgtctcttgctcttgaactactttggaaccaaaccataaaagaaaagaaaatacagtgattgagctcttgtttgtatcagagaagcaatatagcagactagcccatccattctcttactgacatgatctactgctaggcatcatgttggattttgagtattaggcagaattttgtttcatgtttgacagaagaagtggaccggggactgatttttgcatctggacaacaatgctgccatattttttttattgagatcagctataccattctgtgtatgaaggtgcatcatctgcagttgactgtcgaagtaatatattggccaaactgagcaacagcattctcatcttttaagagtgcttcaattctactcgggctaccattcaacaaatcaggctgccagagttctgtcaaccgtgtattgccatctccattgttgctaccgttgtgatggagctaagtggcatattgaccccttttttaccattcttttgcccattgtagtaccataaagagatgtatttagttaggtcgtaag

SEQ ID NO: 138054 - DNA, 2706 bp, Zea Mays
cctagtgcagtcagccaggccaggatggcgctgacgagcggcagcatgaagctgacgccgttccagcccgccaccgggctgcagccagcagcctacatgcaaatctatactctcgcccctggctccgatctgctgagctcaggccgcaattacgaataaaaaattagcctctacatcaaactgcagcttaaactaatcgcacggcgatcgcaggatccgacgagccaccccgcatctcgtgctcctcttcgcttcccaccgaaccccgcttatcgagatccaaatccagcgccagaatgcccgaggcggcgccgcccccgccgctgccgctcctggcggcggcgagctccccggcggctgctgcactgccgcgggcgaggcggcggcagcagcggagggggtggcggcgcccgcgcaggttgctggtctggggcgtcctcgtggcattcttcttcatcatgaactggtggatgttctcccgacttcaggacccctcggcgcgcccgcacttccggttgaggcgccacccaccccgcgcgcccgctactgtcaattcgtcgctctcgactctggaagaggtggctaatgctgctaaggggaagagggcacatagggttatgctcactcgattgcttgctttggcaggccatgctttggcagaggcagagaccaggcctgaacctaaggatttgtgggaagagccgataaatgctactttgtggcgaccgtgttctgaccaaagggattggaaagcctcagagggaaccaatggctacatcatgatcagtgcgaatggtggcataaaccaacaaagggttgcgatttgtaatgcagttacaatctcgcggttgctcaatgcaactcttgtcctcccaaaattcttgtacagtaatgtttggctggacaaaagtcagtttggcgatatatatcaggaggaatattttatcaaatatctgaaatctgatattcagattgttaaggatcttccagtagagctgcagtcattagacttggaggcgattggtagcctagttaatgatacagatgtcatgaaagaggcgaagcccagtttatacatgaaaaaaatactgccaattttactgagaaacagagttgtgcactttataggattcggcaatcgcttatcttttgacccaataccttctgaccttcagagattgcgatgcagatgtaattttcatgctcttcgttttgtatacaaaattcaagaaactggtgcagttcttgtagagaggttgcatggccatagggcctcttcgtcacctttgaaggataatcttttaggccagtttgccgttaagtctgaccccagggcgaacaagagtgatgcatccaaatatctggctgttcatctccggtttgagattgatatggttgcatactcattgtgttactttggtggtggcaaagatgaggaagacgaactagaagcttatcgccaaattcactttcctgtgttgtcagaactcaagaagatgacaaagttgccctctgctgctttcttacggtccgaaggcaaatgtccccttgcacctgaagaggctgtgcttatgctagcagctattggtttcaagcgcagcacaaatatatacgttgcaggtgctgaaatttatggagggaaggataggatggctgccataagtcgtctttatcctgctttagtaactaaagaaacccttctgtctccatcagagctcgaaccatttaggaacttctcatctcagttggcagccctggacttcattgcatgcgcagctgccgatgcatttgctatgactgacccaggaagtcaattctcttcccttgttcaaggttaccgcatgtactacggtggtggggatcttcccacgataaggccaaacaagcgccggctagccagcatacttgtgaagaatgccacaattgagtggaatggatttgaaaatagagtaagaaaactcatacagcaaactaagcaagttcacgagaggcctgttgcaagaagcgtatttagacatccacggtgtccagagtgcatgtgcagaacagagcactaagatctttttttatagtttcttgtgtctataccaatactcctttttcacaagaaacactataccaatgagatcgccaaaggtagttcttttgtgctttggccgaaatctggatatgtctcttgctcttgaactactttggaaccaaaccataaaagaaaagaaaatacagtgattgagctcttgtttgtatcagagaagcaatatagcagactagcccatccattctcttactgacatgatctactgctaggcatcatgttggattttgagtattaggcagaattttgtttcatgtttgacagaagaagtggaccggggactgatttttgcatctggacaacaatgctgccatattttttttattgagatcagctataccattctgtgtatgaaggtgcatcatctgcagttgactgtcgaagtaatatattggccaaactgagcaacagcattctcatcttttaagagtgcttcaattctactcgggctaccattcaacaaatcaggctgccagagttctgtcaaccgtgtattgccatctccattgttgctaccgttgtgatggagctaagtggcatattgaccccttttttaccattcttttgcccattgtagtaccataaagagatgtatttagttaggtcgtaag

SEQ ID NO: 138055 - DNA, 1312 bp, Zea Mays
cctagtgcagtcagccaggccaggatggcgctgacgagcggcagcatgaagctgacgccgttccagcccgccaccgggctgcagccagcagcctacatgcaaatctatactctcgcccctggctccgatctgctgagctcaggccgcaattacgaataaaaaattagcctctacatcaaactgcagcttaaactaatcgcacggcgatcgcaggatccgacgagccaccccgcatctcgtgctcctcttcgcttcccaccgaaccccgcttatcgagatccaaatccagcgccagaatgcccgaggcggcgccgcccccgccgctgccgctcctggcggcggcgagctccccggcggctgctgcactgccgcgggcgaggcggcggcagcagcggagggggtggcggcgcccgcgcaggttgctggtctggggcgtcctcgtggcattcttcttcatcatgaactggtggatgttctcccgacttcaggacccctcggcgcgcccgcacttccggttgaggcgccacccaccccgcgcgcccgctactgtcaattcgtcgctctcgactctggaagaggtggctaatgctgctaaggggaagagggcacatagggttatgctcactcgattgcttgctttggcaggccatgctttggcagagagaccaggcctgaacctaaggatttgtgggaagagccgataaatgctactttgtggcgaccgtgttctgaccaaagggattggaaagcctcagagggaaccaatggctacatcatgatcagtgcgaatggtggcataaaccaacaaagggttgcgatttgtaatgcagttacaatctcgcggttgctcaatgcaactcttgtcctcccaaaattcttgtacagtaatgtttggctggacaaaagtcagtttggcgatatatatcaggaggaatattttatcaaatatctgaaatctgatattcagattgttaaggatcttccagtagagctgcagtcattagacttggaggcgattggtagcctagttaatgatacagatgtcatgaaagaggcgaagcccagtttatacatgaaaaaaatactgccaattttactgagaaacagagttgtgcactttataggattcggcaatcgcttatcttttgacccaataccttctgaccttcaggtattgctccaactagttacgtgacgtaagttcattctggacactgaacagttctctttaacatcatttgggttgccaatttatttgtgatatatctgtagaatcttataaaactatgacagtaggtaagtattttctgag

SEQ ID NO: 138056 - DNA, 1050 bp, Zea Mays
cggcgatcgcaggatccgacgagccaccccgcatctcgtgctcctcttcgcttcccaccgaaccccgcttatcgagatccaaatccagcgccagaatgcccgaggcggcgccgcccccgccgctgccgctcctggcggcggcgagctccccggcggctgctgcactgccgcgggcgaggcggcggcagcagcggagggggtggcggcgcccgcgcaggttgctggtctggggcgtcctcgtggcattcttcttcatcatgaactggtggatgttctcccgacttcaggacccctcggcgcgcccgcacttccggttgaggcgccacccaccccgcgcgcccgctactgtcaattcgtcgctctcgactctgaggtggctaatgctgctaaggggaagagggcacatagggttatgctcactcgattgcttgctttggcaggccatgctttggcagagagaccaggcctgaacctaaggatttgtgggaagagccgataaatgctactttgtggcgaccgtgttctgaccaaagggattggaaagcctcagagggaaccaatggctacatcatgatcagtgcgaatggtggcataaaccaacaaagggttgcgatttgtaatgcagttacaatctcgcggttgctcaatgcaactcttgtcctcccaaaattcttgtacagtaatgtttggctggacaaaaggaggaatattttatcaaatatctgaaatctgatattcagattgttaaggatcttccagtagagctgcagtcattagacttggaggcgattggtagcctagttaatgatacagatgtcatgaaagaggcgaagcccagtttatacatgaaaaaaatactgccaattttactgagaaacagagttgtgcactttataggattcggcaatcgcttatcttttgacccaataccttctgaccttcaggtattgctccaactagttacgtgacgtaagttcattctggacactgaacagttctctttaacatcatttgggttgccaatttatttgtgatatatctgtagaatct

SEQ ID NO: 138057 - DNA, 4065 bp, Zea Mays
atgcatttcttctccggcagtggcggggcccgctccggcgcgctactccccaccacctccaagccgaaggcgcaccaccacctccgttccaagtcctccctctccgtgcccgccttctcccgccgccgcggggggctctactccgcgtcctccccctactcccggcgcgccctctgcctcgcggcgacggccttcgcggcgctcttcatcctagccttcatccgtctcggtttcccctcatcccgctccgctgcgctgtcttcccccacccgtcgccgcgcgcgcctcacccgcagccccgcctttcgccaccgggactcggccgcggcagccgccgtatcggctcggataggacgcgaggcgcccgtggatatcacgacgagagacctctacgacgggatcgagttcagcgacgttgacggtggtgcgtggaagcaggggtgggaggtcaagtacaggggcgacgagtgggacaccgagaagctcaaggtcttcgtcgcgcctcactcgcacaacgaccccggctggatccgcaccgtggaggagtactaccagcgccagtcgcgccacattcttgataccatcgtcgagtccctctccaaggattcgcgaaggaaattcatatgggaggagatgtcatacctggagaggtggtggcgcgacgcgacgcccaagatgcgagaggcattcgctaagcttgtccgtgacgggcagctcgaaattgtgagcggtggatgggtcatgaacgatgaggcaaactcccactactttgccatcatagaacagatgatggaggggaatatgtggctcaatgatactattggagttattcctaaaaattcttggtcaattgacccatttggttattcatctacaatggcttatttgcttaggagaatgggttttcataacatgttaatccaaagaacacactatgaggtgaaaaaggagcttgcaatgaaaaagaatcttgaatatttgtggaggcagaactgggatattgaagaaacaactgacatatttgttcacatgatgcccttctattcttatgatattccacacacgtgtggaccagaaccagcaatctgctgccagtttgactttgctcgaatgcgtggtttcagctatgaatcctgcccatggagatctgatcctgttgagataaatcctgacaatgtggaggagagagcaacaacgcttctagaccagtataggaaaaagtcaaccctgtacagaacgaatacacttctcattcctttgggcgatgattttcgatatgttagtatggaggaagcagaggtacaattccgcaattatgagaaactttttgattacataaactcaaatcctcatcttaatgctgaagtcaaatttggtaccctggaggattacttctccacattgagagatgaagctgaaaagataaactattcacggccaggtgaactgggttctgctgagctgcaaggttttccaacactttcaggagatttttttacctatgcagatagaaatcaggattactggagtggttactatgtatcaaggccattcttcaaagctgttgaccgtgtactcgaacagacgcttcgtgccgcagagattctgggttcatttgttctaggatactgtcagaagtttcagtgtgcgaagctccccatcagtttctcacacaaactgacagcagcaaggaggaatttggcgctttttcagcatcatgatggggtaactggcacagctaaagatcatgttgtggtggactacgggactcgaatgcacacttcactgcaagatctgcaattatttatgtccagggcagtcgaagtgcttttaggagatttccatgatagatctgaccctacattattatcacattttgagtccgtgcaggaacggtcaaagtatgatgttcagctggtacataaggttcttcaccctcttgaagggaaggcacagtcagttgtcttttttaaccctttagaacagacaagggatgagattgttatggttgttgtaagtagccccgatgtttctgttctcaattcaaatggatcttgtttgccaagtcaactttcccctgagtggcagtttgtcagcgatgaaaatatttcgactggtcgtcatcgcctttattggagagcttatgttcctccactaggtttggagacctactatgtggttactgggcaggattgtgaaaaggctattcctgctgcagtgaaaacatacacaactgaacaggaattttcttgccctcaaccatatgattgttcaaagctggaagccaaaacagtggaaatgaagaactccaattacactctttcttttgatacaagtcgtggtctcctccagacagtaactcgtcacaaggacgggcaacaaactgtgataggtgaagaaattggcatgtacaaaagccatggaagcggggcatacttatttaaaccagttggggatgctcgctcaattgtcgaggaaggaggacatttcatccttactgaagggccattggttcaagaagcccattctcttccaaagacagagtggcgtaagtcacctctctcacatagtacacgcatctacaattgtggggacgctatacaggacatgctgatcgagaaggaataccatgttgagcttgttggccatgcttttaatgatagggaattgattgtcagatacaagacagatattgacaaccaaaggatcttctattctgatctaaatggctttcagatgagtaagaggcagacatatgataagattcctctacagggaaattattacccaatgccatcacttgccttcttgcaggattcacatggtaatcgattttctgtacactccaagcaatcattgggcgcagcaagcttgaaaaatggatggctagagattatgttggatcgtaggttggttcaggatgatggccgtggtctggggcagggagtaatggacaacaagcccatgaatgttatatttcatctcctcacagaatccaatgtctcagctttgcctaaaacccatagtttgcatactcttcaaccttccatcctctcgcatcgtgttggggcgcacctgaactacccgatgcatgcttttatgagcaaaaaacctcatgaaaaatccttcaagcgggctcaacagtcatttgctccattaactgcttctttgccatgtgatatacatattgtgaacctgaaggtccctcggcccctaagatttcctcacaccgaatcagcagagccaaaatttgctgttctgttgcagaggagaggctgggacgcatcatactgcaaaaggggtggactgcagtgtacaacagttggggaagagccagtaaatctgttctacatgttcaaagatttgtcagctgtgaatgtgaaggcgacttcgctgaacctcttacacgatgacccagaaatgctaggttaccttgagcagaccggtgatgttgctcaggagggagacgttcttatctcaccaatggagattctggcatacaagttggacctacaaccaccatcatcgcaggaagagtagttttagtttgtgaaaacagtacatgcatattgaacagtcctacatgacagtgaagatggatcttcccgaaatacttgatagcggcagttagatagtactggaacagcaatgctgcaatgctgcatgtatacgtgtcattttcttggcatacagttagtgcttgaacctctagaatttgctggcagttgcagccttgtcatccacgaaggtacatacacttgttcttggtattatgctcaacagatcggaagatttggggcacattgaagcagagctaacttgattacggtaaaaatgtgtgttaacacaactgtgttgctccggccaacgataacttgtatcagagcaagttttgtataattctgttttgcttgcatcctttttgtagtgccatcatcctactgtcaaaaacctgagatagtttagatacatggttcttgctttcgagatctttatattgtatgtacacaattctgcttctatgcatgcggggattgctgggaatgcttcgcccgttttcttttt

SEQ ID NO: 138058 - DNA, 207 bp, Zea Mays
atggcgcagacggcgcggagcctgcaggtgtaccctccaccgcggacccacgctcctaccggcctcagacgcgccgaggggagcgccgcggctgtgaaggaaaaggagggggagaggtctcgcgatcctgttctgaccacggaggcagctgtggagcaccgggccgccatcgggataaatccttatcgaagatcttatcctgcttaa

SEQ ID NO: 138059 - DNA, 721 bp, Zea Mays
gtcatttcgggcgagaagctccaaacgaccacaccgcacacgccgataaaaccgctccacccactccgcccactccccctctgccgtcgcctgtccactttccccgtgcttctccgccgtcgaggccgcgtcccagtgcgaagagactccgactcagatggccagccgctgggtccggcccgaggtgtacccgctgttcgcggcgacgggcgtggccgtcggcatctgcgggtttcagctcttccggaacatcactggcaacccggaagtcagggtaaacaaggcagggagggcagctggtgtgcttgagaaccatgaggaggggagacgttacgccatgcatggcctaagaagctttgtgcacgacaagactcctgagatcatgcctgcagttaacaagttcttcactgaccctaagtgaagcatgttgattggcatactactactactacttgctactggggattttacactttgctggcaactcaatatgttggggacatccatgacctctaaaagtactttgagcgcttggtgatgacttggtatatgtatgatggtggatgagtttgatcgtccatgcttgatgttcatattcatctgtcatctggatttgccgcacttcagtgataaaattgtcatttggatactggtaatggtaccgtcttgtgaagttcgctccttctgcagtgtgtgaactatgactgagtttgattgggca

SEQ ID NO: 138060 - DNA, 726 bp, Zea Mays
gtcatttcgggcgagaagctccaaacgaccacaccgcacacgccgataaaaccgctccacccactccgcccactccccctctgccgtcgcctgtccactttccccgtgcttctccgccgtcgaggccgcgtcccagtgcgaagagactccgactcagatggccagccgctgggtccggcccgagcgcaggtgtacccgctgttcgcggcgacgggcgtggccgtcggcatctgcgggtttcagctcttccggaacatcactggcaacccggaagtcagggtaaacaaggcagggagggcagctggtgtgcttgagaaccatgaggaggggagacgttacgccatgcatggcctaagaagctttgtgcacgacaagactcctgagatcatgcctgcagttaacaagttcttcactgaccctaagtgaagcatgttgattggcatactactactactacttgctactggggattttacactttgctggcaactcaatatgttggggacatccatgacctctaaaagtactttgagcgcttggtgatgacttggtatatgtatgatggtggatgagtttgatcgtccatgcttgatgttcatattcatctgtcatctggatttgccgcacttcagtgataaaattgtcatttggatactggtaatggtaccgtcttgtgaagttcgctccttctgcagtgtgtgaactatgactgagtttgattgggca

SEQ ID NO: 138061 - DNA, 336 bp, Zea Mays
atgttggtggggatctctgggaagcggacctcgccctggcgcgtctcagagaagccgcctgtggggaagacgagagggatggatgtgatgcgaggacggcgcgctgatgggaatggaagaggtgaagagtaccctacctggggatgtgagcatgttgcggagggtgttggagaccatggcggccttcctgtcaacaacgaattcgaagccctcggcgctgatgagcttgacaacgcctgcggtatcgtcgtcctcttcgtcctggggctggtggtgctcacgcggcggcggcatcctgcgaccttgagtgtctgcgacggattggtttggggttga

SEQ ID NO: 138062 - DNA, 2322 bp, Zea Mays
ccgcgatcgccatcgcctcacgcactcgcatcctcccggtcccggactacccataaaaccaccgcgacggcgacgggtccttcgcttcgcctacggcatattcccccgaggccccgaaccaaaccaaaccaaaccaaaccaaaccagcccagatcagcgaaacacactccgctctcccgagaccggacacatggcggcggcggcggtgacgtccaacggcggcgcagtggccgcaaatgggccggcgcccggccggctggcctccgtgtacagcgaggtgcagacgaaccggctcctgcacgcccttcccctcccctccgtcctccgctccaacttctcggtcgtcgtcggccccgccagctccgccgcgggcaaccccgatgagatcgccaagctcttccccaacctgttcggccagccctcggcgtcgctggtgccgtcggccgagcccgcggcgaccaggccgctcaagatcggcgttgtgctctccggtggacaggcgccgggcggccacaatgtcatctgcggcatctttgactatctacaggagcgtgcaaaaggcagcaccttgtatggatttaagggaggcccagctgggatcatgaagtgcaagtatgtagaactcacttcagactttgtgtatccctacagaaatcagggtggatttgatatgatctgcagtggaagggacaagattgaaacaccggagcagtttaagcaagctgaagacacggccaacaagcttgatttggatggacttgttgtcattggtggtgatgattcaaacaccaatgcctgcctccttggtgaatactttaggtcaaggaacatgaaaacccgtgttattggttgcccaaagactatcgatggggatctgaaatgtaaggaggttccgacaagctttggatttgatacagcttgcaagatatactctgaaatgattggcaatgttatgactgatgcgagatccactggaaaatactaccactttgtgaggcttatgggtcgtgctgcttctcacattacgctggaatgcgctttgcaaacacaccccaatgctgcactcattggggaagaggttgctgcaaagaagcaaacccttaagaatgtcacaaactacattactgatatcatctgcaagcgtgcagatcttggttacaactatggtgttatccttataccagaaggcctgattgatttcatcccagaggttcaaaaactcatcgcggaattgaatgaaattttggcacatgatgttgttgatgaggcaggggcctggaaaagcaagcttcagcctgaatcaagggagctgtttgagtttttgcccaatactattcaggagcaacttatgcttgaaagggatccccatggcaatgttcaggtcgcaaaaattgaaaccgagaaaatgctcattagcatggtggaaactgaactggagaagagaaaggcagaggggagatactctgcacatttcagagggcaagctcatttctttgggtacgaaggaagatgcggccttcctactaattttgattctaactattgctatgcattaggctatggcgctggtgcccttctccaaagtgggaagacaggacttatttcctcggttggcaaccttgcggctccagttgaagaatggactgttggtggaacagcattaacatcactgatggatgttgagaggaggcacggcaagttcaagccagtgatcaagaaggctatggtcgaacttgatgctgcacctttcaagaaatatgcatcgatgcgtgatgagtgggccctcaagaacagatacatcagccctggccccatccagttcagtggccctggaagtaatgactcgaaccatactttgatgctggaactcggtgctgcgctatagagatgcgtcctttactttgttcttacagtttttgggagtggagactggccactggagcagcctgcaggtctccatattgtgtgtgaaattgtttaataagaggtttgatgggagttttttgcgtagccgactggatgtagtagcaaaataagaacagggttttttagttttttttgtatgatttacgcaccaactgaccggtcttgtagctccgattctgttccccctggttggctggttgcaatctcttgagaatgaacaaaatgaagttgaaccatgagactgattcagttcgcttgcttccagtagcaggttattacacattgtcgtttctgaggtccagagatagtacgtgtcctactcttgaataatgtattcactctgttttaagttataagtcgagacttcactttacattatggaactagttgcatagt

SEQ ID NO: 138063 - DNA, 980 bp, Zea Mays
ctgataccgtagctagctagtacgtagttgccggcgaacaaggaggagcgagcttgcattggtagaagaccagcagctgggagcgacaagacaagaggtagtgcgcggttcagcaatggcagtggtcatgaggaggatgggaggacttgttctcccggtggcggtgatcatggcggtgctgctatccttggccgtgctcggcgcggaggcgcggcccttgagcggcgacggcggttgggcggccaccggggccgggccgctgccggacggcggcgtgttcatcgtcgagacgctccggcggctgtacctgcagcagctcggagggcctgggccgtcgtgcgagaccaacagccccaacaacggctgcccgccgccgccatagggtggtgttggtgactgaccgacgacgcgccgcgggcacgcgcgccggccgccgtcagctacgcgcgcttagcttcacaagttctaatgatccgcgtgttggacatcatcatgcatggttttcccgtcgacgttgctgatcgacggctggatttaatttatttgttgatggttgattggtttctttatttgtagcttttatttggtttgaccatacatgcatacgcatgtatagtgtgtgcggcacggtgcagtgcgtggaaatttgtacagcaacatgtataagtaagcttgaatactgtagggaaatgtacagatccttttattaatgaataacatgaaactgttttgctcaatattgaactgcatgcaggtactcatgtgtttagtttggtacctgcactgaaggcaggcaggcagattagccgctagttagggaaacaatctaggccactaggcaatccaaatccgacggcggcggcctaggaaagatgctcgcgactagtcaaaggatgacatgcatgccttctattaggtttgttattagttgacattgaaaaattggtaataggagacacaacgtataaggtaggcaaacc

SEQ ID NO: 138064 - DNA, 168 bp, Zea Mays
atggcgggggtgcacctggagattgacggcaatgaggaagtgcacaatgggtccttcctgcggtgcgcgtggcggaaggcaggcgacacggttgttgtcgaggcgtgcttgggagcaaaggcaatcaacgtcgtcggagcacatcagacactccacggcagacaataa

SEQ ID NO: 138065 - DNA, 168 bp, Zea Mays
atggcgggggtgcacctggagattgacggtgatgaggaagtgcacaatgggtccttcctgcggtgcgcgtggcggaaggcaggcgacacagttgttgtcgaggcgtgcttgggagcaaaggcaatcgacgtcgccggagcacatcagtcactccacggcagacaatga

SEQ ID NO: 138066 - DNA, 167 bp, Zea Mays
gtgcatgtgtttagatcaatcggtgatgtatacctgaaaaatgcaaagtataacacagaccagatcgaacccaagttcaggcttcctgaatcattcagcaagcgattaatgagtgctgatccatctatcatctcccgcaatcttgaaccaaatgactgtttcattat

SEQ ID NO: 138067 - DNA, 178 bp, Zea Mays
ctcttattcgggtgtcgcgctttggggatttagaatttatggaaaacattcaccagtatagcagtagagtggttggtcgggagctgtcgtgcaagcgagttgggccgcgaatcgcaatccggcccactaaccctcccctaaccctagccgccccccctttttcccccttgggttgttg

SEQ ID NO: 138068 - DNA, 2711 bp, Zea Mays
gggtcgaagcggagggtggcggaggaggagtcctcggaggaggagtacgaggtggaggtggtccgcgaccacatcgcctcctcccgcggcagccgcctcgcgctcttcggctccgagctccgcctcggccgcttccgcccgcgccgccgcaggcgcctcccgctcgccgggggaaggcgccgccgagggcttcttccacggcctcgtcatccaccccgacaacaagtggtaccggttatggaccaagttcatactggtttgggcggtgtacagctccttcttcacgcccctggaattcggcttcttcagaggcctccccaagaacctcttcttcctggacgtagctgggcagactgcattcctcatcgacatcgtcgtcaggtttttcgtggcgtaccgtgacccagacacgtaccgggtcgtctacagccccgccgccattgcgctccgctactgcaaatcgagcttcgttttcgaccttcttggttgcctcccgtgggacgctatctacaaggcttgtgggagcaaagaggaagtaaggtacctgctgtggattcgcttgacacgggtcaccaaggtcacggagttcttctggcgtttagagaaggacatacgcgtcaactacctcttcaccaggatagtgaagctcatagtcgtggagctctactgcacgcacacagcggcctgcatcttctattacctggctacgacgcttcccgaatccatggaagggcacacgtggatcgggagcttgcagctgggggactacaggttcacacatttcagggagatcgatctcgccaagcgctacataacgtccttatatttcgccatcgtcaccatggcaaccgttggctacggggacatccatgccgtcaacatcagggagatgatattcatcatgatctacgtgtccttcgacatgattctaggagcctacctgatcggcaacatgaccgcgctcatcgtcaagggctccaggaccgagcggtttagggacaagatgaaggaggtgatcaggtacatgaacagaaacaaacttgggaaggaaataagggagcagatcaagggacacctgaggttgcagtatgagagcagctacaccgaagcatccgtccttcaggatatcccgatttctatccgtgcaaagatttctcaaacgctgtataagccatatatcgaaagcattccactgttcaagggatgttccgcagagttcattcaacagattgtgatcaggttgcaagaggagttcttcctaccaggagaagttatattggagcagggaagtgcagtcgatcagctgtacttcgtctgccacggtgcactggaaggtgtaggcatcggtgaagacgggcaagaggagactctgctaatgctggagccagagagctccttcggcgagatctcaatcctctgcaacatcccgcagccctacacggtccgcgtctgcgagctctgccggctcctgcgtctcgacaagcagtccttcaccaatatcctggagatctacttcgtcgacgggaggaggatcctgagcaatctctccgagagcgagtatggcggacgggtgaagcagctggaatcggacatcacgttccacatcgggaagcaggaggcggagctcacactgcgggtcaacagcgccgccttctatggcgacctgcaccagctgaaaagcctgatccgggcaggggctgatcccaagaacaccgactacgacggccgctcccctctgcatctcgcggcttccagagggtacgaggacgtcgtgcagttcctcatcaacgaaggcgtcgacatcgaccttaccgaccagttcgggaacacgccgttgctggaggcggtgaagcaggggcacgaacgggtggcagcgctgctgttcgccaagggtgcgaagctgagcctcaagaacgccggcagccacctgtgcacggcagttgccaagggggactcggacttcatccggcgcgccctggcctacggcgccgacccaaactgcagggactacgaccaccgcacgccgctccacatcgccgccgccgagggcctctacctcatcgccaagatgctcgtcgaggccggcgccagcgtgttcaccacggacagatggggcaccactccgctcgacgaagcgcgcaagtgcggcggccgcacgctgggggcgctgctggaggaggcgcgggccagcgagctgtccatgttcccggagcgcggcgaggaagtcagggacaaggtgcacccgcgacggtgctcggtgttcccgtaccacccgtggcgggcgagcgcaggcgaagagcggcgcgcggagggggtggtgctgtggatcccgcacaccatcgagagcctggtcgcgtcggcgcaggagaagctcggcttgcctggcccggcggcgtcgcggctgcggctgctgtgcgaggacggggccagggtgctcgacgtcgacatggtcaatgacggccagaagctctacctggtcggaggcgaggacggcgatcaggaaggtggtcagtagattgggcatccctgtgtggcatttgcatgctgcttttttttcaaccttgtatgccggttgttgtttttttggctatatatacgtgtgcagtagaagaaaatgtaatcaagtccatcatccgtgctggacactgtacagaactacaaattgggaataatgtaagatgtgaaatgaaaatgcaatgttaagtcgcccc

SEQ ID NO: 138069 - DNA, 2837 bp, Zea Mays
gggtcgaagcggagggtggcggaggaggagtcctcggaggaggagtacgaggtggaggtggtccgcgaccacatcgcctcctcccgcggcagccgcctcgcgctcttcggctccgagctccgcctcggccgcttccgcccgcgccgccgcaggcgcctcccgctcgccgggggaaggcgccgccgagggcttcttccacggcctcgtcatccaccccgacaacaagtggtaccggttatggaccaagttcatactggtttgggcggtgtacagctccttcttcacgcccctggaattcggcttcttcagaggcctccccaagaacctcttcttcctggacgtagctgggcagactgcattcctcatcgacatcgtcgtcaggtttttcgtggcgtaccgtgacccagacacgtaccgggtcgtctacagccccgccgccattgcgctccgctactgcaaatcgagcttcgttttcgaccttcttggttgcctcccgtgggacgctatctacaaggcttgtgggagcaaagaggaagtaaggtacctgctgtggattcgcttgacacgggtcaccaaggtcacggagttcttctggcgtttagagaaggacatacgcgtcaactacctcttcaccaggatagtgaagctcatagtcgtggagctctactgcacgcacacagcggcctgcatcttctattacctggctacgacgcttcccgaatccatggaagggcacacgtggatcgggagcttgcagctgggggactacaggttcacacatttcagggagatcgatctcgccaagcgctacataacgtccttatatttcgccatcgtcaccatggcaaccgttggctacggggacatccatgccgtcaacatcagggagatgatattcatcatgatctacgtgtccttcgacatgattctaggagcctacctgatcggcaacatgaccgcgctcatcgtcaagggctccaggaccgagcggtttagggacaagatgaaggaggtgatcaggtacatgaacagaaacaaacttgggaaggaaataagggagcagatcaagggacacctgaggttgcagtatgagagcagctacaccgaagcatccgtccttcaggatatcccgatttctatccgtgcaaagatttctcaaacgctgtataagccatatatcgaaagcattccactgttcaagggatgttccgcagagttcattcaacagattgtaagtgtcatctctttcatcccaactagctatgtgtgctgaatgaactacaaggtaggaagaactccagcagggtaccttgttgtgatattgttctcaatcccaagatttatcgtctgacatgttctgctgtaaaggtgatcaggttgcaagaggagttcttcctaccaggagaagttatattggagcagggaagtgcagtcgatcagctgtacttcgtctgccacggtgcactggaaggtgtaggcatcggtgaagacgggcaagaggagactctgctaatgctggagccagagagctccttcggcgagatctcaatcctctgcaacatcccgcagccctacacggtccgcgtctgcgagctctgccggctcctgcgtctcgacaagcagtccttcaccaatatcctggagatctacttcgtcgacgggaggaggatcctgagcaatctctccgagagcgagtatggcggacgggtgaagcagctggaatcggacatcacgttccacatcgggaagcaggaggcggagctcacactgcgggtcaacagcgccgccttctatggcgacctgcaccagctgaaaagcctgatccgggcaggggctgatcccaagaacaccgactacgacggccgctcccctctgcatctcgcggcttccagagggtacgaggacgtcgtgcagttcctcatcaacgaaggcgtcgacatcgaccttaccgaccagttcgggaacacgccgttgctggaggcggtgaagcaggggcacgaacgggtggcagcgctgctgttcgccaagggtgcgaagctgagcctcaagaacgccggcagccacctgtgcacggcagttgccaagggggactcggacttcatccggcgcgccctggcctacggcgccgacccaaactgcagggactacgaccaccgcacgccgctccacatcgccgccgccgagggcctctacctcatcgccaagatgctcgtcgaggccggcgccagcgtgttcaccacggacagtgcagatggggcaccactccgctcgacgaagcgcgcaagtgcggcggccgcacgctgggggcgctgctggaggaggcgcgggccagcgagctgtccatgttcccggagcgcggcgaggaagtcagggacaaggtgcacccgcgacggtgctcggtgttcccgtaccacccgtggcgggcgagcgcaggcgaagagcggcgcgcggagggggtggtgctgtggatcccgcacaccatcgagagcctggtcgcgtcggcgcaggagaagctcggcttgcctggcccggcggcgtcgcggctgcggctgctgtgcgaggacggggccagggtgctcgacgtcgacatggtcaatgacggccagaagctctacctggtcggaggcgaggacggcgatcaggaaggtggtcagtagattgggcatccctgtgtggcatttgcatgctgcttttttttcaaccttgtatgccggttgttgtttttttggctatatatacgtgtgcagtagaagaaaatgtaatcaagtccatcatccgtgctggacactgtacagaactacaaattgggaataatgtaagatgtgaaatgaaaatgc

SEQ ID NO: 138070 - DNA, 456 bp, Zea Mays
taaatcacatcaaaactacatcagacaatcagactagaaacaaaatttcagatttggcgtgcagaaaaaaaaaacatacatagatggccacaagtgcacaactcagtgataacacagagctgatgtttcagcggcctcaagaagaaactttgcacatcacattttcaccatagcacaccaatcaggtaccccaagtgtgattcccgccaaactgaatgctgttccaaggccatcactgaatagcaactgtgggagtccaacaggatcaaccctcgctactcatcaagtcataaggcaaactccatctcagctcgtttcaggacacgtgaaaccatagagtagaattcaggttcttgttcttttattcggtcgagtgtggtggattcatgggcgtcagcctgcataaataggagaagtattaagtttgagatgccagcagcctttgatttgtcccac

SEQ ID NO: 138071 - DNA, 2636 bp, Zea Mays
ctcttcccccttcgccaccctagttttttttttaaaaaaaatcgctatctccaagtccaagactccaacagctctcgcacacagccgcagctgctactggctagaccaacacgcactctcgcacacagccgcgggcacagtgacgcaggcggaggagcggcgccggagctagggtttccctgatccggtggggccggggagggggtggaatatcttgctcgatttcggcgctggaggcgcagtgccggtgtccccgaagccggcgggcgcgaggcgggttggggagctggggtacggcgccgggggctcagatctggtatgaccgacggcggcgaagacgggaatgtggcgttgcccaggggccccgcgcgccggaggggccccgtgcgggccagcttcgacgccgacgagttcatcgcgctgatgcacgggtcggatcccgtcagggtcgagctcacgcgcctcgagaacgagctcagggacaaggagagggagcttggggaggcgcagacggagatacgcgcgctgcgcctatcggagagggcgcgggagaaggccgtcgaggagcttacagatgaattggagaagatggctgagaaactcaagctgacagaatctctcctcgaaagcaaaaatcttgaagttaaaaagataaatgatgagaaaaaagctgcattggctgcccagtttgcagcagaagcaactttgcgaagagtacatgcagcccagaaagatgatgacatgccaccaattgaagccattcttgcaccgcttgaagctgagctaaagctttctcgccaagagaatgcaaagctccaggatgataacagagctttggatcgtctaacaaaacaaaaggaggcagctctactagaagcggagaggaccgtgcaaattgccatggcaaaagctgctatggttgatgatttgcaaaacaagaaccaagagttgatcaaacaaattgagatctgccatgaagaaaataaaatcttagacaagctgcatcgccaaaagattgcagaagttgaaaagctgagccaaactgtgagagagttggaagaggctgttcttcaaggtggtgcaacggctaatgttgtccgtgattaccagcgcagatttcaagaaataaatgaagaaaagagaacacttgaccgtgaacttgcacgtgcaaaagttacagcaaacagagttgcttctgttgttgctaatgagtggaaagattctaatgacaaggtgatgccagttaaacagtggcttgaagagcgtaggttcttccagggggagatgcaacaacttcgtgacaagcttgccattacagaacgtacagcacgatctgaagctcaactgaaggaaaaatatcagttacgtctaaaagtactagaagatggactaagagggccaccaagtggctctattcgtccacctactgaaggaaagagctttagcaatgtcccttcccgccggttgtcactcggtggagctgataatatatcaagattgtctcctaatgggttattgtcaaggcgatctccttcttttaattcaagatcatctcttacgtcaaacagcagcttggtcctgaagcatgctaaaggcacttcaaagtcatttgatggcggaactaggtcactagataggagaaaggtacatggaaatggagctcatttactcaacagatctacagatgctgttagagataaagagactaatgatagttggaagggcgatatggatgagaaaactaatgagagtgcagacagcaacacagatgggaaaagtaatgaaaccatgaataataattcagctgagacagtttctggtttcctatatgatatgctgcaaaaagaggtaatttctttgagaaagacatgccatgagaaggatcagattctaaaagataaagatgatgctattgagatgttagcaaagaaagtagacaccttaactaaagcaatggaagtggaagctaaaaaggtcagacgggaggttgcatccatggagaaagaagttgcagcaatgcgtgccagtaaagaacaagaaatcagagccaagcggcttggtacgaaaggctctggtagttcacaactgcttcctggaagaaacgcaccacgaagtgggtccatgcgcaacttccaatgatggcagcactaacaccaagcagcattcttggataggtcctctgttccaccatttgttctgttcctatcctattaattttgtggctaaaatcgtagcacagtgagatgacccaacaatacctagatctgggtaagagtaggctcggatctgatgagaccattgtgggagtgaagctgagcctgttgtctaaccttgtggcgcgccctcttgtttattttagtccaggcagtgcacctgatgcttgtataggccagggatcaccgcatggccaatctgtaatgtatagcctgagtgctcagttacatagacacccgttgcccaggttgtgaatactgtttcctcgcacatgcttctttgcgctgctctatttgccctgtgtttgggttggaatttttaacatggcttctagcctgtctgagttctgttgattataaatagtgacacatgttcatctgcatatgtacatctagtggcgactgtcaactgatgtttatcct

SEQ ID NO: 138072 - DNA, 1386 bp, Zea Mays
gatggccttcgaacagagccaccattgcttggctcatcctccccgacgttgctctctctctctctctctctcccggtgctctgctggccgccgcgcccctggtcccggccccagcttggcctcctccccatgccgctcggccgcccatctccctgctgccgctctcccatggcgcgcccctggtccttgctcctagctcgcctgcgctcggcctccagctccagctcgccgagtccctctctgtctgcgccatggagctcgcccggccgcgacctcgccttgcttcctgttgcgctcctccttcagcgtctctcccatggcgccggccaccctcacctctgctcctctgcgctgccgttctctgcgcccggacatggagctccctcatccgcgattccctgtgctagcgtgtactctctccatggcgcccagcccccagctcggatctcgcccgaccccaagcggagctccatccctggccgccgtgtgcccctgcgctcggcctcctctccattttttctagccaagcccagccaaggttcctccctgcgcgcgcgagctctattgcgagcgccgatctgtacctacaaagcctcgccagtgaagtctgtcgttgttctctggttcgagctcaccctagccatagctcctcatcgtgtgcctccacgccggtgctcgactggctcgacgatgaccctatcgtcgccctgctgttcgtgctccatttccgcagcactgctctttgtcatggccgttagaccgccgttgatctagccgtcgtagctcctctgtcacggttgatcttggtttcctccgtgccaccgaccgtcgacctcgtcgttgcttcacagcgcttggacaccgctgtcattgctcagccatgctatgggcacggacgctttacttcctcgccactgcatcaccatttgctgtaggagagaaagactctaggaccttttggtggaaaggagaagaaagctcatgcgtcgctcgcgaggtgctcgaagtaatgccggaattggaaatcatgattgtgttcatggaatcatggccttcgagacggattaatttattactgagctatcgtcgctctcgctcttcgttttaatatttctcatcaatttggtacgtttgcgctgtcctggtgggccggtgacgtatatgtaaatcgcagtagtgtgatttcgtatgacgctcgataggtgttcggcgatttaggggaaacagtgaacgtcgtcgtttttgttaattccaagtcgcactgtgatgtggtagctgatgtattattgttgttagccaagtcattagatggattggctacctaggtaggtcgcgatgattaccccgtttgtagcacgggcacatgttttattagacgtttgtcgg

SEQ ID NO: 138073 - DNA, 291 bp, Zea Mays
atgtgggaacccgctttcagaattgatgaaatctgtagaacccctcccactcctcaggatgaaatgtgtgctagaatgagttatttccctgaagctatatggaagggtgtacaaaaattcttgtggcgtattgacacttctctgaaaaatattgggatcaatgaacgtctcccttacaatgctcctcttattcagttctcttcctcaatgggtggtggtcgtgatggaaatccaagagtaataccaaaggttacatgagatgtatgcttgttggtgagaattatggcggct

SEQ ID NO: 138074 - DNA, 2263 bp, Zea Mays
atggaggaggcgccaccatcttcttctcccccctcccctcctgtgatgctactcttgctgctgctgcttatcgtctcctccccttgtagctctagcgccctcctctcccccaagggcgtcaaccctgaagtgcaagctctgatgacgatcaagaacacgctcaaggacccccacggcgtgctcaagaactgggaccaggactccgtggatccctgcagctggaccacagtcagctgctcgctagagaacttcgtcaccggactggaggtcccaggtcagaacctctctggcctgctctccccaagcatagggaacctgacgaatcttgagactattctcctgcagaacaacaacatcaccggcctaatcccagcagagatcggcaagcttacaaagctcaggacacttgatctctctagcaaccacctgtatggcgcaatccccacttctgtgggcaaccttgagagcctgcagtacttgaggctcaacaacaacaccctgtctggcccattcccttcagcatcagctaatttgtcccagcttgttttcctagacttgtcatataataatctgagtggtccagtgccgggatctttggcaagaacattcaacatagttgggaatcctctcatctgcggcaccaacaacgccgagagagattgctatgggactgccccaatgccgccatacaacctcaacagctcactgcctccggcaataatgtctaaaagccataagtttgcaattgcatttggtaccgcaattggctgcatcggcctcctcgtcctcgctgccgggtttctgttctggtggaggcatcgtagaaaccggcaggtcctttttgatgtcgatgatcaacacatggagaacgttagcctcgggaacgtgaagaggttccagttcagggagcttcagtctgcgacaggcaacttcagcagcaagaacatactgggaaaaggtggctttggatacgtctacagagggcagttccctgacggaactcttgtggccgtgaagcgactcaaggacggcaacgccgcgggcggcgaggcccagtttcaaaccgaggtcgagatgatcagcctggcactgcacagaaaccttctcaggctctatgggttctgcatgaccgccacagagaggttgctggtctatccatacatgtctaatggaagcgtcgcgtcgcgcctcaaagctagcagtaccacaagcatacgattcctatcctcactttattccacaatgatcgctacgcctacagggaagccacctctggactgggtgacgaggaagaggatagctctcggggcagggagggggctgctgtacctgcacgagcagtgcgaccccaagatcatacacagggacgtcaaggctgccaacatcctgctagacgactgctgcgaggccattgtcggtgacttcgggctcgctaaactcctcgaccatcgggactcccatgtcaccactgcggtgcggggcactgtcggccacatcgcgcccgagtacctctccactggccagtcgtcggagaagaccgacgtcttcgggttcggcatcctgctgctggagctcgtcaccggtcagacggcgctggagtttgggaagacggcaaaccagaagggagccatgctggactgggtgaagaagacgcaccaggagaagaagctggacgtgctggtggaccaggggctgaggggcggctacgacaagatggagctagaggagatggtgcgagtagcgctgctgtgcacgcagtaccttcccggccaccggccgaagatgtcggaggtggtccggatgctggaagcaggggaagggctcgcagagcggtgggaagcctcgcactcgcagtcgcagagcgcggactcgcacgagttcaaggtgcctgacttcactttcagccgctgctactctgaccttaccgacgactcgtcgctgctggtgcaggccgtcgagctgtcgggcccgagatgatgatgacgacgacgccgccgccagtttgcactttgtacagcatgcatattaaggaccgagaatcctgtgtggactaccatactagaatagctagctatagatgtgtattagattaactgtacaaaaagaagagcgtgtgaggtttgtactgatttggatatttacagaattagtagtcgagacaataagaccaagtaaaaaagagcttttcattgttcatttcagagtgcaacaggttctgaaatagtgaaatctcatcagagtccttagctgattttgacataaa

SEQ ID NO: 138075 - DNA, 2226 bp, Zea Mays
cacattgcacgcaggaggaccggccgccactctttctcgctctcttctcttctcttggctccagctccacccacctctagctgcctcccttcggcaatggaggaggcgccaccatcttcttctcccccctcccctcctgtgatgctactcttgctgctgctgcttatcgtctcctccccttgtagctctagcgccctcctctcccccaagggcgtcaaccctgaagtgcaagctctgatgacgatcaagaacacgctcaaggacccccacggcgtgctcaagaactgggaccaggactccgtggatccctgcagctggaccacagtcagctgctcgctagagaacttcgtcaccggactggaggtcccaggtcagaacctctctggcctgctctccccaagcatagggaacctgacgaatcttgagactattctcctgcagaacaacaacatcaccggcctaatcccagcagagatcggcaagcttacaaagctcaggacacttgatctctctagcaaccacctgtatggcgcaatccccacttctgtgggcaaccttgagagcctgcagtacttgaggctcaacaacaacaccctgtctggcccattcccttcagcatcagctaatttgtcccagcttgttttcctagacttgtcatataataatctgagtggtccagtgccgggatctttggcaagaacattcaacatagttgggaatcctctcatctgcggcaccaacaacgccgagagagattgctatgggactgccccaatgccgccatacaacctcaacagctcactgcctccggcaataatgtctaaaagccataagtttgcaattgcatttggtaccgcaattggctgcatcggcctcctcgtcctcgctgccgggtttctgttctggtggaggcatcgtagaaaccggcaggtcctttttgatgtcgatgatcaacacatggagaacgttagcctcgggaacgtgaagaggttccagttcagggagcttcagtctgcgacaggcaacttcagcagcaagaacatactgggaaaaggtggctttggatacgtctacagagggcagttccctgacggaactcttgtggccgtgaagcgactcaaggacggcaacgccgcgggcggcgaggcccagtttcaaaccgaggtcgagatgatcagcctggcactgcacagaaaccttctcaggctctatgggttctgcatgaccgccacagagaggttgctggtctatccatacatgtctaatggaagcgtcgcgtcgcgcctcaaagggaagccacctctggactgggtgacgaggaagaggatagctctcggggcagggagggggctgctgtacctgcacgagcagtgcgaccccaagatcatacacagggacgtcaaggctgccaacatcctgctagacgactgctgcgaggccattgtcggtgacttcgggctcgctaaactcctcgaccatcgggactcccatgtcaccactgcggtgcggggcactgtcggccacatcgcgcccgagtacctctccactggccagtcgtcggagaagaccgacgtcttcgggttcggcatcctgctgctggagctcgtcaccggtcagacggcgctggagtttgggaagacggcaaaccagaagggagccatgctggactgggtgaagaagacgcaccaggagaagaagctggacgtgctggtggaccaggggctgaggggcggctacgacaagatggagctagaggagatggtgcgagtagcgctgctgtgcacgcagtaccttcccggccaccggccgaagatgtcggaggtggtccggatgctggaagcaggggaagggctcgcagagcggtgggaagcctcgcactcgcagtcgcagagcgcggactcgcacgagttcaaggtgcctgacttcactttcagccgctgctactctgaccttaccgacgactcgtcgctgctggtgcaggccgtcgagctgtcgggcccgagatgatgatgacgacgacgccgccgccagtttgcactttgtacagcatgcatattaaggaccgagaatcctgtgtggactaccatactagaatagctagctatagatgtgtattagattaactgtacaaaaagaagagcgtgtgaggtttgtactgatttggatatttacagaattagtagtcgagacaataagaccaagtaaaaaagagcttttcattgttca

SEQ ID NO: 138076 - DNA, 2332 bp, Zea Mays
cacattgcacgcaggaggaccggccgccactctttctcgctctcttctcttctcttggctccagctccacccacctctagctgcctcccttcggcaatggaggaggcgccaccatcttcttctcccccctcccctcctgtgatgctactcttgctgctgctgcttatcgtctcctccccttgtagctctagcgccctcctctcccccaagggcgtcaaccctgaagtgcaagctctgatgacgatcaagaacacgctcaaggacccccacggcgtgctcaagaactgggaccaggactccgtggatccctgcagctggaccacagtcagctgctcgctagagaacttcgtcaccggactggaggtcccaggtcagaacctctctggcctgctctccccaagcatagggaacctgacgaatcttgagactattctcctgcagaacaacaacatcaccggcctaatcccagcagagatcggcaagcttacaaagctcaggacacttgatctctctagcaaccacctgtatggcgcaatccccacttctgtgggcaaccttgagagcctgcagtacttgaggctcaacaacaacaccctgtctggcccattcccttcagcatcagctaatttgtcccagcttgttttcctagacttgtcatataataatctgagtggtccagtgccgggatctttggcaagaacattcaacatagttgggaatcctctcatctgcggcaccaacaacgccgagagagattgctatgggactgccccaatgccgccatacaacctcaacagctcactgcctccggcaataatgtctaaaagccataagtttgcaattgcatttggtaccgcaattggctgcatcggcctcctcgtcctcgctgccgggtttctgttctggtggaggcatcgtagaaaccggcaggtcctttttgatgtcgatgatcaacacatggagaacgttagcctcgggaacgtgaagaggttccagttcagggagcttcagtctgcgacaggcaacttcagcagcaagaacatactgggaaaaggtggctttggatacgtctacagagggcagttccctgacggaactcttgtggccgtgaagcgactcaaggacggcaacgccgcgggcggcgaggcccagtttcaaaccgaggtcgagatgatcagcctggcactgcacagaaaccttctcaggctctatgggttctgcatgaccgccacagagaggttgctggtctatccatacatgtctaatggaagcgtcgcgtcgcgcctcaaagggaagccacctctggactgggtgacgaggaagaggatagctctcggggcagggagggggctgctgtacctgcacgagcagtgcgaccccaagatcatacacagggacgtcaaggctgccaacatcctgctagacgactgctgcgaggccattgtcggtgacttcgggctcgctaaactcctcgaccatcgggactcccatgtcaccactgcggtgcggggcactgtcggccacatcgcgcccgagtacctctccactggccagtcgtcggagaagaccgacgtcttcgggttcggcatcctgctgctggagctcgtcaccggtcagacggcgctggagtttgggaagacggcaaaccagaagggagccatgctggactgggtatacgaaaccgaaaaaaattaatctacaggtcatgcgtgtttttttaacccatcgaacggaacaacgagagtcatgtcgatcggtttcgttgtttgattcatcaggtgaagaagacgcaccaggagaagaagctggacgtgctggtggaccaggggctgaggggcggctacgacaagatggagctagaggagatggtgcgagtagcgctgctgtgcacgcagtaccttcccggccaccggccgaagatgtcggaggtggtccggatgctggaagcaggggaagggctcgcagagcggtgggaagcctcgcactcgcagtcgcagagcgcggactcgcacgagttcaaggtgcctgacttcactttcagccgctgctactctgaccttaccgacgactcgtcgctgctggtgcaggccgtcgagctgtcgggcccgagatgatgatgacgacgacgccgccgccagtttgcactttgtacagcatgcatattaaggaccgagaatcctgtgtggactaccatactagaatagctagctatagatgtgtattagattaactgtacaaaaagaagagcgtgtgaggtttgtactgatttggatatttacagaattagtagtcgagacaataagaccaagtaaaaaagagcttttcattgttc

SEQ ID NO: 138077 - DNA, 1768 bp, Zea Mays
ttttttttggctggagcgaggttgatcgtttgcttcccttccctgctgctgcagtctcctgcagaacaacaacatcaccggcctaatcccagcagagatcggcaagcttacaaagctcaggacacttgatctctctagcaaccacctgtatggcgcaatccccacttctgtgggcaaccttgagagcctgcagtacttgtgagtgcatgcaagcctctcattatgtacttctcttctccagctatgataacctgggtttgttgccatgtccaggaggctcaacaacaacaccctgtctggcccattcccttcagcatcagctaatttgtcccagcttgttttcctagacttgtcatataataatctgagtggtccagtgccgggatctttggcaagaacattcaacatagttgggaatcctctcatctgcggcaccaacaacgccgagagagattgctatgggactgccccaatgccgccatacaacctcaacagctcactgcctccggcaataatgtctaaaagccataagtttgcaattgcatttggtaccgcaattggctgcatcggcctcctcgtcctcgctgccgggtttctgttctggtggaggcatcgtagaaaccggcaggtcctttttgatgtcgatgatcaacacatggagaacgttagcctcgggaacgtgaagaggttccagttcagggagcttcagtctgcgacaggcaacttcagcagcaagaacatactgggaaaaggtggctttggatacgtctacagagggcagttccctgacggaactcttgtggccgtgaagcgactcaaggacggcaacgccgcgggcggcgaggcccagtttcaaaccgaggtcgagatgatcagcctggcactgcacagaaaccttctcaggctctatgggttctgcatgaccgccacagagaggttgctggtctatccatacatgtctaatggaagcgtcgcgtcgcgcctcaaagggaagccacctctggactgggtgacgaggaagaggatagctctcggggcagggagggggctgctgtacctgcacgagcagtgcgaccccaagatcatacacagggacgtcaaggctgccaacatcctgctagacgactgctgcgaggccattgtcggtgacttcgggctcgctaaactcctcgaccatcgggactcccatgtcaccactgcggtgcggggcactgtcggccacatcgcgcccgagtacctctccactggccagtcgtcggagaagaccgacgtcttcgggttcggcatcctgctgctggagctcgtcaccggtcagacggcgctggagtttgggaagacggcaaaccagaagggagccatgctggactgggtgaagaagacgcaccaggagaagaagctggacgtgctggtggaccaggggctgaggggcggctacgacaagatggagctagaggagatggtgcgagtagcgctgctgtgcacgcagtaccttcccggccaccggccgaagatgtcggaggtggtccggatgctggaagcaggggaagggctcgcagagcggtgggaagcctcgcactcgcagtcgcagagcgcggactcgcacgagttcaaggtgcctgacttcactttcagccgctgctactctgaccttaccgacgactcgtcgctgctggtgcaggccgtcgagctgtcgggcccgagatgatgatgacgacgacgccgccgccagtttgcactttgtacagcatgcatattaaggaccgagaat

SEQ ID NO: 138078 - DNA, 2325 bp, Zea Mays
cacattgcacgcaggaggaccggccgccactctttctcgctctcttctcttctcttggctccagctccacccacctctagctgcctcccttcggcaatggaggaggcgccaccatcttcttctcccccctcccctcctgtgatgctactcttgctgctgctgcttatcgtctcctccccttgtagctctagcgccctcctctcccccaagggcgtcaaccctgaaggttctgtcatctctctctctccttttccttctttcctgtttcctcacgtactctgcgactacagcagtaccagtttctatctctgtttcgtttgcctcaaacagaatcgttgttttcgacggcgaatagaaatgaaaatcaaggactccactcactgtcagctgtcttcgtcgtcgcgttgcttcttagttgcattggtgggacctcagctcactgggttaattctctggtatatgtgtgtatgatgttgtgcagtgcaagctctgatgacgatcaagaacacgctcaaggacccccacggcgtgctcaagaactgggaccaggactccgtggatccctgcagctggaccacagtcagctgctcgctagagaacttcgtcaccggactggaggtcccaggtcagaacctctctggcctgctctccccaagcatagggaacctgacgaatcttgagactattctcctgcagaacaacaacatcaccggcctaatcccagcagagatcggcaagcttacaaagctcaggacacttgatctctctagcaaccacctgtatggcgcaatccccacttctgtgggcaaccttgagagcctgcagtacttgaggctcaacaacaacaccctgtctggcccattcccttcagcatcagctaatttgtcccagcttgttttcctagacttgtcatataataatctgagtggtccagtgccgggatctttggcaagaacattcaacatagttgggaatcctctcatctgcggcaccaacaacgccgagagagattgctatgggactgccccaatgccgccatacaacctcaacagctcactgcctccggcaataatgtctaaaagccataagtttgcaattgcatttggtaccgcaattggctgcatcggcctcctcgtcctcgctgccgggtttctgttctggtggaggcatcgtagaaaccggcaggtcctttttgatgtcgatgatcaacacatggagaacgttagcctcgggaacgtgaagaggttccagttcagggagcttcagtctgcgacaggcaacttcagcagcaagaacatactgggaaaaggtggctttggatacgtctacagagggcagttccctgacggaactcttgtggccgtgaagcgactcaaggacggcaacgccgcgggcggcgaggcccagtttcaaaccgaggtcgagatgatcagcctggcactgcacagaaaccttctcaggctctatgggttctgcatgaccgccacagagaggttgctggtctatccatacatgtctaatggaagcgtcgcgtcgcgcctcaaagggaagccacctctggactgggtgacgaggaagaggatagctctcggggcagggagggggctgctgtacctgcacgagcagtgcgaccccaagatcatacacagggacgtcaaggctgccaacatcctgctagacgactgctgcgaggccattgtcggtgacttcgggctcgctaaactcctcgaccatcgggactcccatgtcaccactgcggtgcggggcactgtcggccacatcgcgcccgagtacctctccactggccagtcgtcggagaagaccgacgtcttcgggttcggcatcctgctgctggagctcgtcaccggtcagacggcgctggagtttgggaagacggcaaaccagaagggagccatgctggactgggtgaagaagacgcaccaggagaagaagctggacgtgctggtggaccaggggctgaggggcggctacgacaagatggagctagaggagatggtgcgagtagcgctgctgtgcacgcagtaccttcccggccaccggccgaagatgtcggaggtggtccggatgctggaagcaggggaagggctcgcagagcggtgggaagcctcgcactcgcagtcgcagagcgcggactcgcacgagttcaaggtgcctgacttcactttcagccgctgctactctgaccttaccgacgactcgtcgctgctggtgcaggccgtcgagctgtcgggcccgagatgatgatgacgacgacgccgccgccagtttgcactttgtacagcatgcatattaaggaccgagaat

SEQ ID NO: 138079 - DNA, 1221 bp, Zea Mays
acagagaagcagacactaggtatctacactgctaattctccccatttcttgctccaaattaagcagacactaggatcagccagacatgtcaatcatacactgacgacgacgacgacagagatatatatctgcatctatctgggtgtagcaagatcatacaaattcatctctgctgctagtacagatcgatgcaacgttcgtgtttatacccaggtgggctgcagtttgcaagttaatctgtagcacgcaagcacacaggcgctgtcatcgtcaatggcgaggctgagccacggcctcctgggcgccctgaacctggtgacgctcctgctgtccctgccggtgctgtgcgccggcgtgtacatcgtcacgcgcgccaccacggcgtgcgagcgcggcctccagatccccgtcgtcgcgttcggctgcggactgctcctgctctccctcgtcggcctcgccggcgcctgcggacgccgcggcgccgccaggccgttcctctgggtgtacgtggccttcatgtttctgctcgccgtcctcgtgttcgcgttcgccgtgttcgcgttcgtggtcacccaccggggcgcgggcggcgccgtgtccgggcgcgggtacagggagtaccgcctcggggactactccggctggctgcaggcgcggatcgccgagccggagacgtggcggcgcgtcgagagctgcctctctgaggcgcgcgtgtgcggcggccgggaattctacaggcaacacctctcgccaatccagtccggttgctgcaagccgccgacgtggtgcaggttccggtacgtgaacgccacgttctgggaggcaccgagatcggggctgtctgcggcggcggccagcgacggtgactgccgggcatggagcaacgaccagcaggtgctttgcttcgagtgcgacacgtgcaaggccggcgtgctggagaccgccaagaagaagtggaagacagtggctatcgtcaacgtttccctcctcgcgttcatcgttattgtctacacggtcgggtgcttcgccttgcgcagcaaaggtggtggtcggtacttcaatggcggtggtcctgaccaaacataagcaggtcagcgatcagacaactccgatcgtgttcaaaatggtttaggttagaaacctaaggtagatgaatgatttgaagtttagaattgaactacggccctgttcgattttggagagaaatcaaagaggacgacc

SEQ ID NO: 138080 - DNA, 109 bp, Zea Mays
ggagttgctcctatagtagagttgaagcgagagccattttcagtaagttacaacccttccaaatgacaacgtatcaggtgcaaaccaagttttcgtgcaaactccatgc

SEQ ID NO: 138081 - DNA, 75 bp, Zea Mays
gattacaggagacaacttccagtcgacctggccgaaggaaatctcaaagctctaagcctgcaagccttgggtcag

SEQ ID NO: 138082 - DNA, 88 bp, Zea Mays
gtgctcattgttttatctattttatgtataccaactacgtatagttttgatattgactttcgtcatgctacattacaggatgacatgg

SEQ ID NO: 138083 - DNA, 939 bp, Zea Mays
ggcccacttggcccatctccccagccgccgcccctcccctatcctccctaaggccgccgccgcccctggtagccgccgcctctccctgctcctctctctcccaagcggctctctctctcctcgcttctctcccctcctcttctccagccgctgccaggcaaccggccgccgcagcgcagccacccgagcccctctgctgagagcgagaagagatggccgacaagggtgatgggccgacaatcggcatcgatctcggcacgacctactcttgcgtcggcgtgtggcagcacgaccgtgtcgagatcatcgccaacgaccagggtaaccgcaccacaccctcgtacgtcgccttcaccgactccgagcgcctcatcgaagatgcggccaagaaccaggtcaccatgaaccccatcaacaccgtctttggtgagcacgccctcgttctcggttctttacttactcctgctgccctagctgagatccgttttgttcactgtgaggagaagcccaaggaacccaaggaggtcagttacttatacttgccgattattattcaagtcccatgcggcggtgatcctcgtcgccttctgcctccttggtctgcaactggacgacatgctctggtttctgttccaggagacggtgacgctcaagatccaactgcactgcgactggatgctaaggtaacaatgcttggactggtacccagcatcgttcgtacttggaagaatacggactgtacagctggactagactggtcctccatccgacgctttagctcctctggggaggcatccaatgtggatgattatttatggctgatgggaagagctggttgtgatgcagttgaagacccaagatttgaacgacgctattgtcacaccgaaagtgtgttcgatgaaatgcctccaaaatccggaggtttctatttgtgaaagt

SEQ ID NO: 138084 - DNA, 150 bp, Zea Mays
aacttatggttggtcgctatagatatcgttggggactagcggtgggtcgctatagagcaaggatcactatcaaatcttatagcctgaacgtacctgtagatgttagtgactaaaaattaattaaaacacgtaaacattgatcgctaaatt

SEQ ID NO: 138085 - DNA, 3852 bp, Zea Mays
cagacaggcggacacatacctaagacctaacaaaatcccaaagccgataccggtgacgcggcggcgcggcccaccacggcatcgggcccgcggggcggagggcgtcgctttcgcgagccaccggccgcgcgtacggctccggcaccagcgcagcgcagcgcacgccgggctgcctggcgtccaggcgtattttccctcaaggttccgtcgccgtctcgccctccgacgctccacgcacgccggcaatctccggagagcgacggccgttacgatcagaccagacgtcagaccagaccagaggtgtcgatccgttcccggctcggttcttcctactttcttggacttttgatcgcgtcgcgtcgattagaaactgcctgcgagttaccgcgcgacgacttgctgatgacggtgtgtcatcgcctttccaattggaaaaccagaaaggtgaaagcttcggaatgagacgatggcggaatggaattggctgcagaaagcagcttatctttggcagcgatagtcacagccggagatcccacccgcggcggcacaggtctaaaaggagcaaccgcagatcaactttgccagtgatacgtccgtagtccctgccgaatactcgtacctgctgatactacctcaccacccacacactcccccctcccacgaccaaggttctaaaacttttttccccaagaacatccttgtctgtctccacctgctgacccttgcaaccgcagctataaaaagtacctacgcaggtctcgcgattgtaaaagattgctgcagagaagtttgggaggaacagggttacagtagaagccagtttttgccttttttccaatccctgttcttgcttgtcctggccccgctccttggacttggatttcgatttcttcctgaccatgagtggcaattgccaagtaaaaagctgcgagggttgaagcgagcacggcaagatctgttggttgttgcaggaggcttgccacaggaaggaaaggaggtgccgcttgcggactgtcctgcttgtcctctcacaagacgactccaagccgagaaatcttcgcccaaattctcgctcccccgctctcaattagcgtgcatgggcgcaggaaaggcggcgccttgagctgctgctgcgtcagggggggcgaatggatgcagagagcggccgcggcgccgcgggtgcgcgcaagaagtcatggcggtcagagctggtgctagcctaccagagcctcggcgtcgtgtacggcgatttggcgacgtcgccgctctacgtgtacaagagcgccttcgccggcggcgacatcgagcactctgagggcaacgaagagatctacggcgtgctgtcgctcgtgttctggacgctcaccctcattacgctcctcaagtacgtgctcgtcgtcctgcgcgccgccgatgacggcgagggcggcaccttcgcgctctactccctcatatgccgccgggtccgcgcggggctcctccctggcgtcggcgacagcgctgtcgacgagctcaaggaccagcccgacggcgcgctgccgccgccagcgtcgagcgtgcgcgcggcgctgcagcagcgcagggagctgcagtggctgctgctgctgttcgctctgctcgggacgtccatggtcatcggcgacggcgtgctcacccctgctgtctccgtgttctcagcggtttcggggctcaagctgtcaatggtcaatgaacagcaccaatatgttttgcttccagtaacatgtgtgatcctggtaggcttgttcgccttgcaacacttcggcacgcacagggtcggattcctcttcgcgcctattgtttgcttgtggcttctctgcataagcaccataggggtctacaacatcttcatttggaatccccatatctataaagccctgtcaccatactacatgtaccgatttctccagaagacacaagttggaggctggatgtcactgggtgggatccttttatgtgtaaccggttctgaagctatgtatgcggaccttggacatttctctcagtcttcaatcaagattgctttcacagcggtagtttatccgtcactcgtacttgcctatatgggacaagctgcttatatttcacggcatcacaattttgagaggaaccaccatattggattttacatatcagtacctgaaaagatcagatggcctattctggggattgcaatccttgcagctgtagttgggagccaagcagttatcactggcacattctcagttatcaaacagtgttgctccttgaattgctttccaagggtgaagattgtgcatacatcctccacagtacatggccaaatatacataccagagatcaactggatcttaatgatactgtgcttggctgttactataggcttcagaaacacgaaacagatggcaaatgcacaagggttggcggttataacagttatgattgtcacaacttgctttatgtcactcgtcattgtcctttgttggaacaagaatgttgtatttgctcttgccttccttcttttcttcggtgcaatcgaagctgtctacttctcagcttccctgatgaagttccatgaaggagcttgggtgcctataattgtttccttcattttcttgactgtgatgtgcgtttggcactatggaacagcaaagaagtacgaattcgatgtggaaaacaaggtctcaataagttggcttctgaatttaggctcttcgttgggtattgttcgggtcagaggcattggcctgatacatacagagcttgtgtctgggattcctgccattttctcccactttgtcaccaacctccctgcatttcatcaggttctggtcttcctatgcatcaaatccgtttctgtaccacatgtccaacctgaggagcgatttttggtcggacgcattggcctgaaacaatacaggctataccgggtagttgtccgatacgggtaccgggatgttcaacaggacagcctgcagtttgagaaggccctagtgagcagcattgccgagttcatccgctcgggggactcggatcaaaacggttatccggatggctcagagagtccgtatgagaggttgtctattatcagcaaaggcctgccatttcaagaggctgacggtgacggatcaccatcacctgaatcatctgctcggaaggatacaaacccaatcttagtatcctccaagtcgaggagagtgaggtttgtgctcccagaaaatgcgcagatcaacagccaagtgcgcaacgagctgcaagagctgactgaggcaagagaggcaggcatgtccttcatcatggggcgctcgtatatgaaggcgaaaagtgggtctagcctgatgaagcggattgccataaacttcatctatgagttcctgacgaggaatagccgaggtcccgcctacgcggctaacgtgccacatgtttccacccttgaggtaggaatggtctgccaagtctgatagatatgatatcactgtggccatgtcacgttgtatagaggtaaaaatagttcttatgcctgtacactcacacatatatatcctaactaacaaaagagttagattgtgttgatgaagcggggcatgcatcattgtggcctgcgagtgcagatgttggatagacaaagtgtgcatagttttgtgttttctctataatatattcttttgtgttaggctcttccttgctctgctttgtcaatataccaatgccactgttgctatgtgctatagttacagagtaggagggaggccatttttgtgtgcataaattggcttgttgccaattaattgtatgtactgtatcagaatctgaataagtttatgctgaaattgtttcatccaagttctgagaggg

SEQ ID NO: 138086 - DNA, 1312 bp, Zea Mays
gatatttcgtccacaataatttctcccaaagacaggacaatgagaataacctctcaattgtgtcattttgttgtattttcatcaggagaatcaattgatggtcaacatggggattagtccgaggcggagtgctccgtcgacctcaagctcggcgggctaggcgagatcggggcggcggacggcacaaccacgaaggagccggtggctgcaaccgcagctccgtccgccaccccgatgaagcgcccgcgcttgcggcccggcggcgccggcggggcgcagtgcccgtcgtgcgcggtggacggctgcaaggccgacctgagcaagtgccgcgactaccaccgccgccacaaggtctgtgagacgcactccaagacgcccatcgttgtcgtcaccggccgcgagatgcgcttctgccagcagtgcagcagggttctatattcataagcatgttgttgcaccacacaacctttttgttttatatgttgtcatctgatctctggtgaaaaggagggagatgagctacggaggaaatctgatgttatggaactctaagaaaagtctagatttccacaggtccagtggtgccactgatgtcaagtcagcagaaacgattcttgagcatgagtatgcgtcgatgctctttttccctgaggcaatgctactcctatgcacagtgatgtagtagcaacggagaactgtcattaattggatacttcttatcctaattgcagtcgtatcatttagcttggggtttgaattatcggattgccctaccatactgcttagctaaagcccttgtcaaaatgcataattagaagcaactattaaagaaagatcagcttcagatagagtgaagacgcgagtgcattttccagggatggaaagaaggcatgatttattttcctccgacatataaatactcattcaactcggatcgttactctggtgtgcggcccaaagaaaatcggaggacacatgcttggtgcgatcacattccgtggcctcttgcagtcgtcctacatccgcggagagtctcgcttctttgaccacggaccagtgtacaatcttttcatggctaaggttgggagtgtccaccacagaagatcgaacttaaccttgatcatgatctctagcgctgagggaacagtgatagattgatatgaggtttgtaggtgtaattatgtgtataataacctttttttattttccttgcccctatggtgtagtacctgaaaagcaaaatgatgtatgtatttgttgttaaatacttttctaattctaacagtaagaaattaaggttgtgccgatgcac

SEQ ID NO: 138087 - DNA, 1593 bp, Zea Mays
gagggccactcacacgtctcctactagcctgcccggcgctctcgtccgatcgcgcatcgcctcctttcggaatcttctcctccgggctccggatgttccttcccaagcatccgagccctacccgtccggggcgcacctgcctgcaaccaggcgttcctctcgttcgccctcgctcccgcatccccgcgacgacattatcagaacggcgacatctccttcggtcgtcggccgctgcctcctccagcttcccgtccagggattccccactctctgccgcgaaggggtcatcgcagaataagccgccggatgaaatcaggaggtggaaggcggtgtcgcctggaatgcgcgagtccgctgaccctgaaactgaaactgaggacccatcaccgccgcggacggccctctggtcggcgaggcggagggcacgcgctgcgtggcggaaggtggtgtcttgggtgcccaggaaggcccggagcctcgtactactcaatctggtcactcttatattcgctagcaacatttcagttgtgaaacaggcagaggctcttttggaccctgaccttttcaatatgttaaggttcactatagcagccatcccttttgtgccgctgttactaaaatcgctgaggaatatgcaaatcctttttagaggactagagttgggcatttgggtaagcgtggcctaccttgctcaggctatggggttagttacggctggtgctggacgtgcatctttcatttctgcactcacagttatcatcgtcccgttcttggatggtcttattggagcagaagtacctgcccatacatggtttggggcatttttatcactttttggtgttattatgctggagctaagtggttctccaccatgtgttggtgatcttctgaacctcttgagcgccttttcttttgcaattcatatgctcagaactgagcatatttcaagaaatataaagaaagaaaatttcttaactcttgttggatgtgaggtgtttgttgtagcaatcctatcagcagcgtcatatacttttaaatgcttcacacaaaatgtacaacactggaatttgaaagtatggtctccatcagagttatttggtatggcgatgttgtttccttggccagcaattctatacacaggcatattgtcaacttcgttttgtttatgggcagaggtggccgctatgcgcgttgtatcagctacagaaactgcaattatttatggtctggaacctgtatggggtgctgcttttgcatgggtaatgctcggcgagagatggggcctgacaggatttgtcggggctatcttcatcatggctggcagcttgatggttcagatatatggatcaatcctagatgatgtatctagaggagacgattaccagatgaacatttaaatgttcatattacagaagatgaagcaagttgtaattcatgatgaagcaagttttttcccatttatagggtaggtagctacgagcaagtgtaaccaaactctcaaagtttgcccccccccccccacacacacacacacacacattcctccaaatggctttgttgttgttgagagtttctcatcgatatttcatcctc

SEQ ID NO: 138088 - DNA, 1527 bp, Zea Mays
tgcccggcgctctcgtccgatcgcgcatcgcctcctttcggaatcttctcctccgggctccggatgttccttcccaagcatccgagccctacccgtccggggcgcacctgcctgcaaccaggcgttcctctcgttcgccctcgctcccgcatccccgcgacgacattatcagaacggcgacatctccttcggtcgtcggccgctgcctcctccagcttcccgtccagggattccccactctctgccgcgaaggggtcatcgcagaataagccgccggatgaaatcaggaggtggaaggcggtgtcgcctggaatgcgcgagtccgctgaccctgaaactgaaactgaggacccatcaccgccgcggacggccctctggtcggcgaggcggagggcacgcgctgcgtggcggaaggtggtgtcttgggtgcccaggaaggcccggagcctcgtactactcaatctggtcactcttatattcgctagcaacatttcagttgtgaaacaggcagaggctcttttggaccctgaccttttcaatatgttaaggttcactatagcagccatcccttttgtgccgctgttactaaaatcgctgaggaatatgcaaatcctttttagaggactagagttgggcatttgggtaagcgtggcctaccttgctcaggctatggggttagttacggctggtgctggacgtgcatctttcatttctgcactcacagttatcatcgtcccgttcttggatggtcttattggagcagaagtacctgcccatacatggtttggggcatttttatcactttttggtgttattatgctggagctaagtggttctccaccatgtgttggtgatcttctgaacctcttgagcgccttttcttttgcaattcatatgctcagaactgagcatatttcaagaaatataaagaaagaaaatttcttaactcttgttggatgtgagcaatcctatcagcagcgtcatatacttttaaatgcttcacacaaaatgtacaacactggaatttgaaagtatggtctccatcagagttatttggtatggcgatgttgtttccttggccagcaattctatacacaggcatattgtcaacttcgttttgtttatgggcagaggtggccgctatgcgcgttgtatcagctacagaaactgcaattatttatggtctggaacctgtatggggtgctgcttttgcatgggtaatgctcggcgagagatggggcctgacaggatttgtcggggctatcttcatcatggctggcagcttgatggttcagatatatggatcaatcctagatgatgtatctagaggagacgattaccagatgaacatttaaatgttcatattacagaagatgaagcaagttgtaattcatgatgaagcaagttttttcccatttatagggtaggtagctacgagcaagtgtaaccaaactctcaaagtttgcccccccccccccacacacacacacacacacattcctccaaatggctttgttgttgttgaga

SEQ ID NO: 138089 - DNA, 1216 bp, Zea Mays
gacagtctccaggagccgtatgtcttcatccttccctgctccctcatgttggcccacgccgcttagctcccggaagccttctcctatgcgtctcttctctttgaaatatctcacgtcgtggatgctctgattcttcttgaatcttatccttccaccgccggaccgcccctgactcctttttatgcgcgccggctgctcatccctggcttgctgcgcccatggccgagcggctcccatggcgagctcgccgggatgcccctgctccagcttcctccctgctcggccagaccatcggcctccctctgcttggagctcgtcgccatggtcgttgccttttccctgctcgcgtcctgtgcgcgtcctttagcccttgctcctctggctcggcgcccatctccatggctccctgcgtgtccattcgtcacgctctcctgctccctgttccccttgcgtcccctggatccttctctgcgcccgtgtcaccgtccgccgtcgatcccctcgcgcaggccatgagctgtctgttcgccatagtcgagccgttctcagttgctcgccgccgaagctcccctgatagctgcgtcctgctcgcctttgcgtcgcgcgcatagcgttatgttattcttgcgcgcgcgaagctctttgctcgtcaacgctccagcccggatttcgctttgtcgcccagctcggctctacatctcccatggctgtctgctctagctcgccgtgtccttcgtaaatattttcgcctagctgcacggacctcaccgttgtcttggtcgtcgatgccacgcaactatccacacgtggttgtcttcacggacaccgcttcacactatcactctgtcttcaccatccgtagtgtcatcgtcgggatgtcctagctgcaacaccagcgccctcgatcgtacccaaagctctatattggatttgtcagcgtgctactcgtccgctggttcctcgactttatcgatctcgtcgtcgttcgtgcatccccaagaaatcccaaacgtcgagtgaagacgaagctagccgagtggtattccccaagcgctcgacatattgcctggatcggaaaatcactaccaatctcgcggattcgtgtcagctatggaaacagtacgtgaattaaccacgtgatgcgaaagacaagccaagtcgaccccaagcacgggctaatccgcaagatgaagctgatggaccaacttgaagatgg

SEQ ID NO: 138090 - DNA, 1216 bp, Zea Mays
gacagtctccaggagccgtatgtcttcatccttccctgctccctcatgttggcccacgccgcttagctcccggaagccttctcctatgcgtctcttccctttgaaatatctcacgtcgtggatgctctgattcttcttgaatcttatccttccaccgccggaccgcccctgactcctttttatgcgcgccggctgctcatccctggcttgctgcgcccatggccgagcggctcccatggcgagctcgccgggatgcccctgctccagcttcctccctgctcggccagaccatcggcctccctctgcttggagctcgtcgccatggccgttgccttttccctgctcgcgtcctgcgcgcgtcctttagcccttgctcctctggctcggcgcccatctccatggctccctgcgtgtccattcgtcacgctctcctgctccctgttccccttgcgtcccgtggatccttctctgcgcgcgtgtcaccgtccgccgtcgatcccctcgcgcaggccatgagctgtttgttcgccatagtcgagccgttctcagttgctcgccgccgaagctcccctgatggctgcgtcctgctcgcctttgcgtcgcgcgcatagcgttatgttattcttgcgcgcgcgaagctctttgctcgtcaacgctccagcccggatttcgctttgtcgcccagctcggctctacatctcccatggctgtctgctctagctcgccgtgtcctccgtaaatattttcgcctagctacgcggacctcgccgttgtcttggtcgtcgataccacgcaactatccacacgtggttgtcttcacggacaccgcttcacactatcactctgtcttcaccatccgtagtgtcatcgtcgggatgtcctagctgcaacaccagcgccctcgatcgtacccaaagctctatattggatttgtcagcgtgctactcgtccgctggttcctcgacgttatcgatctcgtcgtcgttcgtgcatccccaagaaatcccaaacgtcgagtgaagacgaagctagccgagtggtattccccaagcgctcgacatattgcctggatcagaaaatcactaccgatctcgcggattcgtgtcagctatggaaacggtacgtgaattaaccacgtgatgcgaaagacaagccaagtcgaccccaagcacgggctaatccgcaagatgaagctgatggaccaacttgaagatgg

SEQ ID NO: 138091 - DNA, 4668 bp, Zea Mays
ggcaaagataccacccctcttctgaagaaagatgaagtggtagtgttctgaagcttcttaaaggccgactttgatttccacttcataagatgctagtggagattctgaaaaaatttgatatatacctacatttgttgaccctgaatgccttaatgaggttagggatatttatctagacagtgaagagctagagcgtagagccaaatgttgtttttttctctaaatccatgagcttcattatcagataaaagcaactaggaaggagcaacaacacaacgactttggttgcctcatcttcacatacctgaaagatgctcgataccctgccttggcatactgaagcaaatgatcgaatgcttagacaagggaatggttctatgtaacgaacaaacttgagaatatcatccaaagacctataaaactacacttcggcataaagaggtcgacatgcgttatgagtgatgaagctcaagatgcccttgtagcttttaacgcggtatgcatctacataggtaccagagatcttgtgcaagagcacttagccttcaacgtttggccgcttcaggctaattgggaaataccgaaatcgaaggaggatagtccatcgatgcaagaggctaaaagggtggcttactatattgaaatatacatacaagtttgggcaacagtttggtgagacagatgatgaatggctagaagcctatgaatcaaaatgcaatgaagttctaggtaacttcgtcaagaaagaaaacaaagccttaacgactacctttggagccagagggaagagaagatcaaaccgagtatttgacgttatacacttcatctatctagactactgaaagtcgcctaaaaggggtgaatagatgaaacctgaaaattataaattttgaacacgaacttcacccggggttaggatcagaaataagtaatagcgagatcagagtgcgaaagaaagttctttttgctatgagttgctcaattaatgcagatgactttgggagcaaactcaaaaggattgtaagcaatataacttagaaagagaggagaggaaaggaagaatcaaatcgtaagctaatgatcaacataattgaacacaacaatttgtttggcgaggttcggttccaaagaacctactccccgttgaggaggtcacgtaggcccggtctctttcaaccctttacctctctcaaacgatcacttaaatcggttgagtgctcacttagatcggttgagtactccttaatctcgagggtcactcagaccccgcaaggatcaccacacacttaggtgtctcttgctagctatacaagtcacttgaaagtttagaaggagatgaagaaagcacaattaagaaaccaagcaacaagagcaacaaatgaaaacaccagatcacactatctcaagtcactaatcactaatgattattagtcacaattatggcacttggagaggtttgaaagctttgaatgtatcttggaatgaattgcttgctcttgtattgaatgtgagtgtgtagaatgcttgggtggattgaatggaagtggttggggttatatttatagccaccaacaactttctagccgttgtctcctttttgccaaccgcggacggtccgtccctgcacatcaacggctgaaatcgcaacagtcagcagtaacggctatatcaacggctataagtgcattaaatgcgttgtcagatgtcagataaagcagtcatagatggtctggctgtgcacccttgatggtccgcgaggatgctaaaaatgcattttaccgaacccgtcaccttcgtttttttgtttttcaacgagcggacggtctgcgcctgaggccagacggtctgagcttggtcccggacgatgctctcttctgcttcagacagtgcgtagtataaatggaatttttgcacagttcctgttcgagacacaccttggtgtcgcggacggtctgccagaagggcccgaacgatccgtgcacatgtgaattttgcaaaaaagcttttcctgtccggaataatctatgacatttcggatagtcgacttagaattgatgtagatgaacttatgcacctaagaaataatcaactaggcaaactagttagtccataagatttgtgatggtcgtcaagcaccaaaattgattatataatatggttaaggccatttacttttcaactaccctcaactgatataaagcagtgggaggaaaaggaaatgcacattgaagccatcgggaagcagtcgaaggtttattatgaagatagggtggctattattgagccaagattgcctatgacaattattcttattgaggagatcgctgccgagcccgcaccggctatcgaatcgaaggttgattcttctgagctaccgaaggagaaggagaataaggttaaggaggaggtagttgagctacccatccatgatgaaattcctttggctagcttgcagcttgcaccaaggccaagaccagagtcgaagccgacttatgaggggacacctcggaaaggtaagaggatggataatattttgagagcaatcctcaagttcacaaagactgaggaatctttctagacgaaggttgctccaccctctccaaagagagatagcgcacttggtgttgagaacgtcgaaattgaacttgcgcaaaaactagatgacgctctaaaaggtgaccctgcttcagataagattgtagcttcgaaggtttacaccattcctgataaatccaaggataaataagaagaacaagttgaagatttggaagaggaggcaactacgatagctgaagaggaatcaactgtgcagcctgaatacaccatccgacacgcctctggaggggagttgactgctgagcagatcgtcaaagtacaagattatgctgaagatttacaatatcggacagacacgctcatttacgacggaaatgatgaagatgaatgcctctactatcttccagacagtagagagattgatgtgtgccgcgtgatgatgaataacataggttagctgaagatcgagtgtggactttccgcaatgccgaagggccagcttgcagatggcctagactataatagcctaaaggtgaggttttagttctttgcttttgaaagttgcctagaggggggcgggtggataggcaaacagaaatatttttcaataaaaactagaaacaaactaggtaaaaccggttcagccggtgccaaaactggttcaaccggtttgaacgagctcaactaaagaatgacatataaaactgaattgatctcaaaattcacctagttaactttggaaatgagatgttctagataatccacagggttcaaagtagtagatctgagaagggcacttctcaaaatccacacacaaaaaagatataaacaaatcttccacagaatggtgagagaatgaagaacacaaacaaacacaatgagcaagaacacaagagacatcagatttatcccgaggttcggtcacaccaccaaggtgccctatttcctcgttgaggcacccacaaagggtcgggtctctttcaaccctaatcctccctttgccgaccgtcaagcccacacactaatctttgctcaaacgagcgggtaatacaaactttcttgtgatcttccacaagatttggagactcacaagcgacacctagtcgtttaggagttagaagctctaagagtaatgaatccacaaagaactcgatgtagtaccaaagctcgaaccaagaagagcaagagggatttaaagattaagcacaaaaaccgcagctctcaaactcactcaaaaatttctctccaaagatttgaaatgggagaggcaagagatgtgtgagagagagtgggaggtgtttctcaggttagaaatggagttcaaatcgtgctcttttatggacagagaggtaggagtgagtatatataggtggggcttcgaaactagtcgttgggctaaatttctgggaaggaccggttgaaccgcccctggtctaactgtcagcctgtctgccagctagtcaagttgaccaaaaccggttgaacctcgttggggggcggttgaactgccccttggcagacctgtcagcctatctgccagtctgactgacagactactgcgaagtctggcaagaggggtcagagacccggttgaactgcccctggggaccagttaaactggtcttgaccagaaagtttaggagagaaaaccccagttcaactggcccagaggcaggttcaactggtgtatggtcaaagaggttcacagttgaagttgaagttcaactgcagttgaaaaagctcaactgtggctgaaaaagctaaactgcagttgaagaagttcaactcaactgaaaaagcttaattgcagctaaagaagctcaactcagctgaagttcaactcagctgaaaaaacttaactgcagatgaagaaaagcttaactgcttttcaacaggaacactctcagtttctcaatcttaacaacagtcagacacaaagtgtccaagggattttgttttttcgaaatagcttttgaatatagaggcttgagttttggcaaacaccaaccttctttttggatccccttgatagtacgacgatttctatactcaagttaaataaaatataattaagtaaactccttgagtaattgatgtctcatgtgtgatttc

SEQ ID NO: 138092 - DNA, 360 bp, Zea Mays
atgcacattgaagccatcgggaagcagtcgaaggtttattatgaagatagggtggctattattgagccaagattgcctatgacaattattcttattgaggagatcgctgccgagcccgcaccggctatcgaatcgaaggttgattcttctgagctaccgaaggagaaggagaataaggttaaggaggaggtagttgagctacccatccatgatgaaattcctttggctagcttgcagcttgcaccaaggccaagaccagagtcgaagccgacttatgaggggacacctcggaaaggtaagaggatggataatattttgagagcaatcctcaagttcacaaagactgaggaatctttctag

SEQ ID NO: 138093 - DNA, 4188 bp, Zea Mays
gactcggtggcggcgtcagaggctccccctcctgcctcgcgccctcgcctccggtcctccgcacaccggccggcgaccctgctgtctcccggccccggcgggcagtgggagccagcagctgctgctccaacaagcaatgatgggaatagaaggcattgcagccacagtcaccgaggaccctgaaccctcaattcctccaggatttggaccttttgctgcctcggcatcatggggaatccaaaacgatgttaaacctgctgatgatcattctagttctgttttagcattacagagcatcgacgacgatgtggaaattttggaatatctatccagttcagtggatcaccagagtgacacaggttgctgtatttctgggagcaatacctgtaggaaatcactgcgtaatagacctccaatagattatagccgctttgatcagattgcagatgaagattctgatgctgaagtagcagacaagggtgtaaatgcagtgaaacacagacaacaattccctaaaggagtacttcgaggatgtccagaatgtgccaattgtcaaaaggttattgcaagatggaatccatctggtgcacgtaggcctgttcttgatgaggctcctgtttactatcctaccgaggaggaatttcaggacacattaaaatacattgagattatccgcccaacagcagaaccatatggaatatgccgtattgttccaccagcttcatggaagcctccatgccttcttaaagagaaaaacatttgggagtgctcaaaattttctactcgggtacagaaggttgacaagctccaaaatcgtaaatcgcccaagaagagcagaagaggtggaatgatgaagaagcgtagaaagatttcggagactgaagaaaacaatcaccatcaaattggaatgcagcaaaaccaagagagatttggatttgaaccaggaccagagttcacactacagatgtttcagaagtatgcagatgacttcagtgatcagtattttatgaaagataaatgcagagattcaccaccatcagtggaagatattgaaggcgagtattggcgcatagttgaaagaccgacagaggagatagagtcacactaccttccaactgaccagaaaattcattctcataaggtaatatatggtgccgatttggagactggaacttttggcagtgggtttccaaagttatgtcctgaaatgaaatctgatgtggaggataaatatgcacaatctgggtggaatctaaataacctgcctagactacaaggttcggttctttcttttgaaggcggtgacatttctggtgttttagtgccttggctttatgtcggcatgtgtttttcatctttctgctggcatgttgaagatcatcatttgtactcactgaactacatgcattggggtgctccaaagatgtggtatggagttccagggaaggatgctgtgaatttggaggctgcaatgaggaaacatcttcctgagttatttgaggagcaacctgatttgcttcacaacttagttactcagttctcaccatcattgcttaaatctgaaggagtaccagtctaccgatgtgttcagcatgagggagagtttgtcctgacgttcccacgggcataccatgctggttttaattgtggcttcaattgtgcagaagctgttaatgtggcacccattgattggttgccggttggacaaaatgctgttgatctttatcgtgaacaagctcggaaaataactatctcccatgataagctgttgcttggggctgcaagagaagcaataagagctcagtgggacatcctatttctcaagaggaattcttctgttaacttgaggtggaaaagcatatgtggacctgatagcacaatatgcaagtcactgaagcttcaggctgtccatgctccccagagaaatatgcttgcctggtacatgcaaagcagctttgttcatgcgattgggacaaaagggggaaagctaagtgccattcacagatggggtgtctctgatcttggattaagtttgagctcctgtgtcaaacgggaaaaggtccaagattccaagactgttcgcagattaactgatggcccaagacggtcctacatgtcacaggcatcaacagtatcattgattccttcttctgttagcactgaacagaaaaagaatgaagataagacactggatttaggttgcccaggtatgaatttaccaaaaataagtccggaggcaaataatctgcgtccttcgacagaacagataaaatcagaaaatctctcacagctaaaggaaccatgtgtgaagaatgaattatcttgtccgaccagcaatggtaccagccaagaacataaaggagggattggaggccacaaacttgcagcagcaagcatgatggttctttctggtcaatcatttcctgcaaatgctggtgaatcagtgagaaatgcgcatgtcttggcagtatttaaagagggtagagactgtacatcttcacttacacttagggagtatcataacaggccagtgtcaatgattgataatggagctaacatgaagctggatctggaaaacatagacaattctcatatgttgatgtcatcaccagacttcaatgcaactgtatgtcattcttacaaggatcaaacattcttaacactggaaactaatacctctgtgatgactgagaaagatagcagtcaggcccgtaatgcaagccagcagtttgtcagtactgctttaagaacacaaaatgtgtctcaggaaccattgtgtaccgcgattgctccaaagcaactcatagatcctcaagttcagaaaaaatcatatggtgtttttggttctggcagtgcccatcttgggcatctgactgttggtaatcagcaactaaatgagagatggcatcaaagacaatctgattctttatccagtgtggaagttagagctaggggtcattcagctatgatagtgcagcctgctctggaaaatcacagcagaaatggagttgcacagaagggtcctcgcatagctaatgttgtacatagattcaagtgctctgttgaacctatagaaattggtgctgtgttatctgggaagttgtggtcctcaagtcaagcaatcttcccaaaagggtttaagagcagagtaaaatacttcagtgttgtagatccagtacaaatgacatactacatatctgaaatattggacgctggacagcagggaccactttttatggtgactgtagaaaactgtcctggtgaaattttcataaacatctctcctaccaagtgctggaacatggttcgtgaaaggctcaatatggaaataaggaggcagctcaatatgggaagagctaaccttcctacactacagcctccaggatcagttgatggccatgaaatgtttgggttgttaacaccagcaatagttcaggcaattgaggcccgggacagagattatatctgtacagagtactggcgatcaaggccccatgcaacaattgagaatcgagacaatcagaatatgtcacctcaggatccaccccttgttgcactgagggggctcttccagcgggctaattgtgatgaactgcgagcactacgcagtttgctgatgagcaatagaattctgggcgacaattctaggcagcaggcttgccaaatccttgatgaggagattgcgaagcaatggcactgaccagcgtaaatacaggatgttgtactaaccaattgtttggcatgattttgttttgacgggataaatcagttttaaggcttgcttcttccgttgcccttgtgcccattcttttcattcttgtgaccatacccaattctttattgcaagtggtgtcaacaagcatgaggctacagctgcatcacctgcaaggaagtcaaaagtaagaggcacatgcatttgtaatggcatcataatgttctttattcccatttcattatggttcctcactatttctgaatagttgtggctgattgttatgttacccaatgacaagggtgagtaacttattataagatgtagctgggtcatcatattcctttgttcttgaaatctgttaaccatgcatgcttgtctgatgtaaaccacccttagattccgggtactcggtcattattgggattattctagtagttgtattctttgtggagcaaataacgatttatatgtat

SEQ ID NO: 138094 - DNA, 4330 bp, Zea Mays
gactcggtggcggcgtcagaggctccccctcctgcctcgcgccctcgcctccggtcctccgcacaccggccggcgaccctgctgtctcccggccccggcgggcagtgggagccagcagctgctgctccaacaagcaatgatgggaatagaaggcattgcagccacagtcaccgaggaccctgaaccctcaattcctccaggatttggaccttttgctgcctcggcatcatggggaatccaaaacgatgttaaacctgctgatgatcattctagttctgttttagcattacagagcatcgacgacgatgtggaaattttggaatatctatccagttcagtggatcaccagagtgacacaggttgctgtatttctgggagcaatacctgtaggaaatcactgcgtaatagacctccaatagattatagccgctttgatcagattgcagatgaagattctgatgctgaagtagcagacaagggtgtaaatgcagtgaaacacagacaacaattccctaaaggagtacttcgaggatgtccagaatgtgccaattgtcaaaaggttattgcaagatggaatccatctggtgcacgtaggcctgttcttgatgaggctcctgtttactatcctaccgaggaggaatttcaggacacattaaaatacattgagattatccgcccaacagcagaaccatatggaatatgccgtattgttccaccagcttcatggaagcctccatgccttcttaaagagaaaaacatttgggagtgctcaaaattttctactcgggtacagaaggttgacaagctccaaaatcgtaaatcgcccaagaagagcagaagaggtggaatgatgaagaagcgtagaaagatttcggagactgaagaaaacaatcaccatcaaattggaatgcagcaaaaccaagagagatttggatttgaaccaggaccagagttcacactacagatgtttcagaagtatgcagatgacttcagtgatcagtattttatgaaagataaatgcagagattcaccaccatcagtggaagatattgaaggcgagtattggcgcatagttgaaagaccgacagaggagatagaggtaatatatggtgccgatttggagactggaacttttggcagtgggtttccaaagttatgtcctgaaatgaaatctgatgtggaggataaatatgcacaatctgggtggaatctaaataacctgcctagactacaaggttcggttctttcttttgaaggcggtgacatttctggtgttttagtgccttggctttatgtcggcatgtgtttttcatctttctgctggcatgttgaagatcatcatttgtactcactgaactacatgcattggggtgctccaaagatgtggtatggagttccagggaaggatgctgtgaatttggaggctgcaatgaggaaacatcttcctgagttatttgaggagcaacctgatttgcttcacaacttagttactcagttctcaccatcattgcttaaatctgaaggagtaccagtctaccgatgtgttcagcatgagggagagtttgtcctgacgttcccacgggcataccatgctggttttaattgtggcttcaattgtgcagaagctgttaatgtggcacccattgattggttgccggttggacaaaatgctgttgatctttatcgtgaacaagctcggaaaataactatctcccatgataagctgttgcttggggctgcaagagaagcaataagagctcagtgggacatcctatttctcaagaggaattcttctgttaacttgaggtggaaaagcatatgtggacctgatagcacaatatgcaagtcactgaaggcacgaattgaaatggagttggtacaaagacaaaatatatcctctccatgtcaatctaggaaaatggatagtgagtttgattctactgatagggaatgtgcattgtgttactatgatctgcatctttcagcttcaggctgtccatgctccccagagaaatatgcttgcctggtacatgcaaagcagctttgttcatgcgattgggacaaaaggtttttcctatttcgttatgatgttaatgagttgaatatcttagctgatgctttagggggaaagctaagtgccattcacagatggggtgtctctgatcttggattaagtttgagctcctgtgtcaaacgggaaaaggtccaagattccaagactgttcgcagattaactgatggcccaagacggtcctacatgtcacaggcatcaacagtatcattgattccttcttctgttagcactgaacagaaaaagaatgaagataagacactggatttaggttgcccaggtatgaatttaccaaaaataagtccggaggcaaataatctgcgtccttcgacagaacagataaaatcagaaaatctctcacagctaaaggaaccatgtgtgaagaatgaattatcttgtccgaccagcaatggtaccagccaagaacataaaggagggattggaggccacaaacttgcagcagcaagcatgatggttctttctggtcaatcatttcctgcaaatgctggtgaatcagtgagaaatgcgcatgtcttggcagtatttaaagagggtagagactgtacatcttcacttacacttagggagtatcataacaggccagtgtcaatgattgataatggagctaacatgaagctggatctggaaaacatagacaattctcatatgttgatgtcatcaccagacttcaatgcaactgtatgtcattcttacaaggatcaaacattcttaacactggaaactaatacctctgtgatgactgagaaagatagcagtcaggcccgtaatgcaagccagcagtttgtcagtactgctttaagaacacaaaatgtgtctcaggaaccattgtgtaccgcgattgctccaaagcaactcatagatcctcaagttcagaaaaaatcatatggtgtttttggttctggcagtgcccatcttgggcatctgactgttggtaatcagcaactaaatgagagatggcatcaaagacaatctgattctttatccagtgtggaagttagagctaggggtcattcagctatgatagtgcagcctgctctggaaaatcacagcagaaatggagttgcacagaagggtcctcgcatagctaatgttgtacatagattcaagtgctctgttgaacctatagaaattggtgctgtgttatctgggaagttgtggtcctcaagtcaagcaatcttcccaaaagggtttaagagcagagtaaaatacttcagtgttgtagatccagtacaaatgacatactacatatctgaaatattggacgctggacagcagggaccactttttatggtgactgtagaaaactgtcctggtgaaattttcataaacatctctcctaccaagtgctggaacatggttcgtgaaaggctcaatatggaaataaggaggcagctcaatatgggaagagctaaccttcctacactacagcctccaggatcagttgatggccatgaaatgtttgggttgttaacaccagcaatagttcaggcaattgaggcccgggacagagattatatctgtacagagtactggcgatcaaggccccatgcaacaattgagaatcgagacaatcagaatatgtcacctcaggatccaccccttgttgcactgagggggctcttccagcgggctaattgtgatgaactgcgagcactacgcagtttgctgatgagcaatagaattctgggcgacaattctaggcagcaggcttgccaaatccttgatgaggagattgcgaagcaatggcactgaccagcgtaaatacaggatgttgtactaaccaattgtttggcatgattttgttttgacgggataaatcagttttaaggcttgcttcttccgttgcccttgtgcccattcttttcattcttgtgaccatacccaattctgtaagaattgctaccttattgagtgatataagaggtgcctcatctactactacggggttgcaaattatgatccttgtttttttcttgatcagttattgcaagtggtgtcaacaagcatgaggctacagctgcatcacctgcaaggaagtcaaaattgtggctgattgttatgttacccaatgacaagggtgagtaacttattataagatgtagctgggtcatcatattcctttgttcttgaaatctgttaaccatgcatgcttgtctgatgtaaaccacccttagattccgggtactcggtcattattgggattattctagtagttgtattctttgtggagcaaataac

SEQ ID NO: 138095 - DNA, 461 bp, Zea Mays
cagggatccaccgtcgccgccctgactgcttcccgtgcggagcacgcggcgcgacaggcccgtttgcgggaagccgctctcgtgtgggagcgcgaacgcgaggccgctgatgctatcgctgctcagattgccgcggcggaacagctcctcgcctgcgacccacgacggcggggtcgcctcctctaacaccgtgggcggagtgtatggcgtcccgcccgcaccgaccgtcggcaccggaccccgcaccatccccacggtgttgtggcatgacccgactgacccgctcgtggctcagctccaccttcaggctgggagtgtccagaacattcgcctcatggttcctgtcgtcctggagccagagtcgtcgtcctacgcacgctagcgggacttactcctcctcacccttcgctgttacgctctggatgaccacgttctctgcgactaggggtgggcattttaaa

SEQ ID NO: 138096 - DNA, 436 bp, Zea Mays
cagggatccaccgtcgccgccctgactgcttcccgtgcggagcacgcggcgcgacaggcccgtttgcgggaagccgctctcgtgtgggagcgcgaacgcgaggccgctgatgctatcgctgctcagattgccgcggcggaacagctcctcgcctgcgacccacgacggcggggtcgcctcctctaacaccgtgggcggagtgtatggcgtcccgcccgcaccgaccgtcggcaccggaccccgcaccatccccacggtgttgtggcatgacccgactgacccgctcgtggctcagctccaccttcaggctgggagtgtccagaacattcgcctcatggttcctgtcgtcctggagccagagtcgtcgtcctacgcacgctagcgggacttactcctcctcacccttcgctgttacgctctggatgaccacgttctc

SEQ ID NO: 138097 - DNA, 1724 bp, Zea Mays
tcttcatcaaatttgcgcggcgtctgcgttccctgcttcccattcgaaaacaaaagcaaaaggtgcgcattcacggtgtcgccctcgtctctactcgtgtctcgtcttgggtagcgtacgcaccttagctcgcaaccatccatccatccacggggctcgggcgcagcagcctcccccgtcgtcgtcttcgtcgtcgccttgccgccgctctgatccgtgcccgatgcatcgtcagccatctcctcacgccttcagcagcagcggcagctgggcggagcagggcgcgggcgggtaccgccacggcagggacggcgccaccttcctcctccccgagctcctccagcgcagccccaaccccagctccaagtcctccagcgccgccaccttcgtgccgccgctcgccgccgcgcatggaggaggagtagcggccccgtttggcatggcgccgctgggagtggcggcggcggacgaagcccggttctgcatgacgccgtggtcagcggcggcgcacttcgagaactggggcgactccggcatcgtcgtcaccagcccgctcgccgagacggcctccaccgacgtcgacatgggtggaggtggagccatggcgcagagcgtcgacggacatgacaactcattgccggcgtgcaaggtggagcccagggatcacaaggcgcagaggaggcttgcgcaaaaccgcgaggcggcccggaaaagccggatgaggaagaaggcgtacattgtggagctggaaaacagccggtccaagctgtcccatcttgagcaggagcttcaaagggcaaggcagcaggggatgttcattgcaagtggacgctccggagatcatggatgctccactggaggtgcgttggcgttcgacctggagtacgcgcggtggctggacgagcaccagcaccacatgaacgacctccgggtggccctgagcgcgcagatcggcgacgacgacctgggcgtgctggtggacggcgcgatgctgcactacgaccagatgttccggctcaagggcgtggccacgaggacggacgtgttccacgtgctgtcgggcatgtggatgagccccgcggagcggttcttcatgtggctgggcgggttccggtcgtcggagctgctcaaggtgctggcgcggcacgtggagccgctgacggagcagcagctggtgggcatctgcggcctgcagcagtcgctgcagcaggccgaggacgcgctgtcgcaggggatggaggccctgcagcaggccctcggggacacgctcgccgccgccgccacgccgtgcgccgccgacagcgtcaccaactacatgggccagatggccgtcgccatgagcaagctcgccaccgtggagaacttcctccgccaggcggacctgctgcggcagcagacgctgaagcaggtgcgccggatcctgaccacgcgccaagccgcgcgcgcgctgctcgtcatcagtgactacttctcgcggctccgtgcgctcagctccctgtggctgacgcggccgacggattgattcggcgtaggcacacggacgggagctgtcgttggttggttgcgctgagactgtaatctgtatccgttgtgagatggggtgaccatgcggattcatcaggcagaaacggcgaatgtgtctagctttagttttggctaccattcagcttcatcagtgaggctagagtagagcgatttcggtgcgcatgtccaggcttttgctc

SEQ ID NO: 138098 - DNA, 1847 bp, Zea Mays
tcttcatcaaatttgcgcggcgtctgcgttccctgcttcccattcgaaaacaaaagcaaaaggtgcgcattcacggtgtcgccctcgtctctactcgtgtctcgtcttgggtagcgtacgcaccttagctcgcaaccatccatccatccacggggctcgggcgcagcagcctcccccgtcgtcgtcttcgtcgtcgccttgccgccgctctgatccgtgcccgatgcatcgtcagccatctcctcacgccttcagcagcagcggcagctgggcggagcagggcgcgggcgggtaccgccacggcagggacggcgccaccttcctcctccccgagctcctccagcgcagtaataacgccgccctgccccttgtttatccgcctgcctgcgtattttgtttcctttctttttcttcttgttggatttctcatggctgttggttgcacgcgcgcgcatcgcgggggctaatgtgaaggccccaaccccagctccaagtcctccagcgccgccaccttcgtgccgccgctcgccgccgcgcatggaggaggagtagcggccccgtttggcatggcgccgctgggagtggcggcggcggacgaagcccggttctgcatgacgccgtggtcagcggcggcgcacttcgagaactggggcgactccggcatcgtcgtcaccagcccgctcgccgagacggcctccaccgacgtcgacatgggtggaggtggagccatggcgcagagcgtcgacggacatgacaactcattgccggcgtgcaaggtggagcccagggatcacaaggcgcagaggaggcttgcgcaaaaccgcgaggcggcccggaaaagccggatgaggaagaaggcgtacattgtggagctggaaaacagccggtccaagctgtcccatcttgagcaggagcttcaaagggcaaggcagcaggggatgttcattgcaagtggacgctccggagatcatggatgctccactggaggtgcgttggcgttcgacctggagtacgcgcggtggctggacgagcaccagcaccacatgaacgacctccgggtggccctgagcgcgcagatcggcgacgacgacctgggcgtgctggtggacggcgcgatgctgcactacgaccagatgttccggctcaagggcgtggccacgaggacggacgtgttccacgtgctgtcgggcatgtggatgagccccgcggagcggttcttcatgtggctgggcgggttccggtcgtcggagctgctcaaggtgctggcgcggcacgtggagccgctgacggagcagcagctggtgggcatctgcggcctgcagcagtcgctgcagcaggccgaggacgcgctgtcgcaggggatggaggccctgcagcaggccctcggggacacgctcgccgccgccgccacgccgtgcgccgccgacagcgtcaccaactacatgggccagatggccgtcgccatgagcaagctcgccaccgtggagaacttcctccgccaggcggacctgctgcggcagcagacgctgaagcaggtgcgccggatcctgaccacgcgccaagccgcgcgcgcgctgctcgtcatcagtgactacttctcgcggctccgtgcgctcagctccctgtggctgacgcggccgacggattgattcggcgtaggcacacggacgggagctgtcgttggttggttgcgctgagactgtaatctgtatccgttgtgagatggggtgaccatgcggattcatcaggcagaaacggcgaatgtgtctagctttagttttggctaccattcagcttcatcagtgaggctagagtagagcgatttcggtgcgcatgtccaggctttt

SEQ ID NO: 138099 - DNA, 1530 bp, Zea Mays
ctgcctgcctccttccttgttcgctttgcggcgcgagcgttttgtctgttgttgtctcccttgggaccggcgcgtccggctggctcactaccactaacgtgttgttgcctgccttgtgcggcgcccgtggttcgcattgcgtttgcagcagcagcggcagctgggcggagcagggcgcgggcgggtaccgccacggcagggacggcgccaccttcctcctccccgagctcctccagcgcagccccaaccccagctccaagtcctccagcgccgccaccttcgtgccgccgctcgccgccgcgcatggaggaggagtagcggccccgtttggcatggcgccgctgggagtggcggcggcggacgaagcccggttctgcatgacgccgtggtcagcggcggcgcacttcgagaactggggcgactccggcatcgtcgtcaccagcccgctcgccgagacggcctccaccgacgtcgacatgggtggaggtggagccatggcgcagagcgtcgacggacatgacaactcattgccggcgtgcaaggtggagcccagggatcacaaggcgcagaggaggcttgcgcaaaaccgcgaggcggcccggaaaagccggatgaggaagaaggcgtacattgtggagctggaaaacagccggtccaagctgtcccatcttgagcaggagcttcaaagggcaaggcagcaggggatgttcattgcaagtggacgctccggagatcatggatgctccactggaggtgcgttggcgttcgacctggagtacgcgcggtggctggacgagcaccagcaccacatgaacgacctccgggtggccctgagcgcgcagatcggcgacgacgacctgggcgtgctggtggacggcgcgatgctgcactacgaccagatgttccggctcaagggcgtggccacgaggacggacgtgttccacgtgctgtcgggcatgtggatgagccccgcggagcggttcttcatgtggctgggcgggttccggtcgtcggagctgctcaaggtgctggcgcggcacgtggagccgctgacggagcagcagctggtgggcatctgcggcctgcagcagtcgctgcagcaggccgaggacgcgctgtcgcaggggatggaggccctgcagcaggccctcggggacacgctcgccgccgccgccacgccgtgcgccgccgacagcgtcaccaactacatgggccagatggccgtcgccatgagcaagctcgccaccgtggagaacttcctccgccaggcggacctgctgcggcagcagacgctgaagcaggtgcgccggatcctgaccacgcgccaagccgcgcgcgcgctgctcgtcatcagtgactacttctcgcggctccgtgcgctcagctccctgtggctgacgcggccgacggattgattcggcgtaggcacacggacgggagctgtcgttggttggttgcgctgagactgtaatctgtatccgttgtgagatggggtgaccatgcggattcatcaggcagaaacggcgaatg

SEQ ID NO: 138100 - DNA, 1001 bp, Zea Mays
tcttcatcaaatttgcgcggcgtctgcgttccctgcttcccattcgaaaacaaaagcaaaaggtgcgcattcacggtgtcgccctcgtctctactcgtgtctcgtcttgggtagcgtacgcaccttagctcgcaaccatccatccatccacggggctcgggcgcagcagcctcccccgtcgtcgtcttcgtcgtcgccttgccgccgctctgatccgtgcccgatgcatcgtcagccatctcctcacgccttcagcagcagcggcagctgggcggagcagggcgcgggcgggtaccgccacggcagggacggcgccaccttcctcctccccgagctcctccagcgcagccccaaccccagctccaagtcctccagcgccgccaccttcgtgccgccgctcgccgccgcgcatggaggaggagtagcggccccgtttggcatggcgccgctgggagtggcggcggcggacgaagcccggttctgcatgacgccgtggtcagcggcggcgcacttcgagaactggggcgactccggcatcgtcgtcaccagcccgctcgccgagacggcctccaccgacgtcgacatgggtggaggtggagccatggcgcagagcgtcgacggacatgacaactcattgccggcgtgcaaggtggagcccagggatcacaaggcgcagaggaggcttgcgcaaaaccgcgaggcggcccggaaaagccggatgaggaagaaggcgtacattgtggagctggaaaacagccggtccaagctgtcccatcttgagcaggagcttcaaagggcaaggcagcaggggatgttcattgcaagtggacgctccggagatcatggatgctccactggaggcagatgatctttttttcttctcttttacattgctcagctcttgttctctgaattctgatcctgtgcaatgtaaagcctaacctgtgtccttgcaggtgcgttggcgttcgacctggagtacgcgcggtggctggacgagc

SEQ ID NO: 138101 - DNA, 2026 bp, Zea Mays
gcatcctacttagctctgttccgtagaaatgaaatccagattgctcttgtactctttccccatcttggccgactcaaccaaacgcctgcattcagataaagtctcacttccgccgcagccacctcgaccactcttcgagagtgcgagctagttgtagatcggcgaggccgtctccgttcgcacaagccagacctcttcgcgccggcaatggacaggctcggcgcgaatccggcgaactcgtgcccgctgacgccgcttggcttcctggagcgctcggccaccgtcttcggcgattgccactccgtcgtgtaccacgacacggtcttcacctggtcccagacacaccggcgatgcctccgcctcgcctccgcgctcgtctctctcggcatcaaccgcggcgacatcgtgtccgtgctgttgcccaacgtgccggccatgtacgagatgcagttcggagtgcccatgagcggcgccgtgctcaacaacatcaacatgcgcctggacgcgcgcacggtcgccgtcctgctccgccactccggctccaagctcgtcttcgtggacccggcgtctctaacgcttatcagagacgcgctgaagcagctcccgcaggggcacccggcaccgcgcgtcatccccgtcgaggatccccacgagaaggggctccctgccgccccgcccgggtcactgacgtacgaggggcttctcgagaagggcgacccggagttcgcgtgggttcggccggccagcgagtgggacccgatggtactcaactacacctccggcacgacgtcggagcccaagggggtggtgcactgccaccgcgggatcttcttgatcacgctcgactcgctcattgaatgggcggtcccgccgcagccgacgtacctgtggacgctgcccatgttccacgccaacggctggagcttcccatgggggatggccgtggtgggcggcaccaacgtctgcctgcgccgcgtcgacgccgccgaggtgtacgccaccatcgcgggccgcggcgtcagccacctctgcggcgcgcccgtcgtgctcaacatgctggccaacgccccggagggcgtgcggcggccgctcccggggaaggtgcgcatcctaactgccggcgcgccaccgccggctgccgtgctgcaccgcacggagtccatcgggttcgaggtcatccacgggtacgggctgaccgagacggcggggctggtggtctgctgcgcgtggaagggggagtggaacaagctccccgcgtcggagcgcgcgcggctcaaggcgaggcaaggcgtgcgcacgcctggcatggccgaggtggacatcgtcgacggcgagaccgggcgcagcgtcccccgcgacgggtccacgatgggcgagatcgtgctccgcggcggctgcgtcatgctcggctacctggacgacgacaaggccaccaaggcggcgatacgcgacaacgggtggttctacacgggggacgtcggcgtgatgcatcctgacgggtacatggagatccgcgaccggtccaaggacgtgatcatcagcggcggggagaacatcagcagcgtggaggtggagtccgtgctgtacagccacccagcggtgaacgaggccgcggtggtggcacggccggacgatttctggggagagacgccgtgcgcattcgtgagcctcaaggaggagggatcgacggctgccgatgtcatcgcgtggtgccgccagcgcatgccacactacatggtgccgagaacggtggtgtttcgcgacgagctgccaaagacctccaccggcaagatccaaaagtacgtgctccgcaaccttgccaaggagatggggtcaacccacaagggcgccagcagaattagcaagatgtagaggactgtcgtcttgcttggcgtgctttgctgcaagctgtagcatggggctgacacgcatctcaatctcattgagatcgacaactactcagaatagtatgattgatgcgcatggagtgtgatataaagatttttctccttttttttatcttatc

SEQ ID NO: 138102 - DNA, 1187 bp, Zea Mays
agcatcgcttttcctttgcaatcgcatcctacttagctctgttccgtagaaatgaaatccagattgctcttgtactctttccccatcttggccgactcaaccaaacgcctgcattcagataaagtctcacttccgccgcagccacctcgaccactcttcgagagtgcgagctagttgtagatcggcgaggccgtctccgttcgcacaagccagacctcttcgcgccggcaatggacaggctcggcgcgaatccggcgaactcgtgcccgctgacgccgcttggcttcctggagcgctcggccaccgtcttcggcgattgccactccgtcgtgtaccacgacacggtcttcacctggtcccagacacaccggcgatgcctccgcctcgcctccgcgctcgtctctctcggcatcaaccgcggcgacatcgtaagcctcggtcagcagctccgcggattggcgcctggaaatgaacaagtctgatttggttaaaccattcctcttggcgtaggtgtccgtgctgttgcccaacgtgccggccatgtacgagatgcagttcggagtgcccatgagcggcgccgtgctcaacaacatcaacatgcgcctggacgcgcgcacggtcgccgtcctgctccgccactccggctccaagctcgtcttcgtggacccggcgtctctaacgcttatcagagacgcgctgaagcagctcccgcaggggcacccggcaccgcgcgtcatccccgtcgaggatccccacgagaaggggctccctgccgccccgcccgggtcactgacgtacgaggggcttctcgagaagggcgacccggagttcgcgtgggttcggccggccagcgagtgggacccgatggtactcaactacacctccggcacgacgtcggagcccaagggggtggtgcactgccaccgcgggatcttcttgatcacgctcgactcgctcattgaatgggcggtcccgccgcagccgacgtacctgtggacgctgcccatgttccacgccaacggctggagcttcccatgggggatggccgtggtgggcggcaccaacgtctgcctgcgccgcgtcgacgccgccgaggtgtacgccaccatcgcgggccgcggcgtcagccacctctgcggcgcgcccgtcgtgctcaacatgctggccaacgccccggagggcgtgcg

SEQ ID NO: 138103 - DNA, 312 bp, Zea Mays
atgaagatcaacgccggccgccgcgacgacgggattgcagcggcgacgctcctggccgccgttcttttcggatgtctcgcgacctccgtgcagtgtgctcgagtagtgccagcagatgccactaccggagacggagagcgcgggcaggaggcggagttggcgttgccgccgccgttctgctacaaggcgtgcggcaacgggcgctgcgacttctgctgcgccagccagtacacgccgacgttctgctgggacacccaggccatgtgcaagcgcgagtgccatccgcccatcagccctcccagttccgtatga

SEQ ID NO: 138104 - DNA, 1222 bp, Zea Mays
gccaatgaatggaaaacagaaatggcgcattccgatcctagaaataacaatcttggtaccctgttgcatatagacgtacaggttcgacttcctaatcctctgcgtcgggaggtatggcgtggcgaagctccccaggtttcctgacgggagaggccccgaagcgttccgcgggcgagtgctccattccatggagtactcagccatggcgcacgcggacgccgccgagctggtcaggggcaagcttgtcgccgtggttggcgccggcaagtcggccatggacatcgtcgcacagtgcgccgaggccaacggtagcagatacccgtgcacaatggtctacagaagcgcccattggatggtggatcctaaagttgctcggcgtgtgaaattcttcaccttcacctcggctcgatggaccgagttgatggttcacaagcccggagaggggttcctgctcagccttctcgccacgacactgactccactgagatggcttatctcgaagttggccgaagtctactacaagaggagcatcccgatgcagaagcacgggatggtcccggactgcagcttctcgcaggggagcctgggctggcggctaggcatactcccggagggattctacgacagggtggacgacggcagcgtggagctccggaggtgccgcggcaccattgccttctgcgcggacggcctcgtcctggacggcggcgccgtggtgggcgccgacgtggtcatcctctccacgggcttccacatcgaccagccgctgcgggacgtgctggcttctccctggttcggcgacatgatagtcgcggcggacgacggcagcgcggcagtgctccccctctacaggcactgcgtgcacccgcgggtcccgcagatggccgtcgtcgggtacgccgagagcggctccagcatctacccgtacgagatgatggccaagtgggtggcgcacctgctcgacggcgcggtccgcctgcccgccgtccgcgacatggagcgtggcgtggcggagtgggcgcggtggggccgctgggcgaggcgggcgtgcgggggcttcttcctcaagtcgtgcatcgcctccgtcaccacgtggtaccacgaccagctctgccgggacatggggcaccgccccaggaggaaggccggcctcctggcggagtgcctgcagccgtacggcccaacggactacgccggcatccagtgagagctgtactgtgta

SEQ ID NO: 138105 - DNA, 955 bp, Zea Mays
acaggcaagcatctggccacatgtgcactcacacgactcagggcgagaggacagcagggcacaataaccgttccactttggtccataggagcgcatagcacagcacaaggagaggccgagaagcgctttagccgtagccgtagcgataagagtgagctagctggtgcacaccggcatggcggccacggcgtactccgtggcgctcctcggcggcgcgcgcctccccgccgctccgcgctccgccctcctccctcggcgcagcgtctgccagcttcgcttccaagatgcaccgaggctctccctgctccgtgcgaaggccgcttccgaggacacatcggcctccggcgacgagttgatcgaggacctcaaagcgaagtgggacgccgttgaggacaagcccaccgtcctcttgtacggcggcggcgccgtcgtcgccctatggctgacgtccgtggtcgtgggcgccatcaacgccgtgccgctgctccccaagatcctggagctcgttgggctcggctacaccggctggttcgtgtaccgctaccttctctttaaggaaagcaggaaagagttggccgccgacattgagaccttgaagaaaaaaatagctggaacagaataaacgctcatggaaagttttagagcgtcctttcttctttggaaagagatctattcgatcggagaaccaatatgcaactacttgagtactattattgcccatgtattgtgtgctgtatatcttctgtatacaaaggaaggttcgtttgttatgtacgtagtagcattgtagtttaaatgtatcgtattacctatctgctaaattcttctttttgatttagcaattttattgtacgtaaacaaaaataagggtaaaacaaatagagtgtgtaatctataccaatattaagaacttattcgataacataaataatatacaattgtaacatgaataaat

SEQ ID NO: 138106 - DNA, 187 bp, Zea Mays
atggcgctgcctctgccacccctcctcctccttggaatgcttgcctcccgcgcgccggcccagacggccacgctgcacgagcgcgacgcggcggtgctgcgggacctcagggagctcccgtcgactgacggcccgcggtgcctcgccctccctgcgttcggcacccctacgcccgtggtggccgctg

SEQ ID NO: 138107 - DNA, 118 bp, Zea Mays
ttttttcaattttaaatccaagtttgattgtgaacttcaaacatacactaggtgagtgcccgtgcgttgcaacagggacatataataccatggtaacttatatacaaaatgtgttata

SEQ ID NO: 138108 - DNA, 2982 bp, Zea Mays
aattttatcaatggctttaagggcccaagctggaagatcaacagccattgctaggtagatgaccatccctgtgagaacatgttgaacgtgcacttttcgaccagctttagtcaataactcagccttccatccagagagttgatttgcaatcttgtcaataatgggttgaacttgggtttttgaaagctttttacattgcttttcattatgttggatgtttggaaatcgtgtgccacacatgctcgataatgattatacaccctattctgcagtggatatatttgtcaaggatcttggtatagtatcttgtgaaagttccaattcgaggatcccagttcacgtctctagtatagcccaccagctgtttatttcaggatctgcttctgggtggggtagatatgacgatgctgccgttgtgaaggtctatgagacattaactggtgtaaaagttgaagggaaggctccgatgctcagtaaagaagatgttcttcagtctcttccatctgaatggccagaagatccaattgataatcttgtacctattgcatctcatagtagcaaaaagtttcttgtagttttagatgatgatccaactgggactcaaacagttcatgatatagaagttttaactgaatggcctgttgaagcccttgttgaacagttcctcaagctaccaacttgcttttttattttgacaaactctcgttccatgactgctgataaggccatgctgctagtacaaactatctgtaaaaatcttaaagctgcggcagagaaggtccctggtgttagttatacaatagtcttgagaggtgattcaactctacgtggtcatttcccagaggaagctgacgctgctgtctccgtattaggtgagatggatgcttggataatctgtccattttttcttcaaggtgggagatacactattaacgacatccactacgtcgcagactctgatagattaattcctgctggtgaaaccgaatttgccaaggatgcagtttttggctataaatcttccaatctcagacagtgggttgaagagaagaccaaaggacgggttttggagaaccaagtttcaacaatttccataactctcttgcgtaaacaaggaccaactgctgtttgtgagcatctctgtagcttggagaagggctctgtgtgcatcgtcaatgctgctagtgacagggacatggctgtctttgcttctggaatgatccaggctgaattgaaaggaaagcgatttctctgccgcacagctgcaagttttgtgagcgcaaggattgggatcaagccaaagccacctatctgtccaaatgaccttggcttaaaaagagctttaactggaggcctcataattgttggttcatatgtgccaaaaactacaaagcaggttgatgagttgcgatcacagttcgggcaatctcttcgagtcatagaggtgtctgtcgagatggtttcaatgaaatcaatggaggacagagaccaagaaatcagacgaattgttgaactagggaatgcttatatacaatccagaaaagacactctaattctcaccagccgccaactcattactggaaaaactcctgaagaaagcttagaaattaattataaagtgagttcagcactagtggagattgtgagaaggattgatagtaaacctcattatatcattgcaaagggaggaatcacttcatctgatattgctacaaaggcgctggaagctaaacgtgccaaagtcatgggacaagcattagctggtgtacccttgtggcagcttggtcctgagagtagatttcctggggtcccttacattgtttttcctggtaatgttggtgataacagtgctcttgctaaagtggtgaaaagttgggcttccccatctagaagttctacaaaagaaattcttcttaatgcggagaagggcggttatgctgttggtgctttcaatgtgtataaccttgagggaattgaagctgttgttgcagcagcagaggctgaaaagagtcctgctattcttcagattcatccgagtgctctaaagcaaggtggagtcccactggtagcatgttgcattgctgctgcagaacaatccagtgtgcctatcagtgtccactatgaccacggcatttccaagtcagacttgcttcaagctcttgaagcgggatttgattcagtcatggtggatggttctcatctaactttaggggataacatcttatacacaaagagcatatcttccttggctcatgcaaaaggtttacttgtggaagctgagttgggtaggctctcaggctctgaagatggcatgaccgttgaagaatatgaagcaagatttactgatgttgcccaggctgaggaatttattgatgagacaagcattgatgctctagcagtttgcattggaaatgttcatggaaaatatccacctagtggaccaaaccttaaattcgacttgctaaaggaccttcgtgcattaacattaaagaaaggagttagcttggtcctccatggagcatctggtctatctcatgagctcgtaaaggagtgcatagacttgggcgtgagaaaattcaatgtgaacaccgaggttcggaacagctacctggcgtccctcagaaagccagaaaaggacttgattcaggtgatggcgtctgctaaagaggcaatgaaagctgttgtagcagagaagctgcgcctgtttggatcgtgtgggaaagcctgagcgaagtacttgcgttgcgccggcaacatgcagtacaagaccgactgcatcatcgggttcgtgatgctgctgctactgtgcagttgcttacagttacagctcattgcgttgaacagctgaagtggttattgtactttgcagtgtagcgcaactaaggctaattcataaatcgtaataatgtatgtatgctgccccgctgtaaaaatgctccgtcgttaataaatgccatcgcgcttgctgtgcctttgtttaca

SEQ ID NO: 138109 - DNA, 1730 bp, Zea Mays
cacttcgcttctcactcgatctgctttgctctgctctcggtctcggctgcttgcctgcttcgagtcgtcgccggcgggagcagagaacccacccgcacggtgcgatgtcgttgaccgcggcccccgtggccttcatcggcctggacgagctcagcgttgagctagctgcctccttcctccgctccggcgcttgcgtccgctccttcacccccgaggcggaacggtcgccttctgcggcgctcgcggagttgaatggcctcctccagtgcgcgagcccagtggaagccgcgcgagatgctgcgctggtcgtcgtgctaagcgatgctggtggggttgacgagttgttcttcggggttgaggggatcgcgaaagggttatgcgcgggttctattgtattgattcattcgacattgctgcctagtcagttggagaagctggagcaggagcttacagatcagaagaaggatgtcttccttctggatggatacattttcactggtttatctgatgaattaaagcaacagattattattgttgcatctgggagacaggacatagcagaaaaagctagcaaatttttccatggtctatacaaaaccatttattttgctgaaggtgaattctgcactagcagaaaaattaggatggtgaatgatttgctggagggcattcattttgttgcgtctattgaagcaatgtatcttggtgttcgagctgggattcatccaacaattatttatgacataatatcgaatgctgctgggagctcgaggatatttgtggagttagttccaaaacttctgagtgaagatcctttgctgattgattttctaaaatcaacaaggaaaaaagcaagccatgtgatggatatgtcaaaatcagtaacatttccactgccacttctgggtgttgcctatcaacaattggtacatggttcatcagcagtaactggagatggatctgcctcaccgctgaaggtttgggaagcatcgtttggagtaaatattgtagatgctgctggcgaacaaatttatgatgcaagcaaattagctgatcagcttgttgcggaatctaaagcagcgaagcggattggcttcattggtcttggagctatgggctttggaatggcatctcatttgctgaaatcagggttctgtgttgttgcttatgatgtctacaagccaacaatggccaggtttgctgatttgggtggatcaacaaaaggttctcctgaggaaatagcaaaagatgtggaaatacttattatcatggttgcaaatgagtctcaagctgatagtgttctttttggaaacgctggtgctgtaccagttttatctgctggaacatctgtcatcctttcttctacagtttctcctggatttgtgatccacctcaacagaagattagaagctgaatgccgacagataaagttggttgatgctccagtatctggtggtgtcaaaagggcggcggatgggacactaactataatgacttcagggacagatgaagccctccattgcactggttctgttctatcagcgctgagtgaaaagttgtatgtaatcaaaggaggatgtggagctgcaagttctgttaagatggtcaaccaacttcttgctggggttcatatagcttcagcagctgaagccatgtcatttgctgctcgactaaatttgagaacgagaagagtcttcgaaattatgcaacatgcaaggggttattcatgg

SEQ ID NO: 138110 - DNA, 1518 bp, Zea Mays
cgtggtaaaagtgcgctctgtttctcatcgtcaagaagaaaagacagaaagaaagcaagaaaacaaggccaaaaggagcctacgatgaatccatcgtcaacgaagcgtcaatggcagccagccacgtgggccgccgccccagcgagcaggctccccccacctcccctcgccctctataaatgcgagcctggcactgcgccgccgagcttacctggaacagagacaggcaggcagcaggccttcatcgcagagaggacagcagcacctgagattgacggcggggcagcgcgcgggcccttcccttcggagcactcagcgtgagagatggggaggcagccgtgctgcgacaaggttggcgtgaagaagggcccgtggacggcggaggaggaccagaagctcgtcggcttcctcctcacccacggtcactgctgctggcgcgtcgtccccaagctcgcagggttgctgaggtgcgggaagagctgcaggctgcggtggaccaactacctgaggccggacctcaagaggggcctgctctccgacgacgaggagaggctcgtcatcgacctgcacgcgcagctcgggaacaggtggtccaagatcgcggcgcagctaccgggcaggacggacaacgagatcaagaaccactggaacacacacatccgcaagaagctcgtccggatggggatcgaccccgtcacccacctgccgttgcaggaaccgccggctcctgctcctgctcccgccgagcagcaggagcagagccacaggcagcaagaagaactgcaactgcaagagctgcagaacggccgcgagcttatcatgcaggagggcgcgggggaagacgatatcacgccgatgatccagccgcacgagatcatgccgacggcggcagcggcaagcaactgcggctctgtttcctctgcccacgccggctccgcgtccgtggtctcgccgtcctgctcctcctcggcggtgtccggcgtggagtggccggagcccatgtacctgctcggcatggatggcatcatggacgccgactggggcagcctcttccccgacactggcgctggcggcggcggcggcggcttcgacttgggcgtcgatccgttcgaccagtacccgggcggtggcttcgaccaagaagacgaccacagaatatgacatcggcctagcaatgcacatagattcgccgcttctccttccatctcgctcagcacatcagcgccgtagcctccatgttttcttaatagctctccagggtccagtgctgataaacaagaactgacaaattcgggtgcggaaacatgactgttcagctgacgtgacgcgtctgattcatcagctatctagttcgtcggcagtccccaccccagagctatgctgtgactgtgcgtcaggacatgaggtgcttgtgtcagcttccgacttctcatgcggcggtgctccaggctttctccggccggctgatggtgccggttgtcgccacgcaccatacgtggcgagcggcagctcgcgtcg

SEQ ID NO: 138111 - DNA, 431 bp, Zea Mays
agcaaggagacgtcagcaagaatccgacagccccgacagttgtacttccgcagggctcaagcactcctccgacgaccacgacatcacatgaacagggcgccaaaacctctctgactgccacgacggttggttgcaattctacaacatatgtatattcttatcaaggagaatggactgcaagctagcattgattttccgactggatgctccttgaattgggttgcagctcactggactccaaatgcggcgacaaacctgtgctacaatatgaagatgtgatgaagcttgattttggaacacatatagatggttacattgttgattgtgcatttactgttgcattcaatcctaagtttgatccattgcttcaagcaacgagagatgccacaaataccagaatcaaggtaatttcgacattttttctctacact

SEQ ID NO: 138112 - DNA, 1427 bp, Zea Mays
atcaccactcatcaggcattcaacaaaagacaacacgaactactcacaacgaatcaggcaagtgcagatcacacacttcacacagcaatggctgctctggctgccgtggtcgtcctcgcgcttgcaacggtcgtcgccggcgcagtttcggcgccgtccaggagtccggtcatctacattttcggggactccatgtcggacgtgggaaacaacaactatctcctcctctccctcgccaagtgcaactacccctggtacggcatcgactacaagaacggctaccccaccgggaggttcactaatggcaggaccatcggagacatcatggccgccaagtttggctccccgcccccggtgccgttcctctccctgtacatgaccgacgacgaggtcctcgccggcgtcaacttcgcgtccggcggcgctgggctcctcaacgagacgggcatttactttgtccagtatctatcgttcgacagccagatatcgtccttcgagcagatcaaggacgcgatgatcgccaagatcggcaagaaggctgccgaggagaccgtcaatggtgcgatcttccaaatcgggctcggaagcaacgactacgtcaacaacttcctgcggccgttcatggcggacggcatcgtgtacacccacgacgagttcatcggcctcctcatggacaccattgacaggcagctgacgaggctgtacgatctcggcgcgcgccacgtctggttcagcgggctggcgcctctgggctgtatcccgtcgcagcgcgtcctctcggacgacggcgggtgcctggacgacgtgaacgcgtacgccgtccagttcaacgccgcggccaaggacctgctcgaggggctgaacgccaagctgcccggcgcgcgcatgtccctctccgactgctacaccatagtcatggagctcatcgaccaccccgagaaacacgggttcaagacgtcgcacacgtcgtgctgcgacgtggacacgacggtggggggcctgtgcctgccgaccgcgcagctctgcgccgaccgcaaggacttcgtcttctgggacgcgtaccacacctccgacgccgccaaccagatcatcgccgaccgcctcttcgccgacatggtgggctccggcgccgtggtgccggggaacgggacgtccccgccccgagtcgttaacgcgccgacgacgatgccgatccacgccgccccgccacgcaagccgtgattctcccgttcgggcgcgcccttttgtgtggcaacgcgaccagtgttccaaacgtgtatgcatgtattccgtgcagctaagcacgcatgtggttgatgaaaaatacatagaaattaatagagcaaggagaaatcgtagtgtcgctattgtaggcgaccaattttctgtggcaagagaatgaaacgacgtccccaattatttttcct

SEQ ID NO: 138113 - DNA, 516 bp, Zea Mays
atgcctcgaaagcatcgcggcgcgcgcgtggcgagggaggagctcggcgccgccttggttcgggcgagacagggacggggcatcacaaagcagggctggtgggcatcaggaggcgggcgtagtgggcggggcatggaggtgaccattgagcctctggattccagtgtgccgccagtaggaagcaggcgtcggcggctcccagctcggcgagcggcgacacctgcccagcagcggcgcaggcacgcaaaaggcgttggggttgggccgtcggtcgctcactcactccacgcctcgcctcccagcaaggtagtccagctccgcagctccatggctcctccgctcctgcagacccgcgccggtgcgctgccagcaaaggttgaagccttgaaggaagcgaggaaccgaagggcagccaccaagccacagaagacagagcgttgggcggctcgttcaatgggcctgatgcgtaatgggtcgtgcgttagggtacagacgaggtctgaaatgtggatttga

SEQ ID NO: 138114 - DNA, 799 bp, Zea Mays
accacgacacacctcgccttccccacgcaccgggccaggtggtataatcaatggacctcgacgccgacatgatcccgacctccccctccgccgactcctcgccctcctcctccgacctcgacaccgagtcgacggggtccttcttcccggaccggagcacgacgctggggacgctgatgggcgtgtcggcgttcggcgggcggagggcgccggcggcaggcgaggggagcgcggaggggccgcagcgcgcggcgctgggtcacggggaggaggcgaggggcgcgggcgtgtggcggcgccgccgccgacggaggcggcgcgggagctggtggcggctgtgccgggaccacggtgggccgccgacgtcgctgggcgagttcctggacatggagcggcagctcgcgggcgcggacttcctctgcgacggcagcggcgccggcgcgtcggggcgcgagacggccgcggcgctgttcgagaacggaagggtgcggcctcctccgcagcccgcggccgccgcggcggaggagaggggcaggtggcggctgctgcgggcgtcggatggctcgtcgacctcgacggcgacggcgtcggcgtccctggcgcgcctgccggtgctgctcaccggcatctgcagcggcggagccgggtaaatgtagtaaataaattgcaattaagtcgctttggagagggggtgtttcgcgacaaaaatggtgttgacgcatctttaatcaagcccccttgtccctgcttcttttcccattaattaattattccagtttggtccttttagccataaaaa

SEQ ID NO: 138115 - DNA, 785 bp, Zea Mays
accacgacacacctcgccttccccacgcaccgggccaggtggtataatcaatggacctcgacgccgacatgatcccgacctccccctccgccgactcctcgccctcctcctccgacctcgacaccgaggtaactcttcaccctcgcccaagttcctgggtcttcttggattgcttggcttacatgtacggcctgacatgcttgttatggatgacgtctcgctttcttgtgtgtgtgtgtgtgtgtgtggggtgggggaggcagtcgacggggtccttcttcccggaccggagcacgacgctggggacgctgatgggcgtgtcggcgttcggcgggcggagggcgccggcggcaggcgaggggagcgcggaggggccgcagcgcgcggcgctgggtcacggggaggaggcgaggggcgcgggcgtgtggcggcgccgccgccgacggaggcggcgcgggagctggtggcggctgtgccgggaccacggtgggccgccgacgtcgctgggcgagttcctggacatggagcggcagctcgcgggcgcggacttcctctgcgacggcagcggcgccggcgcgtcggggcgcgagacggccgcggcgctgttcgagaacggaagggtgcggcctcctccgcagcccgcggccgccgcggcggaggagaggggcaggtggcggctgctgcgggcgtcggatggctcgtcgacctcgacggcgacggcgtcggcgtccctggcgcgcctgccggtgctgctcaccggcatctgcagcggcggagccgggtaa

SEQ ID NO: 138116 - DNA, 3095 bp, Zea Mays
atggctcctgaccttcccgcttcccccgacgtctcacctccccaccagccctcgccggtgcccactccggggccggcgaccacctcccatcacgctgctgcctctacggatccctccccccctgagacgtcggccccgatcctcacccctacctcttccgctgaagcgtctccctgtgacatccttgggcggtccaagtctcaacgatggacggacagcaaccctgactcgccggacggagatcagtccatattggcggcgggcaaccgaccgtcttttcgtgacgtcgtcctccacccgcgatcctctcctggtgctatttcaaggtcgccgtcgcccagaatccttgccgagcagtcgtcttccggggcaactgctacgcagccatcatcgagtgtgccctccccacttgagatcgcggtacagagcccccatatctcgccggggtataagcaccgctggtttcgtggtctggagagagccccgaagaaggatgccgacggttgggttaaagtaaggtcgaagaagacaaggcagcggagtgctaaattgttgcgggctagcaaggctgtgcccgtcgacttgatcggccgctgtttcaactgctttgccgacgaccacttcgctgtgtcgtgccgcagggagccaaggtgttttcgctgcaaggctctgggacatcgatcctatacatgtccagggccgatgcgtaacgacaacaggctcacggttcaccggcggttatctagaggctccgtgtgggatagactgggttcagctgcgccggcggccggtgttcagacagcagtgaagacgacgtctgtaaccaagccttcgcagcaggcttctaaagcgtcagtttggaaccggctccgcatcccggcttttcatccaagtcgattcgagggtcgtaataaggtttggcgcaggatttcaccccctagtgctgaaggtgagaagaggaaggagactgtgtcgacgaccgtcgcgacatcgtccacggtcatggaggtcgcaactgccgcacactcgcagcaacccctcccgcctcgcccacgtcgcaggcgccatcgcaagcgccgttcatcgtcgaggggtggttcggatcctggtcaaggccaagatggagctgtcttgccaggaagtgatgagacccctttggaaggaatagcagtacagtctcatgtgccttgcatcattggctggaataatcttctaacgcaggctgaagatgatttgaagaatgcagtgtctattgttgttatcagtgacttggtgattccgattgcagagattgcagaggcgattgcgcttaagttggatgttgaggcatcttctttggttttgcggcagtttaccaaggccaatctattgctcatgcttccaaatgagtgtttagctctggtactaacagagaggtggagcttgatcagatccagcacgttctcgttgttgtccaagaaatggtccaagtttttgggttcgtctggagtgagcctgccgatccctgtggaagtgcaactgactggtattcctttacatgcatgggagttatcaacagttcagcagctactgaatcagtgtgtttgggtgcatgaagtccatcctgataccctggagctccggaatcttgacgtctttcgttgttctggatggtgctttgacccggcaaccatccctgcttccagagacctttggattgtggaacctacgggagttaacactgaagatggaaggcttggccttgtgtatcagatttttattagtttctcgacgttgaggagtgatcggttgatcccttctcaagattccggagtagatggtggtttttcaagacagaggaggcgtcatcgttcccgctctcctcctcatggcggtgatgataacgaaggcagggaagacggtggggaacctcggagaaggagatcaatcttcgaccgtttgggctcaaagtccgaagcatcgcatcgggaccgtggtggcacctgccccccacacctttcatcctctccggctgtggacgtggtagtctcgcagactccgtctgaagccgggtggggaatgacttctgatgatttggctgcgacagggactgattctgttgatatgtctcctatgatggccattgctccggcgacagtgcttgtccagggcgacccccccagccctgtcgatgaacctgctgctgttgagcctttgttaccggtttctcttctagccagcgggacacctaagggcgccacagttccggctgcagcgcttgtccagggcgatccttgtcctgttgatgagcctgtcgctgttgagctggtgatgccgcccccctgttctgcagcggcatcggggctgtccggtggtggcccatctcattcctccctgccaggaccatcttccccctcttcacccttgagggctccggcagattcttgcactttgggaggaggcgagaaggagcaggccatacaggtgccacccccgatatccccgtctcgggtcacagtcgacatgggtgggattctgagggcgccagtcagaaggccgcgacaaggcaaagctacagccaatgaggtggtaccccgacgcagcagaagggtcgctggagtaggagtggagaggctgcctcctcctccaccggccacgcagggcaagaagcgtatcttgaaggaactgggtattgggaatgctgaagaatctgaaagtttaaggccagaagaccttgatgagtatgccagggttttcagcaaagggctttcagagaaactcacaagggaccaggttcaggccatcgttgatagagtagctagccttctgccaggatggaaagctgaacttatgcccagggctggtagagctattcatatgcagtttgtcatgacggcaaagatgatttatgcagctttggcactcgacattcctgtttgggccatcaaagctattgataagttgaggaagggcttcctttggaggggcaggaaagagttccgtggtggtcattgcctcttggcttggcctaaggttacccgtccaaggagctgggtggtcttgggattagtgagctaaagaacctatgttgggctctgagagctcgttggccatgg

SEQ ID NO: 138117 - DNA, 205 bp, Zea Mays
gttcgaatgggaagaggaaaaggaaatcctacgggttggattgctcgtgtgtccacgggacaaatccaatttgaaatggatggtgtgagtttgtcaaatgctcgacaagccgctagattagcggtgcataaaccatgttcgtcaaccaagtttgttcagtggtcgtaacgtaattggttagtggggaaaaaccgggccgggactc

SEQ ID NO: 138118 - DNA, 1914 bp, Zea Mays
cgccagcccgcccacagaaaagccgttctcccctctttctcgattcgacgaggggaagactcgtcgagccgccggccagcccatctcggcgcattcccggagaatccctccggaaaccggtcgatcctgggtcatccaacacacagcacttcgcttctcccgcgtccccgacccgcgcgcaagccctcatgcggttagggctgtaacgatctcgtctcgctaccggcggccggctgcggaacgggccaccccacgcgctcctctgagttcgttcgactaatctaccgctgactgtactttgggctgtcgccaccagaaagccctcacgagtcctttgcctcctcactccgtcaggctcgtcgccacagggttttgttcctaactttttagcttcaatttttgtcttgaatggcaacacctctggatgttccactggatgatttgattaagagcagagctgggaggggaacaggaagaggcaggggacaaggagggggtcgaggcagaggtgatggccaaaggttggctcgtggttcgtggcgtgggcgtggtactggcaacttccgtgaaaggggacttggggtgtcttcgcggaggccacttggtgttaatacttggtcctcatcatttgctattgccaagtcattcaataaagcaaaggattttgtgtggagacatgatctctttgaggatagcatggtagcagctgggctttctgggatagaatctggaacaaagctttacatttcaaatttgcactatggagtgacaagtgaagatctacaggagcttttttcagaaatgggtcatttgaagcactgtgctgttcattatgacagttatagacacccaactggttcggctgaggtgatattcaccaggagaagtgaagctctcgcagcactgaagcgatataataatatgcgccttgatgggaaggccatgaagattgaagtaataggagcagaattgggtctatcagctgctgccgtaccccagattagtgttgttcctggtgcaagcagaagagggcagagagaagttgttatgatgcctggtggaagtgggtttggacaaggtgcatctggcccatctagttcgcttcctgggtggaagcgtggaggctttgttcgaagaggacaagggcgtgttagttttcctcaaagagggcgagggcaagtgcgcagccgtggccgtggccgtggccgcagtagctttgttcagagccgtggacgtggctatgtgcgcaggggtaatgcagagaaatcagccaaacaattggacaatgaacttgacaactacaactctggtgcgatgaatgtcgactaagttaatccatcgtgacatcattcaatccaacctggaagttggaactatgttgaagctaagcttgttttctgtcggtattctgtcaaatgtgcacacttctgtcatgctctagtggcatcagttgaagattagatattccattattcctactgcaatagtcttgtgatatcagaatttgctgtaattgaatgatgaattatgttttcaaccgttgaaaggtttgctgtcaaaatttcaatattatcctagttattgtcagaattttcagtaggcattagccaaaaagattggtgctgactactggtatatcagaatttgctgtaattgaatgatgaattatgttttcaaccgttgaaaggtttggtgtcacaatttccatattatcctagttattgtcagaattttcagtaggcattagccaaaaagtttggtgctgactacaggttgaggtgctcttcaaaaaaatcctaatgtacctagaggtgacaatgagctttaaattttgggaacatattcggtgcacccaagccttggtgcgtatatgatacacatgaattaataaagttcataaaaaatctaaaaaaa

SEQ ID NO: 138119 - DNA, 897 bp, Zea Mays
cgccagcccgcccacagaaaagccgttctcccctctttctcgattcgacgaggggaagactcgtcgagccgccggccagcccatctcggcgcattcccggagaatccctccggaaaccggtcgatcctgggtcatccaacacacagcacttcgcttctcccgcgtccccgacccgcgcgcaagccctcatgcggttagggctgtaacgatctcgtctcgctaccggcggccggctgcggaacgggccaccccacgcgctcctctgagttcgttcgactaatctaccgctgactgtactttgggctgtcgccaccagaaagccctcacgagtcctttgcctcctcactccgtcaggctcgtcgccacagggttttgttcctaactttttagcttcaatttttgtcttgaatggcaacacctctggatgttccactggatgatttgattaagagcagagctgggaggggaacaggaagaggcaggggacaaggagggggtcgaggcagaggtgatggccaaaggttggctcgtggttcgtggcgtgggcgtggtactggcaacttccgtgaaaggggacttggggtgtcttcgcggaggccacttggtgttaatacttggtcctcatcatttgctattgccaaggcaagcacacaactataactgtttttctgttaccttcgagaatccaaattgcagtaggtacctgatgagaagtggctataaacttattaaaatggcacagcccaactgttccattcagaccatatctgtgaccatttaactgtggagcttcaaagaggatccaatggctttttcattgagacctgtctcttctctgccgagtatgtagggtggtgaggcatatgttggtttgtgctggctattgcttcaaagttc

SEQ ID NO: 138120 - DNA, 515 bp, Zea Mays
accatgtctctgtcgtccatgttgggcctgaccatcgccccgcctcgaggccgcagtcgcgagtcccactcctcctccccctccgactggtcggacccgtccgagtccacgtcgtcgtcgacgagcgcctggaagaggcgcgcgaggaagctcagcgatgagttcgaccgcatctccgcggagcagcagcaccagctggtcgtggagaagaagcggaaggcgggtgcggccacgccggtgaggaagcaggcttctgcacccgccgctggggcgccggcgagggcgtcgctgaagaggaaggccgctgcgccctcatcggcggctggggcaaggaggacctcgccgaggaacaagcactgagcgtaggtcgttgtatgcgctgttttgtttattgatgtgaatcttgcgatcgtggggtgctactcctctgaaaatgtgtaatgagtggttgtgcacaattgctggattggaatgatcgtgaatgaaatggaatcgaatcgatggttgctttgcca

SEQ ID NO: 138121 - DNA, 262 bp, Zea Mays
ggcatgaaggttgacagatctatagagttctcgtatgatgaactttccaatgctacaaacaacaacttcagtatggactataaaattgggcaaggtggttttgcctctgttttttttttctactgagcttagaggtgagaaagctgccataaagaaaatggatacaaagggatctcaagaatttctcaatgacccgaaggttttgacatgcgtccatcactctaacctggttggtgatctcagatttttcagagataataca

SEQ ID NO: 138122 - DNA, 116 bp, Zea Mays
tttcttcctaggcttctcgacacgagaatcatactttttatttctattattcatgattagagatggcaatggggacccgatccccgattcccggcgggtaattcctctattagggg

SEQ ID NO: 138123 - DNA, 1481 bp, Zea Mays
atgcaccacataccatgcattctccctttgctactcctatatatataaagcgcatgcagatccggaagcttgcaacagagacatcgatcagctagctagctgctgccaagagctagccaggggacagagcagcagcttgaagttggtcaccaatgctaaggatgggccgcgccagcgccacagcaggtgtgttgcgcttcgtcagggcgttcgccctctgcgtggctacggcatgcctcctcctggcggccggcatgccctcgcctgtggcggcgcaggacccgtcgaagctgagcctgcagtactactccaagacgtgccccaacgtggagcacgtcgtccggacggagatggagtgcgcggtgcgcgccgacacgcgcaacgccgcgctcatgctccgcctccatttccatgactgcttcgtgcagggctgcgacgggtcggtgctgctcgacgacacggcaaccatgatcggagagaagcaggcggagcagaacgtcaactcgctgaaagggttcgatctggttgacaagatcaaggagaagctggaagccgagtgccctggaaccgtctcctgcgcagacctgctggcgattgcagctagggatgcggttgtgctggttggtgggccttactgggatgtcccagtaggaagactggactccaagaaggcgagcctggacctagcaaacagcgacatccctacggcccagcaaggcctcctcacgctcattgccaagttctgggagaagggccttgatgccactgacatggtggccctcgtcggatcccacacgatcggattcgctaggtgcgagaatttccgggacagaatctacggcgacttcgagatgacgtccaagtacaacccgtcgtccgaggcctacctgagcaagctgaaggaggtgtgcccgcgggacggcggcgacgacaacatcagcgccatggacagccacacctccgacgtgttcgacaacgcctacttcgagaccctcatcaagggcgagggcctgctcaactccgaccaggcgatgtggtccagcatcgcgggctactccacctccgacacagtcaacaagtactgggccgaccccgaggccttcttcaagcagttctccgactccatggtgaagatgggcaacatcaccaaccctgccggcggcgaggtcaggaagacctgcagatttgtcaacacataggatatgataatatatataggatgctcgagactgcaggagaaactcggtggttgtgattgtactttacgcctgcaccttctttcgatggcttgtttagggtggcttggaaaataaaaaacccctttgctgagactattgtattatacatatgtagcatattatatgttcttgtcactgttaaccatatatatggttggctatgtgaagatacatacacatctttgtctgaagaattctacgggtgatttggctgagatttattcacaggtttaattgtttggt

SEQ ID NO: 138124 - DNA, 1255 bp, Zea Mays
atgcaccacataccatgcattctccctttgctactcctatatatataaagcgcatgcagatccggaagcttgcaacagagacatcgatcagctagctagctgctgccaagagctagccaggggacagagcagcagcttgaagttggtcaccaatgctaaggatgggccgcgccagcgccacagcaggtgtgttgcgcttcgtcagggcgttcgccctctgcgtggctacggcatgcctcctcctggcggccggcatgccctcgcctgtggcggcgcaggacccgtcgaagctgagcctgcagtactactccaagacgtgccccaacgtggagcacgtcgtccggacggagatggagtgcgcggtgcgcgccgacacgcgcaacgccgcgctcatgctccgcctccatttccatgactgcttcgtgcagggctgcgacgggtcggtgctgctcgacgacacggcaaccatgatcggagagaagcaggcggagcagaacgtcaactcgctgaaagggttcgatctggttgacaagatcaaggagaagctggaagccgagtgccctggaaccgtctcctgcgcagacctgctggcgattgcagctagggatgcggttgtgctggttggtgggccttactgggatgtcccagtaggaagactggactccaagaaggcgagcctggacctagcaaacagcgacatccctacggcccagcaaggcctcctcacgctcattgccaagttctgggagaagggccttgatgccactgacatggtggccctcgtcggatcccacacgatcggattcgctaggtgcgagaatttccgggacagaatctacggcgacttcgagatgacgtccaagtacaacccgtcgtccgaggcctacctgagcaagctgaaggaggtgtgcccgcgggacggcggcgacgacaacatcagcgccatggacagccacacctccgacgtgttcgacaacgcctacttcgagaccctcatcaagggcgagggcctgctcaactccgaccaggcgatgtggtccagcatcgcgggctactccacctccgacacagtcaacaagtactgggccgaccccgaggccttcttcaagcagttctccgactccatggtgaagatgggcaacatcaccaaccctgccggcggcgaggtcaggaagacctgcagatttgtcaacacataggatatgataatatatataggatgctcgagactgcaggagaaactcggtggttgtga

SEQ ID NO: 138125 - DNA, 1963 bp, Zea Mays
ttctcccttctctctttcctctctcccatgctcttgggctctcagccatgcggaaaggagctctgccgtccgcccggttccttctctcctttctgcccggtgccctggtcaaagatatagactctgttactctagaagatgcaattgagcttttgcaatatcccaaaatcctgggaaaacatcctgaagatgataatcttgtacttataacacattctaaggttggatacaacatcaagcacaggagatttattgctcaagtgccaaagaacatggacccaaagaagatgacacttgagcgtgcactcaagcttctgagtagtaaaagtgtcagacggattggtcgtctaaaggggaaggtcgaaaagaaggaacccattgaatggcattagctgagcctgcctgcactcgtgtgtgcaaaaaaaaaaaaaaaattcagagagaagtcaacattcatagcatgcagaggttcagcctttcgtgtgtttaactgcttatgatgagagcggagaagggggccccatgtgtgacaaagaacaagtgccaagggaatgcacaaccagacatattcgggtcatatctttgatttcatatttttcctttagtcatcaacatcataagctgcattgaacgcgcggacacagaataccagactataaaattctgagcttaacaaagatgagagggtggtttcatcacctattttacataatcgctgcatttcctaattactttcacattttgtactagagataaatgcatcttttaccacaggaaacccattttagttgtgaccgtcgtgtaggttatgtactcatgtgtaagaattgtatatgctacttcacagctgaaattccatctgttttgcactccttttttttaatttgttttcaccggttgatcccgaataacggctagtcttagtaatgctgtcgcgggaatttttttttttacttttgaatacctttacgaacatcgtaagtttttcaccattcaaccgattggatccacttttaaatgtctttagttcagtagcactacttagttttgtctatgaaaaaatgtctcaccaataagtactggagagatgtaaaagtaaaactgagctgtggtataggtactagaagacgtccacgttctttcactcatgcatagcatagcctgttggtcaaagtaaatatcagacagagtaaaatacatccagacagcaaacttcaatttcagacattcctgttctagctcctggttcgttgacacactaaagcacacgttcacctctccattctcggtcacgcagagacctcagcgccaccacacgctcgccatccacctactcatacctgtagatgaagtcggagttgccgaccatggcattgagcacctgcgagacgaggaagccgctgccggcgatgacggccacgatgagcagcgccgtgacggggttcttgagcagctccactatgggctgcagcaccgtgtacgccacccctgtgctcaccgtcacaacgtacagcgcgtaccgccgcatgttgtcccagaactcctccaccagggggccctctggccccagcgccagggcggggcctggccccgcggacagggccagcgccacggtcacgcccaccgtgatgccgccgaggagcgcccacgtcggcagagcgcacgtcctgccgccgccgccggcctcgttattattgcccgctgcagcgagctcttgacgcaagtggctctcctcctccctagctgctgcgatgctttcgtgaggcgctatggcaaggaggcgttttgcgtgctgctgcggggttggtggttcacaggaggagagcccagctcggacgacggcggtgaggccatggccgcgtccgggagacagccgatgtaggtggtggaggagagagagctggttcatcttgtgcaggcgccgtcgcttggtggttgttttttgtgataaggcttctccaac

SEQ ID NO: 138126 - DNA, 482 bp, Zea Mays
tttggactgtttcattgcaaggctgacaatattttgaaaatgtgatgatggcagaacatggacccaaagaagatgacacttgagcgtgcactcaagcttctgagtagtaaaagtgtcagacggattggtcgtctaaaggggaaggtcgaaaagaaggaacccattgaatggcattagctgagcctgcctgcactcgtgtgtgcaaaaaaaaaaaaaaaattcagagagaagtcaacattcatagcatgcagaggttcagcctttcgtgtgtttaactgcttatgatgagagcggagaagggggccccatgtgtgacaaagaacaagtgccaagggaatgcacaaccagacatattcgggtcatatctttgatttcatatttttcctttagtcatcaacatcataagctgcattgaacgcgcggacacagaataccagactataaaattctgagcttaacaaagatgagagggtggtttcatc

SEQ ID NO: 138127 - DNA, 392 bp, Zea Mays
ttctcccttctctctttcctctctcccatgctcttgggctctcagccatgcggaaaggagctctgccgtccgcccggttccttctctcctttctgcccggtgccctggtcaaagatatagactctgttactctagaagatgcaattgagcttttgcaatatcccaaaatcctgggaaaacatcctgaagatgataatcttgtacttataacacattctaaggttggatacaacatcaagcacaggagatttattgctcaagtgccaaagaacatggacccaaagaagatgacacttgagcgtgcactcaagcttctgagtagtaaaagtgtcagacggattggtcgtctaaaggggaaggtcgaaaagaaggaacccattgaatggcattag

SEQ ID NO: 138128 - DNA, 2129 bp, Zea Mays
ctatttattttcttttcagcttcaattcgaggtgtttcagagatattcttcttcaccctggcccttttcacctttccgcccttgtaaaatgtgtggggttgcatttaggagcaattcaacaaggaaaatatcttcaagaaataattttggggttgccttacagcccaaaagtagtgcctttattactcctcggctctttggcagctatagttctgtatgtttcagagccacagccagctgtggaattgctttaaaggctaataatattggcaattcacgaccattctcaactacatacagtaaaaaaataaggtttcttgttaaaaataagatttcattcagtaatctaaatatgagaaggaaagacggaagtgttgcacatagtttgcttcatagatctgagaaatgccaaagcacattagctacatgtagcaccattgttgatgaggcttcaacatctactagtaacaacagcaagagtgttactgatgctaagactgacactgccaagaggaagagttcaagaggaagcaaaaaggaagttgatggagatatgaaagaaaaggaagtacataccaataaaaagaggatatttgctagaactcgtaaagctgcaacaaagacgtctgataatattagcacgaaccaagaaaacaagaagactgataattgtaaattgaaaaggggtgctgatagtttcaaagagaaaaaagtaaataatagggcaaagtcaaaagcagaggtttctgctgcttcttctgtacctgaaatttgtatgcaatcctctattgatggttcagttattgagaaaaagccactggtgccattgtatcctcccagagccaaatcagttgtggttgtggaatcagccacaaaagcaaaagttattcagaagtaccttggggacatgtatgaagtgttaccaagctatggtcatgtgagagatttagcaggtagatctaaatctgtccgccccgatgatgacttcagcatggtctgggaggtgcctgctgctgcctggacacaccttaagagcattaaagttgcactgcaaagagcagaaaatttaattcttgcatctgatcctgaccgtgaaggtgaagcgattgcttggcacatcaaagaaatgcttgaacaacaaggtgtactgggttttgatgtgactgttgcaagagttgttttccatgaaatatctgaggatgcaataaagaaggctttaatgtccccgaggtatattgacatggacttagtcaatgcttatcttgcacgccgttcccttgattatctaattgggtttggcatatcaccacttctgtggaggaagttgcctggttgccaatcagctggacgggtccaatctgctgctttggcccttgtgtgcgatcgagaagctgaaatagaacagtttaaggcacatgagtactggacagtacagacagacttcaaaatacaatcagcagatccttcaaatgccacatgtattccattctgtataaagcatttgaattcaaaaaagctggatcaactttccataccctctcaagaagaagcgcaagctatagaaaagatgattcattcttctacatttgaagttttaggtgttaaaagaagtaaaattcacaagaatcctccattgccatatattacatccagccttcagcaggatgcagcaaacaaactccattttactgcaggatataccatgaagattgcccaaaacctttatgagggtatcaacctttcctcagaagaaacaactgggttaataacgtacataagaactgatgggttccatatttctgatggagctgtggaggacattcgttcactagttaaagaaagatatggtcagaagtacgtttcggaggacattaggaagtatttaaagaaggtgaaaaatgctcaagaagcccatgaagccattaggcccaccagtataaggaggccgccatcatcattggttggaatacttgatgatgattctctaaaactgtacactctaatatggaaaaggacaatggcttgccaaatggaagcttccagaactgagatgattcaagtggatgttggcattcctgaaggagagatgaattttcattccactgcatcaaaactggacttcaagggat

SEQ ID NO: 138129 - DNA, 327 bp, Zea Mays
atggcgagtttatggatggccgacgatggagcgcttggcggctggcgcctgcagatcgaccaggggaaggagatgacgagagaggcagagatggatgaggacctgggggcttggcagcttggggcttcgccgagtcgccgtcacagcgtcgctgtccacagccgcagtccagactctagagacgcctcgccgttcgccaactcagccactcgcagtcgccgtctcgcacagcgcggcacaggaacacgaacaggcggcggctgttcgtggccaggaaaatacgggaatatactggagtttctcgagaaatacgaaaatggacggtaa

SEQ ID NO: 138130 - DNA, 815 bp, Zea Mays
ctagcagcttttgaagaacgtctcctcgtcacgtagctatcattcatggctccaactccaagtcatgcgccggagacgggacacgcttcaacggaggagcagccgcagcccaagggcatcctggaacggatgcacaagtacctcctcctgcttgccatcctcgccgccacggtcacctacaacgctggcctgagcccccccggcggagtctgggctgacgacgccgatggccacctcgccggcgaccccgtgctgcaggctcactacgccgcgcggtacaatgtgttcttctactgcaatgcaacggcgttcgcggcgtcgctggtgatcatcatgctgctgctgagcagcaccttcagcttccacggataccgcgtccgcgcgctgcaggcggccatggtgctggacctactggggctcatgggcgccttcgtggcggggagctgccggaaggtgaggacgtcggcgtacgtcgtggcgctcgccgccgccagcgtcgcgtacctcgtcgcgcacctgctgctgcacttctgggtccggagcaaccgctgcccgtccacccgccgggaggtctcggagctgctcaacctgcaccgtctgtgccactgctgctgttgctgtggccggagggacgatggggctgccgcgcaagatgcacccagagggacacgcgcacgcgtgtgattttttatcaaggttgtggtccggtgtttgtaaggtgtgcgagtgaaatatgccatgagacgacgtttgctccacgaggaatccgatctttgatgctttgacaagtgtcaaatatttacaactataaaaca

SEQ ID NO: 138131 - DNA, 631 bp, Zea Mays
aaattgcttcattatgcaaataggcttgccctacctgatgatgggaccatcaccactgttcgacctaagcctgcaacgctggacttccttgggcttggcattggagggaccatggatggctccacggccaacaatggcctcccggcattaatggttggaggatagctggatatggggtcttcggcacaggtgcctgcgttgggaagatgccaagaggaagaccaacagacgtacgatcctgtgaagttttctccttttttctgcaatgcctcggcttgtccattctttcagtcacagatgtgcttttggtggagatagaagctctgtaagatgtggacctgtacgtagctcgatgctcctcccagtcctgctctctgtctgataaaaaaaatgcccttgaattgatacaattcgatcccagcagatgatccagaggttcaaaatcaccgtgcttttctgaaagtcattgcattttcaaagatgtattctgagttttcttgcgcatgtcctacttgagaaaaattgattatttagagcgtgtttggcatggctcaaaactccaagtaggagttagccggagcatgccaaacaacataactctaaagttgtaaactctatagagttttttaag

SEQ ID NO: 138132 - DNA, 655 bp, Zea Mays
gactcaaaagatttagaaatgcaagggaaggcaggaaaggagtccaaggttgtggaaaagctggatgaccatactttgagcaacaaggaggaatcagacagcgaaactctcagcgtctggaaaaaacgtacagcgaaagcaacatagtcttgctttctcagctgacctttcatattaggatgcagatttcacaggcaggcagtcgttcgcgaatgtggatatttcattgattgacaccttgcaattgacagttgtaatgtagaaaatgtttgtttcgatagcaacacgttagtatagaagtggaataggatttgtttgtaatgttattagatgtgggcacctgttgcccattaagttatggcatggcatcccccggttgtcttgtaatttttagaggggggtcagaggttttgtaacatactatctattagatcttttgcaggacatagtgctttgttgttgaactcttgtagaaatgttgtaggcaataaacagtgatacatgtaaaactagctgcgggcatccaaattttggccccggttcgattgccccagtactttggatctagaatctgacgctggagatttagtatttggactcgatgtaatttctgtttgtagttgacataattactgcactggttttgtactgtcaa

SEQ ID NO: 138133 - DNA, 210 bp, Zea Mays
atggcggccgtggagcagttgaaggagctgggggagaagctgcaggcggtggcgccggcgcctgcggacgaactcgccaagcttctcgaagtgagatatccccaagcttctccgttttggttggctgcgaaccttagtcatggagtcgatggtttagggtcgggctttgcgtggatctgtggctcaggcgggacaattcggcaagtttag

SEQ ID NO: 138134 - DNA, 1762 bp, Zea Mays
gtaggtttattgcatacgtactagctaccactgttggtctgtcacgccggaggcaggtcgcagttattactttaacccggggccccatcggcgatggcggccaacggcggtgaccacacgagcgctagaccgcacgttgtcctgctccctagcgccggcatgggccacctggtcccgttcgcccgcctggcggtggcgctgtcggagggacacggctgcaacgtgtccgtggccgcggtgcagcccaccgtgtcgtcggcggagtccaggctcctcgacgcgctcttcgtcgccgcggccccggccgtccgccggctcgacttccgcctggcgccgttcgacgagtccgagttcccgggcgccgaccctttcttcctccgcttcgaggccacgcgccggtccgcgccgctgctcggcccgctcctcgacgccgccgaggcgtccgcgctcgtcacggacatcgttctggcgtccgtcgccctgcccgtcgccagggagcggggcgtcccgtgctacgtcctcttcacgtcctctgccgcgatgctctccctatgcgcctatttccccgcctacctcgacgcccacgccgccgccggcagcgtgggcgtgggcgtcggcaatgtcgacatccccggcgtgttccggatcccaaagtcatccgtcccgcaggcgctgcacgaccccgaccatctcttcacccaacagttcgtcgccaacggtcgctgcctcgtggcctgtgacggcatccttgtcaacacgttcgacgcctttgagccggacgccgttacggccctgcgccaaggctccattactgtctccggcggcttcccgcctgtgttcaccgtggggcccatgcttccggtgagatttcaggcggaggagacggcggattacatgagatggctcagcgcgcagccgccacggtctgtggtctacgtcagcttcggcagccgtaaggccataccgagggaccagctccgggagctcgcagccgggctcgaggccagcggcaaacggttcctgtgggtggtgaagagcaccatcgtggaccgggacgacaccgccgacctcggcggcctgcttggtgacgggttcctcgagcgagtgcaggggcgcgcgttcgttaccatggggtgggtggagcaagaggagatcctgcagcacggttccgtcggcctattcatcagtcactgcgggtggaactcgttgacggaggcagcggcgttcggtgtgccggtgctagcgtggccgaggttcggcgaccagcgcgtcaacgccgcactggtggcgcgcagcgggctgggcgcgtgggaggaggggtggacctgggatggagaggaagggctgacgactcgaaaggaggtggctaagaagataaaaggcatgatggggtatgatgcggtggcggaaaaggcagcgaaggtcggcgacgccgccgccgcggcaatagccaagtgcggcacgagctaccagagcttagaggaattcgttcagcggtgtcgggacgcggagcgtaagtaggctcgactgatttctgcgagcctgtaacagatacttggttcctgtgacgctgactgtagatcattttcggttgctagagttattttcgccggcctcttcctagccggctgcttatttttaggttggtctttgcttaaagccgccgaaaattaagctttgaaccctatctaattcaatcttttctcttccacgcactcgtttctttcaccgcgcgatgcctccacgctctcggcatccacgc

SEQ ID NO: 138135 - DNA, 1880 bp, Zea Mays
atagggagaggagcagattcggtgagcacacacatcctctaagtgctatctaatctacaatctaccaccagacactgtcgtcagtcgtccctcatcaaccgcgcgcgcgcgacttcaagcatcagactaccataatcatggctccgccgccggcaatgcagagcccaggagagctaaacgacggcgcctacgacgcgccgcacatcctattcatcccgagcgccggcataggacacctgacccccgtcttccgcgtcatcgccggcttctcgagccggggcatcgacgtctccgtcgtgaccgtgctgcccaccgtgtctgccgccgagactgactacttcaacggcctcttcgcggactaccccgccgtccgccgcgtcgacatgcacctattgccgctggacgcctccgaattcacgagagaggacccgttcttcctccggtgggaggccctgcgccgctccgtccacctcctccgccccatcatcactaacgccgcgccgcgcatcacggccatcatcaccgacatcaccctgacctcctgcgtcatccccatcgccaaggagctggacgtcccgtgccacgtcctcttccccacagccgccaccatgctctcgctcaacgcctactaccccgtctatctcgagaagctcaagggtggaccggagccgggcgtgatcggcgacgccgtcgacatccccggcgtgttccgcgtcccgcgctccgccctcccgccggcgctcctcgacgtgaacaagctcttcacgaagcagttcatcgacaacggcagagcgatcgtcaaagccgacggcgtcctcgtcaacacgttcgacgccgtggagccggcaccgctggcagccctgagaggcggcaagatcgtccccgggtacccgccggtgtacaccatcggcccactcaagtcgcacgccacgaaagcgggcgacaagccaggtgacgcgttgcttgacgaatggctaggtaagcagcgagcgcgatctgtggtgtacgtggcgttcggcaaccgcagcgctgccaggctggaccagatccgggagatcgccgccgggctggaggacagtggctatcctttcctgtgggtgctcaagaccacgaaggtggaccgggaggacgacgccgagctggcggaggtgcttggagacggataccttgagcgcgtgaaagggcgcggcatcgtgaccaaggggtgggtggagcaggaggagctgctgaaacacccggctgtgggcatgttcgtgagccacggcgggtggaactcggcgctggaggcgtcgtccgccggcgtgccgctgctggtgtggccgcagctcggcgaccaccgcgtgaacgcgatggcggcagtgagggcaggcatcggggcgtgggcggagcactggagctgggacggggaggacacgctggtgaccaggcaggagatcgccgacaaggtgaaggaggttatggccgacgggaagttgagggcgagcgtggcggtggcccgcgaggaggccgcaaaggccgtcgcggagggcggcacgagttaccgtaacatgcatgacttcatcgccaagcttaagggaggagcttgaggcttgaggagatgatgttacgaacgcaacaatcatgcactgcacgtccattcccaccattccgacgagtgaagtgactgctgttacactcagccgtaccactttggttctgggttttcatttcatgttcatgtgtcttctactactatatacaagcatattcagtgtcttatgtgaactaaagatgatttgaaatggagtcaaataatatatatgtaattagagtaaaatgcatctgtggtctttaaagtttgcacattgtgtcattttggttaacttattggtcggcctatc

SEQ ID NO: 138136 - DNA, 189 bp, Zea Mays
gatctgctgctgctgctgttgttgttaacaggggaaggtgacagcggtggcgttgggtcagcagtcgtcacctctttgccgtcgcagatgatcttgacttcgcagtagagagctggtagaccttaccgcacatttgactttgagacgcctagtaccagttgacttatgcgaagaacaggaacaagctcg

SEQ ID NO: 138137 - DNA, 244 bp, Zea Mays
tttttctcccaaaaacgatatggtatctagaattagggtttgggctcacctgcaccgccacgttggctgcagcttcgccccttcgcatgtcgacgttcccccgtgctgctgcgcgtcgccgttaccccaagctgttgcatgctgccgatcagctctgtgtgatcaccccctggccgtgggaaggggatttcactccggcgtgagatttccagcaacagtgaggtcactgcgggcgatgagccga

SEQ ID NO: 138138 - DNA, 4000 bp, Zea Mays
ttcgcttggggcattgacctcacccaagtcttcgtcttccttctttggcagctgccagtttcatacaccactatttttatccagatccatccttggatttctcttcattccagatacatcttctctaaagcctaaaccccttgctctcttttcttccgatgtatagttggagagggcagtttcacctgcgaggctgaggtgagcaaccattgttggagagcaagcagccacatggccagcaccgctgccactccggaagcaggcagcaatcacagtgaagacggcaccacagtggagcttcccatcgtcgtcaccggcagcaccagccaagaatccattgatactccatccaccaggtacttgttagcccctagccatgtatccagctccagcttcaccgcagacattgagctcctgtggagactgcggaagtacctgctgcttcttggcatcttagctgttggtgttacatacaatgctggattgaccccacctggagggttctggtcgaagaacacacaagggcaatctggacatgaagcgggtgaccctgtcctccgggctctcttcttcccacggcacgaggtattcttctactgcaatgcaacagcctttgcagcgtctcttgtcctcatcatcttgcttctgagtaaaaacgtggcaaggcagaggctatggctccgctcaatgcaactcaccatggttctggacctgttcagcctgatgggggcctatgctgctggaagctgcagggcagtgaagtcctccatctacatctgggttctggtgctctctgttttcacatatattatgatccacatcctagtgttcatgaaagttgttccaagatttgtgtccgagaaaagatttgttccaaaacggctgaaagatgtggcgcggtctgtggagcgctggatcctatcccggtgtggtgttcacaggagtgaaaagaacagctctcacgagaaagatctagaggaagctcgcaagttcactctggtgcttgtgactttcgctgcaactgtggcataccaagcagggttgagtccaccgggtggtttttgggctgaaaatgatgagaacaaaactccagctacatctatgcttcgctctggaaaccttcctcgatataatacttttgttgtttgcaactcgacttccttcgttgcgtctttggtcacaatcatactgcttctaagcccagaactgagtcggcatggcatcagatccagagcggtgaccgtgtgtgttgttgtcgacatattgggccttgttggagcatatgctgcaggaagctgtaggagtgtggtcacatctgtctctgctgttttagtggctgttctagtatggatctgctttgcagttttagctgggatctttgttaacagatctgtagcagagtggtttgggaagaagatcaagccagatattatgaggtgcatcgacagatttggccgggtcttttcgtcgaaccatggcagaaagagatcaagaaatccggagggagagaattctattgcaagtcatcagcaaactgaagagagcataaaaggtgaagcagaagcagaaactgctagagtgccagaataccagcttccataccatcagctagctccagatattgaagagggtgaatgccctggggagcagcagagtccaggcaaacaacaacctacaaacattgaggttgtgtccatctcagagcatgcatctgtaaatgagaagcaagcagaaaatagcagcagtgtcatgtgcaagctgggaagtcagtctacagacccaaattcagctgcaaacgaggctatgactgaaactgaaacagaaaacatacaagatgcaaatatggaggaacaacaatcttccttggtggatggtcttaaaactcccactactgtggctgatcaagaatccacaaccgtggagtgcttgtccgacattgcacccaataaccataatggagccaccaacagtttcaaggaagagaaagaagcttcggagcagcatttgcaagccaatgagattgagagtttcagaaccaataatgtggccagacctgttgaaaatggcaacgttggcatgtatgaagtaactcccagacaagacgacggtgatgtaaatgctggtgccaatccaactgatgaacatctgaagaagtcccggacatacctccttcttctagccattcttgcagtatccctggcgtatcaatcaggtttaaatccaccaggtggtttctggacacaaagaggtaccaacaattcacctaagagcacccatcatcgtccctatcatttaccgggtgatcccatccttgaggatactcgccatcgacgctatattgcattcttctatttaaacgccatcgcctttgtggcatcccttgtcatgatcatcatgctcctgaaccggaggatgagctacaagggcataaaacgatatgcgctgcagatggctatgatagttgatcttcttgctctaacagggtcttacattatggggagtagtagggggacgaagagctccatatacatatggctgttggtatgccttgtgctggtttatgttgctgttcatgttctgatagcaacacatgtaatccctgaagggtgcaagaaggtcgtggcacagaagattgagaatttctcctgcagatacatatggacaaaggcttcgtttcggaaccggggaattgatggtaatggtagtgattgtgaggctgggcaaagccagaggagtgatgccgatgacaagacctgggagcggaggcgcaatctactgttgatgcttgctgttctagctgcaacagtcacgtaccaagctggcatcaaccctccaggaggtgtatggtctgatgatagctcagccagtggtaaaccaggagacccaatccttcagcacaacaattccaagcgctatgatgttttctactactcaaactcactctcattcgtggcatctgtagttatcacaatactgcttgtgaacaaggaatcctgcgagcatggtatcaagtcctatgcgctaagagtgtgtttggtggtgggcttggtgagcctcttgattgcctactctgcaggaagctctaggaaagcaagagaatctatctatctcatcgtcattgctgttgcagttctgattgctcttgtgattcaagtgcttcttctctcctgtacgcaagacagtctcagaggaccaactggacagtttatagaacgtctgctccagctgctttttgggacggacaaggcctggcatggagacacttctaaacagaaagaaagctcaggtcgtcccgagaaaaaagttcggaagaggcacaagtatttgatgctgcttgcagttttagctgcctccatcacgtatcaagctggtctcaacccacccggtggtttctggtccgacgacaatgaaggccatgtggaaggcaatcctggcctgaaaccacctggtgccttgtggtctgataacaaaggtcatttggcaggcaatcctgttctccttgatattaatcctcggcgctacgaaatattcttctgcttcaactctatctcgttcatggcatctattgtcgtagtcatgttcctgttgaacaaatctgcccggaagaaggccgtgccacttgaagtactgcacttgatcatgatactggacctgctggccctcatgactgcttttgctgctggaagctgcagaaaattcaggacttcagtctatgtgtatggtctagtgctcggtgtcgtggtataccttgtgatcgcagttcttttgtcaagtggcattgcaaaatgtctgagacccatggatagaaatagggtttcctctcagagaagtcctattcgcgctcctacagcaagcacaaggatacttggagaccatgcttgatggttccattcctttggtaatagtactagtttaatagtagtgtatgtatttggcttttcagtgtacgttatgttgtgggagtttgaattgaactgaaattcgacgctttatgttgttc

SEQ ID NO: 138139 - DNA, 560 bp, Zea Mays
cgcacccataggcacggaaagagatgacaaaaatggaaatgtacaagcatgtcaaagcaggacaaataaagggtcaactcaaagcttatgcagcagtccacggaatcactgaactgcatgaatcaggcaacggagcaagcagcaaagctttggcatgtctgaagcacccccatgaatttctgaaacgaagggcaaagatttagaatgaaagtttacaaggacaaagctgtcagctgggttccgacctgaaggggtggtaatggatcgtgatctaaatatttcttcacaatttcttagactcctaaataatagttcaaaaatgaatagaaatagagcttaaccctaatgcgatctaatcattaaactatatagtgtaaaatttggactccattgtcatctctaactgctctccttttcttcaaatggaacttgcccaccttaggttgtggccagtagatcgtgtatatgaccatagaaaacactattttgtactattatacactttagactgcactatttacagaataaagagaaagactgctagaggtagctacaaataa

SEQ ID NO: 138140 - DNA, 1783 bp, Zea Mays
atctgctgatcctgaccggccgacccgtcggccgtcgccaactcgtctgctcagcccatctgtatcacaattcccaagagcttgagctccaagtacccggcctgcgcccacggccgggcccaggaaccgccgttctgctgcaccggcggcggaagaagagacggatagcgtggggatccggctgatgcgccggcggcaatgggcatttgggattccattctccccggcggcggccggcgcttcatcaagcgcaaggacagcgacgccggtgaggcaggtcgggcactagaggaactgaggggctcactgtacaacgactttcatacttcagaaggggccaggcgccagcagcagaagctttgtggccctattgttgcactgacattcaactttgtggttgctgttgggattatcatggcaaacaaaatggtttggctgactttccaatcattttaaactttttatgtctgtctatttgcattccttttataaacgcctttccttgtaggtgatgggtgctgttggatttaacttcccagttgcactgtcattaattcattaccttttcgcttttgctttaatgtctgttctcaaggcattatacttgctgccaattgcttctccttccaaatccactcctttctcctcattatttgctttaggtgctgtcatgtctttctccactgggcttgccaatatcagcttaaagcataacagtgtaggtttttatcagatggctaagatagctgtaactccaaccatagtggtagcagaatttattcttttcaagaaaaaggtttcccttcgaaaggttagcacgctggttgttgtctcatttggtgtggccgttgcaaccgttactgatttggagttcaatttctttggtgcttgtgtagcactagcttggattattcctagtgctgtaaacaaaatcctgtggtcaaatttacaacagagtggaaattggacagctcttgcgttaatgtggaagacaaccccaattaccatatttttctttattgttttgatgccattgttggatcctccaggccttttatctttcagttgggatttcaagaacagcagcacaattatcatatctgctttgttcggtttccttcttcagtggtctggtgccttggcacttggggcaacctcggctctcgcacatgttgtgctgggtcagttcaagacgattgttataatgctctctggttatctggtatttaaatctgatcctggattcaccagcctctgtggagctgttattgccctcgcagggatgtcagtgtacacttacctggggatgaaagagtcagccgccaacgctaggagaaattccttaaattcaaggcaaaattctcatttgaagaaggccaaggctattgtagatggagaaaatccagaaacaaagcctatggattctgtgtaaaatgagtgccgtcctcctgctaggtttaagaacctgccattggaagcaatgaggtttggtgagcatacttatggagtgagtttccttcaccaaccagttcatccgaaaacttaatttcactttctttagttcttgcttggagttctattattctttaggcaatggtggtcaaaattgttttcatcgttgatcacattcattgcacgtaggaattatcattgattctagttttaggtaactttggttactgttccaatccatatcctgtcatgctttatttgtttacttgccttgtggattctgttcctcagaaaatagatgaaaggtggctgaaaatggttcctggttgaa

SEQ ID NO: 138141 - DNA, 1683 bp, Zea Mays
ctgctgatcctgaccggccgacccgtcggccgtcgccaactcgtctgctcagcccatctgtatcacaattcccaagagcttgagctccaagtacccggcctgcgcccacggccgggcccaggaaccgccgttctgctgcaccggcggcggaagaagagacggatagcgtggggatccggctgatgcgccggcggcaatgggcatttgggattccattctccccggcggcggccggcgcttcatcaagcgcaaggacagcgacgccggtgaggcaggtcgggcactagaggaactgaggggctcactgtacaacgactttcatacttcagaaggggccaggcgccagcagcagaagctttgtggccctattgttgcactgacattcaactttgtggttgctgttgggattatcatggcaaacaaaatggtgatgggtgctgttggatttaacttcccagttgcactgtcattaattcattaccttttcgcttttgctttaatgtctgttctcaaggcattatacttgctgccaattgcttctccttccaaatccactcctttctcctcattatttgctttaggtgctgtcatgtctttctccactgggcttgccaatatcagcttaaagcataacagtgtaggtttttatcagatggctaagatagctgtaactccaaccatagtggtagcagaatttattcttttcaagaaaaaggtttcccttcgaaaggttagcacgctggttgttgtctcatttggtgtggccgttgcaaccgttactgatttggagttcaatttctttggtgcttgtgtagcactagcttggattattcctagtgctgtaaacaaaatcctgtggtcaaatttacaacagagtggaaattggacagctcttgcgttaatgtggaagacaaccccaattaccatatttttctttattgttttgatgccattgttggatcctccaggccttttatctttcagttgggatttcaagaacagcagcacaattatcatatctgctttgttcggtttccttcttcagtggtctggtgccttggcacttggggcaacctcggctctcgcacatgttgtgctgggtcagttcaagacgattgttataatgctctctggttatctggtatttaaatctgatcctggattcaccagcctctgtggagctgttattgccctcgcagggatgtcagtgtacacttacctggggatgaaagagtcagccgccaacgctaggagaaattccttaaattcaaggcaaaattctcatttgaagaaggccaaggctattgtagatggagaaaatccagaaacaaagcctatggattctgtgtaaaatgagtgccgtcctcctgctaggtttaagaacctgccattggaagcaatgaggtttggtgagcatacttatggagtgagtttccttcaccaaccagttcatccgaaaacttaatttcactttctttagttcttgcttggagttctattattctttaggcaatggtggtcaaaattgttttcatcgttgatcacattcattgcacgtaggaattatcattgattctagttttaggtaactttggttactgttccaatccatatcctgtcatgctttatttgtttacttgccttgtggattctgttcctcagaaaatagatgaaaggtggctg

SEQ ID NO: 138142 - DNA, 2287 bp, Zea Mays
cgtgaggaccgccgactgctgtttccgcgtcatgccaattgggccgggtgtagctagactaggtcgtatctcttgcaagaagtgggtgctataaatttacataccggccttggtgtcgaatcagctccatggccacttccaagctcatcactataactatgactatcctcctcttcctaatcgtagggtttataccagaactctgcgtcgccgctagtagtgaccatgaacagttcgtcttcaatggcttcaccggcagcaacctgagcttagatggcgcagccagaatcacgtcgactggcctcatcgagctgactaatgattcggcccggatcaagggtcatgcgtttcacccatctccgctgcgcttccgccggtcctccgatggcacggtccagtccttttccgtctcctttgtgtttggcatcctctcttcattcggggacatcaggggccatggctttgccttcttcgttagcccaagcaaagacttcaccgccgcttacccaatacagttcctgggccttttcaactccacgaacaacggcagcctgagcaaccacatctttgcagttgagctcgacaccatccaaaacaccgagttcggggacataaacgacaaccatgtcggcatagacatcaacagcctcaactccttgaaatcctacgcggcaggcttctacaacgatcagaacagtggcaggttcacgaacctacccctgattggaagccagcagccaatccaagcatgggtggagtatgacggcaacaagacgcggatcgatgtgaccatagcccctctaggcctcgcaaaacctctgacgccactgctgtctctagccttcaacctttccacagtactcacggaggaagaagcgtacattggcttctcatcttccacaggcctgagcacggggcatcacattattcttggctggagcttcgggatgaatcgccctgctccagccatcgactccaccaagctacccaagctaccctaccttgggccaagagccccctctaaactcctagagatcgtccttccgatcgcgtccgcccttttcgtgttagtggttggcactacggctgtgattctcgtcaggagacatctcaggtataaggaggatgtacgtgaagattgggaggtcgagtatggcccccagaggttcacgtacaaagacctgtcccacgccaccaaaggcttcagttccaagcacttggtcggcgtaggaggctttgggagggtgtacaggggagtgctcccaaagtcgagatcgcaagtggcggtaaagacggtaccatacaactcgaagcaaggcgtaaagcagttcaccgccgaagttgccagcatggggcacctccagcacagcaacatcgtgcagctgcacgggtactgcaggaggaagggcgagtttttcctagtgtacgactacatggtgaacggaagcctcgacaggtacctgtacggctacggcggcgaagagggcaggccgccgggggccacagccacagtagtactagactgggcgcagaggttcaagatcgtcagagacatcgcgtcgggtctgctctacctccacgaggagtgggacaaagtcgtcgtccatcgggacgtcaagcccagcaatgttctcctcgacaacaacatgaatggccgcctgggagatttcggccttgccaggttgtatgaccatggcactgacccacacaccacgcacgtggttgggacgatagggtacctggctccggagcttgcgcacagaggcaaggcaagcactcgcaccgacgttttcgcctttggcgtcttcgttcttgaggtcacctgcggaaggaagcccgttgtcgtcagtgaagacacagacaccccaggcagaggcacgcagctgatgctggtcgattgggttattcagaactggcacaaagggtcactcgttgatgccatagatatcaaactgcagggtagatatgacgtcgaccaggcatgcctcgcgttgaagttgggactgctgtgctcacacccgtctcctgatgcaaggccaagcatgaggcaagttctgcagtatctcgatggtgatctgccgctaccggagctgctaccggcgcacttcagttttcatatgctcgccttgctgcagagtgaaacacggcttaacacatcaacggtgtcattgtatccatcaccagcgatgaccatgatggactatggttcagtatcattttcactagatggaagatagcaataataatgtcgtggcttggctagcttgctgccgtcgttgcccagttt

SEQ ID NO: 138143 - DNA, 375 bp, Zea Mays
atgaaggccagaacactatagcttaagtctgtgggcatcatttctgggagtggcatttcgccgttgaggtattgtacgacctgtctcatactgggccttgcattacaaattgggtgcgcacacatgagtccaaggttcaacgctaggcgcacctcatctgcattgtagctgcattgcaacctactgtccactgtgtatgtgactgatcctttgtgccaatggttgacaacccaatcaattaggacctgagaactgtcctctgcatggctactgattggcctttgcccacaggttacctcaagaatgaagataccaaacgcatacacatctgtcagaggtgttgccttaccggtccgggccagttctggggctata

SEQ ID NO: 138144 - DNA, 4665 bp, Zea Mays
actacagctacccatcagttaaagaacgctgtcacatctgttgcattttctggacgtgctcttcttctatgttctttatgttcatctcagaatgatgatagcagtgttgttgattcattcagtgatcttgttgtcgcttccctttcaaatgcgttacttggcatggatgccaatgatccacctaaaactattgctacaatgcagttaattgggtctatcttttcaaatctagctgcagttagtgatgatgtgcctatattgctccaatctactactctatcgaactggctagatgaattcttttcccgactgttttctgtgcttcataatctggaatcaagtagtcccattaatgagggttaccaaagctcattcatgtcagggacttttcttgttgacagtccatattacttttgtatgcttgaaattcttctagggaagttatcaaaacccttatttaatcagtccctgaagagaattgccaagttcgttaatgcaaatatcctccctggtgctacttcagaagttgggcttctttgttgtgcctgtgttcattcttatcctgaggaggcttcagtctaccttgtaaagccaatcttagagaccatcatgtcatcctttgaggggactccaaccactggttatgtaggaagagtagttgcagataaagcatctaccaaggctgcactttctcctgctctggaaacagcaatagattactatctgagggttttggccatatccatcagttatgccggtcctaccttactcaattataaggaggaactaaatcacataataacatctgcgttccagtccccttcttggaaggttatatttttcatttatcttttcatacattcgaacagctattatttccatgtcccaatcatatattataggatgacgaatttccttttctcttggaatgtctaggttaatggagctggggatcatctccttcgctctctgctaggaaatctggtttcttattacccaattgatcagtacaagtatgtttacatcatgtgcacttgtttgttttctcaaacacatacactcaatgttttctttatttgatctataacatgtttacccaccaaccaatatattattctgtttgtataggccattcacttgtcagcctattggaaatattattgaaccatgggggtgttcgaaagctcatcaggatagggaggatgaaatgcttaatttccctccaaagtggcatgatccaagtcatgatgaactctcttttgcaaatgaattactacaacttcatttccagtcagctttagaagatcttttgactatttgtcagacaaaagttcattctgacacaggagatgagaaggagcacctaaaaataaccctgttacgcattcattctgcattgcatggtgtaatgtcttgtttaccagaaattcgcccgtcatataaagatgggaggtccctggaagtggagtcggctttcttcatagcaggatctgctggtagcactgttggaagctcagaaatgcgtgaaaaggctgcagaatttgtgcacatagcttgcaggtacttattaaaggaaagaactgatgacagtattcttctatcccttgttgtgcgtgtcattgatgctttggtaaactatggaagcttggaataccaagaatggtcaagccatgttcaagcttggaaactagaatctgcttccataattgagcctccatgcaacttcattgttccatttcatgctcaaggaaaaaagagacctagatgggcacttgttgacaaagcaaacttgcatagtacatggaggtgttcacaatcatcatatcacagatacagaatgaatgcagatgtttcgccatctgtccccatgattaatttgatgaatgatctcttagatctctcactacacaactatgaaactgttcgatcgtatgctggaagatcgcttacaaaattgttgaaacgttggccttctctaatttctaattgtgttctcacactcacgggaaatttgcgtgacccaaaagctcctgaacatgttgttcttggttcttgcagcattctgatctcacagactgttttaagacacttgaccactgattctgtttccctctcttcctttatcatgggaattctggaaagctctcatcatgaatcgttgaagtgtcagaaagctattactgagctctttgtaacatataatatacgtttctctggaatatcaaggagcttctttaaaactcctgaaaatcaagctgacaagccaggatttctcagtctaatttctcaaattaatgctttgggctttgagactaatggactacattggaggtacaatttgatggccaacagagtattactattactaattttggcatccagaagcgaatctggcatatattcacaaatgcttgcaaaaattgctggtcatttcttaagaaatttaaagagtcaactgccccactcaagaatgcttgctatatctgctttgaacacattattgcaaggatcacctcataagacatctgcacaaaattctaagcaaccaatagatcaccctgaagattgcaatatttcatcaacagaagagattttgaatgagataatccgggaggaaggattcatgaatgagacactgaacagtttatctcatgttcatattatttccgacaatgatggttcgtcaaaagcgagttatggggcatcatcttttcaaagcggatctgacaaagcaataacttacttctattttgatttctctgcctcatggccacgtactcctagttggatttctttactgcgtggtcacacattctattccagttttgctaggatattcaaaaggcttatacagcaatgtggaatgccagtaatctcttctcttcagagtacactagaagagtttttaatttcaaaagagagaccaaggcaatgtgtcgctgctgaagcgatggctgggatgctgcactctgatatcattgggaatctggaatgtgagaacaactggttgatggcccagttgcataagattatgttagcaccatctgtggagtcagctcctgaatgggcagcttgtattcgatatgctgttacaggaaaagaaagagctggaactcgtgctcctgttctcaggcaaaaagtattagaatgcttatgtactcctcttcctcattccatggcaactagcgtacttgcgaagagatattcttttctgtccgttgctctaatagaaatttctccacccaaaatgtccccagcagagaagcaataccatgttaaaattcttgatgaactacttgacagcatgaaccattcatctgctcaggtaagagaagcaattggtattgccatgtgtgttacaacctcaaatatgagactttctgggttatttggcactggatgttcaccgcaaggccttcatggggatgtaagcatgattgaacaaacaggaaataaatattggtctgaacgtttgacagatggagctaatgaattagccgtaagtatacaaaatagtactcaatctaagcaactagaatcaacatcagattcggctgaagatagcatggatgatagagagcaggctgatgctaaaaggatggaaacgatatttcattttatgatcgcatctttgaagtctgggcgatcttctgttctactggacactattattaggcttgtgtacccaattctctcactacaggaaacatcaaataaagatttatcattgcttgctaagtcagctttcgagttgctgaaatggaggattctacatcggccttttcttgaaactgctattacgtctattcttcctttagtcagtgatcctaactggcgtaccagatctgcactgttatcgtatctcaggacctttacctacaggcacacattcatactttctggctcagagaaatcacaaatctggcaaacaatagaaaaattacttgtggacaaccaagttgaggttagggagcatgctgctggtgttcttgcaagcttaatgaagggtatagatgaagatctatcaaaggatttccgtgaacggtcatatgcacaagcccagcatatttttgttgcacggagaagaaatttgaagttttctgttggtaccatccatggtgcagtccttgctttgacagcttcggtcctttctgttccatacgacatgcctagctggcttccttctaatgtctcgctacttgctcgcttcatccgggagcctccccctataagatcaacagtcacgaaagctgttgcagaatttaagcgcacccatgctgacacatggagcatccagaaggacgcattcactgaagacgaactggaggttctccgtgatacatcttcctcctcgtcgtacttcgcttagattaaaatttcaaaggccataggatattctctggtactggtgttgtgtatatgaatttataactgttgaagtgtcggtgtttttcataaagtatatccttgtacgtacctagttttatttcatcaacagatgccttcgtacaactgagatgaagttatgcagtctactgtataccgtctggacatagcggaagcattatggcatgtgggatccttgcgtgggctgagaaattgttaacatccaaatcttttgcccagtcaacgacgtgaataagatgctgcctagtttaaccgcat

SEQ ID NO: 138145 - DNA, 4525 bp, Zea Mays
actacagctacccatcagttaaagaacgctgtcacatctgttgcattttctggacgtgctcttcttctatgttctttatgttcatctcagaatgatgatagcagtgttgttgattcattcagtgatcttgttgtcgcttccctttcaaatgcgttacttggcatggatgccaatgatccacctaaaactattgctacaatgcagttaattgggtctatcttttcaaatctagctgcagttagtgatgatgtgcctatattgctccaatctactactctatcgaactggctagatgaattcttttcccgactgttttctgtgcttcataatctggaatcaagtagtcccattaatgagggttaccaaagctcattcatgtcagggacttttcttgttgacagtccatattacttttgtatgcttgaaattcttctagggaagttatcaaaacccttatttaatcagtccctgaagagaattgccaagttcgttaatgcaaatatcctccctggtgctacttcagaagttgggcttctttgttgtgcctgtgttcattcttatcctgaggaggcttcagtctaccttgtaaagccaatcttagagaccatcatgtcatcctttgaggggactccaaccactggttatgtaggaagagtagttgcagataaagcatctaccaaggctgcactttctcctgctctggaaacagcaatagattactatctgagggttttggccatatccatcagttatgccggtcctaccttactcaattataaggaggaactaaatcacataataacatctgcgttccagtccccttcttggaaggttatatttttcatttatcttttcatacattcgaacagctattatttccatgtcccaatcatatattataggatgacgaatttccttttctcttggaatgtctaggttaatggagctggggatcatctccttcgctctctgctaggaaatctggtttcttattacccaattgatcagtacaagtatgtttacatcatgtgcacttgtttgttttctcaaacacatacactcaatgttttctttatttgatctataacatgtttacccaccaaccaatatattattctgtttgtataggccattcacttgtcagcctattggaaatattattgaaccatgggggtgttcgaaagctcatcaggatagggaggatgaaatgcttaatttccctccaaagtggcatgatccaagtcatgatgaactctcttttgcaaatgaattactacaacttcatttccagtcagctttagaagatcttttgactatttgtcagacaaaagttcattctgacacaggagatgagaaggagcacctaaaaataaccctgttacgcattcattctgcattgcatggtgtaatgtcttgtttaccagaaattcgcccgtcatataaagatgggaggtccctggaagtggagtcggctttcttcatagcaggatctgctggtagcactgttggaagctcagaaatgcgtgaaaaggctgcagaatttgtgcacatagcttgcaggtacttattaaaggaaagaactgatgacagtattcttctatcccttgttgtgcgtgtcattgatgctttggtaaactatggaagcttggaataccaagaatggtcaagccatgttcaagcttggaaactagaatctgcttccataattgagcctccatgcaacttcattgttccatttcatgctcaaggaaaaaagagacctagatgggcacttgttgacaaagcaaacttgcatagtacatggaggtgttcacaatcatcatatcacagatacagaatgaatgcagatgtttcgccatctgtccccatgattaatttgatgaatgatctcttagatctctcactacacaactatgaaactgttcgatcgtatgctggaagatcgcttacaaaattgttgaaacgttggccttctctaatttctaattgtgttctcacactcacgggaaatttgcgtgacccaaaagctcctgaacatgttgttcttggttcttgcagcattctgatctcacagactgttttaagacacttgaccactgattctgtttccctctcttcctttatcatgggaattctggaaagctctcatcatgaatcgttgaagtgtcagaaagctattactgagctctttgtaacatataatatacgtttctctggaatatcaaggagcttctttaaaactcctgaaaatcaagctgacaagccaggatttctcagtctaatttctcaaattaatgctttgggctttgagactaatggactacattggaggtacaatttgatggccaacagagtattactattactaattttggcatccagaagcgaatctggcatatattcacaaatgcttgcaaaaattgctggtcatttcttaagaaatttaaagagtcaactgccccactcaagaatgcttgctatatctgctttgaacacattattgcaaggatcacctcataagacatctgcacaaaattctaagcaaccaatagatcaccctgaagattgcaatatttcatcaacagaagagattttgaatgagataatccgggaggaaggattcatgaatgagacactgaacagtttatctcatgttcatattatttccgacaatgatggttcgtcaaaagcgagttatggggcatcatcttttcaaagcggatctgacaaagcaataacttacttctattttgatttctctgcctcatggccacgtactcctagttggatttctttactgcgtggtcacacattctattccagttttgctaggatattcaaaaggcttatacagcaatgtggaatgccagtaatctcttctcttcagagtacactagaagagtttttaatttcaaaagagagaccaaggcaatgtgtcgctgctgaagcgatggctgggatgctgcactctgatatcattgggaatctggaatgtgagaacaactggttgatggcccagttgcataagattatgttagcaccatctgtggagtcagctcctgaatgggcagcttgtattcgatatgctgttacaggaaaagaaagagctggaactcgtgctcctgttctcaggcaaaaagtattagaatgcttatgtactcctcttcctcattccatggcaactagcgtacttgcgaagagatattcttttctgtccgttgctctaatagaaatttctccacccaaaatgtccccagcagagaagcaataccatgttaaaattcttgatgaactacttgacagcatgaaccattcatctgctcaggtaagagaagcaattggtattgccatgtgtgttacaacctcaaatatgagactttctgggttatttggcactggatgttcaccgcaaggccttcatggggatgtaagcatgattgaacaaacaggaaataaatattggtctgaacgtttgacagatggagctaatgaattagccgtaagtatacaaaatagtactcaatctaagcaactagaatcaacatcagattcggctgaagatagcatggatgatagagagcaggctgatgctaaaaggatggaaacgatatttcattttatgatcgcatctttgaagtctgggcgatcttctgttctactggacactattattaggcttgtgtacccaattctctcactacaggaaacatcaaataaagatttatcattgcttgctaagtcagctttcgagttgctgaaatggaggattctacatcggccttttcttgaaactgctattacgtctattcttcctttagtcagtgatcctaactggcgtaccagatctgcactgttatcgtatctcaggacctttacctacaggcacacattcatactttctggctcagagaaatcacaaatctggcaaacaatagaaaaattacttgtggacaaccaagttgaggcaagtatatgttcatttgactctgtacagtgacatttattttcccattctgtgtcttgttactcaaattgtgtaatatcattgcattatcacgaaaatgtgtactatcactctatcagtgtacatgttagtgctgtgcagtgtaggtttcttttgtcaatgttttgtactttgttcttatacattcaggttagggagcatgctgctggtgttcttgcaagcttaatgaagggtatagatgaagatctatcaaaggatttccgtgaacggtcatatgcacaagcccagcatatttttgttgcacggagaagaaatttgaagttttctgttggtaccatccatggtgcagtccttgctttgacagcttcggtcctttctgttccatacgacatgcctagctggcttccttctaatgtctcgctacttgctcgcttcatccgggagcctccccctataagatcaacagtcacgaaagctgttgcagaatttaagcgcacccatgctgacacatggagcatccagaaggacgcattcactgaagacgaactggaggcaagctag

SEQ ID NO: 138146 - DNA, 325 bp, Zea Mays
caaatgggggtcgttggacctactcattggaacgcttcctgcgctatcttgttgtttactttgagaaacgccttcagcatgaacaattgtaagagatgaatcttcacttgcacgcagcttgaaaaaaatcatcttattgactgcagttcatctatttcaacataaacactgtagtgttatggcagttgaggaccatgatcaatcttatctgggaaaggaagaaaggtctgtttttgtcaaagctatcttgaaattattggatcgtggtcagtacagcaaggataattctcttgctgaaacagtttccgttgcaacttcgatcctg

SEQ ID NO: 138147 - DNA, 126 bp, Zea Mays
cttttttctttttgggagatgttttttttcttctcgaaaacgtaggaggactgcgtctcattatattaagaagaaagaaaggttatggggctagaaaacagcccagatacaagagcctccttacag

SEQ ID NO: 138148 - DNA, 340 bp, Zea Mays
gttttcttttttgtttgctaaatttttcgaggatagtattatttgttttattctataaaaatgaagcaggtataagtttggtattcttaaaatttgcttgtttttttctcatccaaattttatatctcatgcacaatgctaagggtttagataaacggtagtggaattgcaatgacatggtgtttctgttgttgatagttgaaattaacttgaataaaaggccatgctataaagttatcaatttagtgtttaaaattccaagatgacattagaatagaacaatctctgctaatataaagtgggagtttctcccttcatgctcagtgaaatataaaaaaaa

SEQ ID NO: 138149 - DNA, 92 bp, Zea Mays
tccaggaataggagccattaggagggagagactcttggcccctgccatctcccacagattcgtatcttcctcaacttttctaaaggccgaat

SEQ ID NO: 138150 - DNA, 609 bp, Zea Mays
atgcaggtcggcgacgacagactaggccgaggtgggtcgcgccagggcgtcggtgtcagcggttggtgcttagtgcctggtggctgccggccaggccgatgcggggcgagacagggaagagatgggggaggaaagaggcacctaggtaaagaaaggaggcgccagggggccgcggcggcgggcgaccgaccatggctgacggcggccaggaattttattaaagcgaagagtgacattgcttctgaggatcttcaggctcttgtaaagcttggactggaggtatttcatgcgtcacataacaagtttgttgtccagattaagtggggaggtctgctcataaggcttttaagaaagcatgggaagaggctttcacttgttgtgcaatggagaccactttatgagacgttgataaggactcatttcaagagaaacatgggccctgagggctggaaagtaaggaagcaacactttgagactgtgacctctttagtgtgtgcatctaggaatttctttactgaaggtgtggctgctgaaatttggtcagagttcaggtttggcatattcagcacggatctttacttacattccatctcactcatgcttttctaa

SEQ ID NO: 138151 - DNA, 104 bp, Zea Mays
ttatgcctctttcaatgtatttttcctatttcacccaactttcatgctgacaaaacgtgaagtgatcagaagatcctggtttcgtttccaatcctattgaaaca

SEQ ID NO: 138152 - DNA, 405 bp, Zea Mays
gccccaggtctctctcccttgggtcgtcgtcgtcgtcgtcgtctccacggctacacccacatcttgtcttggaggcgaagaaagaaatcggccaagtatcccgcgccgcccaagtctccccaactaaccccccaaacctaccaccacccatccattttcgccttggcttgacccgcggagctctgactcagagggcatccacggcggcggcagtgcgagggtccgagggaagattggaggatgcacctctacaacgcgtggctaccgccaccggtgtcgaccgcggcgcgtggggaggcagctgcctttgcgggcgctgtgcggaccgccgcggacgcgtggctgcccggggactccgactccgcctacgccacactcaagtggatctccgtgttcgacctgtaa

SEQ ID NO: 138153 - DNA, 331 bp, Zea Mays
gggctgtggatggggcagatatatagcctcctctgccagaactgtgtcctcttttttatcaccctgcgaaccaactggcaggagttagacctgaccatgttcaacaaggacaacggttttgtctgctaggaatctagaaagagtttttcttttcttttttgccatgtgctgttgctgaaacattgaaccatcagcatcaggcttcgacagagctgtctggtgtttgctcatcaattcatcatcagtgtaacactacagattgtaacatttggaatctcggagataggaattaaaaatgttttgatacgccaatatagctgacgctttgttg

SEQ ID NO: 138154 - DNA, 194 bp, Zea Mays
actgacgacgataagtgggctctgaacaaccccttctacttctgcatcaaatgctactacctcctccacaaggacagcacactgctatatcctcacactgtggtgactgttggtgccgataaaattgttgagtctactgttgttttcagtgaccatgacaaggcctcgactcacttgaatatatattcttcttt

SEQ ID NO: 138155 - DNA, 233 bp, Zea Mays
gggtacctctactgccatcaggttcccgtcttatcttttgtcttactgtttcaggtagttccattttccttggtgaaaagtttgtttgtggatttgatttcctttgtttttctagatctcacttccggccctcttgaacttttgttcaacaaatgaagctattctttcatcaaacctatataacagacaatagacattccgcacatggtatacgttacaatctgctgtggtta

SEQ ID NO: 138156 - DNA, 85 bp, Zea Mays
agttcctatttgatggtgcattcattatttggttgtgcatggttaatggtgccatctttcttgtatgaatgcctgatatctaatc

SEQ ID NO: 138157 - DNA, 936 bp, Zea Mays
gtggaatcagtctgttttgctttccttttaacagtggaaagctgcaaaagaggagcttcgtgatgaagaggaagatgagcctgaaactgctctagaggcattagaaaggaagcgacaaaaggaaatagaggagtggcggaaacaacagatagcttttggacatgctcaggaaaatgccaattttgttcctgttcgtggtgattggcgtgaccgtgtaaaacgcagaagggctgaagcaaaaaaggagtcaaaagatgacattgttgttgcatctttaagtagttccaaacagcataaaggatctcctgatctagcagagctttccaagggtcttcctactggttggcaggtaagtattctcgattgtatcatatcagatgctaacatagtgtgctgtgtttaaggtagcttccgctgcagcttccaagaatttgatatctattgcaagtttgtaactgatacaaagaagtgaacaatcgtgaaacactggtcatgagtgcaccctctgttcctgtgtagtgtactgtaaaaccttgttaatctgccatgccatgttttacaaagtggttagcactgcttatttgcgttatcctctctgtgcaggcatacttggatgagtctactaagcaggtctattatgggaacagtctcacgtctgagacgtcctgggagcggccaacaaatgaatgaagatctataaccttggtgtgcggtcaaccgaacgatacaagttgatttgttaatgtagttgatgctgttgaatgggcagcccaattttgtttggcagccaaccccatcctttagagaagaacaaaccacacctcaccaggagatggctgattgtttcattgtcttggtcacaaggcacaaaatttttgatgggataggttttgcttggctaacctatctgcagtacaacatctcttattaatcact

SEQ ID NO: 138158 - DNA, 1493 bp, Zea Mays
cgattcatgtttctctacggactgcgtgcttggacccgcctcttgcgtgtgcggtcggaaactcggaacggcgtgtgtcactttcccacctcccgtcgtcactccaccgccgtccccttgagcgctcgccccaacctggggacgctcgccccagccgatccgatccgtctcaactccattaaaaaaatctctcctttccccctccctatccaggaaaaggagaaggtaccacctcggtcgatcttccctccatttactcctccgggcgaggtcccgattcgatcgaaggcggcggagagagatgaggaagcgtgagcgagagaacccgtgcgggatctgcgggcactaccacaagtacgaggagggggaggtgtgcggcgtctgcggtcaccgcccacctgcagcgtcaccagtaggggccaggcagcaagactcggcgttcccgtccgagatcctcaaggagttcctcttcctcggcagctacgacaacgcctcccgctcggagctcctcaagaccatcggcgtctcgcacatcctcaatactgtacctttgtgccaaaacctttaccggaattcattcacttatcactgccttcaagaggacaagactctgcagtttgatgatgcaaaccagtttctagagcaatgtgagagggagaaagcacgagtcctagtccattgcatgtctgggaaaaatcggcagcttttgtaatagccttcttgatgaagtcgagaggttggagattggcacaatcttttcagtgggtgaaagagcggagaccacaagtgcaactgtctgatgcagcacagcagcagctgattgagtatgaaaagaagctttttggttctaatgatggcagcataccagctcaaccttttgctccagtggattcgctcccttctcttggatttggttttccaaaaccaccaggcgacatccaagcgcctacctttaatcagcaggctccagcatctatctttgagcgcgttaccccgaacagcttccctagtaatttcatattcggagccgaaagaactagtgatagtgatgcgaaacttccagatagcaacaatttcggcgtggtaaactcgtctgggagtgatagcatgatggacagctcctaggatggttttgccttcaccaaggctatctccagcagcttaatcctcaattcctcatctctcgtttcaaatttcacttccactcttgtacaactatagcctgatatacaaaagaaatgactcagtcgcaaatttagtcaggtttctcgggatgtttttttatttctgagaaggaaacgcatttttgtaatagtatgttgtaatatttgccagtattactaaattgctgctgtgcattttaacaatcatgagtgtgcttttttatgtaacttttctagggtaattcacgataacaaattacgctggaaagtttgaataaaaggttacacatgtgcttgttaagatgtacagatttgtgggctcggaaaatg

SEQ ID NO: 138159 - DNA, 1389 bp, Zea Mays
cgattcatgtttctctacggactgcgtgcttggacccgcctcttgcgtgtgcggtcggaaactcggaacggcgtgtgtcactttcccacctcccgtcgtcactccaccgccgtccccttgagcgctcgccccaacctggggacgctcgccccagccgatccgatccgtctcaactccattaaaaaaatctctcctttccccctccctatccaggaaaaggagaaggtaccacctcggtcgatcttccctccatttactcctccgggcgaggtcccgattcgatcgaaggcggcggagagagatgaggaagcgtgagcgagagaacccgtgcgggatctgcgggcactaccacaagtacgaggagggggaggtgtgcggcgtctgcggtcaccgcccacctgcagcgtcaccagtaggggccaggcagcaagactcggcgttcccgtccgagatcctcaaggagttcctcttcctcggcagctacgacaacgcctcccgctcggagctcctcaagaccatcggcgtctcgcacatcctcaatactgtacctttgtgccaaaacctttaccggaattcattcacttatcactgccttcaagaggacaagactctgcagtttgatgatgcaaaccagtttctagagcaatgtgagagggagaaagcacgagtcctagtccattgcatgtctgggaaaagtagatcggcagcttttgtaatagccttcttgatgaagtcgagaggttggagattggcacaatcttttcagtgggtgaaagagcggagaccacaagtgcaactgtctgatgcagcacagcagcagctgattgagtatgaaaagaagctttttggttctaatgatggcagcataccagctcaaccttttgctccagtggattcgctcccttctcttggatttggttttccaaaaccaccaggcgacatccaagcgcctacctttaatcagcaggctccagcatctatctttgagcgcgttaccccgaacagcttccctagtaatttcatattcggagccgaaagaactagtgatagtgatgcgaaacttccagatagcaacaatttcggcgtggtaaactcgtctgggagtgatagcatgatggacagctcctaggatggttttgccttcaccaaggctatctccagcagcttaatcctcaattcctcatctctcgtttcaaatttcacttccactcttgtacaactatagcctgatatacaaaagaaatgactcagtcgcaaatttagtcaggtttctcgggatgtttttttatttctgagaaggaaacgcatttttgtaatagtatgttgtaatatttgccagtattactaaattgctgctgtgcattttaacaatcatgagtgtgctttttt

SEQ ID NO: 138160 - DNA, 2408 bp, Zea Mays
atggctcccgcggacaagcgggtcttcctgctcacgcaacaacgacgacgacaaagcttgggaggccgtcgtccggtccggtggatcggacgcaacagcagtagtgcagcactgctactgcctccactccagtcccaggctcccatctcagagctctcagcggtggcggccggcgaccggcgagctcctccggcatcggatcccctggagtggagcgttgaaccacgctgcgggcctgcattcaccacctccgtgctttccttcgtcttctccgcctcatctggttgctctggtcagtgatggccggtgacattacatgcggatccttgctgcaaaaattgcagtttatatgggatgaagttggagagagtgaggaggaccgtgacaaggtcctttatcagctggatcaggaatgccttgatgtctacaagaggaaagttgaccaagcaactaactctagggatctcctgatccaggcgctggatgactcaaagatagaacttgctaggcttctttctgctctcggagaaaaagctattgcaagaactcctgagaagacaacagggacaatcaagcagcagctagctgctatagcgccaacacttgagcagttgactaaacagaaaaatgaaagaaaaagagagtttgttaatgtacaatcacaaattgatcaaatatgtggtgaaatcgctggcaccatagaggtgggtgagcaaatgacaacaccccaagtcaatgaggatgacttaacacttgagaggcttgaagattttcggtctcagctcaaggatcttgaaaaagagaagagtaataggttggagaaggttcttgattatgtaggcatagtacatgatctttgtaccgtcttggggatggattttctcagcacagtgattgaagttcatcccagtttagatgactccatcggtgacaactgtaagagcattagtaatgatacattgtcaaaacttgacaatacggtagctacacttaatgaagataagaagttgcggctaagcaagcttcaagaactcgctggtcagctctatgatctttgggatctcatggatgcccccaaggaagaaaggcgcatgtttgatcatgtcacctgcaacagatcagcatctgtggatgaagtcacagcacctggatctcttgctctagatttgattgaacaagctgaggttgaggttcaaaggttagaccagctgaaatacagcaagatgaaagaaattgctttcaagaagcaaaccgagctggaagatatctacgctggtgctcatatagtaatagacacagctgctgctcatgagaaaatattggcgctgattgaggcaggtaacattgaaccgtcagaactaattgcggatatggatacccagatagcaaaagcaaaggaagaagcattgagtagaaaagacatccttgataaagtagaaagatggatgtctgcgtgtgaagaagagagctggcttgaagattataaccgggatgacaacaggtataactctagccgaggtgcccacctgaatctgaagcgtgcagaaaaagctcgtattcttgttaacaagattccagcacttgttgaaaccctggtgtcgaagaccacagcatgggaggagaaccgtggtctgtcctttatgtatgatggtgtacctcttctagctatgttggatgagtatgctatgctcagacaagaaagggaagaagaaaagaaaagaatgcgggaacaaaagcgctacattgagcagcaactgaacaccgatcatgaagggccatttggatcgcgggtgagtccaaaccggcctgccagttcgaagaaggctgttggcgtaaaggtgaacggcagcgtctcaaacggcactcctccaaacagaaggctctcaatcagtggccaacagaacggtggtggccatggcgtcaggtctggagggaaggatagcaagaaagacacggcgaagacagcatctccagggaacaatgcagttgcagctgctcctgtggacgcggtctcccaaatttctgtcaccgatccggttccgagcacaccatgatctttaacctagcatcgtatattagatataagcgactctttttctgatgttctgttgttttgtggtaatatcttataatgccttcgtagagtaattatgatgcctgcccatccttcagctgctttggcttcatggtgtaattcttgttttagttccgctcggccgtgctgtttcgacctgtcagacggtgtagtgtagtcttactgagatgtattgcattaatcagtgtgctggacatatagctgttgaaacgttttttgtgtgcacccgtgtgagagtagcgtacttttaacattatctggaaactggactccgcatatcattctgtaggtacgcttaattgattgcttccac

SEQ ID NO: 138161 - DNA, 630 bp, Zea Mays
atacattacattgattaataacaggcagacacacgccctatcatctactgataatacatgtatactttagttgacgatgtagcatttcttcctgatctccccctcggcaccggtgagcacgtcgacgttggccatcttggtcatggactcggcgaagtcgttgaagaacacgtcgtcaaacttgccggtggcaatacggtggacgtactccctagtggtggcgtcggcgaggagcgcggcgtcggactggaagagcccccggcgcttggcgacgtgtcggtagtagctggtgtcgaaggtcttgtagctgccgggatccatctcggacagaatggccttgtccttgtcgtcgtggtggacgctcttgcagcgcgacctgagccggtcggcgtacgcggtgtcgagggacgggtccgagtcgtaggcgctgctgaagttgtagaggcggtcggcgtaggaggggcagtgcgccgtgcctagcgtgtgggcgccggagaggacggcgaggtccttgacgccgaggcccttggaagagaagatcctggtgagcaggggcacgtctccgtaagctggaggcagatggtcggccgcctccgtcgcgctggacgcacggccgtctctcctccccag

SEQ ID NO: 138162 - DNA, 2274 bp, Zea Mays
tccaaaccctaactctaggtccatcccatcgcagagaaaaccttcggtgcccggctgatggggaggaggaaggagcgacgcctagcggccatggccgcggcgggccgcagggtcaagctcgacctcttcctcgattcctcccccggggaggcatcacataataatggaataggaggtgaaaaccgtgaccaacagactgtggttcccacttctccatcttcttcagataaaaaggagaatcctctagcattgcttgggcaatatagtgatgatgaagtggaagatgaggaagcagcagatcaacccactggtgaagctaaggggagtccaggagatgctagtgctcagttaactagtcagcgtgcggatatagctggtgataacagtgaggcaaaaattgaaccatcggcttctgtcggtgatcaacaagaagcagcacctcaagctggtgacgttaagaactacacccaaagtgttactgaagaaaacactatagctcctgagccaactgtacaagaagagagtgtgaaagcaactgaatctcttcccgattcatctggcatgcagattgttggtgatgtcggtggaaattggaaagcagtaatgcatgaacagagtaatcagtgttattactggaacacagttactggagaaacttcttgggatataccaaatggattagcttcaggagttgcaactgcatttgttccttctgatgtggactattcaaatgaagctcaaacccatgtccttccccacagcacactggaagcatatccaagtgatatgtctgttgggaacggcacaacttatcctaatttgggaatggcatgtggaagtgcacatgttactcaagatgcttatgcttatgctgctcctatcgccagtaatgagcctttggacattgatcccttgtatcttgcaaaatatggtgatggtttgctgcaaagattggacctgctggaaaggctctgtggctcgaacaaaggtcttgaattgataagaagagaaattgagatacggatgtcggacttaaatgcactttcatcttatggatcttctttgctcccattgtggttgcatgctgaggtgcacctgaagcaactagactcttctatttccaagctggaaatgaactatcatgcagattcagaacctaggaattcaaagacagaggttgctgaacacagggcacctgatgatgctgacttgataacaccctccaatggcgaggctttgaagtatgaagtttgtgctgggattactatcgatgcaaatatgaagattggtaagccagcttcaacgtctcagaattcacaaggtagggataatgcagctgttcctccaaaaattgaatctgacaatgatgaagatatggatgtggaaatggaagttgatgaagataatgtcgaagagcaggcacagtgcagttctgtacctgaaaaggagcatcctccttcagaacagttgagttcatctaatttgccatcatttgaagatcctacacctcctgaggataattctgttcctccacctccgccagaagaggaatggattccacctccaccacctgaacacgaacacgaaccagctcctccagcttccccagaagagccggctgcatcatatgttcaggtggatacaattcctcagccatatatagctcaagaaaatgttggctatacaatttcaggaatggagtattatagtactgaaggtacaaatgccaattactatatgcaagtgagtgagcctcatgtccttcaagcacaacattcttattatgcaccagtatctgggagtggcatatctgtttctgttgatggcacatctattgccccagaatcttattatacctatccttcagtcactgtggctgcaagcgctgtagcagctgaacattctggatactacgcttcatcagtctctgccatttatagcagtgcagcagatatcaaaacaagctcagcttctcttgtttctgcaattagcaattcggatctaaaaaatcatgataatgttatatccaatgatgcaagtattgtgcctttcacccaagctgtagtagcaacatcagctgcaggaacgacatctgttcctgaaagttctacacagccttctagcagtactacaaaccagatcaaagttattcgcaacaagaagcgggttgttggtattacatcgtctctgaggtctaataagaaggtttcaagtttggtagataaggttgctctctacaacgaatctctgtattctgttattattgcatattag

SEQ ID NO: 138163 - DNA, 1833 bp, Zea Mays
cttctccgctctcctgtgttcttttccgacgaagcagcagctgcaacgactccttaccaatcaaaccaatcccccgtcatcttcaagctccggggatctcagccgccaaatccgggccgtgctcgcgcttgggcatctgcggcctacgatggggagcgagtcggagcccgccaagggcctgttgccctacctgcagcgcgccgatgagctgcagaagcacgaacccctcgtggcgtactactgccggctctacgcgatggagaaggggctgaggataccccagaaggagcgcaccaagaccacgaactccatcctcatctccctcatgaaccagctcgagaaggacaagaaatcgttgactttggggcccgacgacaatcttcatttggagggatttgcattaaacgtctttgttaaagcagataaacaggaccgtgctggacgagctgacataaacactgctaaaactttctatgctgcaagtatattcttcgagattcttaaccagtttggcgagcttcaacctgatattgagcaaaaacagaaatatgccatctggaaagctgctgaaataagaaaagctctcaaagaaggccggaagcctgaagctggaccgcctggtggggataaagatgaagcacctgatatggggcaaagtccttccttcagcagtgtacaccagggcagtgaagcatcacctcgacctgtcaacatggattttagtaggcgggatagcttttctgctgtgcagccaggaaataacgtccctcaccaaagtacagagttcaatgatcatccctctacccagttaccctattcaccgccaccaccctcacagtcccagcatccttctccatcacaatcttattcctctccctcgtatcaggcaacaacagattacccttcttctgattttcacaaaccatcccccaattattcaactcccggctacacaagcacagatttccctaccaatgaggtccacaaaccaccttccaattattccccacctccttacacaaggacagatcgcccttccaatgacggctacaatcctcacagcaatggtaaaccagatgtttcggcttaccctcaggcatatcaaccctcaccctacacatttgaccctcagcacaactctcaaaactactactccacggaagccccagctgttccatacaactaccctaatttccagtcatatcctagtttccaggacaacacgtcagcttctgttctgacgcatcagtcttcattctatcctgaaagtgatgatcccgcagctacatcacacactcctgcctcaaattcttctgtcccaacgcactaccacccaaccgctgactgttcacctcaagtcactcctccagctgcgccaccagctagccagtatagatatgatagcagttaccagcctgaagttgagaagattgctgaggcccacaaggcagccagatttgcggttggtgctcttgcgttcgatgacgtatctgttgctgtggatcacctgaaacgtgcactggatcttctgacgaacccatctgctgaaccccattagctctttgcaccaccgagctcttgtcagaagcatcatctgtacaaatacaagattggtataccaccatggatatattgccaggtcgcgtacatatgagaggggttaccacacaaatctaggagataataagcgagccgtgtgggcttttgaagtcacacttaaggaaaccttattgtgcaaaattcaattatcttattcagagttctgttctacgtaatccattgtattcatttgaatattcttgaggtctggtatggtattttgggtatggacgg

SEQ ID NO: 138164 - DNA, 1857 bp, Zea Mays
cttctccgctctcctgtgttcttttccgacgaagcagcagctgcaacgactccttaccaatcaaaccaatcccccgtcatcttcaagctccggggatctcagccgccaaatccgggccgtgctcgcgcttgggcatctgcggcctacgatggggagcgagtcggagcccgccaagggcctgttgccctacctgcagcgcgccgatgagctgcagaagcacgaacccctcgtggcgtactactgccggctctacgcgatggagaaggggctgaggataccccagaaggagcgcaccaagaccacgaactccatcctcatctccctcatgaaccagctcgagaaggacaagaaatcgttgactttggggcccgacgacaatcttcatttggagggatttgcattaaacgtctttgttaaagcagataaacaggaccgtgctggacgagctgacataaacactgctaaaactttctatgctgcaagtatattcttcgagattcttaaccagtttggcgagcttcaacctgatattgagcaaaaacagaaatatgccatctggaaagctgctgaaataagaaaagctctcaaagaaggccggaagcctgaagctggaccgcctggtggggataaagatgaagcacctgtcagtaccaccaccatttctcaagatatggggcaaagtccttccttcagcagtgtacaccagggcagtgaagcatcacctcgacctgtcaacatggattttagtaggcgggatagcttttctgctgtgcagccaggaaataacgtccctcaccaaagtacagagttcaatgatcatccctctacccagttaccctattcaccgccaccaccctcacagtcccagcatccttctccatcacaatcttattcctctccctcgtatcaggcaacaacagattacccttcttctgattttcacaaaccatcccccaattattcaactcccggctacacaagcacagatttccctaccaatgaggtccacaaaccaccttccaattattccccacctccttacacaaggacagatcgcccttccaatgacggctacaatcctcacagcaatggtaaaccagatgtttcggcttaccctcaggcatatcaaccctcaccctacacatttgaccctcagcacaactctcaaaactactactccacggaagccccagctgttccatacaactaccctaatttccagtcatatcctagtttccaggacaacacgtcagcttctgttctgacgcatcagtcttcattctatcctgaaagtgatgatcccgcagctacatcacacactcctgcctcaaattcttctgtcccaacgcactaccacccaaccgctgactgttcacctcaagtcactcctccagctgcgccaccagctagccagtatagatatgatagcagttaccagcctgaagttgagaagattgctgaggcccacaaggcagccagatttgcggttggtgctcttgcgttcgatgacgtatctgttgctgtggatcacctgaaacgtgcactggatcttctgacgaacccatctgctgaaccccattagctctttgcaccaccgagctcttgtcagaagcatcatctgtacaaatacaagattggtataccaccatggatatattgccaggtcgcgtacatatgagaggggttaccacacaaatctaggagataataagcgagccgtgtgggcttttgaagtcacacttaaggaaaccttattgtgcaaaattcaattatcttattcagagttctgttctacgtaatccattgtattcatttgaatattcttgaggtctggtatggtattttgggtatggacgg

SEQ ID NO: 138165 - DNA, 1952 bp, Zea Mays
cttctccgctctcctgtgttcttttccgacgaagcagcagctgcaacgactccttaccaatcaaaccaatcccccgtcatcttcaagctccggggatctcagccgccaaatccgggccgtgctcgcgcttgggcatctgcggcctacgatggggagcgagtcggagcccgccaagggcctgttgccctacctgcagcgcgccgatgagctgcagaagcacgaacccctcgtggcgtactactgtgggagacgcttctctctcctcgtcgggttcgttcctaatcgatcctattggttagggttttgattcgatttggatttggtcgggtttgggcaggccggctctacgcgatggagaaggggctgaggataccccagaaggagcgcaccaagaccacgaactccatcctcatctccctcatgaaccagctcgagaaggacaagaaatcgttgactttggggcccgacgacaatcttcatttggagggatttgcattaaacgtctttgttaaagcagataaacaggaccgtgctggacgagctgacataaacactgctaaaactttctatgctgcaagtatattcttcgagattcttaaccagtttggcgagcttcaacctgatattgagcaaaaacagaaatatgccatctggaaagctgctgaaataagaaaagctctcaaagaaggccggaagcctgaagctggaccgcctggtggggataaagatgaagcacctgtcagtaccaccaccatttctcaagatatggggcaaagtccttccttcagcagtgtacaccagggcagtgaagcatcacctcgacctgtcaacatggattttagtaggcgggatagcttttctgctgtgcagccaggaaataacgtccctcaccaaagtacagagttcaatgatcatccctctacccagttaccctattcaccgccaccaccctcacagtcccagcatccttctccatcacaatcttattcctctccctcgtatcaggcaacaacagattacccttcttctgattttcacaaaccatcccccaattattcaactcccggctacacaagcacagatttccctaccaatgaggtccacaaaccaccttccaattattccccacctccttacacaaggacagatcgcccttccaatgacggctacaatcctcacagcaatggtaaaccagatgtttcggcttaccctcaggcatatcaaccctcaccctacacatttgaccctcagcacaactctcaaaactactactccacggaagccccagctgttccatacaactaccctaatttccagtcatatcctagtttccaggacaacacgtcagcttctgttctgacgcatcagtcttcattctatcctgaaagtgatgatcccgcagctacatcacacactcctgcctcaaattcttctgtcccaacgcactaccacccaaccgctgactgttcacctcaagtcactcctccagctgcgccaccagctagccagtatagatatgatagcagttaccagcctgaagttgagaagattgctgaggcccacaaggcagccagatttgcggttggtgctcttgcgttcgatgacgtatctgttgctgtggatcacctgaaacgtgcactggatcttctgacgaacccatctgctgaaccccattagctctttgcaccaccgagctcttgtcagaagcatcatctgtacaaatacaagattggtataccaccatggatatattgccaggtcgcgtacatatgagaggggttaccacacaaatctaggagataataagcgagccgtgtgggcttttgaagtcacacttaaggaaaccttattgtgcaaaattcaattatcttattcagagttctgttctacgtaatccattgtattcatttgaatattcttgaggtctggtatggtattttgggtatggacgg

SEQ ID NO: 138166 - DNA, 812 bp, Zea Mays
atccctaatcccagcgcagcacaaacaaacaccgcgccgccgccacagctttgccctacagaatccttttactccgaagattctcaagacgcccctgatggctccccgcgtcgcctccgctctgctcttcgtcgtggccgtcctcgtggcctccgcggcggcgcaggagtccatggcgcccgcgtctgctccggcgccgggaccggtcgctggcgcggcctccgctccggcctccgctgtggccgtggtgtcgtccgcactgctgtccctccttatgacggccctgatgcagtagaagtatcatactagatttgagcgggaatttggttcagtgttgctattcctcattctttttgtatcatatatgtctgcgacatttatatatatgaataaagttggatgatctgctgcatacctttttttatcgatttcattttctaaggttgttacgattcagaaatttttactctcctccccttcaacagccaccacaaagttaaccacaacatatggccacgtttgtttaactaatttcaccttctgtccatgccgactttcacttttcagtcagtttttttataaaataactgatgaaatatatccaaaatcaatatgaatataaaatcgatcgagttattgtggtagtagaaatctattactttgtagatactgaaccctataaatctcttaatctttctctttatgatacttatattctctgtatatccagattaatagacccatcagaaaataaactgaaacaaacagacccgctagtcagaaaaaagaaaaaaaactgaaacaaactgact

SEQ ID NO: 138167 - DNA, 359 bp, Zea Mays
aagagcagaacaccactaaaccgtctaaacacttatgtaaggttacccatttttttggaagcatatcaaagttcgtgttacaaaatccagagtctgatgggtcagcagactccacaaatgacatgactacataagacgaagcctttgaagcaaatcatcagcattcagatccagaagatcaatcaactagtcaggcatttctgtcgctgaaacctctccccacgccttctattgctgaagaagggtaatgagcaccaacaaatccaaatactcacatgccatcatacttttcctactcttgatacattaatatagagaactttcttatttcatgcaaatcattaacttgcaaatagaaa

SEQ ID NO: 138168 - DNA, 1453 bp, Zea Mays
gcctaaaatcgtatggcccaaccccaacaggcagtgcgcaatataagatcaggcagagtatcaagctacattcctctaccagaaaacatggatgaaaacgcttcacgtgcattaaaacgaagcagggttgaagccttgggcgtttctcaatcatgcattcattcatgatagagtgcatttagtttgttctcggttctgtactggaaaaactttcttcagagtacaaaaagtcaatgaaatgttaatccatcattccagttgtgaattttctgtaacaaataaggatcagaccgcattattgcctccttccccgacctttcttcgcttgctgttgctctgcctgttccttccctgaaacttcactgatatcaactgcacgcccacgtgtcatgagagcaaaaaagatgttgttgagcttctccatcttctttgcgtcttgagcttgatctgtcttgaacttcaagcactgcagacaataacttcagtcagaaaagaaggggtgccatttggatcaaacttcatagcatgagcattacactagaatattatactagctagcaatcgatgtgcccaaacaagtagttttgatgttctatatacttttttatcaacatagacttacaggggtgtttgtttgggattataatatgtctaaattatataatccaacaaattttaaactaacacttacttcaaaatttattggattatataatctggacagactataatctcaaacaaaccccctctacataagatgcttgcccctgtaacaaataaacaaagaaacaacaaacatagattttgatattccagcttttctagtaaaacaataagagatgcatatttactagtgctgcaaatataaaacagcataagacagaagctaaatgaaacaaacatgacagcattgaaggctgcacaggttatctcaattgacaacggcattgtaggccatgttttagctgcaatatttacttagagcatgtgaatggaagatataacaggaattacagggatagcatttccaaaaaaaaaggagctccagaaatttatttacaaaaagaaatattctaagtacaaaatgaacccacgtcttaatgaatgacaatggtatagccagtttagcgatgcaatgctatcaaatacatcatacgggaatttcctgcatttcctgctaaatgatatgaccacacgccaaagaacagatagcatcatgcttaatgatctttctgatcttattttcaagaacagacatccaaattcatttgtttataaagagacaaatgttagacatgtcatctgaataatgagtaatactctacacagctaaaggcagatagcaagcaaccactccaccttgcagcactactgcaacatgctgcattaaaagtggtttactaaacaagctatgtgactaaaacagtagaagggaagttccaaacacaataaa

SEQ ID NO: 138169 - DNA, 473 bp, Zea Mays
gcctaaaatcgtatggcccaaccccaacaggcagtgcgcaatataagatcaggcagagtatcaagctacattcctctaccagaaaacatggatgaaaacgcttcacgtgcattaaaacgaagcagggttgaagccttgggcgtttctcaatcatgcattcattcatgatagagtgcatttagtttgttctcggttctgtactggaaaaactttcttcagagtacaaaaagtcaatgaaatgttaatccatcattccagttgtgaattttctgtaacaaataaggatcagaccgcattattgcctccttccccgacctttcttcgcttgctgttgctctgcctgttccttccctgaaacttcactgatatcaactgcacgcccacgtgtcatgagagcaaaaaagatgttgttgagcttctccatcttctttgcgtcttgagcttgatctgtcttgaacttcaagcactgcaga

SEQ ID NO: 138170 - DNA, 1796 bp, Zea Mays
aacttctggcctttagacattttctcctccgtagattgcagaagtttttttttcgcttatcagtatttcggtcgagaaattcgcgaagggattaggggaattcgaggcagggatttgcaagaatcagggcagtttgatgttgcttcctgtgcgcgtcgctaatttctctgttttattcgcgtgatttttagggttttattttgagtttttcgttttctccaccgtatttcgttggcttcgttccgtgctactgtaaattcagaatcttgtcagagaaaagagaaggaaaaggaaaaacaaacaaaatagtaaggggaatttggtacctgggtgtttgctgttccttgagttggtgaatctttggagtgcctggctccgacgagatcgaaaggagggacctttccttggttcctctgctggagctgtgattgcagaggtgaaccatgtcagcgatggcggcggcgggtgaagcggagtatggtgaatgcgtgcagaaggggtccctgcagcagcaccaggcgcctcaacccagccccggcgctctattctacacccatgatggcgtcgccgtctacaggaatccggtcatgccggcgttctaccaacagcccgcgggcagcaatgtcgtcgtgccggcggctccagggccagctcattcccctgccagctctgagcccttcaagcgcaagcgcgggcgcccccgcaagtacgcccccgcagacggcgccgtgccgctggctatcgtgcccccatcgcagccacccactgctcgtgccccagctacctctgaggcctcacccacggttcctcctggcttctctccaagtccgcagagtggtggcgtggtgagtcggcaggcctcgccggcgccggcgccggcgtcaggtgctcccgatgtcaagaagcggggccggccgtcgggcccctccagcaagaagcagcagccgcaggcggcagcgcctggaccaggctggactggattgaagcctcatattttcacagttcaagctggagaggatgtagcatcaagagccatgtcattttctgggaatggatgggctgtttgtatcctgacagccaatggcactgtatctaatgtgaccctgcgtcaaggagagtcttctggtggaacagtaacttatgagggccgttttgagattctctctttggctgggtcatatcttctgtctgaaagtactggcatgagcagtcgaacgggtggacttagtgtttctcttgctagtcctgatgggcatgttttaggtggtgctgtcgcaggacctctaaccgcagcttcgccagttcaggtggtcattgggagctttctggctgatacaaaaatggagcttgaccctggatcagcacctgagaaacatgttttcagcaggtttcaaactaccagcagtccatctaggggtaccgaatcctcgggtgggcatgcaagcccaccaaacaccacaggctccttcagcaccagcacacagccaggcttcccaagctttcccacatggaaatgagtttacctgctatggtggagtgggaccgtggcctctggggatgaggagggaggaatttggaactgacagtcctcgagcgtcgtcgctgtagtttcatgagatgttatgagagtcaatcctatttaggtacttctaactggttacaatgaagttccggtttgctgcttgtcttgacattttgcatcattgaggcacttcaaactccaaagtggtggtaacatacagtatattagatgattccccctatcaaatgccttttgtcattctcctgctcttata

SEQ ID NO: 138171 - DNA, 1136 bp, Zea Mays
aacttctggcctttagacattttctcctccgtagattgcagaagtttttttttcgcttatcagtatttcggtcgagaaattcgcgaagggattaggggaattcgaggcagggatttgcaagaatcagggcagtttgatgttgcttcctgtgcgcgtcgctaatttctctgttttattcgcgtgatttttagggttttattttgagtttttcgttttctccaccgtatttcgttggcttcgttccgtgctactgtaaattcagaatcttgtcagagaaaagagaaggaaaaggaaaaacaaacaaaatagtaaggggaatttggtacctgggtgtttgctgttccttgagttggtgaatctttggagtgcctggctccgacgagatcgaaaggagggacctttccttggttcctctgctggagctgtgattgcagaggtgaaccatgtcagcgatggcggcggcgggtgaagcggagtatggtgaatgcgtgcagaaggggtccctgcagcagcaccaggcgcctcaacccagccccggcgctctattctacacccatgatggcgtcgccgtctacaggaatccggtcatgccggcgttctaccaacagcccgcgggcagcaatgtcgtcgtgccggcggctccagggccagctcattcccctgccagctctgagcccttcaagcgcaagcgcgggcgcccccgcaagtacgcccccgcagacggcgccgtgccgctggctatcgtgcccccatcgcagccacccactgctcgtgccccagctacctctgaggcctcacccacggttcctcctggcttctctccaagtccgcagagtggtggcgtggtgagtcggcaggcctcgccggcgccggcgccggcgtcaggtgctcccgatgtcaagaagcggggccggccgtcgggcccctccagcaagaagcagcagccgcaggcggcagcgcctggtaatgttctgcctgccttttcagctagagcgtagaagtagcaaaacgtgcaaggctgcattgatgtcttcgatcgtatttctcttcagagcttcagatacacgtatatatacttgtagtacttcggaatgagcaaaatgagcaccagaaagagatactaattcatttattta

SEQ ID NO: 138172 - DNA, 684 bp, Zea Mays
aagcacgcaaatcagctgccccagatagatctccctgactccctcctccatgatgctcgcaactcatcatagcatcactcaccgcctccacagcatcccgccaccgggttctggccaccgcaggagactccactccacagcacgcggcgccgtgcggcgagacgatgccaccacggagtcagcaggggagggcacatcgtcatcggaaagcctcagggtgagtaagcctaccgcgacgacggctccggcggggttttcgttgcccaaggactaccgccatactctgttcagctcggagtgcctggaggtgctgggcctggtggacctcgagtcactgcggaagcggccgaggctcaccattggggtgacggtgaaagcgtccgtggtgctcccggtgctcgtggtcctggcggtcctttacctctcggacgtgaccaagggtgttgtcgactggacgcatcatcacctggagaacgacgacgacgtgggggactagcttagttaaaggagtccagctctccagtgttgtgatgcaggcccgcatatatgcagcaggctcaacttgctggtgtaaacaattagcatcaggcttcagctcgtttcactttctattctttctcatttctaatcaagtgtacataaactgacttttaatggtgcgttcatgtaaagtctgcttttatc

SEQ ID NO: 138173 - DNA, 408 bp, Zea Mays
atctgttcgatctatggcttctcggcgctctcccgggtaattttctcgtctcttcattcgaactcatagcagtagcacacaagtttttcttgattagtggtatactcagatcagtggtatatttagaacaagtttttcctgattagtgttatactcagatcagcgcttaaaagtataacagacttaaatcacattgcagagaattatattcagatcagcacttaaaagtatcacagacttaaatcacattgcagagagttaaaccctaatgtctctttatttttatttttgtatgcttgattatttattctcttggtgtaattttcttttttgtttgccttcatctgtagtgagacatgtggcctgcagtgagttatattcactgcatcactagatttttacatgcag

SEQ ID NO: 138174 - DNA, 615 bp, Zea Mays
agtatattacatcaaatggtttattccttaatgaaaaatcgattctaagatttaatttatagtttaagctacgtgaaactgtgtcactttccaaaagcagtccctaggccttgtttgtttgggtactctagtattcaccccaatctacatgtattgaagtgtattggggtgtaaattagttagtatttcttggcattgatattatactaacatgagcaaatcgattaagaaaaatttctagctcaatatggtaaccgtttggatggtccaggttgcatggctgctctggatgcagagcactacctgcaggaggttggagcacaggaagggaagaccgattgactatgtctgggccaagctgctcttgggccaaggaaaacttctccgaaagccgctctctagtggtgtaaacagcacattattatttggttttaggcctcaaattacgttacattggaaattgatttatatgagcgtgcgcaagcttgtatacattattcgcattgtttattactcttagagtcttagtcattaatcacactttgctaagttatatgcttcccttttggagaaaatatctccagaaatgcgcgtatacacccatttgaaatgtgc

SEQ ID NO: 138175 - DNA, 1517 bp, Zea Mays
cacgcacgccagcccgctccagcctccaacccattcttcggcggttcggcccggcctgcaccctgcagccaccaagcaaacccagtgctctgctttctgcattcccccccgccgccactccgtcgggcttgatgagcctctgctccaagctcttcgcgttgctccgcaagtcccgcgccctcgccaccagcaccgccgccgcagccgccgcgacaacctccgcgacggcgtcggccaacgggatggaggaggctgtcgccgcggcgggcccgctgcgcacgcgcgtctgcatcatcggcagcggcccagccgcgcacacggcggccgtctacgccgcgcgcgccgagctcaagcccgtcctcttcgagggctggctcgccaacgacatcgccgcgggtggacagctcaccaccaccaccgacgtcgagaacttcccgggcttccccgacggcatcctcggcgccgacctcatggatcgctgccgcgcgcagtcgctcaggttcgggaccaagatcctcaccgagaccgtcaccaccgtggacttctccgcccgccccttccgtgtcgcctccgacgacaccgttgtgcacgccgactccgtcgtcgtcgccacgggcgccgtcgcgcgcaggctgcacttcgccggctccgacgccttctggaaccggggcatctccgcctgcgccgtctgcgacggggctgcgcctatcttccggaacaagcccatcgccgtcgtcggaggcggggactccgccatggaggaggctaacttcctcaccaagtacggctcgcaagtttacatcatccaccgccgcagcgacttccgggcgtccaagatcatgcaggcgcgcacgctctccaaccccaagatcaaggtcgtctggaactccgaggtcgtcgaggcctacggcggtgcggatggcggcccgctagccggcgtcaaggtcaaggacgtcgtcaccggcgaggtctctgatctccaggtggccgggctcttctttgccatcggtcacgagccggcgacaaaatttcttggagggcagctcgagctcgactctgatgggtatgtggtgaccaagcccggttccacgcacaccagtgtgcagggggtctttgcagctggggatgtccaggacaagaagtaccgccaggccattactgcagctggatcaggttgcatggctgctctggatgcagagcactacctgcaggaggttggagcacaggaagggaagaccgattgactatgtctgggccaagctgctcttgggccaaggaaaacttctccgaaagccgctctctagtggtgtaaacagcacattattatttggttttaggcctcaaattacgttacattggaaattgatttatatgagcgtgcgcaagcttgtatacattattcgcattgtttattactcttagagtcttagtcattaatcacactttgctaagttatatgcttcccttttggagaaaatatctccagaaatgcgcgtatacacccatttgaaatgtgc

SEQ ID NO: 138176 - DNA, 2065 bp, Zea Mays
gtcgatgaaattccggctcacaaagccctagcgagtagcgacctcaattcctcccgccccccccccccccccgggatgggcgtcggcccctacgctcttcgtctctccccgccgccgcggctcgatgccatgctcttcccacagttgcggcctcacctacgccgccgcgtctccgctcgggtagctgcctctggcaccacctggtctcccgccgccaatgactccgaagacagcttcggcggctggtggtttcccgagtacgagaagcatatgaaacaggggaggaggaggatagggtttcagagcgctgtcgtggttgggttgggagcgtctgcggcgatcgcgttggctgggctggcgtggcgcttcccatcctccaggaagcgtatacaacaactcattgttgcaccattacactatgttcaagataaattgtcaacaatggagtcaacagagataatcaaggaggatgcaagtgagagggaatctgatgaaatcgaagtttctagtgcaacacatgataagaaggctgaagcaataactgacgattcaaggcaaaattacaggacagcaatcgccagccattttctattcagagttcatacagatcctgtacatgaggaggctttctctatattgaagaagcttcagataattgagaaagatgttagctccagtgatttttgtacacggagggaatttgcaagatggtttgttaagttaagctcaaagtttgagaggaaaaggatgtgcaggattgttcctaataaattaacttctgacacagtccaatgtgcctttgatgatgtaaatattgacgacccagatttcctgtatatccaatctttaggagaatctggtatcgtatccagcaagttatcaaactccttggaaatgttgacaagtggctctccttgttccaagggaaataccttgttcctacctgatagttacctatctcgattcgatcttgtcaactggaaagtgcttgttgagcatccacgcgcattgagaatagacgaaaagataccgagtcaaaatgtttgcattttggatctgcgagcttgcccagatgtgtctccatccatgctcatagagctaatggctggtgaaaacaacatcatcagcagagtttttggaaatactagacgccttcaaccgggcaaacctgtaactaaagcgcaagcagctgctgcactgactagtggccgaatgaaggaagcagttcatgaagaattgaataaacttgaagcagaaaaccaagcccatctttctcttatagctgaaataatggaagagttaattagtaggggagatatacaacaacaatgggagcaaaagatgaaaaaggagcaagaacgggctcttgaagttgacaataatcttcaacatgtattgcatgagcatgcaaatgagaggacagacagagaagaggaactagcagacttgttgaaagaaagagcagctctagaatgccagaatcaggaactcataaatttaaggtcagaaattgacggcatgtatgatagattggcaactgagaacgaagaggtcatggctgatcagcagactttggaaaacctgatgtctgacatgaccagcaagcatcaagctgtcaatgaagctaaatcatatcttgaagctgagaaggaagctcttactatgttaaggacttgggtggaagatgaagcaggacgtgtccatgaacgagctgagacacttgagaaggctttgagaagatggcgaatcccagaagattgatccctccaaactaactgtgctttgcataggaaaagtcttgttcaaagtttttggagctacttggttccagagcatctgccatcagatctgaaaaattctcaatggaatggaatggtcgtgccataatgttctttgagatggttcattatcctttggtgcttcttggcatcttgttgccatcttaggggccgtctgtatcccttcattttggagaaattataatctatttaataaagtaggctatttaactttaaatttaacattccataactttccaaagttcaaatataagcctatcacaaaa

SEQ ID NO: 138177 - DNA, 809 bp, Zea Mays
gattgctggttccattaactgagttgtgctggtctaatttgcttattggttcagatgatgatgtgcaatacctgaaagaaaggaagatgttgctgactgtgctcaaacagttttcctttttgccttttcttgtgtttcagtgcgcccgaagtctttgccagggattaacttcatcaaagtgttgacagaacacgaggatgcattcgacgtgctgtactgcatagcgttcgagatgatggacgcccagtggctagcaatgcgagcctcgtacatgcagttcaaagaggtgctgaaggccacaaggcagcagcacgagagggagctctccctggaggatctcaatagcatccatgacctccctgcctgcaaccttttgtacaaatagtactaatggtagttagattactgtgatgtagtcaaaggaaaattgtatgatgatcaggtcgcatcgtaaccagaatcatcaatcagcctgtaaaaagagaatatgtgaaaattgtattaaactgaattgactactgttgaggtcaaaaggttgtgttttgcggtcatgtgaaggaggaggcactttttgactggatccgcccgggagcatacataggacaactgctagcttccgatccaatgcaatgaatgatcactaagcagacccttttgaggctggtggattgtgtagatttaatatgcaaaaaaagataagagacaggtattgtgtacgtctggtgatgcatgtgcttgctttgttcccttgttctagatcctcaatagatgattattattattattatcattattagtagtagaaaaaa

SEQ ID NO: 138178 - DNA, 318 bp, Zea Mays
gataatggttcagagatcgaggaagtccctcgtgagaaagtgaatttctgagaagagcttttgagcagcacatcatttactcgccaattagcggatcagatgactttagcaaaggcgtatgtcatccttgcaaaagagcatgataatcttcagctttcatgggagcttagttcgcagataaggaattgtcaaagattgctctctgaaggggcagttagtgggagagcaatcactaaagatgaagcccatcctataataaggcggctagcactgttaatatacaaggctcaggactctcactatgatatcagctcaaca

SEQ ID NO: 138179 - DNA, 259 bp, Zea Mays
atggactgaaacaaccaattgccaaattctttgaacaagaaggatcaagaggctatgctgggaaaagattgtatttgtctgtaacaaatgcaaccatggtgaaaggtctttttgttgtgcaacgtcttgcacataactgtattcaatgcaaactattttcctccgctacactggttgctgctagctattaaacggttttgtgggagattccatctttgaagcagtaattatgctaaatagttcatcaacaattatttac

SEQ ID NO: 138180 - DNA, 480 bp, Zea Mays
atggcgatgcgggacctactggagatgtctctgctccatgcctccattacttcatgccgtcctccctccttccacgctccttcccgcaagagcagcttccctcctccctttcccccaaacgctcccctcctcttctctcgcgctgaactcgacctggcgtccgactccttcacggccccgtcgcagggtgtcgtcatgggtgatggtgtcgtcgtccctgccacagtccgtcggggacttaccggagatgtgctcatggagcctgccatatgcgctttcatgcatggttcttatccattaagtggtaaacactaccatgtcaagaagcttatcaaggagaaaaagaatgatgctagaatttctgaatatatcgatataaataaagagcttcaagaggtttatggcacgatgattcatctcagagtttctgattcttatgttttgtcacaagggcaagacggcaagtcattttgctgctaa

SEQ ID NO: 138181 - DNA, 341 bp, Zea Mays
caagtcgacaacaaagaatgtcctcaagggactgaaaacagaacagaggcattttaagacgcatcatcatgctagtaacaaggagaacccaacaggccaaccaaacaagaataacattgatcggaacagggtccagctatgttgtagttttctacattatacttgcacaaagtattcaggccacaaaggaatgctaaaaataccaaaaaccaataaatcaaggaccaagcttattgatagtgctttcttaaggatgttgagtgacaacaatgcaacacaagaatatgtaatggccccaggacgtgagctctctctcctcaccaaagaagaacaggtacgca

SEQ ID NO: 138182 - DNA, 2905 bp, Zea Mays
atctcctggtgcttctctcaagccaccgacgctcaggctctctacatcctttagcaggcgccaactccctggagctcgccttcctgctggccgcccccagcaccgacgccccttctttttccccatctccttccttggcgcgctcgcccaggtcacgcgtgtccctgctcgcccaggccgcgacctcgccaaaccgcgcagtccctgctctccttccccagccgcgctcagcccagcccttcctccttcgcccttgtcgagctccctcagctcgcccccaaccacaactgcacgccaacctcgccctaggccatggagcagcaacaaccatggaaccctttcgtgtcgcgccctcgatgtgctcgacgaaagttggttcgatgaacgggttggctaatcgcgatgtgtggaggagacaaatttctaggatctgagggtaagagaagccaagacctagagcgatgatcactaggtgttcggtgaaaaggatgaaccggtgatcgtggttggtcttgcaaaatccgagttctattttatgttggtaaggtgttgtgcggtgtgatctccaattccatgttgctgatgtcttgctccatcatgaccttagggaaggatgttttcctctaaattatcgtaataattatgctgggtttatgtgttgttttagcatacattgtgaaagcatttcttgctcagcaggacaaggaggggctttcatgaaataacttttgaccacttatgttccttttccaaatataaatcagttagaagtgggtcttggcaataattagctcatgactatttgttgttggccctttggctgcaatttctgaatagtttgatgtgaagggaccttgctgagctttgtgtacttgatatttgaatagtttggagaaaggattaaaatctaccctcactaattttttagatgccccttaaaactgattttgaggagttattttctagggagctcttggagatgctcttattcctattggtacggagtaatatgtatattgtgcaattaaaatggcctttatatggtattgaacatttcccacaataatctgtaatctttccatgaattgttttcctatatgtggtattattaattggcagtgctcctagacactgcacatccatttcctgtgaaattactaaaagattgccgggaagtggcaatgggactgttactgatgaaattttatgagaattattgatttcgaagtaacttctttctggacttttttgccagccaacattgttttccatagaaaatggtttttgaatattcatggcaaaattttatggtttacaaaattccttcatttcatctacagaaaatcgggcaggctctactacctttacctggcgatgctaaaagccaaccagcactagcaacagcgactcaatttgctgccacaaacatctgcaccagcagaggccgctaccgcagaagccaccacggaatcagatcctgcaacgtccactcctctttcaccttatacaaattacccagattgtggtgcccgacgaggtggggcgtcgtttgagagggccgatgaggcgtcggagaagaagcagtcgaacccgatgcgggagatgaaggtccagaagctcgtgctcaacatcttcgttggcgagagcggtgatcgcctcacccgcgccgccaaggtactggagcagctgagcggccagtcaccggtattctccaaggcaaggtacactgtgagatcgcatgctatgtgacggtgcggggtgagaaggcaatgcagctgctggagagtggcttgaaggtgaaggagaacgagctgctgaggaggaacttcagtgacactggttgctttggatttggtatccaagagcacattgatcttggcatcaatgacacgaccttgacagtcaagatgctctttcaggttattttctcctgaaaccacttcttttgccatctcctaatgttatggtcccagttacatctccattcattgcaggagatggtcccagttactttacatggttctgttggacacaatgaagccatccagagatgctattaaaaatcctgctagtcattatggctttaaactgtaccatgtctgttctattttcagctaggcagagcatgttctatttacagcaggccagcagacaccaggcagtaaggtgatgtatgaatcaattatcaggtgacaaaatggttatgtttaatcatgcatgttttcttcctgactctctatgtttctttgaggcattcaactacttgtagtatcagtgcatcactgatgtatatatgtgttgatgttcatcatccaagatcaaatacatcctgctaggtcattacttgctaatgtgcatctgagtttgctgttgccaggatggaaatgttttttggcagctttctcagtgaatcagtatcaccgcagaacctttttggacacccagatgtcgagagatgcccatttctgaggaatatcaatggagctacaaccttttccctctcttctgctttgccagtagctgctcaaggaggcaagggtccaatttttgaggaagggtcaggctttgagtcagcattcaagcttttccatggccgagatggaatagttcccctttcagaaagatcatatgtatctgatgaaaaccacaatgagagcattgacgtcaagttatatacttagttaggctcaatttagagtacacttatgtagagtacacttatttatattgaaccgtcggagttcctacatatgtatcaagttatatacttagttaggctcaatgttagcatcaacagttgatgagcaactttaaatttagagtacacttatgaatgagttatttgacaatgcttatttatgagatattgaatgttatttatctatattatattaattatagtgtt

SEQ ID NO: 138183 - DNA, 2830 bp, Zea Mays
atctcctggtgcttctctcaagccaccgacgctcaggctctctacatcctttagcaggcgccaactccctggagctcgccttcctgctggccgcccccagcaccgacgccccttctttttccccatctccttccttggcgcgctcgcccaggtcacgcgtgtccctgctcgcccaggccgcgacctcgccaaaccgcgcagtccctgctctccttccccagccgcgctcagcccagcccttcctccttcgcccttgtcgagctccctcagctcgcccccaaccacaactgcacgccaacctcgccctaggccatggagcagcaacaaccatggaaccctttcgtgtcgcgccctcgatgtgctcgacgaaagttggttcgatgaacgggttggctaatcgcgatgtgtggaggagacaaatttctaggatctgagggtaagagaagccaagacctagagcgatgatcactaggtgttcggtgaaaaggatgaaccggtgatcgtggttggtcttgcaaaatccgagttctattttatgttggtaaggtgttgtgcggtgtgatctccaattccatgttgctgatgtcttgctccatcatgaccttagggaaggatgttttcctctaaattatcgtaataattatgctgggtttatgtgttgttttagcatacattgtgaaagcatttcttgctcagcaggacaaggaggggctttcatgaaataacttttgaccacttatgttccttttccaaatataaatcagttagaagtgggtcttggcaataattagctcatgactatttgttgttggccctttggctgcaatttctgaatagtttgatgtgaagggaccttgctgagctttgtgtacttgatatttgaatagtttggagaaaggattaaaatctaccctcactaattttttagatgccccttaaaactgattttgaggagttattttctagggagctcttggagatgctcttattcctattggtacggagtaatatgtatattgtgcaattaaaatggcctttatatggtattgaacatttcccacaataatctgtaatctttccatgaattgttttcctatatgtggtattattaattggcagtgctcctagacactgcacatccatttcctgtgaaattactaaaagattgccgggaagtggcaatgggactgttactgatgaaattttatgagaattattgatttcgaagtaacttctttctggacttttttgccagccaacattgttttccatagaaaatggtttttgaatattcatggcaaaattttatggtttacaaaattccttcatttcatctacagaaaatcgggcaggctctactacctttacctggcgatgctaaaagccaaccagcactagcaacagcgactcaatttgctgccacaaacatctgcaccagcagaggccgctaccgcagaagccaccacggaatcagatcctgcaacgtccactcctctttcaccttatacaaattacccagattgtggtgcccgacgaggtggggcgtcgtttgagagggccgatgaggcgtcggagaagaagcagtcgaacccgatgcgggagatgaaggtccagaagctcgtgctcaacatcttcgttggcgagagcggtgatcgcctcacccgcgccgccaaggtactggagcagctgagcggccagtcaccggtattctccaaggcaaggtacactgtgagatcgcatgctatgtgacggtgcggggtgagaaggcaatgcagctgctggagagtggcttgaaggtgaaggagaacgagctgctgaggaggaacttcagtgacactggttgctttggatttggtatccaagagcacattgatcttggcatcaatgacacgaccttgacagtcaagatgctctttcaggagatggtcccagttactttacatggttctgttggacacaatgaagccatccagagatgctattaaaaatcctgctagtcattatggctttaaactgtaccatgtctgttctattttcagctaggcagagcatgttctatttacagcaggccagcagacaccaggcagtaaggtgatgtatgaatcaattatcaggtgacaaaatggttatgtttaatcatgcatgttttcttcctgactctctatgtttctttgaggcattcaactacttgtagtatcagtgcatcactgatgtatatatgtgttgatgttcatcatccaagatcaaatacatcctgctaggtcattacttgctaatgtgcatctgagtttgctgttgccaggatggaaatgttttttggcagctttctcagtgaatcagtatcaccgcagaacctttttggacacccagatgtcgagagatgcccatttctgaggaatatcaatggagctacaaccttttccctctcttctgctttgccagtagctgctcaaggaggcaagggtccaatttttgaggaagggtcaggctttgagtcagcattcaagcttttccatggccgagatggaatagttcccctttcagaaagatcatatgtatctgatgaaaaccacaatgagagcattgacgtcaagttatatacttagttaggctcaatttagagtacacttatgtagagtacacttatttatattgaaccgtcggagttcctacatatgtatcaagttatatacttagttaggctcaatgttagcatcaacagttgatgagcaactttaaatttagagtacacttatgaatgagttatttgacaatgcttatttatgagatattgaatgttatttatctatattatattaattatagtgtt

SEQ ID NO: 138184 - DNA, 2175 bp, Zea Mays
atctcctggtgcttctctcaagccaccgacgctcaggctctctacatcctttagcaggcgccaactccctggagctcgccttcctgctggccgcccccagcaccgacgccccttctttttccccatctccttccttggcgcgctcgcccaggtcacgcgtgtccctgctcgcccaggccgcgacctcgccaaaccgcgcagtccctgctctccttccccagccgcgctcagcccagcccttcctccttcgcccttgtcgagctccctcagctcgcccccaaccacaactgcacgccaacctcgccctaggccatggagcagcaacaaccatggaaccctttcgtgtcgcgccctcgatgtgctcgacgaaagttggttcgatgaacgggttggctaatcgcgatgtgtggaggagacaaatttctaggatctgagggtaagagaagccaagacctagagcgatgatcactaggtgttcggtgaaaaggatgaaccggtgatcgtggttggtcttgcaaaatccgagttctattttatgttggtaaggtgttgtgcggtgtgatctccaattccatgttgctgatgtcttgctccatcatgaccttagggaaggatgttttcctctaaattatcgtaataattatgctgggtttatgtgttgttttagcatacattgtgaaagcatttcttgctcagcaggacaaggaggggctttcatgaaataacttttgaccacttatgttccttttccaaatataaatcagttagaagtgggtcttggcaataattagctcatgactatttgttgttggccctttggctgcaatttctgaatagtttgatgtgaagggaccttgctgagctttgtgtacttgatatttgaatagtttggagaaaggattaaaatctaccctcactaattttttagatgccccttaaaactgattttgaggagttattttctagggagctcttggagatgctcttattcctattggtacggagtaatatgtatattgtgcaattaaaatggcctttatatggtattgaacatttcccacaataatctgtaatctttccatgaattgttttcctatatgtggtattattaattggcagtgctcctagacactgcacatccatttcctgtgaaattactaaaagattgccgggaagtggcaatgggactgttactgatgaaattttatgagaattattgatttcgaagtaacttctttctggacttttttgccagccaacattgttttccatagaaaatggtttttgaatattcatggcaaaattttatggtttacaaaattccttcatttcatctacagaaaatcgggcaggctctactacctttacctggcgatgctaaaagccaaccagcactagcaacagcgactcaatttgctgccacaaacatctgcaccagcagaggccgctaccgcagaagccaccacggaatcagatcctgcaacgtccactcctctttcaccttatacaaattacccagattgtggtgcccgacgaggtggggcgtcgtttgagagggccgatgaggcgtcggagaagaagcagtcgaacccgatgcgggagatgaaggtccagaagctcgtgctcaacatcttcgttggcgagagcggtgatcgcctcacccgcgccgccaaggtactggagcagctgagcggccagtcaccggtattctccaagggtaattttcttatacctgacgttatcaatgtgtagtgtggtcctggatttatgatggtcgtagcaaccatgttgtgacattgcagcaaggtacactgtgagatcgcatgctatgtgacggtgcggggtgagaaggcaatgcagctgctggagagtggcttgaaggtgaaggagaacgagctgctgaggaggaacttcagtgacactggttgctttggatttggtatccaagagcacattgatcttggcatcaagtaagatgatctcatgtcttatcgtaaataatttgaatgaggcctgtttgtttctgtgaacgggtgttttatgatgggcattgttgcttgcctgtaagcaggggaaaagatatgtaactttgtattcatgtagcctgtacccactatggtcactacgtactgggatagcttaaggctaagttcttaacacagtttataaccatgc

SEQ ID NO: 138185 - DNA, 1344 bp, Zea Mays
tcgccagctctcaaactagcccgtggtgataaattcgccgacgcggatggagaggggagaaaacgtcgccagttcggctgtcgaaccggaactgaagcaacatttgttctgtggaaattgggatggctctggctagggtttcaccgtcttccttagcgaaccttataccgcccctgctccaatccttcttccgccctttctcctcggactttcccatccgcaattcccgccgaagaagctcccccgttgctgccgccttctctcttacttcacaatctgcccacgctgcgagggaggggctggtcatggaggcgcccaggccgagctccaggtatccttggaagcccacgtgtttgtactacacccagggcaaatgcacaatgatgaatgatgcaatgcatctggagaagttcagtcacaatttgaagatggaccttccagtgaatgcatcagccacagataaatccaagcctcagaaactggaatatttattgattcttgatttggagggtagggttgaaatccttgagttcccagtcatgatgattgatgctcaaaacagagaatttgttgattcatttcataggtttgtgcgtccaactgcaatgagtgagcaaagaacaacagaatacatagaagggaaatatggaaaatttggggttgaccgtgtttggcatgacactgctacccctttcaagcaagtgctgcaagagtttgaggactggcttggaaatcacaacctgtggaaaaaggagcaaggtggatcactcaaccgtggagcatttgttacttgtggaaactgggatttgaagacaaaggtccctgagcagtgcaaggtttcaaaaataaatttacctacctattttatggaatggattaacttgaaggatatctacctcaacttctataacagaagggcaactggaatgatgacaatgatgagagaacttcaactgccaattgttggaaaccaccatctcgggatagacgattcaaaaaatatcgcaagagtggttcagcgcatgcttgctgatggtgctgtgattcaaatcactgctaagagacagtcagctactggcgatgtgagatttcttttcaaggaccgaattaggtgattgaaaagtgacacccccaattcatagtggtgctgatattagttgcctgaaaggcatttcaggattttggagcaaagatagagcgactgaacgctcaatcaacatacaaatatgtctagaaattgtgatgctttaaccaaacaagatcaaattactgtccccaagctcatcttagagtttcaactaaatcacaaattaaaggaaccgtgatatgtgaattagttaacgt

SEQ ID NO: 138186 - DNA, 1305 bp, Zea Mays
tcgccagctctcaaactagcccgtggtgataaattcgccgacgcggatggagaggggagaaaacgtcgccagttcggctgtcgaaccggaactgaagcaacatttgttctgtggaaattgggatggctctggctagggtttcaccgtcttccttagcgaaccttataccgcccctgctccaatccttcttccgccctttctcctcggactttcccatccgcaattcccgccgaagaagctcccccgttgctgccgccttctctcttacttcacaatctgcccacgctgcgagggaggggctggtcatggaggcgcccaggccgagctccaggtatccttggaagcccacgtgtttgtactacacccagggcaaatgcacaatgatgaatgatgcaatgcatctggagaagttcagtcacaatttgaagatggaccttccagtgaatgcatcagccacagataaatccaagcctcagaaactggaatatttattgattcttgatttggagggtagggttgaaatccttgagttcccagtcatgatgattgatgctcaaaacagagaatttgttgattcatttcataggtttgtgcgtccaactgcaatgagtgagcaaagaacaacagaatacatagaagggaaatatggaaaatttggggttgaccgtgtttggcatgacactgctacccctttcaagcaagtgctgcaagagtttgaggactggcttggaaatcacaacctgtggaaaaaggagcaagtggaaactgggatttgaagacaaaggtccctgagcagtgcaaggtttcaaaaataaatttacctacctattttatggaatggattaacttgaaggatatctacctcaacttctataacagaagggcaactggaatgatgacaatgatgagagaacttcaactgccaattgttggaaaccaccatctcgggatagacgattcaaaaaatatcgcaagagtggttcagcgcatgcttgctgatggtgctgtgattcaaatcactgctaagagacagtcagctactggcgatgtgagatttcttttcaaggaccgaattaggtgattgaaaagtgacacccccaattcatagtggtgctgatattagttgcctgaaaggcatttcaggattttggagcaaagatagagcgactgaacgctcaatcaacatacaaatatgtctagaaattgtgatgctttaaccaaacaagatcaaattactgtccccaagctcatcttagagtttcaactaaatcacaaattaaaggaaccgtgatatgtgaattagtt

SEQ ID NO: 138187 - DNA, 1055 bp, Zea Mays
tcgccagctctcaaactagcccgtggtgataaattcgccgacgcggatggagaggggagaaaacgtcgccagttcggctgtcgaaccggaactgaagcaacatttgttctgtggaaattgggatggctctggctagggtttcaccgtcttccttagcgaaccttataccgcccctgctccaatccttcttccgccctttctcctcggactttcccatccgcaattcccgccgaagaagctcccccgttgctgccgccttctctcttacttcacaatctgcccacgctgcgagggaggggctggtcatggaggcgcccaggccgagctccaggtatccttggaagcccacgtgtttgtactacacccagggcaaatgcacaatgtgtttggcatgacactgctacccctttcaagcaagtgctgcaagagtttgaggactggcttggaaatcacaacctgtggaaaaaggagcaaggtggatcactcaaccgtggagcatttgttacttgtggaaactgggatttgaagacaaaggtccctgagcagtgcaaggtttcaaaaataaatttacctacctattttatggaatggattaacttgaaggatatctacctcaacttctataacagaagggcaactggaatgatgacaatgatgagagaacttcaactgccaattgttggaaaccaccatctcgggatagacgattcaaaaaatatcgcaagagtggttcagcgcatgcttgctgatggtgctgtgattcaaatcactgctaagagacagtcagctactggcgatgtgagatttcttttcaaggaccgaattaggtgattgaaaagtgacacccccaattcatagtggtgctgatattagttgcctgaaaggcatttcaggattttggagcaaagatagagcgactgaacgctcaatcaacatacaaatatgtctagaaattgtgatgctttaaccaaacaagatcaaattactgtccccaagctcatcttagagtttcaactaaatcacaaattaaaggaaccgtgatatgtgaattagtt

SEQ ID NO: 138188 - DNA, 1311 bp, Zea Mays
cctgcccttctctagtcgtgttctccgtgtgcacgcgcgcagctccctcacggtgctacctctgccctcttcccatggccgagcgcgcctggatctcctccgagctcggcatggatgtgctgtgacttccccagtaccggccgtggcaagctctggtgacccccttccccatggcgcgcccttcctggctcgccggcgatgctcctgctccagctcaccatggcgcccctgccctcaacgccgagctcgccctgtcgcgtgttcctccagctcggaccgcgcccctcctctctgctcggatccgccgtcgcgtcctgctccctggtggtcgagctcgcccagttcgcctcctgtcctcaaccatggatgtcggtcgcccatggattgttcacaaactccgtcgctcgatgtcgcgtctcctgcaccagcgttcctgttccctgttctcggcgtcctaaccatggcggctgagatctctctttctctggtgccgtgtgtgctcaccctcgcccatgccgcgcccctgcgctcgtcgcggcgctccagctcgcccctgcacgctcctctcctctagatccctccctccacgccggacgtcgtctgtttcctggtggctgagcatagcccttgcgctcgcgccttctctgtttaatttgtagaacacctaggtctgtccatggtcactcccttcgtcgttggtgttcggctccctatttcagtttgtcgtgccgcgccgtcatcgtttctgtcacgagcttgatccccgttgtcatcgcttcgccgtgttcgccggtagccgccccgtcgtgctcgtctctggtgctcgcttcggccgcggacgctgtcgagcccatcgttttccctgtccagtgctcgtgcggctttctgctcgccaacgcgtcctctcggctcactcgaccttaatccccatcgcgtcgtcgacctcgccgattgtcgtcgcgtcgtgcgtgcagcagccccggatctgtgtagtctcggtcttgttgtcgatatcgctcgccgtggctcagcttgctagctcgtcgttgtttcatcgtctcgtcttgatgccagtccctacgtgctgtctccgactcgtgttcgcgtcgacaaaagaatgtcaagaagatgtggagaagcaagccctggtcgatgccccaagtgctcggcaaaaggccgaaacaaggatcatcgtcgtttggatggattgctagtcgaaatggtaatcatattttgaatctctattctagctaattaatttgataaatgaattaaagggatatttatcgggatgattattctatttgtagc

SEQ ID NO: 138189 - DNA, 608 bp, Zea Mays
cagggttcaatagtcacagacagctccaatgccacattttgtgtttatgactccgatattgctactggctacggtgttggtgctttcctgtttcttctctcaggccactcactgctcatgggtgttacaagatgcatgtgcttcggtgcaccacttgcaccaggtggaagcagagcatggtccatcatatacttcgcatcgtcatgttgctgaggcctgcctaattgccggagcaacaaagaacgcataccacaccaagtatagggatatggtatatgctggtaactggacctgccaaactctgcgcaaaggagtgtttattgccggagcagtcttcgtggtgttcaccatgattttggacgtctacttctacatgtactattctaaggccactagccaagctacaaaaaggatcagtaagacaactcccagcgttggcatgactggctatgcgtgagccacctaatgaaagtcccggtctgattagaaaaataactatttcttttttttgtgtcgtttttgtaccactgcaactatttctatgtttgttctattttcagtaacactgcagtgagtgatttgggatatgacttagtttcagttaaata

SEQ ID NO: 138190 - DNA, 622 bp, Zea Mays
cagggttcaatagtcacagacagctccaatgccacattttgtgtttatgactccgatattgctactggctacggtgttggtgctttcctgtttcttctctcaggccactcactgctcatgggtgttacaagatgcatgtgcttcggtgcaccacttgcaccaggtggaagcagagcatggtccatcatatacttcgcatcgtcatggatcacatttgcagttgctgaggcctgcctaattgccggagcaacaaagaacgcataccacaccaagtatagggatatggtatatgctggtaactggacctgccaaactctgcgcaaaggagtgtttattgccggagcagtcttcgtggtgttcaccatgattttggacgtctacttctacatgtactattctaaggccactagccaagctacaaaaaggatcagtaagacaactcccagcgttggcatgactggctatgcgtgagccacctaatgaaagtcccggtctgattagaaaaataactatttcttttttttgtgtcgtttttgtaccactgcaactatttctatgtttgttctattttcagtaacactgcagtgagtgatttgggatatgacttagtttcagttaaata

SEQ ID NO: 138191 - DNA, 404 bp, Zea Mays
ccgtgctgcggcggcgctcggcggcgacggcgaagccaaaggcggtcaggcatagggcgaccaccagaatgtgcaccagaatggagctgctccctgtatcgcccatagcgcaccctctcctctccagggcaagcaaagggatagtggcactcgctcagtcgttagcccttcgatttgctcttgtcgctgctgcgtgggatggggaaagggaaagttatgcgagcagtagaacagcaccggccttctcttctttttaattttcttttgatttaaacatggaagaacttcatttaaagggtgtttggtactttggtttattatgactaattcttagtctctacatttattttattttagtcactaaattatcaaatacgaaaactaaaactctataaacaaacgtc

SEQ ID NO: 138192 - DNA, 4228 bp, Zea Mays
ttgctgctcgaatctcagctgctcttcttcagagggaattgccaattgcgttctgcagtaagattgatttggacaaggttggagcgaattggctgctacggcggggagttccaaaaaaaacccgtgaggttttggccttgtcgacttcttggggcatctgggagtagctttggtgcagtgattcacttgagtctggaggaatggcgccgacgaagaggctggagaaacttaagctcagcacattgttgactttcatgcgttgtcacgggggctctagtgatgaccacttacggattgggacagtggggttctccagagtcgtgtacgtcaatgagcctgataggcttgaagaggagggattcagttacctgctgaatgaggtgtcgacgacaaagtacaatctggccaccttcctgcccaagtccctcttcgagcagttcaggagggtggccaatttctacttccttgtctctggtatccttgccttgactccacttgcaccatacacggcagtgagcgcgcttgcgccgctgtgtgtcgtgattgtagccaccatggcaaaagaaggggttgaggactggcggaggaaacaacaggatcacgagcttaacaatcggatagtcaaagtgcatagggggaatggtcattttgaagagtcaaaatggaagaatatcaaagttggagatgtaataaaggtggagaaggataatttcttccccgctgatatgattctgctttcatctaactatccggatggaatctgttatgtagagaccatgaacctcgatggtgaaacaaatttgaaaattaaacaagctctcaaggtgacattggatttacatgaggacataaagttcagggaagtcagacaaacaataaaatgcgaagacccaaatgcgaacctctactcctttgtcggttcaatggaatggagaggccagcagtatcccctgtcatccctacagcttcttcttcgagactcaaaactacggaacactgactacatatatggggctgtcatcttcacaggccatgatacaaaagtgatgcaaaatgcaactgatccaccatctaaaagaagtaaggttgagaagaaaatggatcaaattatttatcttctaatgtcttctctactcatgattgcattacttggttctgtcttctttgggatctggaccaaagaggacctaagagatggtgagctcaaacggtggtatcttcggccagatgctactaccatattctatgatccaaagagagcagctctggcatctttctttcatttgttgacgtccttgatgctgtacagctacttcatacccatttctttgtatatatccatcgagatggtcaagatcttgcaagctctattcatcaaccaggatattcgaatgtatcatgaagaatcagataagccaactcatgctcgtacttcaaatctaaatgaagaactgggtatggttgatacaattctatcggataagactggaacattgacgtgcaacatgatggagttcatcaagtgttcaattgctggaactgcctatggtcaaggcgtcactgaagttgagagagctatggctatgaggaaaggtgctaggttagatgatgacattgaaaatggagaccacaaagacaaaaaaaatgacaacagtccccatgttaaagggttcaatttcaaggatcaacgaataatggatgggaaatgggttcatgagcctaacagagttatgataagagattttttccggctcctagccatctgccacacatgcattgctgaaatagatgaaaatgagaaggtttcatatgaagctgagtcccctgatgaagctgcatttgttattgcagcaagagaactagggtttgagttttacaagaggtcgctagcaactataattgttcgtgaacggaatccaagtcagaatgttgttgagaaaagaaagtatgaactcctaaatatgttggagttcagtagctcaaggagtcggatgtctgtgatagtgaaggaaccagagggaagaatattacttctcagcaagggtgcagacagtgtgatgttcaaaaggcttgcaccaattggaagaaaatttgaagaagaaacaagaagtcacataaatcagtattctgactctggtctaagaacctttgttctggcataccgtgtcttagatgagaaagagtacaaggaattcaatgaaaaattgaacgctgccaaagcatctgtaagtgctgataaagatgaaaaaattgagcaggttgctgatagcattgaacgggacttgattcttcttggtgctaccgcagttgaagataaacttcaacaaggggtgcctgaatgcatagacaagcttgcacaagccggaattaagatgtgggtcctgacaggcgataagctggagacagctatcaatattgggtttgcttgtagccttcttagacaaggcatgacacagataatcgtcacactggaacaacctgatatcatcgcattggagaaaaatggtgacaaaccaaaaattgctaaggcatcaaagcaacgggttatgggtcagatagaggatggaatcaaacaaattccaccttcaactcaaattagcactgcatcattcgcgctaatcattgatggtaaatcactaacttatgctttggaagatgatgttaagtttaagttcttggatcttgctctcaagtgtgcatcagtgatatgttgccgatcttcaccaaaacagaaggcactggttacaagacttgttaaagaagtaacacataaagtgactttagcaataggtgatggggcaaatgatgttggcatgcttcaagaagctgacataggggttggcatcagtggtgctgaaggaatgcaggctgtcatggctagtgatgttgctgttgcccaattccgcttcttggaacggctacttctggtgcatggacattggtgttaccggcgtatttcactgatgatatgctatttcttctacaagaatgttacttttggtgtaactatctttctgtacgaagcatttgcatctttctccgggaagccagcttataatgattggttcttgtcactatataatgttttcttcacctcccttcctgtcattgctctgggggtatttgaccaggatgtgtctgctaggctgtgcatacagtatccacagctataccaagaaggagtgcaaaatatattattcagttggcgtcggatacttggctggatgtttaatggtgttatgaatgctgtcttaatctttttcttctgcatcactgccttcgaggaccaggcattccgtcgcgacggtcaagttgcgggcttggatgctcttggtgtcgtcatgtacacttgtattgtatgggttgttaactgtcaaatggcgctctctgtgaactacttcaccataatccagcacatattcatatggggcagcattgcagtatggtacctcttcctcttggtttatggtgccataaacccgaggttctcaactacagcctacatggtcttcatcgaacagctggccccagccctctcattttggctggtgacactttttgttgtggtggcaacacttgtcccctactttagctatgccgccatccagatccgctttttcccgatgttccacaacaagattcagtggaaacggtacttggggaaggctgaagatccagaggtggcaaggcagttgtcatcaaaacaccgcacatcattgcagcacaggatggttggtatctctgctcgtcgtgacggcaaggctgtgcaaataacaaaggagacagagctacaagttcaggagtagcattgtcagtagattttgcgttttgtacagcttataggatcttgtctccagcaagatgacagctgaactgattgggacttgagatgttcctggattgctgcttctgtgatgcctgtcatgggagttgttccagttcagatgatagagcaagaccacagattgcttagataggtcgcaaggaggccaagagaatacctgctgcaaagttcaatttttagcagttcaaggattttgtgggttttttccctgcttctcttacacatgtaaatgcttgtaaccagattggtagaatttctcctttttaccccccttgcctgccctcgactgtttcaaacaataatggtaagacttctgatttgtgtgacttcatgcttttattatttggaaagaatcataaatgggtgtcttacaatctaaagttg

SEQ ID NO: 138193 - DNA, 2049 bp, Zea Mays
tcacaacctttgatgatcgtaacaaggtcaagagctcttccaatgggcgaccccctcgccgccctccttcgcagcggcggcaatcctcactccgtacacggcgtggccatcaagcttggctgcattgtctccacctttctttgcaacaatcttctatatgcctacctgaggcgccaggtccccgcggacgcccgcaggctgttcgatgaaatgccccgccgcaacctggtgtcctggtccgtcgtcatatccggctccgcccaccatggcgtcctcgcggaagcgttcgcgttgttctcccacatgcttcacggcgcggggcacggaagctgggaccgcccggactcgttcacgctaggggccttggtcgccgggtgctcccgtgccagagatgtcgacgctggcatgcaggtgcacgcttgcgtggccaagttcggcgtcgacgaggatgatagcgtcgcggcggcgttggtggacatgtatgccaaatgcggttgggtggactcatcgtggcgggccttcacgctcgcaccacagcggagcgtcctaagctggacgagcatgattgcctgtctggtcaaccaaggttcgtcaggttactatgacacatcacttctgctgttcaagaaaatgctggcattaaaggtttggcctaccaatgcgacgtattcttgcatcctgaaggtgtttgatacgcccgatttgctatccgttggaatgcaacttcatggctgcttgctgaagatgggaacggaggttgacactgctttggggactgccttgatgacgatgtatggcaggtgtggtggagttgatgagatacctaggttggcttgtcgtataaggcatgatgcgctttcgaggactgccctgcttggcgcttatgcacgtactggatacaatgcagaggcaattggtgttttcaaggagatgatcatgaaaaatatggcaattgaccagtcagctatgactggtatgctgcaggtttgttcatcctttggacaactgagaatggttcggcaggtacattgttatgctttaaaaaccttcttcaagttggataccttactattgaatgccaccatcactgtttatggcagatgtggtgatatcaatagtgctgaaactgtattttatctaatggaggaaaatgacatcatatcatggacggcattgttaacttgctacactcagaatggtcttgatgaagaggtactcttattctttaggaaaatgctccggaaagggttgggatctccagtattttgcatcactagtgtgctacgagccagttctagcatctcaaatcttgctgttgggttgcaaatccattcgaggactctgaagctaggtattgatgatgataattctgtacagaatgcactcgtaaccttgtatgctaattgtggaagtgttcaggttgcattgaagatatttaactcaatgagtaatagagacatcgtcacatggaatgcattactcacaagtttttcacagcatggcagtgaggtggcagccattcagctttttgatctgatgcaagaagaggggatctgcccagatgcttacacttttgttggcctgctatcatcttgcagcagaatgggccttgtaaaagaaggctgtgagtacttcaatgaaatgaaggaaaaatacaacttggaacccaagatggttcattatacctgcatggttgatctacttgctcgtgctggaagattttgtgatgcaatggacttcattgatgcaatgccttatgaaccagatcaaatattgtgggaagctttgctagcttcatgtaaggttcacggaaatttggggttaggaagaatagcagctaagaagattctggaaattacaccacatgattattctgcatacattatattatcaagcattcatgcttcagttgacatgtgggatgagaaatactggaatcgcactgtattcgacacccagcgtgcaagaaaggatactggaaggagttggattgatgcacaagaattatcagagaatatattcgatgcattacaaattggagtgacgtaa

SEQ ID NO: 138194 - DNA, 3268 bp, Zea Mays
ataaaattgactattttttttacatcaatcgactcttaacacgcggagatcgaagtgaatataattgaagtcaaactaagcccttggcgcattccacagtagaaagaggctttacgaatttggtctaaaactatttgtactctggagtctggaactaacaacgcaaaacatacattactcagctcatatgttcagacagtattggtccacagctctatgcttcaattgctgaactatttacatggcagattcgctcgcgtccgagtcccaacgaatcatcattcgccattaactagcgcagaagagcaggcagatacattccctgaaccgcgcaccagaaccgtcaccgagaacaagtgacattcagccagcaccgagcacaacacgtcaacaccaaagctccatttcacacgtatgaatcaagatagtcgaatgcatggatcatcctgtactgcaacaggctggcatagacacggtcgcacactccaacgaacagggactcgtcatcagggctgagggtgatcccggacacctcaccgaagaagtcgatttcctgccgtttcttgtagtccgcagccacgctgtacacatgaacaaagtccgcaggctccgaaaacaccaggaaccgtccatcagaggagtagcgtatgcaccggatcgcgccgatgttgccccgcaataccgcaagcgaggtcgacaagttgcgggtgtcccagatacggcaggttttgtcctggttcccggtcgcaaaggtccggctatccgggtgccatgccgtagcaaatgagtagtccagatggccaactagggtagagcatacctttccattccgtgaatccacaagaagagcatcccgatcatctccaaccacagccaaaagtttcttatccgggctcacagatgtgtgctgttgttatagaagcaaataatgaatgtcaaagcattaaatatattattaagttgcatgcactgatcatttcaacccaaattcttaagctgattatggaaaggtgggcaactcatttatactccaatactccccctcacgtggaggctccatcaggcctacgtggaataggagcacaacaattattttatttaatcgtgctaacaaggattcaaactcaagacctctggatttaataacatattgagttgcatgcaccgactagttcaaccgaaaagcttaagctgattagggaaagatggccaactcatttatactccaacaaaatatatcgacggaccttaaacttgtcaccctatgtcacttaggtcaacgaactctgaaaataaaaatcttgccccctgaacttgttaagtcatgcaccgcaagtccatgcctcttcatgtggctactgaatagaataattttaacaaaaaaaacaccctaccagtcactgggtcacgcccttctccgacagtccaacctcacatgtgaggagttcgaggcgcacctcacaggtgtccatgccgataggggcatccagtggctcatgcccgccggtctcacaggaggtgacccggctacccgccagcttcgactagcacgagaagggtgccatcgccagcgtcaagatgaaggatgtgtgtgcgcctgtgttgggcgttcagcacgacaagcacagtggagggcgaaaactcgccatggcccacaaggaagctcttcgacctcagtgagcagcagctagtcgaccacacggtgctggcatagtgttatagtgtcatatcactagcctctctcgatgtcttttctcttcaaattccgttcagtacgatgaaggattggagcatgctggtttggtttgtgttccagagcagtgcgacggtgcagaactgagtgcaacacagtcgtcagtggctgctggctgcatgtaccgcaggtggtacaatgcatgtacacacagtagtgcatgcatcattccatagtgtatatacactcgctcgacgacatacagcagacgacaaggccagacgatgccgctagtcccggccatatacttaccagtgtatgtatataccgtatacacactgtaaggtctaaggtcccaatcgagcgagcgacgagcctgccatcagtgcaattgtgctgggcaagaaacagggagaggagaggagagtagagcagagcctgtgatacataagatatgcttgtgcagcatcagcacaccggcaccagcgatatgtccgctgcagccgcttctggccagccagtgacactcgatcgcatgcaccttattcgtccacacaacgtacgtatcataagacgggagaaaatatacggccatctatgtgcatgcgtacacaacggcaggccaccagtgaccatgagcactgtgccatggaagcaactgctactgctagctagtgatccttgccgtgtacgctgtgatacattctttcttgacaatgcaggatttgcgtgtgcatgttggcacgttattgccgtcactgacgtgcacatgaacagacggccactgtccgcgctgcacacctcctttccgtttgcgtcatcctcggcaacaaggatgttgtccttttcttccttctgcagggcctaggacggagaattattggtggctcagcgcagcgtgcgtacccatgcacgagcacatccaggccctgctgctttgacccgacctaggtcactgtctgcatggccaacttcatgggttgccaattggcaacgaggccatgtttgtcctgcagggcaacacgctggacacgtgcatgggctccacctacaacacgctggacacgtgcataggaacctgcgtgacttcacccagctccagtgcatgggcagcggtctcaccgtctccatcgtgtccatgctcaacgtgggacgctggaggtggccaggctccacgtctccgccacgcacgcatgctcaatgactcaaggaactacctgcacatctccatcttctggcagatgccgcagtttatcatcaaagctgccaaggtgttcaccttcatcggccggatcgagtgctacaagcctacaatcaggcgcttgacgccattgggtgactatggtagagtgttatttataaaaattatcctactcagcagccccatgaagaggttatgaacctatgatgcacgacttaacaaattcaaggggctagaatagatttcaattttgagagttcgtggacctaaatggcacagagccacaagtttaaggactgccaatgtatttagctcaatgtcaaatatggatgaaacaaccaaaacagtacattggatcctaatgaggtagaact

SEQ ID NO: 138195 - DNA, 882 bp, Zea Mays
agatcgaagtgaatataattgaagtcaaactaagcccttggcgcattccacagtagaaagaggctttacgaatttggtctaaaactatttgtactctggagtctggaactaacaacgcaaaacatacattactcagctcatatgttcagacagtattggtccacagctctatgcttcaattgctgaactatttacatggcagattcgctcgcgtccgagtcccaacgaatcatcattcgccattaactagcgcagaagagcaggcagatacattccctgaaccgcgcaccagaaccgtcaccgagaacaagtgacattcagccagcaccgagcacaacacgtcaacaccaaagctccatttcacacgtatgaatcaagatagtcgaatgcatggatcatcctgtactgcaacaggctggcatagacacggtcgcacactccaacgaacagggactcgtcatcagggctgagggtgatcccggacacctcaccgaagaagtcgatttcctgccgtttcttgtagtccgcagccacgctgtacacatgaacaaagtccgcaggctccgaaaacaccaggaaccgtccatcagaggagtagcgtatgcaccggatcgcgccgatgttgccccgcaataccgcaagcgaggtcgacaagttgcgggtgtcccagatacggcaggttttgtcctggttcccggtcgcaaaggtccggctatccgggtgccatgccgtagcaaatgagtagtccagatggccaactagggtagagcatacctttccattccgtgaatccacaagaagagcatcccgatcatctccaaccacagccaaaagtttcttatccgggctcacagatgtgtgctgttgttatagaagcaaata

SEQ ID NO: 138196 - DNA, 103 bp, Zea Mays
ttggctatgttggtgtagatgagaaggaaacatgcaaagagcatcaaaatcaagttcaacaaactcatgtcaagccatccacctctgatgccatggaggtatg

SEQ ID NO: 138197 - DNA, 1183 bp, Zea Mays
cagtggcaggcaaccagctcgggcgtgtccttcctcctccgtctccatcttggcccaaccgagcccaaacctctccccttttctccgtcctctcctagtccacacggcagacgccgccgccgggggagaggaggggaggggatcggctccaagggaacaggcgagatggcaatcctgtacgcgctggtggcgcgcggcacggtggtgctggcggagcacagcgcggcagccaccaacgcgggcgccatcgcgcgccaggtcctcgagcgcctccccgacggcggcgccgacagccacgtctcctacacgcaggaccgctacgtcttccacgccaagcgcaccgacggcatcaccgcgctctgcatggccgacgacgccgccggaagacggattcccttcgcatttttggaggatattcatggaaggtttgtcaagacatatggccgggctgcgctaaccgctcttgcatatgcaatgaatgatgaattctcaagggtcttgagccagcaaatggattactattcaaatgaccctagtgcagatagaataaaccgcatgagaggtgaaatcaatcaggtccgtagtgttatgattgataacattgataaggttcttgaaagaggtgatcgtttggaactgctggttgacaagactgcaaatatgcaaggaaatacagttcgattcaagagacaagctcggcggttcagaaacactgtttggtggagaaatgtcaaactcacggccgcattgatacttctcctcctggtaataatatatgtcgttctagtcttcgtgtgccatggtttcaccctaccaacttgcataaggtaaggcatgatgtgcacatagtgctttttgctgtgcatgtttgtgcctatcaccggggtccggggggcagcagccattgcaattgtttcttgtgtagaggaaagctacatattatgatgtgattgtgagaactcaattaaagatatgaacttaacataaaaagtgcttcttgtgggtttggctatgaccttgtaggtctatgagaattcggtgtttggattggtgtttatttgtggctattcttgtgtctgtacatgaattcagttacgacgagtattttatggctatgctaatgtaatattcttgaaattgacatgatgcacacatgtagctgccatgataatttgtttccagc

SEQ ID NO: 138198 - DNA, 1461 bp, Zea Mays
cagtggcaggcaaccagctcgggcgtgtccttcctcctccgtctccatcttggcccaaccgagcccaaacctctccccttttctccgtcctctcctagtccacacggcagacgccgccgccgggggagaggaggggaggggatcggctccaagggaacaggcgagatggcaatcctgtacgcgctggtggcgcgcggcacggtggtgctggcggagcacagcgcggcagccaccaacgcgggcgccatcgcgcgccaggtcctcgagcgcctccccgacggcggcgccgacagccacgtctcctacacgcaggaccgctacgtcttccacgccaagcgcaccgacggcatcaccgcgctctgcatggccgacgacgccgccggaagacggattcccttcgcatttttggaggatattcatggaaggtttgtcaagacatatggccgggctgcgctaaccgctcttgcatatgcaatgaatgatgaattctcaagggtcttgagccagcaaatggattactattcaaatgaccctagtgcagatagaataaaccgcatgagaggtgaaatcaatcaggtaatgcacccatttttcagttgtttcatatatgaagactatcctatgttgaagaacttatatattctgaaaactaacgttggatgtatgctgtgacctccgatcttataagctagaagtggaaatgctcatgaatgaagtgcctgaaacctttgtggaactagttttcacatacttgtttaaagcaaaccattacagaaaattccattgatctagcacattggagtggaagagtctcacaatacaaaaggatttatctcttcatcattttctcgcaggtccgtagtgttatgattgataacattgataaggttcttgaaagaggtgatcgtttggaactgctggttgacaagactgcaaatatgcaaggaaatacagttcgattcaagagacaagctcggcggttcagaaacactgtttggtggagaaatgtcaaactcacggccgcattgatacttctcctcctggtaataatatatgtcgttctagtcttcgtgtgccatggtttcaccctaccaacttgcataaggtaaggcatgatgtgcacatagtgctttttgctgtgcatgtttgtgcctatcaccggggtccggggggcagcagccattgcaattgtttcttgtgtagaggaaagctacatattatgatgtgattgtgagaactcaattaaagatatgaacttaacataaaaagtgcttcttgtgggtttggctatgaccttgtaggtctatgagaattcggtgtttggattggtgtttatttgtggctattcttgtgtctgtacatgaattcagttacgacgagtattttatggctatgctaatgtaatattcttgaaattgacatgatgcacacatgtagctgccatgataatttgtttccagc

SEQ ID NO: 138199 - DNA, 1656 bp, Zea Mays
atggctgttggtgggactcaaccagtccttaggaagtacctaggcgccctcaaggacacgacgactgtgagcttggcaaaagtgaacagtgattataaggaattggacattgcaatcgtcaaggccacaaaccatgttgagcgcccatcgaaggagaagtacataagagaaattttccattccatttctgctgctaggccacgggcagatgtagcctattgcattcatgcccttgctagacgtctttcgaagacgcgcaactgggcggttgcgctcaagacattgattgtcattcatcgcgcccttcgggaagttgatcccacttttcgtgaagagcttattagttatggcagatctaggtcccatatgttgaacatggcctactttaaggatgactctagtgcagaagcttgggattattctgcatgggtgcgcatttatgctttatatttagaggagaggctcgaatgtttccgagtgttgaagtatgatgtagaaacagatcctccgagaactaaggatcttgatactgttgctttgcttgatcatctaccatcattgcagcaactccttttccgtcttcttgcttgccagccacaaggagcgtcgtcttacaatgttataatccagcatgcactctcaatggttgctttagagagtattaagatctacactgcgattagtgatggaacaatcaatctagttgacaagttcttcgagatgcaaagaaatgatgctgttagggcacttgatgtatacaaaagagcaactaaccaggctgaacgactttcagagttttatgaagtgtgcaaaactatacacattgggcgtggtgagaaattcctgaaaatcgagcagcctccagcatcattcctgaataccatggaggagtatgttagagatgctccaacaggtcaaaaagagaaggctatactagcgatagaatacaaaaaagagccagaggaggaagaaaaaccgtcctcacctcctgcggctccagaaccagaaccggaacaagtgcctgagccagaacccgagccagtgaaagaggaagcaccagaagctgaaccagatttgctgggtctgaacgaacccaaccctgctgcaactgcgatagaagagcagaatgctttggcgctagccattgttccgatagatgatgctccgaaagctgctcccacttttggaaatggagtcactggctgggaactggcccttgtgacagcaccaagttcaaatgagaccgccgttgccccaagcaagaaactggccggtggtctggacttgctgacccttgacagcctgtacgacgaggcgaaccggagagcgagccagccagcaagctacaacccctgggaggcgacccccgccgcgcctgccccgatgatgaccatggcgccggtgatgcacgacccgttctacgcctcgaacgggtacgctgcgccgcacggcgtgcagatggcggcgatggcgcagcagcagcaggccttcatgctgcagcagcagcagatgatgacgatggccccggcgcagccggtggtccaccacccgatgcagatgcagcagaaccccgcgaacccgttcggcaaccccttcgcggccgccggcatgccgctccacgccgggcccggcaacgtgtacacggggctgatctga

SEQ ID NO: 138200 - DNA, 697 bp, Zea Mays
ggacgcttggtgaatgctgatgcgatagtagctcgtcgcgtgatccattgccagcatgccaaatttgaaactctgttcttggcttttccgggaagttctgaggtttcagtggctcggccggagaatcagtgcgcgattcttgccttgctccatttgtggaatctgttgtttgcttttgcctcatcccagtcctcccctccctccgatgtggctgtttcgaccagaatacaagttgcttctgtctggaggcgctaaagagcgcgtcttgactagagtcagcctattgaaatttgcaattttgctcggtttgatctgttcaaaccaatcactatgccaattttgatgtcctgtgtccgttgcgtgcgtccagaggtgttcgacttgtctgtttggtcaagccccccgaggttctcggtgttgttttttcgcctgtttcgtgccctcctgttgtcaactcacttggatccatttgttctagatgaaattcatcttgatccagtgatatttgtgcattcttgctctagtaaatccagatgatgctgtcggtttgacctcctatgcttttcagtcattaatctgtcagcctttgaccagtttcttgcagtaaaatcccatctgtcttttacttggttgcctcgtttcctattgtggtgtgcgatgttttccctctctctctctctctcattcgcactgtgac

SEQ ID NO: 138201 - DNA, 276 bp, Zea Mays
atggagaaacggttcaaggtgtacgtgtacgaggaaggcgagccgccgatcctgcacgctcgcccgtgcaaggacatctacgccatcgagggccgcttcatcgagcagctggagctcatggcgccgcaacgagaccgtcgtcgtggcggcgcgctgagtggaaccggcgcgcgcccacgccttctttctgccgttcagcgtcttccagatggtgcggttctcgtaccggccaacacctacgacaaaacccctctcctcgtccgcgtccagtggtga

SEQ ID NO: 138202 - DNA, 1822 bp, Zea Mays
taaagtggaataatgccagttcaagatggttaatttggcaaccaggatctcaatacaggcatatgtagtctgcaactgcgaacaagacttagttgcaaaaaaaccaaatatgacaaacaaaattactagtaacatagaaaaatctgttggtatgctcagaactagtaggacacagatgtcgaatccagttgcctattaacttagatgatgccaattttgttggccacatcaagggcatcgtagtcgggtgtcagtttcacataagccttcttcttcccatcaggcctgcatggacacatcaagaatcactcagttgcacaaaataacaaattatgcacaaaaaataacactggagcaaagcgctaacctgatcagggtgttgaccttctttgcttgaatgtcatacatcttcttgaccgcagccttgatctttttcttgtctgccttgaggtcaacaataaagaccagagtgttgttatcttcaatcttcttcattgcagattctgtggtgagggggtacttgagaatttggtactgatcaagcttgtttcttccagtagtgctgattcttgggtacttcgggtccctggccttcttcagggtcttgggctggtgaaatgttacagatgtgcgaatcttcttggtcttcttcttgcctgccccagacttcacagccttggccaccttcaaggcctgggccttggcatcacccttcttggcaggagcggctaatcaaacaacaaaatagtcaggtcatgcatacttacagtaagcctatcaaatcaaatagttcatgaagtttagcatggtgattactggttatgcccaacaatatacagcctaccaataaattgatatgattgcattagagatcctagcagtattcatgagacaatatggtaattagagtcagccaattatatactctcccttttgggacgactcccatgggtcaaggaacgagtgcaaaggacaggtagtggttatatcagagtgctaaaaatgtaccaattaccaattaatacctgatacaattcaacaatggcgacacacctgcaaaggaagtaggaactacctaacactgagcactcaatttacagcaatttaaaggctggcacagtgcatgtactgatcaagtgtggcaaacatagaaatagatatgcaacatcaggcatgtacctttaggagccatttgagcttctcaaaactccctcctgaattgcaagtagataaagaccattatgtcaggcggatgaagatgcaaaaaagaaataaaatcatgagaactggaatgaaacacagaaggatcttgtcgtgcaacatgaaagctacttgttaacaacaattctcagtctagtgttgacagagttagcaccaaaaacaggatcctaaaagcaccattacaaattctacttcatgcccaaaccaaccatagcaagaatatcagaaacattacagtatccccacatatcattaccccaatagaatatcaaagagactcgtggcataactctctcaagattaacagcaaaagctatcagtaagagcagatgcaggaaatctacaaggcaaaagagagcctgacgcacaagctacgcctcgcgagacaactccgaccggcaaaaccgaacgagaacaagcatatacagagcagatccgagcgcttccacgaacagaacgggccggccaacgaattagacggccggacgaaatggggtgaaacgagagcggcggcagtgggtggcttacctttcgtctcctcgccggtctgtagcggacgtgaagcgatgacggctgggaggaaaccctagccccggggcag

SEQ ID NO: 138203 - DNA, 2032 bp, Zea Mays
ttggcaacagcgtcctcctcccgcgtgctctccactcccagaccccggggactacaagggcactgggctaggtccgttggcaacagccgccacactgctccgctctgctctctggaggcattgcctgcctcgagttgtcatggcggcagcggggacgcagctgggtcggctccttgttggcggcctctggctcctggccgcgttgctgcagcggggcgctgcggcggcagtggccgccgtggatgggcggcgcgccatcgcagcgactggggagaacttcgtgtgcgcgacattggactggtggccgccggacaagtgcgactatggcacctgcccctggggccgcgccggcctgctcaacctggatctctccaacaaggtcctcctcaacgccgtcagagccttctcgccgccgctgatgctccgcctgggagggtcgctgcaggacaaggtggtgtacggcaccgcggacctcgggcggccgtgcgcgccgttcgccaagaacgcgtcggagatgcacggcttcacgcagggctgcctgaccctgcgcaggtgggacgagctcaacgccttcttccagaaatctggtgccaggatcgtgttcgggatcaacgcgctaaatggccgtgttccgttgccggatggatccatgggagggccatgggattacaccaatgcggcgtcactgattcggtacaccgcaaacaagggctaccgaatccatggatgggagcttggtaatgaactcagtggcactggagtcggagctcgagttggtgcggaacaatacggtgcagatgtgatcgccctaaaaacactagtcgacgacatatacgcaagccatccatcgaaaccattggtgcttgctcctggaggattctttgaccaagcctggtttgcccaacttattgtcaggaccaggccgaatctactggatgtgatcactcaccacatttacaatttagggccaggaagggacacacatctgattgacaagatcctcaatccatcagtcctcgacgggatgagaagcacattcagcagtcttcaggggctactgaaatccgcaggaacttcgactgtcgcatgggttggcgaagctggaggcgcttacaacagcggccggcacctagtcactgatgcatttgtgttcagcttctggtttttagatcagcttgggatgtcagcaaagtatgacacgaagagctactgcagacagagtttgattggtggcaactacggcctgctaaataccacaacgttccaaccaaaccctgactattacagtgctttactgtggcatcgcctcatgggaaccaaagttctagcaacaacgttcagcggcacgaacaagatccgcgcatacgcacactgcgcaagagattcaccaggaatcactctactgctgatcaatctcagcggcaacaccacgacgcaggtctcggtgagtgtgacgacccaaggggccgtggcggcgcacaagcatggcgcaaggaagcacgtcggcggcaggaagttccggcacgtccacgtccccagcttcgacgaggccgccggcggcgtgagagacgagtaccatctcacccccaaggacggcaacctgaggagccagatcatgctgctgaacggcagggcgttggccaccgacacagcggggaacatccccgcactggaggcggtgaagatggatgcggcacaacccatcgctgtggcgccctactccatcgtgttcgctcgcatttcacatttcaatgcaccggcatgtagttagagtagttagtgggtacagatcataatggcaagggagagtttgttttccttttactccttagaattatgtaaggttgaagaaattatgatgatcaacgatgggaaggggaaaaacttagagttgtaaaaggttgaaagaaattatgatggtcaacgatgggaagagggaaagttagaaatgacagtggaaactcaatcctcgattcaccaaactcgattcaccaagggcaatttaatccgcgtggtaattgaaaatgagaaa

SEQ ID NO: 138204 - DNA, 1282 bp, Zea Mays
ttggcaacagcgtcctcctcccgcgtgctctccactcccagaccccggggactacaagggcactgggctaggtccgttggcaacagccgccacactgctccgctctgctctctggaggcattgcctgcctcgagttgtcatggcggcagcggggacgcagctgggtcggctccttgttggcggcctctggctcctggccgcgttgctgcagcggggcgctgcggcggcagtggccgccgtggatgggcggcgcgccatcgcagcgactggggagaacttcgtgtgcgcgacattggactggtggccgccggacaagtgcgactatggcacctgcccctggggccgcgccggcctgctcaacctggatctctccaacaaggtcctcctcaacgccgtcagaggacaaggtggtgtacggcaccgcggacctcgggcggccgtgcgcgccgttcgccaagaacgcgtcggagatgcacggcttcacgcagggctgcctgaccctgcgcaggtgggacgagctcaacgccttcttccagaaatctgggtttttagatcagcttgggatgtcagcaaagtatgacacgaagagctactgcagacagagtttgattggtggcaactacggcctgctaaataccacaacgttccaaccaaaccctgactattacagtgctttactgtggcatcgcctcatgggaaccaaagttctagcaacaacgttcagcggcacgaacaagatccgcgcatacgcacactgcgcaagagattcaccaggaatcactctactgctgatcaatctcagcggcaacaccacgacgcaggtctcggtgagtgtgacgacccaaggggccgtggcggcgcacaagcatggcgcaaggaagcacgtcggcggcaggaagttccggcacgtccacgtccccagcttcgacgaggccgccggcggcgtgagagacgagtaccatctcacccccaaggacggcaacctgaggagccagatcatgctgctgaacggcagggcgttggccaccgacacagcggggaacatccccgcactggaggcggtgaagatggatgcggcacaacccatcgctgtggcgccctactccatcgtgttcgctcgcatttcacatttcaatgcaccggcatgtagttagagtagttagtgggtacagatcataatggcaagggagagtttgttttccttttactccttagaattatgtaaggttgaagaaattatgatgatcaacgatgggaaggggaaaaacttagagttgtaaaa

SEQ ID NO: 138205 - DNA, 2145 bp, Zea Mays
cgatcccgaccgcagctcccctctccctatccatccaggccatccgctgtacatcacgcacgttggtcggtgctcccctcggctccacgttcgcgctctactcgcacgcgctcaaggtcgccctcggcgccgaccagagccggcttgcgctgctcggggtcgcctgtgacgtcggcgagaacctcggcctgctcccgggggtgctctgcaaccgcctccaccccgcgctgctcctcatcatcggcgctggcgcgtgcctgctcgggtacggcaccgcgtggctcctcgtctctggcgtcgcgcccgcgctgccttactggctgatatggtttgggttatgtcttgctaccaatggtggcgcgtggttggcgactgctgttctagtgacaaacatgaggaacttcccagtcagcagaggtgctgttgctggcattctgaaagggtactcgggtttaagtgctgctgtttacaccgaaatatacactggagtgctccgtgattcacccatcaaccttttgctctttcttactctcggaattcctgctgtgtgccttctggcaatgtactttgttcagccttgtgaaccctctctggtggagacgaatgcagagcaagtccattttatgtttgcgcaagtggcaagtgtttttcttggggtttatctggttggggctacgatattggatcacatcgtgactctcaatgacattatgaactattctctgcttgtcatcatggttcttctcatttttgctcccctggcaataccattgaagatgacgttattcctgaagaaaaaaagtcgatcagattcacactccccaacaactgataatggtcacacagaaccacttttgccttcttcctccgaatcaaaccttggtaatcttgaagatgataccacagacatcgatattctcttagctgagggtgaaggggctataaagccaaagagaagaagaccaagaaggggagaagatttccggtttcgtgaagcaatactgaaggccgatttctggcttctctttgcaatatgctttgttgggtttggatctggaatcactgttcttaataatctagcacaaataggaattgctgcaggtgctgtcgacacaaccatctcactctctgtcttcagtttctgcaatttctttggccggctgggaggtggtgttgtttctgagtatcttgtcaggtcaaggacactcccacgaagtgttctgatcatagggacccaagcggtgatgataattacttacctgctctttgcattgggccggctcgccacactttacgtctctgtcgccttactcgggatatgttttggtatctcgctctccgtgataatctcaacctcctcagagctcttcggactaaagcactttggaaagatattcaacttcatcgcattggcgaatccggtaggcgcgttcctgtttaacaccctcgcgggatatgtctacgatctcgaagtggaaaagcagcacgccacaacatcagggtcggacgttgcatgtcatggccctaattgcttcagactaacattctgtgtcctctccggcgtggcatgcttgggcacactgctgagcacggttctcacggtgagggtccggccagtgtatcagatgctctatgcaggcgggtccttcagccagcccaggaaccccgcacattgacccatggcgataaagctgttttctgcatctattctcttacaataaatccagtatgacgtcggtctgaatagcctcacaaatggtttattgtaattcatgagcacgcaccttattttttgtgctctgtgttgtaatttttggtctaatatgaggagagagcgacggtctcgtgctgctacttgtaccagatgctcgtgatgttgctccaggttaacccgctgatgcccgagttttaggggcgtataactgaaatgtcaacttatgtaaaacaatggtgcttgtacacgacacatgtttatcggacaatttggcagattccatggtatattgagaagaatgtgcatctttttttttccctcctaaaacgtgaaagaaactgcgtctcaggtcttgatcatgtcgtcttaaaatttggtttactcatggcctagaactagggcagtggtcggcaggttaacaggtcaggtcc

SEQ ID NO: 138206 - DNA, 2245 bp, Zea Mays
cgatcccgaccgcagctcccctctccctatccatccaggccatccgctgtacatcacgcacgttggtcggtgctcccctcggcgagcgagatgcgtgggccggcgtcggtgaaggcggggagccggccgccgtggctgggactgggggcggccgcatgggtgcaggtcgcgggcggcgccggctccacgttcgcgctctactcgcacgcgctcaaggtcgccctcggcgccgaccagagccggcttgcgctgctcggggtcgcctgtgacgtcggcgagaacctcggcctgctcccgggggtgctctgcaaccgcctccaccccgcgctgctcctcatcatcggcgctggcgcgtgcctgctcgggtacggcaccgcgtggctcctcgtctctggcgtcgcgcccgcgctgccttactggctgatatggtttgggttatgtcttgctaccaatggtggcgcgtggttggcgactgctgttctagtgacaaacatgaggaacttcccagtcagcagaggtgctgttgctggcattctgaaagggtactcgggtttaagtgctgctgtttacaccgaaatatacactggagtgctccgtgattcacccatcaaccttttgctctttcttactctcggaattcctgctgtgtgccttctggcaatgtactttgttcagccttgtgaaccctctctggtggagacgaatgcagagcaagtccattttatgtttgcgcaagtggcaagtgtttttcttggggtttatctggttggggctacgatattggatcacatcgtgactctcaatgacattatgaactattctctgcttgtcatcatggttcttctcatttttgctcccctggcaataccattgaagatgacgttattcctgaagaaaaaaagtcgatcagattcacactccccaacaactgataatggtcacacagaaccacttttgccttcttcctccgaatcaaaccttggtaatcttgaagatgataccacagacatcgatattctcttagctgagggtgaaggggctataaagccaaagagaagaagaccaagaaggggagaagatttccggtttcgtgaagcaatactgaaggccgatttctggcttctctttgcaatatgctttgttgggtttggatctggaatcactgttcttaataatctagcacaaataggaattgctgcaggtgctgtcgacacaaccatctcactctctgtcttcagtttctgcaatttctttggccggctgggaggtggtgttgtttctgagtatcttgtcaggtcaaggacactcccacgaagtgttctgatcatagggacccaagcggtgatgataattacttacctgctctttgcattgggccggctcgccacactttacgtctctgtcgccttactcgggatatgttttggtatctcgctctccgtgataatctcaacctcctcagagctcttcggactaaagcactttggaaagatattcaacttcatcgcattggcgaatccggtaggcgcgttcctgtttaacaccctcgcgggatatgtctacgatctcgaagtggaaaagcagcacgccacaacatcagggtcggacgttgcatgtcatggccctaattgcttcagactaacattctgtgtcctctccggcgtggcatgcttgggcacactgctgagcacggttctcacggtgagggtccggccagtgtatcagatgctctatgcaggcgggtccttcagccagcccaggaaccccgcacattgacccatggcgataaagctgttttctgcatctattctcttacaataaatccagtatgacgtcggtctgaatagcctcacaaatggtttattgtaattcatgagcacgcaccttattttttgtgctctgtgttgtaatttttggtctaatatgaggagagagcgacggtctcgtgctgctacttgtaccagatgctcgtgatgttgctccaggttaacccgctgatgcccgagttttaggggcgtataactgaaatgtcaacttatgtaaaacaatggtgcttgtacacgacacatgtttatcggacaatttggcagattccatggtatattgagaagaatgtgcatctttttttttccctcctaaaacgtgaaagaaactgcgtctcaggtcttgatcatgtcgtcttaaaatttggtttactcatggcctagaactagggcagtggtcggcaggttaacaggtcaggtcc

SEQ ID NO: 138207 - DNA, 399 bp, Zea Mays
ttttgtttttgaacgacagtcgtatttattagtagcgagtagcgactattcacactcccaagttctccaaaacaagaaactttcggggtttgacagtttgagaggtaaattctgtatacagacacgtacgtaggccggacatataaatccatcgtctagtacaactctacatgatttcaatcgtgcacgattacgcatgcatacacagccacctctcctctcaccgtcgtcgagctgtcgccgtggagaccacgtgcacagcctccgatgcgtgcaccgaggcaggaaagagccgtcgtgccaccgtggtgggcgtcgacgacgacgagcggcttttgggagatggcgacaacgttggcggtgcaacagccggagagcgctccctggcaaaccgcccgg

SEQ ID NO: 138208 - DNA, 1846 bp, Zea Mays
gtcgcgtcctctcctcgataacccaggccacatcgtccttccgcgccgcgccgccggcgacctaacaacccagaggcctcagcaccgcacgcttgcacgtacgtccaggcgcgctcgccgttacgcccacggggatccaggctttccttcgctgccgttgctggtcgagtgcgccacgccgaaaggtgatcgagctgacgagcgctagacgccaccggccggcgcggcgtggcaagtgcaggggcaggccggtgaggtctgggagaggaggaggaggaggaggaggaggaggaggagatggccggtagggagagcggcgggatggcggcggcgctgcgctgcgctggaaggatcgggatcctggccaccgtcgcagtgaacctcgcgtggatcgcgacgtacatccgccggcgctacttcggcggcgggaaccgatccgacaacaacggtggcggcggggaggtggagccgtcaagagggaagccgccggtcacttcggactccatcgtcaacctcgatcatggcgacccgactatgtacgaggagttctggcgcggcacaggagatagcgcctcgatcttcatccctggttggcaaacaatgagctacttctccgacctcggcggcatctgttggttcctggagcctggattcgagcgcgaggtgcggcgtctccacaggctcgtggggaatgccgttgtagacgggtaccatgtgctcgtcgggacaggctccactcagctctttcaggccgtgctgtacgcgctctcacctgcaagtgacggcacacccatgaacgtcgtctcaccggcaccgtactactcgtcttacccatctgtgaccaactatctaaactctgcgctctaccgttgggctggtgatgccaatacatttgatggcgacacatgtattgagctcgtctgctccccaaacaaccctgatggtggcctccggaagcctgtcatcaaatccaagtctagcaagcctgtttatgacttcgcctactactggccgcagtacacacccatcaccgaggcagctgcccatgacatcatgctgttcaccgtctccaaatgcaccggccatgccggcaccaggctggggtgggcattggtgaaggatactaaggtggctcagaagatgatcaagtttatagagctcaacacaatcggtgtatccaaggactctcaacttcgtgccgctaagattatcggggcaatatgtaatggctatgagccggtaccatcctctggtaaaacaagccaactcttccatttcgccaaggaaaaaatggcggctcgctgggctagacttcgtgcagctgtggcagcctcagacatctttactctcccttatgagctatctggctattgtagcttttccaatgagactgtcaccgccaatcctccatttgcatggcttcgctacaacaaggatgatattgaagatctggaggccttcctactcgagaaaaagattatcactcgaggtggcacaaggtttggagtggatgcaagggctgtcagagttagtatggttgacacagaccaagccttcaatgtgttcatcaatcgtctggccacaatgaagtgaaatttcagtgcaaattaataaagcactttgtggctactacaaggatgaccgcgttctagatggaacaatcgatgctttggaaagcttaataatgttttatgttgttgaataattccgtgtgttttcgggtatgttgtgtaatactcaatgtcaaatcctatgcttaatcgatgttgtggtccatcctgttatcagcatggccaattatatatggatgaccgtcactgctcagtctttactcctaattacatgg

SEQ ID NO: 138209 - DNA, 2005 bp, Zea Mays
cacgccgcactcacacatgcatccataaaccctcagcagagccttgtgtcgcgtcctctcctcgataacccaggccacatcgtccttccgcgccgcgccgccggcgacctaacaacccagaggcctcagcaccgcacgcttgcacgtacgtccaggcgcgctcgccgttacgcccacggggatccaggctttccttcgctgccgttgctggtcgagtgcgccacgccgaaaggtgatcgagctgacgagcgctagacgccaccggccggcgcggcgtggcaaggcaagacgccgtgcgggtctcgccctcgtcagctataagaccgcatccccccctgcggagggaggcacacacacagacacagcgctctcactagcctcgcattccgtccctgcagtgcaggggcaggccggtgaggtctgggagaggaggaggaggaggaggaggaggaggaggagatggccggtagggagagcggcgggatggcggcggcgctgcgctgcgctggaaggatcgggatcctggccaccgtcgcagtgaacctcgcgtggatcgcgacgtacatccgccggcgctacttcggcggcgggaaccgatccgacaacaacggtggcggcggggaggtggagccgtcaagagggaagccgccggtcacttcggactccatcgtcaacctcgatcatggcgacccgactatgtacgaggagttctggcgcggcacaggagatagcgcctcgatcttcatccctggttggcaaacaatgagctacttctccgacctcggcggcatctgttggttcctggagcctggattcgagcgcgaggtgcggcgtctccacaggctcgtggggaatgccgttgtagacgggtaccatgtgctcgtcgggacaggctccactcagctctttcaggccgtgctgtacgcgctctcacctgcaagtgacggcacacccatgaacgtcgtctcaccggcaccgtactactcgtcttacccatctgtgaccaactatctaaactctgcgctctaccgttgggctggtgatgccaatacatttgatggcgacacatgtattgagctcgtctgctccccaaacaaccctgatggtggcctccggaagcctgtcatcaaatccaagtctagcaagcctgtttatgacttcgcctactactggccgcagtacacacccatcaccgaggcagctgcccatgacatcatgctgttcaccgtctccaaatgcaccggccatgccggcaccaggctggggtgggcattggtgaaggatactaaggtggctcagaagatgatcaagtttatagagctcaacacaatcggtgtatccaaggactctcaacttcgtgccgctaagattatcggggcaatatgtaatggctatgagccggtaccatcctctggtaaaacaagccaactcttccatttcgccaaggaaaaaatggcggctcgctgggctagacttcgtgcagctgtggcagcctcagacatctttactctcccttatgagctatctggctattgtagcttttccaatgagactgtcaccgccaatcctccatttgcatggcttcgctacaacaaggatgatattgaagatctggaggccttcctactcgagaaaaagattatcactcgaggtggcacaaggtttggagtggatgcaagggctgtcagagttagtatggttgacacagaccaagccttcaatgtgttcatcaatcgtctggccacaatgaagtgaaatttcagtgcaaattaataaagcactttgtggctactacaaggatgaccgcgttctagatggaacaatcgatgctttggaaagcttaataatgttttatgttgttgaataattccgtgtgttttcgggtatgttgtgtaatactcaatgtcaaatcctatgcttaatcgatgttgtggtccatcctgttatcagcatggccaattatatatggatgaccgtcactgctcagtctttactcctaattaca

SEQ ID NO: 138210 - DNA, 241 bp, Zea Mays
gagtccgctccctccagcctctcactcccacgccgcctctgcccccctccagtcccgcttccccctcgcactcgccgccagcattccggcagttcctgatccgggccttccagagggtagcgccgcgatgggcaacccaggaacctccgccaaccccaccgtgcgccactgcctctcgccgcatctcgtggggcagccgccggtgccgcgcgccccggatccgctagacctggcctccgtt

SEQ ID NO: 138211 - DNA, 612 bp, Zea Mays
cttgcacacacatctcatgcaccagaacagaactgcagcccccaatggagaacgcagatctacacgaatcacataacatccagcacgagcatacacataataatcaagaaaccgtggcaggaacacagtcagatctcacaccgaagttaaagccgagggagctcatgagcgccttgttgcagatgacaatggagacagaggacaccacggagaggctcagcgcccccaccgtccccagctggaacttctccccgccgacgcccatctccgcggccctccaaacgcagcaccaccagcaccgacagacaaaccaaggaatgccccgaaagatcacgaatttacaatcgagccgcagggatcacgctgtctcgcccatgagaagacgggtcgcgcccggtcagacccaccgctcctgcgtcagttggaaaatcagagccgcggtcggatctgggcgagtagggcgcgaatcctggcagggcggcggcaatggcgaggagatctggggaggagcgggcgggatcaaggcggtggcgctcgtgcccctccggtctcgcttagcttcgcttctttattatatggctggtcggtcggtcgccgtcggtgagaaagctg

SEQ ID NO: 138212 - DNA, 121 bp, Zea Mays
cgccaatttgggctatgctcgcgtgcggcaagtagagccaacaacccaaggtcaggcgtcacctaggccgattttttgcattttggctcttcctcggaaaaaaatcacgtttggaccctag

SEQ ID NO: 138213 - DNA, 823 bp, Zea Mays
tatgataatgttgcaccactttgtatgctttttactcaattattgtttttttatgaggctatctttgcagaagtatgtttgtcttacctttatgactctgcagaacatttcaaattggacatgaaaagttccatgttccttggctttatgttataaatcgcaaaacctctgaagttccactgatcgatttccatttgaagtactctggaaatgatatacttggggtgacagctaaagttgtggacatgcctcaccactacgtggaagttcatcctgacataaagaagaatttctgggatccacagaattggccaaaatacgttcttgttagatatacatgggaggagcaatcagagatagatgttactggaggattttatgtgttatttggatccgggcttgttttgtccttcattcttgcaatatatgtcctacagtcatctcaagagaagttgacaaggtttgtgcgagaagcagttgcagatagtagcctcccagatggagttgcaaaggtcgagtgatgacctgtctacgatgagctgtcttattacccactaatttctacactgatcagaacctcaagttttttaacagtcaactttcttagctgcggaacgagtaatacaacagagtagcatacatatgaagagctagtggtttatttgattctcttgtgcatgctcttaaaccaactttgcttatatggtggaagtgcataatttcatttccaggcaggagttttggtgcttgctatctcaactgtgagaatttgggactgaataggtttattgtttgcatggttttaaagacggctagggagaac

SEQ ID NO: 138214 - DNA, 1067 bp, Zea Mays
aagtccaaaccaacccatccatctccattcatccgtcttgacagctccactcctaactccagcgaccaccgcgtccccaccatggccgctcgccggagcactagccccgcccggcacggcgtcctccccgccctccttctcatcctatgctcgtccctcccttccctcgccgccgcataccgcccaggcgacatcgtcccgatgctccgctcgggccagtaccacggctcgaggtcggtgtggttcgacgtggtggggcgccattgcccggccttcgcggtcaaccgggaggtgctgatgccgatcccaaagcctacggggttcactggtgctgatccgtacaagataacatttcaaattggacatgaaaagttccatgttccttggctttatgttataaatcgcaaaacctctgaagttccactgatcgatttccatttgaagtactctggaaatgatatacttggggtgacagctaaagttgtggacatgcctcaccactacgtggaagttcatcctgacataaagaagaatttctgggatccacagaattggccaaaatacgttcttgttagatatacatgggaggagcaatcagagatagatgttactggaggattttatgtgttatttggatccgggcttgttttgtccttcattcttgcaatatatgtcctacagtcatctcaagagaagttgacaaggtttgtgcgagaagcagttgcagatagtagcctcccagatggagttgcaaaggtcgagtgatgacctgtctacgatgagctgtcttattacccactaatttctacactgatcagaacctcaagttttttaacagtcaactttcttagctgcggaacgagtaatacaacagagtagcatacatatgaagagctagtggtttatttgattctcttgtgcatgctcttaaaccaactttgcttatatggtggaagtgcataatttcatttccaggcaggagttttggtgcttgctatctcaactgtgagaatttgggactgaataggtttattgtttgcatggttttaaagacggctagggagaac

SEQ ID NO: 138215 - DNA, 1166 bp, Zea Mays
aagtccaaaccaacccatccatctccattcatccgtcttgacagctccactcctaactccagcgaccaccgcgtccccaccatggccgctcgccggagcactagccccgcccggcacggcgtcctccccgccctccttctcatcctatgctcgtccctcccttccctcgccgccgcataccgcccaggcgacatcgtcccgatgctccgctcgggccagtaccacggcgtaatctaatcaacatcaaccattacccaaggcagcaagtatggagttatttcggttcgtttatgtctgatctgtgcgtttttttgggtggttttgcagtcgaggtcggtgtggttcgacgtggtggggcgccattgcccggccttcgcggtcaaccgggaggtgctgatgccgatcccaaagcctacggggttcactggtgctgatccgtacaagataacatttcaaattggacatgaaaagttccatgttccttggctttatgttataaatcgcaaaacctctgaagttccactgatcgatttccatttgaagtactctggaaatgatatacttggggtgacagctaaagttgtggacatgcctcaccactacgtggaagttcatcctgacataaagaagaatttctgggatccacagaattggccaaaatacgttcttgttagatatacatgggaggagcaatcagagatagatgttactggaggattttatgtgttatttggatccgggcttgttttgtccttcattcttgcaatatatgtcctacagtcatctcaagagaagttgacaaggtttgtgcgagaagcagttgcagatagtagcctcccagatggagttgcaaaggtcgagtgatgacctgtctacgatgagctgtcttattacccactaatttctacactgatcagaacctcaagttttttaacagtcaactttcttagctgcggaacgagtaatacaacagagtagcatacatatgaagagctagtggtttatttgattctcttgtgcatgctcttaaaccaactttgcttatatggtggaagtgcataatttcatttccaggcaggagttttggtgcttgctatctcaactgtgagaatttgggactgaataggtttattgtttgcatggttttaaagacggctagggagaac

SEQ ID NO: 138216 - DNA, 308 bp, Zea Mays
gtcattaggtggttacgacaccgaagacaagacaacgagggcttacgatctggctgctctaaaatactaggtccagctactcacgtcaatttccccgtagaaaactatcgagatgagctcgaggagatgaaaggcatgacaaggcaagaattcgttgcgcatctgagaaggagaagcagtggattttctcgaggcgcttccatctaccgaggggtgacgaggcaccaccagcaaggaagatggcagtctcggattggaagggtcgctggaaacaaggatctatacctcgacacttttagtaagaaaga

SEQ ID NO: 138217 - DNA, 287 bp, Zea Mays
gatttattttggttaactttgcatgtgtcatatacatccccgtttacagtgaattcatatgtcaatttctttttgtggatgaaacatgacatagggaatatttatggagcttttatactcacattcttgtatttgatgtttgcatcctcgtgaaacctggagtttgaacacatggactgggagaggtggatccattggagcaggcacaggtggactgggagatacgaagcccacctctgggacaacagctgcaggaaggatgggcagactagaaaaggcaaacaagg

SEQ ID NO: 138218 - DNA, 1176 bp, Zea Mays
cttcttccttcttcctatataaagaggccctagctccaagtctacaatgcaacagatacacacacactcgggtaaagctatctcgagctagctagctgctgtaagccgttgccatggccaaaatggtgttgctctgcgtgctcgtctccttcctcctgatgcccttggcctccctagccctgacgcaggacttctgcgtcgccgacctgacctgcagcgacacgccggcggggtacccgtgcaagtccagcgtcaccgccaacgacttctacttccacggcctggccggccagggcaaaataaacccactcatcaaggccgccgtgaccccggccttcgtgggccagttcccgggcgtcaacgggcttggcatctctgcggccaggctcgacatcgaggtgggcggcgtcgtgccgctgcacacccacccggcgggctcagagctcctcttcgtgacccagggcaccgtcgccgccggcttcatcagctccggctccaacaccgtctacaccaagacgctgtacgccggcgacatcatggtgttcccccagggcctgctccactaccagtacaacgccggcaccggcgctgccgtgggcctcgtcgccttcagcagccccaaccccggcctgcagatcaccgactttgcgctctttgccaacaacctcccgtccgccgtcgtggagaaggtcaccttcttggacgacgcgcaggtgaagaagctcaagagtgtgctcggcggcagcggttaacttgtttttcgagacaatacagtgcaggctgggtatgcatcgtcgccgtcgtcgtcttggtccgtcgtcatcgaatggaacgcgtgtgcttgctgctgcatgcgtgcgtgcacctgtcgtcgcgtgtcaaagtactcgtggtctatttcatcttacccttatttattcatctacttttcattcagggatgtattcagtttccatattgcattttgttgcaatgaaagagtaacatgtgcatctgattggttcaaaatagctttgtggtcgatgtcgtttgtaaagctatatatgatcgcttaaggttacgtttcgctgttttttcagtgttttatatatacaccactttgtagtgccgcatgctgttaatctgttcaattacatatagtcctactattgaaatacttatcccatctcacatcta

SEQ ID NO: 138219 - DNA, 112 bp, Zea Mays
cccctctaggcgactttcaacgggcactagattatgaactgctagtgagttatatatatacgaaacatgttgttgtttatcttattattgttagaatcaatttgttcatcac

SEQ ID NO: 138220 - DNA, 2623 bp, Zea Mays
aggtgctggaggggcgatcttgcaatgcagacgaataatagcaactatggggagcttacccgcaatatccgagaaaaccagcttggaggggtgatctttggttgcaaacacgatacgattgaagaatgcttcagaaaacagctattcggtctgccttcagtccattattcatatgttagaaatgtcaaacctggcatgcctttatttctattcaattatagtgacagaaagctccatggaattttcgaagctgcaagtcctggtgagatgtatattgattcatatgcttggagtaatgatggttgtttaaggtcagcttttcctgcacaggttcgtatttgcacaaagactcggtatccacctctgctggagagccaatttaaaacattgcttggtgacaactattacaaccatcaccacttctattttgagcttgaccatgcacagacaagagctttaatttctttgttcaaatcacttgctccgtctaatttcattcaagttccagctgtttcaagcaaaaggaatcttgcagttcctgacccaaagaaaatcacagcaaattctaaggaaatcaatccatttagtgttctatcaaatacagccgctccagttaactgggctgatgatgtggaaaatgctagtaactcggatgagaagaaatctggtggttcagtttctgattatgacaatttggatgacaattttcttcaaaatcaatttggtcctcattcaaatccagatgaggtcagtcaaacttcctcaggcaaaattgatggccaaggactggagcttattgaatgtaatcatccacttgtcaatactgtgaatggtaaaagaatcataactgatgaatcaatgcttttgaattcacacaatgagcataatggtgctgtggaagttgatgaagtggagattgaagttcacaataacccaggtggtggtgttgggctacagccagaaagacagactgtcctagaaaagctgaaaggattatctttcctacgacagcaggatgccataacttccaaggattgtactcattctggttcagatcaacgggtacctgatgaaacacagatcaatccaaacctttcctgtggcccatttgatgctacaatggaagataaaacctcttttgatgagtgcagccatggaaatgctgaggtgctgcaaatcatcactgatttacagaagaggactgaagcactggagaagaaactgattgggtcagacaaagaaatactttcattgagggaaatttttaaagactcaggaagaaaagtccagcaactggaatacattgtagatgagttacagttcaaacttgactcttccctggctcaccttggaaacatgtgcaatacactagccaccccatcaatattcctgattggtggttataatggcgtgacttggttatcatctcttgattccttttctcctgagaaagacgcggtcctaggtctcacaccaatgagttctccccgctcatatgcatctgctgctgtgttggatggacacatatttgcttttggcggtggcgatggcatgtcatggtataacacagtggaatgctatagctcaagaaataatgagtggacggaatgcccctccatgaaccagaagaaaggaagtcttgctgggatctgtcttaatgagaaaatatacgctattggtggaggagatggaaatgaattttattcagaagttgagatctttgacccctaccttgggaagtggatatgtagcccatctatgctaacctctcggtttgctcttgctgcgtccggactaaatggagtcatctatacatctggtggctatgatggaaacatgtacttgaaatcagcagaaaggtatgatccaagggagggcttctgggtccggcttccaagtatgagtactaggagaggatcccacaccttaactgtccttggagacaccctatatgctatgggagggtatgatggggacaaaatggtttctagcgttgagatctatgatcctagtcttaatgcttggaggataggtgatcccatgaacactccaagaggatatgccgctgctgtttatcttgatgatagcttattcctaattggtggcatgcagtccagtgtgcagatgttggatactgtggaagtttacaatgcaagttctggctggtcagtccttggttctagttctattgggatgaggtccttcgcatctgccgttgtcttgtaattggtagccagaagtttagaattcatatcatcaaaatttgtaacatagctgccattacaatttacatggaatggttagcacaaatcagggtaaacaacccttctgaagcattctggttaccaacagcgagataggataacatgctggttcgaaattttacttttgaatcttcattcgcgactaaccccacattgtgtggatgaacgattttctcggataattgtcaaactgatgtagaatccaaaagaacttttgtattcaattattgcttctgttttttctccttaagtaggcttgtatacatagcagtgcgtaaaacgttgagatgttggttgagcagactgataagctttcaggttagtataagatgcagcaaatgttgctgttaacttttttc

SEQ ID NO: 138221 - DNA, 2755 bp, Zea Mays
cgggaggtgtgagtccacctcctgcccggttcgctgggatcaaccgcgggcgcgtttcccgctcctgtaggggttgcgttggggttttctcattccattttttgggtgctggaggggcgatcttgcaatgcagacgaataatagcaactatggggagcttacccgcaatatccgagaaaaccagcttggaggggtgatctttggttgcaaacacgatacgattgaagaatgcttcagaaaacagctattcggtctgttaagtgcacctttcacctcttgctactatgttctacagatgttgctaagataatatggtattatagattctgtatgctgatggaaaataaaatgccttgtttctaaatattggctcaattaatttaactttttttttgaatttctatattgataagattatgattccttattgacttattttataggtctgccttcagtccattattcatatgttagaaatgtcaaacctggcatgcctttatttctattcaattatagtgacagaaagctccatggaattttcgaagctgcaagtcctggtgagatgtatattgattcatatgcttggagtaatgatggttgtttaaggtcagcttttcctgcacaggttcgtatttgcacaaagactcggtatccacctctgctggagagccaatttaaaacattgcttggtgacaactattacaaccatcaccacttctattttgagcttgaccatgcacagacaagagctttaatttctttgttcaaatcacttgctccgtctaatttcattcaagttccagctgtttcaagcaaaaggaatcttgcagttcctgacccaaagaaaatcacagcaaattctaaggaaatcaatccatttagtgttctatcaaatacagccgctccagttaactgggctgatgatgtggaaaatgctagtaactcggatgagaagaaatctggtggttcagtttctgattatgacaatttggatgacaattttcttcaaaatcaatttggtcctcattcaaatccagatgaggtcagtcaaacttcctcaggcaaaattgatggccaaggactggagcttattgaatgtaatcatccacttgtcaatactgtgaatggtaaaagaatcataactgatgaatcaatgcttttgaattcacacaatgagcataatggtgctgtggaagttgatgaagtggagattgaagttcacaataacccaggtggtggtgttgggctacagccagaaagacagactgtcctagaaaagctgaaaggattatctttcctacgacagcaggatgccataacttccaaggattgtactcattctggttcagatcaacgggtacctgatgaaacacagatcaatccaaacctttcctgtggcccatttgatgctacaatggaagataaaacctcttttgatgagtgcagccatggaaatgctgaggtgctgcaaatcatcactgatttacagaagaggactgaagcactggagaagaaactgattgggtcagacaaagaaatactttcattgagggaaatttttaaagactcaggaagaaaagtccagcaactggaatacattgtagatgagttacagttcaaacttgactcttccctggctcaccttggaaacatgtgcaatacactagccaccccatcaatattcctgattggtggttataatggcgtgacttggttatcatctcttgattccttttctcctgagaaagacgcggtcctaggtctcacaccaatgagttctccccgctcatatgcatctgctgctgtgttggatggacacatatttgcttttggcggtggcgatggcatgtcatggtataacacagtggaatgctatagctcaagaaataatgagtggacggaatgcccctccatgaaccagaagaaaggaagtcttgctgggatctgtcttaatgagaaaatatacgctattggtggaggagatggaaatgaattttattcagaagttgagatctttgacccctaccttgggaagtggatatgtagcccatctatgctaacctctcggtttgctcttgctgcgtccggactaaatggagtcatctatacatctggtggctatgatggaaacatgtacttgaaatcagcagaaaggtatgatccaagggagggcttctgggtccggcttccaagtatgagtactaggagaggatcccacaccttaactgtccttggagacaccctatatgctatgggagggtatgatggggacaaaatggtttctagcgttgagatctatgatcctagtcttaatgcttggaggataggtgatcccatgaacactccaagaggatatgccgctgctgtttatcttgatgatagcttattcctaattggtggcatgcagtccagtgtgcagatgttggatactgtggaagtttacaatgcaagttctggctggtcagtccttggttctagttctattgggatgaggtccttcgcatctgccgttgtcttgtaattggtagccagaagtttagaattcatatcatcaaaatttgtaacatagctgccattacaatttacatggaatggttagcacaaatcagggtaaacaacccttctgaagcattctggttaccaacagcgagataggataacatgctggttcgaaattttacttttgaatcttcattcgcgactaaccccacattgtgtggatgaacgattttctcggataattgtcaaactgatg

SEQ ID NO: 138222 - DNA, 591 bp, Zea Mays
gcaacaaaataacatgatgaaaaatgaagtatgaaatgagcttttctgacagtttctaaggtatccttcctccccctggaccacataaagctaacagcccaagcatcaatcatgactgcttcacagcttgggcaccatggggattcacatgataattccactgaagaagcatccatatgattgacgttcctatgtaaataaacgggcagtgtcgattagagtggctaaacaaataaagaacacaaatggagcattattacaggtaatgcatgcaacaagcacgctgtcagtgcttctattttgcaagattgaaagctggaaccgataaatgctacattccattgtttaaactgcaaaagtaaaatatatactgataaaatcctgaggaagtttaaatgaagaccctgcatagggaaacaggatagctcctaaagctaaatcaaataaatattttgagagaagtgccagacattcaaccaaacagttcgttaaagctgatttctgattaggaggaataaggataataattgctggtgatgataagcaatgtttgttgaacttttttgtttctttctttgctgcttgatattc

SEQ ID NO: 138223 - DNA, 1707 bp, Zea Mays
ttgtttcgtttcgtatcggatcgtgccgctcttcccttctcgtctagtcttgtctttctttcctcctctgttactccacctacagacctactactgccatcgggagggtaagctcttcggagccggagccgggtccacgttaacgccatcgagtgctgcgatgggcagcttaggagggagcgccggtgctggggacggcggcaaggtcgggctgccggcgcttgacgtgacgctcgcgttcccgcaggccacgcccgcatcgctcttcccgccagccgtttcggactactaccaatttgatgatttgctgactgatgaagagaaggcactcaggaagaaggtccgaggtatcatggaaaaggaaatcgcgcccattatgactgagtactgggagaaggctgaattcccattccatgccattcccagccttgccagtcttggtttagctggtggtacaataaaggggtatgggtgccctggactctcgcttacagctagtgctatttcgatagcagaggttgcacgggtcgatgcgagctgctccacatttattctagtgcactcctcgttggctatgtccactattgccctttgtggatctgaggctcaaaagcagaaatacttaccatctcttacccagttcaaaactattggttgctgggcattgacagagccagattatggaagtgatgcaagctccctaaggactgcagcaaccaaggtacctggtggttggcatttagatggacaaaaacgctggataggtaacagcacttttgcagatgtcctcatcattttggctaggaatgcagatacaaaccaactaaatggatttattgtaaagaaaggagctcctggtctaaaagccacaaaaattgaaaataaaattggactcagaatggttcaaaatggagacataattctaaataaagtatttgtccctgaggaagacagattaacaggcatcaattcatttcaggatataaacaaggtcctcgctatgtctcgaattatggtggcatggcaaccaataggcatatcaatgggagtttatgacatctgccatcggtatttgaaagaaagaaagcaatttggagctccactggcagcttttcagctcaatcaagaaaagcttgtccgcatgcttggcaacattcaggctatgcttctcgttggatggcgactgtgcaagctgtatgagtcaggcaaaatgacaccaggccggtctagtttaggcaaggcatggacgtccaagaaggccagggaggtggtttctcttgggcgagagctactgggtggcaatggcattttggttgattttcttgtcgccaaggcattttgtgacgtggaacccattttctcgtacgagggcacctatgacattaatagcctggtggctggcagagagatcaccgggatcgcgagcttcaagcctgctgtgtcagcaaaatcacgcctgtgaaagttgtttttttctttgttcccgaagacagtagaaatcaaccttgtacattcagatgattgggaataagaacggtaggaaagctgtaaaactcgacgtgcttcctcgtatgtactgttctgtttcaaattattcgacgttttgtcggaacggaacggaggacctgtatggctgtatatgatactcatcctatatatcacgcagcttttgaagattttgtaaaaaaacaaccataataaaaacaa

SEQ ID NO: 138224 - DNA, 1864 bp, Zea Mays
cgtcttcgttttgtttcgtttcgtatcggatcgtgccgctcttcccttctcgtctagtcttgtctttctttcctcctctgttactccacctacagacctactactgccatcgggagggtaagctcttcggagccggagccgggtccacgttaacgccatcgagtgctgcgatgggcagcttaggagggagcgccggtgctggggacggcggcaaggtcgggctgccggcgcttgacgtgacgctcgcgttcccgcaggccacgcccgcatcgctcttcccgccagccgtttcggactactaccaatttgatgatttgctgactgatgaagagaaggcactcaggaagaaggtccgaggtatcatggaaaaggaaatcgcgcccattatgactgagtactgggagaaggctgaattcccattccatgccattcccagccttgccagtcttggtttagctggtggtacaataaaggggtatgggtgccctggactctcgcttacagctagtgctatttcgatagcagaggttgcacgggtcgatgcgagctgctccacatttattctagtgcactcctcgttggctatgtccactattgccctttgtggatctgaggctcaaaagcagaaatacttaccatctcttacccagttcaaaactattggttgctgggcattgacagagccagattatggaagtgatgcaagctccctaaggactgcagcaaccaaggtacctggtggttggcatttagatggacaaaaacgctggataggtaacagcacttttgcagatgtcctcatcattttggctaggaatgcagatacaaaccaactaaatggatttattgtaaagaaaggagctcctggtctaaaagccacaaaaattgaaaataaaattggactcagaatggttcaaaatggagacataattctaaataaagtatttgtccctgaggaagacagattaacaggcatcaattcatttcaggatataaacaaggtcctcgctatgtctcgaattatggtggcatggcaaccaataggcatatcaatgggagtttatgacatctgccatcggtatttgaaagaaagaaagcaatttggagctccactggcagcttttcagctcaatcaagaaaagcttgtccgcatgcttggcaacattcaggctatgcttctcgttggatggcgactgtgcaagctgtatgagtcaggcaaaatgacaccaggccggtctagtttaggcaaggcatggacgtccaagaaggccagggaggtggtttctcttgggcgagagctactgggtggcaatggcattttggttgattttcttgtcgccaaggcattttgtgacgtggaacccattttctcgtacgagggcacctatgacattaatagcctggtggctggcagagagatcaccgggatcgcgagcttcaagcctgctgtgtcagcaaaatcacgcctgtgaaagttgtttttttctttgttcccgaagacagtagaaatcaaccttgtacattcagatgattgggaataagaacggtaggaaagctgtaaaactcgacgtgcttcctcgtatgtactgttctgtttcaaattattcgacgttttgtcggaacggaacggaggacctgtatggctgtatatgatactcatcctatatatcacgcagcttttgaagattttgtaaaaaagttattgttgggattttgattctaagaagccaacgataacatttcgatggtggtgttagctttctgaacccagaaagctataaaaatccacgaaaccagatttttcagttttcgatataaactcagcttttttgagcttctaacttttcggacgctaaacaaaaaa

SEQ ID NO: 138225 - DNA, 229 bp, Zea Mays
agctcgaacgcgagggagagaagacgcgagagctcgccgcgggggagacgagacgcgaaagcttgctcgcgggggggagggggacctcgacggagagctcgagggggagaggagacgcgagagcttgctcgcgggggagctcgagggggagaagagacgtgagagggagagatgggaggggagaggaggcggcggcgaaaccctagcgcgaggcgagcgcgagcgcgag

SEQ ID NO: 138226 - DNA, 871 bp, Zea Mays
atggctagtaccgcaagccaaccgtttcaagaagggaagcagcacctgcacctgaaccatggtggccgtgctcttcattcagcgtacggtggtactgctgcgtggcctgccagctcggtgacgccgcctctgaccaggctggagacaccagcgtcgtcgagcaaaagcacggcggaggcgcggcaggccctcaagatccacagcgcggcagagaagcggcggcgggagaggatcaatgctcacctcgcgacgctgaggagaatgatccctgacgctagtcagatggacaaggccaccttgctagcccgggtggtttgccaactcaaggacctcaagaagaaatcggccgaaaccacgcagccaccactggccaccatccccggagagaccaacgagatcgccgtcgtctgctgcaccggcacggcctccactgcctacgagagagcggcggcgacgtacatcagggcctccgtcagctgtgacgaccggccggggctccacgctgacctcgccggagcgttacgcgccatgaggctgaggccgctgagggcggacatggccgccctgggaggcagggctcagtgtgacttcgtactgtgcagagaggacggcgccggctgccgcacgctgaaggctctcgaggagggcgtcaggcaggcgctggccaaggctgcgttcccggagacgccaccgtacggatgcaacgccgctaggagcaggaggcagaggcttgcgggatcacattgttacttgcatggttttgtcgcgaagctctattaaaagtgtcgaaggcagatcggataatattacaagtgactctaagcttggtatgcataaattttcactagcggtttcagttatgccgcggcag

SEQ ID NO: 138227 - DNA, 1086 bp, Zea Mays
gtcgttgctgttgcacaccactagttgcaacagtttaagtagccttggcctcgtcgcctcctccactcactcgctcatcttcttgcaccaccgacaggccagccttcgattctcgtagtcaaagcttttgaggtaccactagtgaaatgagcgaggacaaggtgtcttagaagttactacttagaagagatggctagtaccgcaagccaaccgtttcaagaagggaagcagcacctgcacctgaaccatggtggccgtgctcttcattcagcgtacggtggtactgctgcgtggcctgccagctcggtgacgccgcctctgaccaggctggagacaccagcgtcgtcgagcaaaagcacggcggaggcgcggcaggccctcaagatccacagcgcggcagagaagcggcggcgggagaggatcaatgctcacctcgcgacgctgaggagaatgatccctgacgctagtcagatggacaaggccaccttgctagcccgggtggtttgccaactcaaggacctcaagaagaaatcggccgaaaccacgcagccaccactggccaccatccccggagagaccaacgagatcgccgtcgtctgctgcaccggcacggcctccactgcctacgagagagcggcggcgacgtacatcagggcctccgtcagctgtgacgaccggccggggctccacgctgacctcgccggagcgttacgcgccatgaggctgaggccgctgagggcggacatggccgccctgggaggcagggctcagtgtgacttcgtactgtgcagagaggacggcgccggctgccgcacgctgaaggctctcgaggagggcgtcaggcaggcgctggccaaggctgcgttcccggagacgccaccgtacggatgcaacgccgctaggagcaggaggcagaggcttgcgggatcacattgtgtactacatggtcatggtcatggtcatggtcatggacatggactacatgtcattggtgagcatggatggtagtttagcgatgtagagaagtgtgatatggatgatattgatatgtacttcagtacttgcatggttttgtcgcgaagctct

SEQ ID NO: 138228 - DNA, 3223 bp, Zea Mays
atgccgtcgtcatcgtcttcggtgccgcccaggccggagaatgtccaggacgtcacggctgatgcgatcaacggattccctgtgctcaattctggcagcggcgccggaggccatgggcatgggcacgcgactgccggaacgtatgtgcggccctccctggccgccccattgccttcgccgacggcgcgcgccatcgccggctacggctacggctacgcagccaacaccggcttcaacgccgcgaacgcaatggcggcacgttctcccggtcccggtggagaaccagggacaaactcgctggagctgctcatgcacttggccggatggaataaccacccgccatgggcacagagctatgcgggcatgtccccgcggggccagccgctagtcctctctccctccgccacgtcccccgggtgggcaccgtcgtcgttcgcccccggggctctggcgggaacaagtggcggcagcagcagcagttttggcggccgtggcgctgtcgccgtccaaagcggcgccgtggcccgtaggtacgatctcggtcccggcagttggagcgcgggccgcggcaaaccaccaaacgtgagtcagctacagattactgcggccgcaaccgccgccaccggatcatgctcaaccagcaagacgaagtcgtcgccacttggaggcggcaacacagaacaagaacgcctgacccccgtgcttgcaatgccgactacccaggggaaggttgccgcggcgaggattggccgcgtcaggaagcgcgcgcccaagaatggcatcatcgacagcagtgcggcgccgtccaggaacctgaggcacagggccgccaacaagcagcgaacggccaaagacgcagccgccggcgttgacgagagccccgccgccaacgccaggcgcgtcgacaaccagcctgctggcggcccggcaaaatccgccgcaagcgcggacgcgcgaaacaacgatattcagatcgtcccttctccgccgccggcacgcaatggcaggaagaggaagcagaacgcttccgctgcgtcatcgagatgcagcagcctggccaccaggaggagcggcacggacgcggtggcgccagcgacgaagaagcacaccatcctgacgtggctcatcgacggcggcttcgtgtccgacggagagacggtgttgtatgttccaggaggggacggcggcgcgggcgcggagaaggtggtgtcgggcgcggtgacccgggccggcgtccactgcagctgctgcgacggcgtggtgccgctgccggtgttcgaggcccacgccggggcgcggcggcgcgacccgggccccgggcagcggcagccgtgggagaagctcctgctcgtgtccggcaactccctcctgcggtgcatgcaggaggcgtgggagatggagaaagtgaggaccttccatgcgcaggccaaggtgagggccgcgctggagcaggaggaggacaagtgctcgcaggccaagaggaggctcctcgccaagcatctgaagaagggggtggtcgtcgagaggatcatgtctcctaggatggagaagataaaggcaggcgagaaggactccagcgacgacgcctgcggcgtctgcgccgacggcggggagctcctctgctgcgactcctgcacctccaccttccacccggagtgcctcgccatcaaggtaccagagggctcgtggtcgtgccactactgccggtgcgtgctgtgcatgtcaaacgatgacctgcagggcctgtccacatgccagcagtgtgctcgcaagtaccacgagagctgccgtccattgccggggaacgggtgcgacatcggcacgtactgtggcgagacctgcaagaagctcttttctcagttagcacaagtgacaggcgtgacgaaccctaccggggatggtttttggtgggcgctcttgaggattcagaaagatgaaccggccagctccgaggaaatgcctgccgttctcgagcgcaacgtgaagcttgcggtggcgctgggcgtgttcaacgagtgcttcaacccggtgaaggatcggcgcaccaagatcgatatgctccaccaagctgtgtatagccttgggtctcaatttaagcggctaagctacgaagggttctacaccatggttctggagaaggatggagagatcgtttcagcagccctgctgaggatccatggcacacaagtcgcggagatgcctttcgcaggcacgctgccagcttaccggaaacaaggaatgatgcgtcgcctggtcagtgctgtggagcaggtgctggcgtcagtgcaagtggagaagctggtgatacctgccatagattctctggtggacacatggaagaggtccttcttcttcaggcccgtggatccccagctgagggaggagctcaagaggctgagcctggtggtgatcaccggcaccaccctgctccacaaacccatcgttccgctgccgccgccacgtccaccgtcgccccaacaagcggggagtccagaggcatggtggcgcaagtacgcggacccgtcggcgcgcctgaccgacgacgagcgggcgttcctggagatggacgtcgacacggcgccgcccttccgctacaccgacctggtcacaggcaacgtgtctctgcacaggttctgtcaagccgggagctcgtcgtcggcctgcgccgctgccgtgtccacagggagagcgagcggcagcgctgcaccgcctccgggtccgggagcatttgcggtgcagccgggcggctggcgttcttgccgcaaggctgcgagcgcgatggctccccagcccagctacgcgcgcggcggcgggcgcagcggtatactccatggcatgaagtgaccgatccaccccctgccctcggcgctgggcagggcttgctgcagctctgtggactgtggtgtaattcagctctgagcctctgactctgagaatgaagatgatgcggaattgcggacatactctgacagtctcatgtaccagtactcgatccatctcagcatttagacctggataatatcgatactagcgacattccgtagtgtaatgcttgtgattggtttaagatttggagttgactagagaactaaatgctttacttcagaggattttggtggtgaatggtgatcagctgcgtactctgcaatcttcatataccatttgtttgtgtgtttgattttgtcttttaaataggagcataaggatgtatttggttggacgt

SEQ ID NO: 138229 - DNA, 1535 bp, Zea Mays
agttctagtcaatagagtcgaactataaatcgtttgtttgaactaagagagacccagatagcaattaaaacttttacagacatactttaaaattttatagacttgcaaccgaaatacactttattctttcttcagcctagtccgactaccgactaagaccgactcagctccggcgaccctcaaaccgcaccagccatggacgggccgcgttggacggaagaggtggacgacctggtcgacgccggcgacgtcgacggcgccatcgccctccttgagtccgtcgtctccgatttgtcaacctccgctgctccccctgccactgaccttcgcctcgccacggcgctcggcgacctcgcgggcctgcacgcctcccggggagacaccctccgagccgacgagctccgcgcccgcgccatcgcccttcggtcccgcgccacggtccctgggactgggaccctaggggatcaggagctgtcagagaaatgtccatcacaagagtgtgcaacgggttcaaaagactcagaagtctcagctaatactaataaaagcaatgaagatgaggaggatgattgggaggctattgcagatagtggtgcccttgatgacacactagtgcgctctcttgagcaaggagctagagtatcttcttgcagctcccccgaaaaaagtagcaccccatcttcagggcccaaaaggagggggaggggctcatttctttacaataagagtgttttgtacagtgaccagtgtggttcggaaagagagttggataacaaacagtctaaacctcaggttggatcaaaggatcatgtgaatgagccagagaataatgctgttacagctgctacacagtttgggacaaggcatgtccttgttttttatgactttccgccaagtacacgcacaacagatctggaaaggatttttgagaagtttggggatcacggggttgccattcgctggattaatgatacttctgcacttgctgtttttcggactccatcagctgctaatgaggctcaagcttgcatacctccaagatacaaagtacggtcactgaagccggatgatgatctattgacaaaaatagatggtagagacctagatccgcccaagccaagaccaaagacatctgcaagaacggctcaaaggctaattgctcatgggatgggattgaaacagttcacaaactttgggtctgatgagttgaagaaacaggagggagagaggaaggacagaattgccgctagacaagcaatgcgtgatgaggcttggggttcagattgatggagaacatactatgattgctggtcgcccacatcatgtctgcgagtttgttacattggtgttttagatgcttgtactctttgcatggtcaaatgttgattttgatacagagaaatctgacgcgatgtgtatcgtagtggcgacgtgtacgccaagcatgttgtacgggcagcaagggattaggatgagatttttctgaactgaaaagcaaagcacgcgcagcactatattttgcgaccttaccacct

SEQ ID NO: 138230 - DNA, 502 bp, Zea Mays
gaaaaaaatcgctttaacaatgtttttattttcctataccaaactgaagaaattatgtaacatcaaacgactacatgatactcccaacttgacattccaaagcataaggaagaaaataaatctattccaagacacccactttttttaaccaaatctccaagactagattgcgtgtattttaagatctagcactttgtcaaatcaataaaataaaactaatcgtaatgtaaaataactgatatgccgatctccaagtattcctcctccatgttgatgccttccttcaccagacccacgatgaacaaactgcacaaggcaacagccagccacgccatgagaactaaggaaatggagcagagctgatctaagttacgccaatccacacatatcactttggcacgagcaatagattgttgtaggaggagtgtgggcggagatgatattgcagggttggaagaatacttatattacttggatctagatcatgtcgcgaagaggctac

SEQ ID NO: 138231 - DNA, 2300 bp, Zea Mays
cccagcctcccacgcgtgaccgtgagagggaagggggtatttaacagacggcgggccgaggatgcgagctctcgcggcagcagcaactgcagtggcggcgcctacccccacgcgcctccgcctcccgctcctctcccgcaccctgcgctctggtcactgtagaagctcttattcctccaggctcctacggttctcgtgcagtgccaccaccatgggagatgagacctcaacctcggttgctccccaggaacaggaatccactgtgcaggctgggagtgtcaagcaacagctctccgggctggtccttatgtccctccgggctactgtgcctgaggtggaggtagaaccgatggttgaagtttcagcaaagtttgctgactaccaatgcaacaatgctatgggattatggtcaaaggttaaaggatctggaaccagtttcaaaaaccctaatgccattggacaggccattgccaagaacttgccttcttctgatattattgaatccacatctgttgctggacctggttttgtgaatattgtcttatcaaaccgctgggttgcacagagaatacaagacatgctcgttaacggtatcaagacttgggcaccaattcttccagtaaagagggcagtgattgatttttcatcacctaatattgcaaaggaaatgcatgtgggacatctaaggtctacaattattggagatacattagcacgcatgtttgagttctcgaatgttgatgttctgcgaagaaaccatgtaggagattggggtacacagttcgggatgctaatagaatatctttttgagaaatttccaaattggcaagagattggtagccaggccattggagaccttcagattttctataaagcatccaagcatagatttgacaatgatccagaatttaaagcaagggctcaacaaggagttgttcggctacagggaggagaagagagatatcgagaagcatggaaaaagatttgtgacattagcaggagtgaatttgacttggtctacaaacgcctaaatgtggtgcttgaagaaaagggggagagtttctataatccttatattcctcaagtgttggaggaattgagtagcaaaggcttgatcaaggagagtgagggtgccagagttatatttattcaaggtcatcagatccccttgatagtggttaagagtgatggtggcttcaactatgcctcgactgacttggctgccctttggtatcggctcaatgttgagcaggcagagtggatcatatacgtgacagatgttggtcagcagcagcactttgacatgtttttcagtgctgcaaagatggctggttggctgccaggtccaaacgaaaagaagtttccgaaaacaagccatgttggatttggtctagttcttggttcagatggcaagcggttccgaacgcgcagtactgaggttgttcgattggtagagctacttgatgaggctaaatctcggagcaaatcagaactactacaacggctcactgaaaatggcaaaattgttgactggacggatgaggaattagagcaaacttcagaggcagttggatatggtgctgtgaagtatgctgatctcaagaataatcgtctgactaattacacatttagttttgaacaaatgctgagcgataagggaaatactgctgtgtaccttcagtatgcacatgctcgtatttgttccattattcggaaatccaacaaggatgtggaagatctgaagatgactggagccatttctcttgaccatccagatgagcgtgtgttggggctgtatcttatccgatttgctgaggtggttgaagaggcatgcacgaatctgcttccaaatgttgtgtgtgaatacttgtacaatctatctgaaatgttcacaaaattctataccaactgtcaggtggtcgggtcaccggaggagacgagccgactgttgctttgccaagcgactgctgttgtcatgcgacagtgcttcaatctgctagggatcaccccagtctacaagctgtgatcggctgcatgtttgaagtttgatttatacattcaacatcgctttacgtagaaacccattcatcatggttgcagttttggccttgtaacctagttgaggcagttaacagactataatccatctccctgtttgaaaatagaagcaactcaaaagtttgtaacaaaatatgctctgcagagtttctattgatccattacattacgtattttggtgtttgtattccctcatggcagctcatcagccaatgctgtatggcaagttgctagtcaggtgt

SEQ ID NO: 138232 - DNA, 2304 bp, Zea Mays
cccagcctcccacgcgtgaccgtgagagggaagggggtatttaacagacggcgggccgaggatgcgagctctcgcggcagcagcaactgcagtggcggcgcctacccccacgcgcctccgcctcccgctcctctcccgcaccctgcgctctgtgttgtctacttagccaggtcactgtagaagctcttattcctccaggctcctacggttctcgtgcagtgccaccaccatgggagatgagacctcaacctcggttgctccccaggaacaggaatccactgtgcaggctgggagtgtcaagcaacagctctccgggctggtccttatgtccctccgggctactgtgcctgaggtggaggtagaaccgatggttgaagtttcagcaaagtttgctgactaccaatgcaacaatgctatgggattatggtcaaaggttaaaggatctggaaccagtttcaaaaaccctaatgccattggacaggccattgccaagaacttgccttcttctgatattattgaatccacatctgttgctggacctggttttgtgaatattgtcttatcaaaccgctgggttgcacagagaatacaagacatgctcgttaacggtatcaagacttgggcaccaattcttccagtaaagagggcagtgattgatttttcatcacctaatattgcaaaggaaatgcatgtgggacatctaaggtctacaattattggagatacattagcacgcatgtttgagttctcgaatgttgatgttctgcgaagaaaccatgtaggagattggggtacacagttcgggatgctaatagaatatctttttgagaaatttccaaattggcaagagattggtagccaggccattggagaccttcagattttctataaagcatccaagcatagatttgacaatgatccagaatttaaagcaagggctcaacaaggagttgttcggctacagggaggagaagagagatatcgagaagcatggaaaaagatttgtgacattagcaggagtgaatttgacttggtctacaaacgcctaaatgtggtgcttgaagaaaagggggagagtttctataatccttatattcctcaagtgttggaggaattgagtagcaaaggcttgatcaaggagagtgagggtgccagagttatatttattcaaggtcatcagatccccttgatagtggttaagagtgatggtggcttcaactatgcctcgactgacttggctgccctttggtatcggctcaatgttgagcaggcagagtggatcatatacgtgacagatgttggtcagcagcagcactttgacatgtttttcagtgctgcaaagatggctggttggctgccaggtccaaacgaaaagaagtttccgaaaacaagccatgttggatttggtctagttcttggttcagatggcaagcggttccgaacgcgcagtactgaggttgttcgattggtagagctacttgatgaggctaaatctcggagcaaatcagaactactacaacggctcactgaaaatggcaaaattgttgactggacggatgaggaattagagcaaacttcagaggcagttggatatggtgctgtgaagtatgctgatctcaagaataatcgtctgactaattacacatttagttttgaacaaatgctgagcgataagggaaatactgctgtgtaccttcagtatgcacatgctcgtatttgttccattattcggaaatccaacaaggatgtggaagatctgaagatgactggagccatttctcttgaccatccagatgagcgtgtgttggggctgtatcttatccgatttgctgaggtggttgaagaggcatgcacgaatctgcttccaaatgttgtgtgtgaatacttgtacaatctatctgaaatgttcacaaaattctataccaactgtcaggtggtcgggtcaccggaggagacgagccgactgttgctttgccaagcgactgctgttgtcatgcgacagtgcttcaatctgctagggatcaccccagtctacaagctgtgatcggctgcatgtttgaagtttgatttatacattcaacatcgctttacgtagaaacccattcatcatggttgcagttttggccttgtaacctagttgaggcagttaacagactataatccatctccctgtttgaaaatagaagcaactcaaaagtttgtaacaaaatatgctctgcagagtttctattgatccattacattacgtattttggtgtttgtattccctcatggcagctcatcagccaatgctgtatggcaagt

SEQ ID NO: 138233 - DNA, 2290 bp, Zea Mays
cccagcctcccacgcgtgaccgtgagagggaagggggtatttaacagacggcgggccgaggatgcgagctctcgcggcagcagcaactgcagtggcggcgcctacccccacgcgcctccgcctcccgctcctctcccgcaccctgcgctctgccaggtcactgtagaagctcttattcctccaggctcctacggttctcgtgcagtgccaccaccatgggagatgagacctcaacctcggttgctccccaggaacaggaatccactgtgcaggctgggagtgtcaagcaacagctctccgggctggtccttatgtccctccgggctactgtgcctgaggtggaggtagaaccgatggttgaagtttcagcaaagtttgctgactaccaatgcaacaatgctatgggattatggtcaaaggttaaaggatctggaaccagtttcaaaaaccctaatgccattggacaggccattgccaagaacttgccttcttctgatattattgaatccacatctgttgctggacctggttttgtgaatattgtcttatcaaaccgctgggttgcacagagaatacaagacatgctcgttaacggtatcaagacttgggcaccaattcttccagtaaagagggcagtgattgatttttcatcacctaatattgcaaaggaaatgcatgtgggacatctaaggtctacaattattggagatacattagcacgcatgtttgagttctcgaatgttgatgttctgcgaagaaaccatgtaggagattggggtacacagttcgggatgctaatagaatatctttttgagaaatttccaaattggcaagagattggtagccaggccattggagaccttcagattttctataaagcatccaagcatagatttgacaatgatccagaatttaaagcaagggctcaacaaggagttgttcggctacagggaggagaagagagatatcgagaagcatggaaaaagatttgtgacattagcaggagtgaatttgacttggtctacaaacgcctaaatgtggtgcttgaagaaaagggggagagtttctataatccttatattcctcaagtgttggaggaattgagtagcaaaggcttgatcaaggagagtgagggtgccagagttatatttattcaaggtcatcagatccccttgatagtggttaagagtgatggtggcttcaactatgcctcgactgacttggctgccctttggtatcggctcaatgttgagcaggcagagtggatcatatacgtgacagatgttggtcagcagcagcactttgacatgtttttcagtgctgcaaagatggctggttggctgccaggtccaaacgaaaagaagtttccgaaaacaagccatgttggatttggtctagttcttggttcagatggcaagcggttccgaacgcgcagtactgaggttgttcgattggtagagctacttgatgaggctaaatctcggagcaaatcagaactactacaacggctcactgaaaatggcaaaattgttgactggacggatgaggaattagagcaaacttcagaggcagttggatatggtgctgtgaagtatgctgatctcaagaataatcgtctgactaattacacatttagttttgaacaaatgctgagcgataagggaaatactgctgtgtaccttcagtatgcacatgctcgtatttgttccattattcggaaatccaacaaggatgtggaagatctgaagatgactggagccatttctcttgaccatccagatgagcgtgtgttggggctgtatcttatccgatttgctgaggtggttgaagaggcatgcacgaatctgcttccaaatgttgtgtgtgaatacttgtacaatctatctgaaatgttcacaaaattctataccaactgtcaggtggtcgggtcaccggaggagacgagccgactgttgctttgccaagcgactgctgttgtcatgcgacagtgcttcaatctgctagggatcaccccagtctacaagctgtgatcggctgcatgtttgaagtttgatttatacattcaacatcgctttacgtagaaacccattcatcatggttgcagttttggccttgtaacctagttgaggcagttaacagactataatccatctccctgtttgaaaatagaagcaactcaaaagtttgtaacaaaatatgctctgcagagtttctattgatccattacattacgtattttggtgtttgtattccctcatggcagctcatcagccaatgctgtatggcaagt

SEQ ID NO: 138234 - DNA, 2283 bp, Zea Mays
cccagcctcccacgcgtgaccgtgagagggaagggggtatttaacagacggcgggccgaggatgcgagctctcgcggcagcagcaactgcagtggcggcgcctacccccacgcgcctccgcctcccgctcctctcccgcaccctgcgctctggtcactgtagaagctcttattcctccaggctcctacggttctcgtgcagtgccaccaccatgggagatgagacctcaacctcggttgctccccaggaacaggaatccactgtggctgggagtgtcaagcaacagctctccgggctggtccttatgtccctccgggctactgtgcctgaggtggaggtagaaccgatggttgaagtttcagcaaagtttgctgactaccaatgcaacaatgctatgggattatggtcaaaggttaaaggatctggaaccagtttcaaaaaccctaatgccattggacaggccattgccaagaacttgccttcttctgatattattgaatccacatctgttgctggacctggttttgtgaatattgtcttatcaaaccgctgggttgcacagagaatacaagacatgctcgttaacggtatcaagacttgggcaccaattcttccagtaaagagggcagtgattgatttttcatcacctaatattgcaaaggaaatgcatgtgggacatctaaggtctacaattattggagatacattagcacgcatgtttgagttctcgaatgttgatgttctgcgaagaaaccatgtaggagattggggtacacagttcgggatgctaatagaatatctttttgagaaatttccaaattggcaagagattggtagccaggccattggagaccttcagattttctataaagcatccaagcatagatttgacaatgatccagaatttaaagcaagggctcaacaaggagttgttcggctacagggaggagaagagagatatcgagaagcatggaaaaagatttgtgacattagcaggagtgaatttgacttggtctacaaacgcctaaatgtggtgcttgaagaaaagggggagagtttctataatccttatattcctcaagtgttggaggaattgagtagcaaaggcttgatcaaggagagtgagggtgccagagttatatttattcaaggtcatcagatccccttgatagtggttaagagtgatggtggcttcaactatgcctcgactgacttggctgccctttggtatcggctcaatgttgagcaggcagagtggatcatatacgtgacagatgttggtcagcagcagcactttgacatgtttttcagtgctgcaaagatggctggttggctgccaggtccaaacgaaaagaagtttccgaaaacaagccatgttggatttggtctagttcttggttcagatggcaagcggttccgaacgcgcagtactgaggttgttcgattggtagagctacttgatgaggctaaatctcggagcaaatcagaactactacaacggctcactgaaaatggcaaaattgttgactggacggatgaggaattagagcaaacttcagaggcagttggatatggtgctgtgaagtatgctgatctcaagaataatcgtctgactaattacacatttagttttgaacaaatgctgagcgataagggaaatactgctgtgtaccttcagtatgcacatgctcgtatttgttccattattcggaaatccaacaaggatgtggaagatctgaagatgactggagccatttctcttgaccatccagatgagcgtgtgttggggctgtatcttatccgatttgctgaggtggttgaagaggcatgcacgaatctgcttccaaatgttgtgtgtgaatacttgtacaatctatctgaaatgttcacaaaattctataccaactgtcaggtggtcgggtcaccggaggagacgagccgactgttgctttgccaagcgactgctgttgtcatgcgacagtgcttcaatctgctagggatcaccccagtctacaagctgtgatcggctgcatgtttgaagtttgatttatacattcaacatcgctttacgtagaaacccattcatcatggttgcagttttggccttgtaacctagttgaggcagttaacagactataatccatctccctgtttgaaaatagaagcaactcaaaagtttgtaacaaaatatgctctgcagagtttctattgatccattacattacgtattttggtgtttgtattccctcatggcagctcatcagccaatgctgtatggcaagt

SEQ ID NO: 138235 - DNA, 1010 bp, Zea Mays
gccgacggtccggcagccatcgaccattgtggtccaagtcaaaccacccccctctctccggctgcctcctgcccatgccctccccctataaatcaaataatcaaccaccacatcagagcagacctcagcgcaaagcagatcgaggacaagctcctgtcctgtgtctgtgtgctgtgtgcagaacatcacaagtcaagcaaagcaatggccaccaagatctacatcgtgtactactcgacatggggccacgtggcggcgctggcggaggagatcaagaagggcgcggacgcggtggccggcgtggaggccacggtctggcgcgtggcagagacgctgccggaggaggtgctcgggaagatgggcgcggcgccggcgcgcgaggaccacccggtgatctctccgcggcagctggcggacgccgacgccgtgctgctgggctttcccacgcggttcggcatgatggcggcgcagatgaaggcgttcctggacgccacaggcggtctgtggcagggccaggcgctggcggggaagcccgcgggcgtgttcctctgcacaggcacgcagggcggagggcaggagaccaccgcactcaccgccgtcacgcagctcgcgcaccacggcatgctcttcgtgcccgtgggttacaccttcggcgccggcatgttcggcatcgatcaggtcaggggtggcagcccctatggcgctgggaccttcgccggcgccgatggcagcaggacgcccaccgaggtggagctcgccatggccagacaccagggcacctacttcgccggcatcgccaagaagctcaaggccggagcagcagccctcgctgccgaagccttggcctaatcagtcgtcatgactactcagacggtctttatttattccatgctttgttgtttctataattaataattggttttatattggcgacagaatagtaaagtacgtacttacgtattatgtactacatcagcttgtttgttcctatacatgatgtcataagtggc

SEQ ID NO: 138236 - DNA, 89 bp, Zea Mays
tcttctcattcctcacttttttgtttggtttatgaaatggagtgagttaatccatcacaacctcattccttatagttagttgtttagta

SEQ ID NO: 138237 - DNA, 3804 bp, Zea Mays
  misc_feature (2239)..(2338): n is a, c, g, or t
ctactaccttctctcccgtgacacgccatctccgcaaaaccgccgctcgtcacctctcaacgccaccatgctccggccggcagccggagggctgaccctttccggttcctccaccgcgcgacctcttcctcctctcgcccgttcttagcccaaccaccatcaccgtcatcattcataaacaaaaaggcaggcaggcagtcagtccctcggcaggcacgagcgcagacggtgcgaggcgtccgcgtcgcgtccttccacctgtctccttcgccttgcgtgctcctggcttcaagaaaccgccgcacgccatccagcctgcggtgcggtggtcgcgcagcccgcctggctgccaccgctttccctctcctttcgcttctccgctaccgctaccgctaccaccagcggcgcgggcctccgggtcgtccggccggattcgttccccgggccgtgcaaccacgcacgcgcttgggttccgctcgtcgccgaaagcttctgctctgctcagtttccagctgggaggaggcgccgcctgcggaccgctgcgcaccacggagggaggtgaacttctttctgccacccactacatgactatcgacatcttgttggtggtggacaagctctcctctcagcctcagtgtgtccttcgcgaggctctggaatctcgcctgacgaacaaggttgctcctgcccctccatgatccacctcaactcctcaagccccagcagaatttcagcttctggtggctgcctttgcccctctgtttcctgcctgtcgtcctctcgcaatcctgaattgtgtctcattgcaaaagccctctacttgcgtcgctgaaataaactagtttgtccttgcaatcctgggtgggtgtctcattgcttcagcgctctgcctgcgcctctgaaggctgaagcaaagtatttctgcttcctcttacatagcccttccagcctgtctgcatcaccgtgccattcgtaaccccttcatccttctagctcaacttggactcgccatggatagcacagttgttggtctcaaactggttgtgctagccctttctgtggccatctggttgtttggcacctgctgccatgccgatttcacccctgcagacgactacctcatcaactgcggctccacggtcgacgcgactgtcgaccacagggttttcgtgtctgacacttctggggcagccatcctgacgaccccgacccagagcaccgccgcgaccacctcgccgaatttggtctcagggtttgaaggtgctatgctgtatcagactgctaggatattcgttgtgccatcgtcctatgccttcatgctcaagagccatggccgacattttgtccgccttcacttcttccccttcaaataccagagctatgacctcaccacggcgaccttcaaggtgtccacgcaggatgtcgtgctcctcgacaatttcacagcgcccagtagttcttcgccggtgttcaaggagtattccctgaacattaccagggacatgctcatcctcacatttgtgcctcttgggaacaacacaccggccttcgtcaatgctatcgaggtcatctctgtccctgatctcataaccgactcggtactaagtctggaccctgtcggtcagtatcttgggctgtcaacacagccgctgcagacattctacaggatcaacgtggggggacccaaggtgactcctgagaacgacacgctctggcggacatgggttactgatcaaagctccttcgtaaattccactcccactacacttgccaatttcccaggaaagctgaattttcagaacggattggcaacagaggaggatgcaccggacagtgtgtacaatactgcaaggcggttgcaaaacagtactcgctccgtgtccaatatgacgtggcaatttgatgttgatgcccgttcaagctatctcattcggttccatttatgtgacattgtgagcaaggctccttatcagctcctgtttgatgtatatgtggatagctggtcggtggtgaaagatctagatctctccgataaagcatttggcaacttggcaacaccatattacattgatgctgtcttgctatcaagtgatccatctggtaagctcagtgtcagcattgggccttctgctgtaaagatagcagcgccggatggtatcctgaatggcttggagatcatgaagatgaacatcagtacagggtctgtttccattgtggcaccaccttcagtggcaagaannnnnnnnnnnnnnnnnnnnnnnnnnnnnnnnnnnnnnnnnnnnnnnnnnnnnnnnnnnnnnnnnnnnnnnnnnnnnnnnnnnnnnnnnnnnnnnnnnnncaagctacatccaccagcaccaagtcggccctcaagttcttggacacccctcaatggtcttagcttccttaccacaggcagccgaaccaccagtcggaccactcttacgtctggaactaccggtgacacgagctaccgaattccttttgttgtgctgcaagatgcgacaaatcactttgatgagcagatggtcattggagttggaggctttgggaaggtctacaaagcagtgatgcaggatggaagcaaacttgcagtaaagcggggcaaccagaagtcccaccaagggctgagggagttccgtacagagattgaattgctgtcagggctgcgacaccgtcatctcgtgtcgctcattggttactgtgatgaacacaacgagatgatcttggtgtatgaatacatggagaaaggaactctgaagagccatctttatggcggtgatatgccgcctctcagctggaagaaaagactggaaatctgcgtaggagcagcaagagggctccactaccttcacaccggttttgcccagtcaatcatacaccgtgacgtcaagtcagcaaacatactactcgatgaaaatctcttggccaaggtttctgattttggcctctcaaaggttgggcctgaattcgaccagacgcatgtgagcacagcagtgaaagggagcttcgggtaccttgatcctgagtacttccggagacagaagctgactgacaaatcagatgtgtactcttttggtgtggtgctgcttgaggtgatttgtgcgaggccggttatcgacccgactcttccaagggacatgatcaacctcgcggagtgggctatcaagtggcaaaagagaggagagcttgatcagattgtcgaccagcgcattgctgggacagtcaggcctgaagcactgaggaagtttggagagacggtggagaaatgccttgcagagtatggtgtcgagcgtcctactatgggggatgtgctgtggaacctggagtttgtgctgcagctgcaggaggcaggtccagacatgtccaacatcaacagtatgaatcagatctctgaactcccttcaaatccaaagagagttagctccctggatatcagcagtacagatcaaagccgcgtgcccatcgactactccgacatgtcaacgagtaacgccttctcgcagctaatcaatgcagaaggaaggtgaactggatagaattgttccagtcactgaaaaaaatgtttgttacaaaaactagagatgcctcttgtgtgactacccagcctatcccttctcacatatacaacaccaagttgtgaatcttattgaaattttgtttgccacttgtaactacttatgttctagaaaagggtgagtagctttattgcaatcgtcttttgctcaaatatgtctgtacatgttctgtcacgacccaccagccgaccttcattcgctaagatagttcggcaacatgcttaac

SEQ ID NO: 138238 - DNA, 2311 bp, Zea Mays
  misc_feature (824)..(923): n is a, c, g, or t
caggatgtcgtgctcctcgacaatttcacagcgcccagtagttcttcgccggtgttcaaggagtattccctgaacattaccagggacatgctcatcctcacatttgtgcctcttgggaacaacacaccggccttcgtcaatgctatcgaggtcatctctgtccctgatctcataaccgactcggtactaagtctggaccctgtcggtcagtatcttgggctgtcaacacagccgctgcagacattctacaggatcaacgtggggggacccaaggtgactcctgagaacgacacgctctggcggacatgggttactgatcaaagctccttcgtaaattccactcccactacacttgccaatttcccaggaaagctgaattttcagaacggattggcaacagaggaggatgcaccggacagtgtgtacaatactgcaaggcggttgcaaaacagtactcgctccgtgtccaatatgacgtggcaatttgatgttgatgcccgttcaagctatctcattcggttccatttatgtgacattgtgagcaaggctccttatcagctcctgtttgatgtatatgtggatagctggtcggtggtgaaagatctagatctctccgataaagcatttggcaacttggcaacaccatattacattgatgctgtcttgctatcaagtgatccatctggtaagctcagtgtcagcattgggccttctgctgtaaagatagcagcgccggatggtatcctgaatggcttggagatcatgaagatgaacatcagtacagggtctgtttccattgtggcaccaccttcagtggcaagaannnnnnnnnnnnnnnnnnnnnnnnnnnnnnnnnnnnnnnnnnnnnnnnnnnnnnnnnnnnnnnnnnnnnnnnnnnnnnnnnnnnnnnnnnnnnnnnnnnncaagctacatccaccagcaccaagtcggccctcaagttcttggacacccctcaatggtcttagcttccttaccacaggcagccgaaccaccagtcggaccactcttacgtctggaactaccggtgacacgagctaccgaattccttttgttgtgctgcaagatgcgacaaatcactttgatgagcagatggtcattggagttggaggctttgggaaggtctacaaagcagtgatgcaggatggaagcaaacttgcagtaaagcggggcaaccagaagtcccaccaagggctgagggagttccgtacagagattgaattgctgtcagggctgcgacaccgtcatctcgtgtcgctcattggttactgtgatgaacacaacgagatgatcttggtgtatgaatacatggagaaaggaactctgaagagccatctttatggcggtgatatgccgcctctcagctggaagaaaagactggaaatctgcgtaggagcagcaagagggctccactaccttcacaccggttttgcccagtcaatcatacaccgtgacgtcaagtcagcaaacatactactcgatgaaaatctcttggccaaggtttctgattttggcctctcaaaggttgggcctgaattcgaccagacgcatgtgagcacagcagtgaaagggagcttcgggtaccttgatcctgagtacttccggagacagaagctgactgacaaatcagatgtgtactcttttggtgtggtgctgcttgaggtgatttgtgcgaggccggttatcgacccgactcttccaagggacatgatcaacctcgcggagtgggctatcaagtggcaaaagagaggagagcttgatcagattgtcgaccagcgcattgctgggacagtcaggcctgaagcactgaggaagtttggagagacggtggagaaatgccttgcagagtatggtgtcgagcgtcctactatgggggatgtgctgtggaacctggagtttgtgctgcagctgcaggaggcaggtccagacatgtccaacatcaacagtatgaatcagatctctgaactcccttcaaatccaaagagagttagctccctggatatcagcagtacagatcaaagccgcgtgcccatcgactactccgacatgtcaacgagtaacgccttctcgcagctaatcaatgcagaaggaaggtgaactggatagaattgttccagtcactgaaaaaaatgtttgttacaaaaactagagatgcctcttgtgtgactacccagcctatcccttctcacatatacaacaccaagttgtgaatcttattgaaattttgtttgccacttgtaactacttatgttctagaaaagggtgagtagctttattgcaatcgtcttttgct

SEQ ID NO: 138239 - DNA, 689 bp, Zea Mays
catcattcataaacaaaaaggcaggcaggcagtcagtccctcggcaggcacgagcgcagacggtgcgaggcgtccgcgtcgcgtccttccacctgtctccttcgccttgcgtgctcctggcttcaagaaaccgccgcacgccatccagcctgcggtgcggtggtcgcgcagcccgcctggctgccaccgctttccctctcctttcgcttctccgctaccgctaccgctaccaccagcggcgcgggcctccgggtcgtccggccggattcgttccccgggccgtgcaaccacgcacgcgcttgggttccgctcgtcgccgaaagcttctgctctgctcagtttccagctgggaggaggcgccgcctgcggaccgctgcgcaccacggagggaggtgaacttctttctgccacccactacatgactatcgacatcttgttggtggtggacaagctctcctctcagcctcagtgtgtccttcgcgaggctctggaatctcgcctgacgaacaaggttgctcctgcccctccatgatccacctcaactcctcaagccccagcagaatttcagcttctggtggctgcctttgcccctctgtttcctgcctgtcgtcctctcgcaatcctgaattgtgtctcattgcaaaagccctctacttgcgtcgctgaaataaactagtttgtccttgcaa

SEQ ID NO: 138240 - DNA, 2067 bp, Zea Mays
tcgccacgtaacaactcccccaatccgtcccgtcggccggacgagcagggcccaagggcccaccttaccatggcgaccgccactgccgcccccgtccccgccggcggccacccgtaccgccgcgcccgcactcgctgcggcccaccgcgcctgcaccgcctgcgcttcccggccgcagcagcagccgcttcgtcttccctgcccgccccgtcgtccatgctgccaccgctgccagatggaggcgggcggctggtggcggagctggtgtgcgcgttcaacgagctcacggagcggatgggggaggacctggcgacgtcctcctcgtcgagcctgctcttccgtgtgctgaagctggcgctccccgccctccgcgacgtggagggcggccgggcactcgcacgcgcgctcgccgtcgccgcgaccctcgctgacctccagatggatgctgaagtcatatcagccggcatactaagagaagcattagatgcaggagctgtaagaatgagggatgtaaaaacacagattgggatcagcacagctcatttgctgcatgacagcttaaggattaagcatgctccttcgaagcttgacgtattggatgatgaaggtgcaagcacattgagaaggtttattctttcatactatgatatcagggcagtcatattggagcttggaatgaagcttgatatgatgagacaccttgattacctccctaagtatttgcagcagataaaatctctcgaagtcatgaagatatatgccccacttgcacatgctgttggagcgggtaatctgtcactagaattagaggatctttcatttcgttacttgtttcctcattcctatgaccatgttgatcagtggttgagaagccaagaaggtgactgcaaggctataataaatttgtacaaggagcagttgcttcaagcactgcaggctgataatgagttgaggaggattgcacaggacatctcaattcaagggaggtataaaagccgtttcagtactatgaagaagctagtaaaagatggacggaagccagaagaagttaaagacattctaggtttgagggtaatcttggagcctcggtgtggtggcaattcatctgattggggccctagggcttgccacaggacacatgaaattattcaagctatgtggaaggaaatcccgggtagaacaaaagattatataactcacccaaaacgaaatggttaccagagcttgcatgtggccatcgatgtcagtgaacctgggaaggtgaggccattaatggaggtacagatacgcaccaaggagatgcataggtttgctgttggtggagaggcatctcactctctctacaagggtggtcttactgatcctggagaggctaaaaggctcaagactattatgttggcggcagcggagttagcagctctgcgcctacgagacctaccaggcagtgaccacgtagttgggaactgcaagaacccggctttctgtcagcttgacaaaaatggggatgggagaatcagcatcgaggagctcactgaggtgatggaggatctaggtgctggaggcgaagacgcaacagagctcatgcatcttcttgatgcaaacagtgacggctccttgagctctgacgaattcgagtcattccagagacagatcgaagtgatgagaaacttggaggacgatgataaccactataggaagatcttgaaggagaagctgcacacgatcgacagtgcaggtctcatccatgtgtaccgcaaggagctcagtgacaaattgcttgtgggctgacctggcagccatcttattgttgttttgtatgtataccacactgagaggtgactccagcactgatctgtaaatagtcgttgaacgtacgtggtatccagcaatattacggtagtgaatttatagggtggattgcgagatcaagaaatgaaggtaaatatataagagattcaaagatttagaggtaaatatataagaggttcgaagatttagacaggttcgaaccatataacaccctatgtccttttagtgttcattgtctatatacaatgtgatcagatg

SEQ ID NO: 138241 - DNA, 953 bp, Zea Mays
cccagcgcatggaacactgactcctgcacgatccagccgtcagattctcaagcccctagatccaacagtccatgtcgtttttctcctctatataggcgcacacaaccgagaacacagaaaccctagactgcacccccatcccgcagcagccaaaacctacctagccgccgccgcaggcggccccccatcgccgccaagatgcagatctttgtgaagactctgacggggaagaccatcactttggaggtggagtcctccgacaccattgacaatgtgaaggccaagatccaggacaaggagggcatccccccggaccagcagcggctcatcttcgccggcaagcagctcgaggacggtcgcaccctcgccgactacaacattcagaaggagtccaccctccacctggtgctccgcctccgcggtggcgccaagaagcgtaagaagaagacgtacaccaagcccaagaagatcaagcacaagcacaagaaggtgaagctctccgtgctgcagttctataaggtggacgacgccactggcaaggtgacccgcctccgcaaggagtgccccaacacagagtgcggcgcgggcgtcttcatggccaaccacttcgaccgccactactgcggcaagtgcggcctcacctatgtctacaaccagaaggcgtaattgcttgccccgatttgctttatccgccaacctatcaagcattcagatgttggttactcaaattgtatctcatttagatctgtctgaggttgaaacttaaatggagcagtagtatctatcatattggtacccctgttactgagtataattttgttttcatatccatccttacagacgattgcactttttgcccgtttcaccatgattttttgattcgtaggtcgatgatagtagtattgcataattggattgatttatgtttgcttgattattttaattgctactaa

SEQ ID NO: 138242 - DNA, 1573 bp, Zea Mays
aataatccgaagcacatagcattacacatacgcactttctctctctactgtctgtctgtttctcccaatcctccacagtctctctctagagtagacccaggaaagaggcgatggatatggccattgacacgccatcgccggcgccgcccacgccgccggcgccatcggcagcggccgggcggcagacgcgtgcggcagaggcggtgcgtctggagcaccaactggtgcgcgtgcctctcgagtccctccgcgccaccgtccgctcgaaccaccgcctcgccgagaaggagatcgccgccgtcctctcctccgcctccgcggcccccgcagagagcagtgccgccgccgtcgaccacctcacctccctcgtctctcgcctccacggcctcaagcgcaagatggaggagggcgcacgagcggaggaactgcaggtgcagcggtgccgggcgcgtctggaccggctggcgactgccagcaccggcgacgatgccgaatgggaggacatgcggttgaagaggatcctggtcgattacatgcttcggatgtcctactacaattccgccaccaagctcgctgagacttctggtattcaggacctcgttgatattgatgtctttctcgatgcgaaaagagtaattgattctcttcagaataatgaagtttctcctgctttagcttggtgtgcagaaaacaagtctcggctaaagaaatcgaagagtaagcttgagtttttactgaggcttcaagagtttgtggagtttgtcaaggttaagaatttcattcaggctatagcatatgctcgaaaacaccttgctccctggggctctgtacacatgaaagaattgcagcgtgtcacagcaacattggtttttagaagcaatactaattgtactccatacaagatattgtttgagcaagaccggtgggactatcttgttgacattttcaagcaagatttttgcaagttatatggcatgacactagagccgctgctgaacatatatctgcaagcaggcctgacagctctcaagaccccgttctgctctgagggtagctgtcccaaagaagaccccttgtctctggagggcttcaggaaactagccgagcctctgcccttctctaaacagcaccactcgaagcttgtttgttacatcaccaaggagctcatggacactgagaacccgcctcaggttctgccgaacggctatgtctacagtgagaaggcgcttcaagagatgtccaagaaaaatgacggcaagattacatgccccaggacaggagatgtttatgacgtttcagagtgtgtcagggctttcatctcctaatcatgaaatactctgatttggtgtggctttgggaatctgagtgaatgtacatagagtggtcagcgcattgtgcgccatgtcgagttgattgaactaacctgcaatgttgaactggctggatgttggattgtgcgcatcgttgcaaccgtgaaactgacgtttttcatgctccaacgccttccagagtggaacaactgtataatagcggggaggcttcagacccgatctaagtgaaattaaaaaaataa

SEQ ID NO: 138243 - DNA, 856 bp, Zea Mays
tagcattacacatacgcactttctctctctactgtctgtctgtttctcccaatcctccacagtctctctctagagtagacccaggaaagaggcgatggatatggccattgacacgccatcgccggcgccgcccacgccgccggcgccatcggcagcggccgggcggcagacgcgtgcggcagaggcggtgcgtctggagcaccaactggtgcgcgtgcctctcgagtccctccgcgccaccgtccgctcgaaccaccgcctcgccgagaaggagatcgccgccgtcctctcctccgcctccgcggcccccgcagagagcagtgccgccgccgtcgaccacctcacctccctcgtctctcgcctccacggcctcaagcgcaagatggaggagggcgcacgagcggaggaactgcaggtgcagcggtgccgggcgcgtctggaccggctggcgactgccagcaccggcgacgatgccgaatgggaggacatgcggttgaagaggatcctggtcgattacatgcttcggatgtcctactacaattccgccaccaagctcgctgagacttctggtattcaggacctcgttgatattgatgtctttctcgatgcgaaaagagtaattgattctcttcagaataatgaagtttctcctgctttagcttggtgtgcagaaaacaagtctcggctaaagaaatcgaaggtttgcttgactttcttctgctttagcattgatctaatccaatcagcatagaactggtgttgtaatgtgttttgatagagccattgataaatggctaactgtggtgatgccatgaatgtcagacagtaatgtttctaatagttccttggacatttt

SEQ ID NO: 138244 - DNA, 477 bp, Zea Mays
tattgggctactacgtgcggtaaagggtgatgactgtcttttgtgatcagccagattggcttcaaatatggacagagattgagagacaggacaatcttaataagttgcatgcagcaaacgatttagaaaaaattaaggaacgatgcttgagcacaactcagttgattagaagtctccagtaaagaaaagagaaacatctcgacctcagcttgtctattgtggcatccggcgtggaagcacaaaacgttgtagcatatggtgtggaaacatcggaggagctccggccaccgctactggcaatctcggagccccacgacttcttggcctgcgggagcggtctctccctgaaggctgactctaggcaccatagaagacagagcagatcttcgacgatgagaatggggacagattggagcagcagctgcggccgaggcacaagctgatcggtgggaggagaaccaagcagagcagctttag

SEQ ID NO: 138245 - DNA, 482 bp, Zea Mays
aaataacatcattcgcttatcttattatatgaatctaaaatgttaaaacataatatttaggtacgtttatacctttgtcttgacaaataataattcccgagtgatgcgtttgcaattacaggaatgcgtgaacagtaaaggaatactgttcactatttataggcacaggacacagcctgtgaggaattacaatcatgcccctcataaaagtttacaacaatgactcagacccttatggactaaaaggtcattctatctttaagtcggttcgaccctccatcttcggatatgctataataccgaagcttcatgaatggtaccttcggcatcacgtacgagcagcttcagccgaagctgtttctttccgcaggaccttcggcgacgaagcatggtcccaacaggtagagtttaagattgaaatgggagctttcctactttaagtattgtatacttaaggcttgtttgttttcttgcacgattat

SEQ ID NO: 138246 - DNA, 610 bp, Zea Mays
gatgagctaattacaacgtgattaacagtttgctttgattcttgaacagcaaggagcagatgcaaaccaaactattgtatgcgataaactcagaagctggttttgatctaagttgatcatgttcgggattcagtatttgtgcagtgtagatagttgttagagaacagcttaaaggcacccagagccaaaccaccaaccctcggcctcattcgaagccccatgaggccacgaaggaaaaaagaaaagaaagaaaaggaagaagaaaagacacttgtttctcaaaatagttggatgtgtggagggagtctgcaatatactccctccgctttttttatttgtcatggtttagtttaaaaatgaactgccagtaaagaaaactagggcttcccaacataaataggtggacgctgtttaatcaatcatggacatgtacgtatgtattctatacagaaatttctatttctatatttaaccagtgctggttttgcacgaccaattggtggtttcaatcttgcagagaaactgatgccctcattgggccatggcccatggctgcgtagataattctccgctataagatcttctcagcacgataaaaaagataaaaaaa

SEQ ID NO: 138247 - DNA, 1460 bp, Zea Mays
gttggaattgatggtggtggaattttcaaggatttcatggaaaatattactcgagcggcttttgatgtgcagtacggtctcttcaaggagactgctgatcatcttttgtacccaaacccaggatcaggattggttcatgaactacatctgcaatatttccattttcttggaagtctacttgggaaggcaatgtatgaaggcatacttgttgacttgccgtttgcaacgttcttcttgagcaagttgaaacaaaagtacaattttttaaatgatcttccttcattggatccagaattgtatcggcatcttctatttttaaagcattataatggtgatatctcagagttggaactatattttgttattgtaaataatgaatatggtgaacaatgtgaagaagaacttctccctggtgggaggcacatgcgtgtaacaaatgataatgttattacttttatccatcttgtcgccaatcatcggttaaactaccagatccgtgcacaaagtacacacttcttgagaggttttcagcagcttataccaaaagattggattgatatgttcaatgaacatgaaattcaggttcttatatctggatctttagaaagcttggatattgatgacctgcggtcgaacaccaactattctgcaggatatcatccggaccatgagcttattgagatgttttgggaggtcttgaagagcttaagttcggacaaccagaaaaagtttctcaagtttgttactggatgttctcgtggccccctccttggatttcagtatctcgaaccaaaattctgcattcagagagctggtgttccagggctggaggagcatgcagaccgcttgcctacatcagctacctgcatgaaccttctgaagcttccaccctataaaagcaaggagcagatgcaaaccaaactattgtatgcgataaactcagaagctggttttgatctaagttgatcatgttcgggattcagtatttgtgcagtgtagatagttgttagagaacagcttaaaggcacccagagccaaaccaccaaccctcggcctcattcgaagccccatgaggccacgaaggaaaaaagaaaagaaagaaaaggaagaagaaaagacacttgtttctcaaaatagttggatgtgtggagggagtctgcaatatactccctccgctttttttatttgtcatggtttagtttaaaaatgaactgccagtaaagaaaactagggcttcccaacataaataggtggacgctgtttaatcaatcatggacatgtacgtatgtattctatacagaaatttctatttctatatttaaccagtgctggttttgcacgaccaattggtggtttcaatcttgcagagaaactgatgccctcattgggccatggcccatggctgcgtagataattctccgctataagatcttctcagcacgataaaaaagataaaaaaa

SEQ ID NO: 138248 - DNA, 1456 bp, Zea Mays
attcgagtttcatttattaatgaacatggtgaggaagaggttggaattgatggtggtggaattttcaaggatttcatggaaaatattactcgagcggcttttgatgtgcagtacggtctcttcaaggagactgctgatcatcttttgtacccaaacccaggatcaggattggttcatgaactacatctgcaatatttccattttcttggaagtctacttgggaaggcaatgtatgaaggcatacttgttgacttgccgtttgcaacgttcttcttgagcaagttgaaacaaaagtacaattttttaaatgatcttccttcattggatccagaattgtatcggcatcttctatttttaaagcattataatggtgatatctcagagttggaactatattttgttattgtaaataatgaatatggtgaacaatgtgaagaagaacttctccctggtgggaggcacatgcgtgtaacaaatgataatgttattacttttatccatcttgtcgccaatcatcggttaaactaccagatccgtgcacaaagtacacacttcttgagaggttttcagcagcttataccaaaagattggattgatatgttcaatgaacatgaaattcaggttcttatatctggatctttagaaagcttggatattgatgacctgcggtcgaacaccaactattctgcaggatatcatccggaccatgagcttattgagatgttttgggaggtcttgaagagcttaagttcggacaaccagaaaaagtttctcaatatctcgaaccaaaattctgcattcagagagctggtgttccagggctggaggagcatgcagaccgcttgcctacatcagctacctgcatgaaccttctgaagcttccaccctataaaagcaaggagcagatgcaaaccaaactattgtatgcgataaactcagaagctggttttgatctaagttgatcatgttcgggattcagtatttgtgcagtgtagatagttgttagagaacagcttaaaggcacccagagccaaaccaccaaccctcggcctcattcgaagccccatgaggccacgaaggaaaaaagaaaagaaagaaaaggaagaagaaaagacacttgtttctcaaaatagttggatgtgtggagggagtctgcaatatactccctccgctttttttatttgtcatggtttagtttaaaaatgaactgccagtaaagaaaactagggcttcccaacataaataggtggacgctgtttaatcaatcatggacatgtacgtatgtattctatacagaaatttctatttctatatttaaccagtgctggttttgcacgaccaattggtggtttcaatcttgcagagaaactgatgccctcattgggccatggcccatggctgcgtagataattctccgctataagatcttctcagcacgataaaaaagataaaaaaa

SEQ ID NO: 138249 - DNA, 847 bp, Zea Mays
gactcctctttcccctccccgagcgtgcacgtctcgtcatcgccctactcgctcgccccatcccggagtctccccggctcccaaaccctagcgcctcccggacctcgcaggtgagggaggcggcgatgttcttctccggtgacccatcggcgcggcggcgggtcgacctcggcgggcggagcagcaaggagcgggaccgcaaggtgctgctcgagcagacgcgcgaggagcggcgccggcgccagggcctccgcctccagaacacctccgccacgaagatccagaaattcttcagagggaagaaggctttggaattggcccgctcagaggttcggaagaatttttgctcaacttttggggagcattgcgagaggatagagtggaacatctttggcactaattctgactttcttcggcaattactgttcttcttcaatgcaaatgaagacaatgacatagctatactttgtcatgtctgcaatttgctgctgcaatatgttaaacaaggcggagatgttgtaactctcttcactggtgtgaatggctcctcgctgcaacctcttgttgctcaccgagtaaaaaaatttgccctcatctgtgtgcaagcagtctatcaaaagaggcatgattggggcagccaacttttaacaacacctggaaccacatcagtgccttctgtgtcattactggaaactgtaggttgcttgataaatccaaaatttctttggaactgcaaagtagttggttatcttcagcagagaaagatctattgcttatttcgtggcattatcgtatctgtaccggtaagttggtcttctagttgctctttgacattcgtttggatatt

SEQ ID NO: 138250 - DNA, 242 bp, Zea Mays
cacgaaggccgcgggacttacacctctctcacgctcgactccggccacctcgcctctccccccttcgcgctcgcccacgcgctcgacccatctgggctggggcacgcagcacactcactcgtcggcttagggacccccctgtctcgaaacgccgacaccccccttgtaataatttctatttagaatcattaatctgggacacttgtaatgcacatgatgttttccttatgtattaattcctt

SEQ ID NO: 138251 - DNA, 393 bp, Zea Mays
atggagcatatgcattggaaggaagaaagagcttggccttacaaacttctggatgcaacttatgttgcagagaataagctatggtacacacctgagtgcactggtaatgggtcggatgggcaggccggcccaagcccaagggcttttcacatagctgttgtcattgactacaacatgttcatctttggtggccgatctgggggcaagcgtttaggttatttctggatgctagacactgacttatggcaatggtcggagatgactggctttggtgatttaccgtcaccacgagagtttgctgctgcttcagccataggaaacaaaaagattgttatggcacaaaccacaaatacacacaaaccagatgagaatgcctaccatttgtttctgtaa

SEQ ID NO: 138252 - DNA, 139 bp, Zea Mays
ttttttcaaaattacaaaaacaatactaagtgtacctattactgtctactcgtctcatgatgattactatgtagataaattctctaagttatgaacagtgaccaatgaaatatattcatttgcatacagttctcaaact

SEQ ID NO: 138253 - DNA, 1081 bp, Zea Mays
atctttcttctgtctcctttttttctctgtcatgggctcatggcacacatccaactgcaatgtggtgaacgagtatgtgggagcgatgaggcagctcgcatgtgagatcctggacctgctcggagaggggctagggctcaaggaccccagatccttcagcaggctcatcgctgacacagacagcgactcactcctgcggataaaccactaccctccaccatgcgccattcacaagcttgaccacgacagtcagtgcaggatgaagaacagtttcaggatcgtggcaggcaatggcgcgaaccagtcggcaggtgcacggatcggattcggggagcactcagacccgcagatccttagcttgctccgatcaaacgatgttgacggccttcaggtgcttctgaacagcgacggcagagaggtgtgggttcaggtgccagccgatccatcagcgttctttgtcaatgttggtgatctcctccaggccttcacaaatgggaaggtgataagcgtccggcacagggtaattgcaagctcgagcagggcgaggctgtcaacgatctacttcgctgcgccgccactgcatgcacgaattttggccctcccagagacagtcacagccaactcacccaggcagtaccggcccttcacctgggccgagtacaagaagacaatgtactccctccgcctcagccacagccgcctcaacctcttccacatcggccatgatgaccacggcaaaggagaacaagaatagggagaaagtggctgaactgcaggcagagagtttatgttggaggcttaggtaggtagaattgtccccaaaattttggctctctggcctccacagccagataatgtctagcagtatgctggttctgccaagtgccaatgggtaatagtatttagcattgtacacaagtccttgttgtatggaactgatgtactattgcctgttttagcagtttgttgtctccacctaacttttatttactctcccccccccctttctagagttgcctttgcttaaagaaacctcttccttgcacaaaagtgagacctaacaaggactccctgctgacaa

SEQ ID NO: 138254 - DNA, 1522 bp, Zea Mays
gctcccagcccactatacagtatatacacacatcatcccactccttatcgctatatatagcagtgttgtgtgtccatctctctgctacattgcaccgcatcgtctaagctcgcctgccctttacagcagcttactactacaaagacgacaacacagcgcgcgcgcgccaagctgagctcagctcgtcacgacacgccagcatggtggtgccttccacgacgccggtggtgcgccaagaaacgccaccgccgtcccacgacggcataggcataccgacggtggacctgtcggcgccgggcggccgcggcgcgctgtcgcggcaggtggcgcgcgcgtgcgcgcagcacggcttcttccgggccgtgaaccacggcgtggcgccaggccccgccgcacggctggacgccgccgccaggacgttcttcgcgctggcgccgcacaacaagcagcgcgccggcccgcccagcccactcggatacggctgccgcagcatcggcttcaacggcgacgccggggagctcgagtacctgctgctccacgccaacccggccgccgtcgcgcacagggccagatccatcgacactgatgacccctcgcgcttcagcaatgtggtgaacgagtatgtgggagcgatgaggcagctcgcatgtgagatcctggacctgctcggagaggggctagggctcaaggaccccagatccttcagcaggctcatcgctgacacagacagcgactcactcctgcggataaaccactaccctccaccatgcgccattcacaagcttgaccacgacagtcagtgcaggatgaagaacagtttcaggatcgtggcaggcaatggcgcgaaccagtcggcaggtgcacggatcggattcggggagcactcagacccgcagatccttagcttgctccgatcaaacgatgttgacggccttcaggtgcttctgaacagcgacggcagagaggtgtgggttcaggtgccagccgatccatcagcgttctttgtcaatgttggtgatctcctccaggccttcacaaatgggaaggtgataagcgtccggcacagggtaattgcaagctcgagcagggcgaggctgtcaacgatctacttcgctgcgccgccactgcatgcacgaattttggccctcccagagacagtcacagccaactcacccaggcagtaccggcccttcacctgggccgagtacaagaagacaatgtactccctccgcctcagccacagccgcctcaacctcttccacatcggccatgatgaccacggcaaaggagaacaagaatagggagaaagtggctgaactgcaggcagagagtttatgttggaggcttaggtaggtagaattgtccccaaaattttggctctctggcctccacagccagataatgtctagcagtatgctggttctgccaagtgccaatgggtaatagtatttagcattgtacacaagtccttgttgtatggaactgatgtactattgcctgttttagcagtttgttgtctcca

SEQ ID NO: 138255 - DNA, 1243 bp, Zea Mays
gctcccagcccactatacagtatatacacacatcatcccactccttatcgctatatatagcagtgttgtgtgtccatctctctgctacattgcaccgcatcgtctaagctcgcctgccctttacagcagcttactactacaaagacgacaacacagcgcgcgcgcgccaagctgagctcagctcgtcacgacacgccagcatggtggtgccttccacgacgccggtggtgcgccaagaaacgccaccgccgtcccacgacggcataggcataccgacggtggacctgtcggcgccgggcggccgcggcgcgctgtcgcggcaggtggcgcgcgcgtgcgcgcagcacggcttcttccgggccgtgaaccacggcgtggcgccaggccccgccgcacggctggacgccgccgccaggacgttcttcgcgctggcgccgcacaacaagcagcgcgccggcccgcccagcccactcggatacggctgccgcagcatcggcttcaacggcgacgccggggagctcgagtacctgctgctccacgccaacccggccgccgtcgcgcacagggccagatccatcgacactgatgacccctcgcgcttcagcaatgtggtgaacgagtatgtgggagcgatgaggcagctcgcatgtgagatcctggacctgctcggagaggggctagggctcaaggaccccagatccttcagcaggctcatcgctgacacagacagcgactcactcctgcggataaaccactaccctccaccatgcgccattcacaagcttgaccacgacagtcagtgcaggatgaagaacagtttcaggatcgtggcaggcaatggcgcgaaccagtcggcaggtgcacggatcggattcggggagcactcagacccgcagatccttagcttgctccgatcaaacgatgttgacggccttcaggtgcttctgaacagcgacggcagagaggtgtgggttcaggtgccagccgatccatcagcgttctttgtcaatgttggtgatctcctccaggtaaaataaacaggcactgcggctagtagattaggtaaatgagaattgcttctatatatgagctaccaacgactgtgtcttctaaacagacaaccaggttaattagcaattgctcctttttttgtgaaaagatgggtcagcactgatgttttttggacagcatatgcaccaagtacatcgtaccaactgacaaggatttctgtttttgtcttgtt

SEQ ID NO: 138256 - DNA, 243 bp, Zea Mays
ctctcaatgcctcctagttacaatgaggcaccatgaccttctctgactccagaagcaatggattttgtcaagcgattgttgtgcaaggatccgcgtagaaggatgactgcagctcaggctttaagtcatctgtggatcagaaattataatgacattcagctgtcattagagttaaacatccttatattccaacttatcaaagcttatatttgttccccgtcattacagaaatctgctctgagg

SEQ ID NO: 138257 - DNA, 558 bp, Zea Mays
aatttgcaggattccattcttcatttctctctttcattattccgtagttgcaactgcaagtagctacggcctacagcggctgccgcagtttgtaacgattggccatgggtgcccacactggcagccgctgcaacccgtcagcatcgacggcgaggagaacgaggccgccgccggcgtcctcgggcatgttcctcagaaggccttcgccggcgaagccgatgagccagggtgccgcggaaggcggcaaggccaggacgaagtcctgcgggcgacgggacatggaggtgggggagaagatggaagtcctgaggcgcctcgtcccgaccggcagctgcgatgacgaggtcgatgggctcctcctgcacgccgccagctacatagcgaggctgcaggcacaggtggcggtgatgcaatttatggtcgacgtgctggaggacacaaagcattaatcattttcttttgttattaggattcagacgacacatgtgtagcacacatcatattattcatgatatttacttttgtattgaacctcttgggttcatgtgtggctctttc

SEQ ID NO: 138258 - DNA, 919 bp, Zea Mays
atgccttctcttcccttcctgctttgcgagtcccagcgccaaacacccaaaccctaactatttggctattggctatttgatgcctactacgaacattttggcaaaagaaaaaggtattcagccatggtttttcttgaggcagagatgtcatggaatgtgttgatctcacctagccagctggaccgcaagggcctcctgctccgcaaggctatcattgtgcgtcttctggaggatgtcacaaacaggagggcttcgaaagagcatggctactacattgctgttaatcagctgaaggcaatatctgaagggaaagtgcgtgagctaactggagatgttctgttcccagtttcatttacttgcattacacagaagcctatgaagggagaggtcatggttgggcacgtggacaggatcctcaagcatggcgtgttcctcaaatccggacccgtggagagcatcttcctggctgagaagtcgatgagtaattacaagtacataggtggggagaatgcgatgttcatgaacgaccactcgaagctggagaaggacaccgccgtgcgcttcaaggtcctagggttccgctggatggaggctgaccgccaattccagctccttgctacgatcgctggtgacttccttgggccgctgtgaactgcttccacaggtcaaacaggttctaatgtacattgctcgttagatggtggatggatggttggatctgatgtgtagaattaaactttgctaccagtggtttggtcttgtagaacctgagacatggtaggttttctagatgctgttgccagtgatatttagctctggtttgaacgtatcagtgtacctgtatgatgaacaagcgttgtcatggatgtaccttttctatgcttgcttggaagttaacgttacatggtgttccctgatc

SEQ ID NO: 138259 - DNA, 819 bp, Zea Mays
atgccttctcttcccttcctgctttgcgagtcccagcgccaaacacccaaaccctaactatttggctattggctatttgatgcctactacgaacattttggcaaaagaaaaaggtattcagccatggtttttcttgaggcagagatgtcatggaatgtgttgatctcacctagccagctggaccgcaagggcctcctgctccgcaaggctatcattgtgcgtcttctggaggatgtcacaaacaggagggcttcgaaagagcatggctactacattgctgttaatcagctgaaggcaatatctgaagggaaagatcctcaagcatggcgtgttcctcaaatccggacccgtggagagcatcttcctggctgagaagtcgatgagtaattacaagtacataggtggggagaatgcgatgttcatgaacgaccactcgaagctggagaaggacaccgccgtgcgcttcaaggtcctagggttccgctggatggaggctgaccgccaattccagctccttgctacgatcgctggtgacttccttgggccgctgtgaactgcttccacaggtcaaacaggttctaatgtacattgctcgttagatggtggatggatggttggatctgatgtgtagaattaaactttgctaccagtggtttggtcttgtagaacctgagacatggtaggttttctagatgctgttgccagtgatatttagctctggtttgaacgtatcagtgtacctgtatgatgaacaagcgttgtcatggatgtaccttttctatgcttgcttggaagttaacgttacatggtgttccctga

SEQ ID NO: 138260 - DNA, 1010 bp, Zea Mays
ccttctctttcaccttcagctggaccccgcccctggcccgctcgtcaggcacccaagcaccccacgcgacgcggcacttccacaaggtggatagcgaacccacagcacgtctccatctctggtttgaccgccgccgccgccgccctacgcggctacgccaggcgccgaggccttcgtcggcattttcgtcggcaagcactcaccaggtattcagccatggtttttcttgaggcagagatgtcatggaatgtgttgatctcacctagccagctggaccgcaagggcctcctgctccgcaaggctatcattgtgcgtcttctggaggatgtcacaaacaggagggcttcgaaagagcatggctactacattgctgttaatcagctgaaggcaatatctgaagggaaagtgcgtgagctaactggagatgttctgttcccagtttcatttacttgcattacacagaagcctatgaagggagaggtcatggttgggcacgtggacaggatcctcaagcatggcgtgttcctcaaatccggacccgtggagagcatcttcctggctgagaagtcgatgagtaattacaagtacataggtggggagaatgcgatgttcatgaacgaccactcgaagctggagaaggacaccgccgtgcgcttcaaggtcctagggttccgctggatggaggctgaccgccaattccagctccttgctacgatcgctggtgacttccttgggccgctgtgaactgcttccacaggtcaaacaggttctaatgtacattgctcgttagatggtggatggatggttggatctgatgtgtagaattaaactttgctaccagtggtttggtcttgtagaacctgagacatggtaggttttctagatgctgttgccagtgatatttagctctggtttgaacgtatcagtgtacctgtatgatgaacaagcgttgtcatggatgtaccttttctatgcttgcttggaagttaacgttacatggtgttccctga

SEQ ID NO: 138261 - DNA, 1012 bp, Zea Mays
ccttctctttcaccttcagctggaccccgcccctggcccgctcgtcaggcacccaagcaccccacgcgacgcggcacttccacaaggtggatagcgaacccacagcacgtctccatctctggtttgaccgccgccgccgccgccctacgcggctacgccaggcgccgaggccttcgtcggcattttcgtcggcaagcactcaccagcaggtattcagccatggtttttcttgaggcagagatgtcatggaatgtgttgatctcacctagccagctggaccgcaagggcctcctgctccgcaaggctatcattgtgcgtcttctggaggatgtcacaaacaggagggcttcgaaagagcatggctactacattgctgttaatcagctgaaggcaatatctgaagggaaagtgcgtgagctaactggagatgttctgttcccagtttcatttacttgcattacacagaagcctatgaagggagaggtcatggttgggcacgtggacaggatcctcaagcatggcgtgttcctcaaatccggacccgtggagagcatcttcctggctgagaagtcgatgagtaattacaagtacataggtggggagaatgcgatgttcatgaacgaccactcgaagctggagaaggacaccgccgtgcgcttcaaggtcctagggttccgctggatggaggctgaccgccaattccagctccttgctacgatcgctggtgacttccttgggccgctgtgaactgcttccacaggtcaaacaggttctaatgtacattgctcgttagatggtggatggatggttggatctgatgtgtagaattaaactttgctaccagtggtttggtcttgtagaacctgagacatggtaggttttctagatgctgttgccagtgatatttagctctggtttgaacgtatcagtgtacctgtatgatgaacaagcgttgtcatggatgtaccttttctatgcttgcttggaagttaacgttacatggtgttccctg

SEQ ID NO: 138262 - DNA, 1899 bp, Zea Mays
gtgatgtttcaaaacaatgtccagcgtgtcaaagtataccgtttaaccaatgacgggcagtgggatgatcagggaacgggccacataacaattgactatattgaggggtcaagagaaattgctctggctgtcgtggatgaggtggataatgacacactactacttcaccatcttacttcagataatatctacaagagacaagaacaaacacttatctcattgaaggatcctgaaaaagcactagatttactgctgagctttcaagaagctaaaggatgcttacatatatggcagagcttaacttccttacagcaaaagctacagtctggtgaccctggctatgaattgaaggatcttccttctcttgagctgtccacccttccttcacttttaaagactatattggagtgcggaaagaaggatgggacacgcgttgcaaagttaatatctcgaaatcagcatgaatttttccccaagctagtggaccttttcagaatgtgtgagaattcaagaaacatggatcatctccacatgatctttagactagtcaagggaatcatattgttgaacgatgctggcatatttgacaagattttctctgatgattttatccttgacataattggggcccttgagtatgatccagaggttcccagtgtgcagagtcatcgtgaattcgtgaagaatcaaaccctcaatgaggccatacacattgggaatgtttctgtggtctcaaagattcgtcaaacatacatagtaggttatataaaggttgtttctgtactaaaggatgatgcttcttttatccatgatctgattgcaaggataacatcttcgaatacctctgctgaatcaaaaagcaaactggtcttgtttttgcgtgagctttgcattatcagcaaaagtttggagccgaaagtacgatcacatatgtctaggtatctcattgatgtaggagcgctaaacataatttctgatgtgttacagagtcaggataaagaactcttttcagctggggcaaacatactcgggtattttgttgatctgcatcctgacttagttagaacatttattgccaatcatgaagagaacctggaaggcagttctcttcttgagtttctggttcaagggatggtagttgactccgccaatgaaatgctctatcagtcttgtctaaaggaactgttaggttcttctgatacaactgtgaatcatcatgatgttgttcttcggcttttctttgacaagcatcttcaaaaattgattgacgcaatagcgtcgtcctgcgctccaaagggcattgccagatcaacgtctggtttagctggtgttcgcacaacggttgaacagcattctgctaagcctgaaacattgttgaaaatttgtgaacttttatccttctgcgcacttcatcatacaaaccggatgaagatatttttctcaaccaatgcaatggagaaaattctgacattaactcataggagagagaaggttttggttctggcaggagtccaattcgtgcggattataattggtagaaaggatgactttcttgttgaccgtgttatcaagttcaacctgttaaagccagttattaaggcttttgatgaaaatgaaggtagagacaacatgctacaatctgtggtccttgaactgttggagtatataagaaaggaaaatatcaagcctcttattgaatatgttgctgagtcttgttggggccaacttattgaggagagtgccgaaacaaagcaaagtaccagtgtggttgacatgagaatgaagaaagcagacgaaagaggtgctgataaacgacaggaaggttattttgaggacagtgacagagtagattcttctacacctacaatgcattcacaggagcaatctatcccagcaagg

SEQ ID NO: 138263 - DNA, 341 bp, Zea Mays
tctgcactattccagcaaatcgcacaactgaggaaggctctctacatgcgaccctgtgttggtcattcaaagatgctactgtcactatctagtagtcttcaggttgacgcaacctgcttatctagatcatatcggagtgccgccaaagcgggttatgaagttattcgacctcaaagtttgtcttagtctgctatgtatattttgaaacccacttcctcttgtctgtgcatttccccttcaatgtcttgtgactgcactctttggcggttgatggtgaggtcttccatgccctttgagacattgatgctgatagtttcagttgtgccgagcgttgcttgctg

SEQ ID NO: 138264 - DNA, 1037 bp, Zea Mays
ggccatcgcgtcgagctcgtctcctttctgacaggaggttttgtttttcgaggaaggagagcctaagattgatggtgaacctggcgatttgaagttcaggatccgaacagcaccacacgaccgcttcaggcgagatggcaatgacctgcatgcaacagttacaataaccctgctgcaagctctggttggtttcgagaagaccattaaccatcttgataaccatctggtagaaattggcaccaagggcattaccaaacccaaggagatcaggaagttcaaaggtgaaggcatgccactataccaaagcaacaagaaaggtgacctgtatgtgacattcgaggtgttattcccaaaaaccctaaccgatgagcagaagggcaagcttaaggatgttctcgtgtagaccattgtttctcacatctatgctgctgataatttgaggcgagagcgcctcgaggaaatttttctcagtagcttgcataggaagaagctactgctgcgtttcatgtatgtgattttgcattgcaaatactagcagcctgcctggtcttctttttctttcccttttggttttgtcatgcgcccttaacagctcagtgtagttttagaaagcacaacaaaattgtaccagaatatttgtacttacggaattctgaatacatagattgtagaacagctcggttgcttgcatgttctatgcccaatggccgctgctaccggtgtagggatggcaacagggaattccccgccggggaatagctccccgtccccgcgacgaaaaaacttccccgcggggatccccacgaacgcttgcggggagcatttttttcccatccccgttccccgcggggataaatccccaacggggatccccatccccatttaaattacaattaatacatacatactttgctattaatgttaaatattgtcacttatacacattatcagatataagaaatcattatgcatacatcaaaatgaacacatttgtacaattagtggtctcttgataaggtaattatttatttttgtcg

SEQ ID NO: 138265 - DNA, 1902 bp, Zea Mays
caggcagctttaaacgcaggaaccaaaaggccacggcgggagacggagaacggcgacgccggcggcgaggaggaggagggatacaacggcgagggagaagctgtctctctccacgcgtgggagcgctaaccctagctgccaacctcgcggaaacaccgggttgtgagcgtcgaagagagaggtgcaacgaggcttctcgaggaggctgggacgggatgacggcgctggggaagggaggggtggcgcggtttgcggccgcgctctttgtcctactgaatctctccgcggcgatcgccgggaagagctactacgacgtgctgcaagtgcccaagggcgcgtccgaggatcagattaagaggtcgtaccgcaagctcgcgctgaagtaccaccccgacaagaaccccgacaacgaggaggccaacaagcgcttcgccgagatcaataacgcttatgaggtgctgacggaccaggagaagaggaagatctatgaccagtatggcgaggagggcttgaagcagttccaaggcgggggaggcggtggcggtggaatgaacattcaggacatctttaggaacttttttggtggtggtggtggtgggatggaagaggaggaagaacaaattttgaaaggtgatgaggtgattgttgaactcgatgcttcattagaggacttgtacatgggcggttcagtaaaggtttggagagagaaaaacgtcataaagccagcaccaggaaagaggcgctgcaactgtaggaacgaagtttaccatcgacaaataggtcctggaatgtatcaacagatgactgagcaggtctgtgaccaatgtccaaatgtgaaattcgtacgagaaggtgaattcttgactgttgatattgagaagggaatgaaagatgcacaggaggttttgtttttcgaggaaggagagcctaagattgatggtgaacctggcgatttgaagttcaggatccgaacagcaccacacgaccgcttcaggcgagatggcaatgacctgcatgcaacagttacaataaccctgctgcaagctctggttggtttcgagaagaccattaaccatcttgataaccatctggtagaaattggcaccaagggcattaccaaacccaaggagatcaggaagttcaaaggtgaaggcatgccactataccaaagcaacaagaaaggtgacctgtatgtgacattcgaggtgttattcccaaaaaccctaaccgatgagcagaagggcaagcttaaggatgttctcgtgtagaccattgtttctcacatctatgctgctgataatttgaggcgagagcgcctcgaggaaatttttctcagtagcttgcataggaagaagctactgctgcgtttcatgtatgtgattttgcattgcaaatactagcagcctgcctggtcttctttttctttcccttttggttttgtcatgcgcccttaacagctcagtgtagttttagaaagcacaacaaaattgtaccagaatatttgtacttacggaattctgaatacatagattgtagaacagctcggttgcttgcatgttctatgcccaatggccgctgctaccggtgtagggatggcaacagggaattccccgccggggaatagctccccgtccccgcgacgaaaaaacttccccgcggggatccccacgaacgcttgcggggagcatttttttcccatccccgttccccgcggggataaatccccaacggggatccccatccccatttaaattacaattaatacatacatactttgctattaatgttaaatattgtcacttatacacattatcagatataagaaatcattatgcatacatcaaaatgaacacatttgtacaattagtggtctcttgataaggtaattatttatttttgtcg

SEQ ID NO: 138266 - DNA, 204 bp, Zea Mays
tacaccgatggactccacgacatactcatcaccagcctcatcccacgggatttcctcagggttcttgagggtcacaacagttaatacattagctcacaacttgaacacaaaagctcagtccatgtctagaagaggcaggaaaggcgagcacctgatgccaaagacagtgactggcttgtcaccgaagagaagggtcttggagtc

SEQ ID NO: 138267 - DNA, 245 bp, Zea Mays
tcttctcgcgatcccgcgccgcatcccctcccgccctgccggcgagagcgcggcccgctgaggcggccgttcctggaccagcgacgaccgccgttcaagcgccggtggcagcagcggtcgtggtgggtgcgcctcttgctctccctcctcctcgccctcgcatgcgtcctcctcctcgctgtcctcctcgactccccgaccccgacacctcgccgtccacctccgccgcgtcctccggatccgag

SEQ ID NO: 138268 - DNA, 2794 bp, Zea Mays
cttctcttctcccactctcactatacccatttctcgagatctcggcgaaaccctagtgaaacccccgccgtgggggcaccaagacgccgcaatgctgcacgagctcctcctcgcgctgctcggcttcaccggcgacttcgtcctcgacgtctctctgccgcggcgccgcgccgcctcccaggacgccggcgaggatggaaacggagacggtgaggtgggcccctccttccgcctcgcgccggacctcaccttcctccagccatcagagaggactgctattgagaggctcatatctctgggattttactacagagaactgaatcgctttgcaaccgagtcccgcgacctgagctggattcagtcttctatagatgtttcatcacctcattctgataatacccagaaggggaaagtgagaaaagggagtgtgtacaggagggcaattgccaatggtatcactgagattctgtcagtatacagatcagctgttctgcaggttgagcaaaaccttttatcagatccgttgcctatcctcgcgacagtaactcacgggttgaacaagtttgaagtccttctgcctccactgtatgagcttgttatggaaatccagcataaagacatcaagggtggccagcttcttaatcttttgcacaaacggtgccattgtggggttccagaactgcaaagctgcattcagaggctactttggcatggacaccaggtcatgttcaaccagctgacatcttggatggtttatgggattcttcaagatcagtacagcgagtttttcattagaaggcaagatgacagggatgtggagaatgaatcatctcagcgtgatgtttctgataagttaaagcagaaattagctaaagacacatccctggctagttggcatacgggatttcatgtatcattggacatgttgcctgagtatatccacatgcgaattgcagagtccattctcttcgctggcaaagcaataagggtgcttcgaaatccaagtcctagtgctacattgcaggatcctgtaatcagaactgtaggatctcatggaatgcaaagctctgtaggaggttctggtgtaccaaaagaactggcaaacttctctaacatcagagcagaagaactactgccacaagcagaagctgataaaattgattctatgctcaaggagctaaagcattcttctgaatttcacaaacgaccttttgagtctgctgtcggctcaatacgtacaattgcagctaatcatctctggcagctagtggtggtacgtgctgatctcaacggtcatttgaaggcattgaaagattattttcttttagcaaaaggtgactttttccagtgttttcttgaggaaagccgccaattaatgcggttaccacctcgtcaatctacagccgaagcagatctcatgattccatttcagctggctgcactgaagactatcggtgaggaagacaagtactttaccagagtctcattaaggatgctatcatatggtatgaaaagtagcacgtctcagaaagatctccaaaagcctaatgcttcagagcttccttcacaaggaaaagctgcatcagaattgacacttgatgggtgggatagtattgctctggaatattctattgactggcctctgcagctcttcttcactcctgatgttctgtccaagtatcgcaaggtttttcagtatctcatccgattgaagaggacacaaatggaacttgagaaatcctgggcagctgtaatgcataaagaccatgctgatttttctgattattgcaaggatcggaaaaataactctgcaacacaactgcgtcgacaacggtctaagcctttgtggcgagtaagggagcatatggcattcttgatcagaaacctacaattttacatccaggttgatgtaattgagtcacagtggaatgttttacaatctcacgtgcaagattcacatgattttacagagctagtgagctttcatcaagaatatttgtcagcgctggtttcccaatccttcttggacatcggatcagtctctaggatactggatagcataatgaagctttgcttgcagttctgctggagcatagagcaatatgaaactcggccaaatatttctgagattgatcacataactgaggagttcaacaagaagtccaattcgctgtacactatcttgaggagtagtcgcctcgcgggtagtcagagagcacctttcctgaggcaatttctgatgaggctaaattttaactctttctttgagaccaccgcaaggggagtgatgaattcaggaaggctgcgaccaatcactgcaggtgctcagctgtaacggtgatggtatgtttgggggtagtgctgcagcaagagacaagggaggagtttctgtagtttatgtaaattatgatcggatggtggttgtctgtcatggaaaaatcgattgcaggtgattcatgcttgtgccgttggtattgtgtttttctgtgcttccgtttgttaatgctatccagttcctgtggcctgaactgtaccttcgcaaattatacgctcgttcaccgtggggatctggctgacagatagtgaactgctgccactctttttttttttactaaggccgctgccacttctgagctgtgagatgccatgtctatcaataataacggtaaggagtattctaaaagattttgagctgtgggcagatgaatgtttaggacatatggattggaggggattgaagattaaatcctctcctatttaattttaactagtaaaggattttatccatttaaaa

SEQ ID NO: 138269 - DNA, 1846 bp, Zea Mays
ctctctatatctaatttctcgtggaggcgagcagatagacaggagagagaacgcacgcaagaacgcgctctcctcgcgattggacagggcgcgaacaccccgaggacgcgcgcgatccccgaggacacgggggtgacagcctcgccgtcgccggggcggccgtttcgagctccgtcccgcctcggcccggctcagatttggtgggatccggccaagaaatcccgcagttggtgaggaggagaggaggggagaggaagggagggcggaggggatgggcgtcggtgcggagcccaaggatcaggcggcgacggccgctggggtgccggcagagcaggacgaggcgggcgggaaggaggacaaggccgccgcggtgtcctgctcgatctgcctcgacgcggtgctcgctgcgtccggggagaggtccaccgccaggctgcactgcggccacgagttccacctagattgcattggatcagcatttaatgccaaaggggttatgcaatgccccaactgccgcaaaatcgagaaagggaattggctttatgcaaatggttctcgatctgcccatgatgttagcatggatgaatgggcccatgatgaagacctttatgatgttagctactcagatatgccatttcgcttccattggtgtccgtttgggcgcttaacccaacttccatctttatttgaggaaggagaatcatcacctccagttacatttcatgacttcatgggacaacatgtgtttacggagcaagtagctgtatctgctgcagcagggacaactaatccttgcccctatgtggcatacttgcatcctcttacaccattgacgtcattgtcaagctcccatgtccctgacagaactatggatcgtcctgcataccatgatcattggaaccccatggctgggccatcagatgttaggtccatgcaaacaatgcaacctgctgattttcatcatagccattgggcacatgtgccccattcttatggtcaacccaacagcaataacgagcagccaggaatcccttttggagcaagggctgtacgggtcgatggtgatagccaacgccgagcatctgttgtctctccatcttacttcagtaatggatctggttccagatctagacctcccaatgttcctcctctgatgcctcagttcatgagggctcatggcagcatcagcgaacagtaccaacagaattcatcatctagcttatttgctggggcccataggtcaggaggcatgcgacctgccccaacacctctaccagagaaccccacctttaccttgttcccgccaggttcatctggccatagctcgatggagactgatgatgctgggggaagccggttctacgcctgggagggtgaccggtttgccccatacccgttgatgccggtagactgcgagacaagctggcggacctcacagcagcagtcccaccagagcacatcagagcctacatctgctccaaggaggctgtttgggcaatggctcgctgtcggcaggccatccccatcacccgaggggtcttcgtatcgtcaattgcactcaccgcggatgtagaccctcgccgctgaaagaaacgatgggaagcccattgtattaagttaagccgggctgtgccgtgaaactttgggacgatgctcgaggggacagaaactggaaacgatccggctgaggatatttcgatttggtttatgtgaattccatctcgtacatatttgaaatcaagttgggatgctgggagcttcgaatgtaacgtgatttcttatgctgcaattctgttgattgacggattttcaaacgcgattgaatttccgttgcaatggtacctgt

SEQ ID NO: 138270 - DNA, 498 bp, Zea Mays
atgggcgcgcagaaatcgggcttcacaggggactccgagcagcgcgcggttgaggaagatggagcagagggcgcgacggggaagctccatggctgggcgggcaccggcagggaagcagggagctcagaccatggggatttacctgcgcaggggcgagcgccatgggggacgagagagaaactgggggaagggagctacgacgcgacggcgatagcagtgctccacgacgagcagagcgctgtgcaaaggagtttggctggtcacagcttccatgggagatggcggtcggttgcagcttgggggcgaggtggagcgcagacaggcgacggcggccatgggcagagctcagcggctatgggagcttgaaggaggaacgagcagggagatgggagccgagctagagcaaggtctggcagccggccatgggaaggtcgccaggcaccaagggaaggagcaaggctgagcaggagaagccggccatggagaagagctgggtac

SEQ ID NO: 138271 - DNA, 612 bp, Zea Mays
atgggcgcgcagaaatcgggcttcacaggggactccgagcagcgcgcggttgaggaagatggagcagagggcgcgacggggaagctccatggctgggcgggcaccggcagggaagcagggagctcagaccatggggatttacctgcgcaggggcgagcgccatgggggacgagagagaaactgggggaagggagctacgacgcgacggcgatagcagtgctccacgacgagcagagcgccgtgcaaaggagtttggctggtcacagcttccatgggagatggcggtcggttgcagcttggggcgaggtggagcgcagacaggcgacggcggccatgggcagagctcagcggctatgggagcttgaaggaggaacgagcagggagatgggagccgagctagagcaaggtctggcagccggccatgggaaggtcgccgggcaccaagggaaggagcaaggccgagcaggagaagccggccatggagaagagctggaaaaacgcagatatttttgcgtccggatttttagcaatgcccactggatcgatacattattcaactacgtatcccatttcccaaatcttgaaacgaaaatccgaggactaccgacttga

SEQ ID NO: 138272 - DNA, 1390 bp, Zea Mays
ctctgaaaaatctccagccgccgccctccatctgatatttctcatccgtcgtatatctcctggcgcgcgcgttccttgtcttgtcccagcgcccggcagctgcgccctgctccagctcatggcgcgtccctgcccctcccatggcagctccccagctcgatttccctccctagccatggccgcgcccaaatcctctccctccctgttcggattccgccagacctgcgtagctccctggtgtgtcttcctccctgcgcgctcagccagcgtccctgcgcgctccgcggtgctcagctctccagctccggtgcccagctcgccagggccgcgtgtgctccagtgtcgcgctctgctcgcggagttccttcgcggcgttcatctccctgctcagctcgccgcgccgaactgtccagcacctctctgctcctttcgttcctagcgcgtcgagttgagcttgccgatgatgctttggctggtcagcctctgctctagctcgcagttgctgcgttgccgagtccctggccgccgtgccctgtgcgctgtcctccgctcgccgggctgtacgttgctaggatcggaagcaccgtccttcgtttggacagcaacggcgtgcacaaaagctttgttgctgctgttggaggcttctcgacgaaatatctaacaaagggttgaagctccagtgcatcgccgtcgtttcgctatgtccggcgtcgtgctttttttttgccggtcattggtttcctattcaacacaacaccgtcgtccccgcgtcgcacccggaatttcgccgcgcgtcctgtttcctgctcgccagcgtgccctctcggctcgctcggctttaattcccaatcgcgtcgttgattccgccggttagcgtcgttcgacgtcgcgtcgcgggtgcagctctatatacgtcaccccctgtgtcgtcatcgttccacgcgtcagcaagaaattccaagagtcgggtgaagacgaagctaacaacacgatattccccaagcgctcgacaaaattgcctgaatcggaaaatcgctaccgatctcggagattcgtgttagctgtggaaacggtaagctgataaattattcaaaatagttcgatcgttgaataaattaatgtgctagtgcgaggctcattaaggtgctcaataaattgcgtaagtcacgaaactctcgtcgacttcgcagttcttgcgattattgagccaggttcagttataacgagttatttcactattccggtcaattagttgaattagtgtaccgagtagaatcttagtaggcatgtgtgttgatgaaatattttaatcacttataaagatgtagtacaatttataaaacgagagatgaatttagcatttaaccaattagctaatgagttgtgttta

SEQ ID NO: 138273 - DNA, 806 bp, Zea Mays
cccgtacggtcgtagccgctttctctgcctttcgttcatctcgtcgtcgggccgccgtcctagcgtccaggagatccggacgaacaccccctcgccgccgcaccaaggctccaggccaagcgtcgcgcacaacgcactagttgcagacttgcgcagtgcaggtcgcgccgcaccaaggctccagccttcaggccaagcatcgcgctcgcgcactagttgcagcttgcgcagtgcaggagcacatcaacacatcccgtcaccgctacaaggattgatcaagcattcaaggttccagctcaagagtccagagaagtgtgtacacgagcacaaaaaaatattccaggtttgtggccacatgctcgcctaatcgcctacaggctacagatccttgcctagctccagccactgtccattgctgtcagcaccatgacttcctcctcactgcctcaaagttcaggcgacgacgtcgacacaagaagggacacctcgaacaagaactggctaccacatgctaccagtgatgcagcagccacaacccctattgtgtcatctgctactcccaaaatagctgctggaactgctgtcatgccatgcgctagtgtcggtaattcctcaatgtctgatgccatggctccccgtcatccaccacaaccacgtgtgaaaaagaccatcgccaagaaaagaagtcgccttgctaccgaaggatcaccttctgctccgactactcaagaacaagacgcgtcaaccgtggctggtacacaactattaaaatcattggggttcgatttcaagcacgctaacctctt

SEQ ID NO: 138274 - DNA, 1686 bp, Zea Mays
atggatggatgcgattgtattgagccactttggcaggccgatgatctcttaatgaagtaccagtacatatctgacttctttatcgcacttgcatacttctcgatccctttggagctgatatactttgttcagaagtcagctttcttcccctaccgatgggtactcatacagtttggtgcgttcatcgttctgtgtggggcaacccaccttataaacatgtggactttcactacgcataccaagaccatagctgtggtgctgacagtggcaaaagtggcgacagccgttgtgtcatgcataacagctctgatgcttgttcatataatccctgatctgctgagcgtgaaattgagggagaggttcctgaaagcgaaggccgaggagcttgatagggagatggggataataaggacacaagaggagacgggaagacatgtgcacatgctcacgcacgagataagaagcacacttgacaggcatactattctgagaactacacttgttgaaatgagaagaactcttggtttagcagagtgtgctgtgtggatgccatcacgctctggaacaacccttcagctctcacatgcactccataccaatgctccgcttggatcagttgttcctatcaatcttccgattgtagctaccatttttaatagtaatcgtgctgagagaataccacatacttccccattagcttcagtaaaggctcagaaaagcaagtacgtcccaccagaggttgttgctgtccgtgttccgctgctgcagcttacaaattttcaaataaatggttggcccgagctatctgcaaaagcctttgcagtgttggttttgatgcttcctccagacagtgcacgaaaatggcgaccccatgaactggagcttgttgaagttgttgctgaccaggtggcagttgcactgtcccatgctgccattttggaagagtccatgcaagcccgtgatctgctattggagcagaatattgctctggacgcagcacgccgagaggcagaaatggctatatgtgctcggaatgattttcttgctgtcatgaatcatgaaatgcggactcctatgcgggcaatcatttctttatcatccctcctgttagaaacaaaacttactgcagaacagcgggtgatgattgagactatactgaagagtagcgatcttctagaaactctttcaaatgatgttttggatatatccaagcttggagacggcagccttgagctggaaattgcaccttttaatctacatgccacctttacagatgtggttgatttaattaaaccagtagctgcattaaaaaggctatcggtaatggttcatttggctccagaattgcccacctgcgcaattggtgatcggaagaggttgatgcagataatactaaatgttgctgggaactccgttaagtttacaaaggagggtcatatttcagtttcagcatctatcgctaggccggattctctgagggacccatacgctcttgacttgcatccagttctctccgatgggtctttttacttggctgtgcaggtaaaagacaccggctgtggaatcagcccacaagatatgcctcacaccttcacaagatttgcacaccagcaaaatgctacaaacaaattgcgtagtggcaacggattgggtctggccctttccagaagagccgtcgcgctctag

SEQ ID NO: 138275 - DNA, 432 bp, Zea Mays
atgatgatggattccgcggagcatcagaaggtgatggggatcgcgccggcggcggcgcccgcagcggaggcggggagaccgtgctgcgtcgagtgccgcaccaccgcgacgcccatgtggcgcggcgggccgacagggcccaggtcgctctgcaacgcgtgtgggatccggtacaggaagaagcggaggcaagagctaggtctcgatagcgccaagaaaccacaacaaaaccagcggccgccgccgccacagcagcagcagcagcaagaggatcactgtccggcaacaagtgcagtcgctgtcagagacaacaccaaaagcagcaggctccaagtggtgaagaaacggagggtcctgatgggagtggaggaggccgcagtcctgctcatggccttgtcctcctcatccagatccacgctgctacatggctag

SEQ ID NO: 138276 - DNA, 2553 bp, Zea Mays
ccatctccgactccctcttacccttcccgttccccaattcgaaatcgagtcgggtactcgggtcggtcttgccgtgcgtgcgtggctgcgcgaaccagcccacgctcccactccccgcccgccaccgccgggtccctctagggttttgccgcgatgtcgctccggccgagcgagcgggagcagatgcggaagggcaactacaagcagacggtggacgccgaggagagccgccgccgccgcgagggccagatggtcgacatccgcaaggccaagcgagaggaaagcctccagaagaagcgccgcgatgggttccccgccgccggcgccgtgccgccgatgggccactccaccgcactccagcagaagctcgatggcttgccggcgatggtacaggccgttcactccaacgaccccactgtgcagcttgaggccaccacgcagttcaggaagctgctctccatagagcgtagtcccccaattgaagaggtgatcagcacaggagtcgtgccccgattcattgagttccttacacgtgaggaccatccacaactccagtttgaggctgcatgggcgctcaccaacattgcatcaggcacatcagagaacactaaggtggtggttgagagtggtgctgtgcccatctttgttaagctcctcaactccaatagcgaggatgttcgtgaacaggctgtatgggctttaggtaatgttgctggtgactccccaaagtgccgtgatctggtgctaggccatggtgggctattccccttgctgcaacagcttaatgagcatgctaagctctcgatgctgaggaatgccacatggacactatcaaacttctgccgtgggaagccacaaccgaactttgatcaggtcaaaccagcattgccagcacttcagcaacttatccactctcaggatgaggaggtcctaactgatgcctgttgggctctatcatacctatctgatgggactaatgacaaaatccaagctgttattgaatctggcgtgttccctcgccttgtggaacttctgatgcatccttcagcctctgtactgattccagctctgcgcacggtgggtaacatcgtaactggggacgacatgcagactcagtgtgtcattgacaatcaagcacttccatgccttttgaacctactgaccaccaaccacaagaaaagcatcaagaaagaagcatgctggacaatctcaaacatcacagctggtaacagggaacagattcaggccgtgattaatgcaaacataattgcacctctggtgcaacttctgcaaactgctgaatttgacatcaagaaagaagcagcctgggcaatttcaaatgccacttctggtggcacacatgatcagatcaagtaccttgttgcccagggttgcattaagccactctgtgatctgcttgtttgcccggatcccagaattgtaacagtttgcttggagggtcttgagaacatcctgaaagttggcgaggcagagaaaaatcttggtgcaggcgatgtcaatgtttacgcacagatgattgatgatgctgagggcctggacaagattgagaacctacagagccatgacaacactgagatatatgagaaggctgtcaagatgctcgaatcttactggctagaggaggaagatgatgccatgccctctggcgacaatccccagaatggcttcaactttgggaaccagccctctgttccatcaggtggattcaacttcggctgaagatgcccatttggaatggcggctgtgccattgtgccttggcctagtggttggggctagtcagagttggggtagtggcgtcgtcctccaaaaccttggttcggtcccattggtctggtctcaggtgtttgtcatgtcagtcccagtcagcagggtcagtccttgtgctgcatcaccagtggtgctgcatggaagtggtcagtcttcaaggtcagccggttggatcatttgggctcttgctcccaccgcctctggtggtaggcatgaagtcgcaggtgttgtcgggagttgggttttgcctccaatatagcatgaatgaattatattgttttacctatttgatgaggtagaagaaaagaaccttggaagatagggaatgtgttggtttttgtcaaagcggttcctgtcctgtatgacatgttgcatgagtattgacacaaattataagacataatggcaaataggtttttgggagtctcttgagtctcgagtcttaactcattggctcattgtaggtttgtggttcgttatgtcatcttctctgttgtagtcacttgtgcttcctcaaacgtggttttggcaccattgtctcaaagtcgttccaagcttatctagagcagtagaagacgagggttgtttgcggcatttgaggttatggttcctagtttttttttgtggaacctgatttatcgttgtatgatcatgacaaacaattggtagtaaggaaatcaaaaaggggaaatccgtacatgtttgctctgtttcatctgtatcttgcatgttaaatatttaaatataaaaagcattgagtcta

SEQ ID NO: 138277 - DNA, 1312 bp, Zea Mays
tttcatattcaactgaacttaaatgtttctgtatttatcattattatttgcccttcctgcagtgtgtcattgacaatcaagcacttccatgccttttgaacctactgaccaccaaccacaagaaaagcatcaagaaagaagcatgctggacaatctcaaacatcacagctggtaacagggaacagattcaggccgtgattaatgcaaacataattgcacctctggtgcaacttctgcaaactgctgaatttgacatcaagaaagaagcagcctgggcaatttcaaatgccacttctggtggcacacatgatcagatcaagtaccttgttgcccagggttgcattaagccactctgtgatctgcttgtttgcccggatcccagaattgtaacagtttgcttggagggtcttgagaacatcctgaaagttggcgaggcagagaaaaatcttggtgcaggcgatgtcaatgtttacgcacagatgattgatgatgctgagggcctggacaagattgagaacctacagagccatgacaacactgagatatatgagaaggctgtcaagatgctcgaatcttactggctagaggaggaagatgatgccatgccctctggcgacaatccccagaatggcttcaactttgggaaccagccctctgttccatcaggtggattcaacttcggctgaagatgcccatttggaatggcggctgtgccattgtgccttggcctagtggttggggctagtcagagttggggtagtggcgtcgtcctccaaaaccttggttcggtcccattggtctggtctcaggtgtttgtcatgtcagtcccagtcagcagggtcagtccttgtgctgcatcaccagtggtgctgcatggaagtggtcagtcttcaaggtcagccggttggatcatttgggctcttgctcccaccgcctctggtggtaggcatgaagtcgcaggtgttgtcgggagttgggttttgcctccaatatagcatgaatgaattatattgttttacctatttgatgaggtagaagaaaagaaccttggaagatagggaatgtgttggtttttgtcaaagcggttcctgtcctgtatgacatgttgcatgagtattgacacaaattataagacataatggcaaataggtttttgggagtctcttgagtctcgagtcttaactcattggctcattgtaggtttgtggttcgttatgtcatcttctctgttgtagtcacttgtgcttcctcaaacgtggttttggcaccattgtctcaaagtcgttccaagcttatctagagcagtagaaga

SEQ ID NO: 138278 - DNA, 2108 bp, Zea Mays
cgaaatcgagtcgggtactcgggtcggtcttgccgtgcgtgcgtggctgcgcgaaccagcccacgctcccactccccgcccgccaccgccgggtccctctagggttttgccgcgatgtcgctccggccgagcgagcgggagcagatgcggaagggcaactacaagcagacggtggacgccgaggagagccgccgccgccgcgagggccagatggtcgacatccgcaaggccaagcgagaggaaagcctccagaagaagcgccgcgatgggttccccgccgccggcgccgtgccgccgatgggccactccaccgcactccagcagaagctcgatggcttgccggcgatggtacaggccgttcactccaacgaccccactgtgcagcttgaggccaccacgcagttcaggaagctgctctccatagagcgtagtcccccaattgaagaggtgatcagcacaggagtcgtgccccgattcattgagttccttacacgtgaggaccatccacaactccagtttgaggctgcatgggcgctcaccaacattgcatcaggcacatcagagaacactaaggtggtggttgagagtggtgctgtgcccatctttgttaagctcctcaactccaatagcgaggatgttcgtgaacaggctgtatgggctttaggtaatgttgctggtgactccccaaagtgccgtgatctggtgctaggccatggtgggctattccccttgctgcaacagcttaatgagcatgctaagctctcgatgctgaggaatgccacatggacactatcaaacttctgccgtgggaagccacaaccgaactttgatcaggtcaaaccagcattgccagcacttcagcaacttatccactctcaggatgaggaggtcctaactgatgcctgttgggctctatcatacctatctgatgggactaatgacaaaatccaagctgttattgaatctggcgtgttccctcgccttgtggaacttctgatgcatccttcagcctctgtactgattccagctctgcgcacggtgggtaacatcgtaactggggacgacatgcagactcagtgtgtcattgacaatcaagcacttccatgccttttgaacctactgaccaccaaccacaagaaaagcatcaagaaagaagcatgctggacaatctcaaacatcacagctggtaacagggaacagattcaggccgtgattaatgcaaacataattgcacctctggtgcaacttctgcaaactgctgaatttgacatcaagaaagaagcagcctgggcaatttcaaatgccacttctggtggcacacatgatcagatcaagtaccttgttgcccagggttgcattaagccactctgtgatctgcttgtttgcccggatcccagaattgtaacagtttgcttggagggtcttgagaacatcctgaaagttggcgaggcagagaaaaatcttggtgcaggcgatgtcaatgtttacgcacagatgattgatgatgctgagggcctggacaagattgagaacctacagagccatgacaacactgagatatatgagaaggctgtcaagatgctcgaatcttactggctagaggaggaagatgatgccatgccctctggcgacaatccccagaatggcttcaactttgggaaccagccctctgttccatcaggtggattcaacttcggctgaaggtatgctctctagcgatcttgagcaaaacttgggtggtgtaaggtctatggctgtgcaaattgtgatttctgatgtgatattgtacatgcagatgcccatttggaatggcggctgtgccattgtgccttggcctagtggttggggctagtcagagttggggtagtggcgtcgtcctccaaaaccttggttcggtcccattggtctggtctcaggtgtttgtcatgtcagtcccagtcagcagggtcagtccttgtgctgcatcaccagtggtgctgcatggaagtggtcagtcttcaaggtcagccggttggatcatttgggctcttgctcccaccgcctctggtggtaggcatgaagtcgcaggtgttgtcgggagttgggttttgcctccaatatagcatgaa

SEQ ID NO: 138279 - DNA, 344 bp, Zea Mays
atcctttatcccctaatgctagccacttgatggatgatgaggaacatggctgagatagtgattcccaattcatgaatgaagatggcgagctgtgaagaaatcttgcaaatgtgtgtttgatgttatcgactcatgaagacattgaagaacttatattgtgtccatatgtgtgtgtccgtgtgtgactgagactattattctgttaactattattgtgtctggactgaatttatgtaagtttacttgttggatttggatttgtgctatgtgctcatgtactattgtggacttattttcttgttgttcaatggctatgtcggtggacttattttcctgttgttcaa

SEQ ID NO: 138280 - DNA, 1237 bp, Zea Mays
gtattttttttcttccagccatccgcccgtccgccgacaacacgcgacgtcacgacactcacccgtccgaccgtcctccaaccaccgtccaggccatcctgctgttcgccgaccgctgtccaggctgtcctgctgttcgccgaccgccgtcgaggtcgtcctgctgtcgccaacactgctgtccaggcgtccaggcgtcgttctccagccgtcggagtcgtcggtccagtcgtacaggcgtcgttcgccagcctccaggctccatctgccgtctaccgagtgtcgaagacacggccagtaccacagccgcagtacgtacgttagttgagactcgatatgtctcactctggaacaggacccggaggaggaggagcacgccattcagactcaatgcctgcggagtcagagactgggaacaacaacctaggtttggaaagcatgttgccactgcctccacagccgcagcgaccaccactacctccttctatgagaggcagcagcagcagctctgtttcagcaggaaacaagagaaaaacaagtggaagctctatgggtgcaccaattgttcagtcgtcatcttcagcacaagcaactgaaaataaagatgcaaataaattggttgtcgcagacacaagtaatactggtactagagctgtagcttctgttgatatagcggccttgatgatgatgaggaggacataccagaggatatgactggaacaggaaagagacaaaagaggcgcacatctattgtatggaagtattttaccaaagaaactgtggaagtggaggtgaatggcaagaagtttgagcagctttgggcctactgtaactttccaaaatgtaagcagagatatagagctgagtataatcatggaacaaatgcattccgcaaccatctgaggtcacatcacagtattgtcaaaggacaactagaactaaaggcagaaaaggataatggaaaagatgtcaccactattcagccttttaggtatgatccagatgctagtcttagaaaattctatttagcagtaatcatgcatgagtacccattcaacattgttgatcatgattattttgttgatttcatcaagtcgttgaggcctaattttgccttcaagtctagagtgactgctaggaaagatatacttgacatatactttgaagaaaaagaaaaattgtatgcccgattgaaaaatgtaacatgtcgctttagtgcaacaatggatatttggac

SEQ ID NO: 138281 - DNA, 675 bp, Zea Mays
atgtctctgaagtctgaacactcttctcatcctacgactgggataaagcaggtagatcagatcactctgggtcaaggcccggagaagtcagaggacgaaggagcccgagtaggaggcggccgacggcgagccgctgtgcggcgggctatagaatccgccgccgccgccgtactggatgatggcggcggctgcggggcttgcgtggttgtggacgccgtcgtaggtggtgatgacgtagcgggggtcgtcgcggtccctctccacccgcttcttcacgccgcagccctccgacgagcagcggtagtagttcctgcacgtacgtacgtgtgcatgcacaattatatatccatcagcatcgatccagtaaacattccatttcgtttctatttcttcttcgttgcttttctgcttgttgctttcatgttctgggaatttattttaactatattccaggtgaacatatgggtgtaccttggatttgggctactcttgacagccttcttgccatacttcctccatttgaatccatcgtccaagatctccacctctgatctcgttctgaacccgatcctaccgagtctcttctcgccaccaccaccctcacaccacctgatcatctgcttctcgctgcgatcgctccgagccccggccaaggtcggcgccggcgatgagtaa

SEQ ID NO: 138282 - DNA, 1936 bp, Zea Mays
gctacctcattgcttcgaagttcgaaaaacgattgctagaaacatggttttttcaatgatagacgcagatcgagcgctatttaatttgggacctaacaacgtacggcagagctactatagctccctgtgaaacacatgggaatttagaagcacacgattaagatctctcggagaactctagctagctagctaccattctaatctctactgctaattaagtacctattgtaggcgttcacagccaaccgtggtgcacgttctgccacatccaaaccgtccaacccgcatccaacgccgctgccgcatcccgcgtcgctcccccactcgtccctgccgcagcccccgcgatccccttcccacgcatggcgttcctgccgcagcccccgcggtcctttcggtgttctcgcttctagcgacgacggcggcggcccagggaaggtaccgcgcggtgttcagtttcggggactcgctggtggacgccggcaacctggtcacggagggcatcccggactacctcgccaccgcgcgcccgccctacggccagacctacttcggctaccccaccggcaggtgctccgacggccgcctcgtcgtcgatttcatcgcgcaggagttgggcctcccgctgccgccgccgtccaaggccaagaacgccagcttcgcacagggcgccaacttcgccatcaccggcgccaccgcgctcgacaccgacttcttccggaagcgagggctcggcagcaccgtgtggaactccggctccctccgcacgcaaatccagtggctgcgagacctcaagccatcgctctgcagctccgcgcaaggcacacgatgcaaggagttcttcgctgagtgcctgttcgtcgtaggcgaattcggtgggaacgactacaacgccccgctgttcgccggcaaggacctcagggaggcatacaagctgacgccccacgtgatccgagccatctccgatggagtcgaacaactgattgccgagggggcaaaggatttgatcgtgcccggagtgatgccatcagggtgctttccggtctacctgaccatgtacgttgaccccaaggaagggcatggctcgcgcaccagctgcctcaagcggttcaacacttgaattgaagtgcatcgaggttcctcaggcatggctcgcgcacagctcacatgaaacgtttggtcggggagcacgacagctacttacgtggcacgacagggggcgcctgcgtgccaatcgccctcagcggctcgaggttcctcgcacttcaattcacaggtttgggcggattggcaggttggtcttgcgaattgcaaccagcagagatgatattgaagtcgtggctgtgaatgaccctttcattgatgctaagtacatggtgaagacaattacctatcctctgcaatccaactatatgtagagatcgtcatcaaaagaaacctcaggctttgtattcaacaggacctttacaaacgactaacttagatcggcgagagtagagaataaggcaaggatctttgagcagaatgccactgatagtgagtgcaaggtcgatcctaaagtgctctccaagctatatgatccgtgagtgatgccacagaccaaggatgtcgaagttgagtacctcctgcgctgccttgactaatcaccgattagctatagctgtaaattttatgtatgcatggtttcagttgcgctcgaaccaattgtcttgaccttgaatggacattttgatgtttatttcatctgatgtgtcatgtttcatgacgtagactttcgtttcttgtgattgatttatagtgaacctgtaagatgtaaaataacctttatgacagaaccagctgcaagaatagagtattttgaggaacctttgttgaagtaaatgtaatcgagtttcctagcaatcttattcttgctggtatcatatttttttgagct

SEQ ID NO: 138283 - DNA, 1885 bp, Zea Mays
gctacctcattgcttcgaagttcgaaaaacgattgctagaaacatggttttttcaatgatagacgcagatcgagcgctatttaatttgggacctaacaacgtacggcagagctactatagctccctgtgaaacacatgggaatttagaagcacacgattaagatctctcggagaactctagctagctagctaccattctaatctctactgctaattaagtacctattgtaggcgttcacagccaaccgtggtgcacgttctgccacatccaaaccgtccaacccgcatccaacgccgctgccgcatcccgcgtcgctcccccactcgtccctgccgcagcccccgcgatccccttcccacgcatggcgttcctgccgcagcccccgcggtcctttcggtgttctcgcttctagcgacgacggcggcggcccagggaaggtaccgcgcggtgttcagtttcggggactcgctggtggacgccggcaacctggtcacggagggcatcccggactacctcgccaccgcgcgcccgccctacggccagacctacttcggctaccccaccggcaggtgctccgacggccgcctcgtcgtcgatttcatcgcgcaggagttgggcctcccgctgccgccgccgtccaaggccaagaacgccagcttcgcacagggcgccaacttcgccatcaccggcgccaccgcgctcgacaccgacttcttccggaagcgagggctcggcagcaccgtgtggaactccggctccctccgcacgcaaatccagtggctgcgagacctcaagccatcgctctgcagctccgcgcaaggcacacgcgaattcggtgggaacgactacaacgccccgctgttcgccggcaaggacctcagggaggcatacaagctgacgccccacgtgatccgagccatctccgatggagtcgaacaactgattgccgagggggcaaaggatttgatcgtgcccggagtgatgccatcagggtgctttccggtctacctgaccatgtacgttgaccccaaggaagggcatggctcgcgcaccagctgcctcaagcggttcaacacttgaattgaagtgcatcgaggttcctcaggcatggctcgcgcacagctcacatgaaacgtttggtcggggagcacgacagctacttacgtggcacgacagggggcgcctgcgtgccaatcgccctcagcggctcgaggttcctcgcacttcaattcacaggtttgggcggattggcaggttggtcttgcgaattgcaaccagcagagatgatattgaagtcgtggctgtgaatgaccctttcattgatgctaagtacatggtgaagacaattacctatcctctgcaatccaactatatgtagagatcgtcatcaaaagaaacctcaggctttgtattcaacaggacctttacaaacgactaacttagatcggcgagagtagagaataaggcaaggatctttgagcagaatgccactgatagtgagtgcaaggtcgatcctaaagtgctctccaagctatatgatccgtgagtgatgccacagaccaaggatgtcgaagttgagtacctcctgcgctgccttgactaatcaccgattagctatagctgtaaattttatgtatgcatggtttcagttgcgctcgaaccaattgtcttgaccttgaatggacattttgatgtttatttcatctgatgtgtcatgtttcatgacgtagactttcgtttcttgtgattgatttatagtgaacctgtaagatgtaaaataacctttatgacagaaccagctgcaagaatagagtattttgaggaacctttgttgaagtaaatgtaatcgagtttcctagcaatcttattcttgctggtatcata

SEQ ID NO: 138284 - DNA, 2043 bp, Zea Mays
gctacctcattgcttcgaagttcgaaaaacgattgctagaaacatggttttttcaatgatagacgcagatcgagcgctatttaatttgggacctaacaacgtacggcagagctactatagctccctgtgaaacacatgggaatttagaagcacacgattaagatctctcggagaactctagctagctagctaccattctaatctctactgctaattaagtacctattgtaggcgttcacagccaaccgtggtgcacgttctgccacatccaaaccgtccaacccgcatccaacgccgctgccgcatcccgcgtcgctcccccactcgtccctgccgcagcccccgcgatccccttcccacgcatggcgttcctgccgcagcccccgcggtcctttcggtgttctcgcttctagcgacgacggcggcggcccagggaaggtaccgcgcggtgttcagtttcggggactcgctggtggacgccggcaacctggtcacggagggcatcccggactacctcgccaccgcgcgcccgccctacggccagacctacttcggctaccccaccggcaggtgctccgacggccgcctcgtcgtcgatttcatcgcgcaggagttgggcctcccgctgccgccgccgtccaaggccaagaacgccagcttcgcacagggcgccaacttcgccatcaccggcgccaccgcgctcgacaccgacttcttccggaagcgagggctcggcagcaccgtgtggaactccggctccctccgcacgcaaatccagtggctgcgagacctcaagccatcgctctgcagctccgcgcaaggcacacgtacacacccaagaacgcaaattttcgccgatcctttaccatattttccttcctttctttctttcttaaagtaaaaaaattcaatttcgttgacgctgctatccttttttgtccccctttccttgggtcgtgaaggatgcaaggagttcttcgctgagtgcctgttcgtcgtaggcgaattcggtgggaacgactacaacgccccgctgttcgccggcaaggacctcagggaggcatacaagctgacgccccacgtgatccgagccatctccgatggagtcgaacaactgattgccgagggggcaaaggatttgatcgtgcccggagtgatgccatcagggtgctttccggtctacctgaccatgtacgttgaccccaaggaagggcatggctcgcgcaccagctgcctcaagcggttcaacacttgaattgaagtgcatcgaggttcctcaggcatggctcgcgcacagctcacatgaaacgtttggtcggggagcacgacagctacttacgtggcacgacagggggcgcctgcgtgccaatcgccctcagcggctcgaggttcctcgcacttcaattcacaggtttgggcggattggcaggttggtcttgcgaattgcaaccagcagagatgatattgaagtcgtggctgtgaatgaccctttcattgatgctaagtacatggtgaagacaattacctatcctctgcaatccaactatatgtagagatcgtcatcaaaagaaacctcaggctttgtattcaacaggacctttacaaacgactaacttagatcggcgagagtagagaataaggcaaggatctttgagcagaatgccactgatagtgagtgcaaggtcgatcctaaagtgctctccaagctatatgatccgtgagtgatgccacagaccaaggatgtcgaagttgagtacctcctgcgctgccttgactaatcaccgattagctatagctgtaaattttatgtatgcatggtttcagttgcgctcgaaccaattgtcttgaccttgaatggacattttgatgtttatttcatctgatgtgtcatgtttcatgacgtagactttcgtttcttgtgattgatttatagtgaacctgtaagatgtaaaataacctttatgacagaaccagctgcaagaatagagtattttgaggaacctttgttgaagtaaatgtaatcgagtttcctagcaatcttat

SEQ ID NO: 138285 - DNA, 1466 bp, Zea Mays
gctacctcattgcttcgaagttcgaaaaacgattgctagaaacatggttttttcaatgatagacgcagatcgagcgctatttaatttgggacctaacaacgtacggcagagctactatagctccctgtgaaacacatgggaatttagaagcacacgattaagatctctcggagaactctagctagctagctaccattctaatctctactgctaattaagtacctattgtaggcgttcacagccaaccgtggtgcacgttctgccacatccaaaccgtccaacccgcatccaacgccgctgccgcatcccgcgtcgctcccccactcgtccctgccgcagcccccgcgatccccttcccacgcatggcgttcctgccgcagcccccgcggtcctttcggtgttctcgcttctagcgacgacggcggcggcccagggaaggtaccgcgcggtgttcagtttcggggactcgctggtggacgccggcaacctggtcacggagggcatcccggactacctcgccaccgcgcgcccgccctacggccagacctacttcggctaccccaccggcaggtgctccgacggccgcctcgtcgtcgatttcatcgcgcaggagttgggcctcccgctgccgccgccgtccaaggccaagaacgccagcttcgcacagggcgccaacttcgccatcaccggcgccaccgcgctcgacaccgacttcttccggaagcgagggctcggcagcaccgtgtggaactccggctccctccgcacgcaaatccagtggctgcgagacctcaagccatcgctctgcagctccgcgcaaggcacacgatgcaaggagttcttcgctgagtgcctgttcgtcgtaggcgaattcggtgggaacgactacaacgccccgctgttcgccggcaaggacctcagggaggcatacaagctgacgccccacgtgatccgagccatctccgatggagtcgaacaactgattgccgagggggcaaaggatttgatcgtgcccggagtgatgccatcagggtgctttccggtctacctgaccatgtacgttgaccccaaggaagggcatggctcgcgcaccagctgcctcaagcggttcaacacttgaattgaagtgcatcgaggttcctcaggcatggctcgcgcacagctcacatgaaacgtttggtcggggagcacgacagctacttacgtggcacgacagggggcgcctgcgtgccaatcgccctcagcggctcgaggttcctcgcacttcaattcacaggtttgggcggattggcaggttggtcttgcgaattgcaaccagcagagatgatattgaagtcgtggctgtgaatgaccctttcattgatgctaagtacatggcctatatgttcaagtatgattccactcatggcccgtttaaaggttctattcgtgtcgtggatgattcaaccctcgagatcaatggatga

SEQ ID NO: 138286 - DNA, 1987 bp, Zea Mays
gtcaggacgtgaccgggaacaaatgtgagtgataatcctatctctgccggctactacggccagatagatcgatagagatatacattaatacatacgttcatattagatatatatatagatagatagatagatagatagatagatagatagatagatgcaaagatatatatggatatatattgcataggacctcaagtttctctcctctaagtcaaatctatgctgcattatattagaaaaaacgtggcgaaaaaacaaaacaaagtcacatgtcgtgttagtgtaggtgtagacttcccagctcaaccatctctattaaaaagtctcagctcctcgctagaatcatcgggaaaagaaaaggtttctgctcctactagaaagtcaaactgcagtgccgtgcgtttacggtgggcgggcgacgacagttggacaaaccagcgagtgaaccctgccagccaactatgagcatcacggtcaccaagtcctcactggtgctggtcggcccgtcgacatcgccggcggcggtagagacaaccgggcacatcatcaacctttcgtcgtttgacaaggccctcgccttcttccccgtcacgtcgttccacatcttcgaccatgcgatccacaggcccgccgagaccgtgcggagcgctctgtcccgcaccctggtgcactactccccggtcgcgggccgcgccgtgatcgacgacgacgacggcggcgagctccgtctcgcttgcaccggcgagggcgtggggttcgtgtccgcgtcggccaactgctccctggcagacgtcaagctctttgacccgccgttcgcggcgctactgaaggagctcgccgtggacctcggtgccgagggattccgtctatcggatcctctgctgctcgtgcaggtgacggagttctcctgcggcgggttcgtcgtcggggtgacgcggaaccacgtcgtcgccgatggcacggggttcgcgcagttcctgcaggccgtcggcgagctcgcgcggggcctgccccggccgtccgtctttccggtcagctgcggagacgactccctaccggagctgccgccgttcgtcgacgccatggagaaggcactgatcacgctcgagccacgggacttcgcctacctcgacgtcaccgttccgtccaggtgcatcagccgtatcaaagccggattcgctggccacgccgccgccgcggacggcggcccgtgcaccgtcttcgaggcggtcatggccgtcctctggcagtgccgcacgcgcgccatcatgtccgaccccgatacccccgcccctctcatctttgcagccaacgtgcgcaagcacgtcggcgccaagagaggctactacggcaactgcataacgtcggcggtggtcgtgccgaggagcggggaggtggcgaacggcgacatcaacgacgtcctgaggctgatcaagcgcgctaagcagccgataccgtatcagttcagcaagaacaaggtcgccggcggagacgaaggtcgccgccacgtgcgcggcctgctggaaccgccggaaggtgtgggtttgtccatggagcagctcgacgtgacgctcgggtacaacgccttcgacgtgacgagctggcggaacctcggcgccgacgcagtggacttcggcggcggccggccggcgagggtgatgtgctggctggaccggatggcggtgccgcactgcgtcgcgtgcctgccatgcaacaaggacggggccaacgtgttggcgcgctgtgtcaaggaggagcacgtggacgccttccttggagaattggccaagttcacctgatgagattctttgttgcgaaataaagtgtttgcttaagttgttgccaggtgagcgtgtttggtgtagagctgtgttattagtttcagatttgtaaaacttgtttcagtctatagttttttaaacgctctagatccaccaaatacgaatttatcatatctagtgtttcaacgaagcatcatagttgttct

SEQ ID NO: 138287 - DNA, 1877 bp, Zea Mays
acctgtcaggcgagcccctctctcgggaatcctcccaaaattccccaattcacaggctgcctcgcagccgcaggccaccttcgcgcgcccacgtcgccgccataccatacccgccggcagccgccccgtcttaagatttccctcctctcgtctcatcgctcgctgtccctcagagacccgacagccagcatactcctccctcccgcaactgctacctttgcaccgtgggagcttcccgtttcttggatctctggacggccggcgctgggcatgatggatggaggccaagatggcccggaaagctcaggcagtcgacataagcatggaaagaatccagattaaataagcaaggcctctaggtgtttaaaagaaatctatgtatggactatggagtcatttttcctgaagcaatgacagatcacacaaaccgagctgatcttgtttgaacacaagttcaacttctaaaggatgccctaagctaaaagcaaaactgtttacagattcctgaaggatgaaacccagtatttgaagtatcacaacatggacctagaagaaggcaatgtcaccattagggtcaaaagggcaaaagcaacaaattggcccagggtgatgtcaaagtttttgcttgattggtaccttgagaagaagaagggaatgccacccaagaccaagttcaagaagatccaccacgtttggtgcacatctgctgtaaatactaaattcagaacaacttactctgttgatcaggtgcatcgccattttagacgtttcaaggagatctggatcattgtgactcggtatgtcaatgagactgggagcaggtttaacaataaacacaaaatgcttatacttcctcctgccactatggctagtttaccagtagctgagcgtgctattcttgttaaacccattccattcttcgaccatctgctacatctcttcaatgatggccagctggatgcagagtgcatgagagaccctatcatgactgacgattctaatgaggaattggaggcccagattgcgttgaacattattgcctcaggtgcagatacaagggaccaagatggggaagacctagataatataggattggagggtgaagataaccatcatgaggttgcagcaagtagtggtgaggtgccttgtgaagtgatgtctgatactagtccaccatccgcgcagccatccgggtcctttgctgagagcacaatggctgctctgaagcctagagcaaagaagatgaagatcatcagcaaaacgaaactaagtccaaaggcgcaggctgctctgccacgtgatggaagaaggaacgtggatgcattgaacagcaccttagtagggatccatgacagtgctcgaaaacctattcgggcagcgccaacatcagacccgaatgctcctctgtggaacatgctaaaagagattccactgactcaacctgataggctatctgtagggatgtatctttgtaagccagagtctgaagtgcatcgaagctttttcatgaacatgggcaaggagtaccttgaagcatgggcccgtaagttcttggctggagaggagcatggaaccgtatagtttgatagctgaatccagattgagcttattccctgaagcggcgcatagactgtcgtttgtcaggccttgttattgctgccagtttatgttctataattgatgcatatatatatgttgtgcttgaacagttggtaaataccatttttgttagctgttatgtaacttaaaatgtgtggccaagttagttcgcctttcggccttgtaagcttttcaatgtatatttatttaggtctgatcctcccccaggttgtagatgataacaatgtcatatatttgtggagatctagttctgtttt

SEQ ID NO: 138288 - DNA, 1356 bp, Zea Mays
acctgtcaggcgagcccctctctcgggaatcctcccaaaattccccaattcacaggctgcctcgcagccgcaggccaccttcgcgcgcccacgtcgccgccataccatacccgccggcagccgccccgtcttaagatttccctcctctcgtctcatcgctcgctgtccctcagagacccgacagccagcatactcctccctcccgcaactgctacctttgcaccgtgggagcttcccgtttcttggatctctggacggccggcgctgggcatgatggatggaggccaagatggcccggaaagctcagatcacaacatggacctagaagaaggcaatgtcaccattagggtcaaaagggcaaaagcaacaaattggcccagggtgatgtcaaagtttttgcttgattggtaccttgagaagaagaagggaatgccacccaagaccaagttcaagaagatccaccacgtttggtgcacatctgctgtaaatactaaattcagaacaacttactctgttgatcaggtgcatcgccattttagacgtttcaaggagatctggatcattgtgactcggtatgtcaatgagactgggagcaggtttaacaataaacacaaaatgcttatacttcctcctgccactatggctagtttaccagtagctgagcgtgctattcttgttaaacccattccattcttcgaccatctgctacatctcttcaatgatggccagctggatgcagagtgcatgagagaccctatcatgactgacgattctaatgaggaattggaggcccagattgcgttgaacattattgcctcaggtgcagatacaagggaccaagatggggaagacctagataatataggattggagggtgaagataaccatcatgaggttgcagcaagtagtggtgaggtgccttgtgaagtgatgtctgatactagtccaccatccgcgcagccatccgggtcctttgctgagagcacaatggctgctctgaagcctagagcaaagaagatgaagatcatcagcaaaacgaaactaagtccaaaggcgcaggctgctctgccacgtgatggaagaaggaacgtggatgcattgaacagcaccttagtagggatccatgacagtgctcgaaaacctattcgggcagcgccaacatcagacccgaatgctcctctgtggaacatgctaaaagagattccactgactcaacctgataggctatctgtagggatgtatctttgtaagccagagtctgaagtgcatcgaagctttttcatgaacatgggcaaggagtaccttgaagcatgggcccgtaagttcttggctggagaggagcatggaaccgtatag

SEQ ID NO: 138289 - DNA, 1481 bp, Zea Mays
aatccttatcagggaaataactatacgcaaagataggaaggcaaggctcgacgtacgccgctgaacgggagagcagcacatctcggttgatttgaagatcgaacgcacggcaggctgcgggtttcctctgccgctacctccgttttacgcggccggcgcgcagccatggcgatggtgcaggcgggcatgggcctcacccgggtcgtggtcctcgttggcgccggcgtcgccggctccgtcgttctccgcaacggtcgcctcgccgagatcctcggtgagcttcaggggatactcgacaaggggaacaaggggaaggacggaggagggggagacggggaaaccgatctcaacgaggctcttacctcgcaggtgcgccgccttgccatggagatccggcaacttgctaattcacaaccaataactgttctcaatggaggttctggacaatcaggagtatcaggcctgatagtacctgcagcaactgttggagcactaggttatggttatatgtggtggaaagggatctcgttctcagacctaatgtatgtcaccaagcgcaacatggcaaatgctgtttcaagcatgactaaacatttggagcaagtgcaaagttctcttgctgctgctaaaaggcatttgacacagcgcattgaaaagttggacgataaattggatcagcagaaggctctatctggacaaataagagatgatgtcactgatgcacgtctgaagcttgagaatattggttcagaaatcaagaacatcaaagaattggtttggggtctggatgggaaaattgattcaatggaagctaaacaggacttctcatgtgctggtgtgatgtacctctgccaattcatggagcaaaatggtggaaagcttccggatcgcctggaaggctccaaaatgacgacaaaacgttttggaggccaaaagttcttacagggattgcaactggcaatagaatcagggaattgtggcaaggacaccattgatatgctgttgaaagatgctgattcctctgataaaataaacaggacgtcctccatcaaatctgccagctaattattatctggtcgatactgattcgatgcccagtcggaatatttatagggttttcattacaagtaaatatgtaaatagctgcagccttttgcttgcaggaagtgcattttgtttaatttgtaagcttcgcaaaatgctagtagttgctactacgtaggaacctagtcatgctttaattttgtggtttcgctttgtgaaacgagaatgcaacacgtaataaacgaaaaacaccggttggctttacaatgtggacttgtaacttaaggccgtttggatcttgtcatttttagaggaattggaatctactgtgtagattatttggcttgaaatttgatgttccaccactttgtaaaattcaaatacaagtctatctcattcctcataggatagagggatggaaatgatttttatgtatc

SEQ ID NO: 138290 - DNA, 1582 bp, Zea Mays
aatccttatcagggaaataactatacgcaaagataggaaggcaaggctcgacgtacgccgctgaacgggagagcagcacatctcggttgatttgaagatcgaacgcacggcaggctgcggtaaggcagcggatctggttccgtttagctagggttccgtctccctccaccagacctgctcaacgccttccacgggcgcacctcgacgtgccttgagctagggtttcctctgccgctacctccgttttacgcggccggcgcgcagccatggcgatggtgcaggcgggcatgggcctcacccgggtcgtggtcctcgttggcgccggcgtcgccggctccgtcgttctccgcaacggtcgcctcgccgagatcctcggtgagcttcaggggatactcgacaaggggaacaaggggaaggacggaggagggggagacggggaaaccgatctcaacgaggctcttacctcgcaggtgcgccgccttgccatggagatccggcaacttgctaattcacaaccaataactgttctcaatggaggttctggacaatcaggagtatcaggcctgatagtacctgcagcaactgttggagcactaggttatggttatatgtggtggaaagggatctcgttctcagacctaatgtatgtcaccaagcgcaacatggcaaatgctgtttcaagcatgactaaacatttggagcaagtgcaaagttctcttgctgctgctaaaaggcatttgacacagcgcattgaaaagttggacgataaattggatcagcagaaggctctatctggacaaataagagatgatgtcactgatgcacgtctgaagcttgagaatattggttcagaaatcaagaacatcaaagaattggtttggggtctggatgggaaaattgattcaatggaagctaaacaggacttctcatgtgctggtgtgatgtacctctgccaattcatggagcaaaatggtggaaagcttccggatcgcctggaaggctccaaaatgacgacaaaacgttttggaggccaaaagttcttacagggattgcaactggcaatagaatcagggaattgtggcaaggacaccattgatatgctgttgaaagatgctgattcctctgataaaataaacaggacgtcctccatcaaatctgccagctaattattatctggtcgatactgattcgatgcccagtcggaatatttatagggttttcattacaagtaaatatgtaaatagctgcagccttttgcttgcaggaagtgcattttgtttaatttgtaagcttcgcaaaatgctagtagttgctactacgtaggaacctagtcatgctttaattttgtggtttcgctttgtgaaacgagaatgcaacacgtaataaacgaaaaacaccggttggctttacaatgtggacttgtaacttaaggccgtttggatcttgtcatttttagaggaattggaatctactgtgtagattatttggcttgaaatttgatgttccaccactttgtaaaattcaaatacaagtctatctcattcctcataggatagagggatggaaatgatttttatgtatc

SEQ ID NO: 138291 - DNA, 1818 bp, Zea Mays
atggcggacgctcaccacttcaacaacatctccctcggcggccgtggcggcggtcaccctgggcagttcaaactttactcaggaggcttggcgtggaagaagcaaggaggaggaaagatcattgaggttgataaaggtgatatcactaatgtggcttggatgaggattcctaaatcctaccagctcagcgttgggaccaaggagggcctctgttacagattttttggcttccgcgaacaggatgttagtaacttgactaatttcatagagaagagcactggaatcacgccggaagagaagcagctttctgttagtggccaaaactggggcgggatacaaataaacgggaatatgctttgctttaacgttggttcaaaggaagcttttgaagtctctctagcagatgtggcacagactcagatgcaagggaaaacagatgttgtcctagagttccatgtagatgatactactggagctaacgagaaagattcattgatggatttaagttttcatgttccgacttcgaatactcaattcattggagatgagcatcgtacttcagcacaggctatctcggttgaaattgatggtggtggctcctcagagatggcagttgtcacatttgacggaattgcaattcttacaccgaggggtcggtacagtgtggagcttcatcagtcattcttgcgactccaaggacaagctaatgatttcaaaatccagtatagtagtattctccgcctatttgttttaccaaagtttgagacagaggcagttgttgaaagggaactgacattaagtggggagattttggctgagaagtacaaggataggcttgagagctcttataggggtctaatacatgaggtattctccaaggtccttcgtggcctgtctagtgctaaagtgacacggccaagtacattccgcagttgcctagatggatatgcagtcaaatcatcacttaaagctgaagatggtttgctttatccactcgaaaagggcttcttctttctgccaaagcccccaacactaattcctcatgaagagattgagtatgttgagttcgagcgtcatggtgctggaggtgcaagtatatcatctcattactttgaccttttggtcaagctgacaaatgatcaagaacttctcttcagaaacatccaaaggaatgaataccataacctcttcaacttcatcagcggtaagcatttgaaaattctgaatcttggagatggacaaggtagaactagtggtgttactgctgttcttcagagcactgatgatgattctgttgatccacatctggagcggataaaaaatcaggccggtaatgaggaaagtgatgaagaggatgaagattttgtggcagacaaggatgatagtggatctccaaccgatgattctgatgcagaaggctctgatgctagtatgagtggaggagaaaaggagaaaccttccaagaaggaagctagtagctcaaagccgcctgtgaagaagaagcagaagagtgggccagatgaaggttctcaaaaaaagaagccaaagaagaagaaagatcccaatgcccctaagagagctatagctccattcatgtacttctcaaaggctgagcgagctaatatcaagagcagcaatcctgaactggcgaccacagagattgcaaagaagctcggagaaaggtggcaaaagatgacagcggaggagaggcagccatatgtggagcagtctcaggtcgacaagcaacgctatgcagaagagtctgcagcctaccgtggtgcagccgctcagcagggctctggtgctggatcggaatga

SEQ ID NO: 138292 - DNA, 1454 bp, Zea Mays
caggcgctggcaaagccactcatcttcggttttccggttcttcccagttcccattcggtcactcggaccggacatggcgatgagtttcttctcgcccactaccaccccttcatcctccgcatccctcctccccatccgccgccagtgtgccaccggcccctccgtgtccttccccctcaagccccaccgcttccgagttcatctcaaacctccgcgctcctcccgaacccgaatccacaccctctccacctcctccttgaagatccccaccgagagcattctctcttccgtggtctccacctcgacgaccctcctttttgtgctcgtcgcaggcctcctctccctctccggcgtccgctcactccccgccctcgcctgcgctccggcgccgacccagcaaccgcaagaaaccgaagaacaagaatccaaagagaagaagcagcaagaagaggctggtgagaggaaagaggacgtgttgccgcagctggatgaagaggacgcggaggatgacgaggtgcggatgtattcagcgattctgagccgcaactctggcgacgtggacgcgctcaagtgcgctctatacgctaagatgaggcgcgcggattggggcggggcgctgcggttcgcgcgactgctgcgcgacgccgagcccagcgagttggagtggcgcctgatggtggcgcagctgcacgagctcaagggggacctcgccgaggctgagcgtcacttcagggagctcctggcagaggagcccctcctcgttcgggctctccatggacttgcactgtgtatgcagaagaaacctgagggccctgctgtttttgaaatgcttgagaatgctttgcagcttgcaacttcagagagaagggtcccggaggagcgcaacataaagcttttgatcgcacaaatgcatgttgtcatgggtcagttagatgttgcgtctgagaaactacaaaatcttataaatgaggatcctcgggattttcggtctcatctttgccagggcattgtgtatgcacttttagacagaaaagaagacgcagatatgcaatttgatgtatacagaagccttgtgccggatgaattcccagataagagttttatcagtgatgttatactggcggctaggacggagtcacatgatcggctacaaaaggaatttgactctgagtttcaagcgaagaaatgatacattaagttttgtatagatgaggcccaaatactcctggtaggctaaatggttgcatggtaccaatcttacaaataaaacataacacagtaaaagcatagtgaaaagaggcgtctcttatcaggctatcaccaattttcctcatttcctctccctgttagtctctgcagacatttctcagtgaaatataatatagcgaagacaaaattctgcttgaagttaaaagctgtagtatccaaccagatggattgatttgttgatgttc

SEQ ID NO: 138293 - DNA, 1416 bp, Zea Mays
ctcaagtatagagctaagagcgtgtggtgagtttttttttaatcaagtgtcggagacacaggtcaactcaactacaaccggagtaccataacctatggacaacaccaacatggtcgtggtgacgacgcgggattccggaatcctggcacggttcctcatcaagcccgcggcattccacccgtggcgcgaccgcgccaccacgcagcccacgcaccaacgccgccctaataaatcccctgcgctccgcgcccgccggctcgcaaccctaaccttcctcccctgctccgccgccgccacggtcgcctctactgccatggtgagcgctgaagtcggcatcgattacgtgctgtggacggaggacgaggtgtccacccgcgtgggcgaggtcgccgccgagctcgcggccgacctgcgcgcgttgccggagcccgccgtcatcgtcggcgtcgccacgggcgcgttcctcttcctcgctgacctcgtccggcgcgtcgacgtgcggctcgtggtcgacctcgtgcgcgtcgagtcctatggggcgggcacagagtccagcggcaagccacgtatcacggccgacctcaaagtcgatgtggccgggaagcatgtggtcgtggttgaagatattgttgacacagggaatactctgtcctatctcattgctcatttggagaagaaaggtgcatcatccatatcggtttgcacttttcttgacaaaccagcaagaaggaaagtcaatgttcatctagtaggggatggaaaattttaccgtggatttgagtgcccagactactttgttgttggctatggtttagattacgcggagctctaccgtaacctgccttatgtcggagttctcaagcccgagatgtacaaaaaggattcaagcaattagacctgaggctgtacctgcaccttgtgcaatcgatcgatacgaagatctcagttacaaatgatacagagatcccagttttgatcaacaactttaccgaagcagaacttcttaatgcaaatgatacgagggggaaaaaggcaaaaaaaaaacagaaagatctagtttaccttttttctgtaagttcaggaaaacttcagttttttccaggtttctgtagcataacagcaagatgtacaactgtcagttttgtttgtcaccaaacagcaacccagaagggaaagatgtagttatatggcatgttacattttcagtttacaggctaaacagcttacagtgtcttgtagtgagatgtaactgtaaggtcggggagcttagtgaggtcagggtgggccatgcgttcccctgcccaacataaccaccattgagcaaacagtattttcattaccgtttagagactgtttggttgagttgttgctaaaaaaagctgacgtggaatgtgagatgtgaaaaaaattgctata

SEQ ID NO: 138294 - DNA, 1482 bp, Zea Mays
ggcccgtcagcccacggcacccccgatcccaataagcaccgaaccctatagcccaaaacttcctccacttcacgcccctccgccgccgccgcgtctcctctgcaggtaagaaggtaaggaagagggcgaaatggtgaagcacaacaacgttatccccaacgggcacttcaagaagcactggcagaactatgtcaagacatggttcaaccagcccgcccgcaagcagaggcgccgcatcgctcgtcaaaagaaggctgtgaagatattcccacgcccaactgctggccctcttcgccccattgtgcaatgccagactctcaagtacaacatgaagtcgagggctgggagaggatttacccttgaggagctgaaggctgccggcattccaaagaagcttgccccaaccattggcatttctgtggatcaccgccgcaagaacaaatctctcgagggactgcaggccaatgtccagaggcttaagacgtacaaggccaagctggttatcttcccaaggcgtgctcgcaaggccaatgccggcgactctactccggaggagcttgccacggccacccaggtccagggtgactacatgcctattactcgtggtgagaagcgctcagtcgaggttgtgaaggttactgatgagatgaagtcgtttgcggcctacggcaagctccgtcttgagcggatgaacaagaaacaccttggtgcccgccagaagaaggcggctgaggcagagaaggatgaaaagaagtgaagcaggtataccctgtttttgttttctatctttattccgatgcagccactagtggaattttactgtcaagtgtgtgctctaagttctgttttggtgctgaaaatagagaccagagttttggtgcccaactgtttgatacctggtacttgtggttgcaaactcatcagctatacccttatctaatggctgcctacccgatggtgcgtagtctcgtaggacaaatatgagccgaatgctcatataaataaatacatataccttcgcaattaggcaacacaaactcaacacaacaaatctagcctagggaactcttgctagctctcattcgattcctggtgctcctgcattccgagctcctgcattcctgattgcaatgacggcactccctccggactggttctgcctcgccacacgcttgatgacgcgacgatgaacgacggagggctgctggctctcgcgctcgactgtctccagacactgcccgcgctgctgttcggcctgttcttcctcgcgtgcgtgtagcatggtcctgacgccgtggcgacctggcgtttgtggccttcgcctacgccgatctcgccgtgttcttctggtgcggccgccgtgtcgagtggctggtgctggcgctgccgtctcctggcctggccccgttcgtgaagagagacgacgggtgctgcaggtcgccgtgtgggtccctctccaccgcactaagctgcgcgttcgct

SEQ ID NO: 138295 - DNA, 1042 bp, Zea Mays
ggcccgtcagcccacggcacccccgatcccaataagcaccgaaccctatagcccaaaacttcctccacttcacgcccctccgccgccgccgcgtctcctctgcaggtaagaaggtaaggaagagggcgaaatggtgaagcacaacaacgttatccccaacgggcacttcaagaagcactggcagaactatgtcaagacatggttcaaccagcccgcccgcaagcagaggcgccgcatcgctcgtcaaaagaaggctgtgaagatattcccacgcccaactgctggccctcttcgccccattgtgcaatgccagactctcaagtacaacatgaagtcgagggctgggagaggatttacccttgaggagctgaaggctgccggcattccaaagaagcttgccccaaccattggcatttctgtggatcaccgccgcaagaacaaatctctcgagggactgcaggccaatgtccagaggcttaagacgtacaaggccaagctggttatcttcccaaggcgtgctcgcaaggccaatgccggcgactctactccggaggagcttgccacggccacccaggtccagggtgactacatgcctattactcgtggtgagaagcgctcagtcgaggttgtgaaggttactgatgagatgaagtcgtttgcggcctacggcaagctccgtcttgagcggatgaacaagaaacaccttggtgcccgccagaagaaggcggctgaggcagagaaggatgaaaagaagtgaagcagagaccagagttttggtgcccaactgtttgatacctggtacttgtggttgcaaactcatcagctatacccttatctaatggctgcctacccgatggtgcgtagtctcgtaggacaaatatgagccgaatgctcatataaataaatacatataccttcgcaattaggcaacacaaactcaacacaacaaatctagcctagggaactcttgctagctctcattcgattcctggtgctcctgcattccgagctcctgcattcctgattgcaatgacggcactcc

SEQ ID NO: 138296 - DNA, 595 bp, Zea Mays
acctctctctcccagtcccagtctgtagtgcactcgattcatcatcctcctcctcagtagccatcgattctaacctcacccgcgccgcatctgccaagctcctccgctcctgttactcccatggagctcgcagcgtccgcttccgcctcggccgtctgctcggcgtaccgccaactctcggcgccagcggcggccgctgaccgcggcgtcggcggcgacgacgcgcaggagacggcgacgcggctcgatcggcggcggaggaagcgcggcggcggctgcgcggggctccggcggcggtgctacgcggtgctcaagcagcagcggacgcggctctacatcctccgccggtgcgtcaccatgctgctgtgctggcaccagcacgacctgtccgactgagcgcgctcgatctgtttccttgtgtagtgtgtgtacggtcctagggagaggatagggagggagacgaagcttttcgttgcgaccggctgccggcatgtgaaaatcatcgaatgctggtggaatctggtttccaatttggcgtgtatttgggcatgaacaacgcgaacaaatttatattgcctgatttgtgaaaaccagg

SEQ ID NO: 138297 - DNA, 1839 bp, Zea Mays
aaaaagtttatatctaacgataaaaaaatatatctaaaataatcgttgccgcaccgccgctgtagactgaagggaaagaggaggaagaattcgagtccaagtcttggagctctcgctttaggcggccagggtggaactgccccttgcccgtggttggtgaggcgattcgtggtcgggagcttccgtttctcttcggaggtgaagtggatctgacctactgtaggggaaagagcaaagtacattatcttgtacaaatgtgcattacgctacctttatcataaaccaaatcatctctgtttctgggaacagcaaccagtaatttcccatgcaacctcttggttgatggatgttcttcctgttgggtcagaaagagaaagtcaaacagatagtcaccctttactcatggagcatgcgattggcatcccaaggcatgatgttgcttctacttcgacacctcatcgagacaataatgatggcatggatcaactgccccgtgattcagaaagttcttctggaacaactgatgcatcttactctccgaatgctcctctagcaaggagagatgataatcgccttcggcgtcagcaaagtctaaattctggcttctggatatcaattgaactagctgtaaatcttagccagattatagctgctatctgtgttctgtctgtgtcaaagaatgaacatcctcatgctccattgtttgagtgggtcattggttatacaataggctgcattgcaactcttcctcatctatactggcgctatctccagcgcaaccagctggccactgtgcaagggtcaaatcagaactacgttccagacaacagctttgagagtagttcttttactgggatttcgccccctcctgtgtctgaagctggtgttgtaactgtatcaaatggagtcttgagaaacaatgtggttatcacaaatccaagggcccaagcttttgctgatcacttcaagatggcgctggactgcttcttcgctgtatggtttgttgtgggaaatgtgtgggtgtttggtggacattcttccgcccatgacgcacccaacctgtacaggttgtgcatagccttcctcactttcagctgcattggctatgcgatgcccttcatcctctgcgcgctgatatgctgctgcttaccctgcataatctccctgatgggcttccgggaagatctggacgaaaacagaggtgctacttcggatgcgatcaacgccctgggcacatacaggttcaggtcaaagaagcctcgtaacggggaggcaaacgaaggtggcggtggagtctttgctcctggaacggacaaggaacgcgctgtttctgctgaagacgccgtttgctgtatctgcttggcgaggtacgtggataacgatgatctccggttgctcccttgcgggcacttcttccacaaggactgtgtcgacaaatggctcaagataaatgcgctgtgcccactctgcaaagctgagatcgacgtcgtcccgaggaccgctcctccagccattggctttgggcgccgcgacagccacaggagggtaggaaacgacattgaatcacaacggcttccatgatgtatagtgagacagcaacttgccttgggcgtgtgtgtggcttccagaagagcaccttgtaaattatatagtgagagagagaaagagattatgtcatggaccaacgagtccttacatgatccagcaagtaatcgcctgactgaaaaatgtgtcgttgttgtcaatatgtgtgaatgtgtccctgtagctgtagctttgttcactccaaaatgtaccttgtcatagctaccgtgacgtcaattaactaatctattttat

SEQ ID NO: 138298 - DNA, 1871 bp, Zea Mays
cccgttccttccttgccaccggcgccatctttgcttccgtgacctcgcccgtcgatttttcttttcggttgtttattgcaaaacttgggcgcaagatagtctctgattcgttcggctttacgcggtcgaggcgattgtttggtctggttctggaacctgggctgctcttgctcttggtggcgttagttattcacgggttcttgaatctttcaggcggccagggtggaactgccccttgcccgtggttggtgaggcgattcgtggtcgggagcttccgtttctcttcggaggtgaagtggatctgacctactgtaggggaaagagcaaagtacattatcttgtacaaatgtgcattacgctacctttatcataaaccaaatcatctctgtttctgggaacagcaaccagtaatttcccatgcaacctcttggttgatggatgttcttcctgttgggtcagaaagagaaagtcaaacagatagtcaccctttactcatggagcatgcgattggcatcccaaggcatgatgttgcttctacttcgacacctcatcgagacaataatgatggcatggatcaactgccccgtgattcagaaagttcttctggaacaactgatgcatcttactctccgaatgctcctctagcaaggagagatgataatcgccttcggcgtcagcaaagtctaaattctggcttctggatatcaattgaactagctgtaaatcttagccagattatagctgctatctgtgttctgtctgtgtcaaagaatgaacatcctcatgctccattgtttgagtgggtcattggttatacaataggctgcattgcaactcttcctcatctatactggcgctatctccagcgcaaccagctggccactgtgcaagggtcaaatcagaactacgttccagacaacagctttgagagtagttcttttactgggatttcgccccctcctgtgtctgaagctggtgttgtaactgtatcaaatggagtcttgagaaacaatgtggttatcacaaatccaagggcccaagcttttgctgatcacttcaagatggcgctggactgcttcttcgctgtatggtttgttgtgggaaatgtgtgggtgtttggtggacattcttccgcccatgacgcacccaacctgtacaggttgtgcatagccttcctcactttcagctgcattggctatgcgatgcccttcatcctctgcgcgctgatatgctgctgcttaccctgcataatctccctgatgggcttccgggaagatctggacgaaaacagaggtgctacttcggatgcgatcaacgccctgggcacatacaggttcaggtcaaagaagcctcgtaacggggaggcaaacgaaggtggcggtggagtctttgctcctggaacggacaaggaacgcgctgtttctgctgaagacgccgtttgctgtatctgcttggcgaggtacgtggataacgatgatctccggttgctcccttgcgggcacttcttccacaaggactgtgtcgacaaatggctcaagataaatgcgctgtgcccactctgcaaagctgagatcgacgtcgtcccgaggaccgctcctccagccattggctttgggcgccgcgacagccacaggagggtaggaaacgacattgaatcacaacggcttccatgatgtatagtgagacagcaacttgccttgggcgtgtgtgtggcttccagaagagcaccttgtaaattatatagtgagagagagaaagagattatgtcatggaccaacgagtccttacatgatccagcaagtaatcgcctgactgaaaaatgtgtcgttgttgtcaatatgtgtgaatgtgtccctgtagctgtagctttg

SEQ ID NO: 138299 - DNA, 1702 bp, Zea Mays
aaaaagtttatatctaacgataaaaaaatatatctaaaataatcgttgccgcaccgccgctgtagactgaagggaaagaggaggaagaattcgagtccaagtcttggagctctcgctttaggtgaagtggatctgacctactgtaggggaaagagcaaagtacattatcttgtacaaatgtgcattacgctacctttatcataaaccaaatcatctctgtttctgggaacagcaaccagtaatttcccatgcaacctcttggttgatggatgttcttcctgttgggtcagaaagagaaagtcaaacagatagtcaccctttactcatggagcatgcgattggcatcccaaggcatgatgttgcttctacttcgacacctcatcgagacaataatgatggcatggatcaactgccccgtgattcagaaagttcttctggaacaactgatgcatcttactctccgaatgctcctctagcaaggagagatgataatcgccttcggcgtcagcaaagtctaaattctggcttctggatatcaattgaactagctgtaaatcttagccagattatagctgctatctgtgttctgtctgtgtcaaagaatgaacatcctcatgctccattgtttgagtgggtcattggttatacaataggctgcattgcaactcttcctcatctatactggcgctatctccagcgcaaccagctggccactgtgcaagggtcaaatcagaactacgttccagacaacagctttgagagtagttcttttactgggatttcgccccctcctgtgtctgaagctggtgttgtaactgtatcaaatggagtcttgagaaacaatgtggttatcacaaatccaagggcccaagcttttgctgatcacttcaagatggcgctggactgcttcttcgctgtatggtttgttgtgggaaatgtgtgggtgtttggtggacattcttccgcccatgacgcacccaacctgtacaggttgtgcatagccttcctcactttcagctgcattggctatgcgatgcccttcatcctctgcgcgctgatatgctgctgcttaccctgcataatctccctgatgggcttccgggaagatctggacgaaaacagaggtgctacttcggatgcgatcaacgccctgggcacatacaggttcaggtcaaagaagcctcgtaacggggaggcaaacgaaggtggcggtggagtctttgctcctggaacggacaaggaacgcgctgtttctgctgaagacgccgtttgctgtatctgcttggcgaggtacgtggataacgatgatctccggttgctcccttgcgggcacttcttccacaaggactgtgtcgacaaatggctcaagataaatgcgctgtgcccactctgcaaagctgagatcgacgtcgtcccgaggaccgctcctccagccattggctttgggcgccgcgacagccacaggagggtaggaaacgacattgaatcacaacggcttccatgatgtatagtgagacagcaacttgccttgggcgtgtgtgtggcttccagaagagcaccttgtaaattatatagtgagagagagaaagagattatgtcatggaccaacgagtccttacatgatccagcaagtaatcgcctgactgaaaaatgtgtcgttgttgtcaatatgtgtgaatgtgtccctgtagctgtagctttg

SEQ ID NO: 138300 - DNA, 2110 bp, Zea Mays
cacgcctcctccgccgaagccaagcaaaccaccgacctcgacggagtcttctagccgtcaccctcgttgtcgccctgctcctcctctcagccggtccggccggcggcgtggcgtgaagatcaatccggacccggaacgagttccctcttttgctggttacataaactttggaataggaggatatcccatattgatctttgtgattgagattgattttttttctggaaaatggagatacaaacttcagggaagcccattgatgtgctgatggagaaggttcttagcatgaacattctgtcttctgattactttaaggagctctataggttgaaaacctatcatgaggtcatcgatgagatctacaacactgtcaaacatgtggagccttggatgactggcaattgcagaggcccctccactgcattctgtcttctatacaagttctttaccatgaagcttactgtcaaacagatgcacggtttgttgaagcatcctgactccccacacattagagctgtaagtttctgtttcctgcccttctgtttgctgatgctgaatgtcttgcttcatggccctgtatctattcattaggcatgaggttagtgtatgaatctatatgtttattgggatgattataaaacttatttcggaagtattttttgcaatgaaaaatcttacattccttgcgaatcacttgtacataattttgtgcttacattttggttatagccactaacggtccgacaacttgtttctttggatggacttgtggctgaatttcttggtcctaggacacggggatgacaaagtttgcaagaagttcatagtgtaccagtctgtgctttggagttattggtttcttgtatcttcggtatgttgcagacccaaaggttctttggatgtggtatgagccctatttgagggatgatgaggagttctcccccggatctaatggccgcaagacaaccatgggtgtttatgtgcgtgatcttatacttggacagtactactttgatagtcttctaccaagaattcctctcccagtaactcgtcagattacagccaatcttgaaaagatgaaattgcccactaagctttctggggcaactggagactccagtcgtcagggatcagaagatactgcacgccgtcctccttcagtgaaagcttctctgtcagtttcctttggacagcgtgctccacatcgggcttccaccagggattcatctccagttcgtcgaacagtcacccgtgatggtcatcgaagttcatactcaccatctcgtcgtagtggtagccgtgagggtcctgatcatgaccgttctgaccgggaactggatcattctagtcgtgaccgtgaaagagcccgggatcgttcaaaccgggatcggtatcattcaagccgagaccttgaccgtgacaaggatgccagagattatcatcggcatgagcgtgatagcagggatcgtgagtactacaggtccaggcattcagaagaaagacgggacgacagaagagatcatgaaagtagcaggcacaggcgctctagctctcgccacaggagcaggagtaggagccgaagcaggagcaggagtaggagcaggagaagccgcagccgaagcacgagcaggaggagcctgaatgagcagcgatccagcccattcagggatgcaaataaagagaaggcagccaccgtgtcgagcaacctagcaaagctgaaggacttgtacggtgacataactgcaaagaaggaagacagtgatgctgaaaagcttcaccgtgattcatgcgctgaggaggtcatcaggctgggaggccctcgatggaggtaactttgagacctgtagaactctggtttccgctttgttctgccagcctctctgtaggccttcttgaaaatgctctttatgttcccaaacttgatagagtcgactggtacttcggtatcttgacttgttgtcgcctgacatttgccattaatgtatgttgtttggtatgttattcctaagaattcctatgacattggaacgtactgtataaaccgtggtatccgagcttcatgtttgcttgatgcttatgcaaattgaaggttgaataagtttcagtttca

SEQ ID NO: 138301 - DNA, 1483 bp, Zea Mays
gaagaattaggccccgatctctccaatagtctagtccctcccaagccgactccgcctgattatcttcccggcgctgtttacccccctatgaactaggattcataacagccaccacgacctctgcagctgccggcgcactgcatcgcacacgcattggcgttggcattgagggctcaagtcctctgccagtccaagtcattacggtgtcctccacgacgttggcgttgagggctcaagtctgctgccagtccaagccgtcgttgtggctggccccctccctggcgttggcgttgagggctcgaggccgatgctagtcacgccctcagttgcggccctcgtggcatttctcaccaaggccgcccgctcgccccagactcaacaagctggagtactactttgatagtcttctaccaagaattcctctcccagtaactcgtcagattacagccaatcttgaaaagatgaaattgcccactaagctttctggggcaactggagactccagtcgtcagggatcagaagatactgcacgccgtcctccttcagtgaaagcttctctgtcagtttcctttggacagcgtgctccacatcgggcttccaccagggattcatctccagttcgtcgaacagtcacccgtgatggtcatcgaagttcatactcaccatctcgtcgtagtggtagccgtgagggtcctgatcatgaccgttctgaccgggaactggatcattctagtcgtgaccgtgaaagagcccgggatcgttcaaaccgggatcggtatcattcaagccgagaccttgaccgtgacaaggatgccagagattatcatcggcatgagcgtgatagcagggatcgtgagtactacaggtccaggcattcagaagaaagacgggacgacagaagagatcatgaaagtagcaggcacaggcgctctagctctcgccacaggagcaggagtaggagccgaagcaggagcaggagtaggagcaggagaagccgcagccgaagcacgagcaggaggagcctgaatgagcagcgatccagcccattcagggatgcaaataaagagaaggcagccaccgtgtcgagcaacctagcaaagctgaaggacttgtacggtgacataactgcaaagaaggaagacagtgatgctgaaaagcttcaccgtgattcatgcgctgaggaggtcatcaggctgggaggccctcgatggaggtaactttgagacctgtagaactctggtttccgctttgttctgccagcctctctgtaggccttcttgaaaatgctctttatgttcccaaacttgatagagtcgactggtacttcggtatcttgacttgttgtcgcctgacatttgccattaatgtatgttgtttggtatgttattcctaagaattcctatgacattggaacgtactgtataaaccgtggtatccgagcttcatgtttgcttgatgcttatgcaaattgaaggttgaataa

SEQ ID NO: 138302 - DNA, 2187 bp, Zea Mays
cacgcctcctccgccgaagccaagcaaaccaccgacctcgacggagtcttctagccgtcaccctcgttgtcgccctgctcctcctctcagccggtccggccggcggcgtggcgtgaagatcaatccggacccggaacgagttccctcttttgctggttacataaactttggaataggaggatatcccatattgatctttgtgattgagattgattttttttctggaaaatggagatacaaacttcagggaagcccattgatgtgctgatggagaaggttcttagcatgaacattctgtcttctgattactttaaggagctctataggttgaaaacctatcatgaggtcatcgatgagatctacaacactgtcaaacatgtggagccttggatgactggcaattgcagaggcccctccactgcattctgtcttctatacaagttctttaccatgaagcttactgtcaaacagatgcacggtttgttgaagcatcctgactccccacacattagagctgtaagtttctgtttcctgcccttctgtttgctgatgctgaatgtcttgcttcatggccctgtatctattcattaggcatgaggttagtgtatgaatctatatgtttattgggatgattataaaacttatttcggaagtattttttgcaatgaaaaatcttacattccttgcgaatcacttgtacataattttgtgcttacattttggttatagccactaacggtccgacaacttgtttctttggatggacttgtggctgaatttcttggtcctaggacacggggatgacaaagtttgcaagaagttcatagtgtaccagtctgtgctttggagttgtgagcattttgttttttttgtctttactaagcctgttaaatactaaaatattttgtgtcgaatgactgttttgcgctatttggtgcagattggtttcttgtatcttcggtatgttgcagacccaaaggttctttggatgtggtatgagccctatttgagggatgatgaggagttctcccccggatctaatggccgcaagacaaccatgggtgtttatgtgcgtgatcttatacttggacagtactactttgatagtcttctaccaagaattcctctcccagtaactcgtcagattacagccaatcttgaaaagatgaaattgcccactaagctttctggggcaactggagactccagtcgtcagggatcagaagatactgcacgccgtcctccttcagtgaaagcttctctgtcagtttcctttggacagcgtgctccacatcgggcttccaccagggattcatctccagttcgtcgaacagtcacccgtgatggtcatcgaagttcatactcaccatctcgtcgtagtggtagccgtgagggtcctgatcatgaccgttctgaccgggaactggatcattctagtcgtgaccgtgaaagagcccgggatcgttcaaaccgggatcggtatcattcaagccgagaccttgaccgtgacaaggatgccagagattatcatcggcatgagcgtgatagcagggatcgtgagtactacaggtccaggcattcagaagaaagacgggacgacagaagagatcatgaaagtagcaggcacaggcgctctagctctcgccacaggagcaggagtaggagccgaagcaggagcaggagtaggagcaggagaagccgcagccgaagcacgagcaggaggagcctgaatgagcagcgatccagcccattcagggatgcaaataaagagaaggcagccaccgtgtcgagcaacctagcaaagctgaaggacttgtacggtgacataactgcaaagaaggaagacagtgatgctgaaaagcttcaccgtgattcatgcgctgaggaggtcatcaggctgggaggccctcgatggaggtaactttgagacctgtagaactctggtttccgctttgttctgccagcctctctgtaggccttcttgaaaatgctctttatgttcccaaacttgatagagtcgactggtacttcggtatcttgacttgttgtcgcctgacatttgccattaatgtatgttgtttggtatgttattcctaagaattcctatgacattggaacgtactgtataaaccgtggtatccgagcttcatgtttgcttgatgcttatgcaaattgaaggttgaataa

SEQ ID NO: 138303 - DNA, 1118 bp, Zea Mays
cttgatttaccatcgtcatgacttgaattattttatatcattgtttaatgttgactaatgattcgttttaagctgctccaatctctagtataaacctatactgcttagtgtccttatttgttttttatgatgcagtactactttgatagtcttctaccaagaattcctctcccagtaactcgtcagattacagccaatcttgaaaagatgaaattgcccactaagctttctggggcaactggagactccagtcgtcagggatcagaagatactgcacgccgtcctccttcagtgaaagcttctctgtcagtttcctttggacagcgtgctccacatcgggcttccaccagggattcatctccagttcgtcgaacagtcacccgtgatggtcatcgaagttcatactcaccatctcgtcgtagtggtagccgtgagggtcctgatcatgaccgttctgaccgggaactggatcattctagtcgtgaccgtgaaagagcccgggatcgttcaaaccgggatcggtatcattcaagccgagaccttgaccgtgacaaggatgccagagattatcatcggcatgagcgtgatagcagggatcgtgagtactacaggtccaggcattcagaagaaagacgggacgacagaagagatcatgaaagtagcaggcacaggcgctctagctctcgccacaggagcaggagtaggagccgaagcaggagcaggagtaggagcaggagaagccgcagccgaagcacgagcaggaggagcctgaatgagcagcgatccagcccattcagggatgcaaataaagagaaggcagccaccgtgtcgagcaacctagcaaagctgaaggacttgtacggtgacataactgcaaagaaggaagacagtgatgctgaaaagcttcaccgtgattcatgcgctgaggaggtcatcaggctgggaggccctcgatggaggtaactttgagacctgtagaactctggtttccgctttgttctgccagcctctctgtaggccttcttgaaaatgctctttatgttcccaaacttgatagagtcgactggtacttcggtatcttgacttgttgtcgcctgacatttgccattaatgtatgt

SEQ ID NO: 138304 - DNA, 103 bp, Zea Mays
ccttaagcatcttaaatccttgggtgcgtacgaaagtacggaatgaacaacggaatgccaacctttttcccctctatttagggtgtgtttgggagggcttcac

SEQ ID NO: 138305 - DNA, 447 bp, Zea Mays
aaattgtaaaaaagttggccgcagcgccgcccttcagacccttctcttcatcttcactctcctggtttattcctccgtgccgatctcgtcttctccggcgggaccatggcgccgtcctcctcccgattcgacgatccggcggcggtgaggcgccccccgcagcatgaacggaagccgccgtatatgttgcttctcccgctcgtctacgcccccgtcctccccctcatcaggatcgggctgcggcacaatcccgtagtgagggaccgtctcttctacggcgtcctcgccggcgcattcgcccacggcgcctacctcatgtacgttttcctacacacacgtgcttccctgcttctccatgtgcccctgttcttattagatgtcgattgctaaaaaagaaacaattctggttgctgcgaatcgcgcttctgctattcatgcttacctggt

SEQ ID NO: 138306 - DNA, 612 bp, Zea Mays
agctgccactctgggcccttcccattgccttgcttatagttgaattcattgtccaggtcatcaacatcttcctcctcatcatcaccatgaactcgagggctacctgaatttcattagagaggaatcttgcactgagggcagcattggttcccttccttgcgctcgtactcatagcaagggcggcagacagggaaggcacactcattgcaggcaacaaagacatcaccagtggctgaaacgccaacagtgtcgccacaaatctggcagacctgcccattcgcactcttcgtgggcttagcctgcgcgtcgccgtcgtggcggatcatgacgaactcgttgcggttgtgagagcctgccaccatccccttgttggccgccatctccgcgctcctcctacacacaccgattcacactccaccgacaccgacgaggccggcggagggcaatcagcccgtgcggccctctagatccgagcggcagcggcagcgaccgccaccatgccccagatccctcccgcttgctcgctgcaatgccgcgcagtggtggtgctgctgctgcttcgcttcctcttcctctccgcaccttccttctcctctattacatactcccccg

SEQ ID NO: 138307 - DNA, 1138 bp, Zea Mays
gcaccagaacaggcaacgcactactcgttcgtatctttaagcttgctgctgcagcgtaagaaaaagcagtctgcactcggtcggtcggtcgctctgttcagctagctgcatgctcggccaccatatctcctccagtacgttcgtcgttctccacgccgctatctggtctgcggtaagcagcagctagaggccgttgtgtaggctacacagaagatcatcgaggaggatgctggtgaagaagaacaacagcacggcgatggcggcgggcgtgctgccgctggcgtcgctgaaccacatcagcatcgtgtgccggtcggtggaggcgtcgctgcgcttctacgcggacgtgctcggcttcgtgcccatccgccgccccggctccttcgacttcgacggcgcctggctgttcaactacgggatcggcgtccacctactgcagtcggaggaccccggcagcctcccggagaataagggcgagatcaaccccaaggacaaccacatctccttccagtgcgagagcatggtggcggtggagcggcggctcaaggagatgggcatcccgtacgtgcagcgctgcgtggaggagggcggcatcaacgtggaccagatcttcttccacgacccggacgccttcatgatcgaggtctgcaactgcgacaacctccccgtcgtcccgctcgccgccgccgccgaccagcgcgcgcctgccgtcctcggcgcctgcaagcgggccgcggcggcggtcggcgtcaagcagcagcagcagcaaagcagcggcggcgccgtgccttcttccgccgccccggcggcggccgcgcagcgcgtgccgtcggcggcgcaggcgcccatcgtccgcgtcgccgaggagtcgacgtcgcacatttcgtgcgcgtgattcttcatgccaaatggcgaggacggtcagtgtcgtgccggcctgccggatgccgtcaccgcgacggtgaccgcgcgcactgcatgtctgcgtcgagccgtgacgaagcaggcacgatgcgtcgagtcacggcaaaaagcgtctagcgcgtcgtctctgtatatgcgagtgcgtcgtcgtgtagctccatgtgcaagcaaactactgcccttttgtagtaaagaataaaaccatgtgaagaga

SEQ ID NO: 138308 - DNA, 280 bp, Zea Mays
gttgggtctatttgattttctggcaatcatctcttcgaggtcgcgcaacagtctgcttgatgacgaatactaaatattgattgacgtgggaaggatggaaggtattgtacacttgtgcctgtcacgttgcttaattctagcctaccggagggccgactctaataacctatgttgcttaatcattgtttagtttgttgaactttgttttcagaaaatttgctctaatgtattaggatttagtttactgtgtattttaaggtttaggttagtttgacaaatt

SEQ ID NO: 138309 - DNA, 2161 bp, Zea Mays
aatagggaacacaagtgcgtcgtggtggtgctggcggttttgagttttgacccaccattcccgcattccttctcttctgcagtggcggcagcggcagccaggaaacgcaaacgaggaagaggagcggtcgattcccaatctttatacgattgattctttaccaattgtatcgccattccttcctgttcattgggcgtggggtttcaacctaataaatcggtccttttccgcgcaactagtggggagtggagccgctgagaaatagcaccccttttcctgccccaagatgcctgtttccgcttcttttccacgccacaccttttgaaaatccttcgccgtcagctccccttttgcagcactagttgtttctcagcctgcttggagtttggagggggcagagaacaccatcctgtcgattcaagaaaaaggctgagccgatgggcagtaagagcggcgtgcgactgcaatgcgccgaggccaaatcggcgacggattggagctgctgcttcctggccctgccaccggcagcaccatccggtgttgatggcgatggcgggtttaacctctcgtggaacctccgcaagtccttccacccgccggcgggactcttcgccagcatgggccagcaggttggggttgggttcccggggacttcttctaggtccccgtcgccggagacacctcgggatccgtacatgaagtacgtctcgccggaggttgtcgagacacctccgtcgggggaaggggtggcgttgagggacaaggggaagaagaaagccgtgaagctcaggattaaggttgtgaatcatcacctcaagaggctgatcagtggagcactcgcaggcacagtgtcaagaactgctgttgcacctttggagacgatcagaacgcatttgatggttgggagtaatgggaattcgtcgacggaggtgttccagtctatcatgaagcatgagggatggactgggttgttccgtggtaactttgttaatgtcatccgggtagccccaagcaaggcaatcgagctttttgctttcgatacagctaacaagttcttgacccccaaatctggggaggaacggaagatcccagtccctccttcactagtggctggggcatttgcaggtgttagctcaacactgtgtacataccctctggaattgattaagacacggttaactatacagagaggggtgtatgacaatttccttgacgcgtttgtcaagatcgtccgcgacgaagggcctactgaactctaccgaggcttaaccccaagtctgattggagtggtgccatatgctgcaaccaactacttcgcctatgacaccctgaagaaggtgtacaagaagatgttcaagacaaatgagattggcaatgtcccaacgctgctcatcgggtctgctgcaggagctatctcaagctcagcgacattccctcttgaggttgcacggaagcacatgcaagttggagctgttggtggcaggaaggtttacaagaacatgctccatgccctcctaagcattcttgaggatgaaggggttgggggcctctacaaagggttggggccaagctgcatgaagttgatgcctgctgctgggatttcctttatgtgctacgaggcttgcaagaagattctgatcgaagaagaggatgagtgaagtgtgtgcggatgcattgcgtcattagaactcagttttgcgacatcctgaattcctgatagcaggcagcttctttcggtatttctttgagtcgactggtgctggagttggttgaaactcaagactgaggttactgctgcagtcagcataagttctttttttttgatgagtcgaccaaggggggagaggcccccaccagatccactgcattatgtagctcttcgagttcaaagtacacgccaagcacatattcttaacccccactttgcacccagtttgatcttataaattcacctgtttttttccagatttaaacttttacttttgggtacaagttgtgttgtcgaaactcatgactgcgatgtgtgaaaacgttcagatgccataggcaatcataattcacaagtggcaaagctgcacctgacctgtgttcttgtttctcatatgttggtctgtgatgtcacaacagtgaccattaattccacctaaatgaaaaaaaaaca

SEQ ID NO: 138310 - DNA, 1455 bp, Zea Mays
cgcagagccctcacccttatcatcaatcaattcaccatacaagtcagccactgctgcatttgtttcggtgcactctgtctctctgcagtctgtacggcccagctgctgccgttggcccgttgttcaggtcctgccttcctgctgcatcagttggtcctcttcttccttccgctccccctggctagcttggttgtgtcaactgtctgcaagcttccttctcccctgctctgctctttgattgcttccaccgtttcagctgttcttgacaggtttctctgctcccgccggtggcagactgcctgttgctgctacttcctaaccgttcttggttggtaggattcatctcccctgctctgtcactgtgtcaatccctgagccaaacaagcacctcctagttctgttcccccaatggtggatccaagctagttttccttttatctctggggaaaagtagagagtccgaagatgagagctttaagcagggtcggagtggggctcgccgtggtgtccgcgctgctccttctggcgctcaccgcggagctctattacatcttcgtgcacaagcgccggctgcggcgacgcgccgccgccatctccgacgcgtcgtcgtccccgtcctcgtcctcccgcgagctgctccagctcttctgcttcaagaagccgccggcgctcgcgtccacctacgccgtcccggaggccggcgacgacgccgacgccgacgacgagacggtggaggcgcagctcatgcggctgggcggcgtcgtcggtcccacgcgcctgctattcaccatcaaggaggagacccgggaggacctcgagtccgaggacgggcgcggccggagccgcagcctcggcgagctcatgcattgctctgaaacgccgccgttcctcacgcccagggcctcgccgtcgccagcgatggacaactcctacaacccgctgttcgagtccccggcggcgagcccgggcccgcgccccggcccgacggtgtcgccgccgcccatgttccagtttctcaaggacgccgaggagaaactgtaccgccgggcgctggccgaggaggcgatgagggcgcggaggtcgccgccaccgcagcaagcgacgtcgccggcggccggcgaggaggacggcgggtacatcaccattatggtggggaagaacagccgcgtcatcatccccgtgccgtcagcgccggccaccggcggaggtcgacatgagtgatgagcggcggcggtgtccaccggcaccaccgggttttgatggattatcgactagcttgatactcgtactgccttactgttttagtgtagctcttgtgatgtaaactttgttcttcttttttgttttgttgggtctatggtcttgtgatcatgccaaattggatgtatataacatcaaagtgatcgatgaggactcataatttcagatcaacatgttttccttgttatccggtgc

SEQ ID NO: 138311 - DNA, 1032 bp, Zea Mays
atgctccctggaccaccatccccttccattggcacccgaggggatcaccccggtttttgtcgatctaggcacgagaccgcccacgccatcctcgccacactccccgccatccccttcatcggtgcccaatggcctccgagatggtcgccctcgcttgcaccatcaaataccgcgcttgcaccccgcctacccatcaataatctagccaagacctcgcaaccctgcacccgctacctcgctgagccagcaaagacaacagagcatgaggatccggacgcctaccattccagcgcgagcacctgttgccttgctgatgcacgcggagatctgcccttccccataccacgaggagacacgccccctcacgcttatcctaggtcgacagagtactgcagccaccttgtgttcgagcgtcgtgagcagtttctgtctaaaggggataacaaactacacaaattggtctttaatgttttgtttgatggcacaaaatttgagccagagtaccatgagaattgtggcaatcctgatattgatgagaaatcaccaatgtcatttgaggagatgcttcagaagggataccatggagacacctcaagaacatacctgtgcggagaagtcgatgacgccactaagcggcttgtgaagaatcctatgaacccatatggcaagatacttcaatgtgattggatcagacccagagagacaactaggagaagctccaaggccactttgtcaagggtctctacaatgcacctacttgtgcatgatttactggaggttgtgcgcatgaacaggccacacattggtatggggactagagttgaagtaggagacgtgattgtcattcctatcctgtgcacactgcctcttcgtcgtcgttcgtcgtggctctcgcagtctcgataccagagcatggttgccaggggagagcggtccaaggcaaatttgccatgttggagcagtcacaggagccaagggggttgcagtcataggtcctgctacccagggtggagcagtcataggacctcctaa

SEQ ID NO: 138312 - DNA, 105 bp, Zea Mays
cttgggttgcctgaaaatggaattagtgggttcactcagttctttgctcaggcacttcggctgttttgttaaatggtgtccctggcaaaaatttcaatgtagaag

SEQ ID NO: 138313 - DNA, 98 bp, Zea Mays
attttagtttgaaaatgcataaatcacgatggtcatataagacacttgctttgtgcataatatgccaaaatataaagtatcaaccatattttgtgagt

SEQ ID NO: 138314 - DNA, 96 bp, Zea Mays
cgcagatcttgccttcctcagcacctatcatcatggcatcctcgataggagaaaacatgaaggctttgaccaaagtccttgttgactgtgccgagg

SEQ ID NO: 138315 - DNA, 1200 bp, Zea Mays
aacaatgtatgcgcttgtctcaacgacacaatggagaatctactggcatctgtggacaagaacgaggcggagatctcgccatcaacactatatgccattgcctgtgtcacagagggggtgtcgttcatcaatgggagcccccagaacacttttgtgcctgggctgattgatcttgctatcaagaacaactgcctgatcggtgttgacgacttcaagagtggcagaccaagatgaaatcagtcctggttgatttccttgttggtgctagaataaagcccacctcgattgtgagctacaaccacttgggaaacaacaacggcatgaacctgtctgcccctcaaacattcaggtccaaggagatctccaagagcaacgtggtggatgacattgtctcaagcaatgccattctctatgggcccggcgagcatcccgatcatgttgttgtcatcaagtatgtgccgtacgtgggagatagtaagagggctatggacgagtacacatcagagatctttatgggcagcaagaacaccatcatgctgcacaacacctgcgaggactcgctcctcaccgcaccgatcatccttgatctggtgcttctggctgagcttagcaccaggatctagctaaaacctgagggaacggtaagagcccaccaagtgaataacccgaagcatgctaggtgattcagcgcttcagcacttcagcaccatcatctaatgtctctcattatgcaagacaagttccactccttccactcggtggccaccatccttagctacctcaccaaggcaccactagttccgcccggcacaccggtggtgaacgctctggcaaagcagagggcgatgctggagaacatcatgagggcctgcgttggcttggccccagagaacaacatgatcctggagtacaagtgagcgaagtggcgtggctgcagctggatatacaggaggctgcatgaagggaactagagaggcgagattagctgtgggattgtgttggcttctcgtgttttcttttgcgttctttcctgttcatcgctgtcgagttgttgtattttatttgttggactctcgtgccaacaatgtcatcaagcgtgtatggtggtgcgtgcctgagactgacgatgtacgagggaacttctaccggcagtgtgacacgtactctgcaatgatgagacaatgcaaattgtggtatata

SEQ ID NO: 138316 - DNA, 1215 bp, Zea Mays
tccgttatagaagctatggcttatatgtagccaatgaaacaggaagtttaaggagaagaacaaagtggacaaggtagtcgtgctgtggactgcaaacactgaaaggtacaacaatgtatgcgcttgtctcaacgacacaatggagaatctactggcatctgtggacaagaacgaggcggagatctcgccatcaacactatatgccattgcctgtgtcacagagggggtgtcgttcatcaatgggagcccccagaacacttttgtgcctgggctgattgatcttgctatcaagaacaactgcctgatcggtgttgacgacttcaagagtggcagaccaagatgaaatcagtcctggttgatttccttgttggtgctagaataaagcccacctcgattgtgagctacaaccacttgggaaacaacaacggcatgaacctgtctgcccctcaaacattcaggtccaaggagatctccaagagcaacgtggtggatgacattgtctcaagcaatgccattctctatgggcccggcgagcatcccgatcatgttgttgtcatcaagtatgtgccgtacgtgggagatagtaagagggctatggacgagtacacatcagagatctttatgggcagcaagaacaccatcatgctgcacaacacctgcgaggactcgctcctcaccgcaccgatcatccttgatctggtgcttctggctgagcttagcaccaggatctagctaaaacctgagggaacgacaagttccactccttccactcggtggccaccatccttagctacctcaccaaggcaccactagttccgcccggcacaccggtggtgaacgctctggcaaagcagagggcgatgctggagaacatcatgagggcctgcgttggcttggccccagagaacaacatgatcctggagtacaagtgagcgaagtggcgtggctgcagctggatatacaggaggctgcatgaagggaactagagaggcgagattagctgtgggattgtgttggcttctcgtgttttcttttgcgttctttcctgttcatcgctgtcgagttgttgtattttatttgttggactctcgtgccaacaatgtcatcaagcgtgtatggtggtgcgtgcctgagactgacgatgtacgagggaacttctaccggcagtgtgacacgtactctgcaatgatgagacaatgcaaattgtggtatata

SEQ ID NO: 138317 - DNA, 642 bp, Zea Mays
gagagtcgccgccaccgcgagggccagatgctcgacatctgcaaggccaaacgcgaggaaagcctccaaaagaagcgtcacgatggattcctcgcctctaccgctgacatcgtgccgccgatgggccactccatcgctttccagcagaagcttgatggcttgccagcgatggtacaggtcgtcctctccaacgagcccactgtgcagctcaaggccaccacacagtttaggaagctgctctccataggcgaggtgcgacatagccctgaatttcatgattgcactttggtaaatgagggtaccgaagaaaatggggatgctttggtggttattgaccttcaggcatatgttgttaagggagttggaaaggttcaagcaaagtggtctccagttggtacaattgatatagaatgctccatgaggggagtcgatggtgaggttcgcaatgacgtccttctagggcagaccgtggcttcaccttcctacactaacctcactgtggcatatcacaggacaaatatcttggtacgctattgtaggtggtcaaggaatccaaatggaggcaatctagaatctctcagatataagcaaggttacagatttgatgtggatattcctgaccaaacatgggtaactatatag

SEQ ID NO: 138318 - DNA, 144 bp, Zea Mays
gtttatgtttgcatcagctaaaacagccggcccttcatttaataatcgagggcaagcttctgaatccgtaaagttagttaacgttaatcagtaaaaatacaaaaaaaaatcacatcactgcagcatattcagacaaaaaaaaaa

SEQ ID NO: 138319 - DNA, 2155 bp, Zea Mays
cattgatgatggtaatgatgtagttatgttagtccctgatctaaacccaaatgtatccgcttgtgtggctgctggatgtgtcccatctatgagaatagaaatagatggtgtgattgttagtggaataaaacatgggaaaaaatctaaaaagaaaaatggcaagcgcaagaggaaacaataagggtggctcatataatgagtatgagcaacaaaagcttgaaaatattgaaaggaacaaaaggaggttagaagaattcaacatccctgcaatcatcaactctttggggcagcaacaaaatcgatctaggaaaacttcaaagaaagttcagaacagaaatactgtatcaactgaacgtccaaacttgcgaccaagactacaaagaaacaattgtcagtttgatgaagaacatgtgcttgctgatttggagccagtaggagatttccttagtaacaatgaagacctacagattggtgaccaaagcaatggtacagtgagaaagaaaggaaggggaataacgaagaaagatgacatattctcaaggacaccagatatgcctaaactcaaaatatctcttaatgattatggacagccaattggtgaaaacgctaggaaactttcaagtgttatagggtgtcaagttagaaagaagatatcaattgcttgtgtagattggaggcttgttgatgttaaaaagaagtacgagctgtggactgaaataaagtcatactttgatattgatgacgctgccttaaattgggttacacgcactgttgggaggaaatggaaagaatttaaggcaaatatcaaggagctgtattttgatcctgagctgactatagatgatgttggggaatgtccagacaaaagaattagtgatgatgattggaaatttctctataactattggaagacttctgaatttcagactctctcgaaagtgggaaaagcaaaccggcaaaaactgcagctgcaccatactactggaagtatgaaacttaaagatcttattgaaatctacccagacttgaaagagcggacaattcaggaaggtgatgcatatgctgttctttgtggactgaaagagccaaaaggatatgtccgtcttatgggtctaggcccgactcctcaagatgttggtactccaggattaaagtgttatgcaccaacaagacttcaaatggaggttatggctcgaaagaaagctgaaagtgacagggatgctctagagcaacgtgtttttgagttgcaggctcaaatggagcaaagggcacaacaagatagggcaagtcccatgtcacaacacggttccacatcacgtctacatttggatgcaaggttgaatgaaactggtgatgctggactagatgaaggggaggaagattatgtttctgaagatgatgttgatgacaacttacatgaccaggtgcatggtttaacctcatcaagaacaacagcacacaaaacaaccgcaccaaggagtaatgaaacttctcgctctcaacatgatgctcttgttggaaaagatgccatattatatgccttgttgagatcagatcaacctgtggctaaaggaacaataatttcaactaaaccaaacactattcttgcgggccagtcccttgggagacaatgttgtgaagttattgtgtcttgtgtgttgaaaagagatgcacatttgcctcgtccctatgccaatatggaaactatgggtgatgccaacaagatgtcaattgcatggccatacaatagagtaataagctaaacttaacttactattttgaatgatatatatgacaaattagtgatgaattcttatttggacagctaaagattaccaacaaggcatcaacaccacctgcagtttgaggtaatgcatggtgtaaaaagctagctacttgaggacaagctgacatgcttcgaggacaagctgacatgcttcttttggtttcaagttcttttgtgggcaactttctatctaatagtcatgcaatgttgcgcagatcgaataggcatgatggaaagcttttgtaatgtctaacccatatactgtctctgatgaccaattgggtatatttaggaatatttgtagcttatgactacaactcaattgtggatgtttaagtgctgccgatgaatctatgattatttgaacct

SEQ ID NO: 138320 - DNA, 1259 bp, Zea Mays
accgctgctgccatcgcagccgcattcgcttctccgccgcttacgcttcaagaaaccccaccggtactccgtggccatcgacgccgccaagtggcgcttagcagccgcagcacatacccggacctgaccgctgagaagggcaacgcggacgcgccgagatgcagagcatgtcggcgtcctgctcgtccgccgtctccgtctctacctctagagtctgggccgcggcgcgccgctcgccctcgccccgatccctaccctcgttgcgccacgtcgccttctggccctctccatcctcctcctacccctcttcttctcatggctgtcgctggccgatcgccggcgccggcgcaccggcgctcccgctcggcattcgcgggggcctgcgccggctgccctcgcctctgcttgcgccggacgcccccagtgccggcgcggcggcgaggacgcgggcggccgcggccgcggcgtctccggcagcagccggtaagcaggagggcgccgccggcatttcgcagaccctgcaactcgggacaatgatcctcgtctggtacctcctcaacatctacttcaacatctacaacaagctggttctgaaagccatacctttcccttacaccatcaccaccttccatttcgcatccggaaccttcttcatcacactcatgtggctgctcaatctgcatcccaaaccgaggctctccctcaaacagtatgcaaagctcctgcctttggccttgatccacatgcttggaaatgttttcaccaatatgagtttgggtaaggtgtctgtctccttcacccacaccatcaaggccatggagcccttcttctcggtcctcctctctatcctattcctaggagaggacagtttggatgatataaatctcttctcaataataactgtcatggcattcttgttatctgctccactgatgctatgtgtagaaggaatcaagtttagcccatcgtatctacagaatgctggagttaatgtaaaagaattatttataagagcggcacttgctgggacatctttctatttttaccaacaggtttcgtacagtttattggctagagtatctcccgtgacccattcggttgccaactctcttaaacgtgtggtggtcattgtgtcatccgttctcttctttagaactctaatttcacctataaatgccttaggaaccggtgttgctcttgctggagtgttcctgtactcgcagttcaaaaagtcaaaaccaaaggctacggctgcatga

SEQ ID NO: 138321 - DNA, 1009 bp, Zea Mays
caaaatataattttggggtgtttgtatttggtccaaaaaagtgctaatattttggaacaggacctaccttacatagccgaatacattaatcaatgaaacacaaatagtagagcgggtgctcactcaccagatcggtgatctgacggcgtggacccgatgctgatcgaatgacccaaagagacggattgcaggcctgttccaccgcgcggcctcgatttccccttaacacaacacagaggaagcaggcggcggcgatcgggcgatggcatggcgggcgagcctgtctcggagcctaaaggagatccgcgtcctcttctgtcagtcctccccggccagcgccgccgcccgtgagttcgtgaagaagaactatggtgacatcaaggctcgcaacccctccctccccttccttgtccgcgagtgctccggtgtccagccccagctctgggcgcgctacgatatgggtgtggagagatgcgtgaacttggatggcctgacggaagcacagattgataaaaagctggaggagcttgccaaggccggcgagtctcttaaaaccaaatagttttggaactctatcctgccatgtttaacgttcccaaataaatgatgccatatgggtgagcaattgttactctatcgttatctgtagttgtgcctggaattaagtctttaattggcttaactttgtgaaataatcactactcttttacttgccatgcattttctagattacatgctatattgaaaagggaaaaaatcaatgatttgataagaagaatatatacctagtagcttgtgcatgagagattgatcgtgcaatatttctgcgcagttatatacataattgtatcacagttctatacttcagttctgcgcatgactgaaattgtgcagacacatgtacgattattatttgtttttttctatactttgatgccatgtataaagttttttttacttgtatgtattatagaaaaaaagaagatatatatatatttaaaagtattgg

SEQ ID NO: 138322 - DNA, 870 bp, Zea Mays
atgtctgtctcgctctcgttcgcgagtcactgctctcgcgccgtgaaacaattaacacacgaaacacgaaggaacagagcggaaaaattcagcattttccaagctgtaaaagaacaaatacaaaatgtatgcacacaaagccagactacaacaggtatacgaacatacagagagacagaggaaaaatatatagtatatgagaacgacgactacgcgtcttttcatctgcaattccgcagaagggcgggcatcggcttggaaagccttggacttgctccaaactgcattttgctgctggttcctgaacaatgcgggtggggtgtggatgattcacaagttgtgcaacgggttggagccggtcggggagaacctcttgtcgtccctgaagaagccgccgccgccgccgtcgccgccgaaccgccgctgggcgacggcggcggcggggagctgggcacggccacggcccacgcccacgcgcgaggaggccgaagaaagcggagaaggaacggtggcggcgccgttcgtccgggggctggacgacgacggctgcccgcgcggcgatggtgcagggatgacgttgcccagaagcgagacccccctgagcacgagagggatgagggataccagcaggaggatcttgaagcacctcatcttgtctgtctctgcaccgtaccgtataccgtaccctgtgagagcttggctgccgctccaagtcctaggcgtggtggtagcaagcccgagagagctgagcctgagggagggagggagggtgtgcaggtggtgagggaactggttattggacttgccaatgggagtgcagcagagatggcaatgtaaatattcgccaatgatgcatgaaggaagagagag

SEQ ID NO: 138323 - DNA, 165 bp, Zea Mays
atgtgcactgctcttggaatacattctaagagttttgaaaagccttttcttgagtgcatttctgaatttgatggtacagaaggtgttaaatatatacaacaatctgatattctagactacctgaagcatgtagaatcaaggttgcaataacatgaaagatgtacg

SEQ ID NO: 138324 - DNA, 3550 bp, Zea Mays
gttaggcctatgccggtcattattctgacatagtatctgcgttttcttttttccttcttctgaactgctttcaccttctcatttggcttgtatgcatttttagtgatacgaatccagcacattctctgactgcgatacatagagcaggtagtgtttgacaactctttttttgcccccatcttttacagcttgggcaactactctatgcagtggagcatatagacatccccttcgtcaccatagcagcaccccggaggaagctcacttccttgtagctgactcaaccacatggtaccatcttagcagaggtatagcaatggctatcaaacagagcatcagcttcacgctgcgtgttcttgctgatctatccctcctactcttttgcgtcctgcttgcacctgtatgttcagccacaccagccacagctcctgctgttctcctgcaagtgaagtccggcctcactgaccccggaggcgtcctctctggctggtcactggaggccgacgtgtgctcatggcatggtattacgtgcctgcccggtgaggtctcaccgggcattgtgacaggcctcaacctgtccgggcacggcctgtcaggcgtgataccgccggcgatgagtggcctcgtctccatcgagtccattgacttgtcctccaattccctcaccgggccgatcccgccagagcttggcgcgctggagaacctgaggacgctgctcctcttctccaactccctcaccggcaccatcccgccggagctcggccttctcaagaacctcaaggtgctcaggatcggcgacaacgggctgcacggcgagatcccgccgcacctgggcaactgctcggagctggagacgctcggcctggcctactgccatctgaatggcaccattcctgctgagctcggcaacctgaagctgttgcagaagctggcccttgacaacaacgccctcaccggtggcatcccggagcagatcgcgggctgcgtaagcttgcgctttctgtcagtgtctgataacatgctgcaaggcaacattccttcgtttgttggaagcttcagtgatctccagtcactcaatttagcaaacaaccagttctccggtgggattccggcggagatcggcaacctttccagcttgacgtacctcaacctgctcggtaacagcctcaccggctccattccggcagagctgaaccggctgggtcagctgcaggttctggacctgtcagtgaacaacatttctggaaaggtcagcatctctgcagcacaactgaagaacctcaagtaccttgtgctgtctggcaatctccttgatggcgccatccctgaagacctctgcgccggcgactcatcaagcctgctggagaacctgttcctcgctggcaacaatcttgaaggcggcattcaggcgctgctcagctgcactgctctccagtccatcgatgtgtcaaacaacagctttaccggagtgataccaccgggcattgaccgcctgcctggcctcatcaaccttgctctgcacaacaacagcttcaccggcgccctgccgtcgcagatagggagcctgggcaacctggaggtcctgtctctgttccacaatggcctcaccggtggaataccgccggagatcggtaggcttcagaagctgaagctcttgttcctctacgagaaccagatgtccggaaccatccccgacgagctcaccaactgcacgagcttggaagaggtggacttcttcggcaaccacttccatggtcctattcccgaaaggatcgggaacctcaggaacctgaccgtgcttcagctccggcagaatgacctgtcgggccccatcccggcgagcctcggtgagtgcaggagccttcaggcgctggcattggcagacaaccggcttaccggctcgttgcccgagacgttcgggcagctcgccgagctcagcgtgataactctctacaacaactccctcgcgggccccctgccggagtcgctgttccagctcaagaacctgaccgtgatcaacttctcccacaaccagttcaccgacagcatcgtccctcttctcggctcgacctccctcgccgtgctggcgctcaccgacaacagcttctccggcgtcatcccagcagtggtcgcccgatcaaggaacatggtccggctccagcttggcggcaaccggctcaccggcgcgatacctgccgaactaggcaatctgacaaggctcagcatgcttgacctgtcgctcaacaagctctccagcgacatcccggcagagctctccaactgcgttcagctcgcccatctgaagctcgacgggaacagcctgacgggcaccgtctctgcatggctcggcagcctcaggtcgctcggcgagctcgacctctcgtggaacgcgttgactggaggcatcccgccggagctaggcaactgctcggacctgctgaagctgtccctcagtgacaaccacctcaccggaagcatcccgccggagatcggcaggctgacgtctctgaacgttctgaacctgaacaaaaacagcctcaccggcgccataccgccagcgttgcaccaatgcgacaagctgtacgagctgagactgtcggagaactcgctggagggaccaatcccgccggagctcgggcagctctcggagctgcaggtgatacttgacctgagccggaacaggctctccggcgagatcccggcgtccctcgggggactcgtgaagctggagcggctgaacctgtcatccaaccggctggatgggcagataccgtcctcgctgctgcagctgacgagcctgcatcgcctgaacctatccggcaaccacctctcaggcgcggtgcccgcgggtctatcgggcttcccggcggcgtcgttcgtcggcaacgaactctgcgccgcgcctctgcagccgtgcgggccgcggtcgcctgctactgctaggcggctgtcgggcacggaggtggtcatgatcgttgcgggcatcgccctggtctcggcggtggtgtgcgtggcgctgctgtacaccatgctgagggtgtggagcaactggcgggcggtgtcggtgtccaactccgatggcgaggagtcggcacatggtggcggcggggggaagtgggtggacggcaagtacaggaaagtggggtcatcggtgtcttggtcgtcggaacagaagcacaactcggggtccgagaccaccagcgtgctccatggcaagtccacggaggccgccggcgccgggaagagctagctgctcgcggcgtggcagcagtgaacgtcactttttcttcctagcgagctcaaaagccaaaatgtatgtgtatcgatgatcgtctcttgatctcctcttgtttccgtgtgtgtttttctttgattaattgttactgcttccgccacttccgttcgtctgtggtgtgttcttgattggaggtacaagctggactgccggagcgaagcaaaaccgagaattgtgttaccgtgggctgctacattccatttcgtagttatgggccttcttgaaggcccaacggattcctagactagatagacc

SEQ ID NO: 138325 - DNA, 995 bp, Zea Mays
agatttcaaattggttcatcaatgcccgtgtccggctgtggaagccaatgatcgaagacatgtacaaaggagataggtgaggaagggctagactccaactcttcctctgacaatgtgcagcggaacaaggacaagccgccatcttccgaagaaaaagaggaccataagacctcaatgagccaggtttgccaaaccagccagcttggcgaatccaaagccaacattggtggagtgatgagctttggtggagtgccagccggcggcttccacaacgatgccaaccccgatgacagcttcatgagcctgatgctgaaggcccagagaccgcgtgaaaccgatggcagcggtctcctccatgatgtcatcactcatcactccgatgagagcgcgcggttcatggcgtaccacctgacagagtttgggaggtatgggaacaacaacgtctcattgactctggggttgcagcatgccgagaacacccagccgggcttcccaggcgtcagagaccaagacatctacaactccacagctcctctcaacgtcacctccacatcttcagagtatgattcggcgagccaaatagatcaacaacaacggcagcggtttgaggtgtcacctctgatgcatgattttgtggcctgaatttcagctgacgcactggaaaacatggggaagtgacttgtcatttgtagtgccaggacgaacaacatgcctggactgaattttcaggcgtggaaatgtagctgtagttgtaattggggtacagaatggacgaggtatatagcataaatgttatgtaaatttagtgggggcggggtgatagtggtaaagaaatcctgtaaagatggaatacattttatacgtgtaaaatacgagtatttaagggccatgctgtaaaaatagatttacctgtaacgagtgtttgtaatgagtgtaaagaactgccacatgctagattttcgatgggtgagaagatatagaaatattattttctt

SEQ ID NO: 138326 - DNA, 621 bp, Zea Mays
atggctgcctgggggtgggaggagtcggtctctctctgcttgctccgatggcttcagctgcctgcgagaagcaaggtggaagactggaatggaagggagcggaacaaggacaagccgccatcttccgaagaaaaagaggaccataagacctcaatgagccaggtttgccaaaccagccagcttggcgaatccaaagccaacattggtggagtgatgagctttggtggagtgccagccggcggcttccacaacgatgccaaccccgatgacagcttcatgagcctgatgctgaaggcccagagaccgcgtgaaaccgatggcagcggtctcctccatgatgtcatcactcatcactccgatgagagcgcgcggttcatggcgtaccacctgacagagtttgggaggtatgggaacaacaacgtctcattgactctggggttgcagcatgccgagaacacccagccgggcttcccaggcgtcagagaccaagacatctacaactccacagctcctctcaacgtcacctccacatcttcagagtatgattcggcgagccaaatagatcaacaacaacggcagcggtttgaggtgtcacctctgatgcatgattttgtggcctga

SEQ ID NO: 138327 - DNA, 3929 bp, Zea Mays
ctcaagcatagcctatttagaccctcacttttcttgttcttactgctatctttgtcctccctcttcccctgcaactacttcgaggcaagcatataaaaaaccttgcaccatctccatggcctctctttctctgtcttcttcctctgtttgtactagtcttgagacataagcaagaccaagatttagggggcgacaattagaagtagtacattacaattctacgggattatcgtgttcttggacacagtacttacaattcagtacaagtgctatgagtcttggcgttatgatgagtaggagaagcaaatggcgggctgtcatggcgtccgcggtgctggtgctgtgcgtgggctgtgccgtcgccgtggacgagcaggcggcggcgctgttggtgtggaaggccacgctgcggggcggcgatgcgctagccgactggaagccgaccgacgcgtcgccgtgccggtggacgggcgtgacgtgcaacgccgacgggggcgtcacggacctgagcctgcagttcgtcgacctgttcggcggcgtgccggcgaacctgaccgccctgggctccacgctgtcccggctcgtccttaccggcgcgaacctgacggggcccatcccgccggggctcggccagctaccggcgctggcgcacctcgacctcagcaacaatgcgctcacggggccaataccggcggggctgtgccggccggggagcaagctcgagacgctgtacctcaactccaaccgcctggagggcgccctgccggacgccatcggcaacctcacctctctccgggagttcatcatctacgacaaccagcttgcaggcaagataccggcggctatcggccggatggccagccttgaggtgctccgtggcggcgggaacaagaacctccacagcgcgctccctaccgagatcggcaattgctctcggctaaccatgatcggcctcgccgagaccagcatcaccgggccgctgccggcgagcctcggccggctcaagaacctcaccacgctggccatttacacggctctgctctctggcccgataccgccggagctcggccagtgcaccagcctggagaacatctacctctacgagaacgcgttgtccgggtccgtcccgtcgcagctcggcaggctcaagaggctcacgaacctgctgctgtggcagaaccagctcgtcggcatcatcccgccggagctcgggtcgtgtcccgagctcaccgtcatcgacctgtccctcaacgggctcaccggccacatcccggcctcgttcggcaaccttccgtcgctgcagcagctgcagcttagcgtgaacaagctctccggcacggtgccgcccgagctcgcccggtgcagcaatctcactgacctcgagctcgacaacaaccagttcaccggcagcatacctgccgtgctcggcggcctcccgtcgctgcgcatgctctatctgtgggccaaccagctgacgggcatgatcccgccggagctcggccggtgcacgagcctcgaggcgctcgacctgtcgaacaacgcactgactggacccatcccgcggcccctctttgcgctgccacggctttccaagctactgctcatcaacaacaacttgtccggggagttgccgccggagattggcaactgcacgtcccttgtccggttccgagtgagtggcaaccacatcaccggcgcgataccgaccgagatcggaaggcttggtaacctcagcttcctggaccttggttcgaaccggttgtccggctctctgccagcagagatatctgggtgccggaatctcacgttcgtcgacctgcacgacaacgctatttccggcgaactgccaccggagctgttccaggacttgctctctctccagtacctcgacctctcctacaacgtcatcggaggcactctcccgtcggacatcggcatgctcacctcgctgacgaagctcatcctcagcggcaatcggctgtctgggccggtaccaccggatattggttcgtgctcccggctccagctcctcgacctcggcggcaactcactttctggcaagattccggggagcataggcaagatctcggggctggagattgctcttaacctcagctgcaacagtttcaccggcacagtcccggcggagttcgctgggcttgtgaggctcggggtgctcgacatgtcgcataaccagctgtccggtgatctccagacgctgtccgcgctccagaacctcgtggccctcaacgtatccttcaacggcttcaccggtcggctgccggagacggcgttcttcgcaaagcttcccacgagcgacgtcgagggcaatccggcgctgtgcctctcccggtgcgcgggcgacgctggcgaccgcgagagcgacgcgcgccacgcggcgcgcgtggcgatggccgtgctgctgtctgccctcgtcgtgctcctcgtgtccgcggcgctcattctcgtcgggcggcactggcgcgccgcgcgcgccggcggcggggacaaggacggcgacatgtcgccgccgtggaacgtgacgctgtaccagaagctggagatcggcgtcgcggacgtggcgcgcagcctgacgcccgcgaacgtgatcggccaggggtggtccggctcggtgtaccgggcgaacctcccgtcgagcggcgtcaccgtcgccgtgaagaagttccggtcgtgcgacgaggcgtccgccgaggcgttcgcgagcgaggtgagcgtgctcccccgggtgcgccaccgcaatgtcgtccggctgctggggtgggcggccaaccgccgcacgcgcctcctgttctacgactacctcccgaacggcaccctcggcgacctgctccacggcggaggcgcggccggcaccgccgtggttgagtgggaggtgcggctcgcgatcgccgtcggtgtcgccgagggcctcgcgtacctccaccacgactgcgtgccggggatcatccaccgcgacgtcaaggccgagaacatcctccttggggagcgttacgaggcgtgcgtcgctgacttcggcctggccaggttcaccgacgagggcgccagctcgtcgcctccgccgttcgccggatcctacggctacatcgctcccgagtacggctgcatgaccaagatcacgacgaagagcgacgtgtacagcttcggcgtagtgctgctggagatgatcacgggtcggcggccgctggaccattcgttcggcgaggggcagagcgtggtgcagtgggtgcgcgaccacctgtgccggaagcgggagcccatggagatcattgacgcgaggctgcaggcccggccggacacgcaggtgcaggagatgctgcaggctctcggcatcgcgctgctctgcgccagcccgcgccccgaggaccggccgatgatgaaggacgtggcggcgctgctgcgtggcatccaacacgacgacagcatcgaggcgcggaaagctggaggcggagcaacagtggccgaggccggggccggagcgagaaaatggaccgacccgaagcagcccatttctccgaccaaattgatggccttagcccaaccaggccaggcccggacaagttcagggtcgcaaagcctgctcaagaacccggagtaaaatgatctgaactggctggacccactaccactgtgtggtgtacctcttggcctcttgggggaaccgtagcagagatgttggaaaatggaaagtagggaggggtgcgtcgttttgctaggtgcaaccatgtgacgttgggtacaaaatagaatcttttagaaatttattagtggtaataggggatcattctggggtcccccgagtcatgaaagtctaactaataatgttctgtaccataaatccggcaaagtgcaatggagtttagtgtaaaatattattatataattgataataatgcttatgtggtcaatga

SEQ ID NO: 138328 - DNA, 229 bp, Zea Mays
atgaaacaagtgttccaacaatatatttctatatatcatatagaaataatagtagtaacacaaccacacttgaagctacactttaaccaaacttcaaagtattcaacaaaacagcaagggactagggacacatgatcttagtctctaggaatgttggacagcaaagaacaaaaacagtaaggaatgaaatagcgtcttggccaagacgccaacacaggcacataggatc

SEQ ID NO: 138329 - DNA, 424 bp, Zea Mays
atggaaatgatccttctcacatgccacggtttcctgatcttcgggcctccgacgtcgcatgaaggcgcaagaaatttctgggactcccgaatcacagaggcgagcacgaggaggagatcaggggcgtcgccccggaaatttcgactgacgagcacgtgcgcggaccgcggagtattcgccggcgtggagcgtgaaggcttctgccaccggcccaccgccgtgcgggactcccgaatcgcagaggcgcagacgtctgggcgttgcgtcgccaagctggacgcctggacctagggcgcggccgcgcgggacttgcgtcggggagaggagaatgtggcgccgccgccagagaccgagagcttacgtcggggatagctggatagggatagggtttgcgtctggagtatggactcggcatcgggctttt

SEQ ID NO: 138330 - DNA, 1076 bp, Zea Mays
ataaatacttgccgctactgatcatcgtcatgctcgataaatctctccatcaggcagcacctagctagcagcagccaatgacgaagccttcgcaggtgctgttggcggcgctcgccgcctgggcggtggtcctgctgctgctgtgcgccgccgcgccgcggggcgccgacgcggcgacggcgtgcgacgccacgcagctgacgccgtgcgccggcgccatcatcatcgggaggtcgcccagcgcggcgtgctgcagtaggctcaaggagcagcagccgtgcctgtgcacgtacgcgcgcgaccccaatcttcagcgctacgtcaactcgcccaacggcaagaaggccatggccgcgtgcaaggtgcccgtgccgtcgtgctagttaacttctgtttgcgccgccgccgcgtacgtgtcgtgtcgtgcctgtgtcagtagcagcatggcccactggacagggacagagtatggcgtcactttctgtttccgtacatacgtacctggatcgtgccgtactgccgtgtatgcgtgttctctggtggtactcgatccgctgcctgttgtgtctaccgagctctttggacagctacgcgtgcgtatgaataaatgatataccagatcgtttggctttaatttatactgatttttactgtttttacaatatttttatttctatagatcgtagctgtagctgtttaaatagtctgatttttaattctaagtgaacattcccgtaataatgacccatgcatctgctatatatgcatatcgatccatctgtttttactattgataaaagtagcgctgagaaatcaataatttataaaacaatgtgcgaatgattagtgtgcaggtattttctccatccaataatgggcatattatcaatagttaggttcacgcgctttactacaatttctatatatcatattggtagacgttgtttaaataatatagttatttaaatatgatccaaacacatatatatagattcctggatcgtgccaaaaaaaaaagacaacccgagaccaggacagagtcagcacacaccggcagttgccatgttttggatcga

SEQ ID NO: 138331 - DNA, 136 bp, Zea Mays
tttttttttcggcatggcatgcattgtccagcaccatctgtgtcccttcctttgaggtagagactagaggacacagagaaaggacaactctctctatatatatacagcactgaatagttaatcagattaaatcacc

SEQ ID NO: 138332 - DNA, 1008 bp, Zea Mays
aagaggaagaaaaaacgagctcttttgcactacgtccatagtgcatgataccgatgatggcgaagaagcaccttgccgctgtcgtcctcgccatcctgctggctctcgcggctggcgccaccggcatgcgcgcgtccgagatcgacgacggcatgccgctgatccacatgctgcgcccgctgctgcattctggcggcgacctcggccggcgcggccgcgtgccgtgcgacagctggcggttcgctgtggagaccaacaccctccgcgactgggacactgtcccagcccgctgcgagaagtacgtcggcaactacatgctcggcgggcactaccgcagcgactcccgagccgtcgccaacgaggccatcgcctacgccgagggcctcaacctcaccggccaaggcaaggaggtctgggtgttcgacgtcgatgagacgacgctctccaacctcccctactatgctaagcatggcttcggggttgagccatacaactggtcgacgttcggcgcgtacgtgaaggaggcgaacgcgccggtgctgccggagacgcagcggctgtacaagaggctgcaggcgctgggcatcaagccggtgatcctgactgggcgacgcgaggacaagcgggaggccacggctaacaacctcgccgcggcgggctacaccggctacttgaagctgctgctcaagcctcagaacgtcaaggtgagttcgattgagttcaagtccggcgagcggaagaagctgcaggacgccgggtacgtcatcgtcggcaacatcggcgaccagtggactgacctcctcggcgagccggagggcggccgcacgttcaagctgcccgaccccatgtactacatcggctagctgctatctgctttctactcgatcgatcgggcgcgggagcgagtgaacagcagcaaataaacgtcgtctcaataattaataacgttgtcgttccttcatcactgattcagcgtaccaaataaaacagcctcataattatacagca

SEQ ID NO: 138333 - DNA, 1526 bp, Zea Mays
atgagcagccatgatgccaaattgctgcaaaacttggtcctcaatcttgcatcctcagtggaaactggtgctttgaatattaggagctttttagaagaggctttccgtcatttgggtgacgagcattaccttctgaatgctctacttgctattcgaaaggaggtagacctgatggagcaggatgcactggagagcaaagcaaggtctgacccagagaaggagaggatggaggaacaaattaaccttgctgaggctgcgaagccagtgcctagacaatttactttcacccccccccttcctcacctgaattgtatgaggccagtgacaatgactcctacgactcggacaggtccactagaatggctgacaacaacacaaacacaccttttcgacatactgctgccagcccgaattcagggacctcatgacccatcttcatatacctttcgtaatccatggaacccattttttggtatgacgaatcctgggggtcctcctacacaaacatcattcggtcaaccacagttggtaccacccattacatgtccacaggtttccacccatgttcccaaccagactgaccctataaattttgaatccgaagcagaacacagtgtccaggaagttaacagccctagcaaaccttcagatacacctgggacatttaggaggacaaaggaacagaacttcaaaccagatgaagacctgttgctttgcaaaacatggctagagattagtagtgacccagtcattagcacagggcagaggaaggagggtttatgggctagaattgagaaaaggtacaatgaacttagaggtgagtttccattgaaacttaatagggctctcagcagcaggtgggacaaaataagagctgaaacaagcaaatttgttggattctacgcaagagtcctaagggaaaaccagagtggcctcacagataacgacaagacttcgaaagctgcaactctatatgccacatcacagaaaaagccttttcatttcatgcattgctggacgcggctcaaaaatgaaccaaaatgggatgccatggttcatggaagcccctggagaggcaatgcggggacggaccctgttcgtagtataacacctacaggttctgttaataaagtgaaatatgaggaaggtggttcaaaagggaagagaccattgggacgtgactcgacgaaagcatcaaggaagaaggcaatgtccagttcatcccagtctaatgagtacctatgcagactccatgacattcaaattgcacgattgaagcaaagtgaagaaaaatcagacctaaaacaacaaaacattgagttcatgaaggaagttgaactgaagaagttggaggttcaatccaaggaaatagaagtgaaggaaaaaaattgatgatggaagacaggaagcaaaaggacgaagagctgaacaaactttatgctatggatatggatgctttaccagaagagttaaaagttgtatacatcgcgaggagaaaaggtttaatcgactatttcatcaacaat

SEQ ID NO: 138334 - DNA, 1469 bp, Zea Mays
tccgtgttcctgctgctgctatcccccgccgcgacctcccagctcggccagggccccgccattgccgcctggattaacggctcgccgccgcctagccctgacgccgccgccgccgccgccgccgccgcctcgggcccgcggagccaggagtacgcggcgctgcaggcgctgaaggtggccgtcaccgacgaccccaagggagcgctcgcgtcgtggcagggcgccaatgtgtgcgcctacaagggcgtgtactgctccgcgccgcccgacggcgccgcggccgccggcgcgtcgacggtagtcgcgggcatcgacctcaaccgcgccaacctcaggggcacgctccccgacgcggtgtccctcctggcgcacctcaccttcctccacctcaacagcaaccggctcgggggcgccgtccccgacacgctccgggacctgcagtacctgacggagctggacctgagcaacaacctcttctcgggcccgttcccggcgtccacgctgctcatcccgtcgctggtgtacctggacctccgcttcaacgccttctccggggaggtcccgcccgaggtgttcgccaaggagctggacgccgtgttcctcaacgacaaccagttcgagggccagatcccggacacgctgtgggcgtcgcccgccacggtcatcacgctggccaacaaccacttcaccggcgccgtcccggcggcctacgagttcggcgccggcgccggggccggggccggtggccgggtccgcgaggtgctgttcctgaacaacaacctgaccggctgcgtgcccgaggcgctgggcttcctccccagcatgcaggtgctggacctcagctacaacgcgctgtcgggacacctcccggggacgctctcgtgcctgtcggggatcgaggtgctcaacctcgcgcacaaccagctcacgggcgagctcccggacctgctgtgcgacctgcgccggatcaccaacctgtccgtgtccttcaacttcttctccgggatcagccagcgctgcgaccggcagctggggagccgcggcgtgttcgacttcgtgggcaactgcgtgcccgggcgggacatgcagcggccgcagcccgagtgcgacgagttcccgggggaaggcggcctcagctgcctccgcatccccggggcgcggccagccgggtgtggcgacgcgggcgtcactattggcgtgggcgtcggagtgggcatcggggggctgccgttcgggttgccaggcgctgccgctggaggcgtggtcaccgtcaccgtgccgtgagctgccgggggcactgcacctttgtttggttttctttttttttttctttctcttcttccttttgggcggcaattaccttccattcggctcggcgtaacgtacgcatcgatggtaatgggtgaacattggttggttctcggctggttaatactcctgctactgtagtataatttcgccatagtgta

SEQ ID NO: 138335 - DNA, 1050 bp, Zea Mays
ccccaaacaaggagcgctacatccaggccagcagtttccatttgcaatccgaccccatcttcatcccgttgtcgcagcagcagccatccaagcagcgatggacggcggcaagaagagccggaacccgcacaaggcctccgcggactaccgcagcgaccgcaagtcagcctccgggatgagcggcgaccccaagaagggcggccgcggcggcaagttcacctgggagggcgccgacgactacggctacggctacgccgacgaggacctcggcctcatctccaagaaaggcaacatcaacagcggacgcgctagccaggtccagggaggcgccgccgctaagaaggacgacgacgagtaggcctcgccgcctcggctcgcccgcccggtcccgtcgatcgccagcaagaaccaacaagcccttctgtctgtttaattccagtatcagttcgattctcatgttgaataatcatgatcatgtgggtttaggtgtcgtgctcacgagtatgtagtgtagctcctgctagcacagagcacagcacagagccactgggcgatcgacgggccgtgcatggcctgtagataccatctcatatgttcaccactgctactttgctcatgttgggggcctctcctgaactgggttcctggatgaactgattttctattagtttccggaatcgatgctccagttgcgacccctgctcttactcgcttcagacccagctctggactgtgaaaccgacgacaaacgtctctccagtttcagatgagatgcaattatgaagcaaaactagtagtacttcgcagatccgtaaaattgaagcacacagaaagggaggattgcgatgtttttgttttttctttgtttccaagagattgcaaagtttatctttgcaggcgataacgatgactcagcaacttacccatcagtctctttcttgatgacaactctattgtcagttgtcacacatgccatgcctacatgtccgttcgttccaagtatgcagacatttcgctgcagcagtattgatcatggagcaagcaacccat

SEQ ID NO: 138336 - DNA, 945 bp, Zea Mays
atgagaagagatcgccaaattttaaaggatgtgatagaagactttgctggaggtgtaggggcgagctcggagtttgtcatgcacactttgaatgtcaattgtgccaagtttggaaggcgagcatcaaggatcctcatcactggtggggaggatttgaaggtcaatctttgggctatagggaaacccggtgccctcctgagtctatcaggctttataagtccagttgagtcagtaagctttgactcttctgaagttacgataggtgctggtgcagcaagtggaacgataaaaatatggaatattgaggaggcgaaagttgttcgaactttcactggacacagatcaagctgtgcatctcttgatttccatccttttggagaattcttagccactgggtcttcaaatacaaacatgaaaatatggaatactcgacagaagagatgcatccacacatacaagggtcatacccaacgaattaatgtgcttaaatttactcatgatggccgatggattgtttctggtggggctgataactcagtgaaggtctgggatttgacggctggaaaactcatgcatgatttttgtcttcatgaaggtccagtcaactgcttagatgttcacccctatgagtttttattggctacaggttcagttgataagactgttaaattttgggaccttggaacttttgagttgatcagttcttctggacccgagttaatgattggtttttcagatattatggagaggttacataaagatggtatactatcaagggcaagcaaagatggttatacagttaaccagatattatggagaggctacataaagatggtatactatcaagggcaagcaaagatggttatacagttaatcaggccttgcactgtatctgcagcaaagagaaggatccgaggttactccattcggaggagcaagtcttga

SEQ ID NO: 138337 - DNA, 590 bp, Zea Mays
gccgtgtgtccccttcccctctcgctcggccaggccaccagctgccaggtccggcggcaatgggcaaggcggcgcgctggttccgcagcttcctgggcaagaaggaccaggcaaccaccaaaggccagaggcggcagcaggaccaggctctgcctcctccggccagcgccaagcgctggagcttcggcaagtcgtcgcgggactcggcggaagcggcggcggcggcgacagccgccgccgcggtcgtctcgcccgacgcaggcaacgcggcgatcgcgcgcgccgcggaggccgcgtggctcaggtccgccgcgtgcgccgagacggaccgggaccgggagcagagcaagcacgccatcgccgtggccgccgccaccgccgccgcggcggacgcggcggtggccgcggctcaggcggccgtcgccgtcgtgcgcctcaccagcaagggacgcccgccgtctcccgtcgtcctcgccgccgtcaggatccagacggtgttccggggattcttggcgaagaaggcgttgcgcgcgctcaaggcgctcgtgaagctgcaggcgctggtgcgtggctacctcgtgcgcaggcag

SEQ ID NO: 138338 - DNA, 867 bp, Zea Mays
atggcttggaatggccgcttcggcgacgacgaggaggggagcggccttgagctcagccttagcctcccgggctacttctccggatcgccaacccaagctgcagcaggtttcgaggacaaagcagacggcggctctgctgctgctgctgctgctgggcgagcaaagggaagcaatggcttcaaggccaggccggcggcagctgctccggtcgtgggatggccgccagtgcgcgcgttccggcggaacctcgcctcggcgtcctccaagccgtcccgcgatccgccaccaagccacagaggaaacgagtccgcgagcgtcggcgccggcggcaaggccgtcgagggcggcaacaagggcctgttcgtcaaggtcaacatggacggcgtgcccatcggccggaagctcgacctgggcggccacgccggctacgacacgctaaccgccgccgtcgaccacctcttccgcggcctcctctccgctcaaacgtcgggaccaggcggcgagcggcaggcggtcgcggggatcctgaacggtggcggcgagtacacgctggtgtacgaggacgacgagggagaccagatgctggtcggggacgtgccgtggcagatgttcgccgccaccgccaggcgtctgcgcgtgctgcggagctccgatctcaacccctcgtcgctaagggcagcgaccaggaagagagctgcagcttagtgctgcgctggcgtaccctggagtctcaactctgaacattttgcggccttttcggagggccaccaatgtaaaattgaagcggtttttcgtggatttttgttaccattaccatcatgtatgtgatcaagtagggaagcaggaatctagaggagatgagtggtg

SEQ ID NO: 138339 - DNA, 962 bp, Zea Mays
agcgttctaaccaggtacattaactgtattgaaatgactgacgagtatgtagtagtgttgtatggtatgccgtatacggtacacagaaatacagtgtatagaaatgaaagtatgtgtaaactcactcctctagctgcaacaaatatcgcatcgaccctttattcactcactgactcataatttacccgtttcctttccttttgctcaggccgccgccccggccatggtcctttccttaccggtagctgcggtagatgggggtgtacatgcagctctcagcgtacttgacgagatcgtcagggcgtggcaggcggctggcgaggccgagctcgtaggccttggcagccaccttggcggcgatgcgcgcggagatggcgcggatgttggtgaagggcgggaagatgagccccttggcgaagtgctcctcggttacctgctccgccagcgcctccgaggcggccagcagcatgtcgtcgcggacgcggatggcgccggagatgacgacgccgaggccgaaccccgggaagatgtaggcgttgttggactgccccggcaccagcaccttgccgtccagctccacgctgtcgaaggggctgccgctcgcgaacaccgcgcggcccttggtccaggtgtaggcctgctccgccgtgcactccgagtgcgaggtcgggttcgacagcgcgaagatgaccggcttctcgttctgggacgccatcgcctccaccacctccttggtgaaggtgccgcccttgcccgaggtgccgatcagcaccgtcggcttcagggactgcacggcctccagcagggtcgccacgggctcgtgctcgtgcgcccatggcttcttgaacgcctgcagcgagtccttccgtgacgccacgatcaggcccttggagtccatcagccagatcttcgggcggcactcttcgatcggagacccagtctgcttatatttattgttatgt

SEQ ID NO: 138340 - DNA, 2316 bp, Zea Mays
gtggcgcaagcggatgttgcgtcgtctctccgttgctctcgctcaaggaggccgcgggggcgggccaactagttttcggattccagcgtcgtttggagttgtcctgtcgtgtcttccggtaaacaacaagctagcgagctgaaaagacagcgtcagatgcccaaacctggtgattgcagcagcagcggcgttggtgggccgagcgccggggacgccaaggacttgccccaacttttcctcagagtgggcgcggccgtcacgctctccgtagccggtctgctcttctcgcggcgccagcggccgccccggcagctcctgccgccgccgccgcgtcctccctcggagtcggatgatgcttgcagcatgaaggccagaacagggctcaaggagcttaggatcctaaaaaatgaggataccaaggcaaaaattatcagtgggaactctgtgcacacgaccactaccactacgacaattaccaccaccgcattagtaccattggcccctaaatgcagaagccttgctgatgatgaaggctatctccttccggagttcaatgacatggttctcagagaatttggccaagatatagatagcattccatccacacctgcagcgagagtaagggaagatgtatcgaatgaccatgaagtccacaaacttagagatttggtgagatcactgcaagaaagggagaagactctggagctacagcttctggagtgttacggtttgcaggagcaagatgctgcggtgagggagcttgagaatcagctgaagattaacaacgttgaatcaaagttgtacttgctgaagattgaatctttacagactgaaaaccagaggctgcaaacacagctctcagagaactcaaaaatattctctgagcttgaggcgacaagaacaaaatgcaagtttctgaagaagaagtttatatcggatgcagaacaggcaaaggagcaaatcatttctcttcagaaaatggtcgactcattgcagaacaaacagactgatgaggagaaaaaatttattgagtttgaaaataaactgaagagactagaggagctggaaaaagaggcaacagagctaagagcggcaaattcaaggctgcagcaggagaatgcacatcttattaggcgactggaggttacacgcctaccccctgtacccaagcccaaaactagtatggaggtaaaagcattggaggaggctgatcggttgaagcaagaaactgataggttggctaaagaggttgaacaacttcagagtggcaggtttgcagatgtcgaagaattggtatatctgaaatggataaatgcctgcctacggtatgagctgagaaacaaggatgccccatcagggaagactgttgcacgagatcttagcaagaccctgagccccaagtctgaattgaaggccaaacagctgataatggaatatgccaatgtgggtgcggaggacagtcacttggggcatgtcgaattcggttcagagtgctcttcctcacgggcttcgtcaggtgaaccggatgatgtgtcaattgatattgcttccatgacaaagcatactaataaaaaccccaaaaagaagaagttcttctctaagcttcggaaactggtgctgggaaaagggaaagagaaccgtgaaatttctactctggagaggagagtgtctatttcaagttgttccttcgatgacttcactggaagggattcacatgatagctattcttcgttcatggcagaaccaaacatgcctgatagtcgacggcatggtgatcatggctttggtacacattcttctttggacagcgcaaaatctagtcctcttggcacagaaattgtaggtgaaagaagtgaccattctgtggtgaagagtgtatcttctagagaggaaaaggtaaatgcattcggtcccagcattggccttgatagtagcaaggccatacctgaggatgttgagatccataaatttgctgatgcgctgatcacatcaaggtcaggttccatgtcatcaagaagatcggcatccttccgacactgatataggagtcatctgctactgacccctctgcctggatgtatatttctgccagttcttgatggggggagttataggagatgttactggaatataagttgtcaatactttatttttttgtaccattgcgtatagggtgtagtttacttacctttaataccaactcctactacctgggctcgtcatgtgtaccataaaatggcacatttcaatggcaaacacaagacaattgtaacaccctaaatccatcaattaaggtaacctagattatattattaa

SEQ ID NO: 138341 - DNA, 2084 bp, Zea Mays
ttttatagtactgcacgcatgaatatttttctccccctactttaaagatcaagggcagtttatcttacagttcttccctgaagaaataaaattttcttgacaatgagtttcttctttgtactgcatatatacttctccgagaactgccccatttattgaaaagaatatatgatacaaaaatacccatattggcatgtacacttcggtttttgtttgtgaaggaggataccaaggcaaaaattatcagtgggaactctgtgcacacgaccactaccactacgacaattaccaccaccgcattagtaccattggcccctaaatgcagaagccttgctgatgatgaaggctatctccttccggagttcaatgacatggttctcagagaatttggccaagatatagatagcattccatccacacctgcagcgagagtaagggaagatgtatcgaatgaccatgaagtccacaaacttagagatttggtgagatcactgcaagaaagggagaagactctggagctacagcttctggagtgttacggtttgcaggagcaagatgctgcggtgagggagcttgagaatcagctgaagattaacaacgttgaatcaaagttgtacttgctgaagattgaatctttacagactgaaaaccagaggctgcaaacacagctctcagagaactcaaaaatattctctgagcttgaggcgacaagaacaaaatgcaagtttctgaagaagaagtttatatcggatgcagaacaggcaaaggagcaaatcatttctcttcagaaaatggtcgactcattgcagaacaaacagactgatgaggagaaaaaatttattgagtttgaaaataaactgaagagactagaggagctggaaaaagaggcaacagagctaagagcggcaaattcaaggctgcagcaggagaatgcacatcttattaggcgactggaggttacacgcctaccccctgtacccaagcccaaaactagtatggaggtaaaagcattggaggaggctgatcggttgaagcaagaaactgataggttggctaaagaggttgaacaacttcagagtggcaggtttgcagatgtcgaagaattggtatatctgaaatggataaatgcctgcctacggtatgagctgagaaacaaggatgccccatcagggaagactgttgcacgagatcttagcaagaccctgagccccaagtctgaattgaaggccaaacagctgataatggaatatgccaatgtgggtgcggaggacagtcacttggggcatgtcgaattcggttcagagtgctcttcctcacgggcttcgtcaggtgaaccggatgatgtgtcaattgatattgcttccatgacaaagcatactaataaaaaccccaaaaagaagaagttcttctctaagcttcggaaactggtgctgggaaaagggaaagagaaccgtgaaatttctactctggagaggagagtgtctatttcaagttgttccttcgatgacttcactggaagggattcacatgatagctattcttcgttcatggcagaaccaaacatgcctgatagtcgacggcatggtgatcatggctttggtacacattcttctttggacagcgcaaaatctagtcctcttggcacagaaattgtaggtgaaagaagtgaccattctgtggtgaagagtgtatcttctagagaggaaaaggtaaatgcattcggtcccagcattggccttgatagtagcaaggccatacctgaggatgttgagatccataaatttgctgatgcgctgatcacatcaaggtcaggttccatgtcatcaagaagatcggcatccttccgacactgatataggagtcatctgctactgacccctctgcctggatgtatatttctgccagttcttgatggggggagttataggagatgttactggaatataagttgtcaatactttatttttttgtaccattgcgtatagggtgtagtttacttacctttaataccaactcctactacctgggctcgtcatgtgtaccataaaatggcacatttcaatggcaaacacaagacaattgta

SEQ ID NO: 138342 - DNA, 78 bp, Zea Mays
ggtttccatggtcatgggtctagctgttcatactattgttgtatttttaactatcatatagtgtgtgtgggtttgtgc

SEQ ID NO: 138343 - DNA, 115 bp, Zea Mays
ctgtgcggggtctggggaagggtatctttaagcgccaagccttacccgcataatatgcagaggctggggctcgaacccgggaccttccggttacagacggtaggccctaccgctg

SEQ ID NO: 138344 - DNA, 858 bp, Zea Mays
atgcttcccaccccatggtcttccacatttccctcgcccgccactggcttcctccttctccttgccctcctccccgtcgcatcggggacctcagtccctaccctaggaggtttcgatcgtggagaggcggccggcgcggacgcatattcgatccttacgtttcacgactacacgccgcctccgccccccgttctgccgccgccaccggcggccccggcggcgacctgcgcgggggacctccacggcgtgggagaccttgacacccagtgcgtggtccatgagtcggtgaggctgggtggtggggtgttcatcagtggcaacggcagcctcctaatccttgatggcgtcgcggttacctgcgagcggcctgggtgcgtcgtctctgccaacctctccggcgatctcctcctcgggaacaggtcccgcgtcgtggccgggtgggtttccctcgcggcggccaacatcacactcggcgaggacgctgttattgacaccaccgcgcttggcggtgacccgccggaccagaccagtggtgtacccactgggacgtatggggatggcggtggacatggcggccgtggcgccagctgcttcgttaagaaggggcaagcacaagaggactcatggggtggtgattcctacgcttggtctgcactgaagaccccaaataactatggaagcaaagggggatccactaccgtcgagaaggactatggtggtgggggtggcggtgtcgtgtggttgttcgctgaagagattgtgatgaatggaacagttcttgctgatggtggagacggtggcaccaagggtgggggtggctctggggggagcatctatctgaaggcttcaacaatgtga

SEQ ID NO: 138345 - DNA, 106 bp, Zea Mays
atcagactggagaaagacagttctttggcctgaactgaatcaagaagcagaagaacaagtctgtatcattcgagagaatttgagggtagctcaaaccaggcaaaag

SEQ ID NO: 138346 - DNA, 249 bp, Zea Mays
atgacccttgaggcgctggcaacggcgccggcccccggggcgcgagctacgacggtggcggctcctgagacgtgtgcggcagcgacgtcctcgagacacatgcagtggctgcgcccctcgagtcacgagcgaaggctgcgggatgtgaggttcaccggtctgtacggcggcaagaatcgtctacgcggcggcggcagccacgcgagagcacagttggcttcggtggcggtcgcgcatgacatcctctga

SEQ ID NO: 138347 - DNA, 693 bp, Zea Mays
catggacgcacgtctccatgttgcctgtcggccttatctccatccctcatcacctctgcgagcacaagttttagcgcctgccctcagtccagctcgccagcagctctctgccctcctccctcaagccctagccgagtttttccatggtgccctgaatgccagcccctttactcgatgcccctgctaggttccatggccgtcgctgtcccagccatctccttggtggccgacctcgcccctgcaacctcgcctcgctggatctcctcagggcgccgggatgctgcttcctacacgtcgtgcggctccctggtgcttgctctcgcccttggctatggaacagcaacagccatagagcctcttcgtgtcgcgccctcgacgtgctcgacgtaatgtcgcagcaggttacacttgatctgtgcactccggtcacgatgtcgtcgaatcccagtgaggacccattgttctccttgtgtttattcctctccggtacatgtattcgacgctgattaattaaatgctaatcgtgtgtatatgtgtgcttatgtttgtgatttttgtggagaaacacctgaggcagttgggtggagaagaataaagaaagctctcgcgcatcacacacctagcgctcgacggaatgattgagtttgaatcgtcgccgttttccgttatttggtttagtatggtgagctcttt

SEQ ID NO: 138348 - DNA, 1714 bp, Zea Mays
agcgcgcgccagcctcgtcagttcctagttgcaagcaacgcaacactggtggaactccaatactcacacggcatggcggcgaagcactaccagcagcaccacttcctgatcgtcacgtacccggcgcaggggcacatcaccccggcgcgtcacctcgcgcgccgcctcggcagcgtgtgccgcggggcacgcgtcaccatctgcgccccgctctcggcgttccggaagatgttcccgggcgctgccggtgtgactgtgacggaggaggagtgtggcgacggcgatgcgaaggtcaagtacgtggcctactcggacggctacgacggcgggttcgacatcgccgtagacagctacgcgcggtacatggagcaggcaaggatggcggggtcgcgctcgctggccggggtcctccgccgcctccgcgacgacgggcgccccgtcacgtgcgccgtgtacacgctgctcctgccgtgggtggcgggcgtggcgcgggaccacggcgtggcggcgacggccgtgttctggatccagccggccaccgcgctcaccgcgtactaccactacttccgcgggcaccgggacgccgtcgtggccgccgcggcgtccggagacccgtgcgccgaggtggggctcccgggcctcccgccgctccgcgtccgcgacctgccgtcgttccttgccgtcacctccgaggacgacccgttcgcgttcgtgctcccggagttcggcgagctcgtcgacgcgctcgaacgagacgacggctcctcggagcacccgacgtacgtgctcgccaacacctgcgacgccatggagcccgacgcgctcgcgtcgctgaggccacacgtggacgtcttccccgtcgggcccgtgctctcgttcctgcacgaagcggatgacggcaggcgcgccccgtgtcctcctcgtgacgtctttgaccatgacaagagcgggtacctcggctggttggacaccaagccggccaagtcggtggtgtacatctccttcggcagctcgtcggttatgtgcaaggaccaggtcgcggagatcaccgacgccatggtgcaggtgaagaggccgttcctcttggtcctgaggaaggacagccgcaagggccacgacgacgacgcggtggcggcggccgatgcggacagcgccggcgggatggtggtggagtggtgcgaccaggcgcgcgtactgtcccacccagcggtcgcatgcttcgtgacgcattgcgggtggaactcgaccctggagagcgcggcgtgcggcgtgccgaccgtcgcggttccgcagtactcggaccagggcacggccgcgtggctcgtggcggagcggatgggcaccggcgtccgcgcggcggcgcgcgcggacggcgtcgtggaggcccaggagctgaggcggtgcgtggaggccgcagcgtcgggggcggtggcggcgcgcgccgcggcgtggaagcggaaggcgtgggctgccgtagccgacggcgggagctcgcaccggaacctgacggagttcctgaggcagatcggccacggccgcggcgactaaaccggagacgacgtcgtattgtattgtatcaccacgttgtggtggcgttgcagccagctgccagcgtgcatttctagcgaaaccatgcatacagttgattgcaatttgagcgaggacgcaatccatgtctggtttctgaagtctggcaacgtattcccttcggctc

SEQ ID NO: 138349 - DNA, 115 bp, Zea Mays
ttgtatcctagccggcggcctccacaaccccctcccccagccaacggcctccactgccccacccaacgtcgcagctccactcacaatcggaggaactgctctacgaccaccttcc

SEQ ID NO: 138350 - DNA, 2506 bp, Zea Mays
gaatttatatctatagctgctgcttccatttaaatagttgatttcacggaatttatatttatatctattgctgctgcttccatttaaatagacatgtataaaaaattaaaaatcagctccttataaacagggtaacgaacattctcatccagtttttttcataaatcattttttagaaatttgggacagaaactgatttttttaaaacagtggtgcttataaacaaaccctaaaatacacgctcgcagaaaaaaaattgaaaaagagatgaagcagtaggtagacccaagggttcaaaaactaaacgccataattaccgtacgggtcttcgtcccgtggcaggggcagacgcggcggcgggcccggcattactctcccgctataaatcctactccgccgcacaaggcagaacagaagaggcctccccgctccgcgttccccagcgccagcggtaaccccacccaactcctctgagctgtgacacagctgtcctcctccccccactccaggcgctcacacaccctccacttccctccacaggaatccgccgccataatctcctccgctccgctccactccgcattgcaggattgcgccgagcacgagcaccctcctccccgaaacctcttcttggctctgctttcggtggtatggtgggatgatgagcagggcggcagtgctgctgtgtctcctctgctgcctcgccgccgccggcgaggcggcgtcagtggtgggcgagggcgaggcggcggagctggccgtgtcggtggacccgtcgtggcggttccccagccagcggctgcgggacgcgtacgtcgcgctgcagacctggaagcagcaggccatcttctccgaccccaggggtttcaccgccgactgggtgggcccgggggtatgcaactacaccggggtcttctgcgcgccgctgccgcgcggggtgccgggcgccggggagctcgccgtcgcgggcctcgacctcaaccacggcgacatcgcgggctacctcccgccggagctcggcctcctcgctgacctctcgctgctccacctcaactccaaccgcttctgcggcctcgtccccgccactctgcgccgcctccagcttctcgtcgagctcgacctcagcaacaaccgcctcgtcggggcattcccggccgtcgtgctggagctcccggcgctcaagttcctcgacctccgcttcaacgacttcgagggcgccatcccgccggagctcttcgaccgcccgctcgacgccatcttcctcaaccacaaccgcctccgctccccgctccccgacaacttcggcaactccccggcctccgtcatcgtgctcgccgacaacagcttcggcggatgcctcccggccagcctcggcaacatgtccggcacgctcaacgagatcctcctcatcaacaacggcctcgactcctgcgtcccgccggaggtcggcttgctccgggaggtgaccgtcttcgacgtcagcttcaactcgctcgttggcccgctgccgcagcaggtggccgggatgcgcaaggtggagcagctggacgtcgcgcacaaccgcctgtccggggccgtcccggaggccatctgcgccctcccgcggctcaagaacctgaccatctcctacaacttcttcaccggcgagccgccgtcctgcgcgcgcgtcgtgccttcggacggtgacaggaggaactgcctgcccaaccgccccacacagcgcacgccgcagcagtgcgccgcgttctactcgcagccgcccgtcgactgcgccgcgttccagtgcaagccgtttgtccctgttccgccgccgccgccgccatcataccccggcccgttgccaccggtataccctatgccgtacgcatcgcctccgccacctgcgcagtaccgatgattcgtcgaggagcgagaagcactatcactttcaccttaattcgccaccaccgctgctgcgctggatgaagacagcaaagttcaccgtcacaattgtacgtggtcagtcattgttgtgcttagattagtagtgttcttgattgatagctaccggcatatagaagattatattattatacggtgcatatatcgctcttgcttttgcatttgtcggtctctgtttttcgcgtcgatccgggttggcgttgtggcgacggtgaaaaggattgaaggtggtggtgatggagggaacagtttgagattgagcttggattgattgttgactgggttgtgaataataaactgcttgagagagagagaaagatgaggatgaggaggattggttggtgacttcacctgggcctgggatgtatagagggaactaagcttcttcagttaagctgctgctttcagttgagagtccagacataagttttcagaccaagtaatgtatcctacttactattctttttttttggtgtcacagctacttactgttaatcgattgttatgatataatctctctacatttttatttatttatcgtgttttaattcaaaaataaacaata

SEQ ID NO: 138351 - DNA, 324 bp, Zea Mays
cgccgcaaccatgccgtgacaacattagaagtttgacggggtcgctgcactcgcgcccatattccacagttgttcggtggacaaggaggagttagggtcattcaacaacgattgaggatcgaacgcaggcacacactcgggtgtgagcgtcaccaggggccaatgaattgttcgccggagattgcagagcaccaccgagcctttttgctcgtggacggagcacgtcgcatcacgatcgtggacgtgcaagtaattgaggaacccggaactcaacagggggaaaactctgagcagaagttcgttgaaggcaagttgtgcccttga

SEQ ID NO: 138352 - DNA, 2985 bp, Zea Mays
cgcttcagcttgcgcgtcgccacggcactccccgctgctctcagtccccaaccccagcgcggaaggcagagctgactaccatttccgttcccacgaatgctcccgtgactaccaccccgctccaggtagcaaagctgcggccggcgagggaggtaatagggtttttttggtctctgcgactacgacgccggcatgggctaccaccacctcctactctcgccgtcggtggcgcagccgccccgtcccgcccttctccctccaccccgcggccgccgcggcagcggcgtcgggcgggccaccgcagtatttgcctcggcgtccagcaccgctcgctcccccgctgcggacgacgccacgcggaggagggccgtgctcctggtcggcgtctcggtgctcccgctcctccgcctccgcgacgccgcggcggcggcggccagggcgcagctctcctcggttgatctcgtcactgatagaacagatattcaaaaggctgatgtaactcagcctgaggagccttgggaagaactacatcaacctgatgagcaaggacaaccagcaagaaatccacttgcaggtctcctaaatgcaattgcagttattgcttctggtgttttcgctggacttcttggtacttctcaacaagaaaagaaggctttgcaatcgaccatctcatctatggagaccaaattggttgaaaacgaggcagcaatgtcgatgctaagggaaaactatgagaaaagaatattggatgaacaagtaaaactgaagaaagaagctagaaagtttcaggaggaggaagccttcctgcaagatcagttggcttcatctagaagaaccgtaacatctttaactgaggaagttcaaagggagaaggagctagtagagcagcttaaccttgagatagatcgacttaagagcagtattgcagaagcagaggaagacaaacatttgtctgaaggcaaattgaaggaaaatatggaagtgcttgatattttgtatggcaaggtaaatctgcttagccaagaggtaaatggcaaggacgaacacatcagggagctgagctcatcactttctgccaaggaaaaggactacgagaacctaaatgtgatctgcaatcaagccaaagaggacctagagcaggcaaattcccaaataaagcaagtggagaaagatgttcgtacagctaaagatgatctcaaatcgaaggcgtcacttattaactcactgaatgagaaagttcaaacattatacactgaaaagggtgaagtggaagaaaaactaagtgctctagtgagtcagtatacatacctgaaatctgcttctgaagagagggcttctcacgattctgaactattagttcagaaagatgatatgctcaatcagcttgaagaaaaactttctgctgcattaagtgactctagcaaagacagaactcgaattgccgagttgaacaatgaattggtcaccaccagaacaatactagataatgaagttgttgccaataaaaaattgtcagaccttgttcagttcactgaagaggcactaacaggttccagaaatgaggtgtttaaactctctgaagagcttgacgcagtaaagagatcaaatcaggatttgatgactcagatttcaaaactaacagatgaggccagtgaagtgaggcaggctctggctaacaaaatagagcaggcagagtcagtttatgcaactctttcagatgagctggcgtctgtaagggaagtacttaaaaagtcagaaggagaactcgagatcacctcgaagcagttagttttggtttcagaagcacatagtgaccttaataaagaattgctggatgcatataagcagttagagtccacgcaaagtgagctagtgaaagagcgtaaaatcaatgctactcttaacatggagcttgaggctttggtgaaacaatcagtgatagagtccgaagcaagaaaaactcttcaagtcgacttggatgaggccactagatcactaaatgaggtgaataagagtacactctgtctgtctaagcagctggaaacaactaattccaagatttctgctattaaagaggagaaagatatgctgtcaaagttccttgaggaacaaaagaaaagtacggttgaagctcaggaaaacatggaggatgctcagaataccataaaaaggcttgggactgagagggagagttttgaagtaaggtctaagaaacttgaagaagagttggccacagcgaaaggtgagatattgcgtttgaggagacatattagtacaggtgggtctccgaacacccaagttctttcggaagcaggtgcagcgccaattagcagtcgagcactgaaacagcaacccatgaatgatcatgttcaaaatatcaatggtgctgatgctgtagcgtcacgttcgcctaaacggatttataggaggaaacgcaaaccagcagcataaggattatctgaatgccaaggggctagtttgggaactccatttttccaaggatttttaatttctcaaggaaaaatgaactaatttctcttgaaaaaaaaattccttgaaaaaatagggttcacaaactagccttaaaagcaaaagctggcgttctttttattcctctattattcaccttgttataacatcttgtgaactcccattcttcgaaaggtagacctccttacagtattatcttcggtggtgctggctcttccgcgcatccctactgaaaccgagaaccttatgtagtcacatacggtttgatgggatttagaatccatgttaccgtgtgacctgtgtacacctttaactgagttggttagatgatctaagtagcattaatgggtacaaaacaatttttttgaggatcgactcagccgaaactgctttggccgtttcttaaaaccggccaggctggagtagtgaaatttcaactttctcattgtattcgttttgtcaaattgattgaaaaaaccatctcgtttggagttc

SEQ ID NO: 138353 - DNA, 2166 bp, Zea Mays
attgcgtcgccttgttctcgcgctcgccgtggagtttgcggcgcttcttggctcgtaccggcgctgccttttggcgtttcgtggggggcggtttgagattttctcttcgcttctcctctcagtgcccctgattcgggaggaggggccggactgatctctgttccgctcgcgtgctttccaggggctgacgcgcgcgacaatgctgctcaagagggtggcggcggacgacggctccggcgccggcgccggcgccggcgtagggaggccacggctcttcgccatgccaaggctgctggtcgggctcgaggcgcccaggtgcggcgcaccagactgcgactcgccgatgacggcgcgcagcccgacgtcgccgctcgatctcaggcccttcgcctcgctgctccgctcgccgcgctcacccagaaccaggagctgggattcgcaccgccttggcctcggcggcctcgtcgacgacacgctcgccgaacccgtcgcatgcgccaggagccgcctgctcggcctcgggccccaagcgcggcagccgttcaagctgccgcaacgcctcgccaagcccctggccacccagccgagggactgctcccacgcatcctcggagctcgggaatgtggggaccgctgccggctgcaagccgctgccgtgcagcaggtcctacggggatgtgaagtctggtccagaggtcaccgtgcccggcggcgctccgcccggcgcgagcagccaccctgccgatgttggcaagttccccgcgccggggtccctgccggtgtccatcggcggcccgcgctggtacatcgggtccgtgtccgcgacggaggtggagcagtccgaggactacacctgcatcatcgcgcacggtcctaacccgaagaccactcgcatcttcggggactgcatcttggagccctgcactcctagtgtgtctgacggtgacggcatggatgccatggaagtcaaggaaggagcagagtcctactggttggtcaagtgcttcgatgccagcgagcctggagagttcttagactcctgcatctcttgctagaagaagctggatggcaatgacccctgcgtttatcgtggtgtgagggcattctgccgtgggaactggaggaatcaggaagtccttgctgagcaggaagacaacattccagctgtgtccttcagctcggctggctcatcatcttccttcaacgatgaagtagtcatggctgaaatggttgtggtggctgcaccagttgacgtccactaccctgaatctggcaaaccagggtagctgatcaataatgtcaattgtcgcagttttcatcttcgccgccatcattattttgctggttttgtaagttaagttccagcatttggtagcattgatcattttatgagaattgaggctccatctagaatttgctgagatgtgatctctcagcctttagaacggagagcttccatgccttaagcattgtaattttgaaccgaggctattggcaatgcaggttccccaattttcatcctctcttttttggtttgttcctcagtggcaatgacgatatctgcatgctgtaagttgcagcaacatcttttgataatgccattgagctgtgttgtgaaatctaccgcttctgctctcgaggaatggtgattactagggacactggcacgatgatagattgacagacagttagaaatcttggtgttacacttagagatgtcagtgtttacgcagtctaaattttgcaatgatctgacgcggagcaatgatgcagggcaggagcagacacaggtactatcaatggttgatcgctattgataatttattgtctgtttgctacaggttgcactgtgtgtgaggttggatcatttggattcatatgttcgtggagacatgtgatcgacaagaattcggtggcagaaacttcagtttggcagattatgtagagcataattttgattcattcttaggccttttttgtttgtgccagattggtgggttggaacgattactaaccagattgtttctctaatttatataaactttgattagctggaacgattctgggtgcaatccgacagaaatgaacaaggccttagacaatcacatcactgacatatttggtcacttgttttcatttactgtataaaataaaaaacaagacaata

SEQ ID NO: 138354 - DNA, 2014 bp, Zea Mays
ctgctctcttctgctgcctctccagtttttgattcgctgcacgccaaaacgagcgcaagagagatataggggagaaatgcaaacgcagcggcgggggcagtgacacagtggcattttactgcgcctgcgcctgtgcgcctgcgcctgtgcgcccaccagtcacaaggcccatatcctcctccgctccttcctctccgtctctcccctccagcattgcggtggagagggaagcaagaggtatcggagatagagagagaaagggcgaaaaacagaagggaacagcaacggagcagctgatcaggggctgacgcgcgcgacaatgctgctcaagagggtggcggcggacgacggctccggcgccggcgccggcgccggcgtagggaggccacggctcttcgccatgccaaggctgctggtcgggctcgaggcgcccaggtgcggcgcaccagactgcgactcgccgatgacggcgcgcagcccgacgtcgccgctcgatctcaggcccttcgcctcgctgctccgctcgccgcgctcacccagaaccaggagctgggattcgcaccgccttggcctcggcggcctcgtcgacgacacgctcgccgaacccgtcgcatgcgccaggagccgcctgctcggcctcgggccccaagcgcggcagccgttcaagctgccgcaacgcctcgccaagcccctggccacccagccgagggactgctcccacgcatcctcggagctcgggaatgtggggaccgctgccggctgcaagccgctgccgtgcagcaggtcctacggggatgtgaagtctggtccagaggtcaccgtgcccggcggcgctccgcccggcgcgagcagccaccctgccgatgttggcaagttccccgcgccggggtccctgccggtgtccatcggcggcccgcgctggtacatcgggtccgtgtccgcgacggaggtggagcagtccgaggactacacctgcatcatcgcgcacggtcctaacccgaagaccactcgcatcttcggggactgcatcttggagccctgcactcctagtgtgtctgacggtgacggcatggatgccatggaagtcaaggaaggagcagagtcctactggttggtcaagtgcttcgatgccagcgagcctggagagttcttagactcctgcatctcttgctagaagaagctggatggcaatgacccctgcgtttatcgtggtgtgagggcattctgccgtgggaactggaggaatcaggaagtccttgctgagcaggaagacaacattccagctgtgtccttcagctcggctggctcatcatcttccttcaacgatgaagtagtcatggctgaaatggttgtggtggctgcaccagttgacgtccactaccctgaatctggcaaaccagggtagctgatcaataatgtcaattgtcgcagttttcatcttcgccgccatcattattttgctggttttgtaagttaagttccagcatttggtagcattgatcattttatgagaattgaggctccatctagaatttgctgagatgtgatctctcagcctttagaacggagagcttccatgccttaagcattgtaattttgaaccgaggctattggcaatgcaggttccccaattttcatcctctcttttttggtttgttcctcagtggcaatgacgatatctgcatgctgttgcactgtgtgtgaggttggatcatttggattcatatgttcgtggagacatgtgatcgacaagaattcggtggcagaaacttcagtttggcagattatgtagagcataattttgattcattcttaggccttttttgtttgtgccagattggtgggttggaacgattactaaccagattgtttctctaatttatataaactttgattagctggaacgattctgggtgcaatccgacagaaatgaacaaggccttagacaatcacatcactgacatatttggtcacttgttttcatttactgtataaaataaaaaacaagacaata

SEQ ID NO: 138355 - DNA, 1639 bp, Zea Mays
cgcgtgcgtgtttctgcttttattttttgtttactgttttcttgctcgcaagttggcgatcccggcgatgagagattcctcctcatccggttttatcccccggttgccgttcgcattgtcctattgcgtcgccttgttctcgcgctcgccgtggagtttgcggcgcttcttggctcgtaccggcgctgccttttggcgtttcgtggggggcggggctgacgcgcgcgacaatgctgctcaagagggtggcggcggacgacggctccggcgccggcgccggcgccggcgtagggaggccacggctcttcgccatgccaaggctgctggtcgggctcgaggcgcccaggtgcggcgcaccagactgcgactcgccgatgacggcgcgcagcccgacgtcgccgctcgatctcaggcccttcgcctcgctgctccgctcgccgcgctcacccagaaccaggagctgggattcgcaccgccttggcctcggcggcctcgtcgacgacacgctcgccgaacccgtcgcatgcgccaggagccgcctgctcggcctcgggccccaagcgcggcagccgttcaagctgccgcaacgcctcgccaagcccctggccacccagccgagggactgctcccacgcatcctcggagctcgggaatgtggggaccgctgccggctgcaagccgctgccgtgcagcaggtcctacggggatgtgaagtctggtccagaggtcaccgtgcccggcggcgctccgcccggcgcgagcagccaccctgccgatgttggcaagttccccgcgccggggtccctgccggtgtccatcggcggcccgcgctggtacatcgggtccgtgtccgcgacggaggtggagcagtccgaggactacacctgcatcatcgcgcacggtcctaacccgaagaccactcgcatcttcggggactgcatcttggagccctgcactcctagtgtgtctgacggtgacggcatggatgccatggaagtcaaggaaggagcagagtcctactggttggtcaagtgcttcgatgccagcgagcctggagagttcttagactcctgcatctcttgctagaagaagctggatggcaatgacccctgcgtttatcgtggtgtgagggcattctgccgtgggaactggaggaatcaggaagtccttgctgagcaggaagacaacattccagctgtgtccttcagctcggctggctcatcatcttccttcaacgatgaagtagtcatggctgaaatggttgtggtggctgcaccagttgacgtccactaccctgaatctggcaaaccagggtagctgatcaataatgtcaattgtcgcagttttcatcttcgccgccatcattattttgctggttttgtaagttaagttccagcatttggtagcattgatcattttatgagaattgaggctccatctagaatttgctgagatgtgatctctcagcctttagaacggagagcttccatgccttaagcattgtaattttgaaccgaggctattggcaatgcaggttccccaattttcatcctctcttttttggtttgttcctcagtggcaatgacgatatctgcatgctgtaagttgcagcaacatcttttgataatgccattgagctg

SEQ ID NO: 138356 - DNA, 1136 bp, Zea Mays
attgcgtcgccttgttctcgcgctcgccgtggagtttgcggcgcttcttggctcgtaccggcgctgccttttggcgtttcgtggggggcggtttgagattttctcttcgcttctcctctcagtgcccctgattcgggaggaggggccggactgatctctgttccgctcgcgtgctttccaggggctgacgcgcgcgacaatgctgctcaagagggtggcggcggacgacggctccggcgccggcgccggcgccggcgtagggaggccacggctcttcgccatgccaaggctgctggtcgggctcgaggcgcccaggtgcggcgcaccagactgcgactcgccgatgacggcgcgcagcccgacgtcgccgctcgatctcaggcccttcgcctcgctgctccgctcgccgcgctcacccagaaccaggagctgggattcgcaccgccttggcctcggcggcctcgtcgacgacacgctcgccgaacccgtcgcatgcgccaggagccgcctgctcggcctcgggccccaagcgcggcagccgttcaagctgccgcaacgcctcgccaagcccctggccacccagccgagggactgctcccacgcatcctcggagctcgggaatgtggggaccgctgccggctgcaagccgctgccgtgcagcaggtcctacggggatgtgaagtctggtccagaggtcaccgtgcccggcggcgctccgcccggcgcgagcagccaccctgccgatgttggcaagttccccgcgccggggtccctgccggtgtccatcggcggcccgcgctggtacatcgggtccgtgtccgcgacggaggtggagcagtccgaggactacacctgcatcatcgcgcacggtcctaacccgaagaccactcgcatcttcggggactgcatcttggagccctgcactcctagtgtgtctgacggtgacggcatggatgccatggaagtcaaggaaggagcagagtcctactggttggtcaagtgcttcgatgccagcgagcctggagagttcttagactcctgcatctcttgctagaagaagctggatggcaatgacccctgcgtttatcgtggcaatgacgatatctgcatgctgtaagttgcagcaacatcttttg

SEQ ID NO: 138357 - DNA, 276 bp, Zea Mays
atgagcacgtacgccaccgcctggtccaccgcccgcgccgtcgtctccgccactgccgccttcttcaccgacgaccccatcggcggcaaacgtgttagctgtcggagtgaattggtggatggcctgatgttgatgagccgacctgagagggcaattgaagctcggatcggtgcggtggatgcattatatagcgagaggagaccgagtagggggcctgggagaggtggcggctctcgaggcttcgtgggtgccagccggtggatgctgaattcttga

SEQ ID NO: 138358 - DNA, 3997 bp, Zea Mays
atggccagcgggcatgaaaaggcgctcgtccttggccccctcctcgccttcggtggccgctacggggaactggaaccccatgctgtgggactgggacagccgcgcgctcaccgccaggccgttggccgatgcgctccgcctcgtcggtggccagccccaaccctagcatgcggccgaggagcaccgttagggggccgggggaagcggcgcgctgaagctccagctcggcccgcgggaaggctccgcggccccgacggacgccagcccgacgcctcccacgacgtcgctgtcgccgtccccgcctgcttcggggcaggacccggtggtcaggtcgagcaagcggtggaggagactgttgctgcggtggcggcggcggagcacagatggggaggagtccattgggggactggaggctttggaagctccgcgaggacggcgcgacgggcggaacgcacgaggcgaggaagaggacggggaggaacacagggggaaggggtttgcggggggaggggggcacgggcggccgccattgccggcttacggtcgggtgggggaggaggagcacgcgcagagaggagggcgggggcagtctacactaacattttagggaacgtatcttgtgctcacgcaatatccgtgctcataggtaaccagcaggattccacgacctctgttcgtacaggagtccggaagagcccagaacgttctatcgtgcgcctgcgaacgtgggcccaacacgtcagacggaagaatgaacaacatctctggcaactcctagaacgttcacggccacaccccgcaccacggcggcccgccccgccgcccccggccctcgtacccggtgagatatatcgccgccttccctcgcgaaaccactcgtggagacaacgacgacgagtgacgactacgacgcgagaagtcgaggggcagcttcgtgctaggaccgagcttcaggaggtctccaacggcaacggccccgccccgcgccaccgccccccgcagggactgattgctattagagatctatttggtagtggtcagcagctgagggtgaaccgaagatgagcgttgtgggattcgacctcggcaatgagagctgcatcgtggcagtcgcgcggcagcgcggcatcgacgtggtcctcaacgaggagtccaagcgcgagaccccagccatcgtctgcttcggggacaagcagcggtttatcggtacggccggtgccgcgtcctcaaccatgaaccccagaaactccatctctcagatcaagcgcctgctcggccgcaagttctccgacccggaggtgcagagcgatatcgcctccttcccgttccgtgtcacggaggggcccgatggatttcccctggtccatgtacggttcctgggtgaggagcggacgttcacccccactcagctgcttgccatggtgctgtccaatctgaagagcattgccgaggggaacctgaagactgcggttgttgattgctgcattggcatccctgtgtacttcactgatttgcagcgcagggctgttcttgatgctgctactattgccggcctccggcctttgcggctattccatgagacaactgccacggcgttggcttatggcatttataagactgacctcccagagcatgaccagctaaacgtcgcgtttgttgatgttggtcatgctagcatgcaggtcagcattgtcggttacaagaagggacagctcaagatgctttcacatgcatatgaccgttctcttggcggcagggacttcgatgaggtcctcttcaagcactttgtggcaaagttcaaagaagagtacaagcttgacgtctaccagaatgcccgcgcatgccttaggttgcgtgtggcgtgtgagaagattaagaaggtgctgagtgccaacccagaggctccactgaacattgagtgcttgatggatgagaaggatgtgagagggtttattagaagggacgagtttgaacacatcagtgcacctgtgctggaacgtgtcaaaggacccttggagaaggccttgactgaagctggcttgacaactgaaaatgtgcacattgttgaggttgtcggatctggttctcgtgttccggccataatcaagataatcactgaattttttgggaaggagccaaggcgaaccatgaatgcaagtgagtgtgttgcacgaggatgtgctcttcagtgtgctatgctcagccccactttcaaagtgcgggaattccaggttaatgatgggtttcctttctcagttgcgttgtcatggaaacaagaatcccagaacagtgcaccccaacagacccttgtattcccaaaggggaatgcaattccgagcattaaatctctaacgttctataaattgagtacatttgaagttgatgttttgtatgtgggtacaggcgactcgcaaattccacaaaagataagcacttacacgattggccctttccaaccctccaaatgtgagaagaccaagctgaaagttaaagtgtgtctcagcatccatggcattgtcacagtggattcagcaatgatgctggaggaggatgtggaagttccagtctcatctgctaatgaagctctaaaggatactacaaagatggacacggatgatgcaccaagtgatcatgtttctggaactgatgcgaatatgcatgagcatagaagtgctgacactactgaggctcctgctgaaaatggagcacaagattctgaggaaaaatctgttccaatggaaactgatgcaaaggttgagccatcgaaaaggaaaattaagaaaacttctgttccgatccatgagttggtctacggcgcattgtctgccactgacctgcagaaggctgtagagaaagagtatgagatggctctgcaggacagagtaatggaagagaccaaagaaaagaaaaatgctgtggaagcttatgtctatgacatgcgtaacaagctgtacgacaagtataacgattttgtcacacccgaggagaaggaagggttgattgcaaagcttcaggaggttgaagattggctgtatgaagatggtgaggatgagacaaagggagtatatatttctaaactggaagagcttaaaaagattggcgatccaattgaggcacggcacaaggagtggacggaaaggggttcctctgtagatcaactggtgtattgtatcaatagtttcagagaggctgcatcgtccagtgaccagaagtttgaccatatcgacatatctgagaaacagaaggtcatcaatgaatgctctgaagcagagaactggttaagagagaggaaacagcagcaggatgccctaccgaagcatgctaatcctgtgctgctcgtatcggatctgaagaagaaagctgaaacacttgaccggttctgcaaaccgatcatgacaaaaccaaagccggctccaaagccacagactccgccaccacaacctgaaacccaagcatctgagcctcaaacaccagagcaacaacaaagccggtctggcggaactggtgagccgaggagtgagggaggtgtgcagcaggcctccggtgagcaaatggacatggacaatcctgaatctgctgatgctgccgcataagtttggttgccatctctatcttatgatcgatcaaaattttctgttagtgtctggtaggtggatgagttaaggcgacactagcattctcacaagcgatttcgttttaggcagttggattgaggtatatgcatcttgtccagcgttgtttagaaaaaaagttaggcaaaatatagcaagttttacataaacgttacatgatcgaaatgcaccatcggctataatcggatgtcgtggatgattcggtcaattataatttgcacttagattccttgagttaggctgcgtcacagctcaggtcatacatgtttctttgaagactacatgttctcgacagaacggaaagctattggtttttgtgcggatagaatttaagccttttttacgtggtgcacgttgtgaagtaa

SEQ ID NO: 138359 - DNA, 1917 bp, Zea Mays
atgggacctgcgtgcaaaaccgcagcgcggccgcgcgtgctgctgctgtgcagcccgtgcatggggcacctcatccccttcgcggagctcgcgcggcgcctcgtggccgaccacggcctctccaccacgctcctcttcgcctcggctacatccccgccctcggagcagtacctcgcggtggccgccgccgtccccgacgccgtcgacctcatcgcgctgccggcaccgccgccagacgcgctgcctcccgccacggccgcgcgcgagcgcgcggagctcgccgtcgcctccaacgtgccacgcgtccgggagatcgcgcgggagctgggcgcggcggcgccgctcgtcgcgctcgtggtggacatggtcggcgcggcggcggcgcgcgacgtggcggcggagctgggcgtcccgttctacgccttcttcacgtccccgtggatgacgctttcgctgctcctccgcctccccgagatcgacgcagcccgcgccggggagcaccgggacgccgcggagccgatccggctccccggctgcgtgccgatccacgcccacgagctgccgacgtccatgctcgccgaccggagcagcagcgcgtacgccgggttcttgtccatggccaagggcgtcgcgggagtcgatggcgtccttgtgaacacgtttcgtgaactggagcccgcggtgggcggcgacggtcgtctgcagctgccggtgtacccggttgggccattggtttggaccaggccggccggcgtggacacggaccacgagtgcatgagctggctggacgggcagccacgtggctccgtggcgtatgtgtcgttcggcagtggcggcacgattacatggcagcagacggctgagctggcgctggggctggagcttagccagtgtaggttcatctgggctatcaagaggccacaccagagctcaacaatcgcggcgttcttcgggactcaaagaggcgatgagcacagccccttggattttttacctgaagggttcatggagaggactagagggatggggttggtggcccagtcttgggcgccacaaacagctatacttggccacccttccattgggtgcttcgtcacgcattgcgggtggaactcggtcctagagagtgtgatcaacggtgttcctatggttgcttggccactctacgccgagcagaacatgaatgctgcgatgatggaggtccaggttggtgtggcattgcgggctaaggtcggagctgatcgatttataaggaaggacgaagttgcgaatgcgattcgacgtgcgattgtaggggaggaagctgaaaggctgaggaagcgatcaagcgagcttagacgccaatcagcgcaagctctgagcaaggatggagcaagtcacagaggtccttcgcctttaagaggtgggctcggggcaggtgttatcgttgcctcgctcacgaccaccaaatcaactcatgcaagaactccttctgttgcatccgttgtcgctgccccggtcatcgggagcggcattatcgctttcggtcttcctcttcctgtccatcgagttaactgctccgtgcaatgtgaccatcctcaacaaacgagtacttgtgctaaggacaccagtgcaaacgccacagcctttgtccttggcgagaagcccacaaggatatctggtacaaagattcatagagagacgaaccttagcactaatgaggcggtcgcagggacatttgaagcagattctcgccaaatgatgtccaccgagcagaccattgaggtgccttcggataccttcacattgcttcaggctataacctctgttgaagatgttgttttggtggaggatgcatcatatgatgaggaagctactttggttatgcaaactacttttgatggccccatctttattaccaccatcgactatggttaa

SEQ ID NO: 138360 - DNA, 603 bp, Zea Mays
tgctccgggccggcccgattagcccggcacggctggccatctatagctgcggcggcgacggccgcgagtgccggccgctgggttggctgctggggctgccgttcgcgctgctcgccgtcctcgtctccgtcgtcggcgccatcatctggatcatcgggctgcccatatcgtgcatctgcccgtgctgcctctgcgtgacggtggtgctggaggcggcggtggagctcatcaaggcgccgctgcacgtcatcacctggttcacatccaagataccctgctagacaagcagtcggaggatggtttgtgagcgatagccaacaaggggcagcgcatggacagtttacacaggacacggggtttcggtgcagactagaatctgtcatgtttcttcgagcttctggattgccgtttaacttttcaatataggtcaaaataaagagttgcagttgcacagctattttaagaacggtatagaggtatggtagatttcatataggtcatgtttgacagggttccggcttctcgagaaccctgccaaatggtcacttaaagttggctctttatatatgaagtctgaaggagccagagctgtttgtatatata

SEQ ID NO: 138361 - DNA, 80 bp, Zea Mays
attagcaaggagcacggaacgaatcaagcaaaagccaaggaacaggggaggcaaggctgctgcccgtgatgtgctgcggc

SEQ ID NO: 138362 - DNA, 459 bp, Zea Mays
atggacacaaaaccttgggtaagcacctacctgaccaaaactctaatttgtcttatgcaggaacatatacttcagcacaagttctggaagatctctcatcacacacaaccagtcaggaatgtagtcttcaggaggaccaccaatccaatgtaccccatcaacgagccatctaccaacaacaaggtacgtatttttaccacgcaggaacaaactcacaacagaggtagacaaccaatcagcgcatacacttcgatacactttgggccggagcggccacggcgctacttaatcccaattcccaatcccggcatcactgtctgtgcctgggtctatatgctttacagatgcggctatttcaccggacacggcgacatccacctgggagttgtattcatcaaaccccaccactcacccctgggttcaattttcagagcacaatcatgtaagattgaaaagtag

SEQ ID NO: 138363 - DNA, 363 bp, Zea Mays
tgcgccggcggcggtgacggcaagcaggaggtactcgacccagccgagatcgccgttggcgccaatccgcttgctggcgtatccgaacgggcagccggcggccctgtccttctcccgctgcgggagcgcgaagaacgcggccgcggcggcctcgaggcgcgccaggaggtgcggcggcacgccgtggcccgtcaccttgaagaagccgtggtcctcgcacgccttggccaccgcgcgcgcggcggcggcggcgtccccggctgccaggtcgacctccggcacggcggccggcggcggcggcgatgcgcgctgcacggccggcagcgcgatctgctccagctcgcccttggtgaggaccaccat

SEQ ID NO: 138364 - DNA, 1523 bp, Zea Mays
gcaacaaccatttcttcttcctttttctatatcgcgttacgtccctccctacccagcgatctaggccgccgcctctcctactgcatctccctcgctctcgtcgcctcgttcgcttcgcctcctccccgccccgccccgagccgagcagagcgcagccctatccggagctgggatggcggacgcgaagcagcagcagcagcagccacagcaggcggcagcggcagccaccggcgtgtggaagacggtcaagcccttcgttaacggcggggcctctgggatgctcgcgacctgcgtcatccagcctatcgacatggtcaaggtgaggatccaattgggtgagggctccgctggtcaggtcacaaggaacatgcttgcaaatgagggtgtccgttctttctacaagggtttgtctgccggattgctgaggcaagcgacgtacacgactgctcgtcttggatcctttagggttctaactaacaaagcagttgaaaagaatgaagggaagccattgcctctaattcagaaagcttttattggtctgactgctggagcaattggtgcttgttttggtagtcctgctgatctggcactcattagaatgcaagccgactcgaccctgccagctgcacaacgacgcaactataagaatgctttccatgcactctaccgtatcagtgctgatgagggagtccttgcgctttggaagggtgcaggtccaactgtggtgagagctatggcactcaatatgggtatgcttgcttcctatgaccagagtgtcgagctatttagggacaaatttggcgcaggagaaatttctactgttgttggagccagcgctgtttctggattcttcgcctcagcatgcagtttgccctttgactatgtgaagacacagattcagaagatgcaacctgatgctaatggcaagtacccatacacagggtctttggactgtgctgtgaagaccttcaagagcggtggcccattcaagttctacactggtttcccggtgtactgcgtcaggattgcaccccatgtcatgatgacctggatattcttgaatcagatccagaagtttgagaagaagatcggcatataggattcccatcggacggatacagggttgaccgttctatgctattactgctggactctgtaataacattccagctgctttcgcaccatggtagttggttttggtagagacaagtctgttacaatttttttaccttagctttccaattattgtgtcgcaataatcgaattaattgttgctgggggattttttttggggggtgggtgggtggacatgcatttgttggctgggatgtagccatgaggagagggggatactacctagttatgccattgaatggaattggaccatattttatacagatttttaccttcagttcttttgaacttattgcatttgggacattgattttttttgtaatggaaacgatgggaattgatcaactgtgagattatgttctcggcctgctcgagattgtacctgataa

SEQ ID NO: 138365 - DNA, 632 bp, Zea Mays
gcaacaaccatttcttcttcctttttctatatcgcgttacgtccctccctacccagcgatctaggccgccgcctctcctactgcatctccctcgctctcgtcgcctcgttcgcttcgcctcctccccgccccgccccgagccgagcagagcgcagccctatccggagctgggatggcggacgcgaagcagcagcagcagcagccacagcaggcggcagcggcagccaccggcgtgtggaagacggtcaagcccttcgttaacggcggggcctctgggatgctcgcgacctgcgtcatccagcctatcgacatggtcaaggtaccgtaccaccgcaccgctctgtcacccggcttccttcacagtgctcgtgagtgagctggtgaggcgggatcggggcgtggcgggcttagatctacgggaatggggttgcttgccgcgtgaatcagtcggttagatgcttacccgcggagtttgcccctttttggttggatctgatgaatcgagcgtgcccttggggtcagcgtagtggaactaagcttgctgttaagtattttggtgcggctagctttagatccgtcggaattgccgtgactggatcaagcatgcgtgggttgctgggagctgaagttgt

SEQ ID NO: 138366 - DNA, 1627 bp, Zea Mays
tggaccccgcaccgtccgtgcaccgcgcccacacgccgaaacggcgatcccacacgcgacgtcgcccacgaggccgcggcgcaccttgcctggccgcaacaaccatttcttcttcctttttctatatcgcgttacgtccctacccagcgatctaggccgccgcctctcctactgcatctccctcgctctcgtcgcctcgttcgcttcgcctccgccccgccccgccccgagcagagcgcagccctatccggagctgggatggcggacgcgaagcagcagcagcagcagcagcagcagccacagcaggcggcagcggcagccaccggcgtgtggaagacggtcaagcccttcgttaacggcggggcctctgggatgctcgcgacctgcgtcatccagcctatcgacatggtcaaggtgaggatccagttgggtgagggctctgctggtcaggtcacaaggaacatgcttgcaaatgagggtgtccgttctttctacaagggtttgtccgccggattgctgaggcaagcgacgtacacgactgctcgtcttggatcctttagggttctaactaacaaagcagttgaaaagaatgaagggaagccattgcctctatttcagaaagcttttattggtctgactgctggtgcaattggtgcttgtgttggtagtcctgctgatctggcactcattagaatgcaagccgattcgaccctgccagttgcacaacgacgcaactataagaatgctttccatgcactctaccgtatcagtggtgatgagggagtccttgcgctttggaagggtgcaggtccaactgtggtgagagctatggcactcaatatgggtatgcttgcttcctatgaccagagtgtcgagctatttagggacaaatttggcgcaggagaaatttctactgttgttggagccagcgctgtttctggattctttgcctcagcatgcagtttgccctttgactatgtgaagacacagattcagaagatgcaacctgatgcgaatggcaagtacccatacacagggtctttggactgtgctgtgaagaccttcaagagcggtggcccattcaagttctacactggtttcccggtgtactgcgtcaggattgcaccccatgtcatgatgacctggatattcttgaatcagatccagaagtttgagaagaagatcggcatataggattcccatcggacggatacagggttgacagttctatgctattactgcttgactctgtaataacattccagctgctttcgcaccatggtagttggttttggtagagacaagtctgttacaattttttaccttagctttccaattattgtgttgcaataatcgaattaattgttgctgggggatttttttggggggttgggagggtggcatgcttttgttggctgggatgtagccataaggagagggggatactgcctagttatgtcattgaatggaattggaccatattttatacagatttttaccttcagttcttttaaacttattacatttgggactttttttttgtaatggaaacgatgggaattgatctactgtgagattatgttctcggcctgctcgagattgtacctgataaggtaacggtgtgaca

SEQ ID NO: 138367 - DNA, 1827 bp, Zea Mays
tggaccccgcaccgtccgtgcaccgcgcccacacgccgaaacggcgatcccacacgcgacgtcgcccacgaggccgcggcgcaccttgcctggccgcaacaaccatttcttcttcctttttctatatcgcgttacgtccctacccagcgatctaggccgccgcctctcctactgcatctccctcgctctcgtcgcctcgttcgcttcgcctccgccccgccccgccccgagcagagcgcagccctatccggagctgggatggcggacgcgaagcagcagcagcagcagcagcagcagccacagcaggcggcagcggcagccaccggcgtgtggaagacggtcaagcccttcgttaacggcggggcctctgggatgctcgcgacctgcgtcatccagcctatcgacatggtcaaggtgaggatccagttgggtgagggctctgctggtcaggtcacaaggaacatgcttgcaaatgagggtgtccgttctttctacaagggtttgtccgccggattgctgaggcaagcgacgtacacgactgctcgtcttggatcctttagggttctaactaacaaagcagttgaaaagaatgaagggaagccattgcctctatttcagaaagcttttattggtctgactgctggtgcaattggtgcttgtgttggtagtcctgctgatctggcactcattagaatgcaagccgattcgaccctgccagttgcacaacgacgcaactataagaatgctttccatgcactctaccgtatcagtggtgatgagggagtccttgcgctttggaagggtgcaggtccaactgtggtgagagctatggcactcaatatgggtatgcttgcttcctatgaccagagtgtcgagctatttagggacaaatttggcgcaggagaaatttctactgttgttggtaagattctagtgcctacaagcttttgaggatttctgctatgttgttgaaatcaaatgcttattttcttagcttctgcaactgacattgcccggatccttttgattctactcattgtgcttaattttgtcaatttctgtacgtagccatgttaggcctgctgatcagtttcctgatgcaatcgtccaatttgattgcaggagccagcgctgtttctggattctttgcctcagcatgcagtttgccctttgactatgtgaagacacagattcagaagatgcaacctgatgcgaatggcaagtacccatacacagggtctttggactgtgctgtgaagaccttcaagagcggtggcccattcaagttctacactggtttcccggtgtactgcgtcaggattgcaccccatgtcatgatgacctggatattcttgaatcagatccagaagtttgagaagaagatcggcatataggattcccatcggacggatacagggttgacagttctatgctattactgcttgactctgtaataacattccagctgctttcgcaccatggtagttggttttggtagagacaagtctgttacaattttttaccttagctttccaattattgtgttgcaataatcgaattaattgttgctgggggatttttttggggggttgggagggtggcatgcttttgttggctgggatgtagccataaggagagggggatactgcctagttatgtcattgaatggaattggaccatattttatacagatttttaccttcagttcttttaaacttattacatttgggactttttttttgtaatggaaacgatgggaattgatctactgtgagattatgttctcggcctgctcgagattgtacctgataaggtaacggtgtgaca

SEQ ID NO: 138368 - DNA, 1619 bp, Zea Mays
tggaccccgcaccgtccgtgcaccgcgcccacacgccgaaacggcgatcccacacgcgacgtcgcccacgaggccgcggcgcaccttgcctggccgcaacaaccatttcttcttcctttttctatatcgcgttacgtccctacccagcgatctaggccgccgcctctcctactgcatctccctcgctctcgtcgcctcgttcgcttcgcctccgccccgccccgccccgagcagagcgcagccctatccggagctgggatggcggacgcgaagcagcagcagcagcagcagcagcagccacagcaggcggcagcggcagccaccggcgtgtggaagacggtcaagcccttcgttaacggcggggcctctgggatgctcgcgacctgcgtcatccagcctatcgacatggtcaaggtgaggatccagttgggtgagggctctgctggtcaggtcacaaggaacatgcttgcaaatgagggtgtccgttctttctacaagggtttgtccgccggattgctgaggcaagcgacgtacacgactgctcgtcttggatcctttagggttctaactaacaaagcagttgaaaagaatgaagggaagccattgcctctatttcagaaagcttttattggtctgactgctggtgcaattggtgcttgtgttggtagtcctgctgatctggcactcattagaatgcaagccgattcgaccctgccagttgcacaacgacgcaactataagaatgctttccatgcactctaccgtatcagtggtgatgagggagtccttgcgctttggaagggtgcaggtccaactgtggtgagagctatggcactcaatatgggtatgcttgcttcctatgaccagagtgtcgagctatttagggacaaatttggcgcaggagaaatttctactgttgttggagccagcgctgtttctggattctttgcctcagcatgcagtttgccctttgactatgtgaagacacagattcagaagatgcaacctgatgcgaatggcaagtacccatacacagggtctttggactgtgctgtgaagaccttcaagagcggtggcccattcaagttctacactggtttcccggtgtactgcgtcaggattgcaccccatgtcatggtaaatagagaatacctggctatacactcctggacagtccaccttttaccttatttttcaatctggtaaccatccattgataatttgaatgcagatgacctggatattcttgaatcagatccagaagtttgagaagaagatcggcatataggattcccatcggacggatacagggttgacagttctatgctattactgcttgactctgtaataacattccagctgctttcgcaccatggtagttggttttggtagagacaagtctgttacaattttttaccttagctttccaattattgtgttgcaataatcgaattaattgttgctgggggatttttttggggggttgggagggtggcatgcttttgttggctgggatgtagccataaggagagggggatactgcctagttatgtcattgaatggaattggaccatattttatacagatttttaccttcagttcttttaaacttattacat

SEQ ID NO: 138369 - DNA, 2504 bp, Zea Mays
gaatcactcattccactcccaaacctcccgaaaaccctcgtcgtcttcctcccaaatcactcactcgcttgatctctcctctccgaacccggcaacccctagaactagggttccagcgacccaatgacggacggcagcgacgagtacaagcgcgacgagtcggtgatcctgctggtcatcgtctccctcgccgcgctctcgctcctatccctcatcgccgccttcgcctactactgctacattacgcgcaaggtctcccgccgccttcagtcactccatctccccaaacgttccagctctcctcctcctcctcctcctccccgggctctgccgccgccgcaacagcaggggaaggacagcccgttcagcagctccgccagcgatggggccgctgcggcggcggcggcgatgtcggttgtggttgctggggagaggggcgtgcaggtgttcagctaccgtcagctccacgcggccatgggcgggttcggccgggcgcacatggttgggcagggcagcttcgggaccgtgtaccgcggggtgctccccgacgggaggaaggtcgcggtcaagctcatggaccgcccagggaagcagggcgaagaggagttcgagatggaggtggagttgctgagtaggctccgatcgccgtatttattgggccttattggccattgttcagaaggtgggcaccgtctactggtatacgagttcatggccaatgggggtctacatgagcatctctacccaaccagaggttcctgtggtggaatctcaaaattggactgggacacaagaatgagaattgcacttgaggcagccaaaggtttggaatatcttcatgagcgtgttaatccacctgttatacatagagacttcaagagtagcaatattctcctggacaaggacttccatgcaagagtttcagactttggtctagccaaacttggatctgatagagctggtggccatgtctcaactcgagttttgggcacacaaggctatgttgcaccagaatacgcattgactgggcatttgactaccaaatcagatgtgtacagctacggtgttgtgcttttggaattacttactggcagagtaccagttgatatgaagaggcctcctggagaaggtgttttagtaaactgggcattgcctatgctcactgaccgagaaaaagttgtgcggatcttggatccagcattggaaggtcaatactccttgaaagatgctgtccaagtggctgctattgctgccatgtgtgttcaaccagaggctgactacaggccattaatggctgatgttgtccaatcgctggttccacttgtcaagaaccgttctaatcagaaagcttgcaaccccaacgtgcaatcgtccaagccacttgactaggaaagcgtccgtctgagcaggtaggttgtctgaacggtcctgagagcttatttgggtttgaagggaagtttctgtcatgtacaattagctgcccgcggtgatggtgggttgttggattagtacttgtggttgtgtggagttcgtcatcagatggtaggtttggtatgagctggcagaactgtttgtagagtactgcactaatttccttttggcttatttatgttagggaagcagctttagaagatcattgtgcgcttgtacagaggtcttaactgttaagctgctaagtgttatgtatccttgccagtagtgagtgttatccttgtattgtagtattactaatgtatagcacgtttctggattggttctgacttcattgttgtttgagcaacgtaccttctttttaccatgttttgttgatttttgttaaactttcaactgattcagaaaatggagcatattgcaacaaaaaaggtgaaaaaaagtctgaaacaagaggacatcacaaattcacaatgttgttcagtttaccaggactcatgtgttcagacaccaaacgttcatgacagacatgtttggacatgattaatgtggttgatgactttgaagccaaatggttgttggttgatggtgaattaccgaaccacatttcttggtgttcccgcaagtgtcctcaggcgcttcaacaaatggttgctccgttgtaaggaccagcgagcaatggataaggaatagaacaatcgttccaacaaatggctagcaagaccagtgaagcacggtgtggcgggcttggctggcggaaggggaagcattcaaaggagagatgtcgtccgtacctacctccttttcgtattcggtgcagccacaagggctcgtgaattccatgctctattaaattggaaaaattccttttcatctaagtagaaggatcctgtattttttactagaaattctgttctcttgaagggctagtttgggaacctaatttttccaaaggatttctatttttccaagagaaattagttcattttccattagaaaaatataaatctcttgaaaaatggtattctcaaactagcccgaaaagtttttatttggggaaaaccaaaataaaa

SEQ ID NO: 138370 - DNA, 2595 bp, Zea Mays
cgctatccaccccactgctggctgtccctgccctcgggttccacgcagaggaagtgaatcacccattgcacttttccgcgcggaggaaggtgaatcactcattccactcccaaacctcccgaaaaccctcgtcgtcttcctcccaaatcactcactcgcttgatctctcctctccgaacccggcaacccctagaactagggttccagcgacccaatgacggacggcagcgacgagtacaagcgcgacgagtcggtgatcctgctggtcatcgtctccctcgccgcgctctcgctcctatccctcatcgccgccttcgcctactactgctacattacgcgcaaggtctcccgccgccttcagtcactccatctccccaaacgttccagctctcctcctcctcctcctcctccccgggctctgccgccgccgcaacagcaggggaaggacagcccgttcagcagctccgccagcgatggggccgctgcggcggcggcggcgatgtcggttgtggttgctggggagaggggcgtgcaggtgttcagctaccgtcagctccacgcggccatgggcgggttcggccgggcgcacatggttgggcagggcagcttcgggaccgtgtaccgcggggtgctccccgacgggaggaaggtcgcggtcaagctcatggaccgcccagggaagcagggcgaagaggagttcgagatggaggtggagttgctgagtaggctccgatcgccgtatttattgggccttattggccattgttcagaaggtgggcaccgtctactggtatacgagttcatggccaatgggggtctacatgagcatctctacccaaccagaggttcctgtggtggaatctcaaaattggactgggacacaagaatgagaattgcacttgaggcagccaaaggtttggaatatcttcatgagcgtgttaatccacctgttatacatagagacttcaagagtagcaatattctcctggacaaggacttccatgcaagagtttcagactttggtctagccaaacttggatctgatagagctggtggccatgtctcaactcgagttttgggcacacaaggctatgttgcaccagaatacgcattgactgggcatttgactaccaaatcagatgtgtacagctacggtgttgtgcttttggaattacttactggcagagtaccagttgatatgaagaggcctcctggagaaggtgttttagtaaactgggcattgcctatgctcactgaccgagaaaaagttgtgcggatcttggatccagcattggaaggtcaatactccttgaaagatgctgtccaagtggctgctattgctgccatgtgtgttcaaccagaggctgactacaggccattaatggctgatgttgtccaatcgctggttccacttgtcaagaaccgttctaatcagaaagcttgcaaccccaacgtgcaatcgtccaagccacttgactaggaaagcgtgtgttcgatctgcagtttgtgctcgtctttctggaacccttctcgtctataactaactatggctgagacagatattcacaagctcctaaactatgattttgtctgcgggtgctcttctgattttgtaggtccgtctgagcaggtaggttgtctgaacggtcctgagagcttatttgggtttgaagggaagtttctgtcatgtacaattagctgcccgcggtgatggtgggttgttggattagtacttgtggttgtgtggagttcgtcatcagatggtaggtttggtatgagctggcagaactgtttgtagagtactgcactaatttccttttggcttatttatgttagggaagcagctttagaagatcattgtgcgcttgtacagaggtcttaactgttaagctgctaagtgttatgtatccttgccagtagtgagtgttatccttgtattgtagtattactaatgtatagcacgtttctggattggttctgacttcattgttgtttgagcaacgtaccttctttttaccatgttttgttgatttttgttaaactttcaactgattcagaaaatggagcatattgcaacaaaaaaggtgaaaaaaagtctgaaacaagaggacatcacaaattcacaatgttgttcagtttaccaggactcatgtgttcagacaccaaacgttcatgacagacatgtttggacatgattaatgtggttgatgactttgaagccaaatggttgttggttgatggtgaattaccgaaccacatttcttggtgttcccgcaagtgtcctcaggcgcttcaacaaatggttgctccgttgtaaggaccagcgagcaatggataaggaatagaacaatcgttccaacaaatggctagcaagaccagtgaagcacggtgtggcgggcttggctggcggaaggggaagcattcaaaggagagatgtcgtccgtacctacctccttttcgtattcggtgcagccacaagggctcgtgaattccatgctctattaaattggaaaaattccttttcatctaagtagaaggatcctgtattttttactagaaattctgttctcttgaagggctagtttgggaacctaa

SEQ ID NO: 138371 - DNA, 614 bp, Zea Mays
ctcgtctctcacaactacgagactagcagttcttcagcaccaacacaaacggtgtaactagctaccttataacaactagctagtctctctcgatagacatctaactagcttaccaacaagctagctaggctctctttcagggtcccttatatggcttccgcacacaaaatcgtgttcgtgcttctcttgctgacagcatcgtcgtcgtccatgctgcaagccaggacgatggcgccaagtcatgaccgccagcatgcacaaacagatcatcaagcggcagcgcacgccaaggagagggagagcttaccgagcccttcttcccagcaactgaccagagatacggcgccgtcgacgacgccgccacccgcaccgcctgctagcaacactgaggtcgccgtcgccgtcgccaagggtggggaggcgatggcgcagtcggccgccgacgggtctgtgcccagccccggcataggccatcacaaaatgctacaataatctgcgccaaacaaaattgtagtgtctatgtatccatatatatagatacaaaataaaagctagacgtaccttctctctatctatatatattttgcgctcgaattatatgcataacgtgtacg

SEQ ID NO: 138372 - DNA, 1902 bp, Zea Mays
gcagtttgtggataagggtcttttaagtcttcatatgaaactatccttttgatatacagctgaaggacaataactatcatggatgctactgcaaattcagatgtgcaaagggctgaggaatttaaacttaaggcgaatgatgccttcaaggcaaacaagttctcgcaggctatagagctttacagtcaagccattgagctgaatagttcaaatgcagtttactgggcaaaccgtgcatttgcacacacaaaattagaggaatacggaagtgctgtgcaggatgctacaaaagccatcgaaattgattctagatattcaaaaggttattatagacgaggcgcagcttatcttgccatgggaaagttcaaggaagccctgaaggattttcagcaggttaaaaaaatctgcccaaatgatccagatgctacaagaaagttgaaagagtgcgagaaagctgtccaaaagatccgttttgaagaagcaatatctgctggggatgatgagaggcggtccgtggcagactctattgactaccatatcatagaagtagagccacattatgcgggaccgagaattgatggggaagaaataacgatagagtttgtcaaagcaatgttggatgaatttaagaagcagaaatgcatacataaaagatatgcttaccagattgtgctaaaaaccttggatttgctgcgatcgatgccttcccttgttgatgtggatgttccaaacggtggacattttacagtttgcggtgatgtgcatggccagtactttgatttgctcaacatatttgacctcaatggccttccatcagaagaaaatccttacctcttcaatggcgattttgtggaccgaggatctttctccgttgaagtcatactcaccctttttgctttcaagtgcctctacccaaaagctatgtaccttgcaagaggaaatcatgaaagcaagagcatgaacaaaatatatggctttgagggggaagtgaggtcaaagctgggtgagaagtttgttgaactttttgctgaagtcttttgttggttacctcttgcccatgtcatcaacaacaaggtctttgtggttcatggagggctatttagtgttgatggggttaagctttcagacattaggtccattgatcgtttttgtgaaccacctgaagaaggtctaatgtgtgaattactatggagtgaccctcagcctcagcttggaagaggtccaagtaaacgtggtgttgctctttcctttggcgcagatgtgactaagaagtttttacaggaaaataacctggatcttattgtccggtctcatgaagtaaaggatgaaggccatgaaattgaacatgatggaaagcttataacagtcttctctgcgcctaattactgtgaccagatgggcaacaagggtgcatttattcgcttcacagctccagaaatgaaaccagatattgttactttctcagctgtggtgtatcttgcagccacatcctgatgtgaagccgatggcatatgcaaataacttcctcaggatgtttcaatgacggaatataacaacattgtttagcaatttttatcagatgagtctgttgtgtgtcagctcccaaatcacatttcttggctaggtttaagtatatgctcccttgtacaacaaatcaaatgatgcaagggattcaactgtcgatttacttggatggtacatccatttttgtgcacgagttgtgattcttgtaactatccgtaaagtcttagatcattagattttagtttacttgtaaaattgctaaatcgtcatttcctgtcttgcttatcagtgagttacacacgtttagtgcttttatcaaattacatgtgtttcagcggtacaattcctaatatctgagtaatccttccattttaaccc

SEQ ID NO: 138373 - DNA, 1989 bp, Zea Mays
tgtaggcctgagtgcattacaattcgcgggtgcatcttttgaaatgctggctcagtgcaatggtctactgtcatgaaactatggatcataagtttcatgaaaagtttgtggataagggtcttttaagtcttcatatgaaactatccttttgatatacagctgaaggacaataactatcatggatgctactgcaaattcagatgtgcaaagggctgaggaatttaaacttaaggcgaatgatgccttcaaggcaaacaagttctcgcaggctatagagctttacagtcaagccattgagctgaatagttcaaatgcagtttactgggcaaaccgtgcatttgcacacacaaaattagaggaatacggaagtgctgtgcaggatgctacaaaagccatcgaaattgattctagatattcaaaaggttattatagacgaggcgcagcttatcttgccatgggaaagttcaaggaagccctgaaggattttcagcaggttaaaaaaatctgcccaaatgatccagatgctacaagaaagttgaaagagtgcgagaaagctgtccaaaagatccgttttgaagaagcaatatctgctggggatgatgagaggcggtccgtggcagactctattgactaccatatcatagaagtagagccacattatgcgggaccgagaattgatggggaagaaataacgatagagtttgtcaaagcaatgttggatgaatttaagaagcagaaatgcatacataaaagatatgcttaccagattgtgctaaaaaccttggatttgctgcgatcgatgccttcccttgttgatgtggatgttccaaacggtggacattttacagtttgcggtgatgtgcatggccagtactttgatttgctcaacatatttgacctcaatggccttccatcagaagaaaatccttacctcttcaatggcgattttgtggaccgaggatctttctccgttgaagtcatactcaccctttttgctttcaagtgcctctacccaaaagctatgtaccttgcaagaggaaatcatgaaagcaagagcatgaacaaaatatatggctttgagggggaagtgaggtcaaagctgggtgagaagtttgttgaactttttgctgaagtcttttgttggttacctcttgcccatgtcatcaacaacaaggtctttgtggttcatggagggctatttagtgttgatggggttaagctttcagacattaggtccattgatcgtttttgtgaaccacctgaagaaggtctaatgtgtgaattactatggagtgaccctcagcctcagcttggaagaggtccaagtaaacgtggtgttgctctttcctttggcgcagatgtgactaagaagtttttacaggaaaataacctggatcttattgtccggtctcatgaagtaaaggatgaaggccatgaaattgaacatgatggaaagcttataacagtcttctctgcgcctaattactgtgaccagatgggcaacaagggtgcatttattcgcttcacagctccagaaatgaaaccagatattgttactttctcagctgtgccacatcctgatgtgaagccgatggcatatgcaaataacttcctcaggatgtttcaatgacggaatataacaacattgtttagcaatttttatcagatgagtctgttgtgtgtcagctcccaaatcacatttcttggctaggtttaagtatatgctcccttgtacaacaaatcaaatgatgcaagggattcaactgtcgatttacttggatggtacatccatttttgtgcacgagttgtgattcttgtaactatccgtaaagtcttagatcattagattttagtttacttgtaaaattgctaaatcgtcatttcctgtcttgcttatcagtgagttacacacgtttagtgcttttatcaaattacatgtgtttcagcggtacaattcctaatatctgagtaatccttccattttaaccc

SEQ ID NO: 138374 - DNA, 79 bp, Zea Mays
acataattttgcgaggtcggcttcctgctgctttgctactggtttatcttgacacggctactgtctgctctgctactgg

SEQ ID NO: 138375 - DNA, 447 bp, Zea Mays
atgccaggttccgacgatgtgctgccaggatcaacaccacccaccacctccaccgtcgccacaactattgatgcgagggctgctgccaccaacccaatttcacaggcggacttcatggcattccatcagctaatgatgcagcagttcgccgccctcaccgccgccatcagtggcatgttcaacatgccatccaccaccaccaccatctttcccttcccatctgccacgacactcgttccatcgccgatctctgcctttgtgccatcagcgtcaaccatacctgtacccatccaacagatcgccttcccacactctccatccttgatccccagctttcccgaggatgctcttcctacacaccatcaccctgctgcaggcgccatcaccaccaccaccacttccacaaattatccttccccacgttcgacgggaaagatgatcccgtga

SEQ ID NO: 138376 - DNA, 902 bp, Zea Mays
gccagctcgcgagctgaactggctcgctcttttattgagccagaaaaaaactccgctcgaccttgttctaagcacagtttctggatcggaggagcatccccgcctaggtctctgcagccatggttcgcggatcgctcggcaagcttgcatcgcgcgccctctccgtcgccgggagatggcagcaccagcagctccgccgcctcaacatccacgagtaccagggcgcatagttgatgggtaaatacgggatcaacgtgcccaggggcgcggcggctgggtccgtacatgaggtcaaggacgccttgaagaacatgttccccagcgagaaagagatagttgttaaaagtcaaatccttgctggtggccgagggctgggaactttcaaaagcggattgcaaagtggtgtccatattgttaaggctgaggaagctgaattgattgcaagtaaaatgttaggccagattctgataacgaaacaaactggtccagagggaaagattgtgagcaaggtctacttgtgtgagaaactatctcttacaaatgagatgtactttgccatcacccttgataggaaaactgctggtccgctcattattgcttgcagcaggggaggaaaacactatagttgacctcaatgttcaaaggatggccagggctacatcatcttgttgttgacgggttccgtgtgttcaatcgccgagcagaaagccaggaacagaacttaggcgttggcgattggcatctccctcccctaagccatggccaccgggcggcccgtacgactcgtgctggatgcctccctcctcctcgacccctcctccaccagggaggcggcggcggtggctctgcggcccggggtagaggagctgttgcggcggttgcgctactccaacctgactgtg

SEQ ID NO: 138377 - DNA, 1063 bp, Zea Mays
gccagctcgcgagctgaactggctcgctcttttattgagccagaaaaaaactccgctcgaccttgttctaagcacagtttctggatcggaggagcatccccgcctaggtctctgcagccatggttcgcggatcgctcggcaagcttgcatcgcgcgccctctccgtcgccgggagatggcagcaccagcagctccgccgcctcaacatccacgagtaccagggcgcatagttgatgggtaaatacgggatcaacgtgcccaggggcgcggcggctgggtccgtacatgaggtcaaggacgccttgaagaacatgttccccagcgagaaagagatagttgttaaaagtcaaatccttgctggtggccgagggctgggaactttcaaaagcggattgcaaagtggtgtccatattgttaaggctgaggaagctgaattgattgcaagtaaaatgttaggccagattctgataacgaaacaaactggtccagagggaaagattgtgagcaaggtctacttgtgtgagaaactatctcttacaaatgagatgtactttgccatcacccttgataggaaaactgctggtccggtatgccatttatctcaaatattactttgctgttcattttataatttctattagtgggcttttcttgtattttttaaataagtcagtgcattgtggtgattaacagtcaaagtaacttaatgcacatcgtcaatctcctttttctgaaatggttgtatattttgtgaagtttttttaaccctcatttctgattgcccatttcagctcattattgcttgcagcaggggaggaaaacactatagttgacctcaatgttcaaaggatggccaggtatttctttttttcctgtctctattcaactgttgtcgcatagctaatcttgaactacggattgcgacagccattagaatccagttatatatactttgctgcagtgagcagccaattggccatagaccgaacaatctcatgttcatgatgaaaaagaaaaaaaatgagggatttagagttttggaacccaatttgtttttaccttt

SEQ ID NO: 138378 - DNA, 1056 bp, Zea Mays
ctgcctttggcaaccaccccgccccaaaatctctttctccgctgcgctgcaaacccaccgcttccaccatcgccactcgtcaccccttgctcccatagtccccataccatgcccgacctccacccgccggagcaccaagtcgccggtcaccgcgcctccgccagcaagctgggcccgctcatcgacggctccggcctcttctacaagccgctccaggccggcgaccgtggggagcacgaggtcgccttctatgaggcgttctccgcccacgccgccgtcccggcccgcatccgagacaccttcttcccccggttccacggcacgcgactcctccccaccgaggcgcagcccggggagccgcatccgcacctcgtcctcgacgacctcctcgcggggtttgaggcgccctgcgtcgcagacatcaagatcggcgccatcacgtggccaccgagttcgccggagccctacatcgccaagtacctcgccaaggaccgcgggaccacgagcgttctgctcggattccgcgtcttgcgtccgagtcgtcggccccgagggcgccgtgtggcggacggagcgcccggaggtgaaggctatggacaccgtcggcgtccgccgcgtgctccggcgctacgtgtcatccgcttgccgacgaggggatggactgcgcgctcgcggcggcggtgtacggaggaaaaggtggagtcttgtcacagctgcgcgagctcaaggcatggttggaggagcagactctgttccacttctactcggcgtcgattcttctgggctatgatgctgctgcagtcgcagcaggcggaggtgggggtggggtaacagtgaagctggtggactttgcccatgtggccgagggtgatggggtgattgaccacaacttcctgggcgagctctgctagctgatcaagttcgtttctgacattgttccagagactccttagacgcagcctttgggtccttcttaagagaggatcctgacatttttgatttgataacaaaggtaatgctcacccttgatatattaattgctctttttgtttgtta

SEQ ID NO: 138379 - DNA, 110 bp, Zea Mays
caccagcgtggtagagtctgctcaacaccaaacttcgacgactgcgccggccgtcggccgtcgctgccgccctattttgaccccatcgccggcgacgataatcgccaggt

SEQ ID NO: 138380 - DNA, 99 bp, Zea Mays
ctcggaacgccgacactacttctccacagatcaaccccaaacaaaacccatatcaaaagtactcaaagattctccagaaaaccacaagagaaggaaaaa

SEQ ID NO: 138381 - DNA, 1287 bp, Zea Mays
actcagaagctgcccagagctaccacccttcttatccccacccctcctcctcctaccttttctccttcagacctcaaaatctgtgtgtctcctgccgcggctagctgataggaacaagagcatgcacatccgagaagaggaggctacaccatccacagtaacaggcatcatgtcgaccctgacttcggcggggcagcagaagctgaaggagcccatatcccctggtggcggctccgcgtcggtcgctgggtccgctgcggagaggaacaacggcggcaggggcaagggcaagactgagatcaagcgcatcgagaacacgaccaacaggcaggtcaccttctgcaagcgccgcaacggcctcctcaagaaggcgtacgagctctccgtgctctgcgacgccgaggtcgcgctcatcgtcttctccagccgcggccgcctctacgagtacgccaacaacagcgtgaagggcaccattgagaggtacaagaaggcaaccagtgacaactccagcgcagctggtacgattgcagaggtcaccattcagcattacaagcaggaatctgctaggctgaggcagcagatcgttaacttgcagaactccaacagggccctgataggtgattctatcacaaccatgagccacaaggaacttaagcacttggagactaggttagacaaagctctcggaaagattagagcaaaaaagaacgatgtgctgtgttctgaagtcgagtacatgcagagaagggaaatggagttgcagaatgacaacttgtacttaaggagccgggttgatgagaatgaaagggcacaacagacagcgaacatgatgggggcaccatcgacaagtgagtatcagcagcacggttttactccttatgatccaataaggagcttcctgcagttcaacatcgtgcagcagcctcagttctattctcagcaggaggaccggaaagacttcaacgaccaaggtggaagataaatattggacctctcaagcttcagtacttatccgtgatgatgcatgactgccagtgagaaactgagctacattactgtggaattatatgtaaagactagtactactgcttcatatatgtgcatgtgcgcacacgcgcacgtagtatgcacaatttcatcccactattatggcttggcaccaactatgtctccttaattatcataggagaaaaataagtcacgcacaaaaaaattctaaagatgaggcgcagtgttggatgactgaaactgaaagataggattctcgtggatggcggtggtcatata

SEQ ID NO: 138382 - DNA, 1969 bp, Zea Mays
atagccggccggacgccactctatcccggccgtcggccgcggttcaggctctccttccattagaagcactcttctagtttagactttataatagaggcgctgaggcctcacccttttccctggtgttgcaagttgcaacacacagcgtccggcgagatcggcgatcagaaaccacgagcccacccaccatccggaacgcgcgcgatgtgtcccatcagaggtggtggttgttcttggccagcgtccgtcgtcggctctgccacggcggcgctgctcctcgccgccgtcatcgtgcggctcttcgtcccccgtgcctgttcttcaggaattatcaaggggcggcggcaggtaggtgctggtgctgccggaggagcacggctccctgccggctcgctcgggtggccgctcctcggcgagacgctggcgttcatccgggccgcgtactcgcctcgcccggagtccttcgtcgagaaacgccgcgtcttgtacgggaaggtgttcaagtcgcacctgtgggggtcgccggcggtggtgagctcggacccggaggtgagccgcgcggtgctgcaggccgacgcgtcggcgttcgttccatggtacccgcgatcgctcatggagctgatggggcaatcgtccatcctagtgctcggcggcggcctccagcgccgggtgcacggcctcgcgggcgccttcttcaagtcgccgcagctcaaggcgcaggtcaccctggacatgcagcgccgcgtcggccgcgccatggacatgtggggcaggcggcgccatcggagcatgggcgacgacagcggtggtatgcccgtgcgtgtgcagaacgaggccaagtcgattgtgttcgaaatcctagtgagggcgctgatagggttagaggaaggggacaagatgcagtacctcaggcaacagtttcaagaattcattgccggtttgatatcacttccggttaagcttccggggactcaactctatagatccctcaaggctaagaagaggatgacaaagttgataaaaacgatcatccaagagaagaggaagaagatgatgtcggaaggcgacgatctgcgtggtgggactcatccacgtgatatgatcgacgtcctgctaggcaacggcaacgacgagctcaccgacgagctgatatctgacaacatgatcgacttcatgatccctgcagaggactccgtgcccgtgctcatcacgctggccgtcaagtacctcagcgaatgcccacaggctctgcagcaactcgaggaggagaacatggagctcaagaggcagaaatcaggcgcgggagaaaccctagaatggacagactacatgtcgctcgccttcacacagcacgtgatcacggagacgctgcggatgggcaacatcatcaacgggatcatgcggaaggcggtgcgagacgtggaggtgagaggccacctggtcccgaagggctggcgcgtcctcgtctacttccgcgccgtccacctcgacgccgccgtccacgacgacccgcacgccttcaacccctggaggtggaaggagaggcccgacgtcgtggccatgagcggcggcggcggcggcggcttcaccccgttcggcggcggccagaggctgtgccctgggctcgacctggcaaggctcgaggcctccatctttctgcaccatctcgtcaccaatttcaggtgggtggcggaggaggacaccgtcgtcaacttccccacagtgcggctcaagcgagggatgccaatcgcagtgacgcccagaacctgctgaacgcaacgcaacttgccaggcaaaaccatactatacatttatactcaactaaagaggtgtgagaaataatacagtacatgcatgcatgtaatggagggcgaaattaaaagttggcacggcaaagaagctgctggtatgccaaaagttcagtttgcaaattatatagtttaattactattacactagggagacccta

SEQ ID NO: 138383 - DNA, 678 bp, Zea Mays
atgttggacaagtgggagccgtcgtcgttgcaaatgctagagtacagccccaacgacaaggacatgtgggagccggatctgaggggtggcagcggcgggggtgagagacgagcgcgcgccgcaacaggtgctgtggaacgtgacgtagaggaagaggactccgactcgccgtcgtcggagatgtcagtggatgagcccaacagcggggttctcggtttcttgatttgcagcacccagtttcttggggatcaccaggtgcggccacacgcggccaacagtggcgctgggtcaccacgagcaggtggtccacgaccatggttatcgatgacggcgcagggtaactgtgagcagcagctggccagccacacagtgcccacaacttgcaagatgttgaacgcgtcaacaatgtttagaagactccatgacaaatctattgagaagacagaaaaaggctatctagaaatattagtggaaggtgctcagaattgtattaagaaaggagaaaaatatagctacaaaaccagttgtttggagggaaataaatatgtggaatacaactacatgaactctcaagggaacctagcccgcgcccactcgagtcgatcaactgagctgtgtagcttgggttggggtacacttgttttgcactttgttagctgtgggtaccctttgagctga

SEQ ID NO: 138384 - DNA, 966 bp, Zea Mays
gatctcgccatggatggttgcagagctgtccttactggagacatgcaatgtcacgaggcgacgatgagcagctgcgactctgatcatcttcaccgcgagaggggagagcaaggcttgatcagctcgcagcttcagcagcagctggaacagatctacatgctgatggacatggagctagagcatgagctgcacctgcaccacaacgtgccaccgcagggctgtagccagcggcagctgtcgtcgccgttcctgcctttcgccgtcagctccgatgtgacctcgtcgcccgtgctcacgtcgtcgagcaccacaaccttttgtcaacagccagccgaggcctcaccctcacccctggacacgccattttccccactcccctacagctactctgacacgatcccggacctggaagagatcatgagccgaccacggcacaaggacggccatgcggagtccggcaccagtgcattcaggcagtacgtccggcacctccgccccaagaagaagctaaagcagggcggctgcgggcagagggcgatcaagacggccatgtcggtcttggcgagaatgcacagctctaggctttcccagtggcagaggcagatctcctcgacggagatggcggcggcagtgccgtccgacgagagcaaaaacatccagcttctgcacgtccggtcggagcgcaagcgccgtgagaagattaacgacagcttcgaggctctcaagaatgcgttgcccccttcctgctgcaagcgagataaaacatccatactgatgagggcaagggactacataaactctctcaagtccagggtgtctgagcttgaggagaacggcaagagtaaattagacatacatgtgccatttaaatttaaagcatgtgatgacaacaatttcgtgaagcagtctgtgtctgtgatacagactgtcaaatgcacgatgcagtcagagatagagacaccctaa

SEQ ID NO: 138385 - DNA, 856 bp, Zea Mays
aatggtcccagaaaaaaaaatacatggtgatgtctatgcattactacttagttactttgtcttcccttttttttcctttaatttcttttttccttcacttcttctactgtgctgcttccttttcttacttcaattactaatggagacactaccacatttctcccaacaggcacaattcaagaacctttcagcagttctaatggcatctttcttcgccatcacaacaccggcaggaatagctgctggggcaggcatgaccacattctacaatcccaatagcccaagggcccttgtggtcgagggcattcttgactcggtatctgctggcattctcatatacatgtcactagtggatctcattgctgtagatttcttgggtggaaagatgacagggaccctgcgacagcaagtgatggcatacatcgcattgttcctcggtgcgctctctatgtcatcacttgcaatatgggcttgagacatgaccttgattaaatatcagataaaaggtgaagcagtgtccatataaaatttctggggtatatgtacagttttaatgtgtagtatcttgttgtatggtagcttccttcgggatcatcataggataacatgcactgtttttcaagggcatgaaaaaaacaccgctgatgtactcaagggtgaactatgtggtttctttaagcgatgagcaagcaatgatatgtttgactgccgctgaatgactgcatgcactgctgtaatggttgtgtcaattgtgggtgtggctggtcttggcatttcagtatctgcaaagtgtaatggttgggtagtcttctgtcaaatatgaaatattgacaacgttgatttgatctgcagcaaa

SEQ ID NO: 138386 - DNA, 1749 bp, Zea Mays
catcccctctcttttccgctctttcccctgcgacttcaacctctctcaatctcctctccttgtccactggcttgggcgtgcctttgcgtgcgacgggagctaggaatccacggcatcggaaaagtggccgcctgaagaaccgatttctccaagattttgttgtccgtcctatcgcttgcaggatcggattcgccgtctctggccatggttctcgccggcctccgccggcacgtcggccagttcttgaccagcagtaatgagcttatggcggcgtcgctctcggccgtgagctgcgcggacgaggtgcagaaggcggagggggcggggtgccgtgacgacgccgcggcgctgcggctcaagaaggtggccatggcggcgatactggtggccggggtgctcggggtggtcctgccgctcgcggggcggaagcggcgcgcgctgcgcacggacagcgccgcgttcctggcggccaaggcgttcgccgccggggtcatcctggccacggggttcgtccacatgcttcacgacgccgagcacgcgctgtccagcccgtgcctccccgccgcgccgtggcgacggttcccagtgcccgggttcgtcgccatggccgctgcgctagccacgctggtgctcgacttccttgccaccaggttctacgaggccaagcatcgcgacgaggccgcgcgcgtcaaggcggcggcggccgccgcactggttgcgacctcctctgggagcgacgaggacatcacggtggtcaccgtcgatgaggacgagcgcaaggccccgctgttgcaaacgcactgccatggacacggtcacagccacagccacagccatgtgcatgagccggtgcaggtagagggtagcgaggcggaggtgtcggcacatgtgcgctccattgtcgtgtcacagatactggagatggggattgtgtcacactctgtgatcatcggattgtcactgggagtgtcgcggagcccatgcacaatcaggccacttgtcgcagcacttgcattccaccagttcttcgaggggtttgcactaggtgggtgcattgctcaggcacaattcaagaacctttcagcagttctaatggcatctttcttcgccatcacaacaccggcaggaatagctgctggggcaggcatgaccacattctacaatcccaatagcccaagggcccttgtggtcgagggcattcttgactcggtatctgctggcattctcatatacatgtcactagtggatctcattgctgtagatttcttgggtggaaagatgacagggaccctgcgacagcaagtgatggcatacatcgcattgttcctcggtgcgctctctatgtcatcacttgcaatatgggcttgagacatgaccttgattaaatatcagataaaaggtgaagcagtgtccatataaaatttctggggtatatgtacagttttaatgtgtagtatcttgttgtatggtagcttccttcgggatcatcataggataacatgcactgtttttcaagggcatgaaaaaaacaccgctgatgtactcaagggtgaactatgtggtttctttaagcgatgagcaagcaatgatatgtttgactgccgctgaatgactgcatgcactgctgtaatggttgtgtcaattgtgggtgtggctggtcttggcatttcagtatctgcaaagtgtaatggttgggtagtcttctgtcaaatatgaaatattgacaacgttgatttgatctgcagcaaa

SEQ ID NO: 138387 - DNA, 800 bp, Zea Mays
ccggatcttgacggcgaccacgctaccaggcactgacgccgtgaactagttagtcatagccccccccctgaaatcccagtctcccaagtcccaaccaaggagccttgtgcccatcccatccgtcgtcgtctggacatgcagggaggtgtgagctgcgtcggcgggcggctgggcctgaccatcgacccggctggcgacggggaggcccccgcggagcgcgtggggcggttggtccgcgagagccccgtggtgatcttcgcctggcgcgggtgctgcatgtgccacgtgatgcggcagctgctggcggccgtgggcgcgcacgcgacggtgatcgagctggaggaggccgccgaggaggccgcggcgtcggccgccgccgccgccgccgtgccggcgctgttcgtgggcggcgcgcccgtgggcgggctggacgggctcatggggctccacctcagcggcctcctagtcccgcggctccgggaggtcggcgcgctctgcggctaggccgggccggggcggcgtcgtcacttgctggtggtctggtctctctgtcgatacacgggtacggtacgttacgttacgtaatttaggggaagctgaggggggttggagcgaaatggccgtgtgacgtttgtatacagacgtcgttgctagttctgtctgtgctttgctttgctgtgtggcgctggggccgggtgaggtggttggctaaagttgaagacctatgtgagaaatgcctgggtgtaactgtaattaatacgtttgtcctgcacgagtttgttaactgcgtccctggttct

SEQ ID NO: 138388 - DNA, 703 bp, Zea Mays
ctagttagtcatagccccccccctgaaatcccagtctcccaagtcccaaccaaggagccttgtgcccatcccatccgtcgtcgtctggacatgcagggaggtgtgagctgcgtcggcgggcggctgggcctgaccatcgacccggctggcgacggggaggcccccgcggagcgcgtggggcggttggtccgcgagagccccgtggtgatcttcgcctggcgcgggtgctgcatgtgccacgtgatgcggcagctgctggcggccgtgggcgcgcacgcgacggcgtcggccgccgccgccgccgccgtgccggcgctgttcgtgggcggcgcgcccgtgggcgggctggacgggctcatggggctccacctcagcggcctcctagtcccgcggctccgggaggtcggcgcgctctgcggctaggccgggccggggcggcgtcgtcacttgctggtggtctggtctctctgtcgatacacgggtacggtacgttacgttacgtaatttaggggaagctgaggggggttggagcgaaatggccgtgtgacgtttgtatacagacgtcgttgctagttctgtctgtgctttgctttgctgtgtggcgctggggccgggtgaggtggttggctaaagttgaagacctatgtgagaaatgcctgggtgtaactgtaattaatacgtttgtcctgcacgagtttgttaa

SEQ ID NO: 138389 - DNA, 897 bp, Zea Mays
atggttttgctgcccctgcccctctcccacgcgtacatcatggttctactgcccctctcccactcttatcgccatgttcctcgccccctgcccgctctcccgattcaaggaaacatgatggaatccacgcctgccacgggggacagggaagcaatctccacgatcatcgcccccgccttgaatcgcgcttggatccccttccatccttggcgccattggcccttccatccttggcgtccaacgtgtactgagttcgagtgtactgagttcaagggtattggtgggcggtggtacatctgcggcgggcacaccctacactgcagcaagctctaccgcatcctggacggactcttcctacagtaccccattgcgacaaggccatcaaccagaacaaagatctttctagagaaccatattgttgattcagaaatttctcttacaaccactattattttgcgaaatttcttgtggatggtgaccactaccaagtctggatggccgaccgatgtacatagagaggccagggatggtgtcccggagtttgagagagctttcagggagaggttctctgcctgcacattagctgctaagaggcatattgactccactaccatcttcaacgtccaaggtgtgaagcacaaagagattagtaaagtcgagaaggacatagttctcaggtgtgttcttatgtttactttacattcgagaaggacattctatttgaagctcaacttatcgtgtaaattggtttcaaagcacagcgagtattgtgatgtttggtattttcgttcttcacaccccttcgccaaggccatcaatggcgccgcgctgcagctcttcagcttcgccgagaccatcagcatcggtcgcccccctagaaactcttcaagatcatag

SEQ ID NO: 138390 - DNA, 2029 bp, Zea Mays
caccgaatcgaaggccaacacggcaactctcgcacagagaagaggcaaggagagagagagagagagagagcagccagtcgtcgaaggctcgtagccctagaagctccaatggcggactccgaagacgcgccgccagccgtgcaccgccgcccaccgcgccccgctcgcggtgctgctgcagcccagggcttcgcggccgcgttgcgccgccggctgagatccggcgctgcggtggcggcacgcgccagctttgccgcagactccggggacgagtctggccccggcgagccctcttcgtctcgccgccgcgacaacagcgggggcgcctcgtccgccgccggcggccgggccggggcaggggacttctccgcgttcaccttccgcgccgcggcgcctgtccaccggaaagccaaggagagccctctgagctccgacgccatcttcaagcagagtcatgcaggccttttcaacctatgtattgttgttctggttgcggtgaatagcaggctcattattgagaacctgatgaagtatggcttattaataagatctggcttttggtttaatgctacatcattgcgagactggccactgctaatgtgttgccttagtctacccatatttccccttggtgcatttgcagtcgaaaagttggcattcaacaatctcattagtgatcctgctactacctgttttcacatcctttttacaacatttgaaattgtatatccagtgctcgtgattcttaagtgtgattctgcagttttatcaggctttgtgttgatgtttattgcctgcattgtttggctgaagcttgtatcttttgcacatacaaaccatgatataagaaaactgatcacaagcggcaagaaggttgataatgaactgaccgcggctggcatagataatttacaagctccaactcttgggagtctaacatacttcatgatggctccgacactctgttatcagccaagttatcctcgaacaccttatgttagaaaaggttggctggtccgtcaagttattctatacttgatatttactggtctccaaggattcattattgagcaatacataaatcctattgttgtgaactctcaacatccattgatgggaggattactgaatgctgtagagactgttttgaagctctcattaccaaatgtctacctgtggctttgcatgttttattgccttttccatctgtggttaaacatacttgctgagattcttcgatttggtgaccgagaattctacaaagactggtggaatgcaaagacaattgatgagtactggagaaaatggaacatgcctgtgcataaatggattgttcgtcatatatatttcccttgcatgcgaaatggtatatcaaaggaagttgctgtttttatatcgttctttgtttctgctgtacttcatgagttatgtgttgctgttccctgccacatactcaagttctgggctttcttaggaatcatgcttcagattcccctcatcatattgacatcatacctcaaaaataaattcagtgacacaatggttggcaatatgatcttttggttttttttctgcatatacgggcagccaatgtgtgttctattgtattaccatgatgtgatgaaccggactgagaaggcaaaataaccatctgtagatcttttttggtgtttcatttcttccatcatggaaactgaaagcaataatctgtgcacacagtaaaccagcatcgtgtcttccagttttttttgttgttgttggaatctatcctagatctttatcatgtgtatggtggataacctcatgtcaccatcgtatctgtatacaataagcctaaatcagctgacgttctatatgtaaattagtaaatgtaatgactaattagtgcccccctttctgcactaccagatctacttttctcgtaatatttaatattaaaacaatcacaccacacattctactgcctggtgatgatgttatataacatttggtatcacgagcggaatctaagcatgtctgtaatctgata

SEQ ID NO: 138391 - DNA, 2099 bp, Zea Mays
caccgaatcgaaggccaacacggcaactctcgcacagagaagaggcaaggagagagagagagagagagagcagccagtcgtcgaaggctcgtagccctagaagctccaatggcggactccgaagacgcgccgccagccgtgcaccgccgcccaccgcgccccgctcgcggtgctgctgcagcccagggcttcgcggccgcgttgcgccgccggctgagatccggcgctgcggtggcggcacgcgccagctttgccgcagactccggggacgagtctggccccggcgagccctcttcgtctcgccgccgcgacaacagcgggggcgcctcgtccgccgccggcggccgggccggggcaggggacttctccgcgttcaccttccgcgccgcggcgcctgtccaccggaaagccaaggagagccctctgagctccgacgccatcttcaagcagagtcatgcaggccttttcaacctatgtattgttgttctggttgcggtgaatagcaggctcattattgagaacctgatgaagtatggcttattaataagatctggcttttggtttaatgctacatcattgcgagactggccactgctaatgtgttgccttagtctacccatatttccccttggtgcatttgcagtcgaaaagttggcattcaacaatctcattagtgatcctgctactacctgttttcacatcctttttacaacatttgaaattgtatatccagtgctcgtgattcttaagtgtgattctgcagttttatcaggctttgtgttgatgtttattgcctgcattgtttggctgaagcttgtatcttttgcacatacaaaccatgatataagaaaactgatcacaagcggcaagaaggttgataatgaactgaccgcggctggcatagataatttacaagctccaactcttgggagtctaacatacttcatgatggctccgacactctgttatcagccaagttatcctcgaacaccttatgttagaaaaggttggctggtccgtcaagttattctatacttgatatttactggtctccaaggattcattattgagcaatacataaatcctattgttgtgaactctcaacatccattgatgggaggattactgaatgctgtagagactgttttgaagctctcattaccaaatgtctacctgtggctttgcatgttttattgccttttccatctgtggttaaacatacttgctgagattcttcgatttggtgaccgagaattctacaaagactggtggaatgcaaagacaattgatgagtactggagaaaatggaacatgcctgtgcataaatggattgttcgtcatatatatttcccttgcatgcgaaatggtatatcaaaggaagttgctgtttttatatcgttctttgtttctgctgtacttcatgaggtaacttatttaccttttcactcttcatctgctatattaattatatagttctctattttcaaatgtgtcctttcgagtttcgacatgcttttgttcaaacttaccagctgcagattacttggatgaagtgctctatataaaattaaatatttcataatccagtccctttcgagaaaattatgatacattttgtttgcaattgtacaccagttatgtgttgctgttccctgccacatactcaagttctgggctttcttaggaatcatgcttcagattcccctcatcatattgacatcatacctcaaaaataaattcagtgacacaatggttggcaatatgatcttttggttttttttctgcatatacgggcagccaatgtgtgttctattgtattaccatgatgtgatgaaccggactgagaaggcaaaataaccatctgtagatcttttttggtgtttcatttcttccatcatggaaactgaaagcaataatctgtgcacacagtaaaccagcatcgtgtcttccagttttttttgttgttgttggaatctatcctagatctttatcatgtgtatggtggataacctcatgtcaccatcgtatctgtatacaataagcctaaatcagctgacgttctatatgtaaattagtaaatgtaatgactaattagtgcc

SEQ ID NO: 138392 - DNA, 1257 bp, Zea Mays
gcgccaatggcggccccggatcagggctccggtgccacgcccgaggcggcagccgcgctgatgagcacggagacgtcgtacacctgcggcggcgaggagcagcccatgcaccagcaccacgagcgcaagctctcgagcaatgcctccttctcgtccctcgcatcgtcgtcgccgccgccctcgtccgcgtcgtcgtcgcccaactacctgccggcggcgtccaacaagttgtcgtgcgatagcatcccctgcgccggacccgacctcgggaagctctcgtccttctcctccacgtccacctacgagagcttcttccacatcgaggcactcgactcctccgacaacatcgggctcggcaacggcaacgacaacgcgtccgccgcgggcagcaacgagttcctggacttcgagcccacgacgcggcctccggcggcgcagacgatgacgccgcagcagagcaggcagaagaaggccgagggcgccgccgcttacgacccgaagaggctcccgtcgtccatgttccggacgcggtcgacgaaccccgccgaatggagcgccacctccaacggatccctcttcagcatccagctcagcacctccacggacctcaccgcgcagtacgccgacttctactacgacgccgccgggttcccccggttacccaccctagggcgcgacgcggctctggcgctgccgtccttgtcagaatcgtcgtcggagcgcacaggggggctgtgcatgaggcatgactgcgccagatgcagcagcagcagcaagacctggaagtcagtgaggttcgccgccaccgagagcgtctccggagagggcaagcactctgtagttgtctccaccacgatggcggttgcggtggaggaaacggagacggaggctccggcggcgtcggcgtcggcaaccaaggcccctgcagcagggtggtgcgagtccgggtgctgtttgggatcgtcgtcaccgacgatgtgctggcctcgctgctgcggatgccacgaatgtggctgccattgcaaatgctggttttgaatttggcgggaagggatgactgcacgcctgttgtaaatcgaaatgaactttgattgttttgtgctgatgtacagggtgtgctatgtaaatgtatgagtaggcattattagaagattgcacacttttaagattttattaatttctaaagcaatcaatgtataaataatgaataaaccatacattgtaaataagaagcaatacacatagctgattaaattt

SEQ ID NO: 138393 - DNA, 1137 bp, Zea Mays
atggaggcgctggcccgcttctcgggcgcctactggcgcgacctcttcgactcccgcatcgggcgcaccacctggccgtacgggtccggcgtgtggtccaagaaggagttcgtgctccccgagatcgagcccgaccacatcgtctccctgttcgagggcaactcgaacctgttctgggccgagcggctggggcgtgaccacctcggcgggatgaacgacctgtgggtgaagcactgcggcatctcccacacgggctcgttcaaggacctcggcatgaccgtgctggtcagccaggtgaaccgcctccgcgcgccgctgtcgcgccccatcgccggcgtcgggtgcgcgtccacgggggacacctccgccgcgctctccgcctactgcgccgccgcggggatcccggccatcgtcttcctccccgccaaccgcatctcgctggagcagctcatccagcccatcgccaacggcgccaccgtgctctcgctcgacaccgacttcgacgggtgcatgcggctcatcagggagttcgactgggaggtgcccgactgggtgatcgtgcctggaggcaacctgaggaacatatacgcgttctacaaggggttcgagatgtgccgtgtcctcgggctcgtcgaccgcgtgccgcgcctcgtctgcgcgcaggcggccaacgcgaacccgctctacggctactacaagtcaggctgggccgagttccagccgcaggtggccaggccgacgttcgcgtcagcgatccagatcggcgacccggtgtccgtcgaccgggccgtggtcgcgctcaaggcgacggacggcattgtcgaggaggccacggaggaagagctcatgaacgcgatgtcgctggccgaccgcaccgggatgttcgcttgcccgtacaccggggtcgcgctcgccgccctgttcaagctcagggaccagcgcgtcatcgggacgaacgaccgcaccgtggttgtcagcacggctcacggcctcaagttctcgcagtcgaagatcgactaccatgacagcaagatcgaggacatggcttgcaagtactccaacccgcctgtgagcgtgaaggctgactttggcgccgtgatggatgtgctgaagaagaggctcaagggcaagctctga

SEQ ID NO: 138394 - DNA, 1419 bp, Zea Mays
atggctgccgatcgtgcatggatgtacaatagttggagtaggaatggacgtcattatgatgattgggtagccaagaccaaagattttgtggaccacgaagaggaggaggacgaggaggaggtgcaacaccatgaggaggaggacgagcaggcccatgaggaggaggaagtgcaggcccatgaggaggaggaggaggtgggcatagatgctaaggcggatgatgataccaccgaggctcctgtcgttcgacgaaggggcactcggaagggccactttgtcctacctccgtcagtgcctacacaatctgaagctcgagtactgatcatcccggttggtgatagccaatgggaagacacgtcatttgacggtcgaggtcaccatagacatgttaatcaagtcttaggtaacctctgtcgtctacataacccaggaattgtcaccgacccgaaaggtgtggtggttccttgcactagctggtcgcacttcgcactagctccacatgctacatatggaacagctcaaggcgccgtcaagcacgacttttggagacgctatcatgtggaacctgaggctcaagagcatgcagaccgagtattagacaaaaatgcaaagaaggtgtgcagggatgcattttccaatgctcgtctacaggttgtgaacgcgtacatgaaacgccgaggtcattctatcaacaactttcgacagcattcggatgtctacttgactgtagaccagtacatggaggtaactcttccatggatggaacaccgaccgcaggcttacaaggctttgtgtgagatatgggcttcgcccgagtggattgagaagtcaaacagaaatcgacataggcagcgccatcagcaggacgagaacaatgatgaggtcgtagtcaaccatacctatggggctgatggacacattcggttggctaagcgaatggagacatacgggcaggagatggttaagaagtatggagaagaatacgattggcgaggagcgcctaccatcgacgctgaagttgtgcattcacttggaggcaaggcgcatggacgatattttatgtttaccggtgttatcgattcgacggagttgcgttctcgtggcggctcttcgtcgcaggcgggctatggtagtagcagacgtagtcgccgctctgtatctagcatggaggaagctatgagggagcagcaagaaaagtttcgtgaagagctgcggcaacaacaaatggcattcctccaacagcaatcagagtacatggctgcttacaacgcacaggcgcaacaagcaataaactcttggtttccacagcacgcccggcagcaaccatttgttttccctcagtttcagccccctctgcctctgtggggattacatgctccaccacctctacctccacctcaggttcttcaatttagttaa

SEQ ID NO: 138395 - DNA, 841 bp, Zea Mays
atatttcatgaccggtgtggttttttgatcttctgtgacaggctctcagctacccctacatgggccacggcaatgggacctccattcaaaatggaccaacaactggagaaaggaaccatgcagggctcctaccagatcaataccccggccagttgctgaaccataataacaacactggagcacggcagcctgcagcagtcggccagcctgatgagcagcagcagcagcagggtggtgctaataataatgacgagacgaagaaggacctgaggagccgggggctgtgcctcgtcccggtgtcatgcacgtcgcacttcggaggggacaacgccgctgactactgggctccggcgccgctcggtgggatcctccgctagagcgagcgcgccattgaagcatgcatatgcgttttctcgtttagatgtggcgagctagctgctgttcgttccgtacaagtatatgttcgtcaggctgctgcagggtagctagctagagagagctgtgtctaattaagaatcatcgcaagggtggcgtgcatgcatatatatgctgctggttgctgtgggaaacataccatcatgagcagtcattcttggtaggggagaagctgcgtgcgtcgtatacctgtaaggctgattgctcttgatgctatgcgagtaagtatgacgaccctttttgtgggcgcgcaaggcttcattaattattttgtatcttcaagggagggcgcttcaagtagaagatctagatcttctctggtcccctgtcgcaaatttatttcgttggtcatgtatatgtaattaaaatctagcaataagttattagtgaacatgtttatttactc

SEQ ID NO: 138396 - DNA, 2217 bp, Zea Mays
gaggaggatggggtatgcatgtatagagagtgagagagagagagaaagaaagtttccggaggaaagcgagggaaagttcacaaataaaggagtgaagcaaaaggaaacggaaaacaaaacaaaacaaagcccagattcctctctccgaacagcgcctatgttttttttttcttcagccccccccccccccccccccccccccccctcacctcttcttcttctgctggtatctatcgttgttgttcccttcgttctctctccatctatctccctcagattacttgcgaccagcgacgctctggctggcccctttgagattgacctggggcttccatacaccaagagtgcagcaagaggatagatagcatttgttgcagcgctctctaggtcgtctctctctctctctagctagctagcgtcgtctcctccggtgaggtgatgaacagaggagaattccagacctcccttgtccagcagatgatctggagcggcggcggcggcggcaataccacagcggcaggcagcagcaacatcatgagcagcggcttcaagcagtcttgccatgaggatcaacaagaggcctcccgcaacctgcagctgctgccctccctatcgtctccgtcgtcgctgctcttctccaatgcccagcagttcccgcacaccacctcttcgggccagcagctagcccacaccaacgccggcggcgcagcagctggttctctcccaagtctggacgacgacggcggcagcggtcaggacagccacatgccggaatcgtggagccagatgcttctaggggagttcgctggagagcgctacgccgccaccgcatgtctgctgtcaaagggcgtagaggactggggggatcacgctgcggcagctgcaagcgcgtgcatggtgggtggcggcggcggcgtggaggaggagggctcggccgccatgcctctgtacagcttatatggtggtggtagtcacagtcacagccacctcgctgcagctggtgaccatgagatgccgccggcgccagcagcagcagcagcaggggccaataagtctcagctgagccagatgctcctcgcctcgtcgcctaggtcctgcgtcaccaccagcctcggcagcaacatgctcgacttctccaacaacggcgtgcccccggcgcccgatcagctgaagagccaccaccaccatcaatccgataactcatccgagtgcaacagcaccgtaacaggttcggccatcaagaagcctagggttcaggcctcctcttcagcacaatctactctaaaggtgaggaaggagagactgggtgacagaataactgccctacaccagatcgtttctccgtttggcaagactgacacggcgtccgtcctgcaagagaccattggctatatcagattcctactgggacaaattgaggctctcagctacccctacatgggccacggcaatgggacctccattcaaaatggaccaacaactggagaaaggaaccatgcagggctcctaccagatcaataccccggccagttgctgaaccataataacaacactggagcacggcagcctgcagcagtcggccagcctgatgagcagcagcagcagcagggtggtgctaataataatgacgagacgaagaaggacctgaggagccgggggctgtgcctcgtcccggtgtcatgcacgtcgcacttcggaggggacaacgccgctgactactgggctccggcgccgctcggtgggatcctccgctagagcgagcgcgccattgaagcatgcatatgcgttttctcgtttagatgtggcgagctagctgctgttcgttccgtacaagtatatgttcgtcaggctgctgcagggtagctagctagagagagctgtgtctaattaagaatcatcgcaagggtggcgtgcatgcatatatatgctgctggttgctgtgggaaacataccatcatgagcagtcattcttggtaggggagaagctgcgtgcgtcgtatacctgtaaggctgattgctcttgatgctatgcgagtaagtatgacgaccctttttgtgggcgcgcaaggcttcattaattattttgtatcttcaagggagggcgcttcaagtagaagatctagatcttctctggtcccctgtcgcaaatttatttcgttggtcatgtatatgtaattaaaatctagcaataagttattagtgaacatgtttatttac

SEQ ID NO: 138397 - DNA, 667 bp, Zea Mays
ctccatctatctccctcagattacttgcgaccagcgacgctctggctggcccctttgagattgacctggggcttccatacaccaagagtgcagcaagaggatagatagcatttgttgcagcgctctctaggtcgtctctctctctctctagctagctagcgtcgtctcctccggtgaggtgatgaacagaggagaattccagacctcccttgtccagcagatgatctggagcggcggcggcggcggcaataccacagcggcaggcagcagcaacatcatgagcagcggcttcaagcagtcttgccatgaggatcaacaagaggcctcccgcaacctgcagctgctgccctccctatcgtctccgtcgtcgctgctcttctccaatgcccagcagttcccgcacaccacctcttcgggccagcagctagcccacaccaacgccggcggcgcagcagctggttctctcccaagtctggacgacgacggcggcagcggtcaggacagccacatgccggaatcgtggagccagatgcttctgtaatcacctgatcttcctcttgcttctctatcacatcgatctccttctcctgcctgctaaggggttgtttctaaatgtttaagattgatttattattcatccaacagatccacagctacaaataaaaca

SEQ ID NO: 138398 - DNA, 776 bp, Zea Mays
aatataatgatgcgcagttctcttgcgtgttcgagaaaaaaaaatctctattactttcactagtgacccacaccccacacaaactgagctagccacaggcacagttcatatgctgcatattggtttgaatggaacatttataaaataactattgatatttttcttcagtatacgattgcgatgatgggatatggtccagaagacaaaaatgctgtattggagttgacctacaactatggggtgaaggaatatgataagggaaatgcttatgcacagattgctattagtactgatgatgtctacaaaactgcggaagcaattagagtaaatggtggacaaattactcgtgaacctggcccattacctggcatcaccaccaagataactgcatgcacagatccagatggctggaaaacagtgtttgtcgataacatagattttctgaaggagttggaagaatgagctttgctagagatctcaacttggtacatcaagctccatacggttgcaccccgtgagttccatgcatgacctgcaaaatctttgtaaagccacagcctcaaactgaggattgtagataggtcgtccaatctacggcatcatcgcaattgatagttgatagagcattagattttccttgcagatctatatagatgcgcaaccgtttttgtattatgcattttaatgcataagttcaatggaaatgattcatgggtaagaaaatcgtcttctttcaagcggcaatataagggctggtttggtgacttgaatagcaa

SEQ ID NO: 138399 - DNA, 1458 bp, Zea Mays
aggcacactgatggccccgccagatccaagccgcgacccagacggcaagatagagcgagcgacctctcgattctccccatcccgccgtgcttcccgtcttcaccaaatccttcgccacgatggcgcgcctgctcatccccctccccttcgccgccgcctctgcctcatcgctccacctcgccgtctcccgccttcctctcgccgcggtctccgccgcgcgtcgcgagtgtctctttgggggaagggtggtaggaggagtggtgagggcgcccgcgaggctttctaagcgcgggttgtgcgccggcgcagaggctggcgactcggccgtcacggtggaggccatggaatgggtcaagaaggacaggaggcgcctgctccacgtcgtctaccgcgtcggggacctcgacaagacgatcaagttctacacggagtgcctgggcatgaaactgttgaggaagagggacattcccgaggagaggtacaccaatgcctttctggggtacgggcctgaggattcacattttgttgtggagctcacttacaattatggtgtggagagctataacatcgggactggttttggccactttggaattgctgttgaggatgttgcaaaaacagtggaacttattaaagcaaaaggaggaacagtcacaagggagccaggccctgtcaaaggtgggaaatcagtaattgcctttattgaggatcctgatggttacaagtttgagcttatagaaagagggcctactcccgagcctttgtgccagaagtcgctgattcattttgtaatattacaaaggcatttggcatggaacttcttcgcaagcgagacaattctgagtacaagtatacgattgcgatgatgggatatggtccagaagacaaaaatgctgtattggagttgacctacaactatggggtgaaggaatatgataagggaaatgcttatgcacagattgctattagtactgatgatgtctacaaaactgcggaagcaattagagtaaatggtggacaaattactcgtgaacctggcccattacctggcatcaccaccaagataactgcatgcacagatccagatggctggaaaacagtgtttgtcgataacatagattttctgaaggagttggaagaatgagctttgctagagatctcaacttggtacatcaagctccatacggttgcaccccgtgagttccatgcatgacctgcaaaatctttgtaaagccacagcctcaaactgaggattgtagataggtcgtccaatctacggcatcatcgcaattgatagttgatagagcattagattttccttgcagatctatatagatgcgcaaccgtttttgtattatgcattttaatgcataagttcaatggaaatgattcatgggtaagaaaatcgtcttctttcaagcggcaatataagggctggtttggtgacttgaatagcaa

SEQ ID NO: 138400 - DNA, 1477 bp, Zea Mays
aggcacactgatggccccgccagatccaagccgcgacccagacggcaagatagagcgagcgacctctcgattctccccatcccgccgtgcttcccgtcttcaccaaatccttcgccacgatggcgcgcctgctcatccccctccccttcgccgccgcctctgcctcatcgctccacctcgccgtctcccgccttcctctcgccgcggtctccgccgcgcgtcgcgagtgtctctttgggggaagggtggtaggaggagtggtgagggcgcccgcgaggctttctaagcgcgggttgtgcgccggcgcagaggctggcgactcggccgtcacggtggaggccatggaatgggtcaagaaggacaggaggcgcctgctccacgtcgtctaccgcgtcggggacctcgacaagacgatcaagttctacacggagtgcctgggcatgaaactgttgaggaagagggacattcccgaggagaggtacaccaatgcctttctggggtacgggcctgaggattcacattttgttgtggagctcacttacaattatggtgtggagagctataacatcgggactggttttggccactttggaattgctgttgaggatgttgcaaaaacagtggaacttattaaagcaaaaggaggaacagtcacaagggagccaggccctgtcaaaggtgggaaatcagtaattgcctttattgaggatcctgatggttacaagtttgagcttatagaaagagggcctactcccgagcctttgtgccaggtaatgcttcgagtgggagatcttgatcgtgctataaatttctatgagaaggcatttggcatggaacttcttcgcaagcgagacaattctgagtacaagtatacgattgcgatgatgggatatggtccagaagacaaaaatgctgtattggagttgacctacaactatggggtgaaggaatatgataagggaaatgcttatgcacagattgctattagtactgatgatgtctacaaaactgcggaagcaattagagtaaatggtggacaaattactcgtgaacctggcccattacctggcatcaccaccaagataactgcatgcacagatccagatggctggaaaacagtgtttgtcgataacatagattttctgaaggagttggaagaatgagctttgctagagatctcaacttggtacatcaagctccatacggttgcaccccgtgagttccatgcatgacctgcaaaatctttgtaaagccacagcctcaaactgaggattgtagataggtcgtccaatctacggcatcatcgcaattgatagttgatagagcattagattttccttgcagatctatatagatgcgcaaccgtttttgtattatgcattttaatgcataagttcaatggaaatgattcatgggtaagaaaatcgtcttctttcaagcggcaatataagggctggtttggtgacttgaatagcaa

SEQ ID NO: 138401 - DNA, 502 bp, Zea Mays
ggtatcgtggatgatgagttcatgttggagattcaccatggtgggttctttcttggtcatggtgctctgaggatttatgttgatggaaaagtatcttggattgatgacgttgaggttgatacatggtctccggtgtagtttgttgacttcatagaaaagcttgggtatgagaaaaaccaggatgtgaaggtgtattgattattacttgggaaggatttaccagatggacttagagtcatgtgtagtgattcagacatgaatagcatggtatctatcgtgagcagggaaaattttgtggtttactttgatcatgatgacattgtaggtgagctggtatgggatgactttgtagccaatccagttgcccagcttcctagggtcacttaaataccacaatgtttttcttcctttcactatatctcgtttgcgaggaatctccacaacttggagtctctcgcccttacaaaagatgatcacaaatgaacacggaagtaaggatggg

SEQ ID NO: 138402 - DNA, 543 bp, Zea Mays
tcagtttccgccgttgagccggtcgacctcagcaagctccggactgcccttgcgcacagcttcgtcgtcgtatctgtcttctgcggtgctaggttcttcacacatgacagggaaagggagggggagggacagagattcttgggcttggagatcggtctcgatcttcagggtgagcggcgccttgtcggattcgggcgcgccgtctccgacctcgggctcaccgcatccgtccatgacattgtggtacatccattactacagaggagaggaattggccaaaagatagtgaacaaaattacaagggtacttcatagcagaggtatatatgacatctctgcgttatgtacagcaaaggagaggcccttttttgaagcttgtggatttggtgatgatatgatgggttcaacaacaatgttgtatactagaaaaacacagaaatagagttcattaaaaagttctcaattggtataatgttatttgttgatatgataactcatctgttggtcttcactgctgatgtttcaaagcattactctcagaaaa

SEQ ID NO: 138403 - DNA, 737 bp, Zea Mays
cgcgcacctcacaaccctcgcgctcttctctccgactccaaaccccttcggtccgaagtccagcaaacacagagctagagccccaccacccatctccatctccatggatccggccctcgtggaccctgcccacctgcaggcccttatgctcgcctgcggccactcttgcacgctccgcctctcgccggcgctatcagtttccgccgttgagccggtcgacctcagcaagctccggactgcccttgcgcacagcttcgtcgtcgtatctgtcttctgcggtgctaggttcttcacacatgacagggaaagggagggggagggacagagattcttgggcttggagatcggtctcgatcttcagggtgagcggcgccttgtcggattcgggcgcgccgtctccgacctcgggctcaccgcatccgtccatgacattgtggtaatgttctctttcgcagtgaatttgcccgtggtagcgaaccctgattgtgtgggtagaaactattaactgtgtgaaaccttatttttctattctgttcttgttaacctcattggcattaacacattttccatctgtcatttcttgcaaaagaattgatcttttttttttggaatctgtgaagagacattgctactgggctagaggaagtgtttatttgattgaataccatggaacattaacaaaaacaagggcaaggttgtttcggttagcagattgtggattgtggcttttaggttgt

SEQ ID NO: 138404 - DNA, 363 bp, Zea Mays
atggaggggattggtggctgcggtggtggggtatcagcgatggcagtggaggggaccagcagcggagatgagcgcaccgccctgccctaccggcccggcatcggcgtgaagtgcggcacctggtgcctcatgcggtcgcagagcggcttactcatgcctgacacgcctttacccgcacacgccggcgtcatggacactgcgttccactcgaggcactgcactcagcggcgcggctcgacggagaggccgaggctgtttccggcaggtggtccgtgggcgcccaaccttttatctttggagatggtgagcggcgactgtgacatggcggcggcagcgggttacggtggcaccgccttgacttag

SEQ ID NO: 138405 - DNA, 840 bp, Zea Mays
cattccgaatgattcttgcaaaattcagaatgattagtacctttgtgtgtcaaaaaaacataaacagaaggcaggcttcatgagtacctttgtgtgttccctctagaaagcttcatcagcaacaacagtaccatttgcccggccaagacccgtttgtttgttgagccacaaccaaaaactatagagacgcttctactgatcccatttatttttcaactgagttttagaatgtcttaaaccagttcttagataatacttctcagttatgacatggtagcctctggtagtcatgaagccattaaccctattactagcctttatttgctcaacacaaaggtcacataatgtagtattgttgtatggatctgtctaatttgccttgtcaaatgtatcacccatctaccatatgaaaaagcagagcaaacatgaatgtccaataaaaatacatagtgcaaacatccaccaatctttttcattttttaagacacaagcaaatagttcacacgagcagtgcaatgtctacagacttgctagttgctagcacagttacctcgacaacgatggcaaggatgcattgaacagtagagtttttctatggatgccaacgaaaaaacattatctaatgcacagagaaaatatagttgcaatgcagatcgtactacttaatgatgacaactgttctatggatgccaacgaaaaaacattatttaatacaacaaagtttttctatggatgccacccgtactacctaatgttgcaatgcagcagagttttcaaacataatgatgccaagccagccactgttttctcccatggtacggatgcagagttttggtgctg

SEQ ID NO: 138406 - DNA, 574 bp, Zea Mays
acatcacagcagcaacagccgaaacagcaacagcctacctcttcgtgaatcgtgtcccttcccttggctgcagctgcaggatccaagcaacgcggaaggagggaggtgagcaccatgtcggcgctgttcaacttcaactccttcctgaccgtggtgttgctggtgatctgcacctgctcctacatcaagatgcagttcccggcaatcctcaacgaccgcaccggattccgtggtttcttttggaaagctgccaggataggtgagcgattgagcccttgggtatcagtcgggtgcttggctatgggaatatccactattttcttctaaggccgaagttttaatctccacaaatttagtctaggacgcagcaccttgtttcacttgtagagaaaaaaaaaactattgtaagcattttgcttcagtttttaatggtgggcactgtaagatctgtatctgcactgagatttctgatattaacaaaaatgttttctcataagatttctgagaaaaaaaaaactttgtagaccttgtagctgtttgaagagtggtaattgatgaactgctgagagaaaaa

SEQ ID NO: 138407 - DNA, 1163 bp, Zea Mays
agccgttaaagatttatcgggtttaaatcaaattaaaccgtgtcaaaattactgtctacatcgtatacatcgctaagacaattgggatccaaaatatctgtgatttttcggttaaataaattaaaaagaaaaagaaaaatatctcctactccttcacgctcatcacaatcttatctcctccacgtatctacttcagcttccatcgcgtagctcccagtgcctggcttcctcacgcacgcagtgcacgtctcccgcggcgcgtggacaggtggtgggacacgcagtccgcggccgccgtgcgggatgatatgctcgagttttcttatcttccagcgaacggatgactttatttcctccccagcgcatcgcgttcttccctgtctcccatgggtgccgagcttttccctgagctccctgccctggccgccgtgccctctgttcctccagctctgcgtcgcgcagcttcttcccagttcgcccatctccctcggctctctcaagttcgccgtgcctctgttatttacggccgtcgctctcccagcccggccggatctcccagcgtcgcgccctgctgtcctcccattcccatggtcggcgctccgttttcctctgccggctgagtctcctcgacatggagctgttaggatgtgtcctctacactagccggttaacagtaaccggggtagggttaatcctaaccgtctaaccgcgcccctgatcggggggctatcctaaccgttggttgcagcccccggtcacacgacgccatataaatagattaagggggccgacgggtttagccaacgctaatcgctcgaccacaaaccctaatcaacactttgagaggaaccgatcccctaggcgctcggagtgacttgaatcgctgtgactatgtctcagatccccgttatcccatcgggatctgagattccccctgcaggcaacattggaggagctgatccaccgccgatcaacgacgggaaccaatctcctcgacaccagcagggagatcgacaagaaggaggaggcgggtcttcgctgcaagacgccgccgcaatgatggctaggaacaacaacgacggtatgttaacctatacccctcagtagaatagatctactcatcatcgaggtattttagacacggattggtattctagggactt

SEQ ID NO: 138408 - DNA, 90 bp, Zea Mays
gtcaaccctattttagcgcatgttggaccattaagcaatacactgcctttgtattctcaacctagacccaaaaaaaccccaccataaaaa

SEQ ID NO: 138409 - DNA, 1401 bp, Zea Mays
gaattcattgccaacgtcgcgtcgcgtcgcgttaatgtgcaggagggcaaccaccagctacccctctctcttactgcttcgaacttgtctctccatattccttcccgcacgcccacatagaaacagaagttcacacacgaacaatactactactactataaatacaggagaatgttttgccgcatgtttttcattttaatttagtgcacgatttgttgcatcgtagccaactagcaacgacaacccagctagtgattcggttgccgccatggcttatttgctcaagagcaggagtaaaccagtgcagcagctgctggtacccgcgtcttcagaagaacagcagagaagggtaaatgaggtccgggagctccttggcgatctgccgacagagatgccgaacttcctttctgatgccactatccgccggttcctccgagcaagaaactggagtacgatgaaagctaccaagagcctcaaagaagctaccagttggcgacgtcagtacaagccagagaaaattcgttgggaaagcattgccgacagtgagaatgaggctaggagagcctacatacctgactaccttgacaagaaaggaagaatggtcttcgtaacacttccaacaataaagtccaaatcttcagagaaggatcatctaaagtatctagtgtacaacttggaaaacctgctcatcgattgtgcagatgcagaagaggataacgttgtttggatctcggatttcaaaggctggtcaatatcaagcacaccattttcgttgacccgacaatcgctgcacataattcaacaatattatccaggattgatagcagttggtattctaaccaacgctcccaaaatttttgaatccttttggaagataatgaaacatttcctcgagccaaaaatggacgaaaaagtgaaatttgtgtacaacgacagttcggagagccagaagatactgggcgacatgttcgacctggacgagctggagcatatatttggaggaagaaacacggccgactttgacatcaatgtgtatgcagagagaatgaaacggcgagatcggatacggggagcttcgacagaggataatggcgaggccacctcttcccgatgttggacgaagaccacgagaaactccagttctgtttgaagagcgcagtaccactaatctggacgaaggttgaaactttagtgttatcctatatactgtatatgctctgagccacgcgagcgcggttatatgataaaactgcttagcatttatagttatgaacacaaagagtgttaactttaaggatctgcgactcgactcctaaaagaatgtaaaggctagttcggaagtttgagaaataaacctagggttcgaaaaatctttcataaataactaaatatcttattcaa

SEQ ID NO: 138410 - DNA, 1511 bp, Zea Mays
gaattcattgccaacgtcgcgtcgcgtcgcgttaatgtgcaggagggcaaccaccagctacccctctctcttactgcttcgaacttgtctctccatattccttcccgcacgcccacatagaaacagaagttcacacacgaacaatactactactactataaatacaggagaatgttttgccgcatgtttttcattttaatttagtgcacgatttgttgcatcgtagccaactagcaacgacaacccagctagtgattcggttgccgccatggcttatttgctcaagagcaggagtaaaccagtgcagcagctgctggtacccgcgtcttcagaagaacagcagagaagggtaaatgaggtccgggagctccttggcgatctgccgacagagatgccgaacttcctttctgatgccactatccgccggttcctccgagcaagaaactggagtacgatgaaagctaccaagagcctcaaagaagctaccagttggcgacgtcagtacaagccagagaaaattcgttgggtgcgtatctaaatcttacagcctttagttgctgcaaaaaaggcttttatgaattatttcatcttatggtagaacaacccatgcatgtttctgcttggaatcaattgtaggaaagcattgccgacagtgagaatgaggctaggagagcctacatacctgactaccttgacaagaaaggaagaatggtcttcgtaacacttccaacaataaagtccaaatcttcagagaaggatcatctaaagtatctagtgtacaacttggaaaacctgctcatcgattgtgcagatgcagaagaggataacgttgtttggatctcggatttcaaaggctggtcaatatcaagcacaccattttcgttgacccgacaatcgctgcacataattcaacaatattatccaggattgatagcagttggtattctaaccaacgctcccaaaatttttgaatccttttggaagataatgaaacatttcctcgagccaaaaatggacgaaaaagtgaaatttgtgtacaacgacagttcggagagccagaagatactgggcgacatgttcgacctggacgagctggagcatatatttggaggaagaaacacggccgactttgacatcaatgtgtatgcagagagaatgaaacggcgagatcggatacggggagcttcgacagaggataatggcgaggccacctcttcccgatgttggacgaagaccacgagaaactccagttctgtttgaagagcgcagtaccactaatctggacgaaggttgaaactttagtgttatcctatatactgtatatgctctgagccacgcgagcgcggttatatgataaaactgcttagcatttatagttatgaacacaaagagtgttaactttaaggatctgcgactcgactcctaaaagaatgtaaaggctagttcggaagtttgagaaataaacctagggttcgaaaaatctttcataaataactaaatatcttattcaa

SEQ ID NO: 138411 - DNA, 1827 bp, Zea Mays
attcttctccgtcctggacaccacacacacacagcttccctctcttccattcttccattagccatccagtcaacaagtcgtgcgcagcgcagtggcaagagctagctaggagattgatccggcctagttctgttcagcatgaggaaggtgtgcgccaacccagacagagaggtcggcctcgacacagtgctcgaggtgcccgtcccggaccagctccaccacgatccgtcgtcgtcgtcgtcgggccacggccggcgccggcgacgcacgctcaaggcgtgggtgcggtcgcgcatggaccagcgccaccggcggcacagctcgccgccttcccaggcggacgtgcagctcatgctcggggtggtcggcgcgccgctggtgccgcagccagtgcaggcgaggaaggccatggtggccggagaggacatcaaggaagagccccttgaggtgtccaaggcgaagtacatcgtggagcagtacgtcgcggcgtctgggggcgagcgggcgctgagcgcggcgacgagcatgtacgcggtggggaaggtgctgatgaggacgaggtcgtcgtcgacgacgaccaagcaggggcagaaagcccgcaggacgggaatggtgggcgtggtccacggcggcgccgagatcgccggcggcctcgtgctgtggcagaaggggccggaggtgtggtgcgtggagatggtggtggccggcggcaccaagatgagcgccgggagcgacggcagagtcgcctggcgccagacgccctggcagcaggctcacgcttcgcgggggcccccgagacctctccgtcgatgcgtccagggtcttaacccgagatcaacggcgaacctgttctcgacagccacgtgggtcggcgagaagagcgtcgacggcgacgactgcttcgtgctccgcgtcgacgccgacccgctggccctgcgcgcccggagcggcgacgacgtcgaggtcgtcaggcacgccgtgtgggggtacttcagccagaggacggggctgctgtcccgcctcgaggacagccacctgctgcgcgtccgcgcgacgaagggctcgccgctggcccagacgaccacgtactgggagacttccatggactcgtccatcggcgactaccgcgccgtcgacggcatcaacgtcgcgcacgccggccgcaccgtcgtctcgctgtcccggttcggcggcagcaccaacgacgacagcgctggatccgaatcggccggcgtgctcggcaggaggacgtgcacgtgcatggaggagaattggagcatcgaggaggtcgacttcaacgtcgtgggcctgtccgcggagtgcttcttgcctcctagagacatggtagtagtaccttgcagtcctaaaccagtcgacgatgagaaggggcagtgtggccgccttgaccacagctgcaagaaagacgacgctccagctgcacttgacgtcaggaacaagaacggtaatggcggtgccggtggtgtccatcgtcctgcgacggcaagaaaggctcttgtaacggcggcgacagggctaccctggtccgggactgccaaggttgtggccgtcgaaaccttcgacaccaccgctgagtaattagtattattactttgtatatgctgcgtagttacggaggcgtgcgcgtgttgcgcgccccgtacgtgacgtctggtagctggcaagaacagtaccctgtagtttcattttgctatgtatagtgcacagtacgagatatgcgtagaacccatgaacctttttctcctctggagttctactgtttttccataacctgcaagaatacatatgctgtacggtaagaattaatgt

SEQ ID NO: 138412 - DNA, 369 bp, Zea Mays
atggtgtcaagggcctgtgcgtcgtgggcgccatcaacaactgtacctcccagctccccacctatgggagatcttctcccccataatgtaatgtcgctactctgctactcgtatgtgcatgctccaattctgtttggaggagcttccattgagggcatattattttttttccttttgagttgtccatcgatcgttgtttggtcctataaaagggaaaaggagcatttttatacgctcattttacaaatgtacttgtgtttatcaatttttaaaataaggtggacgaattgtacctttgtagtttcttcttcagtatcagatttggaagcatgttatttagaatcagatttgagagtatgttggttgtaa

SEQ ID NO: 138413 - DNA, 512 bp, Zea Mays
ttatttttttaatctcagtatgcaccaacatttttgggattttctgtagatatcaatatatgatttacgcatgtcttctcctctgagagttaaggatcacatgtatggtagcccaatattaaatatcaaatggcaccagacacttaattctaccgaacctaaactgatcactgctgataagcacatagtgagaatctgggatcctaatacattaccacacatgctgccatctgaaaatgcattttcagctgctgtatctgctctggagtgaatgaaggacatcgtctttggaagtcagacatcacctagagctagggtgtccattcttgacatgtttctcttagtgataggtggatactgtctagctaggaacagagtctcgagggattgatggacgcatgcatcttcaattcctgtgtgttgtattactactggtacaatctccaattcttgtgaacttatgtatttggactatcaatttgtgatatgaacatatatcaatgtgtttgaaa

SEQ ID NO: 138414 - DNA, 166 bp, Zea Mays
ttatttttttaatctcagtatgcaccaacatttttgggattttctgtagatatcaatatatgatttacgcatgtcttctcctctgagagttaaggatcacatgtaagtctctattttctcttgtgaagggttttcacttgttaatctttatcaaaagttagttcca

SEQ ID NO: 138415 - DNA, 1234 bp, Zea Mays
tttgtcgccttagcccttatcagacctgagttcatacagccattaaactgcaatcaaacaatccggtatacctatacattgtagccacattctaattttttaacagctacaatccataaagccaccaaggataattattttgtgcaacatcttgaaattttataaacataaatgtgtactgcagtatcctcatagctggatgttttataaggctcttactttggttcatgttgttcaacattctcagtaagtagcatctcatattgtgcaaagtccatttgccatggaagtacatatcttgcattaatacatctctatgcaaagcaccagtactgaatctcaaattggcaagaaatgattcagtttcctccaaaaatatgcacaaatttccataccgagctacctatacatgtgatgcaggttgcaatttggatttgtgtaactccaaaatggaatccataccaacatgtggacagtgatatcctaagagtggtcaagtttttcatacgagcccatgtaggtaggtttgatgttggcaatcaccagttctcatgcagctgtacaatactagaaacaagctgattgtgttcaacacaccaccatatcaaccatgcagtcttactgcatgttcagcaactagcaaagctcatgataaagactgcctgataaatattagaccatagaacaccttaagattctatacttgatcctcccccaagcttgtcgatccaatttttcatttcaaatatgctactgacaactattcccgtgagatccattcttccaatgacactttaatcttcaactcatgcatacaatgcaagtttccattattcatatcattcaaccaggactgactgttgtaatcttgcagagtagagagtacgttatcactgctttggatgcctcagaataaaaatcttatgaagcttgtacacacatgtacatcgaagtatggttcagacaacatttccgtctttagggcatttctatcgtgctgtagctttcagtgatttctccttttgtcttggatctgacgaacacattcagcaaccaaaacactgaactttagggtgaccttgcctgtaaggggtgggttcaagccaaccttcttataagcttgtgcaatgtttttctggcatttttgcaagtgaatattacagagggagggagctgcagactttatgatcggcctactacaggggataagcccaccttgtagcccactggaaaa

SEQ ID NO: 138416 - DNA, 507 bp, Zea Mays
gggtcgtcttgtgtgtgtctggaagaaaaccatagcagaacgagtgagtgattttttttttggattggtttgtttgtttgcagtggagatacggacgcggtagtccccttgacagcgacaaggtactccatcgacgccttgaaccttccaaccgtcgtcagctggtacccttggtacgacgccaaggagcagaagcagcagcaggaggttggtggatggagccaggtgtacgaggggctgaccctggtgacggtccgaggggcggggcacgaggttcctctccaccgcccgaggcaggcgctcatcctgtttcgccacttcttgcgtgggaaacctatgccgcctaagaacggaactgttgtgtagtagtatttgttttctcggcataattaatgatgcaaaaataatttatcgcgcgccttcagtctaaggccatgtttggattcggtactactaaagtttagttggactaaactttagtgactaaattttagtcactaaaatcta

SEQ ID NO: 138417 - DNA, 1714 bp, Zea Mays
gacatctatatatattgtgtgcatatgcgcttcacgagcaaagtgtccgaagaataacaggaaattaaagcgatatcgtaatccaagaaccggggccatgcccggtcgtaatttcgcaacgacggcggtggccatagcggtcgtcgtcgtagccgcgctagcgtcggcgtcggcgggcgcggacgacgacgagcaagggcacctgcgccgggaagccgaccgcatcgtccggctgcccgggcagcccgacgacggcgtggacttcccgatgtactcagggtacgtgaccgtggacgagggcgcggggcgggcgctgttctactggctgcaggaggcggccgcggaggcgcagccggcgccgctggtgctgtggctgaacggcgggcccgggtgctcgtcggtggcgtacggcgcgtccgaggagctgggcgcgttccgcatccggcccgacggcgccacgctcttcctcaacgcgtaccgctggaacagagcggcgaacatcctgttcttggactcgcccgccggcgtcgggttctcctacaccaacaccacctccgacctctacgactccggcgacaggagaacagctcatgattcgtacaagtttctggcgaggtggttcgagaggttcccgcagtacaagtaccgcgacttctacatcgccggggagagctacgcagggcactacgttccccagctgtcccagatcgtgtaccgcaagaacaagggcgtggagaaaccgatcatgaacttgaaaggcttcatggtcgggaacgcggtgacggacgactaccacgaccaagtgggcacgttcgagtcgtggtggaaccacgggctcatctccgacgccacgtaccggctgctggacgccagctgcgtgcacgacagcggcgagcacccgtcgccgcggtgcaacgccgcctacgacaaggcgacggcggagcagggcgacatcgacccctacagcatctacacgcccacatgcaaccagacgtcgacgtcgtcgtcgtcgtctacgccgaggaggatgaggctcaagggccgctacccatggatgagggggtcttcttatgacccgtgcaccgaaaggcactccaccgtgtactacaaccgcccggaggtgcagcgggctctccacgccaacgtcaccgccggcgccggcggcgccatgaactacacgtgggcgacctgcagtgacaccatcaacaacaactggggagattcacccaagtccgtgctccacatctacaaggaactcattgcagccggactcagaatatgggtcttcagtggagatacggacgcggtagtccccttgacagcgacaaggtactccatcgacgccttgaaccttccaaccgtcgtcagctggtacccttggtacgacgccaaggagcagaagcagcagcaggaggttggtggatggagccaggtgtacgaggggctgaccctggtgacggtccgaggggcggggcacgaggttcctctccaccgcccgaggcaggcgctcatcctgtttcgccacttcttgcgtgggaaacctatgccgcctaagaacggaactgttgtgtagtagtatttgttttctcggcataattaatgatgcaaaaataatttatcgcgcgccttcagtctaaggccatgtttggattcggtactactaaagtttagttggactaaactttagtgactaaattttagtcactaaaatcta

SEQ ID NO: 138418 - DNA, 679 bp, Zea Mays
ttggcttcgtagaccattttctgccgagacgagatggcgatgacatatataaaactttcggtatcaaaatcctgatttttccactatatatgtgatccggtccggccggcttgctgggtcgtcttgtgtgtgtctggaagaaaaccatagcagaacgagtgagtgattttttttttggattggtttgtttgtttgcagtggagatacggacgcggtagtccccttgacagcgacaaggtactccatcgacgccttgaaccttccaaccgtcgtcagctggtacccttggtacgacgccaaggagcaggtgagcttcatcgtcgtcatcgtccctgctagtagtatagctagctctcaacctgccatgcatgccctcgtgtacgttgttctttgtgtgattttgctttggaattgaccagcagaagcagcagcaggaggttggtggatggagccaggtgtacgaggggctgaccctggtgacggtccgaggggcggggcacgaggttcctctccaccgcccgaggcaggcgctcatcctgtttcgccacttcttgcgtgggaaacctatgccgcctaagaacggaactgttgtgtagtagtatttgttttctcggcataattaatgatgcaaaaataatttatcgcgcgccttcagtctaaggccatgtttggattcggt

SEQ ID NO: 138419 - DNA, 435 bp, Zea Mays
atggggagtgagccgcaggcggccgcggtgtggcgagcggagaagagcacgcacggcaggcgcggtgctgatgacgggcacgacgcggagtgccacaagggtcagcacggcagggaggagagcgccgacgctggtgagggagtccgtgccagcgagagtggcgccagggcaggggtcgcgggtgtagaggagtctgccatgagggggaggaacggcggtgcggtggaggtgctacggaactgggagggaggcgaggagtcgcggcatcctgggcggtcgaggaagcaggcgacgcatctccctaggcggtcggggaagcaggcaggtgctgggaatgcgaggcttgacgttgttggcgaggtagaacttgggtgcggtggcaacggccgactggcttctcggtcttggggaaggcatcgccagtcttggccttga

SEQ ID NO: 138420 - DNA, 240 bp, Zea Mays
atcctcctgcagaaagtatgcttgcaagatttaacccatcaaccagatgattggcattccgatgattggtgggccaaatctaatgaaagagtggatggtcaagtccagaaaggcttgaactccattatcatccttgcagcatgggcaatctggaatctccgcaatcgatgtgtaattgatgggatcttgcctagtttgaatggggttttagaggtcatcagggagcagctatatttctgg

SEQ ID NO: 138421 - DNA, 1679 bp, Zea Mays
ggatgcaaacgtatttatattctctccttaattccccatctttctcctccgccttcgcctcctccgcatccctcgccttcctccgcccaagcctctgttctcctccggctgccgaaaccctagccgcctccgccgtcatggcgagcagcaacgtctccaccgtctacatctccgtcatcgatgacgtcatctccaaggtccgcgaggatttcatcacctacggagtcggcgacgccgtcctaaacgagctccaggctctctgggagatgaaaatgctgcactgtggcgcgatctcggggaacatagagcgaaccaaggctgccgcggcttctgccggaggcacctccggcacgacaccgccagtgcacgacctcaacgtgccgtacgaggccacatccgaggagtacgccaccccgaccgctgacatgctgttcccgccgacaccattgcagaccccaatccagactcctttgccagggacagacacagggatgtacaacatacctactggcccttccgattatgccccatcaccgatcagcgatatcaggaacgggatgacgataaatggggcagacccaaaagctggccgtccaagtccttacatgccaccaccttccccttggatgaatcagaggccgctgggtgttgatgtgaatgtcgcttatgtggaaggtcgtgaagatcctgacaggggcgtgcagcctcagccactgactcaggactttttgacgatgtcttctggaaaacgcaagagggatgagtatcctggtcagctcccttctggttcttttgtaccacagcaagatggaagtgctgatcagatagtagaatttgttgtgtcaaaggaaaatgcaaaccaacattggagttccatcatcaacaagcttgaaacaccaaccaagacagtcactcctgttattccgcagtgtgatgggattcaagatgactacaatgatgtattattctaaaactaatgggttcacatagatatttcagtacaaacttactgtgatatttctttttccagcaatttttctttccaggagttccaactgaagattataatacccctggagaatctgctgagtatcgagctcctacacctgctgttggaacaccaaaaccaagaaatgatgctggagatgataatgatgatgacgatgatgatgaagaacctcctcttaatgaagacgacgacgacgacgatgatttagatgaccttgaggaaggggaggatgaacctaacacacaacatcttgtacttgcacaatttgacaaagtgacgaggaccaagaatcgttggaagtgcactttgaaggatggaatcatgcatttgaatggtagggatgttctatttaacaaggcgacaggtgagtttgatttttgactttttggatgaagatgagctattttagaagcagctgtatggacatatcttgtcttagacataaggacggggaggtgacgaagtgttcttggtggggtgctggcagtatgactgcgtcgtgttttcctattgagactttgtttcaccctcttgtttgtcaccgcaattgttatcgctgtaaagaagttaccgcttgtgctgtggacattttctgagatgggtgtctcacatccgcagcgtaactaatgctagttatacatttttgtctctaaagtcagttttggtgctg

SEQ ID NO: 138422 - DNA, 1608 bp, Zea Mays
ggatgcaaacgtatttatattctctccttaattccccatctttctcctccgccttcgcctcctccgcatccctcgccttcctccgcccaagcctctgttctcctccggctgccgaaaccctagccgcctccgccgtcatggcgagcagcaacgtctccaccgtctacatctccgtcatcgatgacgtcatctccaaggtccgcgaggatttcatcacctacggagtcggcgacgccgtcctaaacgagctccaggctctctgggagatgaaaatgctgcactgtggcgcgatctcggggaacatagagcgaaccaaggctgccgcggcttctgccggaggcacctccggcacgacaccgccagtgcacgacctcaacgtgccgtacgaggccacatccgaggagtacgccaccccgaccgctgacatgctgttcccgccgacaccattgcagaccccaatccagactcctttgccagggacagacacagggatgtacaacatacctactggcccttccgattatgccccatcaccgatcagcgatatcaggaacgggatgacgataaatggggcagacccaaaagctggccgtccaagtccttacatgccaccaccttccccttggatgaatcagaggccgctgggtgttgatgtgaatgtcgcttatgtggaaggtcgtgaagatcctgacaggggcgtgcagcctcagccactgactcaggactttttgacgatgtcttctggaaaacgcaagagggatgagtatcctggtcagctcccttctggttcttttgtaccacagcaagatggaagtgctgatcagatagtagaatttgttgtgtcaaaggaaaatgcaaaccaacattggagttccatcatcaacaagcttgaaacaccaaccaagacagtcactcctgttattccgcagtgtgatgggattcaagatgactacaatgatcaatttttctttccaggagttccaactgaagattataatacccctggagaatctgctgagtatcgagctcctacacctgctgttggaacaccaaaaccaagaaatgatgctggagatgataatgatgatgacgatgatgatgaagaacctcctcttaatgaagacgacgacgacgacgatgatttagatgaccttgaggaaggggaggatgaacctaacacacaacatcttgtacttgcacaatttgacaaagtgacgaggaccaagaatcgttggaagtgcactttgaaggatggaatcatgcatttgaatggtagggatgttctatttaacaaggcgacaggtgagtttgatttttgactttttggatgaagatgagctattttagaagcagctgtatggacatatcttgtcttagacataaggacggggaggtgacgaagtgttcttggtggggtgctggcagtatgactgcgtcgtgttttcctattgagactttgtttcaccctcttgtttgtcaccgcaattgttatcgctgtaaagaagttaccgcttgtgctgtggacattttctgagatgggtgtctcacatccgcagcgtaactaatgctagttatacatttttgtctctaaagtcagttttggtgctg

SEQ ID NO: 138423 - DNA, 457 bp, Zea Mays
ggatgcaaacgtatttatattctctccttaattccccatctttctcctccgccttcgcctcctccgcatccctcgccttcctccgcccaagcctctgttctcctccggctgccgaaaccctagccgcctccgccgtcatggcgagcagcaacgtctccaccgtctacatctccgtcatcgatgacgtcatctccaaggtccgcgaggatttcatcacctacggagtcggcgacgccgtcctaaacgagctccaggctgtaagaatctctgatttatcgacccccagctctcgccccttcaattctttcttgatttcagcggttttgatggttctctctccgatccggcggaggaaaccctagctctgggagatgaaaatgctgcactgtggcgcgatctcggggaacatagagcgaaccaaggctgccgcggcttctgccggaggcacctccggcac

SEQ ID NO: 138424 - DNA, 1914 bp, Zea Mays
tccacgccgtcgtcccactcgccgcccaagtcacactcgcccgggggcgagggcggcggcagctccgggccgtccacgtcgctcgtcgtgggcgtggtcgtcggcggcatcgtgctgctgctgctcgccagcttcatctgcctctgctgcctccgtaagaagcgccgccgcgcgccgccgcggcctcagcactacggatacccgccgcctccgcccccgtacaaggaggatccctatggtggaacataccagagttggcagcaaaatgcgcctcctcctccaccccctgaacatgtggtcacgaccctgccagcatatgccaatcctcctcctcagccgccgccaccaccaacagcagcagcgatgctaaatagtagtggtggatctggttctaactactctggtggcgagatcctacctccaccatcccctggtgctgctctcggcttctcaaagagcacattcacctacgaagagttgatgagggcgactgatggattctctgatgctaatctccttggacaaggtggttttgggtatgttcacagaggattgctgcctaatggcaaagagattgctgtaaaacaattgaaacttggaagcggccaaggagagcgtgagttccaggctgaggttgagattatcagccgagtacatcacaaacatcttgtgtctttggttggctattgcatttctggaggcaagaggttgcttgtctatgagttcgtccccaacaacacattggaattccacttacatggtaacgatcgaccaacaatggagtggcccactagattaaagatcgctctgggtgctgccaagggtttagcttatcttcatgaagactgccatccaaagatcatccaccgcgacattaaggcatctaacattcttcttgacttcaaatttgaagctatggttgctgactttggacttgcaaagttcactactgataacaacacccatgtgtcaacaagagtaatgggcacctttgggtatttggcacccgagtatgcagcatctggcaagctcacagaaaaatccgatgtattttctttcggagtcatgcttcttgagcttattactgggcggcgaccaattgacacaacccaaacatatatggatgacagcttggttgactgggcaaggccattactgatgagagcgctcgaggatggtgaatatgatgctttggtggatcctcggctcggaaaggacttcaatcctaacgagatggcaagaatgatagcctgtgcggctgcgtgcgtacgccattccgcacgtcgtcggccacgaatgagtcaggtcgttcgggctctggaaggcgacgtgtctttggaggaccttaatgaaggtgttcgacctggccatagccgcttctttgggtcatatagcagctctgattacgattccgggcagtacaacgaggacatgcagaagttcaggaagacggcgttcaataacaacacctacaccagcagccaatacagcgcgccaaccagtgaatacggccaggtgccgtctggatcaagcagcgagggccgccagacgcaggagatggaggagtcgggtgcagtgaagaaaggtggctacagcggctacagctccggatacagcggagcctcgtgagcgaattccctccctctctgtttttgctctttttacttctgatgctttctgttgctgcgtttgtaaagctgacttccgcgtgattgatgtatctaagtttgacacagtatagttgtatgtagctgcaatcgtttattctttcgtgaaaaaattgttcttggacaatgtttggctgtgcaattcaacgagagctaagctaattgactgctcatgtactgtccatggctcgctcagttcatcgttctcatccaaagacaaagagcttgccagatttttttttttacc

SEQ ID NO: 138425 - DNA, 1899 bp, Zea Mays
tccacgccgtcgtcccactcgccgcccaagtcacactcgcccgggggcgagggcggcggcagctccgggccgtccacgtcgctcgtcgtgggcgtggtcgtcggcggcatcgtgctgctgctgctcgccagcttcatctgcctctgctgcctccgtaagaagcgccgccgcgcgccgccgcggcctcagcactacggatacccgccgcctccgcccccgtacaaggaggatccctatggtggaacataccagagttggcagcaaaatgcgcctcctcctccaccccctgaacatgtggtcacgaccctgccagcatatgccaatcctcctcctcagccgccgccaccaccaacagcagcagcgatgctaaatagtagtggtggatctggttctaactactctggtggcgagatcctacctccaccatcccctggtgctgctctcggcttctcaaagagcacattcacctacgaagagttgatgagggcgactgatggattctctgatgctaatctccttggacaaggtggttttgggtatgttcacagaggattgctgcctaatggcaaagagattgctgtaaaacaattgaaacttggaagcggccaaggagagcgtgagttccaggctgaggttgagattatcagccgagtacatcacaaacatcttgtgtctttggttggctattgcatttctggaggcaagaggttgcttgtctatgagttcgtccccaacaacacattggaattccacttacatggtaacgatcgaccaacaatggagtggcccactagattaaagatcgctctgggtgctgccaagggtttagcttatcttcatgaagactgccatccaaagatcatccaccgcgacattaaggcatctaacattcttcttgacttcaaatttgaagttggacttgcaaagttcactactgataacaacacccatgtgtcaacaagagtaatgggcacctttgggtatttggcacccgagtatgcagcatctggcaagctcacagaaaaatccgatgtattttctttcggagtcatgcttcttgagcttattactgggcggcgaccaattgacacaacccaaacatatatggatgacagcttggttgactgggcaaggccattactgatgagagcgctcgaggatggtgaatatgatgctttggtggatcctcggctcggaaaggacttcaatcctaacgagatggcaagaatgatagcctgtgcggctgcgtgcgtacgccattccgcacgtcgtcggccacgaatgagtcaggtcgttcgggctctggaaggcgacgtgtctttggaggaccttaatgaaggtgttcgacctggccatagccgcttctttgggtcatatagcagctctgattacgattccgggcagtacaacgaggacatgcagaagttcaggaagacggcgttcaataacaacacctacaccagcagccaatacagcgcgccaaccagtgaatacggccaggtgccgtctggatcaagcagcgagggccgccagacgcaggagatggaggagtcgggtgcagtgaagaaaggtggctacagcggctacagctccggatacagcggagcctcgtgagcgaattccctccctctctgtttttgctctttttacttctgatgctttctgttgctgcgtttgtaaagctgacttccgcgtgattgatgtatctaagtttgacacagtatagttgtatgtagctgcaatcgtttattctttcgtgaaaaaattgttcttggacaatgtttggctgtgcaattcaacgagagctaagctaattgactgctcatgtactgtccatggctcgctcagttcatcgttctcatccaaagacaaagagcttgccagatttttttttttacc

SEQ ID NO: 138426 - DNA, 842 bp, Zea Mays
tcttagagttaagctcttagccacttgctggtcttatcatttgaaagaagaaatggtactcaattgctggtccctttggcaattttttctttgcacttttcttgttagaactggcaagccacagccaagtaccttgcttgcacaaacaaaaatcccttctattgtagggcaatccatggatttattgcttgtcctgaaatttgatagaggcgttcatgatatcagttgcttgttaattccatttgtttcttgttctcttatgcattgttatgaatatttgcaccttctgcaggtaacgatcgaccaacaatggagtggcccactagattaaagatcgctctgggtgctgccaagggtttagcttatcttcatgaagactgccatccaaagatcatccaccgcgacattaaggcatctaacattcttcttgacttcaaatttgaagctatggttgctgactttggacttgcaaagttcactactgataacaacacccatgtgtcaacaagagtaatgggcacctttgggtatttggcacccgagtatgcagcatctggcaagctcacagaaaaatccgatgtattttctttcggagtcatgcttcttgagcttattactgggcggcgaccaattgacacaacccaattaggcactgcttgctataagcacatatgtacttccatttgcatgctgtataatactaatactaattgcaaaattatagttgttttttctacccttgttagtcaataagcatatttatggccaataggttgtattcttattcttgtaaccgtgttaattaatgttatggacttgtagtcttgtattaccttgtgaat

SEQ ID NO: 138427 - DNA, 1332 bp, Zea Mays
aaacagcagccagtatcagctgcctcctctctttctcgacccatagccacatcctcgccccgcgctgcggagcattcagtcatttgccactactctcacggcctcaccaagctcttccatgcaatccatggagtgtagcaacaaaagtggtgaccggcggctaatggaccgcctcagccagctgctcctctgtccggccaacactttcctcggctcccggtacagctcatcctcgttggcctccacggttttcacagccaccgctgccgccgcctccacaacgctatcgatctcttccacttccaccaccgcagccaactacacaggccgcgccgatcctttctcagccgctctcgaccgccctcctcccgagcgcatgcgctgtaacaaggagcagcacaaggataaggggaagcttcaagaacgccgtcggcggcgcttcaagaacgccgtcgacaaagacggcgtccggacgctctcgtccaacccctacggcttcacctcttctggcgaggaggacgatggcaccgacggttacggcgacgacgaggacacagagactttcttgtcctcaagaagcctcttgtccttcgactcttctggcttctacgcgtacaggaagctgctgaagccaccgtccaagaacaggagccacctcggccgccaggggagacgccggcgttgctgtcggcggccatctgcgagctgcgtggagacgtgcaacgcgagatccgtgagggagcctgggttccgtcctctggtgatgacgacgacggctaccgctgccgcgctggagcaggtaccgaaggggctggccgtggtgaagcggtcacgggacccttacggcgacttcctggagtcgatggtggagatgatcatggggcgtcaggtgttcggcgcggcggagctgcagcggctgctgcggtcgtacctagcgctcaacgcgccacgcttccaccccgtcatcctccaggcgttctccgatatctgggtggtcatccacgtgcacggcggctagcgcctaacgctggccgccggccggcgttgttagatcaaactgcttagattgtgcatgcattgacgcagctgaacgtaattgcatagcactgtatgcttgttgggatgtaaaatgtggtgttaactaggctggtttgagcatctccaagagttctctcaaatgtttgtttctaagattattgaggtattcaagtcgccaaaatgtactaagagcacaaaagaccactttctggacaataccaacaacaggacatatcctatggaatcatttgctctagtacacaaaagctctatagcgacagttttgtagctcta

SEQ ID NO: 138428 - DNA, 1770 bp, Zea Mays
atgttaagaagcagaagtctgctgaaagagttcagtagcgaagtgtcaaaccaaggtgcattagacatcgaggatttggcacaaatagggaagaagattggaacctgtccctactatggttcacgagacatggtccgctcagctgaccttgtagtccttccttatcaatctttgttactcaagtctgctagagaatcacttggccttaatctgaagaacagtgttgtcatcatagatgaagctcacaacttagctgattccttgagtaacatgtacaactcaaagatcacgtcttctcagttgaaggcagtcctttcctgcctggatgaataccttgatagattttacaatgttttgggagctgggaatcgacgatacatccagaccttaacagttttaacaaagtctttcatacgtgttttgatcaacaatcaagatggtgccagcactatgtcttctatgaccataaaccaattcttgttttcccttgacattgataacataaacatagtaaaactttgtcagtttgtgaaagaaagcaatataatccataaggtttgtggatatgcaaacaagttaagtagcatccaaaatcagtttgatctccagctccatgatgaaggaagcagtatagcatgctttcaggcattggttgactttctacgctcccttctgaacagcaatgatgatggaagaatcatagttgcaaagcaaaagctaggtggacaacctgatgaagcatatcttaaatttgtgatgctttgtgcggaaaaaatattttctgaggttacgcaggatgcttatgctgttatcctggctggtggaactctccagcctattgaagaaactaggctgcgcttgtgtccaagcttaccaccaactgatataaaattcttcacttgcaaccatattgttcctcctgagagtattcttccaatagcagttacacgtggaccctcaggcaaggcatttgatttcagctacaattcaaggagctctccttccatgattgaggaacttggtcgtttcatctgtaacattataacagtcgtgcctgagggagttgttatgtttttttcttcatatgattatgaaaggcgtgtatatgatgcatggatgacaacaggcacaatttccaggatttctaaaaagaaacatgttttcagagagccaaggaacagtgctgatgtcgaggctgtcctcaacaaatacaaggaggcaattgaatcctgtagtaatttttcccaagacacaggtgtcaatggggcacttctattagctgttgttggtgggaagatttctgaaggcataaatttcagcaatgggatgggtcgttgtgtcataatggttggcttgccttatccaagtccatctgatgttgagcttatagagacaataaagcatatcgaaagtatttctagctcattttcggttggagatgataaggccttaagcagaaaatatgatgatgaatgtgaacttcagcctggttatgatatattacggaagtgcactagaggtggaagagagtattatgagaatttatgcatgaaagctgtgaatcaatctattggcagagcaatcaggcacataaatgactatgctgcaatgctattggttgactcgcgttatgcacagacttcatcaaccaagagtttttcctgcccggctgataagcttcctcaatggataaaagcacgactctcttgtgctcaaaactatggagaagttcatagatcgttgcatcagttcttcaagttcaataaaaaa

SEQ ID NO: 138429 - DNA, 216 bp, Zea Mays
ccaatgccgccgccgccgcgaaaagacttcccggcgttcccgtttgcgccgtacccgatccagtcggaattcatgtcgtttctctacgccgctctctcttcaggccccggcgccctcgccctactcgagagccctaccggcacgggcaagacgctcagcatcatctgcagtgcgctgcagtggctcctcgatcaccgcgaagctgccgtagttgcc

SEQ ID NO: 138430 - DNA, 2536 bp, Zea Mays
gccatttgttaaaagcccccccgaacccccgttgcctgcacatgctccggtcgggctgcctctgctgctctcgatcgaacaagaggtgtccgtccaacgacaactcggcacaagaactgtccagatatctccaactagtgttaggttatcttatcgattcagattcgtcatagcttcctgccaaatccgttgatctcagcttaatcagccgtccagctgggcactgacacttctgcaggacttgaggtctcacggtcactcaagtcgtctggtctgagtgagccatggcggaggccaaccgcaggacgacgccccggccccgcgcggtgccgccgctgctcgccgaggtggaggtctccaacctgcccggcttcgacgtcaccccaacgccgagcccgcacggccaggacgccaccacgccgagcccgcgcccgcccacgaagccgtcgtcccgccccggggtgccgccgctggaccgcgtgccgtgccgcagcgaggtggtgttcccgccgctggactcgccgttccaggcgccgggctaccgctccgtgcagcccgtctccatcagcctcccggcgtcgcccatcggcttcggcttcggcgtgcccgtcatccccgcgccggccaacgccgccgccgccgactcggacgacgacggcctccggaggcaggccctccaggccaacgccgcggccggcgacccgcagcaggcgccggcgccgacgccgccgcccgcgcgggagaatggaggagggggcgtccggttcatgcaccagccggacaagctggtgttccgctcgcagcccattcccggcggccagccacagcgcgccggcagccgagccgcccgggcctgcagggccatcagccgggacaggcgctatgacacgttcaagaccttctccgggaagctcgagcgccagctcacccacctggccggcgccccggaggtccaagaggtgcgaggagatgacgccgtcgacgccgccacctcccgcaccacgtccatgcccaaagtcgatcgcttcttcgccgcactggaaggccccgaactcgacaagctcaagacgtctgaggaactggtgctgccgtcggacaagacgtggccgttcctgctccggttccccgtgtcggcgttcggtatctgcctgggcgtgagcagccaggcgatcctgtggaagacgatcgcgtcgtcgtcgccgaccacgttcctgcacgtatcccacaaggtgaacctggtgctctggtgcatctccgtgctgctcatgtgcgccatcacggccgtctacgcgctcaagctcgccttcttcttcgaggccgtgaggcgcgagtactaccaccccatccgggtcaacttcttcttcgcgccgtggatcgcctgcctcttcctcgccatcggcgtgccgccgtccgtggccactgagcccctgccgaggtggctctggtacgcgctcatggcgcccgtgctcttcatggagctcaagatctacggccagtggatgtccggcggccagaggcgcctgtccaaggtggccaacccgtccaaccacctgtccgtggtgggcaacttcgtgggcgcgctgctgggcgccaacatggggctcagggagggccccgtcttcttcttctccgtggggctggcgcactacagcgtgctgttcgtcacgttgtaccagcggctccccaccaacgagacgctgcctaaggagctccacccggtcttcttcctcttcgtggcggcgcccagcgtggcgagcatggcgtgggccaagatcacgggcgagttcggctacgggcccagggtggcctacttcatcgccatgttcctgtacgcgtcgctggcggtgcggatcaacttcttccgggggttccgcttctcgctggcgtggtgggcgtacacgttcccgatgaccggcgccgccatcgcgtccatccgctactccaccgaggtggacaacaccttcaccaaggcgctctgcgtggcgctgtccgtgatcgccgtgctcacggtgacggcgctgttcgtcaccacgctggtgcacgcgttcgtgctccggaagctcttccccaacgacatctgcatcgccatcacggaccacaagatgaagcccatcatggagctgcacgagagccatggcgaggacagcagcaccaacagcaacgacatcgagaccggcgccggtggcaaacagtgagggacgcgacgcctagctaggaagcatgcataagcaatgcacgcgcgcgcacacccaagtcgccgagcttcacgcacgccaagcgtggggggatgacgcgaccgagttcttgcttggattggattggatctttctataggattgcctacttggttcgatggcgcacgctgaggacctttgatggattgcatctattagttactctatctactactagtcagtagagaactacttgaatgtacagagtgggctacgttgtatgaaacgcggctgcttatttatcgtggaaacattatgcatgcagagtggctttaaaacttaagcatctcatcagttcctcc

SEQ ID NO: 138431 - DNA, 2355 bp, Zea Mays
tttttttttacagtacgctgtgcctgttgctttaatgtagttctgagcggttctacctcgctccccagctgcaggacttgaggtctcacggtcactcaagtcgtctggtctgagtgagccatggcggaggccaaccgcaggacgacgccccggccccgcgcggtgccgccgctgctcgccgaggtggaggtctccaacctgcccggcttcgacgtcaccccaacgccgagcccgcacggccaggacgccaccacgccgagcccgcgcccgcccacgaagccgtcgtcccgccccggggtgccgccgctggaccgcgtgccgtgccgcagcgaggtggtgttcccgccgctggactcgccgttccaggcgccgggctaccgctccgtgcagcccgtctccatcagcctcccggcgtcgcccatcggcttcggcttcggcgtgcccgtcatccccgcgccggccaacgccgccgccgccgactcggacgacgacggcctccggaggcaggccctccaggccaacgccgcggccggcgacccgcagcaggcgccggcgccgacgccgccgcccgcgcgggagaatggaggagggggcgtccggttcatgcaccagccggacaagctggtgttccgctcgcagcccattcccggcggccagccacagcgcgccggcagccgagccgcccgggcctgcagggccatcagccgggacaggcgctatgacacgttcaagaccttctccgggaagctcgagcgccagctcacccacctggccggcgccccggaggtccaagaggtgcgaggagatgacgccgtcgacgccgccacctcccgcaccacgtccatgcccaaagtcgatcgcttcttcgccgcactggaaggccccgaactcgacaagctcaagacgtctgaggaactggtgctgccgtcggacaagacgtggccgttcctgctccggttccccgtgtcggcgttcggtatctgcctgggcgtgagcagccaggcgatcctgtggaagacgatcgcgtcgtcgtcgccgaccacgttcctgcacgtatcccacaaggtgaacctggtgctctggtgcatctccgtgctgctcatgtgcgccatcacggccgtctacgcgctcaagctcgccttcttcttcgaggccgtgaggcgcgagtactaccaccccatccgggtcaacttcttcttcgcgccgtggatcgcctgcctcttcctcgccatcggcgtgccgccgtccgtggccactgagcccctgccgaggtggctctggtacgcgctcatggcgcccgtgctcttcatggagctcaagatctacggccagtggatgtccggcggccagaggcgcctgtccaaggtggccaacccgtccaaccacctgtccgtggtgggcaacttcgtgggcgcgctgctgggcgccaacatggggctcagggagggccccgtcttcttcttctccgtggggctggcgcactacagcgtgctgttcgtcacgttgtaccagcggctccccaccaacgagacgctgcctaaggagctccacccggtcttcttcctcttcgtggcggcgcccagcgtggcgagcatggcgtgggccaagatcacgggcgagttcggctacgggcccagggtggcctacttcatcgccatgttcctgtacgcgtcgctggcggtgcggatcaacttcttccgggggttccgcttctcgctggcgtggtgggcgtacacgttcccgatgaccggcgccgccatcgcgtccatccgctactccaccgaggtggacaacaccttcaccaaggcgctctgcgtggcgctgtccgtgatcgccgtgctcacggtgacggcgctgttcgtcaccacgctggtgcacgcgttcgtgctccggaagctcttccccaacgacatctgcatcgccatcacggaccacaagatgaagcccatcatggagctgcacgagagccatggcgaggacagcagcaccaacagcaacgacatcgagaccggcgccggtggcaaacagtgagggacgcgacgcctagctaggaagcatgcataagcaatgcacgcgcgcgcacacccaagtcgccgagcttcacgcacgccaagcgtggggggatgacgcgaccgagttcttgcttggattggattggatctttctataggattgcctacttggttcgatggcgcacgctgaggacctttgatggattgcatctattagttactctatctactactagtcagtagagaactacttgaatgtacagagtgggctacgttgtatgaaacgcggctgcttatttatcgtggaaacattatgcatgcagagtggctttaaaacttaagc

SEQ ID NO: 138432 - DNA, 96 bp, Zea Mays
gctagatctcgtgtcgtttcgttcgatcgccttgctgatacattatttatatgtcccatccattaccacgatcggattaatcaatctactggtgct

SEQ ID NO: 138433 - DNA, 956 bp, Zea Mays
tttctggctcatcagcttatcagtagggcactaaccattccaggcacatcggtccattggtacgcaaagccagagatgcggaagcaaaggaagatgggtcatattacaattgtggggccttctaagataagtgtaaaatcacgcttggacaacttgctgcaaagaaactcgtctgatcccaaggaagttagccctcgtgttgctattataatggggtcccaatctgatcttcctgtgatgaaagatgctgagagggttttgaaagagttcgacataccttgtgagctaactattgtttctgcacatcgtacaccagagcggatgtatgattatgcgaagtctgctaaagacaggggtttcgaggtcataattgcaggtgcaggcggagcagctcatttaccagggatggtggcttcattgactcctcttcctgtaatcggagttcccattaagacttcaacactatcaggatttgattccctcctatctattgtgcaaatgccaaaaggtattcctgttgcgactgttgctatcgggattgcagaaaatgcaggtttgctggcagctaggattctggctgcaagagatcctgagctccaggacagggtaactaagtaccaggatgatctgagggacatggttttggagacagcagaaaggctggaggaccaaggcccggaggaatttctgaagggaatggattgaccccttttgaagccctggctctggggcctgggaggaatacgaatatatgggtcggcgataactcagtccactcgattatggtttaagatcgggagtcatcaaaaagatactttaaggactagttccggagctacaaaacctgaggggattgggggctagaatctccgtgactcttagagctgttttgatgaccaagaatcacgaagggatccataggcttggctgccttattcagtgattttagcctctct

SEQ ID NO: 138434 - DNA, 851 bp, Zea Mays
cgacgccccacgctcaaaaagcacaaatcgcttcccgcgccgccgccgcgccgccgaccggcgctcctcacctctcccgccgcacccatcgtctcccgttcccggctaaaccctgcttgagccctagacaccgcccgcctccgggaggtagagagcatgcacgccaggttcctcagcgcgccgtcccctgcctccgccgccccctccccgtacgttcgcttggccttcacgggcgcccgcccgcgccgcgcgtgttggaagccgcgaggccccgcgtccgcgtccgcgccgccgcctcggcctctccactcgctgtgcgcccgggcctccatgcagcccgcctctcccgcgcacgacgggcatggtggtccgccggtgcacggcgtctccaacaccgtcatcggggtcctggggggcggtcagctcgggaagatgctctgccatgcagcgagtcagatggggattagaattgtcatcctcgaccctcttcccggctgccccgcgagctcggtttgcgatgagcacgtcattgggagcttcaatgatgaggacacggtccgggagttcgccaagaggtgtggggtcctaacagtggagattgagcatgttgatgtcaccacactggagaaactggaaaaacagggcgttgactgcgagcctaacgcctccacaatcatgattattcaggacaagtacaggcagaaaaagcatttctcaagatgcgagatcccattgcctgacttcatggaagtagatactttacgcagtatagaggaggctggagaaaagtttggctatcccctaatggtcaaaagcaagagattagcatatgatggtcgaggaaatgctgt

SEQ ID NO: 138435 - DNA, 111 bp, Zea Mays
attacttacggtcgcaactacaacgtttcagacttcctgccgtgtgatatccaagttcctttgaatattgtgtcaactactagggcatgttagaattgcttgcgtgtgtgc

SEQ ID NO: 138436 - DNA, 618 bp, Zea Mays
ggtcttacacccgcgagctcggtttgcgatgagcacgtcgtcgggagcttcaacgatggggacacggtccgggagttcgccaagaggtgtggggtcctaacagtggagattgagcatgttgatgccgccacactcgagaagctagaaaaatagggcgttgactgtgagcctaaagcctccacaatcacgattattcaggacaagtacaggcagaaaaggcatttctcaagatgcgagatcccattgcctgactcatggaaggtagatactttacgcagtatagaggagactggggaaaagtttggctatcccctaatggtcaaaagcaagagattagcatatgatggtcgaggaaatgttgtagccaagaataaagaggagctaccttctgttgttgcttcactgggtgggtttgagcgtggcttgtatgttgagagatggactcttttcgtaaaggagctttctgtaattgtggcaaggagcagagacaactctactgtctgctatcctattgtggaaacagttcacaaggaaaatatatgccatgttgttgaagctcctgttgatgtatctaacaaaataaagaagttagctactagcgtggctgaaaaagctatc

SEQ ID NO: 138437 - DNA, 1394 bp, Zea Mays
aaaaacagaaaagactaacattttttttttgttactccgctccggtagtacccaatatacatggacatgaacgaatggaattcacgttacatatcagctactcccttgtggcaaaccaatcctgcagaagcaagagggatcagtcgaccatgtcctcgagcacgacggtggcgagcggcgggtgcgcgtaggggcccttgacccaggtgttggcgatgaagcggtagggcgcctcggtgaggtggatgccgtcccagctgacgtgcgcgtcggggtcctcgcaggtggtggcgccagggagcccgcacgacgcgctcacgttgtagttgtacggcccgccgccgccgcagcacgcccgcagagcgccgcgcttgtagcctgtgcggtgtgcgcgcgaactgtatgtagggcgtgtagtagtcggcgtagacgacgcgggactccgggcggcggcgctgcaggcggtcgagtgcgacgcggagcatggcgttgtggtagagcgcgacgctgttgtacttcttgaggcagccggtgcgcgggtcgtactcggagcggtcctcggacgggtacatggtgagcgtgatggggatgcatccggcggggaggttgcccggcaccacgacgtggcgggcgccctcgtccagcagccgctccacgccgcccaccagcgacgccaccaccgccggcaccatcgtcttcaccttctccagcgaccagtccgccttccacgcgaagctgtagtcgttgccgccgaactcgccgaacacgaacagggccctcccgaacagggcgcggcacgcggcggggtcgtcggggcagatgctgcgcttcacctcctggaaccactccagctgcacgcccatggacgtgttgaagggcgggatgctccacacgttgttgtccttgaagtacttgaggtccagcgccgtcgcgcccatcaccgcgaagttggcgccctggctgaagttggtgcccttgttcgccgacggagggagcagcgggagaccgaacgcctcggctgcggaagtcgatcacgaggcggccgttggagcacctcgcgtacggcggcgggaacttgggcatgttgggcagcttgcccgagttgatgatgacgaagttgcccgtgtcggagaaggagtcgccgaagctgaagatggcattgtagtactgctgcagcggctcgcccgacgccgcgcctgccaggaacaggagcaccgccggcagccacgccggcggcaccaccgccgagaagcccctcctccgcgccatggccggccgccactaagtacgcaccaaccacaacggaagggaaaccaaccggcagtgtgagtggttgtgtgaaagagagagagagagagggtaaggcgaaaggcaggcaagggctgctgctatgc

SEQ ID NO: 138438 - DNA, 314 bp, Zea Mays
ttcttggatgtgatgcttgacaatacatttttgtgttccttgacacatgtacagtggcgtgtggtagttgaagggtgtatagttgtattacttagttcctagttcgtaaaaaaaaacttcaaaagaagaatgcattcctaccaaaaaagggaaagggaaaaaagatgggcgtctgtggtggtcggttgcagcaactgttgtctggttgctatgaactccaaagtgcatgaagagatcaatgtaaccttggatgatgtttgtgtttgtttcgtttactcgtagaatataaaggggagatagaagaattggcttca

SEQ ID NO: 138439 - DNA, 1548 bp, Zea Mays
atgtcatcagactccagtctaaccgaatccctacatgagagaacaattgtctttggccttaaactttgggttgtgattgggatcgctgttggagcgtccctcttgggtattcttctcattcttctcatatgccttaccattcaaagttgtatcaagaggtcacgcaagccactcaatgaccgtcgactgcaccagatccctccagcgtacaaagatatcaaggaagtggggatggtagaccaatttcctgccaaagattttgttgtacatgatgggcttctactcactattcagaatgggcctgagcctgttgaaccagttgatagagatgcgattcagttggctcaggaggaaaagttgaaacaaagagaagagaccaatgtctctgcttcttttcccattatggatggctgcgagggaactcagattgtttctgtcgatgaacagtcttccacgcacgctactgttgactctgcaccattggcaggtttacctgaattttcttatcttggttggggccattggttcactctcagagatctagaccttgcaactgaccattttgcaaaggataatgtaattggtgagggtgggtatggtgttgtatatcgtggcagattatcaaatggcaccccagttgctgtcaagaaaatccttaacaatttaggacaggctgagagagaattcagagtggaagtcgaggcaattggccatgttcgtcacaagaatttggtccgccttttgggttactgtgttgagggtactcaaaggatgcttgtgtatgagtatgtgaataatggaaatcttgaaagttggctccatggggaattgtcccagtacagttctctcacttggttggctcgcatgaaaatccttctgggaactgcaaaggcccttgcttacttacatgaggcaattgaaccaaaagttgtgcaccgtgacatcaagtccagcaatatcttgattgacgatgagtttaatgccaaaatatcagactttggtttggccaagatgcttggtgctggtaaaagccatattgctacacgagttatgggtacctttggctatgttgcacctgaatatgctaacagtggacttctaaatgaaaagagtgatgtctatagctttggggttgttctgttggaagctattacaggtagagatccaattgattatgatcgccctacaaatgaggtaaacctggttgactggcttaaaatgatggttgccaacagacgttctgaacaagtggtggacccaaaccttgagagaaggccttcgacaaaggagctgaaacgtgcccttttgactgctctgaggtgtatcgatttgaatgctgagaagaggcctagcatggaccaggtggtccggatgttggattctaatgaactcataccgcaagaggaaaggagacaccgacaaatccgaatccctgagagttcagaaaccgagccactgcggggcaagaataacagtggcaggagtgatgctcctgagcatgaagcgaggccaccacgacctaagagccgaactttttcgtccaaatga

SEQ ID NO: 138440 - DNA, 445 bp, Zea Mays
gagcacggcccggcacgaggccgcccgccagtgccagtgccagtgccggtccctccctctcttggctggtgctggcctggatcctccacgcgacgccgccgcggctcccttctcgtctcgtcgtccagtggtgggtggtggcggtggtggtggagtgcagatccgcgcatccgtacgtggattgccttccgtctttgcccattgctgttggccagtcggcgtggatttgagagctgcgtgtgtgtgtgtgcatccgtggtttggttacttctccggcactcaagatcgaagtcgcaggacttgtttgggttcaactgaactcccgtgtcctgcgccaggaccgccactgatgagacactcagatttaggatggctttcatccgccgccattgctgagcttctccagtaaagactggaatttttcgccgcgccaacctttaactgt

SEQ ID NO: 138441 - DNA, 834 bp, Zea Mays
aaaggcaatgaaaggcgctctacctcgtttcatgacatactaatgaataaatagttgcaggtcaggaacaaatacatagagttactcaatatatataactcataatttcaatgaattctcaattaaatgaaaaatgaatgcaagcattccctgcatgcgatggcacctcacgctggggttgcatgcgtggttcatatcatgtttgcaagagccatgcagttgttggccatctggttgagctccttgtcaaacttccccatggggttggggacgccggcctgggtgaaggggcggtcgcacgagtcgaagtcctggacggcgagctgcagcatgatcttggcggtgccggtgtccttgaacgtgatggcccgctgcgccgcgccgatggtgtcctgcgtgttcatgtacatggtgtcgcagaacgtgagcgcctgcgtctgctgcggcgggatggtgcgggccgacttcgcgacgtgcttgcgcgcctgcgcggtgcgcttggcgaacgcgtccacttgcatgttcagcacggccaggttgtcgatgaccgggtacttggacgcgtgccgcccggcggtggacgtgcacacctccgggaacggggtgcgagagcagatgccggcgacctgcgggttgacggcgccaccgtgtcccctgcctcccctacccttacccagcgcctgcgggaggaggccggcggacagcagcgccacgacggcgaggaggacgagccgtgaggcttgccccatgatttttattattctgtgagattataattgctcgatggcgatagatagatatatatttatgggccagcgaggaagtcaaggagcg

SEQ ID NO: 138442 - DNA, 2628 bp, Zea Mays
cagccgttctcctctcagccgtcgccgtcgctctcctctcctccacactgctctcctctctcctccgagccgcagctcttctctctccctctcccctgcgcgccgccactgcgggcatctacaccgctgccgctcctctcttctccgagccgcagctcttctctctccttctcccctgcgcgccgccgctgcgtggccctacacgccaccgctacgggtgccctacgcgccgccgtcactgctccagctctcctctgtttcccagccaatgccgccgctctaactccccaaggcatcgccccgacgacggctcaacgacgccccgtcgacgcctcgcggacgccctgcgccgcagcgggcgctttacgctccatggcaaggcgcgttagatgcctcaggttccacgcgcgccttagcccctaagcgacgctaaggcggcgcttcaaggacgccttgataagcatgattgggaggtgaaaacatggattacgactttggtggcacctcacccgatccctatgggggtggaagcatccacctagtgtgtgatcattgcggtaccagtgacaactacaccactgacgacgctgatgatggccaattcacgtgccgtacatgctctgccgtgcacactacacaggcaactgctgctgatcctcatgacttccccgccactggcaacatctctgtccgtcgtgttgccacccagcccacccccaagcttggtgcccgcacacccgcgccttacctgaggacccctcaggctgctcccgtgcctgctactgccgcttttgatgacttcacagagctgagtgagccgcgggactttgtgtctggatctggcacgtgtggggagcctgaggatctggcagtgcaggtccgctggcgctatgtacggggtctccaggtgatcctgcagcggcagctggaggtgctggtggagcggcaccaggtaggcgcgtttgtgtgtgctgttgccggcattgtctgggtgcggtgggttgctgcatccagggtgtttgatggaatctgggcccgccaggtgcttgaggaccacaaggccgtggggagacagaagtgttatggtagcagatatgagctgtttttatgctttcccttgttaatcatttccatcggaagaactgaatggactctgacataaatctatctcttgttgcagatgacaagaaacctgatgagatgaagtatgaatgggatgatgatatgtcgctccaacgaaaagacaggcacaagctggagtttgcctttttgcgttcgttgaggatgatgctgccggtttactcaacattggctgtttgtttcttggcctgtcatattgcccgtgaagccatcttgccaagtgacatttacaggtgggcaatggaggggaatatcccatatgtggctgcttttactgaagtagacaggttccttgggagctctttccaagactgccctttggatgcaaggcagctgttcaggccggtgcgagttatcggagcatggcaactggaagctgcagctggatccatagcacaaagagtagccttgaggcttccttcagttaacttctatgcaattgctcaacgttgtttgaaggacttgttactgcctatagatagaatcctcccccacgcatgccaaatttatgagtgggcaatgcctgcagaattatggttgtctagtaatcctgctagagtcccaacacgggtttgtgtgatggctatcctaattgtggccctacgacttctttataacatcaacggtcaagggatatgggagaagatttgtgaggaaggaagaaacccaagtgaatctcactatgatgcaaattcatctacttccaggaagcttgaggctagtaacagtgaggagtttggcacaagagaactgttgtgtgctatttcagttgcctatgataaaatcaatacgtcacatgactactcgagtgatctccgctcttatctcaaatactgcaaggaagttgtttttgctggaattacatcttcagatgaacagactcatctaatagagatcttttgggatatgtacaaagccagggaggatgataatatagaagatcatgtaaaatcccagtcccattctatggcagacattccaattacaaatggagtgaggaaacactaccgagatggagcttttgttaaagcaagttccttttctgcatcttcaggtcatgatgcaatgcaaatgctcaagtcagagatgcaagatcatggatttcattatatgccacctaggaaaccaaggaaatcagatggttatcttcgttataggcggcggcggctaagtggtggctttatttttgttgcacatgctgattattacttgttgctacgtgcttttgcaaagcttgcagaaattgatattcgtatcatgcatattagtgtgttgaaacttgagaagagactcgcatgtattgaggagcgaattgaaagaagcttgaacaccttacataacttttctactggaacagtagatgagctaagatctgtatctgactgaagttcctagtgtagtctcatactctgctagcatggtaagttttggcatcttgagaaacataattgtccttgagcattatgcctcccattactgctgtttttt

SEQ ID NO: 138443 - DNA, 813 bp, Zea Mays
atggccaggcgcgagagagtatttaaggtggtgatcaaatttgcggcccgtgctgatctccaccatctggctatgtttctagctggaaggcaagcagatgcccctcaggaagctcttcaagtgcttgacattgtactacgtgaattgcctaccgcgaggtattctcctgttggtaggtcattttactctcccaacttagggagacgtcaaaaacttggtgagggataggaaagttggcgtggtttttaccaaagcataaggccgacaaagatgggcctttcactgaatattgatatgtcctctactgcatttatcgagcctctccctatgatcgattttgttgctcagcttcttaacagagatatcttagttagaccattatctgattctgatcgcgtgaagattaaaaaaaccctaagaggtgtgaaggttgaggtgactcacaggggaaacatgcgcagaaaatatcgcatttctggcctcacctcacaagcaacaagagagctatcattccctgttgatgatcgtggtactgtgaagactgtggtgcaatacttcatggagacttatggttttagtatccagcacaccactttaccatgcttgcaagtgggcaatcaacaaagaccaaattatctgcctatggaggtttgcaagattgttgaaggacagcgttactcaaagcgactcaatgagaaacaaatcacttctctactgaaagtgacctgccagcgccctcaagagcgtgagctagacatcttacaggttttagttgcactgcttactgttgctacttgtcttttcttaacatga

SEQ ID NO: 138444 - DNA, 738 bp, Zea Mays
atggccaggcgcgagagagtatttaaggtggtgatcaaatttgcggcccgtgctgatctccaccatctggctatgtttctagctggaaggcaagcagatgcccctcaggaagctcttcaagtgcttgacattgtactacgtgaattgcctaccgcgaggtattctcctgttggtaggtcattttactctcccaacttagggagacgtcaaaaacttgatatgtcctctactgcatttatcgagcctctccctatgatcgattttgttgctcagcttcttaacagagatatcttagttagaccattatctgattctgatcgcgtgaagattaaaaaaaccctaagaggtgtgaaggttgaggtgactcacaggggaaacatgcgcagaaaatatcgcatttctggcctcacctcacaagcaacaagagagctatcattccctgttgatgatcgtggtactgtgaagactgtggtgcaatacttcatggagacttatggttttagtatccagcacaccactttaccatgcttgcaagtgggcaatcaacaaagaccaaattatctgcctatggaggtttgcaagattgttgaaggacagcgttactcaaagcgactcaatgagaaacaaatcacttctctactgaaagtgacctgccagcgccctcaagagcgtgagctagacatcttacaggttttagttgcactgcttactgttgctacttgtcttttcttaacatga

SEQ ID NO: 138445 - DNA, 528 bp, Zea Mays
ctgcctgaacaaataggagaactctgctcactctagcacctcgacatattttatttcccttccctgacttgccttcccgagagcatgcagcgcctcacctcgcttcgaactctcgacttgagttattgtgacgcgttgacccagcttccggagtggctaggcgaactctctgcccttcaaaaactcagcctcctgcagtgccttggccttacctctttgcctcgctccatacaatgccttactcctctcgaggaatctctactacttattaagtcggtaaggggtatgctatcattccgtgttctgccattcccattcccatcccccctccctgcactgtctttctcattcccgtctgccatttcgtgttctgtcattcccattcccccctccctgcactgtctttctcattcccggctgtcattctgtgttctgccagtgttctgtcattcccattaccccctctccctccccgcaaatcctattcccattccaacgtgcatcccacgcctagctaaaaattaaatt

SEQ ID NO: 138446 - DNA, 447 bp, Zea Mays
cccgcccacgcacttctctctctcaccagcaggtcgcgccgccgccgcgccaccgctctccggatcatcggccacccacctcctcttcctcctcgcccgctcactggccgtccctgctgcggtgccgcgcgttcaagtaggaggccggcgacggcgacccggctgaggccaacgcacggaagcgcaggaagggcccgctgtataagctcaaggcggcgatccagggcctcgcgagatctcgcttcaccgccgcggaggtgtacgggggagagtaccagtaccagcgcgccgttgagaaggcggaggagatattcttctcgctcatggattcgtcccgacaaaccaagctcaacaagcagaagatgttggaattggctactttgattcccttcttaaagtagggttccttcaagaccaggatcgagaccaaatttacaacagttgagc

SEQ ID NO: 138447 - DNA, 1260 bp, Zea Mays
atggcacccatccatgccctgttcagaagcagtaccagtcggggtcgagcgagcctagagagccagccgaacatggacagatacagagcacccaaggccaggccagaccaagcagatgctgacgactccgacgagctcggtgtgtttgccgccgagcgctacttctacggagacgacgacgagctgtggccgtgcgagcgctcctcctcctcgctgtcgtccgcgttcaggacggggacgcacgagcccgaccggtccgtcccgacgccgacggccgtcactagctcgtcggaagcaagctggaacagccgctccactctgctgcccaatcccaatgggcaggccgagaagttgcacgctgctgccgccgccgccgccgccgccgccgccactccgatcatcgaatccaggccttccggggcagaaggccagcggcccggccgccggcccgcttcgtcgtctaacctgcggcggtggctgcgcggagtggcggcgtgcgcttgcgccggcggagcttctgaagatacagcgagcgccgacgaaataggaacgaacgagcggttcccggaaacagaggtccccgaggtcaccgcagcgagatcgagtctgacgcccgcgagtggcagatggctcctcggaggcgacaacacaacccttgccggaatggaggcgttttcttctcccaatcccattcagcccgcgggggatggccaccgtcgtgccaccgacctgggtgaattgtctacgcccatcttgcatccccaagcagcagccacctcccactccgacgagcggcggcgcatcaaaccattggaaacgttctggccggtgccgccggtgggcgaccatgggagctcgctcgggtcagagatgcagcgaagctctgcttctgcagtcgtcgctggaaatacggctctgggtggtgacgctcagcgcgcggccagcggtggcggagggagtccgggcgaggacgacgcggctccgagcgagcttgggtgccagtacccacctagcgaggccagcgttgtctggagcgtggtcaccgcggacggcgcggcgtccggcatcttctccagcggggcgtctgggtactactaccactactgcctcaacgacctcgaccatggtgcgatgcggggcgccggtgccaggaacactcggagaaggagaagcggaatcgtaagcagcagcagcctgctgtgcatgagcgagaaggcagtcgacgctgtcgggccaactcggtccgttcaccgacagtag

SEQ ID NO: 138448 - DNA, 1108 bp, Zea Mays
gattgatgcactcgctcatctcacatgggtgggactcttcgctcttgcatcactgcctgtctagcgggagctactctagcttccggacaccaactccagcgcccctgtatggaacaagtccaccctcactgtctgacagcgagctgcagataccctaatgaaggcagtgatggtgacaatgctccagaaacaagcagtgatgtaagcaatgagagtgacaatgacaatggaaggtctattggaagaacaacccaatgtttagcacaaaatatttgcaccgatcaagaaaggttgtccagtgatgactgtgattccagtaaccaggaacctccccctgttttccaatatatggagcatgatgcaccatatggaagacaaccattagcaaatatgtatttgcatgtaagtttcctgatctaaatacatacaagagctgtgatcttctcccgtccagttggatctctgtagcctggtatcccatataccggataccaacaggacctacgctacaagatctagatgcttgctttttaacattccattcactgtcaacaacacctgacggtgagtgctcgtgtttcttcttggataagacaagccgacgacctgcggcaagaaacagaagaaacaaagcgcccagattgatgtaacggctcagtagctcggtgagcccaggccggccttcaacaatggcatccagcgcaaagctgtggaaccggagagagtttctagggctgcatcgtcaacacgaacaaccaaaccagcaagaggcgttccgacaccaccaccttcccggactaggaaggagaggaaggttgccgtgaagctgtcgaggttccaaacagcagccgcttgagctcgtgcagaatcagggaggaaactgttgttttgtcgtctgtctgctccaacgacgagttctagatttcattgacttgtgtacactgattctttctacaaatcgtgtggtggaattcttctactctgttacccgtactaccaccagcaggattctttctgtaatatgttttggaatttgatcctttctataatttaaactggggaaaggaggcccagccgcccacccagcccatgagacatttttatctca

SEQ ID NO: 138449 - DNA, 1230 bp, Zea Mays
atgactaatgatcaagatctagaattcgaattgtgccatgtgaagcatttcgcatttcacgatctgcaaagtgcaacggacaattttaattccaagaatatattaggtcaaggaggttttggaattgtgtataaaggctgtttgagaaatggaactttagtggtagtgaagagattaaaagatcctgatgttattggtgaagtccaatttcaaacagaagttgagttgattggccttgctgtgcacaggaatctcttgcgtttgtatggattttgcatgacctctaaagaacgattgcttgtatatccatatatgccaaatggcagtgttgctgaccgcttgagagattatcgcaatggaaaaccatctcttgattggagtaaacgcatgcggattgctcttggcactgccagggggttactctaccttcatgaacaatgcaatcctaagatcatccacagggacgtcaaagctgcaaacatattgctcgatggaaatttcgaagcaatcgtcggggattttggattagcaaaacttcttgaccgtcaggaatcacatgttaccactgcaattcggggcactattgggcatattgctcctgagtatctctcaactggacagtcctcggaaaagactgatgtttatgggattggcattctcctattggaactgattactggtcctaagaccttgagcaatggacatggccagtctcagaaaggcatgattctagactgggttagagagctaaaggaggacaagagactggataagctggtcgacagggatctcagagattcatttgatattcttgagctggagtgttcagttgacgtgatcatccaatgcacacagacgaaccctatgctgtggcctaagttgtctgaaattctacacgctcttgaagccaatgtcacgctggcggaaaccagcgtcgaattgaacagggaacctcttccttatggcgtgccttgcagttcctctatgaggcatgaggaccctcacgattcatcgtccttcataatagagccaatcgagctatctggtcccagatgacagctgttgtcggtgtggttgaggcgaaaagaaaagaaaagaaaacagggaaatgatacaattgtacaaaacatgtatatcctagatgtagttcaacttggcaatagtttgctgggcgtgttgccgtaccttacataatattttgaacgtgaggctggggcgaaccttgttggc

SEQ ID NO: 138450 - DNA, 378 bp, Zea Mays
agagcgcaggtggttggatggccgcccatgcgcaactaccggaagaataccctcgccgtcgcgaccgcctccaggagcaaggcgccgacggaggaggccgcgtccggagctgggcccatgtacgtgaaggtgagcatggatggcgcgccctacctcaggaaggtggacatcaagatgtactccagctacgaggacttctccctggcgctcgagaagatgttcagctgcttcatcgctagtcaaagtggtctgcataaatcatcgagcaaagacagactgactaatggctcaaaggtggatgccctcaaagatcaggagtatgtccttacatatgaggataaggatgcagactagatgcttgtcggtgatcttccctgg

SEQ ID NO: 138451 - DNA, 1181 bp, Zea Mays
cccgctgacaatttactagccgttagacagtttatttcaccccatcgcttcctctcctgacgtgttacttcaaattcgaatcccgcgacccaccaaatccaaacaaataaactcgtcatcgacgacgacgacggctctttccttaccaatcaataaaaccattcccaactgagatttgaagcctaaggccgatggggatggaggcgagatgcggtgacctggccgtagctgccggcgcccgcgtccggcgcccgctacaaccgcgggacaccaacgtggcggcgtccacggtagtggtcggcaaggctgcgccgaagcccaaagctcatccaaagggggcgacgaggcccgctttgccttcactgccgccggcaccgctgttcccggtggtgaagccacccccgcccgtgaaggaccagtgcgacgcgtctgttgcgggcgtggccgaagtgtcgctggcggaggagctcgagagggcgcgggagcggcgcgctcggctccgcgcggcgcgggaacagacggaacgggagatggtgagccgtgccgagacgatggagcgagcggcggcggagtgggagcgccgcgcggaggaccagcgaaggctcgtctcggagctcatgcgcctcatcggggtgcctgaggtgtacacgcctgtggaatcactgagatccaaggaagagaggaagcgaagggtggccaccattggtcgttccgggtcgactggctccatctcgacagcatcaacagtgcaggctgatgttggagcaaaagcctgcagtgatcagcaatccgaggatactggagggataatagagacggcaaaagcaaccgagatcacctcctgattttgtgcaattggttccattttcaactgaaagcagagttgcttgtggctttgtttttgccccctagtgtaaatcgtcagttgtgaatgaaatcaaacggcccgtttgtgtgtttcgttcggaatgttgagatgcccaaaagttctatggtcgagatggcgctgtctacatagtagaatgttggggcttcgatttttggggaaaatatgaacatgagcatgtgcatgtgctttcttaatataacaattttgttaaaccccacggccatcttgttataagtttacacttccgtgtaatcgtgcttgaggcctaatacaacatctcggttctttctat

SEQ ID NO: 138452 - DNA, 1190 bp, Zea Mays
gtctaaccgtccatttcccattcccgctgacaatttactagccgttagacagtttatttcaccccatcgcttcctctcctgacgtgttacttcaaattcgaatcccgcgacccaccaaatccaaacaaataaactcgtcatcgacgacgacgacggctctttccttaccaatcaataaaaccattcccaactgagatttgaagcctaaggccgatggggatggaggcgagatgcggtgacctggccgtagctgccggcgcccgcgtccggcgcccgctacaaccgcgggacaccaacgtggcggcgtccacggtagtggtcggcaaggctgcgccgaagcccaaagctcatccaaagggggcgacgaggcccgctttgccttcactgccgccggcaccgctgttcccggtggtgaagccacccccgcccgtgaaggaccagtgcgacgcgtctgttgcgggcgtggccgaagtgtcgctggcggaggagctcgagagggcgcgggagcggcgcgctcggctccgcgcggcgcgggaacagacggaacgggagatggtgagccgtgccgagacgatggagcgagcggcggcggagtgggagcgccgcgcggaggaccagcgaaggctcgtctcggagctcatgcgcctcatcggggtgcctgaggtgagtcctccgtggctgacgttgctaccaattttgagaatttattagacgccatggtggcaggtgtacacgcctgtggaatcactgagatccaaggaagagaggaagcgaagggtggccaccattggtcgttccgggtcgactggctccatctcgacagcatcaacagtgcaggctgatgttggagcaaaagcctgcagtgatcagcaatccgaggatactggagggataatagagacggcaaaagcaaccgagatcacctcctgattttgtgcaattggttccattttcaactgaaagcagagttgcttgtggctttgtttttgccccctagtgtaaatcgtcagttgtgaatgaaatcaaacggcccgtttgtgtgtttcgttcggaatgttgagatgcccaaaagttctatggtcgagatggcgctgtctacatagtagaatgttggggcttcgatttttggggaaaatatgaacatgagcatgtgcatgtgctttcttaatataacaattttgttaaacccc

SEQ ID NO: 138453 - DNA, 806 bp, Zea Mays
attacgatactataacaccacatctgcttgatatagtgttgtgctagcatgctctggatccgagatagtcagcttggacttcatggaggcgtcgtgggacgagcccgccgccttgcactatgggattgaggtgagaggaatcaaggactgagtttcacggagggagacaaccccttcgtcgcatggagaagcttacgaaggcaaggcaacaactcagcggatgtcgttgcacaacaggcggacacctgtgatggagcagtatatagccgaggccggagcaggcatccccagcgtccccatacgcgtttctcgcccccaccccgacagaggccgctcacccgtggtgcagatctcgcccttcaccttctcttccttcggcatcaccgtctccatcggcgtctccgtcctcggcatggcatggtgagtcacagtgtgcctccacaccctgtgtcgccagatctgcacgacgttggaggctctagtggtgtcctccatggaagaaacatagttcaaagggccatacttcatagctatttgcccctcaatgtttcaagtgaaagggcctaagagtattggagcactctatgttacctgcttggcgccaactatttaaaatttactctagggtagtagataattttccttgtcgagttttattttggtatatgtaactttgtaattggtcctaagcgtattggagcactctaagttaacaggtgcttgaagctaatgatgaaattatacagcttggatgaataaacctttgttgtagtgacataaggagcttcgaaactgcaaagaatttt

SEQ ID NO: 138454 - DNA, 1176 bp, Zea Mays
ggttattcattcgtccttctattatctttgcctttgtcttctttcctaagatttcactacttctgcggggtgtcacagtcttaagatcatgtcagggtaggaaatgatgtccgagagtgaagagcatggctcgctcctagacaagatcaacgacaagatcaacgagaagatccatgagtacaagcactcgtcgtcgtcgtcctcctcttcggactcagatgatgacaagaagcccaagaagtctaagaagaagaagctttttggaagaaaacacccattgcatcatgtcctcggaggaggcaaagccgccgaccttgtgctgtggaggaacaaacaggcatctgggagcatattggtaggggtgaccgtgatctggttactgttcgagggcatcggctaccacctccttaccttcctctgccacgcactaattgtgtttctcactatctggttcatctggtccaatgctgcgtcctttgtcaacaggtcacctccaaagttcccagaggtcattctatctgaagtccagtgcatgaaggtagctcatgttgcaaggaaagaaatcaacgaggctttctatacattgcgcaatgttgcttctggaaaagatttgaaaacatatctgatgacagttacagtgctgtggttcatttccataattggaagctgcttcagtttcttgactctgtcttacactattttcctgatggcatacactctgcccatgttgtatgagaaatacgaagatcaagttgatatcgtaggcgagaaggccctcattgagataaaaaagcagtacaaagtgattgatgcaaagtttatctctaagatcccaatgttgtctgagaagaaacaacactgagagagggtgctccaaaggtctaattcagcacattaccaatatatgaaagtagttcctttggctttgctatatcatcatttagcaacctttaagatgataccatagatattatatggattcctaaggttggaaatttgtgtcttccgagtcccctagaatagttgcttcttcctgtctgacagtgaatttgattttgtatggatgtgacatataaataaaaaaataaataaaaagatacggaatacaacacaagagtcaaaatagcacgataaaaagagcaagacatagatttgagataacacaatgattcctaa

SEQ ID NO: 138455 - DNA, 1201 bp, Zea Mays
ccaacacaacgatggagtgaaggcatgaagacccgaaactgaaaccaaaaataaactgcaggcagagggggaaggagagcggcaggagggtcattaaataaatctacttttctgtttcagggtaggaaatgatgtccgagagtgaagagcatggctcgctcctagacaagatcaacgacaagatcaacgagaagatccatgagtacaagcactcgtcgtcgtcgtcctcctcttcggactcagatgatgacaagaagcccaagaagtctaagaagaagaagctttttggaagaaaacacccattgcatcatgtcctcggaggaggcaaagccgccgaccttgtgctgtggaggaacaaacaggcatctgggagcatattggtaggggtgaccgtgatctggttactgttcgagggcatcggctaccacctccttaccttcctctgccacgcactaattgtgtttctcactatctggttcatctggtccaatgctgcgtcctttgtcaacaggtcacctccaaagttcccagaggtcattctatctgaagtccagtgcatgaaggtagctcatgttgcaaggaaagaaatcaacgaggctttctatacattgcgcaatgttgcttctggaaaagatttgaaaacatatctgatgacagttacagtgctgtggttcatttccataattggaagctgcttcagtttcttgactctgtcttacactattttcctgatggcatacactctgcccatgttgtatgagaaatacgaagatcaagttgatatcgtaggcgagaaggccctcattgagataaaaaagcagtacaaagtgattgatgcaaagtttatctctaagatcccaatgttgtctgagaagaaacaacactgagagagggtgctccaaaggtctaattcagcacattaccaatatatgaaagtagttcctttggctttgctatatcatcatttagcaacctttaagatgataccatagatattatatggattcctaaggttggaaatttgtgtcttccgagtcccctagaatagttgcttcttcctgtctgacagtgaatttgattttgtatggatgtgacatataaataaaaaaataaataaaaagatacggaatacaacacaagagtcaaaatagcacgataaaaagagcaagacatagatttgagataacacaatgattcctaa

SEQ ID NO: 138456 - DNA, 1224 bp, Zea Mays
gatcgtagaaaataggttattcattcgtccttctattatctttgcctttgtcttctttcctaagatttcactacttctgcggggtgtcacagtcttaagatcatggtgtttttatgtctcaaacatggtcgcaattgtgacattaggtagatgggagatttttgactgagttttcgtgttttgtgagcgaagtcagggtaggaaatgatgtccgagagtgaagagcatggctcgctcctagacaagatcaacgacaagatcaacgagaagatccatgagtacaagcactcgtcgtcgtcgtcctcctcttcggactcagatgatgacaagaagcccaagaagtctaagaagaagaagctttttggaagaaaacacccattgcatcatgtcctcggaggaggcaaagccgccgaccttgtgctgtggaggaacaaacaggcatctgggagcatattggtaggggtgaccgtgatctggttactgttcgagggcatcggctaccacctccttaccttcctctgccacgcactaattgtgtttctcactatctggttcatctggtccaatgctgcgtcctttgtcaacaggtcacctccaaagttcccagaggtcattctatctgaagtccagtgcatgaaggtagctcatgttgcaaggaaagaaatcaacgaggctttctatacattgcgcaatgttgcttctggaaaagatttgaaaacatatctgatgacagttacagtgctgtggttcatttccataattggaagctgcttcagtttcttgactctgtcttacactattttcctgatggcatacactctgcccatgttgtatgagaaatacgaagatcaagttgatatcgtaggcgagaaggccctcattgagataaaaaagcagtacaaagtgattgatgcaaagtttatctctaagatcccaatgttgtctgagaagaaacaacactgagagagggtgctccaaaggtctaattcagcacattaccaatatatgaaagtagttcctttggctttgctatatcatcatttagcaacctttaagatgataccatagatattatatggattcctaaggttggaaatttgtgtcttccgagtcccctagaatagttgcttcttcctgtctgacagtgaatttgattttgtatggatgtgacatatatatgcctgaccaattgtcattatttgctattcatatatgttactgggt

SEQ ID NO: 138457 - DNA, 93 bp, Zea Mays
cacaacataatatagtggacatgtctaaaacatgtgtcttaccatattcattgtaccaatcagaacattcaataaattaaagtgaccaatcaa

SEQ ID NO: 138458 - DNA, 784 bp, Zea Mays
gtggcatccgttttgtcaggctagctagctagcttcttgcctaaagaacaccttattttgttcaaaggaggcatcagagagtacgtataggacactgaggaatgggtcactggaagagccgtcaccgcagcggaagggacgaggcagctcgagcgaaggaaacccggtgcttggctctggcctgctgcccctgctactacgtgctcggctccgtcgccaggggggttgcgaggtgcctcttcgtggcttgctatccagtgatacaatgctgtggcctcgacgagtgcaggcaccaccaccatgccagcaacttcagccacttcagatgatgcatgcatatatatacatccatcaagctagtaggagtgcatcttctacttgatcagcagttccatttgccctctctttcagcgaagaaagtcgggtttgttagaagtttaactaaatcgtgcaagattctgaagaaattttcttcacgtctttttacaagttctcggtgttcttggactcctgttttggtttactagttgtccacttcttcgctggaggagacagacctgcctgcatcaagactatgactaacgcaataagatagatgagtaaagctgaagaaaactgcctgctaaatggctattggtctcctggaagttattcatagagtggttggttggtgacaacgctttccgattgtttcttccctacaataatgtgcctctcaggggaaaaaacatactcctaataatttcttacagctggttctgggtcccctttctttagcccctaa

SEQ ID NO: 138459 - DNA, 1592 bp, Zea Mays
cagctgaacgcctgaacccaatcctaaggagtagccatttcccccactcttcccgccaccatggccgccgccgctatctctttgccccgctctccctctctccttcaacccacgcgccggcgctcagcgccaccagcctgcacgcagtccgagcgcggcgtctccttcgaccccggctccgccttctaccgcagcgacagcgccgcgggtcgtgacctcgccgtcctcgcagccactctccaccgccgccgtggccgtcccgacccttccgccccattcctctgcctcgatgctatgtgcggctgtggcgtccgcgcgctccgctacctcgcgcaggccggcgccgacttcgtctgggccaacgacgcctccgaggcgcttcgccccatcatccttgccaacctctgtcgctttgagcggggctcgccggaagcggtggcggggtgcaggaggtgggtggtgtcgcacaacgacgccacccgtctgctcgcagagcgctacctccggcgcgagtacttcgatgtcatcgacgtcgactcgttcggcggcgacgccgcttacgtgagggcagcgctcttggcgctcaaaattggggggctgctctacctgacgtccacggattggcggtcggcgagaggatatgggtcgagaaggtggcgctgcacgggaagcatctcttttgggatttcacataacacccctattctcgtattttgcgtatcatggtcctatttatcgagtaatggtacaactatgcaacggaaaagatgatggcatcagtaactatggcttcatttgtcattgcaagagttgtggtcagtctcaaacttttggatttgatgagctggggcagatttcttgtggatgtacagacacaacagtaggatgccgattcaatcactgttgtaggcccactttggacaggtcctctccacgatgcctctttccttaccgaaatgctaggcttggccaacgaatggggatgggcatgcacaattgaaaatggtgtctctttggaaaaacttcttggcatgatgattgaagagagtgacccgaggttgcctcctggatatataagacttgatgagatttcgagacgagcaaaagttaactctcccccactcggcaccctcatcaattcattgcggaaggaggggttttctgcttgtagatctcatattagtgcaaatacaatcaagaccaactgttcaatggcttcttgcatcgatgttgcccggggcatccgaaactcaagatgaatatcaattaccaactatatatggtatggctgcgtgtgcccagcgaggctcacgcgagcttggtgcataaggggctgattggttggatgcacagccagctatccaggctagttaagtatatgcaaatctaggtgtttggtttcctgtattgcttcagtagcctgactaaactgtgcaaaagtggcatccaaacttggctctaggcttgttcgttttgctcttaatccatgtggatttggtaggattaagtgggttttaatttcaaacaagataaaatcttttataatttttttccaatctcatccaatacatataagatgggaataaccggac

SEQ ID NO: 138460 - DNA, 1662 bp, Zea Mays
cagctgaacgcctgaacccaatcctaaggagtagccatttcccccactcttcccgccaccatggccgccgccgctatctctttgccccgctctccctctctccttcaacccacgcgccggcgctcagcgccaccagcctgcacgcagtccgagcgcggcgtctccttcgaccccggctccgccttctaccgcagcgacagcgccgcgggtcgtgacctcgccgtcctcgcagccactctccaccgccgccgtggccgtcccgacccttccgccccattcctctgcctcgatgctatgtgcggctgtggcgtccgcgcgctccgctacctcgcgcaggccggcgccgacttcgtctgggccaacgacgcctccgaggcgcttcgccccatcatccttgccaacctctgtcgctttgagcggggctcgccggaagcggtggcggggtgcaggaggtgggtggtgtcgcacaacgacgccacccgtctgctcgcagagcgctacctccggcgcgagtacttcgatgtcatcgacgtcgactcgttcggcggcgacgccgcttacgtgagggcagcgctcttggcgctcaaaattggggggctgctctacctgacgtccacggattggcggtcggcgagaggatatgggtcgagaagctctttgtcttcatatggagcgtatgttcgtccaatgccatatccaaatgaggtcggtttgcgaatggttataggtggcgctgcacgggaagcatctcttttgggatttcacataacacccctattctcgtattttgcgtatcatggtcctatttatcgagtaatggtacaactatgcaacggaaaagatgatggcatcagtaactatggcttcatttgtcattgcaagagttgtggtcagtctcaaacttttggatttgatgagctggggcagatttcttgtggatgtacagacacaacagatgccgattcaatcactgttgtaggcccactttggacaggtcctctccacgatgcctctttccttaccgaaatgctaggcttggccaacgaatggggatgggcatgcacaattgaaaatggtgtctctttggaaaaacttcttggcatgatgattgaagagagtgacccgaggttgcctcctggatatataagacttgatgagatttcgagacgagcaaaagttaactctcccccactcggcaccctcatcaattcattgcggaaggaggggttttctgcttgtagatctcatattagtgcaaatacaatcaagaccaactgttcaatggcttcttgcatcgatgttgcccggggcatccgaaactcaagatgaatatcaattaccaactatatatggtatggctgcgtgtgcccagcgaggctcacgcgagcttggtgcataaggggctgattggttggatgcacagccagctatccaggctagttaagtatatgcaaatctaggtgtttggtttcctgtattgcttcagtagcctgactaaactgtgcaaaagtggcatccaaacttggctctaggcttgttcgttttgctcttaatccatgtggatttggtaggattaagtgggttttaatttcaaacaagataaaatcttttataatttttttccaatctcatccaatacatataagatgggaataaccggac

SEQ ID NO: 138461 - DNA, 5554 bp, Zea Mays
acaactgcgagtctacgaattccgtaaaccggccgaccaacaaagctgccgtgtgcccgtgtggaagcgtcctcgcctcctcggccccctcgaatcacacgcgccccgcctcattcgtccattccccagccttccagagcccgccgccgccggccgctgctcccccgacgcgggggaagccaccggcggtagcgctcgcttcgccgcgccaaaaacctagcggctccgagctccccgccgcctccgtggcttatatggcgaacccgggcctagggcttggactcgcgccaccgggcgccgagccctccgccggagcgccgccctcttcacgtcgcgcgccgcgcttggccaaacggcgccacgcgcccgcctcctcccgctcccgcatgccgcagacctcagccggaatatggaacccgtttggtggtggcggaggtacggatagacagaccggaggctttgtgtttggtgctgcttcggcagtgagccaacagcctttggagccagcagtgtcagtagcttcacccactgaggcgcccttcgtgtttgggagcgtgagggagagcctgcctcggtttgacgagggatcgcccgcttcatcaaagctccctgataagatggagaagttgaacctgcgaacatcaagtgaggttgacgatggtctcggtcaggggagggatcgaaaggatggaagttcggtatttggtgctgatatatctggtttgttttctagtaacaaggaatctaatgtgctccaggagaagcttacacagttgaatttaggccacaaagaacccttgcaaagtaagaagagggatagtgctaatggtgtgccgcaagcatttgtgtttggaggtaatggagctgggagttttgctgactgtaagaacaaagccgcccctggtgcacattcagatgatcctagttcagttcatggcactgatgcaaaaggtatggctgggaagtcgatgcagttcaatataggcagtcaagcaccttccaggggtggggggattgatcgtactaatggagcaccagaagctttcacgtttcgaagtaccacattaagtggtcatgtggataatataaacaatgttgactctggtgccaataccagttcttccactgttgctaaatgtgtttgtgatgcagattttcctctggaaaagataacacggttgtgtataggaagtgacatgcccttgcatgagacgaaaagtggttatcaacccaaagtgtttacgtttggaagtggaggaatcccaggcgctgtttttgggaaggaaactggcagcacatcagataggagcagtgaattcctctctgcaaatagcaatacttctagttcaagcagtgattttttctctacagcaaatagcaacgtttctaattccgctaatggcacttattgtttgccaccagagaagacaccagatttgaatgcaggagacagagtcatgtcacagagcttggaaggtgataattctaattgtccaacagagacctttctatttgaaagaaatgaaacccgaagctctgtttcgcactctgcaagcatagccatggatgacggtgggaattttgtcaatgatgaaaatactgacacctgtagttcagctcacagtacagtggagtgtgcaggtgctctcccagagaagatgacaaagttaggtataggatgcagaattccacatcatagcaggaaagatgaaactgctaccgatccaccagaagtatatgtatttggatgtaatctttctagcttttcttctgcccagacttcaagtaaatcgaatgatcgcacgactcctgaattttgttttcaaagcaaaacaggggcaacttcaggatatggtgctgttccccaaaccaaagttcaggattcatacccatttacaattttgaataattcatgtactttctctacttttgagaatgcagttcctgctttcagttttgggacactgaatgcagaaacagaaacagctccagatgatcctttttctttttctgtcaaacatgatttgcctgggtattccagagagaccttatttggtttagacagtataaaatctgcatacaaggacaaaagggaagcatgtaaaggaaaaatgaaaaacaagaggccaactaggctaaagcaacatgctcagctccatcaggttatttctaaggaagcctgtaccagtggagaagcatcagatttagcaggtgactgttcaccaatggattgttcgccatatcctgcagaatctgaacatgtgccaacagaggcatatgtggcttctgatcagcccgttcacataggtgatactgttatctcgaacgggaacaccagttgtgctgaggatgatgtagtttctgcagccgagcacttggttactgatgcagacctactgatgtttggagatgaaggtagaggaccgaaactagatgcatctgagagcaattttggtagcagcgtttctagttttgaaggagatcaaagcaatgcatcacaacattctttcactaatattgggcaaaactgtaatgagaatacctacagaactccccatgattttgttgaggctgctgcttttcaatcaaactcatcaaatttcagtgggctgaactttagattcggtgtgtcatcctctccacaaatctctgctgcggcacaaagacgtagcacaagaaggaagttaagaacaaagggtagtctagcatcgaaaccttcaactatcgactctttagaacagccaaaatcttcacaagatactaagggcatgcagtttttctgtgaagcaagtaaaaatgaagactcagtgaaagcgcaacaatcaagagattcttctacttctgtggccttggagacttgtgaaacctggcgtactagtggaaataaagcctatgcaaatggacattttactgctgcagaggattattatacccgtggaataaactctgttacccacaatggcgtttctggacaatgttcccgtgcattgatgctgtgttacagcaaccgtgcagctacaagaatgtcacttggcatgatgtgggaggcgcttcaggattgtttgactgctacatcaattgaccccacttttcttaaagctaaagttagagctgccaagtgccagcttgcattgggcgatcttgaagatgcatcaatgagttacatgtcctgtttgaacagtaacaccgagagctctgaccctaaaatatttgctgaggcttctgatggtttggaaggagtcaagagagtgaccgattgggtatctcagtgcaaggaatttcttgagagaagaacatctcctgaagcaacaaaagccttagaattgatctccaatgcattgcacatatgtccacattcggacagcgtcaaggagatgaaagcagaggcattgttgatgctacgaagatatgaagaagtgattcaactatgccaagagtctgtgaatctgactgaaagaaattcagttttattcaaagacaatggagaaccaaagaattccagagtctctgaacggatgcagttttctggaaggtattggcggccctacctcatttgcaagtcttatttcctttcaggcaagcttgatgaggctcttgaattgttaaagaaacatgagcaagtcacacctgtcaaagaaagtgaagtgaacacatatgaagaaaaattctcatcattgtcagcgactataagagaactactttctcttaaggctgctggaaatgaatcatttcaagctggtagatattcagatgctgtcaaacagtattcagcagctttggcatggaatagtgaatcacgcccattttcagctgtatgtttttgcaatcgtgcagcggcttatcaagcactcggtcaagttactgatgcaatatcagattgttcacttgccatggttcttgatacaaattatccaaaggcaatttcaagacgagccaccttatacaagatgataagggattatgaccaagctgctaatgatgtaaggaagctaatctctcttcttgaaaagaaagtcaatgtgtctggagtatcaccaaaagcttttaacaagcacaatgatctcaagcaagcacatgtgaggctttcatccatagaggatgaagcaaaaaatgacacccccctgaatttgtatttaatcttgggagtggagccatcctgctcttcagaagatattaagaaggcataccggaaagcagcattgagacatcacccagacaaggctactcaattattaataaggaacgagaacgcagaagatggattttggagggatgttgtcaaggaagtctatgcagacgctgatcatctgttcaaaacaattggggaggcatataatgttctttctgacccggccaagcgtgaagagtacaactttgaagaggatctaagaaatgccaggaggagagtatctagttctaggagcatgcataggtcacctgaacagaactacagcaacagaggctttaatccacgccagcggcagtcaagcagagcatcacgttcacgttggtacagcaattcagacgattactggtaaagaagccattacatatggagtgggcatgtggtgcgaagcaacttttgcatgtgtggagcaaaaggcctccttgcaccaagatggcacctgcctttctggggttttttaggtgccggtgctgacgcaccagccttcgcagtctcagctttcgtgtctgtttgctgtgtttcttttccagagggtgaaaatattaggattgatcaactggggatctgggatgattggttgacacttgattagcacagaaaatacgtgggattaggaagtggtacatcaaattatcttttgttggcctggtgatttctgaacactgactgcttgggagtggctggcatgatggtatccactcttgaggagttgaacactgagaacaacttcgaaggttaggagcaaggataaagatgttggttcctcgaatatctgcaggcactcttttgctggatgcatggctactgtttagcacgggcagtttgcagcagatcaactggaaggagacatgctcagatgctcctgtttggcgcgtgcagttctgttctgttgcttctgtttaatccaaacgacgtagcgctggaaacagagtggctacatattacaactggctaactgctcaatgtcggaactcggaatcacgattttttatttattcattgttattagaggttttagctagcccaatgttgagagtattttattcagatcaaggttccttcgaagaaaaaagaggctcgggttacggtgacattggccaattgcaggttctgtcatgttgcttatgatgaaatatttggaacgacttaaacccttggactgctgcatatgtttttttttgcgtgaacgtttcgttgataaacgggatatatacacatattcgaaggccttaaggcacaaagaaaaggagactaattaagggtgtgtttggttggagagtcaactaaaatgagcgaaatgagcggctgtattacagtttttgagaatgaatctattctattttatgtttggcaaacagaatttagccg

SEQ ID NO: 138462 - DNA, 5286 bp, Zea Mays
ccaccggcggtagcgctcgcttcgccgcgccaaaaacctagcggctccgagctccccgccgcctccgtggcttatatggcgaacccgggcctagggcttggactcgcgccaccgggcgccgagccctccgccggagcgccgccctcttcacgtcgcgcgccgcgcttggccaaacggcgccacgcgcccgcctcctcccgctcccgcatgccgcagacctcagccggaatatggaacccgtttggtggtggcggaggtacggatagacagaccggaggctttgtgtttggtgctgcttcggcagtgagccaacagcctttggagccagcagtgtcagtagcttcacccactgaggcgcccttcgtgtttgggagcgtgagggagagcctgcctcggtttgacgagggatcgcccgcttcatcaaagctccctgataagatggagaagttgaacctgcgaacatcaagtgaggttgacgatggtctcggtcaggggagggatcgaaaggatggaagttcggtatttggtgctgatatatctggtttgttttctagtaacaaggaatctaatgtgctccaggagaagcttacacagttgaatttaggccacaaagaacccttgcaaagtaagaagagggatagtgctaatggtgtgccgcaagcatttgtgtttggaggtaatggagctgggagttttgctgactgtaagaacaaagccgcccctggtgcacattcagatgatcctagttcagttcatggcactgatgcaaaaggtatggctgggaagtcgatgcagttcaatataggcagtcaagcaccttccaggggtggggggattgatcgtactaatggagcaccagaagctttcacgtttcgaagtaccacattaagtggtcatgtggataatataaacaatgttgactctggtgccaataccagttcttccactgttgctaaatgtgtttgtgatgcagattttcctctggaaaagataacacggttgtgtataggaagtgacatgcccttgcatgagacgaaaagtggttatcaacccaaagtgtttacgtttggaagtggaggaatcccaggcgctgtttttgggaaggaaactggcagcacatcagataggagcagtgaattcctctctgcaaatagcaatacttctagttcaagcagtgattttttctctacagcaaatagcaacgtttctaattccgctaatggcacttattgtttgccaccagagaagacaccagatttgaatgcaggagacagagtcatgtcacagagcttggaaggtgataattctaattgtccaacagagacctttctatttgaaagaaatgaaacccgaagctctgtttcgcactctgcaagcatagccatggatgacggtgggaattttgtcaatgatgaaaatactgacacctgtagttcagctcacagtacagtggagtgtgcaggtgctctcccagagaagatgacaaagttaggtataggatgcagaattccacatcatagcaggaaagatgaaactgctaccgatccaccagaagtatatgtatttggatgtaatctttctagcttttcttctgcccagacttcaagtaaatcgaatgatcgcacgactcctgaattttgttttcaaagcaaaacaggggcaacttcaggatatggtgctgttccccaaaccaaagttcaggattcatacccatttacaattttgaataattcatgtactttctctacttttgagaatgcagttcctgctttcagttttgggacactgaatgcagaaacagaaacagctccagatgatcctttttctttttctgtcaaacatgatttgcctgggtattccagagagaccttatttggtttagacagtataaaatctgcatacaaggacaaaagggaagcatgtaaaggaaaaatgaaaaacaagaggccaactaggctaaagcaacatgctcagctccatcaggttatttctaaggaagcctgtaccagtggagaagcatcagatttagcaggtgactgttcaccaatggattgttcgccatatcctgcagaatctgaacatgtgccaacagaggcatatgtggcttctgatcagcccgttcacataggtgatactgttatctcgaacgggaacaccagttgtgctgaggatgatgtagtttctgcagccgagcacttggttactgatgcagacctactgatgtttggagatgaaggtagaggaccgaaactagatgcatctgagagcaattttggtagcagcgtttctagttttgaaggagatcaaagcaatgcatcacaacattctttcactaatattgggcaaaactgtaatgagaatacctacagaactccccatgattttgttgaggctgctgcttttcaatcaaactcatcaaatttcagtgggctgaactttagattcggtgtgtcatcctctccacaaatctctgctgcggcacaaagacgtagcacaagaaggaagttaagaacaaagggtagtctagcatcgaaaccttcaactatcgactctttagaacagccaaaatcttcacaagatactaagggcatgcagtttttctgtgaagcaagtaaaaatgaagactcagtgaaagcgcaacaatcaagagattcttctacttctgtggccttggagacttgtgaaacctggcgtactagtggaaataaagcctatgcaaatggacattttactgctgcagaggattattatacccgtggaataaactctgttacccacaatggcgtttctggacaatgttcccgtgcattgatgctgtgttacagcaaccgtgcagctacaagaatgtcacttggcatgatgtgggaggcgcttcaggattgtttgactgctacatcaattgaccccacttttcttaaagctaaagttagagctgccaagtgccagcttgcattgggcgatcttgaagatgcatcaatgagttacatgtcctgtttgaacagtaacaccgagagctctgaccctaaaatatttgctgaggcttctgatggtttggaaggagtcaagagagtgaccgattgggtatctcagtgcaaggaatttcttgagagaagaacatctcctgaagcaacaaaagccttagaattgatctccaatgcattgcacatatgtccacattcggacagcgtcaaggagatgaaagcagaggcattgttgatgctacgaagatatgaagaagtgattcaactatgccaagagtctgtgaatctgactgaaagaaattcagttttattcaaagacaatggagaaccaaagaattccagagtctctgaacggatgcagttttctggaaggtattggcggccctacctcatttgcaagtcttatttcctttcaggcaagcttgatgaggctcttgaattgttaaagaaacatgagcaagtcacacctgtcaaagaaagtgaagtgaacacatatgaagaaaaattctcatcattgtcagcgactataagagaactactttctcttaaggctgctggaaatgaatcatttcaagctggtagatattcagatgctgtcaaacagtattcagcagctttggcatggaatagtgaatcacgcccattttcagctgtatgtttttgcaatcgtgcagcggcttatcaagcactcggtcaagttactgatgcaatatcagattgttcacttgccatggttcttgatacaaattatccaaaggcaatttcaagacgagccaccttatacaagatgataagggattatgaccaagctgctaatgatgtaaggaagctaatctctcttcttgaaaagaaagtcaatgtgtctggagtatcaccaaaagcttttaacaagcacaatgatctcaagcaagcacatgtgaggctttcatccatagaggatgaagcaaaaaatgacacccccctgaatttgtatttaatcttgggagtggagccatcctgctcttcagaagatattaagaaggcataccggaaagcagcattgagacatcacccagacaaggctactcaattattaataaggaacgagaacgcagaagatggattttggagggatgttgtcaaggaagtctatgcagacgctgatcatctgttcaaaacaattggggaggcatataatgttctttctgacccggccaagcgtgaagagtacaactttgaagaggatctaagaaatgccaggaggagagtatctagttctaggagcatgcataggtcacctgaacagaactacagcaacagaggctttaatccacgccagcggcagtcaagcagagcatcacgttcacgttggtacagcaattcagacgattactggtaaagaagccattacatatggagtgggcatgtggtgcgaagcaacttttgcatgtgtggagcaaaaggcctccttgcaccaagatggcacctgcctttctggggttttttaggtgccggtgctgacgcaccagccttcgcatctcagctttcgtgtctgtttgctgtgtttcttttccagagggtgaaaatattaggattgatcaactggggatctgggatgattggttgacacttgattagcacagaaaatacgtgggattaggaagtggtacatcaaattatcttttgttggcctggtgatttctgaacactgactgcttgggagtggctggcatgatggtatccactcttgaggagttgaacactgagaacaacttcgaaggttaggagcaaggataaagatgttggttcctcgaatatctgcaggcactcttttgctggatgcatggctactgtttagcacgggcagtttgcagcagatcaactggaaggagacatgctcagatgctcctgtttggcgcgtgcagttctgttctgttgcttctgtttaatccaaacgacgtagcgctggaaacagagtggctacatattacaactggctaactgctcaatgtcggaactcggaatcacgattttttatttattcattgttattagaggttttagctagcccaatgttgagagtattttattcagatcaaggttccttcgaagaaaaaagaggctcgggttacggtgacattggccaattgcaggttctgtcatgttgcttatgatgaaatatttggaacgacttaaacccttggactgctgcatatgtttttttttgcgtgaacgtttcgttgataaacgggatatatacacatattcgaaggccttaaggcacaaagaaaaggagactaattaagggtgtgtttggttggagagt

SEQ ID NO: 138463 - DNA, 4622 bp, Zea Mays
ccaccggcggtagcgctcgcttcgccgcgccaaaaacctagcggctccgagctccccgccgcctccgtggcttatatggcgaacccgggcctagggcttggactcgcgccaccgggcgccgagccctccgccggagcgccgccctcttcacgtcgcgcgccgcgcttggccaaacggcgccacgcgcccgcctcctcccgctcccgcatgccgcagacctcagccggaatatggaacccgtttggtggtggcggaggtacggatagacagaccggaggctttgtgtttggtgctgcttcggcagtgagccaacagcctttggagccagcagtgtcagtagcttcacccactgaggcgcccttcgtgtttgggagcgtgagggagagcctgcctcggtttgacgagggatcgcccgcttcatcaaagctccctgataagatggagaagttgaacctgcgaacatcaagtgaggttgacgatggtctcggtcaggggagggatcgaaaggatggaagttcggtatttggtgctgatatatctggtttgttttctagtaacaaggaatctaatgtgctccaggagaagcttacacagttgaatttaggccacaaagaacccttgcaaagtaagaagagggatagtgctaatggtgtgccgcaagcatttgtgtttggaggtaatggagctgggagttttgctgactgtaagaacaaagccgcccctggtgcacattcagatgatcctagttcagttcatggcactgatgcaaaaggtatggctgggaagtcgatgcagttcaatataggcagtcaagcaccttccaggggtggggggattgatcgtactaatggagcaccagaagctttcacgtttcgaagtaccacattaagtggtcatgtggataatataaacaatgttgactctggtgccaataccagttcttccactgttgctaaatgtgtttgtgatgcagattttcctctggaaaagataacacggttgtgtataggaagtgacatgcccttgcatgagacgaaaagtggttatcaacccaaagtgtttacgtttggaagtggaggaatcccaggcgctgtttttgggaaggaaactggcagcacatcagataggagcagtgaattcctctctgcaaatagcaatacttctagttcaagcagtgattttttctctacagcaaatagcaacgtttctaattccgctaatggcacttattgtttgccaccagagaagacaccagatttgaatgcaggagacagagtcatgtcacagagcttggaaggtgataattctaattgtccaacagagacctttctatttgaaagaaatgaaacccgaagctctgtttcgcactctgcaagcatagccatggatgacggtgggaattttgtcaatgatgaaaatactgacacctgtagttcagctcacagtacagtggagtgtgcaggtgctctcccagagaagatgacaaagttaggtataggatgcagaattccacatcatagcaggaaagatgaaactgctaccgatccaccagaagtatatgtatttggatgtaatctttctagcttttcttctgcccagacttcaagtaaatcgaatgatcgcacgactcctgaattttgttttcaaagcaaaacaggggcaacttcaggatatggtgctgttccccaaaccaaagttcaggattcatacccatttacaattttgaataattcatgtactttctctacttttgagaatgcagttcctgctttcagttttgggacactgaatgcagaaacagaaacagctccagatgatcctttttctttttctgtcaaacatgatttgcctgggtattccagagagaccttatttggtttagacagtataaaatctgcatacaaggacaaaagggaagcatgtaaaggaaaaatgaaaaacaagaggccaactaggctaaagcaacatgctcagctccatcaggttatttctaaggaagcctgtaccagtggagaagcatcagatttagcaggtgactgttcaccaatggattgttcgccatatcctgcagaatctgaacatgtgccaacagaggcatatgtggcttctgatcagcccgttcacataggtgatactgttatctcgaacgggaacaccagttgtgctgaggatgatgtagtttctgcagccgagcacttggttactgatgcagacctactgatgtttggagatgaaggtagaggaccgaaactagatgcatctgagagcaattttggtagcagcgtttctagttttgaaggagatcaaagcaatgcatcacaacattctttcactaatattgggcaaaactgtaatgagaatacctacagaactccccatgattttgttgaggctgctgcttttcaatcaaactcatcaaatttcagtgggctgaactttagattcggtgtgtcatcctctccacaaatctctgctgcggcacaaagacgtagcacaagaaggaagttaagaacaaagggtagtctagcatcgaaaccttcaactatcgactctttagaacagccaaaatcttcacaagatactaagggcatgcagtttttctgtgaagcaagtaaaaatgaagactcagtgaaagcgcaacaatcaagagattcttctacttctgtggccttggagacttgtgaaacctggcgtactagtggaaataaagcctatgcaaatggacattttactgctgcagaggattattatacccgtggaataaactctgttacccacaatggcgtttctggacaatgttcccgtgcattgatgctgtgttacagcaaccgtgcagctacaagaatgtcacttggcatgatgtgggaggcgcttcaggattgtttgactgctacatcaattgaccccacttttcttaaagctaaagttagagctgccaagtgccagcttgcattgggcgatcttgaagatgcatcaatgagttacatgtcctgtttgaacagtaacaccgagagctctgaccctaaaatatttgctgaggcttctgatggtttggaaggagtcaagagagtgaccgattgggtatctcagtgcaaggaatttcttgagagaagaacatctcctgaagcaacaaaagccttagaattgatctccaatgcattgcacatatgtccacattcggacagcgtcaaggagatgaaagcagaggcattgttgatgctacgaagatatgaagaagtgattcaactatgccaagagtctgtgaatctgactgaaagaaattcagttttattcaaagacaatggagaaccaaagaattccagagtctctgaacggatgcagttttctggaaggtattggcggccctacctcatttgcaagtcttatttcctttcaggcaagcttgatgaggctcttgaattgttaaagaaacatgagcaagtcacacctgtcaaagaaagtgaagtgaacacatatgaagaaaaattctcatcattgtcagcgactataagagaactactttctcttaaggctgctggaaatgaatcatttcaagctggtagatattcagatgctgtcaaacagtattcagcagctttggcatggaatagtgaatcacgcccattttcagctgtatgtttttgcaatcgtgcagcggcttatcaagcactcggtcaagttactgatgcaatatcagattgttcacttgccatggttcttgatacaaattatccaaaggcaatttcaagacgagccaccttatacaagatgataagggattatgaccaagctgctaatgatgtaaggaagctaatctctcttcttgaaaagaaagtcaatgtgtctggagtatcaccaaaagcttttaacaagcacaatgatctcaagcaagcacatgtgaggctttcatccatagaggatgaagcaaaaaatgacacccccctgaatttgtatttaatcttgggagtggagccatcctgctcttcagaagatattaagaaggcataccggaaagcagcattgagacatcacccagacaaggctactcaattattaataaggaacgagaacgcagaagatggattttggagggatgttgtcaaggaagtctatgcagacgctgatcatctgttcaaaacaattggggaggcatataatgttctttctgacccggccaagcgtgaagagtacaactttgaagaggatctaagaaatgccaggaggagagtatctagttctaggagcatgcataggtcacctgaacagaactacagcaacagaggctttaatccacgccagcggcagtcaagcagagcatcacgttcacgttggtacagcaattcagacgattactggtaaagaagccattacatatggagtgggcatgtggtgcgaagcaacttttgcatgtgtggagcaaaaggcctccttgcaccaagatggcacctgcctttctggggttttttaggtgccggtgctgacgcaccagccttcgcagtctcagctttcgtgtctgtttgctgtgtttcttttccagagggtgaaaatattaggattgatcaactggggatctgggatgattggttgacacttgattagcacagaaaatacgtgggattagg

SEQ ID NO: 138464 - DNA, 723 bp, Zea Mays
atgtgggagtcaataataggagttctgggaattgtgaatcaaggacagcgaaatccatcaagggctagaggtttggttgctaacatggagtcattttgttttgtgttaatcatgaagatgatgttgcaaatccttcgcatcacaaatgagttgtcccttctgttgcaaaagaaggatcaaaacattgttcatgctatgtctttagttgttgatgtgaaaattcgtttgaatgatttgagaagtaaaggttgggatctattgtttgaaggagttaaagctttttgtgtggaagctggtattgatataccagatatggatggtccaataccaagatttggtcagtcaagaagaggatgaagaaataatatcactcaagatcatttttatcgtgttgatatcttctatgctgctattgactctcttatattagagttggatcatcgattcaatgaggtatcctccgaattgcttacttgttttgcttgtcttgatccaagagattcattcagcaagtttgatgtgaataagcttgctagtcttaccgagatatatttggaggatttctcttttgatgatcgcaagttaatcaaagatcagttactgacatttattgttcatgtgcgaagagttgatgaattcaaagcttgtcatgatcttgcaagcctagcaaaaacaatggttgaaattggcagggatactatattttttttggtatgacagtta

SEQ ID NO: 138465 - DNA, 213 bp, Zea Mays
atggggcctgtctctgtcctgccgctgctccgcccccagtgcctctgtccgccgtggctgaggcgccgagctgcctgcaggttatgggcctacggcctgtccctatccctccgtgtgtgctccatccgtcgaggccgagcaggtgataatgatgccaaatcaaagggaaagaggacgaagtcgcaaatttgtatatttaaagagctattttag

SEQ ID NO: 138466 - DNA, 525 bp, Zea Mays
ccctggccccgacggatcttggtcggctcctgcgctctccctactggatgccgccctgcttcgctcccaactgctggcgtcgggttatccacatgtcccgctcgacaccactggcgcggcccccgtgcgtggctgcgccctgccgctgactgtctacagccaaccgtccaccatcacctccgccctgcgagctccctcggatgacgttgttgctcttctcgccgccactcgagcagccgttacggctgctcgccagcgggcccaggacaccgcccgtgcacttgagcaggagcaggcggtgctcgacgccatcgtgcgccagtacgccgagacctaccgtcgtctcgctggcaagggagtctcggatggctcccccacgtccgctcgccaccgcgccgacaccttcgagcccgcgcctaccccggcctcaaccctctgcgcttcccttcacgctcaggcggcggccctcaccagcatccgggcaacagtcaccgatgttcttgcgccgaactccactcagtaccc

SEQ ID NO: 138467 - DNA, 359 bp, Zea Mays
ggtccaaaactagtaccaatcaatacaggaccagtgtgttagtatttgtgtaaatacatgcttactgccgcgtccacccaaagtcctagtgttaccgatgaacaacaactgttacacaaacatgaaaatgggcggtggagcaccgtttcttgggttacgagcaaggctgcagtgtcctgttcgatatctgttttttcgttcgcaatcaatcaggcgctcggagctgagctgggtatcttgaattgcttcttcacgtaatgtgatgcctctgaatcatttctgtgacacaggaccctaaggagggttttggagtccgctccaaatttgctcttgccaccttgagtaacttctcgtaggtc

SEQ ID NO: 138468 - DNA, 2061 bp, Zea Mays
cgcagcacgtggacgcgaagccttgccgaaagttttccctacgcgttcgcaagagctcgtaaccatcacggcctccgcttctccattcgatcccatataagcctccgccacccacagagccacgcgtcgaacggaacccagaggaacagagcagacgacgcgaggcgatttctgcgggtttgcttgctccatctgtagaccttaggccgccgccgggcgaccgtgcgcgtgcggtgctcacgccccaccccgctcaggtgaaggcacttcaagatgggcgaggtacacgaagctgacaagaacattgagatctggagggtgaagaagttaatcaaggcacttgatgctgcaaggggcaatggcactagcatgatttctctgatcatgccacctcgtgatcagattgcacgcgtcactaagatgctgggtgatgagtacggaactgcctcaaacatcaagagcagagtcaacagacagtctgtgttggctgccataacctcggctcaacagaggttgaagctttacagtcgagttccccccaatggtttggtgctctatactggtaccattgtcaccgatgatggcaaggagaagaaggttacctttgacttcgagccatttaggcccattaatgcttccctgtatctctgtgacaacaagttccacactgagtccctgaacgagcttctgacgtctgatgacaagtttggtttcataatcatcgatggcaatggtacactgtatggtacactgagcggaaacagcagggaggttctgtacaagttcagtgttgatcttccaaagaagcatgggcgaggagggcaatcagcagtccgctttgcccgcctgcgcatggagaggcgacacaattacctgcgcaaggttgctgagcttgcgacacaatacttcatcaatcctggcaccaaccagccgaacatcgttgggcttattcttgccggttctgctgacttcaagagcgagctgggtaaatctgagatgttcgatccacgccttcaggccaaagtagtgaagatgattgacgtgtcttatggtggggacagcggcttcaaccaagccatcgagatgtctgccgaggttctttctgatgttaagtttgtccaagaaaagaagctgatcgggaagtacttcgaggagataagccaagacacagggaagtacgtccttggcatccaggacaccatcacagccctggaaatgggcgcggtagagatcctgatcgtgtgggaaaaccttgatgtcaggcgttatgagctcaagaacagtgccacaggagagacagtcgtgaagtacctgaacccagctcaggaggctgaccagagcaacttcactgacgaggcgacatccggagatctggaggtcattgacaacacgcagctgctggagtggttcgcggagaactaccaccagttcggctgcacgctggagttcgtcaccaacaagtcacaggaaggttctcagttctgccggggattcggcgggattggtgggatccttcgctacccagccgacgtcagtgcctaccaggacggtgacttgtctgatggggagtatgatgaagacttggaatagcaatcaaccagaactcaaatgaatccggtccgggaggagcctgcgctggcccgggccgtgccgggggggggaaccctgaaacttccaaacgatcggtgcaaggagaccatggtggaggatctgtagggaaggaggcttgagcaacttatataggatatatatatggaagcttgtcaagctggtgagtggtgactttggagacggtgttttgctctgttgatccgagcttgcagtctggtgctactaggaatcagccgtggacgctgccttctgttggtcaggagagcctataatcgatcaactagcatcctattagtattgggttggtgccagtagtatggtgaataaaatacctggaggactcccgaggttgcacgttcgctttatgacgtgcgtgatatctatgattgtgaaaatgtctgtgacctgtcatttcttataatccattctctcgttgttgtggattgaggc

SEQ ID NO: 138469 - DNA, 413 bp, Zea Mays
aggtccagttccagcctctctcaactctcatccggtcgtccatggctgactcgtcgtcttcgtcctagctgaatcgccgtcgtgccttgcaagccgtgcgtcggcatcacgccctcgccctcccctctcgccctcccaaaaacgccgcagcgtcgtggcctcccagatcggcgacggcatcaacagagatagagtcgtacagacaggcaccacgtataaactataaactactgaactagcaactatttgctttgctctctatatgaatatagtctctgtatgaatattgaatttgttagcaccggtgatctctcccaggtggcctcagcgtatgaatatgctagtttctaccatgtaaattgcgagtgactatgatacagttagtgagcctattatattgggatgttttcata

SEQ ID NO: 138470 - DNA, 806 bp, Zea Mays
tattttgtgtgtctttttatcatgatccatatgacgtttaatctgagtaacatgttacttgcacgattttttctgatgattgatacttatatgactgactattcaccctttaaaattattgcagtttaccaggatacatatttttgtaattgtttgtgacatgttagtcttttgtttaacctatttcatccatagggttctgcaaaacatccttttgtgaaatgatcctcgaccgtcaattctttgaaatgttccctagtaaaatgatttattcttgatggttcaaaagtttccctattccttggatgtatcatatgcatcggggatgtcatattgaagaatcagtataataatatggactatttggaggggtctttaaatgagcttggaagttggtgcataaggctgcaacaccgtctagtgagggtgttttggacaaagaaaacttgtaccttaaaacaggaggatacaagaagctggagtggttgtctgaaggcttttgaactgcttgaagcattagtgtagctttggtgcttttgtgactgatcaactctggagcagctagagtgatgtagttgtgggcttttgaacaatagctggagtgatatgaaatattagtgatgtagttgtgggcttttgaactgcttcaagctggagtgatgtcgttgtggtgcttttgtgactgatcatctctggagcttttgtgaatgatctagctagctatctgtaaatgatctagtcgtgaatgatattataattgtgatgcttttgtgaatatataattgtggtgcttttgtgtttatgtg

SEQ ID NO: 138471 - DNA, 810 bp, Zea Mays
cctactcagcctctcctgcacgccgccgcccatggtaccaaactcgaccgccaaagcccctggccgagctcccccatggcgtctcccccaaccatggtgctctctgctcctccacggcgctgagctccaccagccgctgctcttgaacgctagcgccaacctcatctttgctcctctctcccgcatctctgcaggtcgcccaggtcgtggcctcgccggatcccgcgcgctcctgtgtcgtggcgttgtccccatgttttctccgcgccagcgcgccaccggctctacttgagctcctccctcgccgtagctcacaggtcgccaccccatggctgctgctcctctctccctcatctctgcaactcggcgcctcctctactcctccacctgcagttcgccccatgttctggacgccaaccctccatccccctaccctccagccatggacgccctagctcccttttgttgctcgctagggaccagctcggtgccctctcctcacttgaagccggcaacaacgccttggtagtggtcgagcagcacgtcgtcggctccgtgggttttttgggcagcccggttgcggtgtcgtcaaaccccgcttgcagttcaacagttgaatttcatcgagtcccagccagtttgattatatgaaccagaggcaagccaggatgccctaggtgtggatctctgttaggctgtgaagccttttttatcataaagtcactgccttctccattcttgtttgcctatatttttgtgagatatagcctgcccgagagagggagtttttaaaagcggtatgaaaatctg

SEQ ID NO: 138472 - DNA, 1820 bp, Zea Mays
atttatttagtccctctccctccctccctcactcctccgctgaggcgaggcaaccccgtcaacccgaggatcccacgcgaaccctagccagctagcaagccaccgcggccgggtccaatggcggaggacgggggcgacagggaccaccagcagcagccgccggcggcggcggccgctgcggcgtcagacagcgccggggtggaggggcgcagcagggagagcgtcaagctcttcgtgggacaggtgcccaagcagatgtccgaggccgagctcgctgccatgttccgcagcgtcgccctcgtcgacgaggtcactgtcatccgcgacagggtcaccagggtctcgcgaggctgctgcttcgtgatctgcccatcaagggaggaggctgataaggctgtgactacataccacaacaagcgcacactacctggggcctcaagtccattgcaagtaaaatatgccgatggggagttggaaagattggagcacaagctcttcgttggaatgctccccaaaaatgtaacacatgctgaaatgacggatttattttcaaaatatggaaatataaaggatttacagattctgagaggctctcagcaaacgagcaaagctggttgtgcctttctaaaatatgaaacaaaagagcaagctgtggctgctatagaagctctaaatggaacacacaaaatagagggttcaagtgttcccttggttgtcaaatgggctgacactgaaaaggaaaggcaggctcgaaaagcacaaaaagctcaattccagtcttctaacatgttgaatgcaaatgctatgcagcagaattcagtgtttggaggtttacagatgggttatgtgccgcagtacaatggatttggctaccagccacaaggaacctacgggcttatgcaataccctcctctatctcctgtgcaaaatcaagctgccttccagaatatggttcagcctgttaatcaaggaagctcgatccatggagctaattctgaagtttcgcctaatccagttcctagatcatttaattccgcgcagttgggaagcccctattcgcctttgcctggtttgcagtatcctggagtgtatcctggtggtcctattaatcatcgccccttttcaagttctcacagttcaaccaaagttcaaaactcaagtgctaattcgccgtcttcgagtcccagcagcaatcctggcccccagatagagggtcctcctggagccaatttgttcatataccacatcccgcaagaattcggtgaccatgatcttgccagtgcattccatagtttcggtagggtactgagcgccaaagttttcgtagacaaggcaactggtgttagtaaatgctttggtttcgtaagctacgactctccagcctctgcacaggcagccatcagtgtgatgaatggataccaattaggcggcaaaaagttgaaagtacagctcaagagagacaacagcaagcacagtaaacctttctgacaaagcgacctcgttgtgtgctctcaccacgttcaggaaaaagtcggtacatatgtgtcacaattgatcattacattgtttcctccggcctctcaccattgcgttgccgccggtggtggctcttgttgtatctttgttcaattcacattcttgaaaactgtcgcattgtgtatttttcgtcgcagcgtagctgtagcgtttgtaccatcatcagatcttgtacatcagacattgatttattcaattgttttttaaaaaaaaattcacatggattattttgttgtaaataatgttttaggaatttccagtatgtgacatgtttgagtatttct

SEQ ID NO: 138473 - DNA, 1840 bp, Zea Mays
atttatttagtccctctccctccctccctcactcctccgctgaggcgaggcaaccccgtcaacccgaggatcccacgcgaaccctagccagctagcaagccaccgcggccgggtccaatggcggaggacgggggcgacagggaccaccagcagcagccgccggcggcggcggccgctgcggcgtcagacagcgccggggtggaggggcgcagcagggagagcgtcaagctcttcgtgggacaggtgcccaagcagatgtccgaggccgagctcgctgccatgttccgcagcgtcgccctcgtcgacgaggtcactgtcatccgcgacagggtcaccagggtctcgcgaggctgctgcttcgtgatctgcccatcaagggaggaggctgataaggctgtgactacataccacaacaagcgcacactacctggggcctcaagtccattgcaagtaaaatatgccgatggggagttggaaagattggagcacaagctcttcgttggaatgctccccaaaaatgtaacacatgctgaaatgacggatttattttcaaaatatggaaatataaaggatttacagattctgagaggctctcagcaaacgagcaaagctggttgtgcctttctaaaatatgaaacaaaagagcaagctgtggctgctatagaagctctaaatggaacacacaaaatagagggttcaagtgttcccttggttgtcaaatgggctgacactgaaaaggaaaggcaggctcgaaaagcacaaaaagctcaattccagtcttctaacatgttgaatgcaaatgctatgcagcagaattcagtgtttggaggtttacagatgggttatgtgccgcagtacaatggatttggctaccagccacaaggaacctacgggcttatgcaataccctcctctatctcctgtgcaaaatcaagctgccttccagaatatggttcagcctgttaatcaaggaagctcgatccatggagctaattctgaagtttcgcctaatccagttcctagatcatttaattccgcgcagttgggaagcccctattcgcctttgcctggtttgcagtatcctggagtgtatcctggtggtcctattaatcatcgccccttttcaagttctcacagttcaaccaaagttcaaaactcaagtgctaattcgccgtcttcgagtcccagcagcaatcctggcccccagatagagggtcctcctggagccaatttgttcatataccacatcccgcaagaattcggtgaccatgatcttgccagtgcattccatagtttcggtagggtactgagcgccaaagttttcgtagacaaggcaactggtgttagtaaatgctttggtaaccgattcttcccagtttcaattccagtgacaggacatcattaccttacagacattgtttgctaacttattttcctgtataggtttcgtaagctacgactctccagcctctgcacaggcagccatcagtgtgatgaatggataccaattaggcggcaaaaagttgaaagtacagctcaagagagacaacagcaagcacagtaaacctttctgacaaagcgacctcgttgtgtgctctcaccacgttcaggaaaaagtcggtacatatgtgtcacaattgatcattacattgtttcctccggcctctcaccattgcgttgccgccggtggtggctcttgttgtatctttgttcaattcacattcttgaaaactgtcgcattgtgtatttttcgtcgcagcgtagctgtagcgtttgtaccatcatcagatcttgtacatcagacattgatttattcaattgttttttaaaaaaaaattcac

SEQ ID NO: 138474 - DNA, 2326 bp, Zea Mays
acctttccaggaagctgaatcaacagaaacgcgtagaaataacgaaaagtacaaaaatattgcgctgaagtttccgtgtacgacggtcaggctcaggctcagcatgaaatagccgcgtccggcgtttcatcatctcagtccccggcgcggcaggtgaaattcgagtactcctgactgttcagttcactataatatcccttggtgccgttgcccttgcctcaaatctatacgtaagtggaaacgttggaggagatcgatcgatcgggatgggtgggtgcttctccgtgcacggtgacgtgcgcggcggcatggagggcgtcggcggtggcgcgaggacccagggcggcgcggcgtcgtcgtctgcgcagcagggcgggccgaacgatgcggtcgactatttcttccagacgcgcgggctccgcggcctctacacgcccatcgagttgtcattttcagcatcgaagttgcggaatacagattccttttcaaagagtgatcctatgttagtggtctacactaacatcaaaggaaagctagaggagattggccgtactgaagtgattttaaattcactggagccctcatggattacaaaggttacaatgtcttaccaatttgagattgtgcaaccactcatattcaggatatatgatgttgacacaaagtaccacaacactccagtgaagacattgaatttgacacagcaggattttctgggggtagcatgctgcaacttatcagagattgtaacaaaatttaaccgtagcctgacattgaatcttcagagtgattgtggacatggtcttcatggaacaatgacagtacatgctgaagaaagtgactcctctagaatggcagttgagatgactctgcgttgcgtgaacttggaaaataaagatgtgttctccaaaagtgatcccttcttaagaatatctaaactggtagagactgctggtcccattccaatctgcaaaacggaagtagtacctgacaacttgaaccctgtttggaggccaatcactttaacatcgcagcagtatggaagcaaggataacccactgctagttgagtgttttgattttaattccagtggtgaccatgaactgataggggccttccagacaactattactcagcttgaaaatctatatacctcaaagtctgcagcaattttttacaaccacaagggacaaagaaagatgaaagaacaattgtttgtggacaagtttcaggaaacagtccagcatactttcttagattatatatccagtggatttgagctcaatttcatggtggctatagattttactgcttcaaatggagacccacgtgtaccccagtccttgcactacattgacccctctggcagacctaattcgtatcaacaggcaatgctgggggttggcgaagttctgcagttttatgacaatgataggcgatttcctacgtggggttttggagcaagggtacatggttatgtatcacattgctttaacttgaatacagctacaaatgactctgaggtggttggagttgaaggcatcatgtcagcatacacctcttctctttacagtgtttcccttgctgggccaactatgttcgggcccgtgatcaacaaagctgcagatattgcaagccagtcccttcaatattcaaacaataaatattttgtccttctcattatcacggacggagttctcactgacatccaagaaacaaaagattgcattgtaagggcatcagacctgccattgtcgattctcattgtaggcgttggaaacgctgatttcaaacaaatggagatcttagacgcggacaatggtaagcgactggaaagctctacgggtaggatcgcgacacgcgacatcgtccagtttgttcccatgagggaagtccaaggtggcgagatctccgtcgtgcaatcccttctggaggaactgcccggtcagttcctgcagtacatgcgcactcggggaatcaagccacagcgggctccggggcttgcttcagcgcccgtttacccacctcagcagtgaccagaagaaaacgtgcacgagctgatccatttgcctcaactgtggattccgctagcgtcccgtcccgtggtagcctagtactcttgttcatacggtctctggttagctttctctttgccgcagttggtaaatatccatgctgtagaatctagatccagcacaaatagatagtaaaacactgctttcctctaggttaagctagacgatgtaaattcgtgctgcagattgccaagtattcaggttgtcgtgaaacgtcattattatcacctgctttcatattaagtactatc

SEQ ID NO: 138475 - DNA, 1782 bp, Zea Mays
acattgggctggtccggccactccgacacccttatataaagtcccgaaccctagaggcaagcaccttcctccccaactcgccgtctgccttctgcgcctccatttcggcctctgtcccttgcaagttcaatctcacctccaaccatgggtaaagagaagtcccacatcaacattgtggttattggccacgttgactctggcaagtcgaccaccacaggacacctgatctacaagcttggaggcattgacaagcgtgtgatcgagaggtttgagaaggaggctgctgaaatgaacaagcggtccttcaagtacgcgtgggtgctcgacaagctcaaggctgagcgtgagagaggtatcaccattgatatcgctctgtggaagtttgagaccaccaagtactactgcacggtcattgatgcccctggacaccgtgacttcatcaagaacatgatcactggtacctcccaggctgactgtgctgtccttatcattgactccaccactggtggttttgaggctggtatctccaaggatggccagacccgtgaacatgctctccttgcgttcacccttggagtgaagcagatgatttgctgctgcaacaagatggatgcaaccactccgaaatactccaaggcacgttatgatgagattgtgaaggaagtctcatcctacctcaagaaagttgggtacaaccctgataagattgcctttgttcccatttctggttttgagggcgacaacatgattgagaggtccaccaaccttgactggtacaaaggcccaaccctgcttgaggctcttgaccagatcaccgagcccaagaggccttcggacaagcccctgcgtctgcccctccaggatgtgtacaagattggtggtattggaactgtaccggttggtcgtgtggagactggtgtcatcaagcctggtatggtagtcacctttggtccaactggcctgactactgaggtgaagtctgttgagatgcaccacgaggcgcttcaggaggctcttccgggcgacaatgttggcttcaacgtgaagaacgttgctgtcaaggatctcaagcgtgggttcgtggcctccaactccaaggatgaccctgccaaggaggctgccagcttcacctcccaggtcatcatcatgaaccaccctgggcagattggcaacggctatgccccagtgctggactgccacacctcccacatcgccgtcaagtttgctgagctcattaccaagatcgacaggcgatctggcaaggagctcgagaaggagcccaagttcctgaagaacggtgatgctggtatggtgaagatgattcccaccaagcctatggtggtggagacattctccgcgtatcctcccctgggtaggtttgccgtccgcgacatgaggcagacggttgctgttggagtcatcaagagtgtggagaagaaggacccaaccggcgccaaggtgaccaaggcggccgccaagaagaaatgatgcgatcccgtgtctgcttttgcagtgcctggataacttgccactaaagttgtgtatgcggttgttgctgttattgcgtggactgtttgctgcggtgtctcctgtttgtttgggtagcgcagcgtcggcctcttcaggtgtctgttgtctgttgtctttactatcagtaatgctcctgagacttgtatttctccttttggcgccgctaaatggaattttcgaacaatgattttcgtgttattattttacaaccttttcgaacaatatttacacgtctgatgtgttttgctgaga

SEQ ID NO: 138476 - DNA, 644 bp, Zea Mays
acattgggctggtccggccactccgacacccttatataaagtcccgaaccctagaggcaagcaccttcctccccaactcgccgtctgccttctgcgcctccatttcggcctctgtcccttgcaaggtagctaatcctctgtcgctcgatctttgtccttgaggtgctcgatgagataggcagtggttcaaagctgtgctctgttgcctccccgtgcctgaagtgattcggtcttctgtttgcgattaattgtagctactgcgtctccattctcttagttttttgtggttttgtttgcttccgtgtttggatgacctgattcttacggatagttgcttctggatttgataaattacatacgcaccgtgccaccgtagttggacgacttcttaattgcgcttgcggtcgtgttacgtggtcttaataaagtcagatcgaatttttgaggtgtagagctgctgtagtttctatttgaccgatacttgtctttgtagttcatgcgcagtaagagttgtaacctcataatatgaccaaattcctgatctgctttatagagttgttgtgcctaattttgaattcgtcttactggctcaaaattatgtgcgcacacttattagtttgctctttattttctatgcctgcttt

SEQ ID NO: 138477 - DNA, 2283 bp, Zea Mays
agattgggctggtccggccactccgacacccttatataaagtcccgaaccctagaggccagcaccttcctccccaactcgccgtctgccttctgcgcctccatttcggcctctgtcccttgcaagttcaatctcacctccaaccatgggtaaagagaagtcccacatcaacattgtggttattggccatgtcgactctggcaagtcgaccaccacaggacaccttatctacaagcttggaggcattgacaagcgtgtgatcgagaggttcgagaaggaggctgctgaaatgaacaagcggtccttcaagtacgcgtgggtgctcgacaagctcaaggctgagcgtgagagaggtatcaccattgatatcgctctgtggaagtttgagaccaccaagtactactgcacggtcattgatgcccctggacaccgtgacttcatcaagaacatgatcactggtacctcccaggctgactgtgctgtccttatcattgactccaccactggtggttttgaggctggtatctccaaggatggccagacccgtgaacatgctctccttgcgttcacccttggagtgaagcagatgatttgctgctgcaacaagatggatgcaaccactcccaaatactccaaggcacgttatgaagagattgtgaaggaagtctcatcctacctcaagaaagttgggtacaaccctgataagattgcctttgttcccatttctggttttgagggcgacaacatgattgagaggtccaccaaccttgactggtacaaaggcccaaccctgcttgaggctcttgaccagatcaccgagcccaagaggccttcagacaagcccctgcgtctgcccctccaggatgtgtacaagattggtggtattggaactgtaccggttggtcgtgtggagactggtgtcatcaagcctggtatggtagtcacctttggtccaactggcctgactaccgaggtgaagtctgttgagatgcaccacgaggcacttcaggaggctcttccgggtgacaatgttggcttcaacgtgaagaatgttgctgtcaaggacctcaagcgtgggtttgtggcctccaactccaaggatgaccctgccaaggaggctgccagcttcacctcccaggtcatcatcatgaaccaccctgggcagattggcaacggctatgcccctgtgctggactgccacacctcccacatcgctgtcaagtttgctgagctcattaccaagatcgacaggcgctctggcaaggagcttgagaaggagccaaagttcctgaagaacggtgatgctggtatggtgaagatgatacccaccaagcccatggtggtggagacattctcagcgtatcctccccttggtaggtttgctgtccgtgacatgaggcagacggttgctgttggagttatcaagagtgtggagaagaaggacccaaccggcgccaaggtgaccaaggctgctgccaagaagaaatgatgcgatcctgcgcctgctttagcaatacctagttttcatcattacaagttttgtttgtggtcgttgctgttattgtgtgaactgttgagctctgttagcctgtgcacttttatctatttatttggtaccttgttgctatttcaccttctgcaatacaagaatgctgtaagagctatatgttaaccttttggcattgttaatttgattttaggaagtcgtatagttatcttcagtatcggcatgattggtttctgggttcgtgggcgcccggctcgcagcgcctggacggctagcgaagctctgtccttgcacggctcgcagcggccttgacgaatgacggctagctagctccgtcctcgcgtctctacgcatgcaggtctacgcggtgggcttggacgtttagcgaaactcctggtgtattcggttgagcaaccaattacgcagtatgtttctttttatccccttaaggctttgtttgggtactctagtattgacctcaatccacatgtattgatctggattggggtgtaaattagtttaagttacacctcaatacaagtggattgaggtcaatactagagtacccaaactaggcctaagagcatgttcggttataccaatccaagtcaaaaatgaataggaggggatttaaatccctccaattctcttctggattggtataaccaaacaagccaaagttttggaagttttgcagggtcgtttggattggtttctgaatcctttatctgctacaattttctctatccattatatctgtccactcttctttttttc

SEQ ID NO: 138478 - DNA, 2595 bp, Zea Mays
gtcccgaaccctagaggccagcaccttcctccccaactcgccgtctgccttgtgcgcctccatttcggcctctgtcccttgcaaggtagctaatcctctgtcgctcgatctttgtccttgaggtgctcgatgagataggcagtggttcaaagctgtgctctgttgcctccccgtgcctgaagtgattcggtcttctgtttgcgattaattgtagctactgcgtctccattctcttagtttttgtggttttgtttgcttccgtgtttggatgacctgattcttacggatagttgcttctggatttgataaattacatacgcaccgtgccaccgtagttggacgacttcttaattgcgcttgcggtcgtgttacgtggtcttaataaagtcagatcgaatttttgaggtgtagagctgctgtagtttctatttgaccgatacttgtctttgtagttcatgcgcagtaagagttgtaacctcataatatgaccaaattcctgatctgctttatagagttgttgtgcctaattttgaattcgtcttactggctcaaaatcatgtgcgcacgcttattagtttgccctttattttctatgcctgctttattttttatattacattgattgctctgtttaatatttgcttctttatttttacactgcttatgtgtatcaagcttttttcaagctcataactccggcgacaacgttagatctagtttctgatcccatccgataaattgtgtcgttactggtagtattaatttactagtgtttctaatcattgattcgtcttgttaacagttcaatctcacctccaaccatgggtaaagagaagtcccacatcaacattgtggttattggccatgtcgactctggcaagtcgaccaccacaggacaccttatctacaagcttggaggcattgacaagcgtgtgatcgagaggtttgagaaggaggctgctgaaatgaacaagcggtccttcaagtacgcgtgggtgctcgacaagctcaaggctgagcgtgagagaggtatcaccattgatattgctctgtggaagtttgagaccaccaagtactactgcacggtcattgatgcccctggacaccgtgacttcatcaagaacatgatcactggtacctcccaggctgactgtgctgtccttatcattgactccaccactggtggttttgaggctggtatctccaaggatggccagacccgtgaacatgctctccttgcgttcacccttggagtgaagcagatgatttgctgctgcaacaagatggatgcaaccactcccaaatactccaaggcacgttatgaagagattgtgaaggaagtctcatcctacctcaagaaagttgggtacaaccctgataagattgcctttgttcccatttctggttttgagggtgacaacatgattgagaggtccaccaaccttgactggtacaaaggcccaaccctgcttgaggctcttgaccagatcaccgagcccaagaggccttcagacaagcccctgcgtctgcccctccaggatgtgtacaagattggtggtattggaactgtaccggttggtcgtgtggagactggtgtcatcaagcctggtatggttgtcacctttggtccaactggcctgactaccgaggtgaagtctgttgagatgcaccacgaggcgcttcaggaggctcttccgggtgacaatgttggcttcaacgtgaagaacgttgctgtcaaggatctcaagcgtgggtttgtggcctccaactccaaggatgaccctgccaaggaggctgccagcttcacctcccaggtcatcatcatgaaccaccctgggcagattggcaacggctatgccccagtgctggactgccacacctcccacattgctgtcaagtttgctgagctcattaccaagatcgacaggcggtctggcaaggagcttgagaaggagccaaagttcctgaagaacggtgatgctggtatggtgaagatgataccgaccaagcccatggtggtggagacgttctcagcgtatcctccccttggtaggtttgctgtccgtgacatgaggcagacggttgctgttggagttatcaagagtgtggagaagaaggacccgaccggcgccaaggtgaccaaggcggctgccaagaagaaatgatgcgatcctgcgcctgctttagcaatacctagttttcatcatcacaagttttgtttgtgatcgttgctgttatcgtgtgaactgttgagatctgttagcatgtgcacttttatctatttatttggtaccatcttgctatttcaccttttgcaatacaagaatgctctaagacctatatgttaaccttttggcattgttaaattgattttaggaagtcgtatagttagttttcttcagtatgtttctttccccccttagttttgtctgttttggaagttttgtagggtcgtttggattggtttctgaatcatttatctactacaattttctctatccattagcaagagaaactcttctttttttcttgtccagtagcgttttttaaatctcgtcctatacgttaatctcgtgctacatgtaaatacaatgt

SEQ ID NO: 138479 - DNA, 2001 bp, Zea Mays
gagcaaataacattgtcattcagtcatcccatatactatgtctcgctccgtttatgggccctgggccgccattcggaagtcaagtattgggctggtccggccactccgacacccttatataaagtcccgaaccctagaggccagcaccttcctccccaactcgccgtctgccttgtgcgcctccatttcggcctctgtcccttgcaagttcaatctcacctccaaccatgggtaaagagaagtcccacatcaacattgtggttattggccatgtcgactctggcaagtcgaccaccacaggacaccttatctacaagcttggaggcattgacaagcgtgtgatcgagaggtttgagaaggaggctgctgaaatgaacaagcggtccttcaagtacgcgtgggtgctcgacaagctcaaggctgagcgtgagagaggtatcaccattgatattgctctgtggaagtttgagaccaccaagtactactgcacggtcattgatgcccctggacaccgtgacttcatcaagaacatgatcactggtacctcccaggctgactgtgctgtccttatcattgactccaccactggtggttttgaggctggtatctccaaggatggccagacccgtgaacatgctctccttgcgttcacccttggagtgaagcagatgatttgctgctgcaacaagatggatgcaaccactcccaaatactccaaggcacgttatgaagagattgtgaaggaagtctcatcctacctcaagaaagttgggtacaaccctgataagattgcctttgttcccatttctggttttgagggtgacaacatgattgagaggtccaccaaccttgactggtacaaaggcccaaccctgcttgaggctcttgaccagatcaccgagcccaagaggccttcagacaagcccctgcgtctgcccctccaggatgtgtacaagattggtggtattggaactgtaccggttggtcgtgtggagactggtgtcatcaagcctggtatggttgtcacctttggtccaactggcctgactaccgaggtgaagtctgttgagatgcaccacgaggcgcttcaggaggctcttccgggtgacaatgttggcttcaacgtgaagaacgttgctgtcaaggatctcaagcgtgggtttgtggcctccaactccaaggatgaccctgccaaggaggctgccagcttcacctcccaggtcatcatcatgaaccaccctgggcagattggcaacggctatgccccagtgctggactgccacacctcccacattgctgtcaagtttgctgagctcattaccaagatcgacaggcggtctggcaaggagcttgagaaggagccaaagttcctgaagaacggtgatgctggtatggtgaagatgataccgaccaagcccatggtggtggagacgttctcagcgtatcctccccttggtaggtttgctgtccgtgacatgaggcagacggttgctgttggagttatcaagagtgtggagaagaaggacccgaccggcgccaaggtgaccaaggcggctgccaagaagaaatgatgcgatcctgcgcctgctttagcaatacctagttttcatcatcacaagttttgtttgtgatcgttgctgttatcgtgtgaactgttgagatctgttagcatgtgcacttttatctatttatttggtaccatcttgctatttcaccttttgcaatacaagaatgctctaagacctatatgttaaccttttggcattgttaaattgattttaggaagtcgtatagttagttttcttcagtatgtttctttccccccttagttttgtctgttttggaagttttgtagggtcgtttggattggtttctgaatcatttatctactacaattttctctatccattagcaagagaaactcttctttttttcttgtccagtagcgttttttaaatctcgtcctatacgttaatctcgtgctacatgtaaatacaatgt

SEQ ID NO: 138480 - DNA, 896 bp, Zea Mays
gagcaaataacattgtcattcagtcatcccatatactatgtctcgctccgtttatgggccctgggccgccattcggaagtcaagtattgggctggtccggccactccgacacccttatataaagtcccgaaccctagaggccagcaccttcctccccaactcgccgtctgccttgtgcgcctccatttcggcctctgtcccttgcaagttcaatctcacctccaaccatgggtaaagagaagtcccacatcaacattgtggttattggccatgtcgactctggcaagtcgaccaccacaggacaccttatctacaagcttggaggcattgacaagcgtgtgatcgagaggtttgagaaggaggctgctgaaatgaacaagcggtccttcaagtacgcgtgggtgctcgacaagctcaaggctgagcgtgagagaggtatcaccattgatattgctctgtggaagtttgagaccaccaagtactactgcacggtcattgatgcccctggacaccgtgacttcatcaagaacatgatcactggtacctcccaggctgactgtgctgtccttatcattgactccaccactggtggttttgaggctggtatctccaaggatggccagacccgtgaacatgctctccttgcgttcacccttggagtgaagcagatgatttgctgctgcaacaaggtatgctttcaggaatttttgtttcaaaagcctctagtataatggtatgtgctacttttgcagaatttggtgctagtataatagttctggagttgaatacaggatttgtgaaatgcatatagtggctagagcttcgattaaccttctgtttctttcatatttagtagttagttaacttaatagcattcattagtttgctagcatgat

SEQ ID NO: 138481 - DNA, 975 bp, Zea Mays
ccaggaacgacaagagattcaattccaaaatcatggacagttgtgcaagttcataatgaaaatagcctcacatatagcagtcaacaactcagctcattctgaagaaaccaatggacacaaaaccttgggtaagcacctacctgaccaaaactctaatttgtcttatgcaggaacatatacttcaacacaagttctggaagatctctcatcacacacaaccagtcaggaatgtagtcttcaggaggaccaccaatccaatgtaccccatcaacgagccatctaccaacaacaaggtacgtatttttaccacgcaggaacaaactcacaacagaggtagacaaccaattagcacatacacttctatacactctgggccggagcggccacggcgctactcaatcccaattcccaatcccggcatcactgtctgtgcctcggtctatatgctttacagatgcggctatttcaccggacacggcgacatccacctgggagttgtattcatcaaaccccaccactcacccatgggttcaattttcagagcacaatcatgtaagattgaaaagtagggcagctgctagctctagatttaaagtaaatagctgaaccagacagaagcatacgttgggccctggcttgtctgtaatcaggaaactaagttttagttattgggctaagatccggaggaattgtaactgaaagatctcaggcaaacgtgagggctaacaaacttgggacagagaacagaagcagttagtgtggcgtcgcgctcgcccgcgggcctagcctccagcatccacaccacccgcgggacggcgtccgcgaccatgggcctgctgccgcaggccggccttgccgcgttgtcgcagaactccgcgagcgccgggcgacatcggcgcgggtggcggaccagtcgctgcccagcgcggcggccgcgtgcgtgaagaatggctgcgtgaagtctctagggttttt

SEQ ID NO: 138482 - DNA, 903 bp, Zea Mays
gcgcgcggacggagagcggacgcggctgggcagcgagacagacggggcgggggcaagagaaacggtgcacgcgcagatcgtggtggagagtttccttccatgggagagcggacgcggctgggcacttcatctccagcgatgggcaaggagaaatcccacatcaacattgtggttattggccatgtcgactctggcaagtcgactaccactggccacctgatctacaagcttggaggcgttgacaagcgtgtcatcgagaggttcgagaaacaggctgctgaaatgaacaagcggtccttcaagtacgcctgggtgctcgacaagctcaaggctgagcgtgagagaggcatcactattgatatcgctctgtggaagttcgagaccaccaagtactactgtacgatcattgatgcccctggacaccgtgacttcatcaagaacatgatcactggtacctcccaggctgactgtgctgttcttatcattgactccaccactggtggctttgaggctggtatctccaaggatggccagacccgtgagcatgctctccttgctttcactcttggagtgaagcagatgatttgctgctgcaacaagatggatgcaaccactccgaaatactccaaggcacgttatgatgagattgtgaaggaagtctcatcctacctcaagaaaagttggatacaaccctgataagatcgcctttgtctccatctctggttttgagggtgacaacatgattgagaggtccacaaaccttgactggtacaaaggcccaaccctgcttgaggctcttgaccagatcaccgagcccaagagaccttcggacaagcccttttggcattgttaaattgattttaggaagtcgtagttttcttcagtatgtttctttcccccccc

SEQ ID NO: 138483 - DNA, 918 bp, Zea Mays
cttctcggctcactcactctcgctcgacctatgttcttgagctggttgatgagatagcaactggatcaaagttgtactctcttgcctccccgtgaccatagtgaatcgccctctgcgttcgatttatgttgctcttgcggtagttcccccaactgccaccatgcagaacgaggagggtaagactgtggacctctatgtccccaggaagtgctcggccacaaacaggatcatcactgccaaggaccatgcctctgtccagatcaacattggccacttggatgcgaatggcctgtatgatggtcacttcacaacgtttgctctctctgggtttgtccgtgctcagggcgacgcagacagctccttggacaggctgtggcagaagaaggctgatatcaagcagtagattttacatctagtttaccaagaattggacactgccttagctatgttttgaattcatgtcactatatgcaatgttgtgatttcagctggtaccttaaatctgaagatttagtatctttgttgggttccttctgagtttgatgtgtggtgttcaattcaaccgtccagtctccagtggcaccgaaatatgctgttggtgtagtttcattcaaaaaacgtgccattcaattcaactgtccagtgccattcaatgaattactatgttttgaattactatgctgcttataggacacacatagcacaactaaagtaaacaagtgggctacaaatgatttatgtcatgatctgcatcttctcttcatacaaaaagtaaaaaaactatatatgatttgaggtgatttaagtattgttattttcctttattttctttgcttagctacaaatattgtaccttttgaagaaaaaaatgctacaacaaattgcatggttctgtttgtttaaaaaataaaataaaca

SEQ ID NO: 138484 - DNA, 886 bp, Zea Mays
taatgtcccgaaccctagaggacagcgctttcctgtccgactcccagccgtcgtctgctgcggactccgcctccattttgctctgtttcttgcaagttgctcttgcggtagttcccccaactgccaccatgcagaacgaggagggtaagactgtggacctctatgtccccaggaagtgctcggccacaaacaggatcatcactgccaaggaccatgcctctgtccagatcaacattggccacttggatgcgaatggcctgtatgatggtcacttcacaacgtttgctctctctgggtttgtccgtgctcagggcgacgcagacagctccttggacaggctgtggcagaagaaggctgatatcaagcagtagattttacatctagtttaccaagaattggacactgccttagctatgttttgaattcatgtcactatatgcaatgttgtgatttcagctggtaccttaaatctgaagatttagtatctttgttgggttccttctgagtttgatgtgtggtgttcaattcaaccgtccagtctccagtggcaccgaaatatgctgttggtgtagtttcattcaaaaaacgtgccattcaattcaactgtccagtgccattcaatgaattactatgttttgaattactatgctgcttataggacacacatagcacaactaaagtaaacaagtgggctacaaatgatttatgtcatgatctgcatcttctcttcatacaaaaagtaaaaaaactatatatgatttgaggtgatttaagtattgttattttcctttattttctttgcttagctacaaatattgtaccttttgaagaaaaaaatgctacaacaaattgcatggttctgtttgtttaaaaaataaaataaaca

SEQ ID NO: 138485 - DNA, 440 bp, Zea Mays
taatgtcccgaaccctagaggacagcgctttcctgtccgactcccagccgtcgtctgctgcggactccgcctccattttgctctgtttcttgcaagttgctcttgcggtagttcccccaactgccaccatgcagaacgaggagggtaagactgtggacctctatgtccccaggaagtggtacgtttgcctcatcctcttgtagaaatatttctgctctgcatggttggttttgttgtgtgctaaggttgagtttatgttctttcagctcggccacaaacaggatcatcactgccaaggaccatgcctctgtccagatcaacattggccacttggatgcgaatggcctgtatgatggtcacttcacaacgtttgctctctctgggtttgtccgtgctcaggtgatagttcatgatatgtttattgcatttgtctagcccat

SEQ ID NO: 138486 - DNA, 2277 bp, Zea Mays
atggcgcggttcacgattttgccccttccatacgcacttattttggtcgctgcggcgtgctccgtgctgggctacgtcccttacgacgcggcgccgcggagcaccggcggggccgggcatcacgccagcgctcgaacttacatcgtcctggtcgagcctccgcctgcgcacactcatgaagacgacgaggcagcgcaccgccggtggcacgagtcgttcctgctgagctccggcgccggcgccggcagccggcgccgcgttcgccactcgtacacgagcgtgctctcgggcttcgccgctaggctgactgacgacgagctcgcggccgtgtccaggaggccagggttcgtgcgcgcgttcccggaacgcagggtgcagctcatgacgacgcgcagtccggggttcctagggctgactcccgacggcggcgtctggaacgcgaccggctacggcgagggcacgatcattgggtttctggacaccgggatcgacgagaagcacccttcgttccacgacgacggcatgccgccgccaccccccaggtggaagggcgcctgccagcctcccgttcggtgcaacaacaagctcatcggcgcggcgtcgttcgtcggggacaacaccaccaccgacgacgtcgggcacggcacgcacaccaccggcacggcggccggccggttcgtggaaggagtctcggccttcggccttggcggcggcggcggcacggcggccgggatggcacccggcgcgcacctggccgtgtacaaggtctgcgacgcccaagggtgcttcgagtccgacttgctggccgggatggacgccgccgtgaaggacggagtcgacgtcctctcggtgtccctcggcggcatctccacgccgttggacaaggaccccatcgccatcggcgcgttcgcagcggtgaccaagggcgtcctcgtagtgtgcgccggcggcaacagtggccctctgccctccacgctgtccaacgaagcgccgtgggtattgaccgtggcggccgggtctgtagaccggagcttccgtgccagcgtgcggcttggcgacggcgagatgttcgaaggcgagtcgctggttcaggacaaggacttcagctccaaagtgtatccgctgtactactcaaacggcttgaactactgcgactacttcgacgccaacatcaccggcatggtggtcgtgtgcgacaccgagacaccggtgccacccatgagctcgatcgaggcggtcagcaatgctggcggcgccggcgttgtgttcatcaacgaaccggacttcggatacaccatcgtcgtggagaagtacgacaacctccccatgtcgcaggtgaccgcggtggacggcacaaagataatgggctacgccatgaagggtacgtcgacgagcaaccatacggcaacgatcgtgttcaacagcacagtcgttggggtgaagccgtcgccgatcgtggcagccttctcgtcgcgcggccccagcgtcgccagccccggagtgctgaagcccgacatcatggcgccggggctcaacatactcgccgcgtggccgtcggaggtgcccgtcggggccccccagtcgagcagcttcaacgtcgtctccggcacgtccatggcgacgccgcatatcaccggcgtcgcggccctcgtcaagaaggtgcacccggactggtccaccgccgcgatcaagtccgccatcatgaccacctccagcgccgtcgacaacgcgggcaaccagatcatggacgaggagcaccggaaggcgagcttctactccgtcggcgccggccatgttgtcccggcgaaggccgtagaccccggcctggtgtacgacctcggcgtccacgactacgccggctacatctgcaggctcctcggcgaggcggccctgaaaatcatagccataaacaccaacttgacttgcgctgagctcgagcctgtcaccggagcgcagctgaattacccggcgatactagtgccgctgcgagctgaggcgttcgccgtgaaccggacggtgacgaacgtcggaccagcgaggtcgaactacaccgccaagatcgaagcgccgaaaggcctgacagtcaaggtggagccggcggagctggagttcacgaaggtaaatgagaggaagacgttcacggtcacagtgagcgccgcagccggagccagcagcgagcaggagctcgccgaggggaccctgagctggctgtcccacgaccttgatcatgtcgtgaggagcccaatcgtggccgactccagacttaccttgagttga

SEQ ID NO: 138487 - DNA, 1711 bp, Zea Mays
cttcaccaccggcgagccacatcgagaacacgatcgagcacacaagcacgaagactcgtttaggagaaaccacaaaccaccaagccgtgcaagcatcatggagtacggtcagcaggggcagcgcggccacggcgccacgggccatgtcgaccagtacggcaacccagtcggcggcgtcgagcacggcaccggcggcatgaggcacggcacgggaaccaccggcggcatgggccagctgggtgagcacggcggcgctggcatgggtggcgggcagttccagcctgcgagggaggagcacaagaccggcggcatcctgcatcgctccggcagctccagctccagctcgtcggaggacgacggcatgggcggaaggaggaagaagggaatcaaggagaagatcaaagagaagctgcccggaggccacaaggacgaccagcacgccacggcgacgaccggcggcgcctatgggcagcagggacacaccggcagcgcctacgggcagcagggacacaccggcggcgcctacgccaccggcaccgagggcaccggcgagaagaaaggcattatggacaagatcaaggagaagctgcccggacagcactgagcggcgcctatacgtggctgtgctgtgctgtgctggcgcgtcaaagccgtactcttcagcgttccatagataataagataaacccatgaataagtgtccctaccctttgatcatgtgacagggacagggacagggacagtttcctgtacttgtggggtgaatttgtacgtgtgatacggtaacttggtccgtgtactgtttatgctgctacgttttccttcctaaaagtacgtatatatatacagcacttgcgagtggctttacttgtgtgcactgcctaaaagtgtcgatattacctccagcggtaaataaatgacccttgtaagaaacttacacagcatgtcttactaattaacagccgttattatgttcggcgcagtactcacactggaacttacgaacaagaattgctctatcaatcaccatctactttagatatatcttctgaaacttttttcaaatccaaaagttcagtatcttcctacaaattagtgaattaggaatccaaaagttcagtatcttcctacaaattagtgaattaggatacaaattagtgaattaggaggggttcttttgtgcagaaaagacattgggtatagtggagatgaatgggaagatagaaaaagacgaataagaaaagtttttttgattagacgcatgcaattggcgaaacattttattcaaacaaatgtagaaccagaatggatggttttgtgcttattaccggttcttcctcccgaattgagacccattgtttatagatctggggataaagtagtgacttcagatattaatgaactttataagagagttatccgtcggaacaacaaccttgcctatctattaaaaataagtgaattagcaccagcagatttagtaatgtgccaggaaaaattggtacaagaagccgtggatacacttctttcacatataaaaataccctatcctatccatttagaaatcctggttcaactccttgaataccggattcaagatgttccctctttacatttattgcgattctttctccactattattcgaattggaatagttttattacttcaatgaaatccatttttcttttgaaaaaagaaaataaaagacta

SEQ ID NO: 138488 - DNA, 164 bp, Zea Mays
tttgcagattcaccaccaaatccttgggagcgttctagagctgaaggagcatctggtcctgcacctttcaagcccccatctggtagaagcactagtgatgttgttgaagcttccggtaccgctaaacccgatgaaaatgttactgtgacagagaggtgtgtctt

SEQ ID NO: 138489 - DNA, 336 bp, Zea Mays
atgacgcataactacgcttatatcgagaaggggagaaaggatcaaccgtcattgtctccgtcggcaacatcggccctgttgacagcccgagctctgtgtgccctcctccccacgcgtttgatggcatctgttttctcttctccctcgcgttgcaggtacgaacactcttagacatgtgtcttcttggtgttagggttttcttctatcctctcgcttcgtgcactccccccacaggcccacaccattcctactcattgacgagcaagacccatgtgttcccatcacccccgttcgaccgtcacccaaatgcagaaattgttttactgctgcagagct

SEQ ID NO: 138490 - DNA, 997 bp, Zea Mays
actttgttcatccatgggcataaattcacatttaagcacttgtgttggcactcaatcaccaaaatacttagaaatggcccaaaggcacatttccctttcagttgggcccgccgcgcgaccgcgccggggctctcgctggctcccgccgttgcgagacgggcggcctccgcgtcgggaggaggccacgggcgcgtcgtcgttcgctcaaccgacggcggctgtctgtggttccgcgacgagggcgcccatggtgaaagtcgcggcaagcggctctactgccactccactctgcggcggtgccagcgttgatgaccacctctcggcctactgctacttcttctctcggcctactgctacttcttctccagcatgggtctagtccatgtcgcgatacggggtttggatatttttgggctaggttccttcccaactctgcagtgtagcctctccgcagcgtggtctagctacgctcctttcccttggttctgatggcgtggctggctgttgccctttgaaggttgttcagcatgggtctggtgaatgaaggcatcgacatggaggagggaaacccggagatcggcatagcaattcttttgcatgacagttagttttattttattaatctgtgctagatcttcaaatacacacaatccaatcttgaatatttggttaaataagtatgctgcttgtaccataaactgtgtgcgacgcaaatttcagtaagtgcattttgctgatgtattgtggtagtagaccgaccttccttctgcagagtggaaccaaaggtatttgatgagttttttggcatgccacatagcagatttgaccgggaagcttgcattgcttgtgtggataacatcaatatggcatacggtgatgactttcctgaacttagtactttcaagtgtgtgacaaggaaggaaagtagcaagctggaaagcaagaaccaagataaattgtttgatgcatatatcctgcatggtccgcaatacaatct

SEQ ID NO: 138491 - DNA, 1008 bp, Zea Mays
ccctcgccgtgaaattagggaaacaaacaaattccttaggagcccatgggtagtttgatttgatgccagtgaacacagacgttgttcaaaaccagatctcctaagttacaactttattggctctagtggacttccctaagaagtctgatcgctgtgactaagagtaatcaattgttctctaatcagctatgcccttttcagaatacggtgtgtgtcttgatttggaaattgtcgtaggtcggctagctaaatcaacagccaaaatttagtttattcagtagctatattggggacctcctcatgtttctgaaaaaagatatactgttatgttgcactatgaatgagaaactgtcgaattattttctgcttgttcatcagagtttggtaatcttcttcttcttccgagttatgcagattaggttgatgtctttcatgagactattgcctcaaaggctaccccaacttatcaggtgtgttttagctttcactcctaccaatatgatagatacttcatttatgtgtccataatttcattgaaaatgacatggggttatgtttccgttttcttgcttgatgcactctctcaggcaggtggagcaagatgttgagactgtaatccacgttctccagccaggtccaataggaattgtggagcacaaattcacagacacggagatcttagaggccagggctacagtgaaaagagcagtggataattggcgaagaaattggacccttgagaaaaatgttggcagataaatggaaataatataccccttgtgtcttctatcaacagtacttgaaataaataggatgctatggctggatgcagctgttgccattagttagatttgagcacgatctgcttatcgggagttatgttaactgttctaaatgatcagtctgcctctctttgtttcatggtttgaaacgttcatatttagagaatttctttttgttcattgccttgtcggcagccggctgtcatattgaatgtgatctttcttt

SEQ ID NO: 138492 - DNA, 345 bp, Zea Mays
tggacttccctaagaagtctgatcgctgtgactaagagtaatcaattgttctctaatcagctatgcccttttcagaatacgagtttggtaatcttcttcttcttccgagttatgcagattaggttgatgtctttcatgagactattgcctcaaaggctaccccaacttatcaggcaggtggagcaagatgttgagactgtaatccacgttctccagccaggtccaataggaattgtggagcacaaattcacagacacggagatcttagaggccagggctacagtgaaaagagcagtggataattggcgaagaaattggacccttgagaaaaatgttggcagataa

SEQ ID NO: 138493 - DNA, 1880 bp, Zea Mays
cgcagcagcaccgcaatttggcgtcctagttgccatgtgggggagccgagccgaggtcgggtgggagtgggaggctgtcccctacaccagccccagtcgtcgccgcgcaccatcacagcctcctccatctatcccctccctctcgagtctcgcctgctgctgctcccttcttcttcttcctcctcctcctcttcttggtcttggagctggaccttcctcttcccctcgttgatcgttcgcggttgccgattcgccatcccctccaaatcaagacaagattgagtgggtcttgggcccctgtccctagctgcattgcgaattgaggcgccaatttgggagacgactgcattgatgaatgccggaggccacagcactcactgatttagggattcgatgtcacgggcacccggatgtcattgccgatcgcccttgtagtcggcattgccggtggcgccaccttgctcgcggtggcggccgtgctgctcgcgctctggtgcgctgcgcggatgagggcgcggcgtaaccgcaactccgacactggctcctccgacccctcgacgctagtggagtggggaaaaggggggcgcagctcgttggcaccggacctggagcatcaggttgcgaggcaattctcgctggaggacctggtgcaggccaccaagaacttcagcgacacgaacatcatcggcgcggggagcttcggattggtgtacatgggcctgcttctcgatggcactgttgtcgcgatcaagaggcgcgtgggggcagcgacgcaggtgtttgctgatgaggttaggttgctttcagagattcgtcaccgaaacattgtaactctcattggttactgtcaagaagggggtctacaaatgctggtgtatgagtacctgcccaatggcagtgtctgtggccatctgtatgataacaggaaaggctctgcaacacggcttgagttcaaacaaaggctctcaatagctattggggcagctaaaggtttgaatcatctgcacagtcttgatcctcctttgatacacaaggacttcaagacaaacaatgtgctggttgatgaaaatttcattgcaaaggtggctgatgctggacttgttaggttaattagaggatctgacgatgccggcccatcgcgtgggttcagtaacagtgtttaccaagatccagaggtacagtcgatgactcagttctctgaaagcagtgatgtttacagctttggagtttttcttttggagctaattactggcagggaagcagcttccttgatacctacagagtccagagaatatttggcacactggatggaagcgcatttcagttcaaatgaactgattgacccaagattagccggcaacttcactgcagaaggtatgaaggagcttgttggtctggccttccaatgcttgaacccatcatcaagacgccgaccgaggatgaggcttgttgcgactgaactagaccggattctagagacggagatgtccatgacaacgttcatgggcgacggaaccaccattgtcacgctcgggagtcaattgttctcgtcgtgaagcgacgttgggattgatttcatgtctgctatttgatgacatgatgattgtgtgtgagagcctaacaacagctattgtttctgccatgctgttcaggctctgcattgttatgaaatgccatgtatggtcatttttaagcttgtcatggttgataggtaggagtgagaagaaatagagctgtatgtatgtctcttttttcttctttttgttgcatgggagaagaattgtatgtaaatcttttagattgttaactatccttcaatgtatttgcagattgttcttcctttcggtgttttaatttctgaaagggctaacttgtgctaa

SEQ ID NO: 138494 - DNA, 1903 bp, Zea Mays
cgcagcagcaccgcaatttggcgtcctagttgccatgtgggggagccgagccgaggtcgggtgggagtgggaggctgtcccctacaccagccccagtcgtcgccgcgcaccatcacagcctcctccatctatcccctccctctcgagtctcgcctgctgctgctcccttcttcttcttcctcctcctcctcttcttggtcttggagctggaccttcctcttcccctcgttgatcgttcgcggttgccgattcgccatcccctccaaatcaagacaagattgagtgggtcttgggcccctgtccctagctgcattgcgaattgaggcgccaatttgggagacgactgcattgatgaatgccggaggccacagcactcactgatttagggattcgatgtcacgggcacccggatgtcattgccgatcgcccttgtagtcggcattgccggtggcgccaccttgctcgcggtggcggccgtgctgctcgcgctctggtgcgctgcgcggatgagggcgcggcgtaaccgcaactccgacactggctcctccgacccctcgacgctagtggagtggggaaaaggggggcgcagctcgttggcaccggacctggagcatcaggttgcgaggcaattctcgctggaggacctggtgcaggccaccaagaacttcagcgacacgaacatcatcggcgcggggagcttcggattggtgtacatgggcctgcttctcgatggcactgttgtcgcgatcaagaggcgcgtgggggcagcgacgcaggtgtttgctgatgaggttaggttgctttcagagattcgtcaccgaaacattgtaactctcattggttactgtcaagaagggggtctacaaatgctggtgtatgagtacctgcccaatggcagtgtctgtggccatctgtatgataacaggaaaggctctgcaacacggcttgagttcaaacaaaggctctcaatagctattggggcagctaaaggtttgaatcatctgcacagtcttgatcctcctttgatacacaaggacttcaagacaaacaatgtgctggttgatgaaaatttcattgcaaaggtggctgatgctggacttgttaggttaattagaggatctgacgatgccggcccatcgcgtgggttcagtaacagtgtttaccaagatccagaggtacagtcgatgactcagttctctgaaagcagtgatgtttacagctttggagtttttcttttggagctaattactggcagggaagcagcttccttgatacctacagagtccagagaatatttggcacactgggtaatttctactgacatgtagctatggaagcgcatttcagttcaaatgaactgattgacccaagattagccggcaacttcactgcagaaggtatgaaggagcttgttggtctggccttccaatgcttgaacccatcatcaagacgccgaccgaggatgaggcttgttgcgactgaactagaccggattctagagacggagatgtccatgacaacgttcatgggcgacggaaccaccattgtcacgctcgggagtcaattgttctcgtcgtgaagcgacgttgggattgatttcatgtctgctatttgatgacatgatgattgtgtgtgagagcctaacaacagctattgtttctgccatgctgttcaggctctgcattgttatgaaatgccatgtatggtcatttttaagcttgtcatggttgataggtaggagtgagaagaaatagagctgtatgtatgtctcttttttcttctttttgttgcatgggagaagaattgtatgtaaatcttttagattgttaactatccttcaatgtatttgcagattgttcttcctttcggtgttttaatttctgaaagggctaacttgtgctaa

SEQ ID NO: 138495 - DNA, 2291 bp, Zea Mays
cgcagcagcaccgcaatttggcgtcctagttgccatgtgggggagccgagccgaggtcgggtgggagtgggaggctgtcccctacaccagccccagtcgtcgccgcgcaccatcacagcctcctccatctatcccctccctctcgagtctcgcctgctgctgctcccttcttcttcttcctcctcctcctcttcttggtcttggagctggaccttcctcttcccctcgttgatcgttcgcggttgccgattcgccatcccctccaaatcaagacaagattgagtgggtcttgggcccctgtccctagctgcattgcgaattgaggcgccaatttgggagacgactgcattgatgaatgccggaggccacagcactcactgatttagggattcgatgtcacgggcacccggatgtcattgccgatcgcccttgtagtcggcattgccggtggcgccaccttgctcgcggtggcggccgtgctgctcgcgctctggtgcgctgcgcggatgagggcgcggcgtaaccgcaactccgacactggctcctccgacccctcgacgctagtggagtggggaaaaggggggcgcagctcgttggcaccggacctggagcatcaggttgcgaggcaattctcgctggaggacctggtgcaggccaccaagaacttcagcgacacgaacatcatcggcgcggggagcttcggattggtgtacatgggcctgcttctcgatggcactgttgtcgcgatcaagaggcgcgtgggggcagcgacgcaggtgtttgctgatgaggttaggttgctttcagagattcgtcaccgaaacattgtaactctcattggttactgtcaagaagggggtctacaaatgctggtgtatgagtacctgcccaatggcagtgtctgtggccatctgtatgataacaggaaaggctctgcaacacggcttgagttcaaacaaaggctctcaatagctattggggcagctaaaggtttgaatcatctgcacagtcttgatcctcctttgatacacaaggacttcaagacaaacaatgtgctggttgatgaaaatttcattgcaaaggtggctgatgctggacttgttaggttaattagaggatctgacgatgccggcccatcgcgtgggttcagtaacagtgtttaccaagatccagaggtacagtcgatgactcagttctctgaaagcagtgatgtttacagctttggagtttttcttttggagctaattactggcagggaagcagcttccttgatacctacagagtccagagaatatttggcacactgggtaatttctactgacatgtagctgtaagttatctagaaaggaaagttatggagttctgcttaatctccagcaaaatatcattctggtgtttagtgtacctaactgtgaagtcaggccacacatttccaaaacttgaaaacagctagagcataaactgttttcatagttattaggagtgagaagtgtttgtcatgttgtaggatcacataaattcttattaggatatattattgaatactgaaagtccttgttgatgtttgataatggatacaactaattgtaccttagttgagacactttttaagaggaaaataacaatttgaaaaaagtgctgcaattctcgtgcataaggatatttcttttacgcgaaagggccactaccgtaaaggatatttcttttactcactgcttactgaaaaaacattttcttgtcacattgaatgatcgaaagatggaagcgcatttcagttcaaatgaactgattgacccaagattagccggcaacttcactgcagaaggtatgaaggagcttgttggtctggccttccaatgcttgaacccatcatcaagacgccgaccgaggatgaggcttgttgcgactgaactagaccggattctagagacggagatgtccatgacaacgttcatgggcgacggaaccaccattgtcacgctcgggagtcaattgttctcgtcgtgaagcgacgttgggattgatttcatgtctgctatttgatgacatgatgattgtgtgtgagagcctaacaacagctattgtttctgccatgctgttcaggctctgcattgttatgaaatgccatgtatggtcatttttaagcttgtcatggttgataggtaggagtgagaagaaatagagctgtatgtatgtctcttttttcttctttttgttgcatgggagaagaattgtatgtaaatcttttagattgttaactatccttcaatgtatttgcagattgttcttcc

SEQ ID NO: 138496 - DNA, 1344 bp, Zea Mays
atgggtaaggagaagtcccacatcaacattgtggttattggccatgtcgactctggcaagtcaaccaccaccggccacctgatctacaagcttggaggcattgacaagcgtgtgattgagaggttcgagaaggaagccgctgaaatgaacaaacggtccttcaagtacgcttgggtgcttgacaagctcaaggctgagcgtgagagaggtatcaccattgatatcgctctgtggaagtttgagaccaccaagtactactgcactgtcattgatgcccctggacatcgcgacttcatcaagaacatgatcacgggtacctcccaggctgactgtgctgtcctgatcattgactccaccactggtggttttgaggccggtatctctaaggatggccagacccgtgagcatgctctccttgctttcacccttggggtcaagcagatgatttgctgctgcaacaagatggatgcgaccactcccaagtattccaaggcccgttacgatgagattgtgaaggaagtttcatcctacctcaagaaggttggatacaaccctgacaagattgcctttgtccctatctctggttttgagggtgacaacatgattgagaggtccaccaaccttgactggtacaagggtccaaccctgcttgaggctcttgaccagatcaccgagcccaagaggccttcagacaagcccctgcgtctgcccctccaggatgtgtacaagattggtggtattggaactgttccggttggtcgtgtggagactggtgtcatcaagcctggaatggttgtcaccttcggtccaactggcctgaccactgaggtgaagtctgttgagatgcaccacgaggctctccaggaggcccttcctggtgacaacgttggcttcaatgtgaagaacgttgctgtgaaggatctcaaacgtgggtacgtggcctccaactctaaggatgaccctgccaaggaggctgctagcttcacctcccaagtcatcatcatgaaccaccctgggcagattggcaatggctatgccccagtgctggactgccacacctcccacattgctgtcaagtttgctgagctcataaccaagatcgataggcggtctggcaaggagcttgagaaggagcccaagttcctgaagaatggtgatgccggtatggtgaagatgattcccactaagcccatggtggttgagaccttctctcagtatcctcctctgggtcgttttgctgtccgtgacatgaggcagacggttgctgttggagtcatcaagagcgtggagaagaaggacccaactggtgccaaggtgaccaaggctgcaataaagaagaaatga

SEQ ID NO: 138497 - DNA, 1394 bp, Zea Mays
gtcattccgctcgtctctctcgctcacatcaactctccaggcaaaatatcctgggcgcgatggatgcaacgccagcgagcaagaaggccacgccggccgccgccgtcgccgacgcggtcccgctcgctgcgcagcaggcggcggagcagctgtcgtcgcccgaatccgtcgccggcgtgagggcgagcggcagcgaggacgacgacgagcaggtggagaggttctacgcgctgctggacaacatccgcgccatgaggggcatggtcagcaccggcggcgcggcaccggggaggaagcgggcgcgcgacgacgagcccccgtggcggccggcgttccggatggaggacttcgagcttgaggaattcgactccggctccgcggggtgcgacgggggaaagaagaagagggagagcagcatcgcgaagcggccggccgacgaggaggagcaggccgagtgtccacacatgcaatgcccccgcctcgcgttgctcgtccccctgccctgccgcgagtcgtctccgcccacgtcgtctcccgaaatctcgccccccgagacgcgcccgcgccacggctgccgctccttccgccccgcctgcccacctcgaccacccctcccccgcgggtgctgccagaactggtgggtggatgatctctccgtggtcaaggtcgaccactcccaggtgctcctcgcctccgtcaccttctccgcccccatgccgttgctccgcctccgcgtggcctctcctaggtcaggcctccccgccgcgatcgatgggtccgcggtctccgtccacttccgccggatgtccgtgttcgcctccacccgccccgtcgcggccgccctcggcgccgccgcgttcgaggaggccgtcgtcaagtacgagccccgcgccttagctgtctccgtcgccgcctccactctcgacctcggtaagcacgaggtcaacctcacccgccttctcccgctctcgttcgaggatctcgaggacgacggcgactccggcttcgagaagtggagcaccagcttccggctgtccggccccgtccgcggcgcgcggcttaacgtaaccttctcttgctcgctcctcgcgggcggcggcaccagcgagcagcacaggggcggggaagtggcggggctgcgacgcggctcgatggcacgggcagtgtcagtgcaagtgccgacgcctttgcccgcgcggagcaggggcgtgagggttctccacgaggtgctgcccagcttgaggtctgccaggccggtgccttcttctgttgctgacgggggtcctgatgcgaggaaggaggaggtggcagcaccggactgcacggaagaggggtctccggaggcaaagcactgcacatcggtagagcctgtgttcgtcagctttggtggatag

SEQ ID NO: 138498 - DNA, 2018 bp, Zea Mays
ggcactgctacgagtgagagccgaaaatacccctatataaacagaatctatgagtactaagcagtccctctcatccatccagagaagctagagtccaggtctcactcgcgaccgagagccacagagaaatggggggccctggtcgtccctggcaccggcacgtcttcctcgtcgtgtcgctgcagcttctccttgtggcgccatggcaggacgagacggccgctcgagctctcaatttcaccaggcaggatttccccagggccttcgtctttggtgccggcacgtcagcttatcagtacgaaggggcaaccgatgaagacggaaggagcccaagcatatgggacaactttactcatgcaggtaggatgccggacaaaagcactggcgacctaggggcggacggctaccacaaatacaagggagacgtgcagctgatgagtgacactggcctggaggcctaccgcttctccatttcttggtccaggcttattccaagaggaagaggagccatcaaccccaagggcctcgagtattacaacaacctcatcaatgagctagtaaaacgaggaattgagatacacgtgaccctgtcccacctggattaccctcagatcctggaggacgagtaccacggctggctgagccccaggatggtggacgacttcgaggcgtacgcggacgtgtgcttccgcgagttcggcgaccgggtgaggcactggaccaccatggacgagccgaacgtcaactccatcgccgcctacgacaacggcgccttcccccccggccgctgctccccgccgttcgggttcggcactaactgcaccgccggcggcaactccagcgtcgagccctacgtcgtcacccacaactgcatcctggcgcacgccgccgtcgccgccctctacacccgcagctaccgtgccgaacagcagggcgtcgtcggcatcaacatctacaccttctggaactaccccttctcccccgcccccgccgacgtccaggccacgcagcgctcgctcgacttcatgatcggctggatggtcaacccgttggtgtatggagactaccctcaagtgatgaagaggatagtcgggtcccgccttcccaggttcaccaagcggcagtcggagatggtccgcgggacggcggatttcattggcataaaccactacacctccgtgtacgtcagtgatcgccccaacgacgcagcagccgacaccacggggccccgggactacaatgctgatctgtcggctaccttcagattttctcgcgatgatccagctactggccagttcgtcccaatcaacatgccaagcgacccgcagggactgcaatgcatgctcgagtatctcagccaaacctacaacaacatccccgtctacgtgcaggaaaacggctacggggcgctcttcaacgactccatccatgaccacgagagagccgagtacttgagtgcctacatgggcagcgcactcgctgcactcaggaacggagccaacgtgaaggggtacttcgtctggtcgttcctggacgtgtttgagctgctggcgggctactactcgcgatacggcctctaccatgtcgattttcaggacccggagctgccgaggacgccaaaactctctgcgctgtggtacagcaagttcttgaagaatgaaatcgacataatagagaacgttgtcagcgatactgacgatgcgcgctcgcatgctgctgaacaatgagttagtttgctagcaagcagcaggcagcagcacacgacatatcacatatgcatgtcgtagtagcggaggaaaagaatgtttcttatccattctttttttttcacaagtccacagaagctcagaattttcagcagttggtcaggcccggaattcagtgttcgtgaatcgtagccataggcaccctctttggctgtagccctgtagtatgcgctacgtacggcaacagttgtcatgagtcactctgtcgctactgacacaataagtaatacagaaaggaactattactcttgc

SEQ ID NO: 138499 - DNA, 396 bp, Zea Mays
atggggatggacaaatgcagcatgaatggacaagtgtagcgcgaacaacgtggacatcgacaacgtacgcaaggcgggcatggtgatgaacgggttgcccatcagtgtgtacgcatcggagacgttggggtgtgcggcggccatatccacagacggttgatgagcaagatgctcgggcgcattggggattcaccgctgatcaggtttggcacatacccatgcggcgcgtgcgccgtgtcgggcacgctcaagtgggacatggccactgtcatggagtacaagggcctacccctgcagcaggccgtcgactactatgtcaggggcatgatgcagaatatccgaagacaactattatcaataattagccaatataaactatttacaaatctttactaa

SEQ ID NO: 138500 - DNA, 2036 bp, Zea Mays
gttgttaatcccttcgccgtactcagctaccgccgccgccgccgccgccgcgtgagttgagagaacgagagccaagaagccagggagggacttgagcttcacttgggaagggctagtactgctcccgcccccgccacggccgtctggctgtctgttgcgcgactgcgccagcctggcggctctgccccgggctgctggcgccgccattgctttcccttggagccgctggcagctaaactggtgccctcggccgcctttgtgcgttcctcgccactgcgcccggggtagctgaggtctgaagacggaggtgtcgcccgcctcacggctcctgcaccacggtttttctttctcgcatcgccagagcaacaactgccccccgccgttgtttgtcctgtgctcaaaatggaggctaatggagcagtggatctggaggttgacattatcggcccaggtgctgctggtagcaagttaacctcggttgacgaccctgacgccacagagtgttcaagttcttttggggacactctgtcaggttcggaggatggtgcaagaccttcagagattagcgacattgaggtggactcgccgttctgccgctacccttctaattgtgatgctgctgctctactggatgcagctgcttcagacaattcggatagactattgaagaagaaaaaggtgactgatcattggagaaagtatgtaagcccactaatgtggagatgccaatggttagaactgcggatgaaggatttgcaatcgcaagtgtctaaatatgacaaggagcttgcagtactcaagcatgagaaggagttgcagacaaaaatgattgaattggattgttcctcctcacgatctgtaccattctcctctctttgctgcagaaagactatgaagcgaaggaggagaaaaagaaatgaagataaaattgacacttcatcatatatctctaatcatactgtattatcttattttgaaaaaatggaagcagatggtcattctattgaagacaatgccaacctagtcgatgacaacacaaaagcaaataatgatgctgattggctacttggtattgaaggaggtgataccactgttgagcagattcttttaagcattcaagctgctcaagacagggtattcagtctgagatcaaatctcaagcaagcaatggctaggaagaataagggaataacccttaaaattaacacatccgtcattggtacacacagctcaaattgctcaccaggaaagggcaaagttgctggactgcatgagagatctccccaggacacatcagaatgtgatatggatgattctggcatgcctgatagtgctctctcaagctatggagaagctagcaacatggatatttttgagagcaccatgagcctattgtctgaaggcccacatcagatgggagaatttcgtgaaagttctgaagatgtattgattgacaaccaggcagcagaggaagggtaccgaaacttcgaggtgatcagccacccaagcaagcggctaagggtatcagtgaagcgagaagctgggccacactcggaggatgagagcgtcgcccctgttgtcggtgtcaagagagaagagacacacgaggaagctaccaccagcttcagcctgcacggggcattcctgaagccctgcttcacggggaagaggcaggagaggaagccgaaaaagcaaatgaagcgaaggcgaggtggcccgaccgcggcagctgccgctctcatctcgtggaggagcaagaggatccggaagaagaagcaactctaggatggacgcacatgccatggttcacactttctggcctgatcagatgatgggatgacgacggcaaccgcatacttaaatctttttcttagccttattcttttttatttgtctttctttaccttatcactttttttatctgcctctccttaccgttatcctttttctttcctggattctgtttaacttttggctgtttgtttcggtttcaaatgggactgttttgccaatgcgtttcattcattccaggttcc

SEQ ID NO: 138501 - DNA, 2043 bp, Zea Mays
gtggttctctattttcttttcccgcgagttgttaatcccttcgccgtactcagctaccgccgccgccgccgccgccgcgtgagttgagagaacgagagccaagaagccagggagggacttgagcttcacttgggaagggctagtactgctcccgcccccgccacggccgtctggctgtctgttgcgcgactgcgccagcctggcggctctgccccgggctgctggcgccgccattgctttcccttggagccgctggcagctaaactggtgccctcggccgcctttgtgcgttcctcgccactgcgcccggggtagctgaggtctgaagacggaggtgtcgcccgcctcacggctcctgcaccacggtttttctttctcgcatcgccagagcaacaactgccccccgccgttggtcagtcctgcgagctctagatagttacaaacatttgtcctgtgctcaaaatggaggctaatggagcagtggatctggaggttgacattatcggcccaggtgctgctggtagcaagttaacctcggttgacgaccctgacgccacagagtgttcaagttcttttggggacactctgtcaggttcggaggatggtgcaagaccttcagagattagcgacattgaggtggactcgccgttctgccgctacccttctaattgtgatgctgctgctctactggatgcagctgcttcagacaattcggatagactattgaagaagaaaaaggtgactgatcattggagaaagtatgtaagcccactaatgtggagatgccaatggttagaactgcggatgaaggatttgcaatcgcaagtgtctaaatatgacaaggagcttgcagtactcaagcatgagaaggagttgcagacaaaaatgattgaattggattgttcctcctcacgatctgtaccattctcctctctttgctgcagaaagactatgaagcgaaggaggagaaaaagaaatgaagataaaattgacacttcatcatatatctctaatcatactgtattatcttattttgaaaaaatggaagcagatggtcattctattgaagacaatgccaacctagtcgatgacaacacaaaagcaaataatgatgctgattggctacttggtattgaaggaggtgataccactgttgagcagattcttttaagcattcaagctgctcaagacagggtattcagtctgagatcaaatctcaagcaagcaatggctaggaagaataagggaataacccttaaaattaacacatccgtcattggtacacacagctcaaattgctcaccaggaaagggcaaagttgctggactgcatgagagatctccccaggacacatcagaatgtgatatggatgattctggcatgcctgatagtgctctctcaagctatggagaagctagcaacatggatatttttgagagcaccatgagcctattgtctgaaggcccacatcagatgggagaatttcgtgaaagttctgaagatgtattgattgacaaccaggcagcagaggaagggtaccgaaacttcgaggtgatcagccacccaagcaagcggctaagggtatcagtgaagcgagaagctgggccacactcggaggatgagagcgtcgcccctgttgtcggtgtcaagagagaagagacacacgaggaagctaccaccagcttcagcctgcacggggcattcctgaagccctgcttcacggggaagaggcaggagaggaagccgaaaaagcaaatgaagcgaaggcgaggtggcccgaccgcggcagctgccgctctcatctcgtggaggagcaagaggatccggaagaagaagcaactctaggatggacgcacatgccatggttcacactttctggcctgatcagatgatgggatgacgacggcaaccgcatacttaaatctttttcttagccttattcttttttatttgtctttctttaccttatcactttttttatctgcctctccttaccgttatcctttttctttcctggattctgtttaacttttggctgtttgt

SEQ ID NO: 138502 - DNA, 1513 bp, Zea Mays
gaacaatccacaattcccagtaccctcacgccggcatccgtcgaagctgctcgacctcgactcaagccttccttgctccttgccgccgtcgagtcgtcgcaggaacgatgacccggcggaacggctgtacgatctacgtgggcaacctccccggcgacatccgcgagagggaagtggatgatctcttctacaagtatggacgtatagtggaaattgacttgaaaattccaccaaggcctcctggttttgcttttgttgagtttgaggacgcacgtgatgctgaagatgcaatatatggccgtgatggatacaactttgatggccataggttgcgggtggaattagcccatggtggacgaggcacatcttcttttgatcgatctagcagctatagcagtgctggacaacgcggtgcctcaaaacgttctgattaccgtgttatggttactggattaccttcttcagcatcatggcaagatctcaaggaccatatgcggcgagctggtgatgtctgtttcactgatgtgtatcgtgaggctggagcaactattggaatagctgattatactaactatgaagatatgaaacacgcgataaggaagctagatgattctgagttccgtaatgctttttcaaggacatatgtccgggtgagggagtatgatgctaggcgcagccgttctcgctccagaggcagaaaccgctctaagtcaagaagcagaagccacagccactcgtactcaagaagcagaagctgcagttatagcaagagtaggagcccaagatctagatctgcttcagagtcaaaatcacctgttaaggcaagattggggcaatgtgaggatctgggaattgcattggtaggataatggaatattgagaacgtgatgatggtttggaacgttggatagtcacagctggattgtgatgcattgtatgacaagtggactgccaccagcaataggagcaagatagggctggcaccacacatacggacaggattttttgatcaccatccagatcccctcctgtttctccccggcgtgacaagtctgcaagcaggagtcctgccaggagcaagagtctgccccgatcttgttctccggcaaaatcagagtgaatcggattctgcacttgaaacgttcagaaaggcagagctcgagctaaaagattgctgtacggattatgagcactgtgctagtagcattgctgtcccttccatatttttacaaatactctgttctttgaggagatcactgtatgctactactctgtacctgacatgatgcaaacgttgttggtttttgaacttagcagaacgatgactttgatcagctccatccattccttccattttttttttctgaatatttcaaaagattgtagtatgcagctattgttattctctgatgcactcctgtgtcctgtcattgtggaaaaaaaatggaattctaccattcatgtgatgtgtctaaaaaatgcaactctagcttgcgattagatgcagttgttt

SEQ ID NO: 138503 - DNA, 1355 bp, Zea Mays
gaacaatccacaattcccagtaccctcacgccggcatccgtcgaagctgctcgacctcgactcaagccttccttgctccttgccgccgtcgagtcgtcgcaggaacgatgacccggcggaacggctgtacgatctacgtgggcaacctccccggcgacatccgcgagagggaagtggatgatctcttctacaagggaaggcaatgtggattgcgaatgtatggacgtatagtggaaattgacttgaaaattccaccaaggcctcctggttttgcttttgttgagtttgaggacgcacgtgatgctgaagatgcaatatatggccgtgatggatacaactttgatggccataggttgcgggtggaattagcccatggtggacgaggcacatcttcttttgatcgatctagcagctatagcagtgctggacaacgcggtgcctcaaaacgttctgattaccgtgttatggttactggattaccttcttcagcatcatggcaagatctcaaggaccatatgcggcgagctggtgatgtctgtttcactgatgtgtatcgtgaggctggagcaactattggaatagctgattatactaactatgaagatatgaaacacgcgataaggaagctagatgattctgagttccgtaatgctttttcaaggacatatgtccgggtgagggagtatgatgctaggcgcagccgttctcgctccagaggcagaaaccgctctaagtcaagaagcagaagccacagccactcgtactcaagaagcagaagctgcagttatagcaagagtaggagcccaagatctagatctgcttcagagtcaaaatcacctgttaaggcaagatcaccatccagatcccctcctgtttctccccggcgtgacaagtctgcaagcaggagtcctgccaggagcaagagtctgccccgatcttgttctccggcaaaatcagagtgaatcggattctgcacttgaaacgttcagaaaggcagagctcgagctaaaagattgctgtacggattatgagcactgtgctagtagcattgctgtcccttccatatttttacaaatactctgttctttgaggagatcactgtatgctactactctgtacctgacatgatgcaaacgttgttggtttttgaacttagcagaacgatgactttgatcagctccatccattccttccattttttttttctgaatatttcaaaagattgtagtatgcagctattgttattctctgatgcactcctgtgtcctgtcattgtggaaaaaaaatggaattctaccattcatgtgatgtgtctaaaaaatgcaactctagcttgcgattagatgcagttgttt

SEQ ID NO: 138504 - DNA, 1336 bp, Zea Mays
aaagcgaacaatccacaattcccagtaccctcacgccggcatccgtcgaagctgctcgacctcgactcaagccttccttgctccttgccgccgtcgagtcgtcgcaggaacgatgacccggcggaacggctgtacgatctacgtgggcaacctccccggcgacatccgcgagagggaagtggatgatctcttctacaagtatggacgtatagtggaaattgacttgaaaattccaccaaggcctcctggttttgcttttgttgagtttgaggacgcacgtgatgctgaagatgcaatatatggccgtgatggatacaactttgatggccataggttgcgggtggaattagcccatggtggacgaggcacatcttcttttgatcgatctagcagctatagcagtgctggacaacgcggtgcctcaaaacgttctgattaccgtgttatggttactggattaccttcttcagcatcatggcaagatctcaaggaccatatgcggcgagctggtgatgtctgtttcactgatgtgtatcgtgaggctggagcaactattggaatagctgattatactaactatgaagatatgaaacacgcgataaggaagctagatgattctgagttccgtaatgctttttcaaggacatatgtccgggtgagggagtatgatgctaggcgcagccgttctcgctccagaggcagaaaccgctctaagtcaagaagcagaagccacagccactcgtactcaagaagcagaagctgcagttatagcaagagtaggagcccaagatctagatctgcttcagagtcaaaatcacctgttaaggcaagatcaccatccagatcccctcctgtttctccccggcgtgacaagtctgcaagcaggagtcctgccaggagcaagagtctgccccgatcttgttctccggcaaaatcagagtgaatcggattctgcacttgaaacgttcagaaaggcagagctcgagctaaaagattgctgtacggattatgagcactgtgctagtagcattgctgtcccttccatatttttacaaatactctgttctttgaggagatcactgtatgctactactctgtacctgacatgatgcaaacgttgttggtttttgaacttagcagaacgatgactttgatcagctccatccattccttccattttttttttctgaatatttcaaaagattgtagtatgcagctattgttattctctgatgcactcctgtgtcctgtcattgtggaaaaaaaatggaattctaccattcatgtgatgtgtctaaaaaatgcaactctagcttgcgattagatgcagttgttt

SEQ ID NO: 138505 - DNA, 1089 bp, Zea Mays
gctgacgtggcgaaggctactaccacaatatcgagcatcggcggggtcatctccgaaaaaaaacgcgaacgcagaacgccgccggcccgtcgtgcactcgtgtttcccttcctccacttgccttcgtgttcgtgattcgtgatttcgccgccggaaagccgagggagagggagcgatatggggttcgtcggagacacgatggagtcgatccgctccatgcagatccgccaagtgctcatgcagatcatcagcctcggtatgattgttacctctgcattaatcatatggaagggtttgatagttttcacggggagcgagtcaccagttgtagtggtgctctcgggtagcatggagcctggatttaaaaggggtgatatcctgtttttgcatatgagcaaagatcctattcgcacaggagaaatagttgttttcaatgtcgatggtcgtgagattccaattgttcaccgagtgattaaggtccatgaacgtcaggacactgcagaagtggacatcctcaccaaaggtgacaataattttggggatgaccgactattatatgcacatggccagctttggctccagcaacaccacattatgggacgtgcggtgggctaccttccatatgttggctgggttacaattatcatgactgagaaaccatttattaagtacctgctgattggcgcactgggtttgctggtcataacgtcgaaagattagtgatgtcaaacttcagggccatgtagattttgctcttatggtgcaacagcagagatcagtggctttgtggcgtttaagagatgccgttctgttgcgccatgtatcaaacgagaagatttctttatctactgcgagggcacctgcctattgatcggatagtcggttctaatccagcatccatcttttgtagttgtggcctagctaatgagttgaaccagtcgttggttctattcgatgaagataactcttcattgcagtcttgcaggaacctcctaggcaatgtgcaatgataaaaatctgcgcggtcttacgtgctgcttcatcatgctgactgatgagcacaacatgcgcctttgtttgtttccactt

SEQ ID NO: 138506 - DNA, 1814 bp, Zea Mays
gctgacgtggcgaaggctactaccacaatatcgagcatcggcggggtcatctccgaaaaaaaacgcgaacgcagaacgccgccggcccgtcgtgcactcgtgtttcccttcctccacttgccttcgtgttcgtgattcgtgatttcgccgccggaaagccgagggagagggagcgatatggggttcgtcggagacacgatggagtcgatccgctccatgcagatccgccaagtgctcatgcagatcatcagcctcggtatgattgttacctctgcattaatcatatggaagggtttgatagttttcacggggagcgagtcaccagttgtagtggtgctctcgggtagcatggagcctggatttaaaagggtttgtttactctctacataacatggaaataaccttgggttttgtatgctttcttgatacctacctgcttcatgttcacattagtaactgtttaacaaaacatttttccttttatctgtgactttccagaaactgcttcacaaaggatcatttccattttctatatgaatacctatcacttctttaagttctattagttttgtatacgttgaatggccgcattatttcattttccttgtcactagagttttcgtttcaagtcttcaagatgagtaaattttacaaaacggtatattcctgtcccagttgtcacaaccacttctagtgtctgtttcataaaactaccaaaactttgggctccattcttacgaacttaccacactgtgccccttgccctgagaacctgcacccactcgtcagcatcacatagtgcagtgcactatgtgacgctgaccagtgagcctaggtgctcaaaccattttaggagctaaggtggtaggtttgttagaaggaaaccttaagtattagtaattttgtgaaatggcatcagaagtggtagctttgtgacaattatgacagtaaagtggtatttttgtgaaattaaccttttaagatttgtaccataatttgttgatggtctgctatgtaccatgtattttttagctccagagctagttgtatgtacgcttttgaagtgccttaacgattaattgtcttgttttcagggtgatatcctgtttttgcatatgagcaaagatcctattcgcacaggagaaatagttgttttcaatgtcgatggtcgtgagattccaattgttcaccgagtgattaaggtccatgaacgtcaggacactgcagaagtggacatcctcaccaaaggtgacaataattttggggatgaccgactattatatgcacatggccagctttggctccagcaacaccacattatgggacgtgcggtgggctaccttccatatgttggctgggttacaattatcatgactgagaaaccatttattaagtacctgctgattggcgcactgggtttgctggtcataacgtcgaaagattagtgatgtcaaacttcagggccatgtagattttgctcttatggtgcaacagcagagatcagtggctttgtggcgtttaagagatgccgttctgttgcgccatgtatcaaacgagaagatttctttatctactgcgagggcacctgcctattgatcggatagtcggttctaatccagcatccatcttttgtagttgtggcctagctaatgagttgaaccagtcgttggttctattcgatgaagataactcttcattgcagtcttgcaggaacctcctaggcaatgtgcaatgataaaaatctgcgcggtcttacgtgctgcttcatcatgctgactgatgagcacaacatgcgcctttgtttgtttccactt

SEQ ID NO: 138507 - DNA, 138 bp, Zea Mays
ggacgagttggaaaaacatctcttgtgctgtggtatgtgaataatgtcttctcagacaaacatgaagcaacagttcaagcctcttatttgacaaaacgccttgttgttgaaggtgtgcctattacgctatctatatgg

SEQ ID NO: 138508 - DNA, 455 bp, Zea Mays
ggtgtccgaagctcagcagaaccaagccccaggagatctggcggttcaaccctttttggagggcttggttttctaaggagctacaccagctgagacgtatgtgctcagatacgtgaatttttattcagactccatcagcttgagctgcatatgtaggtagtagaaaacatggcagttgccaaaaggatggctcccttttccaattgggaattgcgaatttttgtaggaacttaataccttgcagggcaatgcctggagggttgtatattgcactggattatactagtagaatacatgtttggcaaggagcagttgcaactaaatttgtgcttttcttggactcaaacctgctggctgatgatgcttgcttggatagcatgtatgcaacatttgttgtggcagctgcaggctgcaggcatatctggaaactctggatccactcacggttggatttc

SEQ ID NO: 138509 - DNA, 984 bp, Zea Mays
ccctcctctccctcgcgggtcccggcgcggacgcaaggcaaaggcaaaaggcggcagaggtggcgctgcagtccaccaattagcggctatggtgcttggcaagatcgccatcgtcatcggctccggagttatcggatcagtactcacaggtggtgagtctggtcttcccgacttcaaggatgcaatctctggtgctttcaagttcttgaccaagagttcaaagcaaggcaaagatgggccgtcgaccagcaggccacatacttctgagttgttgacccaggtcaattatctcagagaggagctacaaatgttgtctaaatcaaatcatgttgctattgtcactgttgatggtagacctgggcctggtgcatatggtattacagctgttattattggagctattggctatttattcataagatggaaggggtggaaactttctgatatgatgtttgtgacgaagcgtggattatctgatgcttgcaatgttgtggggaaacaagtggatcaggtttcagaaagtgttaatgttgcaaggagacatcttgcaggaaggattgatcgtgtagattgtagtttagatgaatgtcatgaaattacagaagccacaagggaacaggtcacaatcatccatggagatctaagtgccttccagaaggaaatggaaacagttcatcttgtagttcgtagtctggaggcaaagcttggacgcctagcttatactcaagatcggacaacacgaggaatatatgatttgtgtgaattcactaaaagattggatcagagcccgaaagctgagactcatcaggttacatcatcaactcctcgccctgctattgaatcctcagagagaattgctagggctggttctttgcccccagctttggaaccagagtctcctagaatagaggcgcctaaggttgtgcgctcatctacaatcatgtcagcatcgggacttagtttgctagctggaactacaacacc

SEQ ID NO: 138510 - DNA, 1444 bp, Zea Mays
aggcctaaggaacgaagcccgatccgcttatgggatatcgtggccctgcaatcagtgaccgtccagcagatgcgcggacagctgtcggatcagaaaccctagcccgggaggctctcacctattattagaatccacctcgcaccccgcgagcggtgacttccctagggtttagtcgcgccgccgccgccgccgaaacagcacatcgctctctcgatctcagccatggcggaggtggagcagccccaggacgcggtgaagctcttcaaccgctggaccttcgacgatgtccaggtgaacgatatctcgctgaacgactacctggctgtgactgcggcgaagcacgcgacattcctgccgcactccgcggggcgctactccaagaagcggttccgcaaggcgcagtgcgccatcgtcgagcgcctcaccaactcgctcatgatgcacgggcgcaacaacggcaagaaggtcatggccgtccgcatcatgaagcacaccctggagatcatccacctgctcactgacgccaatcccatccaggtggtcgtggacgccattatcaacagtggaccacgtgaggatgccacccgtattggttcagctggtgttgtgagaaggcaggctgtggatatctcacccctgagaagggtgaaccaggccatctacctcctcaccactggtgccagggagagcgctttcaggaacatcaaaaccattgctgagtgccttgcagatgagttgatcaacgctgccaagggctcttccaacagctacgccatcaagaagaaggacgagattgagcgtgttgccaaggccaaccgttgagtggagcttgtatcctggtgcacttgcactagaactacgtttctggcagtcgtatttttttcttgtgtttttacccatgtttagactttgagacctatatctaaggttttggttctcagtgaacaatgaaaattactgtgaaatgcagttgttttggtgcagaaatgcgcactgagatattctgcttgtgaatttgtgagtgctgttggcgtcgccgctggcttgccgatgtagtatttcttgtcactcagatgtcaccggttctatgttggcaatcttctgtaggttagacaattgatgatagcaggtgcaaatcaagctgctggtgcagattaggcaaaccaatacaagaatgggaagatctttttttttttaaaaaaaacatgtttcaaaccagcctttttcacccccaggatatttttagcttaccttgcttgcgttggtttgtaccaatagttttatctgcactgcacctctccgtgttattggttaggtgacacaattgtagctatggatctgtttgtttccatacccttgcctgctctctctccgtgttacattgtgccataatcaggattgccataatcaggccatgagataagtttcttaagtctgctttttt

SEQ ID NO: 138511 - DNA, 965 bp, Zea Mays
gcggacagctgtcggatcagaaaccctagcccgggaggctctcacctattattagaatccacctcgcaccccgcgagcggtgacttccctagggtttagtcgcgccgccgccgccgccgaaacagcacatcgctctctcgatctcagccatggcggaggtggagcagccccaggacgcggtgaagctcttcaaccgctggaccttcgacgatgtccaggtgaacgatatctcgctgaacgactacctggctgtgactgcggcgaagcacgcgacattcctgccgcactccgcggggcgctactccaagaagcggttccgcaaggcgcagtgcgccatcgtcgagcgcctcaccaactcgctcatgatgcacgggcgcaacaacggcaagaaggtcatggccgtccgcatcatgaagcacaccctggagatcatccacctgctcactgacgccaatcccatccaggtggtcgtggacgccattatcaacaggtactaccttgctctcctgtcctcactcccgatctctgtattgtcaggctaataacagctaaacttgttactttatgctgatactttttggaatgcggtaacttttggtgaaacgtttgtttttactatgcaattgaattgattcctatgaaattcatgtataattttctatgaaatttatgtataatttctgtcttctgaagtagattgcactttgatagagctattatgtatttccttgctgcttgttgccagttttatatatctgatatgcatttaaactgattggtatgagatcatgtataatttgtctttcaaaggggagtgctgtttgatataagttccttgctggttcctgctattttaaatctgatagcatgatcgttgacaaatgccagctgttgaaattcgaaataaatgccatgtcacaatttctcatcatactagaatgtatgtttttaagctgattgtactt

SEQ ID NO: 138512 - DNA, 459 bp, Zea Mays
tattggccaagtttgaagctgcgacataaccttgatgtcatgcacatcgaaaaaaatatttttcttcatcaagctgttcggcatgccagacacggacatggctgaagcacacaacgtcgctgccaaggagaaggcggtggaaatgctggcagtgctcggcaatgattgatgtagagttttaccagagcagcgtgccaagattgcccatgcccatttcatttagagacagagtcggttgggatgtgttacagagctctgccaactgttaatggaacatgctgttctgcactagctttgatttcctcatagttgctattgtgcattgtaatgtcaaactgcgaggattggaaggcagaactctactccttcactgtgtcagtttgtttgagggataacagttcagttatagcagttctgaagtctcgtatgagccaaaacttaaactgaatgacctaacag

SEQ ID NO: 138513 - DNA, 544 bp, Zea Mays
cagaggtgtaattatagagacacatgcatgctagaaccctttcgtcaagctcatttcctggatgaaggtgacttgctatgtcatgcaacaagatctcacaagcagaatatcttatggcattttcaccaagggcagccagctcgcttccgagccatgcagtgcataagaggcaattctgcaagaatcaagccagtcgatgttcctgattgtatttctttgtgatgttgatgtgagaccagctttctttgtgagccatgctgcagtgtacgattctcctgaccaggaataagtccctccgaggtttgaaagaaaacatgctgataatgcctgtactctactgttttcttgagatgatagagagtccaacaggacttccatcgcttcatcttggaacacactcctgccatctgatctctcctgccaaaaggaataatatggaacctgctgcttcagatattgtgaggttacttgtaatggtaataatagtaacaacgaggatgttgtgtttttgaagaattggtgaaaccatgaaaaacaatttttt

SEQ ID NO: 138514 - DNA, 1518 bp, Zea Mays
atgctgctcaagttccgggattttgcaagatgtttcgtcggatcggaacgcgcacccgcctcagccgcgcgggtaagcgcggctccgtcgtcggcagtagtggcggcggtgccggtgcacctgccggacaacgacgacctcctccttgagatcctgctgcggctgccgccgctgccgtcctcgctcccgcgcgcgtcgctcgtgtgcaggcgctggcggcgcgtcgtggcggacccggacttcctccgccgcttccggcggcgccacgcgagggcggcgccaccgctgctgggctacttctccagcggcccacacgggcccgtcttcgcgccgacgctggcgccgcccgaccgcgtcccgcccgagcggttctccttctccccgccgcggccgcggccgcctgccggcgagcgcctcttcctcctcgggtgccggcacggcctcgcgctgctcatcgaccggagacgcctggaggccgtggtgtggaaccccgtctccgggcgccgggccgccgtggcctacccaccggagctgaccaccgacaacggggcgcactgctgccgcggcacggtgctgagcgcgagcgcgagcgccgccgtcgatgatgagggcgatggcggccactacttgaggccgttcaaggtcgtcctggtacgcacggacgtgggcgacggcggccgcatacgcgtgctcgtgtgcgtgtacgcgtccgagaccgcgagatggggccacgccgtctccaccgtcgtcccgtcgtcgtccgtgtccaacctgcccagcgtgttggtccgcgacgcgctctgcgggttcctcctgtggcccaacggcatcctcgagtacgatctggagaggcacagcctgggcgtggtccggacgccgaagcgccgccaccccatcgacaggtccttcttccaggttgtgagggcgcaggacggagagctcggccttgcgatcttgaccgagctgggcatggagatggagctgtgggcgcggaggaggaaggcaagctcgtgcgcatcggatggtggtggtgatgtggacggagggtgggtgctagagaaaactattcgactggacagcctcctgtcgctgccacgtcgtagcagcagcacgatggacgacggcatcttgttgtcagcgaggatactggggtttgatgaggataacaacgtcattcacgtatccacctgcaccggcgccttcgcgatccggcttgacgactccatgcagttcacggaactcttcgaggtcagccggattggttcgtaccattcctgtcatccctacgctggtttctataccggaggaggtgtgcctggtcttttaacaaattccaactatatatgttcagaatagatagataatattgttcatgtgctacgcttatataatgcggttcgtagcaagattcaggagtaataagcattttcgcaaacaactgtatttactgccaggacatataaattgattctgaatatatggaggttgcaagctcggtttggtcgacaataaaatgaa

SEQ ID NO: 138515 - DNA, 102 bp, Zea Mays
cggcggcggcggcggcggaccgcccttgccgtgatcaataatgaaaccaaaagccgacagtatttgagctggaaatacaagagggacatcccactgctagca

SEQ ID NO: 138516 - DNA, 734 bp, Zea Mays
gcaaaagaagcctgggacatcttgaagcgcatgttctcttcggccatgcgcgcccgagtcgttcaggttcgcatcgaccttgccaacatgaagaagtaggacctgtctgctgctgactacttccgcaagattaaagggttcgcgactgaacttgctgctgccgaaacccctctccgtgatgatgaagtcatcgcgtatcttctggctggtctcggatcggactacgattcattcgtcacatccatgatgaccaagaccgaggctccctccctcgacgatgtctactcccaccttctggcattcgaggctcgccagctgcagcgacaagccgaagcgcgactccctgttggtgcctcggctaactttgctggccgtgggggacaggcgccacgtggacgcgctcgcggtacaccacctggccgtggccgcgcgcggacctccgtcgttctagggtcggggtcggtctgctccaagctctgacaggcctaggcgtctaccatgccaaatctgcggcctgtcgaaccacacggcggtcaagtgttggcatcgcatggacgagtcctaccaggaggaacaacccttcgccgcaactgctaccactacttcctacaaggtcgatccctactggtactccgacacgggggctaccgatcacatcactagtgatctggaccgcctagcccttcgtgaacaataccatggtgctgaaaatgttcaagttgataacggggcag

SEQ ID NO: 138517 - DNA, 1064 bp, Zea Mays
agcaccagcgtacctccttcacagcgcaccataaaatctaatccgtctccttcctcttgttcaccaaagcaaaccgaagccgcactctaccgcgctcctcccgaaccacagctatgctcgcccaccgcctcctcctcctcctcgccgtcgccgcggcgagcggcaccgccttcgctaagccgacggcgtacgaagccctcgctgactacgacttcccgccggggatcctccccaagggcgtggtcgcctacacgctcgacaacgccacgggcgccttcacggccacgctcgacgcctccgcgtccggcagcgggtcctccgtctgcgagttctccatccagggctcctactcgctccgctaccagaccaagatcaccggaaagatcgcccccgaccacctcaccgacctcgagggcgtctccgtcaaggtcctcttcttctggctcaacatcgtcgaggtcacccggcgcggcgacaacctcgagttctccgtcggcatcgtctccgcggacttcgggattgaaaacttcctcgagtgccccacctgtggctgcgggttcgactgcaacaacctgctcatgctgcagaagcccggcgccgccaccgccaagctgcgcctgcggggtgccttctagaactccacttctgcagatttggtgactgctgctgtaagctgcctcgactagtagtgctgtatgtctagtagatgtgggttaataaagagggcaaacttgaaagatcccagcttttagatgtgggatggggtaaccaagttcaggactcgatgtcatgtttcaccaattgtttcagacagttctaggaacagtcagagaagcaattaagacctttcaaatattttaatttatacgtctctatggaaattgtcttatttccattgagatgtttgcccctcatgtgaattagtttgtgaagtggtgatagttgaatcccatggatatggatggttgcttaaatgcttgttttggttgttagttcaagacttcattagttttttcgtttccattaagacaaaatatttattctcacacagttgggagaagctt

SEQ ID NO: 138518 - DNA, 789 bp, Zea Mays
atggaagcaggcagagggcaagcagggacagaggaccgcgtgagctctgaacttggagcaccgcgaccatgggcgagggaggagctcggccgggagcgagctgagggagagatagaggagatgcgcgccacgggagcttcgagcagaggacggcagcgcgcgacacagggatctggaaaggagcaaagagagctggggcgactgcggcacccaggggagccagaggtgacgcgcgagcaccatgggaggagcctgcgtgcggaaaagaagcttggctgggcgagcagcaaagcgccgagcagagaggagctccgcccagggatggagcaaggaaccgggtgcggccatggaactggagacgcgcgcgcagggagagaaataggggatccgggctgggggcttggccgggacgcgactcccatgggcgagcggcgagccagagagaagtcgagaaggagctgggcgacggtgcggcaagctccacggctgggcaccgagcgctgcaagaaggagataagctccgtgagaaaaatctccaggactgcgcacgggtaccagggaagaagaagcagctgggctgcgcgcggttcttatccagggcgagggcggcggctaaaaatctgctggggacggcggcgcgagtccggcaagcgctggacggacgtacaggcgataaggatcacgagcacgagctgggattgggatggagcacagtggaacaggggacatgcgtggagtcttctgaagagggaagatattttccttttctcatccatttctttgaactaa

SEQ ID NO: 138519 - DNA, 882 bp, Zea Mays
ctttattgttattttgtttcaagttataagatatatatgtcagatctgacagttgatttcctttccctcagctgatgaaactaacagataatgacatcgtggagatgatcttctttcctgtggtgaatgaagcctgccgagtgcttgatgagggaattgctctcaaagcatctgaccttgatgtagcttccattatggggatgggtttcccttcttacaggggtggagtaatgttttgggctgactcgcttggtgcgaaatatgtgtatgacaaactggatgcatggtcgaaggattatggggagttcttcagaccctgtgaatatttagctgtgagagctcgtcagggtgcatccctggctgccaaggttgatggtgtcaaatcgcgactctagggttttgttgttcatttgtccggacatgcttatacggactttggcctcaatgacattgagatgttgtgaaaacccttgagcaccaactgttacaatcatgcagttgcaaaacctgcacaagtgaattatacggaggcctagcgaagtggaaattgcatgtgccttcgtgggattgctgaggatctgcagcaggaatttctctgaaatattatgtgcagttttctgaagtgatgctgacaactttgcatagaatagttacagggagtttctcctagacgttttgcgggaatatactttgttgcagtggattcttatttttttaaaaataaaactcgtgaaatccatggtcgtatgtacgatactacctccgttctttttgaatatttgtcattcgctagttaattttttaactaaaacacgataaataaaaaataatggagggaatacaacatttcagttcgatcatctgctcaaaaagtacacgttc

SEQ ID NO: 138520 - DNA, 3026 bp, Zea Mays
aacccaggccaacacggcgccccggaatccctccactcctcccgccgcactaccgttgccgttgcgattcgcgagtcctccctagccgccgggcgccgcgccccgccggcccttcctcccgctgcatactacattagccaggggctcggcgacccggtgcggcggtgccagcagccgcagccggcaggcagcatcaggccagcatctcggcctcggcgtgacccggtggccgcgtgggcaggcagcagactgagccctgcaaaccgcatgcacgcacgccgcaggcaggctagcaagcagtcagctctgtattgattgtgcttttggagtggcactaaacgtggaaattgacgggctccgctactggtagccgttgccgtagatggcgaggggcatcaccaccatggaggtgcgcgccgacggcgtggccgtcatcaccatcatcaacccgcccgtcaacgccctctcgctcgacgtcatagctagtttgcagaggaactatgcagaggctctaagcaggaacgatatcaaggcaatcgtcctcactggttccaaaggaaggttttgtggtggattcgatatagccgcgtttgaaaataagccaaaaaatgagaagcctggatccatgtctattgattttttgactgacatagtggaagatgctcacaaaccgtcagtggctgctatagatggcattgctctaggtggtggattggaggttgcgatggtttgccatgctcgcatttcaacaccgtcagctcagttaggactacctgaacttcaacttggaatcattcctggaatgggagggacacaacgtcttccccgtcttgttggtctgccaaaagcccttgagatgatgttgacatcaaagactataaaaggcaagatggcacatgaactcggtttagttgatgctgttacctcagctaataaattggtcaacactgcctgttcctgggctctggaaatttttgaaaagaagaaaccatggttcaaaagtctccacagaactgatagacttccagatcttgaggaagtgaaggatattctgaaatttgcaagagttcaagctgaaatgaaggctgctaatgttcagcatccaatagtttgcattgatgttattaaagaaggaataatctctggccctcgtgcaggcctcatgaaggaagtgctctctgggaaaatgcttgagcagtctcaaacaagcaaaagcttaaggcactttttttttgctcagcgtgccacttcaaagattccaaatattaccaacataggtttgacagcacggaaaattaaaaaggcagctatcgttgggggtggtctaatgggatccggaattgcaacaatactgatattgaacaactttaatgttgtcttgaaagaagtaaatgaacagttcttatctgctggcattaacagaattaaagtgaatttgcaaagtcttgtcagaaagggtcaacttactgaagaagattatgaaaagaagctttctctgctatgtggtgctcttgactatgaacagttcagagatacagatgtagtaattgaggcggtaattgaggatatggtgctgaagcagcaaatattttctgaccttgagaagtattgccatcataattgcatatttgcaacaaacacttcaacaatagacctgaacataattggtcagaagacagcttctcaggaccgcattgttggtgcacacttctttagtccagctcatgtcatgtcactgttggaaatagtttgtactcatcatacttcctctcaagttattgtggacctgattgatttggcaaagaaaatacagaaaacaccaatagttgttggcaactgcacaggtttcgctgtcaaccggatgttctttccttacgctcaggcagcttcttttcttgttgattatggtctggatgtgtatcacatagatcatgtgatcacacaatttggaatgccaatggggcccttccgattagccgatcttgttggttttggtgttgctattgctacaagaaagcaatattaccaaagttatcctgagcgaagttacaaatcaatgcttcttcagattcttgttgaggataataggacaggtgaatcttcttgtaagggcttctatgtatatgatgataaacgcaaagcctctcgagatcctgattttgggaagtacattgaaaaatcaaggaacatggcaggtgttatgcaagatcctaagctgatgaaactaacagataatgacatcgtggagatgatcttctttcctgtggtgaatgaagcctgccgagtgcttgatgagggaattgctctcaaagcatctgaccttgatgtagcttccattatggggatgggtttcccttcttacaggggtggagtaatgttttgggctgactcgcttggtgcgaaatatgtgtatgacaaactggatgcatggtcgaaggattatggggagttcttcagaccctgtgaatatttagctgtgagagctcgtcagggtgcatccctggctgccaaggttgatggtgtcaaatcgcgactctagggttttgttgttcatttgtccggacatgcttatacggactttggcctcaatgacattgagatgttgtgaaaacccttgagcaccaactgttacaatcatgcagttgcaaaacctgcacaagtgaattatacggaggcctagcgaagtggaaattgcatgtgccttcgtgggattgctgaggatctgcagcaggaatttctctgaaatattatgtgcagttttctgaagtgatgctgacaactttgcatagaatagttacagggagtttctcctagacgttttgcgggaatatactttgttgcagtggattcttatttttttaaaaataaaactcgtgaaatccatggtcgtatgtacgatactacctccgttctttttgaatatttgtcattcgctagttaattttttaactaaaacacgataaataaaaaataatggagggaatacaacatttcagttcgatcatctgctcaaaaagtacacgttc

SEQ ID NO: 138521 - DNA, 1283 bp, Zea Mays
gccggccggcaccaaaaccacgcgctactacaccagcctagctagccctttcgccgtcgctgcggctcctgcccactgactcgtaggtttcgttgtttcgacaatgtgcggcggagccatcatcgccgacttcgtccccgccggcgcccggcgcccggcaacagacgacaccatgtccgcctccatcctctccggtagtacgttgtatacctaccactaactggcgaggcccgtgctcagtctgattagcttctgcagcttgctatcctacatgcatgacatcctgtagaatattacgctaaccccgccgcatgcacaacaaccattcgctaaccccgccgcgcgctgccggtaccgttttctgcttctggccaggcgaggaccatccggagctgccgctgccgctgccggcgccggcgccggggcgcaagacggcgtaccgcgggatccggcgccgcccgtggggccggtgggcggcggagatccgcgacccgcggaagggcgcccgcgtgtggctcggcacctacgccaccccggaggacgcggcgcgcgcctacgacgtggcggcgcgcgagatccgcgggcccaaggccaagctcaacttcccgcccgccgtcggcggcggcgcgcgcgcgccggcgccggcggcggccaagaggcgccgcaagtccgcggcgaccgaggagagctcggcctcgtctcctcctcctccggcggcggcggcggccgtcgtcgtggcgggcggcggggaggaggcgctgcgcgactgcatgtctgggctcgaggcgttcctggggctgcaaaacgccgacgagggtggcggcgtcgaggcgtgggacgccgtggacctcatgttggcgtaggccgtacgccttagcaggggggcccagcgccagcgccagccccagccccagcgcgcgcgtgccgcgtgccgtcgctgtgaacggccgccgcagctgttttggatcgagtaataatattattagtagtataatgtttctccaagcagctaagataattgcaagccttgctgggtggtattactagcactgctatctaggagtatgtactagcaggatgggtttatctagcttgttgctaaacagaaaattaatctaagaaaacagagatatggtctgttaattgccggctctaactaatggccggcgataatctgttaggctacctcagattgaccatctctatttcttattataaactcattttcctcgtctattattttgaactccattatataaatgcagtctacatattgtacaaca

SEQ ID NO: 138522 - DNA, 1102 bp, Zea Mays
gccggccggcaccaaaaccacgcgctactacaccagcctagctagccctttcgccgtcgctgcggctcctgcccactgactcgtaggtttcgttgtttcgacaatgtgcggcggagccatcatcgccgacttcgtccccgccggcgcccggcgcccggcaacagacgacaccatgtccgcctccatcctctccggcgaggaccatccggagctgccgctgccgctgccggcgccggcgccggggcgcaagacggcgtaccgcgggatccggcgccgcccgtggggccggtgggcggcggagatccgcgacccgcggaagggcgcccgcgtgtggctcggcacctacgccaccccggaggacgcggcgcgcgcctacgacgtggcggcgcgcgagatccgcgggcccaaggccaagctcaacttcccgcccgccgtcggcggcggcgcgcgcgcgccggcgccggcggcggccaagaggcgccgcaagtccgcggcgaccgaggagagctcggcctcgtctcctcctcctccggcggcggcggcggccgtcgtcgtggcgggcggcggggaggaggcgctgcgcgactgcatgtctgggctcgaggcgttcctggggctgcaaaacgccgacgagggtggcggcgtcgaggcgtgggacgccgtggacctcatgttggcgtaggccgtacgccttagcaggggggcccagcgccagcgccagccccagccccagcgcgcgcgtgccgcgtgccgtcgctgtgaacggccgccgcagctgttttggatcgagtaataatattattagtagtataatgtttctccaagcagctaagataattgcaagccttgctgggtggtattactagcactgctatctaggagtatgtactagcaggatgggtttatctagcttgttgctaaacagaaaattaatctaagaaaacagagatatggtctgttaattgccggctctaactaatggccggcgataatctgttaggctacctcagattgaccatctctatttcttattataaactcattttcctcgtctattattttgaactccattatataaatgcagtctacatattgtacaaca

SEQ ID NO: 138523 - DNA, 954 bp, Zea Mays
accaaaaccacgcgctactacaccagcctagctagccctttcgccgtcgctgcggctcctgcccactgactcgtaggtttcgttgtttcgacaatgtgcggcggagccatcatcgccgacttcgtccccgccggcgcccggggcgcaagacggcgtaccgcgggatccggcgccgcccgtggggccggtgggcggcggagatccgcgacccgcggaagggcgcccgcgtgtggctcggcacctacgccaccccggaggacgcggcgcgcgcctacgacgtggcggcgcgcgagatccgcgggcccaaggccaagctcaacttcccgcccgccgtcggcggcggcgcgcgcgcgccggcgccggcggcggccaagaggcgccgcaagtccgcggcgaccgaggagagctcggcctcgtctcctcctcctccggcggcggcggcggccgtcgtcgtggcgggcggcggggaggaggcgctgcgcgactgcatgtctgggctcgaggcgttcctggggctgcaaaacgccgacgagggtggcggcgtcgaggcgtgggacgccgtggacctcatgttggcgtaggccgtacgccttagcaggggggcccagcgccagcgccagccccagccccagcgcgcgcgtgccgcgtgccgtcgctgtgaacggccgccgcagctgttttggatcgagtaataatattattagtagtataatgtttctccaagcagctaagataattgcaagccttgctgggtggtattactagcactgctatctaggagtatgtactagcaggatgggtttatctagcttgttgctaaacagaaaattaatctaagaaaacagagatatggtctgttaattgccggctctaactaatggccggcgataatctgttaggctacctcagattgaccatctctatttcttattataaactcattttcctcgtcta

SEQ ID NO: 138524 - DNA, 143 bp, Zea Mays
ataccgtttccgacagttttcatctctacccggggtcgccgaagggagttggcgtcgttggcgcagcctcttggcaatccggtggtcggacgtaccccagcgcagcccgcccaccgttcgggcgccaggaaaaccagtggcgg

SEQ ID NO: 138525 - DNA, 1319 bp, Zea Mays
acacagcacgccagcttcctcctttctcttcagccattcttgttcttggctatctatcttctcccctcttctctctccttctctctcttactcttaatttggtgcttcttaatttctcagaagagactttgcaagcttgtgacttgttctcccaattcgattgcaaacttgatcaacatcttgttcttggaaggaaggtattagcttctaagaaagcgcaattgttgtggtttatgcacaccattggcagcgagtctctgctgtttgggttgtccaaaaccatctcgtcggcgcagaagccatgtccacgcgcgggagcggtagtcttagccctgctgccggtgcgtctgcggcggcgccggaggtggaaggccactgggccccgcacggcgcggtgctgacggcctgcgtcgtgggctccaacgtgctcgtgatcctgctcgtcttcggtttcttctggcggttcttctctgggaaaggggggccgtccacgtcacacggcgccgacgacgatgacgaggaggactcactgcccgtggcgtccccatgggcgtcccgctaccggttcgagggccacggcgcacggtcgacgccgatggaagacgtggtgtcgtccctgcccgtgtccgtgtactccagcgccggcgccgaggaaggaaggaaggcccggcccgagtgcgctgtgtgcatcgtggagctgcgcgatggcgactcggtgcgcgtcctcccgcggtgcgggcaccggttccacgccaactgcgtgggcgcgtggctgcggcgccgcaccacgtgcccactctgccgcggcagagtcgtgccccccgccgccgcggcccttgctgacaagtccagggacgccaaggacgacgtcgccgtcgccgcggattgtcccgtgtgatgcggcggcgctccggccgactccgaggacagtatcgctcgctcgaactgtaagtctgtaactggcagtgatgctgcatggtgggcaagcaagcggtggaccacgacacgacaccacgcacacatggcggatggtgacagccatcttcttccagggtcggcgtccgtactccgtagccatgtcgcatagctatagctccagcctccagatgaccagctagaaaaggttggtgagacgattgattccttcgtcctgttatttatatttcttgcttcttttctggttttgggatttagatatattgcgagtcgtggtatatatatgtgtgtcttgaattgatcgagtcttccgtcatgtgtagtatccatgtgagatctgcatgattaattactcgtggtactttagtcgtatattagaagaa

SEQ ID NO: 138526 - DNA, 2299 bp, Zea Mays
ctggtggtggtggtggtggtggtggtggtggtggtggtggtggtggtggtggtgctggtggtggtggtggtggtggtggtggtggtggtggtggtggtggtggtggtggtggtggtggtggtggtggtggtggtggtggtggtggtggtggtggtggtggtggtggtggtggtggtggtggtggtggtggtggtggtggtggtggtggtggtggtggtggtggtggtggtggtggtggtggtggtggtggtggtggtggtggtggtggtggtggtggtggtggtggtggtggtggtggtggtggtggtggtggtggtggtggtggtggtggtggtggtggtggtgggcgtggtggtggtggtggtggtggtggtggtggtggtggtggtggtggtggtggtggtggtggtggtggtggtggtggtggtggtggtggtgctagtggtggtagtggtggtagtagtggtggtgtagtagtagtagtagtgctagtgctgtatgtgtcgtgtgtagtgtgtagtgtgtgtgtgtgtagtgtgtgtgtgtgtgtagtgtagtgtgtgtgctgtagtgctgtgtcgtagtgtgtggtgtgctgtgctgtgtcgtagtagtgtgtcgtgtgtagtgtgtagtgtgtcgtgtgtgtcgtgtgtagtgtgtagtgctgtgtgtagtgctgtagtgtgtgtagtgtgtgtagtgtgtcgtgtgtgtagtgctgtgtgtgtgtgtagtgtgtgtgtgtagtgtgtgtgtgtgtgtgtgtgtgtgtgtgtgtgtgtgtgtcgtgtgtgtgtgtgtgtgtgtgtgtgtgtgtgtgtgtgtgtgtgtgtgtgtgtgtgtgtgtgtgtgtgtgtgtgtgtgtgtgtgtgtgtgtgtgtgtgtgtgtgtgtgtgtgtgtgtgtgtgtgtgtgtgtgtgtgtgtgtgtgtgtgtgtgtgtgtgtgtgtgtgtgtgtgtgtgtgtgtgtgtgtgtgtgtgtgtgtgtgtgtgtgtgtgtgtgtgtgtgtgtgtgtgtgtgtgtgtgtgtgtgtgtgtgtgtgtgtgtgtgtgtgtgtgtgtgtgtgtgtgtgtgtgtgtgtgtgtgtgtgtgtgtgtgtgtgtgtgtgtgtgtgtgtgtgtgtgtgtgtgtgtgtgtgtgtgtgtgtgtgtgtgtgtgtgtgtgtgtgtgtgtgtgtgtgtgtgtgtgtgtgtgtgtgtgtgtgtgtgtgtgtgtgtgtgtgtgtgtgtgtgtgtgtgtgtgtgtgtgtgtgtgtgtgtgtgtgtgtgtgtgtgtgtgtgtgtgtgtgtgtgtgtgtgtgtgtgtgtgtgtgtgtgtgtgtgtgtgtgtgtgtgtgtgtgtgtgtgtgtgtgtgtgtgtgtgtgtgtgtgtgtgtgtgtgtgtgtgtgtgtgtgtgtgtgtgtgtgtgtgtgtgtgtgtgtgtgtgtgtgtgtgtgtgtgtgtgtgtgtgtgtgtgtgtgtgtgtgtgtgtgtgtgtgtgtgtgtgtgtgtgtgtgtgtgtgtgtgtgtgtgtgtgtgtgtgtgtgtgtgtgtgtgtgtgtgtgtgtgtgtgtgtgtgtgtgtgtgtgtgtgtgtgtgtgtgtgtgtgtgtgtgtgtgtgtgtgtgtgtgtgtgtgtgtgtgtgtgtgtgtgtgtgtgtgtgtgtgtgtgtgtgtgtgtgtgtgtgtgtgtgtgtgtgtgtgtgtgtgtgtgtgtgtgtgtgtgtgtgtgtgtgtgtgtgtgtgtgtgtgtgtgtgtgtgtgtgtgtgtgtgtgtgtgtgtgtgtgtgtgtgtgtgtgtgtgtgtgtgtgtgtgtgtgtgtgtgtgtgtgtgtgtgtgtgtgtgtgtgtgtgtgtgtgtgtgtgtgtgtgtgtgtgtgtgtgtgtgtgtgtgtgtgtgtgtgtgtgtgtgtgtgtgtgtgtgtgtgtgtgtgtgtgtgtgtgtgtgtgtgtgtgtgtgtgtgtgtgtgtgtgtgtgtgtgtgtgtgtgtgtgtgtgtgtgtgtgtgtgtgtgtgtgtgtgtgtgtgtgtgtgtgtgtgtgtgtgtgtgtgtgtgtgtgtgtgtgtgtgtgtgtgtgtgtgtgtgtgtgtgtgtgtgtgtgtgtgtgtgtgtgtgtgtgtgtgtgtgtgtgtgtgtgtgtgtgtgtgtgtgtgtgtgtgtgtgtgtgtgtgtgtgggggggtgtgtgtgtgtgtgtgtgtgtgtggggggggtctgtcgctctctctatatagagagcggggtggtggggggggggtggggggctggggcggaggggggggggggggggggcgtaggggggggggcgggcggggggt

SEQ ID NO: 138527 - DNA, 1496 bp, Zea Mays
gggaaattcttcagatttttgtccggtccaaaacaatcagtaactgacgaattgggtgggtcaaaactaagccagaatgctgtacaatcattgcaccatagacgacaattttatgattccacagtgacatcacacacaaccaaccgaaagaagaaccaaccatttgagccacctagcagtaggtcatgattgtcctcactctatcggatgctttggtttgcagaattaaaaagccagattagttaggcaacacgaatagaaaatacaatctccaggaaggaaaaatatgccgtccacgaagaactctcaggaatgtgttgtgggttaatcttaatccactatgtgatgatgatgtggctaacttttccgtcttaagcagtgagcttaactacagctaccttgggacttgggttgagataccgagagctgaaaagaaaccatatcaccaaggacacgtatgaccccggccctctcctgtattgtttgtgaggaagagaaagccaagaggaaacaccagagactcgtgctccaatacctatgcctcctaattggcctttatccctctgaaacgaagaagtgcttactattatatgtttggttaaaaaaagggggggcttttttccatgagttgtcagaatcacaaaatgagctgaaacactgatctgacgctgtttcatgtttggtttcttatatatatgcagtagaacgcatgagcccgacgagaattttccagttttttttttttttaaaaaaagaactctatggagatatcacgtgcaatcacaaactttatgatgacacccgaaatccagtacaaaaagccgaacgaaattaatggaagaaagaagcagaacgaacagcagaggccgagtaacagagagagagggagacagagagagagagagctgacctcccagacgatggagcagtcctggttgatgcctttctcgccgcgccgcgagcagacggcggcgaacgtgtccgagccgtcgccccacagggtgcccgacgtccgcagcaccgccggcacggcggtcttgcggtcgcctgcgccgttccctttccggtccctgtccctgtccctgtccctccccaccgagagtgaccgggccaggccctgcagcagcgacgagatctgccgcattctctgggaccgctgctagcacagattaaagagctccttctcctgggcggcgcgcgacgtggctgatggagagccggctcgggagttcagagcgccggccggctgccgtgacgagggtggacagcaggcccggccatagaggacctctctctctctctctcgtccctttggggtgaagggaggagcttggattggattggacgggtagaactggatcgaacaggaagaagaaaaaaaaagagacgcttccagactaccacgctagcacgagacgatcgaacagcgtgttcttggcagctaaggagatagagggccgggaaaaaaaaggtggaccgaggaaggaagagtatcg

SEQ ID NO: 138528 - DNA, 4146 bp, Zea Mays
atgacctatctacctcttctagaaaaccctccaagcgcggccaaaaacattcaaagtgaaatcgcctcctcccttgggagaactcatgcaaacccagcagaagggggcaatggtctgaaatcgtggaccaacaatgatgatctgcggaaagatgctgcagaagcgctctgctgcctcgcacatgcccttggagaagactttactatcttcataccatcaatacgcaaaattcttgtgaagcaccacttgcggtacagaaaatgggatgagattgaaaatcggctactgaggcgagagctactcatcactgaaaacttgtctgtgcaaaagtacacacaatgtccacctgatgtcattagagacccccttgatgattgtgatggtacaccttctgagatagctgatgatacacagcgacaagcaagaagtcatcaagtcaatgatgtccggttgcggagtgccggtgaggcttctcaaaggagtactagggaagactgggctgaatggatgagacatttcagtattgcgcttctcaaagagtcaccatctccagctttacgcacctgtgcaaggctagctcagcttcaggcagaatttatggaacatgatgagaagccacttcctattgatacaagactgcttggtgcacttgctgagaagtgtcgagcatttgcaaaggcactccattataaagaaatggaatttgaagctgtgtgcaccaagaagatgggtgcaaatcctgttacagtggttgaatcccttattcatattaacaatcaactacagcagcatgaggcagctattggcatattgacttactcacagcaaaattcggaagttcaattgaaagaatcatggtatgaaaagttgcaccgttgggatgaggctcttaaagcatacaccgtgaaatcatctcaaacatctggtccctttacaaaacttggatgctacattaggtcgaatgaggtgtctagcagctttggctcggctgcaaatgctgcttggcatatgggtgagtgggaccatatggcagactatgtttctcgcctggatgatgcagatgaaaataagctccgtatgttgggtaacgcaacagctagtggtgacggaagcagtaatggtgctttcttccgggcagttcttttagttcgttacaaaaagtatgatgacgctcggatgtatgttgagcgagctcggcggtgtttagctacagaacttgcagcactggtacttgagagttatgagcgagcgtataataacatggtgcgtgttcaacaactttcagaactggaagaggtgattgattactgcactcttcccatggaaagcccgattgctgacggacggagggaacttattcgcaatatgtggaatgaacggattaaaggaacaaaacggaatgtcgaggtgtggcaagccctacttgctgtcagggagttggttcttccccctaacgaagacagagacacctggataaagttcgctgaactttgctggaagaacggtcgtattagtcaggctagatctacgttagtcaaacttttacagtttgatcctgaatcttcccctgaattgacactgtatcatgcacatccacaagtagctctggcttatctaaaataccagtatgcagttggtgatgagcttaaaaggagggatgcattttctaaactgcaagagttgtctgtgcaggttgctaccaccatgggcaatttacctggaacatcagcaaaccatggcaccatgtcaaatgctggagtaccactcattgctcgtgtctacttgacacttggtagctggaagaaggcactatcacctgcattagatgacgattccattcaagaaattttgatttcttaccataatgccacgctaagtgcaaaggactgggggaaggcctggcacatatgggctttgttcaacacagaagtcatgtcacgctatactttccgaggccgaccagatattgctggaaaatatgttgttgcagcagtaactgggtatttttattctattgcttgtgcatctactacgaaaggggtcgatgatagcttgcagctttactttgaccaaaggaaaaataactcggccggggagggaaagaccgccctcccggatatccttcgtctgttaactctttggttcaaccatggggatacctcagaagttcaaacagcgttgcagaaaggtttttcccttgtcaagattgagatgtggctggttgtgctgccccagataattgctaggattcattcgaacaatagagtagttagagaactgatacaatctttgctagttcgaattggaaaggggcatccacaggctttgatgtatcctctcttggttgcctgcaaatcaataagtatattgagacaacgtgcagcgcaggaggtcgttgataagatccgccagcacagtggaggtcttgttgaccaggcacaacttgtgtcgaaggaactgatacgggtagcaattttgtggcatgaaatgtggcatgaggcactcgaggaagctagcaggatgtattttggtgagcacaatatcgaaggaatgcttgctgtacttgagccattgcatgcaatgcttgagaggggggatgagacaattaaagaaaatgccttcattcaggcttatgggcatgaattactggaagctcatgaatgctgtttgaaatatcgggctacaggagaggatgctgagctaactaaggcctgggatttgtattaccatgttttcagaagaatcgacaaacagcttccaagtcttacgaccctcgatctgcactctgtttcgcctgagctactcaaatgtcgaaagttggaacttgctgtgccaggaacttatgctgcaggccacgaagatttgcggcaagatgaacgagtaatgcagctttttggtttggtgaatactctcctagagaactcaaggaaaacatcagagaaggatttatcaatccaaagatatgctgttatacctttgtcacctaacagtggtttaattggatgggttccaaactgtgacacacttcatgctctgatccgtgaatacagagatgccaggaagattttcttgaatcaggagcacagacttatgttggcttttgcacccgattatgatcacttacccctcattgcaaaggtggaagtgtttcagcatgctttgcaaaatactgagggaaatgaccttgcgaaggttctgtggctgaagagtcgaacttcggaagtatggcttgagcgccgcacaaactacgctagaagcctggctgttatgagcatggttgggtatttgcttggtttaggagatcggcatccaagcaaccttatgttagatcgctatagtggaaaaatattacacatcgacttcggagattgctttgaggcttcaatgaatcgagaaaagttccctgaaaaagtaccattccgtttgactcgaatgcttgtgaaagctatggaagttagcggtattgagggtacattccgaacaacttgtgaaaatgtgatgcaagtccttcgcacaaacagagacagcgttatggccatgatggaggcatttgtacatgacccgttaatcaattggcgtctgttcaatttcaatgaggttcctcaagtgtcgaactatggtaatgttcatgctcacacggttgtcagtagtgaagaagcagtggctaaccgagagctcatgcaacctcagcgaggagcacgtgagagggaactgctacaggctgtcaatcaactcggtgatgccaatgaggttttgaatgagcgtgctgtagctgtgatggcacggatgagtgacaaactaacagggcgtgacttctcttctgggtcagctttggctggagcaggtggtgtccgttctggtgagctctcttggaaacagtagcagtttataacatgtaaatattgtgaataccgtgtgcatagaagtttcgtggtgacagtttgtatgtgcagctttgtaattagcagaacttcaagatgccttggaccatccttttgtcagtttcttagaccgtgtttagcagttcacccttatggccatccaaaacactgtttttgtactgtagattgtattgtttgtagattgtactgttcgcagggtggatttttgaatatgagtataagaatgtgtaagctgttgaagata

SEQ ID NO: 138529 - DNA, 966 bp, Zea Mays
gaattggaatggtcaactagactagaagtgctgaaggttttagggattatgggtgcattggaccctcacgcacacaagcgaaatcagcacaatctacctggtcagcatagagaggtcctacggccaacaatcgagaccgcacaacatattgtttccatggaagagttaccgactgactactggccttctttttcagcatccgaggactactattcaacagttgcaattagctccctcatgcgaattcttcgagatccttctctttcaagttatcaccaaatggtggttggctcccttatctttatttttaagtcaatgggcctcggctgtgttccatacttaccaaaggttcttcctgatttattccgtgctgttcgcatgtgcgaggatggtgctttaaaagagttcataacctggaaacttggaacattgatatctattgtccggcagcacatccgaaaatatttacaagacatactttccctcatctctgagctgtggacttcctcattcagcttggctgcaccaaatcggaccatacagggcccacagggttcaccggttcttcaccttgtcgagcagctatgcttagctttaaatgatgagttcagaatgtatttacttcacattctaccgagttgtatccaagtcttaggtgacgctgaacgttgcaatgattattactatgttcctgacatattacacacacttgaagtttttggcggaaatttggatgagcacatgcacttggttgctccggtgcttgttcgtttatttaaagtggagctggttgatatcaggcggcgtgcaattgttactttgactaatcttatacctaaggttcaggttggtactcatgtttcggctttagtgcatcatctgaagcttgtcttggatgggtaagattttttactataaataaacccttctttaattgctatatggtgtctgtcttttgaaaaaaaa

SEQ ID NO: 138530 - DNA, 110 bp, Zea Mays
tgttttttttgccaccaactttattttgatgtcctgcactgaatattttcctagtacttcgcagtcatcttgtttggctctttaatgttgctgtggtatcttacgacaag

SEQ ID NO: 138531 - DNA, 606 bp, Zea Mays
ttgattgctaaggaccacacatttaacatcgcggcttacatctcgtctggagcggatgttattgctgccgcgctccgtaaacatgttgaggaggaagcccgagatctcagcggtgaagcttttttaaggtttatggatcagctctatgagcagatatctagtttactgcagagcaacgatgttaatgaaaatttactggctctccgtgctatcgatgcattaattgatatgccctttggagaaggcgcttccaaagtttctaagtttgccagcttcttgagaaacgtatttgaagtgaagcgcgaccctgaaatcctagttcccgcaagtgaagtgctgggtcatttagcaaaagcgggaggagcaatgactgcagatgaagtggagcggcagattaaaacggctttggggtggcttactggtgaacgagtggaatatcgccgatttgcagctgtactcattctcaaagagatggcagaaaatgcgtcaacagttttcaatgttcatgttcctgagtttgttgatgctatatgggtagcactgagagaccctaaacaagctgttcgtgaaaaagcagttgaagccttgcgcgcttgtctccatgtt

SEQ ID NO: 138532 - DNA, 618 bp, Zea Mays
gacaatataaatatataatattaatttaaatacgtcaactcaaataaaataaactgatgtcgaacaaacattacaatatcatatatattatttctaaagaatcaacatagaattataggaacatataatatcatggtaatttatgtatacggagtacaattccaactttctaaagcttgtgtggtgcttcagggtgttggtcgaaacggggatcctcttgagagtgacattaagttgctcaagcaaaccagttgtggtgagcaatggtaccgatagctagcagagaatcaacctactcgtcattgatgaggcatcgtctccccacatttgcatatgagatgtcaattcttggcatcacgtgcgttcatgaggtaggcctcaatgcgcccctccttattacgtctcttgtgttattcgtcccatcgatatcatacacaatgtgctattcgtccttgtattactctagaggcatgtctcccatggtattccttggcgccacctgcaaacaacataaaaattagcttacttaaacctcgaatattcagaaaagaaaaaacaaaacaacaaaagagtctgcaaattagtagcttaagcaacacaaataattcacctcatcct

SEQ ID NO: 138533 - DNA, 1137 bp, Zea Mays
atctttcctcgtcgacgcacgggataagatgccatagcggttgcctgagatctgctccacgcgcatagtggttcgcctggccacgctactccgcctagaagcgcccatgtccgatcgtcgccctcgccccattcgccgatgccgagctccaccccgcccctgttccgcccaggccgagctccgccccagcgtctggccccaagtggtctttgccacgttcttgagctcccccaacaacacgatggggcaggtctttctctttaatccaaaatgcttttttagccggtcctcaaagctcttgttttttaatggcgaaagaatattgttgttctttagagaatctgtgtggcactattctcagagttggccgttttgaatagaggttggtctttgtcatcagcaacaaggattgctgctcactccttcctatgcatttcccgatcggttgtttgggctctgaaggacccagtaaccaaatgtgtaactgaatgaaggtgtcttttttatgaatgcgtcagttcaccttctgcaactcagtattagataaataatctgtccatccaaatttttgtactgaagaggttgtgcctgtgcggttaggcacacgcacaccatctaactgataatatgcacctgagctgtgttcttgctgtgcataatatccataaactgcaagtaattctttactaacctgcttttgtatgtggtttcttgtatttggggtgttattcaggtgttcactattaggtaaacttttgtacaattaggtctttgtcacttcatatttttacttaccgcaagtgtgtgtatggtagtttggtgtcagtatttgttttcataaaaaaaatcttgatgtcgctcatcgacgacgagaagaagccttatgactgctagtttgacctctagaagctgtcctacgtggccgcatgcgccgctgtgtacgacaagctccggcgcagctgccgtttggacgcggtgcagagcggctgcaccacgctatccatcatcaagcagggggaccacatggtcgtcgccaacgtcagcgactctaaggttgttctgggcaccgcatccgacgacgacgccatcacgccgtccaattcatcgtccacctgaagcccaacctgccatgtaagt

SEQ ID NO: 138534 - DNA, 513 bp, Zea Mays
atgaatgctcagacatgtgttgagattgtgtgctatttgtgcctgattttattgcacaggcagggtggtctatctcaaagattttcgaaagttgtgtcctattacggtctcacgactccgccatataaactggtatgtttggaatcatcattttgttgggaattgatgcaaccagaaggtggtggcttacctgagggaggtgtgctacagcatattgaaaaggattttggctcatttactaattttagggaagagtttattcgttcagccttacaactattggggtatggttgggtttggcttgttttcaagagaaatgagagaaagctttcagtagttcacacacgaaatgttatcttcccacttgcttttggtgatattcttgatgattctgtcaagagccccaaggctataatagacattctaagggatcaagtttttggatttgacacattttttgtgacaagtcaggagccttacgagagagaagaacaaatacggagggaaatgtag

SEQ ID NO: 138535 - DNA, 102 bp, Zea Mays
atagctcactcgtttaagtggtttcacatggtccgtctatggtgtaatagcctactagacccatttgttaggcgagaatcgaaatggatagacctacaacgc

SEQ ID NO: 138536 - DNA, 1179 bp, Zea Mays
gcaagatgtactctccaagaatatcgacatcgtcatgtccattcacatccatcctcatggatctgaagcatatgatccagtccttgattatggtggcagctggcacaaatcgtaaagattttggagtcgcttgacagcgaaggtcaccagcctccaagtgtcacactatgagagcgccaaacaggtttgtgcgctgaacctcgcaaaattgtgtctggaactctggatcgcacactgcatggcgacaaggaccctgctcaggatgataggtcgatccgatacgaaggcctcaagttttctgatctttcttgctctaatttgggattagtttattaatcaaattgctgcataccacatttacattgtattgcctatacattctctgttgttgatattcatgtactcttctaattagaactgaacctttctgttaacagcgcacttgaaccattttttcgaactacaccagcagggatgtaactttatgagagcgctattgattgtaggtgtccagttaggctacactgtcatttttgggtggtatgcaacattcttgttaatccgaacagggaatctgttatgtccaattattgctcacgtcttctgtaatatgatgggtttacctgttttctcgtcaccacgaacaaaaggagcggcattggtagcgtttctggctggttcaatagccttcttttggctgcttttccctgcaacaagtcctgaactgtacaacagcagttttgatcgctgcagttgctggcatggcttttgcaattggaaataacatagaactagattggaaagcaatgggtcctaacttgaagctactaacaattgaaacctccaggccctagctgacacttctgacggattttctatttgcagaaactccatatgaatgtcttaaaacgttttgtagaaatgtgtcccttgttttagcttaagactcaagagcttaaactagcaaaagattgtattttgccacttgttaaatacgtgctgatcatgaaatcgctgtcaatcccttctcaaagtggaatttgactttgttgagctgcttttatttatattgtgcttgctactgcagcgcctagagtttgtagattacacatcatggacccgtctgatattgtaaacgagagacatgtttctaagttaatatgctccctccatttattt

SEQ ID NO: 138537 - DNA, 1479 bp, Zea Mays
caaacacccatagtccgaaaacagcgtgttcttcgtgccaagcgaagccacgcgaccgactgtgttacgatcccaaatcttcactcccgacgaaatctagaatccaatgagcaatctcgactgacgcctgcttcaccagattatggcgacgccggcgggcctccttctcgcctcgccgccggtgatatcaggtgtcgcggcgatggcggcgtgcgccgcaatggcagtattctacgtcgctgtcctctatgccccgacggtcatcctccggttcccacccccaacctcactccgcaccttcctccaccgtcgcttcgcctgtgccgccgtcgcatccgccgcctccgtccttgccactgcgtccctcctccgagtctggagcctcagcgacttcgctgatatgtttgctgtgttcggcattaggaaggatcacttgattcaggccgtggctattccacttctcctgacatccctagtgtatgctgggtcattcgtcgctagagtgtggctcctagtgagctcgtggggcggtggcgatgaggtggagataggctgcgcacagaggcttgcacaatggatccaagctgctgttgcggatgttatggtttggcggaactatgtagtggcaccatttactgaggagctggttttcagggcatgcatgatacctcttctgctctgtgggggattcaaaatgtctacaattatatttctgagtccaatcttcttcagtctagcgcacttgaaccattttttcgaactacaccagcagggatgtaactttatgagagcgctattgattgtaggtgtccagttaggctacactgtcatttttgggtggtatgcaacattcttgttaatccgaacagggaatctgttatgtccaattattgctcacgtcttctgtaatatgatgggtttacctgttttctcgtcaccacgaacaaaaggagcggcattggtagcgtttctggctggttcaatagccttcttttggctgcttttccctgcaacaagtcctgaactgtacaacagcagttttgatcgctgcagttgctggcatggcttttgcaattggaaataacatagaactagattggaaagcaatgggtcctaacttgaagctactaacaattgaaacctccaggccctagctgacacttctgacggattttctatttgcagaaactccatatgaatgtcttaaaacgttttgtagaaatgtgtcccttgttttagcttaagactcaagagcttaaactagcaaaagattgtattttgccacttgttaaatacgtgctgatcatgaaatcgctgtcaatcccttctcaaagtggaatttgactttgttgagctgcttttatttatattgtgcttgctactgcagcgcctagagtttgtagattacacatcatggacccgtctgatattgtaaacgagagacatgtttctaagttaatatgctccctccatttattt

SEQ ID NO: 138538 - DNA, 1284 bp, Zea Mays
caaacacccatagtccgaaaacagcgtgttcttcgtgccaagcgaagccacgcgaccgactgtgttacgatcccaaatcttcactcccgacgaaatctagaatccaatgagcaatctcgactgacgcctgcttcaccagattatggcgacgccggcgggcctccttctcgcctcgccgccggtgatatcaggtgtcgcggcgatggcggcgtgcgccgcaatggcagtattctacgtcgctgtcctctatgccccgacggtcatcctccggttcccacccccaacctcactccgcaccttcctccaccgtcgcttcgcctgtgccgccgtcgcatccgccgcctccgtccttgccactgcgtccctcctccgagtctggagcctcagcgacttcgctgatatgtttgctgtgttcggcattaggaaggatcacttgattcaggccgtggctattccacttctcctgacatccctagtgtatgctgggtcattcgtcgctagagtgtggctcctagtgagctcgtggggcggtggcgatgaggtggagataggctgcgcacagaggcttgcacaatggatccaagctgctgttgcggatgttatggtttggcggaactatgtagtggcaccatttactgaggagctggttttcagggcatgcatgatacctcttctgctctgtgggggattcaaaatgtctacaattatatttctgagtccaatcttcttcagtctaggtaaatttctatagtatcgttctaattttttgtattccaaaggaaccaactttgcctgcatcattttatccttctcatgtatgcccgcacgtctgtgaacgggagcgcaatgagtgaggattgtactctggagcaggctgcagcgcaagatagtagctaggtcctgaagaaagttctggtcctgtcagaagtttcaattagtcagagcctcagaggcatttgattagtaatggttgtgagtttggtttgttaggatatctagtttgttacagggtttggatcataagctgttatgatcggcattctatatcaatgtcgtgccaagcgtccctgttgcgaaccagcgacaacaccgatatcgcttcagtcggttcaggggatttgtttgtaatttatttgctcaaagataggagtttgtttggtttgataagttcgttggcttgttagggttcggctatttaaatagccctaacactatcatttgtttgttaagcaagatcagtacataaggtgttgcttctcgcccagaacccatttgacgtgcgcc

SEQ ID NO: 138539 - DNA, 546 bp, Zea Mays
atggcttccgtcctgcacgcaaagcttccggctttcgtcttctccgtgtcgcttctcctctcctctgcacttggggcgagggtggtgtgcgagcagctgacggcggaggtgtgcgcgttcgcggtgtcgtcgacgtcgcggcggtgcgtgctggagaccacgcactgcgcggggcggccgacggagtacgagtgccggacgtcggaggtggtggccgcggacgggcggctgtcggggctggtggagaccgacgcgtgcgtgcgcgcgtgcggcgtcgaccgcgccaccgtcggcatctcctccgactccctcctcgacccgcgcgtcgccggcgccgtctgctctgcggcctgcctccggggatgccccaacatcgtcgacctctacgccaacctcgctgccggagagggcgtagctttttcagagctgtgcgaggtacaccgtgccaaccctcgtcgtgccatgtcacagctccagagctccggtgaggcacacgacgctcctgcttctgctccttcgccgacgccgtctccttgagcttaacca

SEQ ID NO: 138540 - DNA, 2053 bp, Zea Mays
tcgccggtccttgatctccatggctctagcgtttagccgcagcagcggccagcacgtgcacgccggcgaggatagcgcggtcccggcggttaccaccacacaggtcactgacactagctctcaatgaaattgcggacccgcaacacagtgggaggttacctcccagctcgggcccactccagtccagcggtccagccccgtgggtacaccatacacggtcccctcgcctccctccgagaaggaagaagctcaggcgaagcgaggcagagggatgtcgtgacgacgaaaccgaagccgagaacggaagcgagccttacatatacccggccccgtcccagtgccctcggcttccgccccagataccaaaccctaaccttagtcggccgttccgcaggcccgccggcggcgacgccttgtgtgccgcgtccgtgattctcttgcacagggaagcgtttggaaggggactccctgcctagtgcactggccgcagcgacgcgcggccgaggcgcggatcggggaggggaggacggctgtggcgagatggcgggtgacgtcgcgacctcgccagccccggcgccgctgtccgtgtcctcatcgtcgcagaaccaccaccaccacggccccacgaccgcccgcggtctcctctgccacgccggcgccggtgcctccgctggtgtggtggcggcgacgttcgtgtgcccactcgatgtcatcaagaccaggttccaggtccacggctggcccaagcttgccacaggtacaattggagaaccaatgcacaacatgcataccatgaatacaaaaaagtttaaaactgtcagaatgtcctcacgctggcagatcatcgcatacatgatacatatgccccatgtgttgcttgttagttatcaataccaaattcgtcgaagtttcaaacaatgcacacaaaactgtagtgtaattattgggagcttgcagcagattgctcaacaagaaggtttccggggaatgtatcgcggcctatccccaactattctggcactcttgcctaactgggcggtttactttactgtgtatgagcagcttaaaagttttctttcttccaacgatggaagccatcaactttctttaggggcaaatgttgttgctgcatcatgtgctggagctgcaacaactattgtaacaaatccactttgggttgtgaagacaagatttcagacccaaggaattagagccgggccaatcccgtataaaggtacacttgctgccttgagaagaatagcacatgaagaaggcatccgagggctatacagtggcctggtccctgccttggctggtatcagtcacgttgctattcagttccctgtgtacgagaagataaaagcttatctggctgagcgagataatactactgtagaagcattgagttttggtgatgtcgctgttgcttcgtctctggctaaagtagctgcgtcaacattgacatatcctcatgaggttgttcgatcaaggctgcaagaccagcgagcaaactctgatgccagatacaaaggtgtaatagactgcgtcagaaaggtttatcataaagagggtgtggctggcttctaccgtggatgtgccacaaatctgttgcggacgacccctgctgcagtgataactttcactagcttcgagatgatccataggtcccttcttgatctattccctgctgaacctgaacctcacatccaacctctaaagcattgaccatacaacatctgtaccctatccatgcggcagattaggaccccagtaaccatccagcaacagcaatgttgtttactgtgccagatggctcttgtaaaagagaattgtttttttcccagataatagctgccattcaaaagttgaaacaatagtgtaggcagagcattagcatctgtgtacgtaatagatttgttagcatgcatttggggtggaggtatatgagcgatgttgggtattttttttatgatgatgacgaaaagaaaaatgttacgacatatgaaggaatgattactatattctttttcacacctggtgtgctgtgatcgtg

SEQ ID NO: 138541 - DNA, 1879 bp, Zea Mays
tcgccggtccttgatctccatggctctagcgtttagccgcagcagcggccagcacgtgcacgccggcgaggatagcgcggtcccggcggttaccaccacacaggtcactgacactagctctcaatgaaattgcggacccgcaacacagtgggaggttacctcccagctcgggcccactccagtccagcggtccagccccgtgggtacaccatacacggtcccctcgcctccctccgagaaggaagaagctcaggcgaagcgaggcagagggatgtcgtgacgacgaaaccgaagccgagaacggaagcgagccttacatatacccggccccgtcccagtgccctcggcttccgccccagataccaaaccctaaccttagtcggccgttccgcaggcccgccggcggcgacgccttgtgtgccgcgtccgtgattctcttgcacagggaagcgtttggaaggggactccctgcctagtgcactggccgcagcgacgcgcggccgaggcgcggatcggggaggggaggacggctgtggcgagatggcgggtgacgtcgcgacctcgccagccccggcgccgctgtccgtgtcctcatcgtcgcagaaccaccaccaccacggccccacgaccgcccgcggtctcctctgccacgccggcgccggtgcctccgctggtgtggtggcggcgacgttcgtgtgcccactcgatgtcatcaagaccaggttccaggtccacggctggcccaagcttgccacaggtagtgtaattattgggagcttgcagcagattgctcaacaagaaggtttccggggaatgtatcgcggcctatccccaactattctggcactcttgcctaactgggcggtttactttactgtgtatgagcagcttaaaagttttctttcttccaacgatggaagccatcaactttctttaggggcaaatgttgttgctgcatcatgtgctggagctgcaacaactattgtaacaaatccactttgggttgtgaagacaagatttcagacccaaggaattagagccgggccaatcccgtataaaggtacacttgctgccttgagaagaatagcacatgaagaaggcatccgagggctatacagtggcctggtccctgccttggctggtatcagtcacgttgctattcagttccctgtgtacgagaagataaaagcttatctggctgagcgagataatactactgtagaagcattgagttttggtgatgtcgctgttgcttcgtctctggctaaagtagctgcgtcaacattgacatatcctcatgaggttgttcgatcaaggctgcaagaccagcgagcaaactctgatgccagatacaaaggtgtaatagactgcgtcagaaaggtttatcataaagagggtgtggctggcttctaccgtggatgtgccacaaatctgttgcggacgacccctgctgcagtgataactttcactagcttcgagatgatccataggtcccttcttgatctattccctgctgaacctgaacctcacatccaacctctaaagcattgaccatacaacatctgtaccctatccatgcggcagattaggaccccagtaaccatccagcaacagcaatgttgtttactgtgccagatggctcttgtaaaagagaattgtttttttcccagataatagctgccattcaaaagttgaaacaatagtgtaggcagagcattagcatctgtgtacgtaatagatttgttagcatgcatttggggtggaggtatatgagcgatgttgggtattttttttatgatgatgacgaaaagaaaaatgttacgacatatgaaggaatgattactatattctttttcacacctggtgtgctgtgatcgtg

SEQ ID NO: 138542 - DNA, 216 bp, Zea Mays
atggctatagagatcaaattgctctgcaaagccctcgcttccttgcttacaacacttgaggaccattgtgccgccatcatagatgtggtgaaggcttcctttgaaccaaggagcctttttgagtttaatgaatttaaccaggcattagtagacatcgagtaccttgccaagaacctagatcagcttgccctagaatgcaaacatgaagttaactag

SEQ ID NO: 138543 - DNA, 107 bp, Zea Mays
aaaagtatagaaaaagagtatatgctgctcttgacgcatatactctatgaacacatgcgacgcaagagcacagtttggatgcgaaatggaatagaagtctcactttg

SEQ ID NO: 138544 - DNA, 626 bp, Zea Mays
tttggtcaggtctcagtcatacagattgcatcagataagatagctagccttcatttaaaaaaaactgtatgaagatgacccaaaagcattggatagctgcttgaggcatattatgtgtccatctaagatactaaagctgggctatgatattcaatgtgatctcatcaacaaagcaatcgtatggagaattggaatgttttcagtcctattaaatgccacttgatttgcagaagctgttcaaaggggttactggtggcctctctggattgtcaaaggtatataaatatacaatcgtcataaaatataaactggttgcagttaactgttgtccatctacttttgacattttcttgttatgtagaatgtcacgtgccatgaaacactgccaagaaatattaggagctggtttgaaaaaggcccaacgtaatagcaactgggagcaacagccactaacccaaaatcaggttggccactgtcattggtgatcttttttcttgtttccttgaaaacagccctgttatcatgtgtgtcaacatctacttctacgtattagcaactgttttttcatatctggacattgtgatttagtaagttgctcatatattctactacattctttagcacgc

SEQ ID NO: 138545 - DNA, 529 bp, Zea Mays
gagattatgacacaaaatccaatacaaaattcagaaactgtttggctaataatgagattctagaataaggttgtcaaaatgaggcatgaaccgactttgcctttaaaactcctaacctattgaaactgctaacatatgtagcagtgtatgtgtatctgccctagcgggccaatctagtgagtcttcctgtgcgggctgggaccacgcatcaataccatggggtcccgtctagtcttcctgtgcttcctggcccgagaacccctatatgtacacagaaaaaaatttagttggtacaactaccacggggccataaccccgactagaattataagggaaataccacaggctgtttgtcatggagcaccttattacgtaagcatacgacacaggaggtgaggtgcctctgctggacattattatgtgcctgccttgcacacagaagcatttaacaccgctgctggtacccacggaaccacagtatcccagctactacaccaatttatttcctccaagaccggtcatagaactg

SEQ ID NO: 138546 - DNA, 2010 bp, Zea Mays
gaagttcctaaactaatacaggccatcatgggcccaatctgtcgcggagtagcgccgaattcaaacgaggaggcgaaaaccaaagcagcaacgaaatgtatcgcgccggatgtgttgagtcatccgagtcacacgacctcactcctccggtcgtccctccccataataaaacgcgatccattttatcggggcggccgggcgggcggcgcggatcgggggggtcgaatcgaatcgatggaccacaagccatgcgcggccgtccttgagccgttgctcccgtcgccggcggagggcaaggcggcggaggcgaagcggctgatgcggctggcggggccgatcgtcgccagctgcgtgctgcagaacgtggtcagcatggcgtccatcatattcgttggccacctcggcgagctccacctcgccggcgcttccctggccacctccctcgccaacgtcacgggctacagccttctcaccggcatggcgagcgcgctggacacgctgtgcgggcaggcgttcggcgcgcggcagcaccacctcctgggcgtgtacaagcagcgcgcgatggtggtgctcgggctcgcctgcgtcccgatcgcggtcgtgtgggcgtgcgccggccggatcctgctcctcctcggccaggacccgcagatcgcggcggaggccggcgcgtacgcgcggtggctcgtcccgtcgctggccgcctacgtgccgctgcagtgccacgtccgcttcctgcagacgcagagcgtggtcctgcccgtggcggccagctgcggcgccacggcgctctgccacgtgctggtgtgctgggcgctggtgtacaaggccggcatgggcagcaagggcgccgcgctcagcaacggcgtctcctacgccgtcaacctcgtggtactggcgctgtacgtgaggctgtcgggcgcgtgcagggagacatggaaaggcttctcgcgggaggcgtttaaggacctgtggcgattcgccgagcttgcctggccgtccgccatgatgatctgcttggagtggtggtcgtttgaagtccttgtgcttctgtccggtcttctgccaaatcctcagctggaaacgtcagtcctgtcgatttggtatgatcactctgcagtttgcacttcataataatttcctactctgcatgctggtcatcattttttttcaattgacctattttacagcctaaatactggtgctctgctctacatgataccattggggcttacttactccataagcacacgcgtttccaacgagcttggcgctgggcagcctcaggccgctaagatggcagcaaaggtagtcatgtacatggctttgtctgaaggactcgttatatcgttgacgatgaccctgctacgcaacatttgggggtacgtgtacagcgacgaggaggagatcgtgacgtacatctctaagatgttgccgatcctcgggatatctttcttcatagatgggctccatagctctctttcaggggtgctcacaggctgcggaaagcagaagatcggcgcggccgttaatctcggggcgttctacttgctaggcatcccagtggctgtactgcttgcattcgtcttccatctcaacggaatgggcctctggcttggcatcgtctgcggcagcgccaccaagctgggttttcttctgtttgtaacgtgttccgtagactgggacaaggaggcagtgaaggcaaggtacagagtgttagggtcatctctcccgttagcatgaaaaaaatgccagtgttacatggaaatcccatttgaaggcagttgaacagaacccagcaaagaaagtgtgggaaaaaaaaactttctatagtttgggacatctcaaagtcatagatagctacggggaaggcaagaagaaccagagccagtatttttggattcatctgtagtgttaaattttgtagcactgcaatggtttttcaggaaatataattagctggattgagtcaaatggcaacgatacatgatagttttccacgttctgggt

SEQ ID NO: 138547 - DNA, 1884 bp, Zea Mays
gaagttcctaaactaatacaggccatcatgggcccaatctgtcgcggagtagcgccgaattcaaacgaggaggcgaaaaccaaagcagcaacgaaatgtatcgcgccggatgtgttgagtcatccgagtcacacgacctcactcctccggtcgtccctccccataataaaacgcgatccattttatcggggcggccgggcgggcggcgcggatcgggggggtcgaatcgaatcgatggaccacaagccatgcgcggccgtccttgagccgttgctcccgtcgccggcggagggcaaggcggcggaggcgaagcggctgatgcggctggcggggccgatcgtcgccagctgcgtgctgcagaacgtggtcagcatggcgtccatcatattcgttggccacctcggcgagctccacctcgccggcgcttccctggccacctccctcgccaacgtcacgggctacagccttctcaccggcatggcgagcgcgctggacacgctgtgcgggcaggcgttcggcgcgcggcagcaccacctcctgggcgtgtacaagcagcgcgcgatggtggtgctcgggctcgcctgcgtcccgatcgcggtcgtgtgggcgtgcgccggccggatcctgctcctcctcggccaggacccgcagatcgcggcggaggccggcgcgtacgcgcggtggctcgtcccgtcgctggccgcctacgtgccgctgcagtgccacgtccgcttcctgcagacgcagagcgtggtcctgcccgtggcggccagctgcggcgccacggcgctctgccacgtgctggtgtgctgggcgctggtgtacaaggccggcatgggcagcaagggcgccgcgctcagcaacggcgtctcctacgccgtcaacctcgtggtactggcgctgtacgtgaggctgtcgggcgcgtgcagggagacatggaaaggcttctcgcgggaggcgtttaaggacctgtggcgattcgccgagcttgcctggccgtccgccatgatgatctgcttggagtggtggtcgtttgaagtccttgtgcttctgtccggtcttctgccaaatcctcagctggaaacgtcagtcctgtcgatttgcctaaatactggtgctctgctctacatgataccattggggcttacttactccataagcacacgcgtttccaacgagcttggcgctgggcagcctcaggccgctaagatggcagcaaaggtagtcatgtacatggctttgtctgaaggactcgttatatcgttgacgatgaccctgctacgcaacatttgggggtacgtgtacagcgacgaggaggagatcgtgacgtacatctctaagatgttgccgatcctcgggatatctttcttcatagatgggctccatagctctctttcaggggtgctcacaggctgcggaaagcagaagatcggcgcggccgttaatctcggggcgttctacttgctaggcatcccagtggctgtactgcttgcattcgtcttccatctcaacggaatgggcctctggcttggcatcgtctgcggcagcgccaccaagctgggttttcttctgtttgtaacgtgttccgtagactgggacaaggaggcagtgaaggcaaggtacagagtgttagggtcatctctcccgttagcatgaaaaaaatgccagtgttacatggaaatcccatttgaaggcagttgaacagaacccagcaaagaaagtgtgggaaaaaaaaactttctatagtttgggacatctcaaagtcatagatagctacggggaaggcaagaagaaccagagccagtatttttggattcatctgtagtgttaaattttgtagcactgcaatggtttttcaggaaatataattagctggattgagtc

SEQ ID NO: 138548 - DNA, 1339 bp, Zea Mays
gaagttcctaaactaatacaggccatcatgggcccaatctgtcgcggagtagcgccgaattcaaacgaggaggcgaaaaccaaagcagcaacgaaatgtatcgcgccggatgtgttgagtcatccgagtcacacgacctcactcctccggtcgtccctccccataataaaacgcgatccattttatcggggcggccgggcgggcggcgcggatcgggggggtcgaatcgaatcgatggaccacaagccatgcgcggccgtccttgagccgttgctcccgtcgccggcggagggcaaggcggcggaggcgaagcggctgatgcggctggcggggccgatcgtcgccagctgcgtgctgcagaacgtggtcagcatggcgtccatcatattcgttggccacctcggcgagctccacctcgccggcgcttccctggccacctccctcgccaacgtcacgggctacagccttctcgtacgccctcggaccgaccgagtccccaatccatctactagcactccgttccgttgttttgacccatcgatcgttttgttgccatgtctcgatcgtcgtggccaagaccggcatggcgagcgcgctggacacgctgtgcgggcaggcgttcggcgcgcggcagcaccacctcctgggcgtgtacaagcagcgcgcgatggtggtgctcgggctcgcctgcgtcccgatcgcggtcgtgtgggcgtgcgccggccggatcctgctcctcctcggccaggacccgcagatcgcggcggaggccggcgcgtacgcgcggtggctcgtcccgtcgctggccgcctacgtgccgctgcagtgccacgtccgcttcctgcagacgcagagcgtggtcctgcccgtggcggccagctgcggcgccacggcgctctgccacgtgctggtgtgctgggcgctggtgtacaaggccggcatgggcagcaagggcgccgcgctcagcaacggcgtctcctacgccgtcaacctcgtggtactggcgctgtacgtgaggctgtcgggcgcgtgcagggagacatggaaaggcttctcgcgggaggcgtttaaggacctgtggcgattcgccgagcttgcctggccgtccgccatgatgatctgcttggagtggtggtcgtttgaagtccttgtgcttctgtccggtcttctgccaaatcctcagctggaaacgtcagtcctgtcgatttgcacacgcgtttccaacgagcttggcgctgggcagcctcaggccgctaagatggcagcaaaggggtgctcacaggctgcggaaagcagaagatcggcgcggccgttaatctcggggcgttctacttgctag

SEQ ID NO: 138549 - DNA, 821 bp, Zea Mays
gcaatggccttggcctctcaaagaagtgtccgcttgttagtcctagcccaagcctttgccatttgcatgctgatcccatgctgctcctccagcaaagaagccatggagctgttcgagagagcgtgccactgtttcgataatcccaatatatacagccagtgcgcggaggagttcaggctgaacgcggagggcgcgttccacgtgcagaggaacgaggtggacgagtactgcggcgggccgtgcctggaggagacgaatctggcgctggagtgcgtggaggaggtggccgccgagagcttcaggttctccaacggcgcgtcggtgctggcggtgaggcaggcgctcggcacggggtgcagctacggccccgacagagggacctttgagatcagggagcgcaaagactgcgtcggcggcgccgacgagtactactaccgcaagcctcgcgaccacgagcaggagaagccagcagtcggcggccggtactacggcgagggcagccagcagccgtacgagcagcagggcgccggcggatatggcgagggcgaggagtactgctccggggccgctggcaggctaggaggagagcgccgcggctactacctgcagacgatcatcctgctgcttcttgcctctgcaccaccactgatcctcacgctctaaaattcagtttccgctaccggcatgttgtagacccttgtttttatgctgtattccttcggagttttttcccccttcacttttcagtaattttgcacgcgctactgtctacgttctagaacaaacacctcttcgacaaatatatttgtcctctttttcga

SEQ ID NO: 138550 - DNA, 1374 bp, Zea Mays
atttcccagctccaggttccagaacacagctccgatcccattcccatccaattggttcttggaatcgcattccacgacataaatagcatctgcactgcatcccatatgtttctcagcgagcatgctgcaggccatttcttcccaccagtgtgccgttgtcgctgaagccccagcccccagtagtgtgattcgttcataaaggtgtgagatcatccacacaactagctagctcgaagctagtagctgctgccatggtagtagcactgaggctgggacacttgtgctgcgcggttgtgcttgcgttgtccatctcttggtgcagaggacaaggaggaggaggaggaggtgctgctggtgcaggtggtgctggtgcagcagggggcgcggcaggtggtgctgtggttccagggacacaggatgccatccagatcgtgtcacaggctgctctctgctttgacaatagacaggtgataaacgggtgcctccaagcaatgggcaacaatgtcaacagcaacggcaacggtggcagtagcaatggcagtggcggcggcggcagcagcaacagcaacagcgggtcaacggcaagcatgtgccaagggccgtgcttcgggcagatgatgctgatgatgaactgcgtgaacggcatcctaggcaacatccagggctacagccccggcctcatgcagggcgtccaggccgtcttccaaatgtcgtgcggcaatgttggcaacagccagcagggtggcggtgctagtggaggtgccgccgccggtggtgctgctgctggaggtgccggaggtactagtggatcgtctagtagtgggggtgccgccgctgccggcggtggagctaatggcggaggtgccagtggtgctggtggtgtcactggcagcgccggcaatgctgttggtgccagcgggggcaacaatatggccaacggtgtcactacggctggcggtaccacgagtcctaacggaggctcacacgtggcggtaagcgatcttgatgagccaataaccagcagcgcaaacggccccatgggcagcaggcttccctcgatgtcgatgctgaggacttggacgtgtatttggctactgcgcctgctgtggctctgacgaaactggattagagataagaacgttgtaaacattgagagcagcagctattcgtttctttcgcttggaagcgtactagcagtagttttaattttaccatcagcaaagattttacgtgaagcgtgtgcgactttaaaagtacacatcggcaagcaattcgcaacgtttgcttcaatataatcttagctacatccttcgttatcatttctatttctatattattaaagcagcaagaaaacgcggccaaagagcctattca

SEQ ID NO: 138551 - DNA, 1006 bp, Zea Mays
ggtgcccgctctggtcgacatttctctgcgcacgcccagccactctcctttcttcctccctgctgtgccaatccccctgcttgtggagcttcttctccgcccggctccttgctcgcctggccgcacagctccctggtgccgtgcccagcccatctccatctccctcgctgagtccctgttcttctcccatagcgccccctcagcccgtcacgctcagccatggcgtccaccgcgccggacctccctgctctctgctccctcgcggcaggccggcaacttcctatctctctgctcggctcctcccacggcacgccgtgctccagctcggattccccctccatggcgcgcccgagcactccggctctctgctcgagctcgcccagctccctgctgcggtgactagcgctcagcgtccggctccctgggtgcttgccctgctcgccgccatcctgctggatcccctccacggcgcccgttcttcccgggtgtcttcctccaccgcgctctcctctgcaagcaactgggttctgctctgccctgggcgtcgttctcagtcactggtggaccgcgcgcccctctgtttgctggtcgtggctccctcatgctcgccgtcattcgatatgccgccacgtcctcgcctcgtctcggtagcgcgcctgccagtgtcgttcctcgctatgtcgagctccctccccgtcctgtccaattcgccgtgtgggtggaacctacgtgcacgctgtcatcgacaccatggtcgtctccctgtgcgttgtgtccctcgtctccagccgacgcactaaggaatgggcgtggagtatagaagaaagtgaagcccgaaatggtgctcgccaggcgctcaacaaaatgcctgaatcttgttcttccctactcaatctcgttgaaccccgaatcccggacgttagacaaaataagcgaggtccgtgtgcatcgctcatcaagtgctcgacacaaagagctgaatcagaatccttgccgtgttcgcgga

SEQ ID NO: 138552 - DNA, 1450 bp, Zea Mays
aaaggatacaagtgatggttttaattaaattccaggtaaccaacaagacataaaatacacttcggtaccaactgatggatctcctttgatcatacacaagtcctttgatcacagtcacacagaagtgagaactaagttcacagctaagactcttagcgatacaagagatgcatttgtcgccacaaactcaatcaccatcatcttactcctcggactcagcctcgcccactcttcttgttgcccttccttgagtacctcaagttcctcagaaacttcgggtccatctaaacgcacacaaaagagcgcattaataggcatacatatggccaggataaaacctggtccaaaaggcgtattgagcaaatagggacagcaaaggagaaataaaaatgaaacttctgcaggagtacaatatttatgtcagaaaatgcaactggaaatagtcggtatcaaactatctaaaccttcctcaaaaaagcaactagagagtttctgtagataaagaatgagtgaaaattcataataaacacaaaattgagataaggagatgaaacgccactgaaactagatatcatcatgcacactaatttgctgcgcaaacaattttttggggtccaaccaagcacatagcctgagattttaatgtgtcaatactcgatagcactcattctctagtcaatcatctgcgtagctacagcataagaattcagacaaacatcaactaacgtagctacacaagtacaaggtaaaaacgacgatgattccataagttctgcaacaagataagatatgaagagattcatgccatggtaacattttagcaataagccaccaacaggataatataactggcataacaaattcggtacaatacaaatcataacaacttacaatacatgatttactttcacgatgcagctacaaaactttctttgggacaattaagactaaaggacagccgtacagcatttcgtcgaaaaataacagggcagtaaggcaatttgggagcaacaaacgccaaacatactagtataaaacactggaaaagtaggcagcatctagtatttatagagccatgctacaaaaattactgcatttgcactcgggcacaggcatatggtcacgtttcagcggaatgcaagttttcaaattcagatctagcatagttgagaagaatggaaaaggaagcacgtacccccttggtggaggtctggcggtggcgcttgggcttcttgatgccgttcttgtgcgccttgaacgactggttatgcgccgtgtggttcttcgacttggccatccagaatccctctcgctactgctcctagtcacctgcggttccaccaataaatcaggagacgaacatcgaatccggaggaggactcgggaggaagacgaggagtaccagcaacagagcagatcagtggcggcgtgatgagtgttagggtttcta

SEQ ID NO: 138553 - DNA, 2844 bp, Zea Mays
acgaatgctcatcccgccaccagctctgaagctctgacaccacccatggcggctctcgctctcgcccttgccctcgccagcatcaccctctccacgcttgctccacgacccctgcccctgatgaccagcgccttctcctataccgcaccgcatgacactataccacggaaatcccggctcatcgtcgaggagtacaagacccgaatcctgcggtcgtcaccggacggcaccttctcctgcggcttccaccagatctacgacggcgccttcaccttctcggtatggtacaccaactcctcgaccgacggcgacgacacggccgccatcgtgtggagcgccaaccgcggccgcccggtgcacgcctggggcgcggccgtcgccctgcgcaaggacgggagcatggtgctcaccgactacgacggcacggtcgtgtggcaggcccaggagagcagttcgtccccggacgcgggcgcggcccagtacgcgcagctgctggacaccgggaacctggtcctcaagaactccagcggcgccatcgtgtggcagagcttcgactcgccgaccgacaccttcctccccacgcagcgcatcgcggagacgtccaggctagtctccaccaccgagctgcagctccccggccactacgccttccgcttcagcgaccagtccatcctgtcgctcatatacgacgacaccaacgtcaccagcgtgtactggccggaccccgacttccagtactacgagaacagcaggaacctgtacaacagcaccaggatcgcgagccttggcccatccggggacatcttctcgagcgacttcgcgaacagccagcatgagctcgccgccgctgacagaggcgccgctggtatcctgagaaggcttaggctggaccgcgacgggaacctcaggctctacagtctcaacagctcggacgggaccgggacgtggtcggtctcatgggttgccgagtcccagccatgcaagacccacggcctctgtggcccgtacgggatatgccactactcgcctgcgccggtgtgttcttgcccgcctggctaccagatgacgaacccgggcaactggacgcaaggttgccggcctgctgtggacataccttgcgacgacgacggggagcaaaacctgacctttctggagctacggaacaccgattactggggatctgatcaggaacgcatcgagaaggtgtcactggaaacctgcaaggatacgtgcttaagagactgctcctgcaagggggttcagtaccaggaagggaacggtacgtgctacccgaagtctctcctcttcaacgggaggtccttcccgacgcccaccgtgcgcaccatgtacatcaaactcccatcgttaagtctgaaggcatcaaagctccccattccgcagtccaacgtgcttgattcttcggtaccgcaccggctcaggtgtgatccagtaacaagcacgacgatcatggaaaaggactcccataggaggactgatcaggaggagccaagatggatctactacttctacgggttcgtcggcgccttcttcgttatcgaggtcttcttcttcgcgttcgcgtggttcttcgtcctgaggagggagctgaggtcgtcgcaggtatgggcagctgaggaaggctacaagatgatgacgaaccatttccggatgtacagctacagggagctggccaaggcgaccgaaaagttcacgcatgagctcggatggggaggcactacctacaagggggtcctggacgacggccgagcggtggccgtcaagagactgggaaacataaggcagcacagcagagaggagttccacgacgagctgcacgtcatcgcaaggatcaaccacatgaacctggtaaggatgtacggcttctgctcggagaggtcccacaggatgctggtcctcgagtacgcggacagagggtccttggccgacgtgctgttcagaggcagaggcagaggcggcaacaacaacaacagcaaaacctcctcctccctagactggaagcagagattcagcgtggccctgggcgtcgccaagggcctggcctacctccaccacgagtgcctggagtggatcgtccactgcaacctgaagcccgagaacatcctgctggaccaggacctggagcccaagatcgccgacttcgggctggcgaagctgctcagcaggtccgggtccgggccggcccggaacgtgacgccgacgcgggcgcgaggcaccgtgggctacatcgccccggagtgggtgtccggcctgcctatcacggccaaggccgacgtgtacagctacggcgtcgtgctccttgagctggtgtcggggacgcgggtcttcgacctggtactcaagggcgaggaggacgacagggcgcatgcgcatgcggtgctgaagaagttcgtcaggatggtctcgtacaggctggacaaggatgagccgttctgggtagcggagttcgtggacttgaggctgggtggtgagttcgactgctcgcaggtgaaggggatgctcaggctggccgtctcgtgcttggaggaagagaggaaaaagcggcccaccatggaatcggtagtccagagcctcctctcggttaattcagctggaagccaatagaacagcaatacggtgacagagagagagtgtgtgtgtgcaaggggttttttttttttgttgattcaaagcaaagcaccttattgtaagcgccacacttgttttcgcagtctagagagagaaagtgtgtgttttacctgtacatcactgctatgtgctgtgtaacgatggaacgggaacagcggtaatgtagttctttgtagtcgcttttctgtacatgcattg

SEQ ID NO: 138554 - DNA, 3343 bp, Zea Mays
atggccgttaagcccacatccatcatcgccgcctccgccacagcacgccatggagaccagcaagtcgccaccgctctactcggcgccgcgggagccctctgccacgacagtgatgctgtgtccgtgcctggcgttcttcctcctcgctctcatcatcacctccatcgcactcactgtccactttcgcctctactgccacactcctcttgcccacctcatctccccgcaccgctgcccccaccacatctgacctccgtctccgcccgcatcgctggcgtggtcctgcttcccagaggcgtgttccctctgctgccgccgagatcccgatacgttatgggttcccctctcctcgcgacgccggcatgcggggcttacgacgtgctctggggcttcgcagccggaaggttcctctccatcttggctgcctccgacgaagatcagggctcgtcggagcaggaggcggctgcgagcaacccggagggcgtggaccgcgtctgcgcggccatcgcggacgtcgtcgcctccggtgccgacgcgaacctggaggcggcgctatccgcgctctcgccaccgctctgcgaagcggtcgtgctcgctgtgctccaccgcttcaagcacgcacataggccgtcctaccgcttcttcaggtgggccacagtgtccggtggctttacccacaccaccattacctactgcaagatgttacacatcttaggcaagacgaggcagttcgagtcgatggttgcgatgatccaagagatggggaaggcgggggccctgtccatggacgccttcaaggttgccattaagtccttcgctgcggctggtgagatcaagaatgcggttggcgtgttcgagttgatgagaaagaacggtttcgatgatggggtggaatcattcaattgcttgctcgttgctttagccaaagagggattaggtagggaggccaggcaggtgtttgacaaaatgcatggccagtactctccagacctgcgctcttatactgcactgatgctggcatggtgcaatgcgaggaatctggttgaggcggggcgggtttggaatgagatgctggagaagggaatggatccagatgttgttgtccacaacacaatgattgaggggttgctgcgtgggcagaggcgacccgaggccgtgaagatgtttgagctgatgaaggcaaaggggcctccaccaaatgtgtggacttacacaatgttaatccgtgaccattgtaagcaggggaagatggacatggcaatggagtgctttgaggagatgcaggaggctaaatgccaaccagatgttgctacctatacatgtttgctggttggatatgggaatgcaaaacaaatggacagagtgactgctgtgttggaggagatgacacagaagggatgcccccctgatgctcggacttacaatgcactgattaagttgctaacaaataggaatatgccagacgatgctgcaaggatatacaagaagatgatcaagaagggacttgagcccacaatccatacttacaacatgatgatgaagtcatatttcgttggtgatagcaactatgcaatgggttgtgcagtgtgggaggagatgcaccagaggggtatttgccctgatgtgaactcttacacagtgttcattaatgggcatatacgacatggcaggccagaggaggcatataaatatatcgaggagatgattaataaagggatgaaagctccacaaatagactataataagtttgctgcagatttctcaaaggctgggaaaccagatatattgtttgagttggctcagaaagtgaaatttgctgggaaattagatgtatctaatgtgttctatcagtgggcagatagaatgaagagtcgggtgaagagaaatgtaccttcagattggtaatagaatgttctaagattactatgctgccagcaggaatgtggcatgctgtgatggtgcttgaaatttgattactaaggagaactgctacctttttcagtttgccattgtacggtcaactttaatataattgtgacctgacattcaaaaaaaagtgcaagatgcaaggcctaccatgtgcttatttacggttgatgtcttttaacaatcttcaaggcaaacctgtgacatgcaaaatctttcttattatcactcgttttgacttttgtgattgatgcatttatcacatcgtgttaaacatagcttgttattcacatgttgatatgtgtagctccttccttcttgtttacgtttgtttgtttctttgattaaacaagttatctgagctatttctttgtatcttttttgatgccatgacatagaaaacactacattatcaaatattcaaatgcgtagatttggtaaaagtttgactatgatattgatgatctttcgtggtctgagtggtggagtttttgcagctattcacaggctggaaagttcatgcactgccctccttgtggatacactttctgttaacaaaatgctatacagtttctttctacttaccttgtgattttgatggagctctgttcctgtggttctttgacatttgttggtctcttgagcattagttctgcaatatgcattatgctcctctattgaactctatagcccatattgtggagatcactaacatcacctacatagcaagggatattttttttcatgcaacccagaatctgaacgccattgcgaaaagcagggataaaatgctgctgtttcactgcaccaactaaacagagaaagaaaaggagatgagaaaactcagcatgttttgattcgactacagtctgcgcccccaagaaaccagggaacaggagtcaggactaacctccagcagctgcaaccggtactgcctctgcccactttggacgacgccaatcattcgcatgacaaggtagagcggcagcaggataccagcagcacgaaccgtcgccactgcaaccagatgccatgcgagcgtcacaatggtgaactgcacaagtcagaatccaggggacagcatggatcaggactcgtcctaaaggatggctatttttcaattcgctgcatgacttagaaccactacataccgtgatcgccagcgaccggcaccatgtggcgcattgatctgcggcgtaggagcacctggtgtaatctgcaccgtcaaccaagccctccggaggttccaaatgttgcatgtcctcgtgttcactgcacgatcacttgagaaaatttagatggttgccaatttgactggaacccagttacaagcctacttgaaagctttttttattttagattttctttccgaactttatgaaacttttgcaggttaacggttttttttttgaaagaa

SEQ ID NO: 138555 - DNA, 2720 bp, Zea Mays
atggccgttaagcccacatccatcatcgccgcctccgccacagcacgccatggagaccagcaagtcgccaccgctctactcggcgccgcgggagccctctgccacgacagtgatgctgtgtccgtgcctggcgttcttcctcctcgctctcatcatcacctccatcgcactcactgtccactttcgcctctactgccacactcctcttgcccacctcatctccccgcaccgctgcccccaccacatctgacctccgtctccgcccgcatcgctggcgtggtcctgcttcccagaggcgtgttccctctgctgccgccgagatcccgatacgttatgggttcccctctcctcgcgacgccggcatgcggggcttacgacgtgctctggggcttcgcagccggaaggttcctctccatcttggctgcctccgacgaagatcagggctcgtcggagcaggaggcggctgcgagcaacccggagggcgtggaccgcgtctgcgcggccatcgcggacgtcgtcgcctccggtgccgacgcgaacctggaggcggcgctatccgcgctctcgccaccgctctgcgaagcggtcgtgctcgctgtgctccaccgcttcaagcacgcacataggccgtcctaccgcttcttcaggtgggccacagtgtccggtggctttacccacaccaccattacctactgcaagatgttacacatcttaggcaagacgaggcagttcgagtcgatggttgcgatgatccaagagatggggaaggcgggggccctgtccatggacgccttcaaggttgccattaagtccttcgctgcggctggtgagatcaagaatgcggttggcgtgttcgagttgatgagaaagaacggtttcgatgatggggtggaatcattcaattgcttgctcgttgctttagccaaagagggattaggtagggaggccaggcaggtgtttgacaaaatgcatggccagtactctccagacctgcgctcttatactgcactgatgctggcatggtgcaatgcgaggaatctggttgaggcggggcgggtttggaatgagatgctggagaagggaatggatccagatgttgttgtccacaacacaatgattgaggggttgctgcgtgggcagaggcgacccgaggccgtgaagatgtttgagctgatgaaggcaaaggggcctccaccaaatgtgtggacttacacaatgttaatccgtgaccattgtaagcaggggaagatggacatggcaatggagtgctttgaggagatgcaggaggctaaatgccaaccagatgttgctacctatacatgtttgctggttggatatgggaatgcaaaacaaatggacagagtgactgctgtgttggaggagatgacacagaagggatgcccccctgatgctcggacttacaatgcactgattaagttgctaacaaataggaatatgccagacgatgctgcaaggatatacaagaagatgatcaagaagggacttgagcccacaatccatacttacaacatgatgatgaagtcatatttcgttggtgatagcaactatgcaatgggttgtgcagtgtgggaggagatgcaccagaggggtatttgccctgatgtgaactcttacacagtgttcattaatgggcatatacgacatggcaggccagaggaggcatataaatatatcgaggagatgattaataaagggatgaaagctccacaaatagactataataagtttgctgcagatttctcaaaggctgggaaaccagatatattgtttgagttggctcagaaagtgaaatttgctgggaaattagatgtatctaatgtgttctatcagtgggcagatagaatgaagagtcgggtgaagagaaatgtaccttcagattggtaatagaatgttctaagattactatgctgccagcaggaatgtggcatgctgtgatggtgcttgaaatttgattactaaggagaactgctacctttttcagtttgccattgtacggtcaactttaatataattgtgacctgacattcaaaaaaaagtgcaagatgcaaggcctaccatgtgcttatttacggttgatgtcttttaacaatcttcaaggcaaacctgtgacatgcaaaatctttcttattatcactcgttttgacttttgtgattgatgcatttatcacatcgtgttaaacatagcttgttattcacatgttgatatgtgtagctccttccttcttgtttacgtttgtttgtttctttgattaaacaagttatctgagctatttctttgtatcttttttgatgccatgacatagaaaacactacattatcaaatattcaaatgcgtagatttggtaaaagtttgactatgatattgatgatctttcgtggtctgagtggtggagtttttgcagctattcacaggctggaaagttcatgcactgccctccttgtggatacactttctgttaacaaaatgctatacagtttctttctacttaccttgtgattttgatggagctctgttcctgtggttctttgacatttgttggtctcttgagcattagttctgcaatatgcattatgctcctctattgaactctatagcccatattgtggagatcactaacatgttagtaattttacttcccatcaaactttcagttccatcgaattgtacattattgaaatgctcttctgtcttcttatac

SEQ ID NO: 138556 - DNA, 2320 bp, Zea Mays
ccgacactccaccatcctccatggccgttaagcccacatccatcatcgccgcctccgccacagcacgccatggagaccagcaagtcgccaccgctctactcggcgccgcgggagccctctgccacgacagtgatgctgtgtccgtgcctggcgttcttcctcctcgctctcatcatcacctccatcgcactcactgtccactttcgcctctactgccacactcctcttgcccacctcatctccccgcaccgctgcccccaccacatctgacctccgtctccgcccgcatcgctggcgtggtcctgcttcccagaggcgtgttccctctgctgccgccgagatcccgatacgttatgggttcccctctcctcgcgacgccggcatgcggggcttacgacgtgctctggggcttcgcagccggaaggttcctctccatcttggctgcctccgacgaagatcagggctcgtcggagcaggaggcggctgcgagcaacccggagggcgtggaccgcgtctgcgcggccatcgcggacgtcgtcgcctccggtgccgacgcgaacctggaggcggcgctatccgcgctctcgccaccgctctgcgaagcggtcgtgctcgctgtgctccaccgcttcaagcacgcacataggccgtcctaccgcttcttcaggtgggccacagtgtccggtggctttacccacaccaccattacctactgcaagatgttacacatcttaggcaagacgaggcagttcgagtcgatggttgcgatgatccaagagatggggaaggcgggggccctgtccatggacgccttcaaggttgccattaagtccttcgctgcggctggtgagatcaagaatgcggttggcgtgttcgagttgatgagaaagaacggtttcgatgatggggtggaatcattcaattgcttgctcgttgctttagccaaagagggattaggtagggaggccaggcaggtgtttgacaaaatgcatggccagtactctccagacctgcgctcttatactgcactgatgctggcatggtgcaatgcgaggaatctggttgaggcggggcgggtttggaatgagatgctggagaagggaatggatccagatgttgttgtccacaacacaatgattgaggggttgctgcgtgggcagaggcgacccgaggccgtgaagatgtttgagctgatgaaggcaaaggggcctccaccaaatgtgtggacttacacaatgttaatccgtgaccattgtaagcaggggaagatggacatggcaatggagtgctttgaggagatgcaggaggctaaatgccaaccagatgttgctacctatacatgtttgctggttggatatgggaatgcaaaacaaatggacagagtgactgctgtgttggaggagatgacacagaagggatgcccccctgatgctcggacttacaatgcactgattaagttgctaacaaataggaatatgccagacgatgctgcaaggatatacaagaagatgatcaagaagggacttgagcccacaatccatacttacaacatgatgatgaagtcatatttcgttggtgatagcaactatgcaatgggttgtgcagtgtgggaggagatgcaccagaggggtatttgccctgatgtgaactcttacacagtgttcattaatgggcatatacgacatggcaggccagaggaggcatataaatatatcgaggagatgattaataaagggatgaaagctccacaaatagactataataagtttgctgcagatttctcaaaggctgggaaaccagatatattgtttgagttggctcagaaagtgaaatttgctgggaaattagatgtatctaatgtgttctatcagtgggcagatagaatgaagagtcgggtgaagagaaatgtaccttcagattggtaatagaatgttctaagattactatgctgccagcaggaatgtggcatgctgtgatggtgcttgaaatttgattactaaggagaactgctacctttttcagtttgccattgtacggtaatgtgccattgaagaattgcgtgcgttaatatccgttggtctgacaatgttttcttgaatatgctcagactgaaaatgttgagtcaatttatgttgtagctgtcatatttctcgttagggaagatttagatgctttgcgattttatattgctgatttgtatgctcatagcttagacctagctggaaattaaatccactgcttgattccagctagcaagcatgtttatattctctttaatgttaaaatgaagcattggatagccactaggcagctcatgagt

SEQ ID NO: 138557 - DNA, 1763 bp, Zea Mays
ggacgggtttagataccacttgtgctaaggaaaacaagggaaacggcggtgtcaataatgctgctgagaactcgactcaaatttcagaatcctctgatggtggccaactatcactgcaggacaacaagatgggtgattctgatgctgcagatgcgaatagatcatcagcatcttcgacgatcgtgtctgaaggcaaggaaagcatactcaaacacgactgtgacagcgtccaggctccaaagctgggtgcttcagctgctaacggtccatcgtccaagagcaaaagaagttaccgagtcaacattcttcgctgcgagagcttagcttctctggccccatcgacgctagagagactccttgctagggactacgacatcgtagtgtccatgatccctctcccatcttcctcagtcctgccctgcccatctggtctagtgcattttggtccgccttcctactcttccatgacaccttggatgaaactggcgctgtacacgtcagggacctgtggcccggtatctgctgttttcatgaaggggcagcggctgaggctgctgcctgaaccattggccagctgcgagaaggcgctgatatggtcctgggatcagtctgtggtgggtggactaggcggcaagttcgaagggaacttggtgaaaggaagccttcttctgcactacctgaactccatgacaaagcattctgctgtggtggtgcagccattaagcgaacacgatcttgacgagacagggagcatcgtcaccatagacgtcccgctgccgctgaaaaatgccgatgggtcgattccatccacggtagtcggcaccgacttgccggaggaccaggtctcgagtctgatcctcttgttagaggacctgtccaatagagtcgagctgagcacggttgggtaccttcggctgctaaggcttcacagggcgaatgagtcgtccgaacacggaaagcttttgagtgggtgcctctgaccatagagttcggcatccctttgtttagcccacagctctgcgagaggatctgctagagggtcgtcgagtcacagatgcttcagaaagacgacatcgctgagcactacgagacgatgcagaacgtgaggaggaggctgagagagctgtgcaccgagtaccaagcgaccggcccaacggcgaggctgttcaatcagcggggaggctccaagaacacctccccgcgcaaactggtgcagatggtcagcggtagatggagcccgttccatgatccgtctacgcccactcactccagtagcccccccgctgaacacgacagagccaaaccagcgagacggcagagatgcttcaccgaagttctgagcttcgatgggaggatcctcaggtcatatgcgcttactcctgtgtatgaggctgctacaagatcggtctccgaagagcagcctaccacgcccgcagcgaaaccggatcacgaggacgctaacaccaaggacgtggccttgccaggagtcaatctgatattcgatggaactgagttgcacccgtttgacatcgttgcctgcctccaagctcgccagcctctctcgttgatcgccgaggcgtcggcgacatctttggcaatgaaatgacgacgagagtccagtacgcactagtaaatttttcggtaggtgacggagtttagtagtgtatgccattgcattccttcttgctgttgtatgcagaattgcattcttcaaggggagcttctcaaagcagacatttttcttttaaaaaaaagattgctgc

SEQ ID NO: 138558 - DNA, 1363 bp, Zea Mays
tgtcactggaagtaggcattcaggcacctatatgtaatagctacagagcctcgatggattcagacagtggacattgacacagaacttccagtgtattgtccattggaagtgacagttgctgaaacggattattatgatgagaccaactattgtgaggtgacaccttgtcttctgccagaacgctcagtgcttaaaagcattcgagtttgtgggcctagatattggcctcaggtgataaaacttgcacctgaagacaagccatggtggagatctggagacaagacaaatccattcaatgggggagtactctacataaagcgaaaagttggatcttgctcctactctgacgatccaattggatgtcaatcgttaatttcacgggcaatgcatgaggtctgtgatgcaccatctgctagttgcagtaatcaaccaaacagcactaatggtagctacttcagagttgatcagctagtaagcactttctcggccaatccaagcttgattgcttttgcaaaactctgctccgtgtcatggaagagcagatgcaatagcaattttcaggagttctgttctcaagtgctatatgaatgtatgagcaaagatagaccatcactgttacaggcctatatcagtttttacacaacaatagagttaatgtgggagcatttgaagactgggaattttcctttttataattcccttttccttcccaacttgaaggtcgctttggcctacaacgaagcattagttgattctagaatcacaaatggaggaattattcattcgacattcttggagtcacttatgaagcgagtgggagacatctttgcggagctgccaaacctcaaggacaacctccaccgatacttgagcacgggcacatggcctgacacacaaaacgacgtggtggttctctcgtggtacctccaatggtacaatataccacctgcccatgttgtggcttctgcagttgagaaggtcagaccgagagtccctgccggtgtatctatgctcccactgcttcgcctcctgctgccaaccacacaccttgtgggactgatggagatcgagaaggtacagattgtcatggaatgctaaaggatgagcgtggaaaattcaatcaaccttctctgcatgcgggttacttgtgatgaacggtagcaagtattgcttagtgcacttgtgatgaaatctgccagggactaagctgttctgaattaagtttgagacaaaagaatcccataatttttattgtgctttgctttagattcatattttctgcatgaattgtttcgattctacccatgagaagtactccctctgtccttatcagaggtcaaaccctctaagtttgacaagttta

SEQ ID NO: 138559 - DNA, 890 bp, Zea Mays
tctttttttttgtcatctggctcttgtgagctttcatctctaggctatcccaacttggtaatagttgggttttgggactgaacaccttttgttgtatcttaagggtgagattggccgaagaagtggtggtgacaacgtgctagaaagggaagggtatgctgttgctgcaggttctgcattaggatttgttgccttgggtcatggcaatcgtgcatttggattcatggatactttcctagatcgactttttgaatatattggcaccaaagaagtctaccatgaaaagtacctaaatgcaacatctgccgatgatcaaagttgcaaccctggacagatgatggatggagcacaaataaatgttgatgttactgcacctggagcaatacttgctctagccttgatatttttgaaggccgagtctgaggagattgcagctagactcaatatccccaacacttacttcgatttgcagtatgtgaggcctgattttgttatgcttcgcattatagccaggaatttaatattgtggagcagaatacaacctaccaaaggatgggttgattctcaaattcctgaaacagtcaggtgtggtatttccaacatgagtgaagggactattgacagtgatgaattggatgctgaagctctttttcaagcttatgttaacatagtgactggcgcatgtattgcacttggactcaagtatgctggcagcagaaatggtgatgcccaagagctactctacgcttacaccgtctattttctaaatgagattaagcacatacctgttcgaacatcaaatatactaccaaagggattactacaatatgttgaccgtggaactcttgaactctgcttgcatcttattgttctctccctctctctggtga

SEQ ID NO: 138560 - DNA, 208 bp, Zea Mays
ctggggccaagggattgtctcaccttgctgctctgccaatattataggtcgtttggtttttaccttatggattgtttcttgtatgcttgtttttggcctccgtaaggagaactctgtatggtctttttgggctgccttttggccctgtaaaactcttctgcttaatgataatgatgcgcatttctcccgcgctttcgagaaaaagaaa

SEQ ID NO: 138561 - DNA, 229 bp, Zea Mays
gagaaccaagtccccaatgaccagtctgataacattgagaaccaagtccgatatggcgcgtcgctaagagggttacgccccaacgattttctttgtggtttcatctccataagatttggctggtttttacgttggtttgccggacctaacacaaccctcctctaccgggcttgggaccggctatgttgaaacgacttaaggaagtcttccaatcaacataggcggagtt

SEQ ID NO: 138562 - DNA, 101 bp, Zea Mays
ggcccattagggttagggttctctctatatatgtaccccactctatgcaatatatcagtcactttcatattcttacattaatgaaatgccacatagctctc

SEQ ID NO: 138563 - DNA, 579 bp, Zea Mays
gaacatagttatgttgattattattgccgtgactttccactcaacttgactgaatccccatccctagtctcttcaaattctttaacaactccaccgtccctgtttcgttggtttgaatattgtctacgtcatggtttgaactccgcaaagctggaagacattcctactctaatgcgcaaacagaaagtttctgccgtgagttggagtaggaaggtgttgtcattctatagtttgttgttaggagcagaaaggaaaggcaaaaatctctcttctggtgtgtattgtgaagttgccagtggttcagcgagaaacactgaagaacttactgttctggctatggttgctgaaaagtttggtcatcggcagttggatttgttaccagttggtgtatctcttgtgcttcgtcatgcactggacaaatgccgtgactccccacctgatgattggcctgcaactgcttatgttcttgttggcagggaagacctagctacggcaaagatggggacagttaggaaagaaaacctgttgtggaacaatgataatttgacatcaatgtcagtcccttatatgctacatctg

SEQ ID NO: 138564 - DNA, 2718 bp, Zea Mays
atggatcagatgaggatgattctatacaaagtagtggtaaacttgacaatggctacatggacacaagtggaaacctgtagaccttggtgtgagtttgcatgcaaggaaccacttgaagagagctggtaccatcttattcagaagaaaggtaacacagggaactggggaagaaattcccaacaacactcacactcaaacacccacaacattctagatcccttctctccatttcaaattgaaggagaacacaaaggaaatgcaattgtggaaaatggggctgccaagccattagctgcagcaaacttgatacggtcacgcagtaaatccaataatcttcatgcagttcaacctgacccagttgctgcagatattctacgaaaagaacctcagcaagaatcatttgtcaagctgctaactactccaaaggagattccgactgctgatgaaattgaggtgttcaaaatccttcagaagtgcctcgagttaagagactcttatctctttagagaggaggttgctccatgggagaaggaggtcataaatgacccctgtactccaaaacctaaccccaacccgttcacttatgtgcctgaaccaaagtcagagcatgttttccaaactgttgatggcgttatccatgtttatgcggataaagattgtacggagagcatttatcctgtggctgatgctacaaccttcttcactgacttgcattatattctccgagtaacggctgcagggaacacaagaactgtctgccataatcggttaaatcttcttgagcataagtttaaattccatctgatgttaaatgcggatagggaatttcttgcccagaagactgccccacatcgtgatttttacaatgtcaggaaggttgacactcatgttcatcattcagcatgcatgaatcaaaaacatctgttgaggttcataaaatccaaactaagaaaagaacctgatgaggtggtcattttcagagatggtacttatatgactttaaaagaggtttttgagagcttggacttaactgggtatgatctgaatgttgatttgctagatgtccatgcagacaaaagcacatttcatcgttttgacaaattcaatctaaaatacaatccatgtggccaaagtaggctcagagaaattttcctcaaacaagataatcttattcaaggccgttttcttgctgagttgacaaagcaagttttctctgacctttctgctagcaaatatcagatggcagaatataggatttcaatctacggaaggaaacagagtgaatgggaccaacttgcaagttggatagtgaacaatgaattgcacagtggaaatgttgtctggctggttcagattccacgcttatataatgtgtacaaggaaatgggtatcgttacatcattccaaaatcttcttgacaacattttcgttcctctttttgaggttactattgatccagcttcacacccacagctccatgtcttcctgaagcaggttgtagggttggacctggttgatgatgaaagtaaaccagaaaggcgtccaacaaagcacatgcccacacctgaacagtggaccaatgtgttcaaccctgcattttcatattatgcgtactactgctatgctaacttattcaccctaaacaagctgcgtgagtcaaagggaatgaccactatcaaattccgtccacatgctggagaggctggagatgttgatcacttggcagcgacatttcttctctgtcacaacatatcacatggaattaatctaaggaagtctcctgtgcttcagtacttgtactatcttggtcagattggtctggcgatgtccccattgagcaacaactccttatttcttgactatcatcgcaacccttttccaacgttcttccaacgaggtctgaatgtctcattatctacggatgaccctttgcaaattcacctgacaaaagaaccattggtggaagaatacagcattgctgcttcgctgtggaagctcagttcttgtgatttatgcgaaattgcgaggaactctgtttaccaatctgggttttcacatgctctcaaggcgcactggattggtaagaactacttcaaaagaggacctgctggaaatgatattcacagaaccaatgtaccgcacatcagggttcaatttagagagatgatctggagaaatgaaatgaaactagtgtactctgacaatgagatcttaataccagacgagctggacctgtaagatgtccagcctcgtgtataccagacgagttgcgttgtagctgctatgggaattatacttcatgttttgttgctggaagtcggcaaagtgatcaagagtgtcaccaagcataccaactaccaagggatgcaatactacctccattctcgaatatttgccgtccgctagtttatttttgaactaaaacatgacaaataaaaaagaacggaggaagtaatacggcaaagtgaagcaacagatgcttgtgtaggagttgtgttactatcttcaaggcttgtgcaagagttgtgttaatgtctcttactcactcttatctcttatcttaaatcttactttataagtgttttttttttgcatgctcatagctagtattccctgaacaccccccctcccctcgaattgtaaccatgtactcgaagtgcttgcactctggttggatcctatacggtgagtaaggtgctatcggttgttatgctgccc

SEQ ID NO: 138565 - DNA, 2931 bp, Zea Mays
atgctactgctgctactgctaaaatccccctcacactcacacccctctcctaatcatccgcttaaacccacgagcccggcaggcaggcaggcagcccggtgccgatggactcctcgggctccgcctcgtcctacaagctgcagctcgccctcgcggcactcgttggtgcctccgccgccgcttcagcggcctactacctgcactgccgtgccgtcgcgcaggttgctcgctccgcctccacgagccgccgtaggccccgcgcccccgcctccgccgctagcggcggcggcggcggcggcgtgaagctccctccaccgcgccgcgctgccgtcggctcagcctcgcttcccgacctctctgcgttctatgatgtcggcagccgcggcggcggcgggctcgccgccggcgggtacctcgtggaggaggaggaggacgacgatgcggatggggtcgtgggcccgcacgtgaacggtggcgcgctcgaccccgcggagttccttcagataccccagggcttgcctagactgcacgtgggccccgacggcagtaaacaacttgcccggtcaggttcaaatagacgggttgaaataattagacctaagtcacccaagtctcctgctgccagtgcaagtgaagatggatcagatgaggatgattctatacaaagtagtggtaaacttgacaatggctacatggacacaagtggaaacctggaaggagaacacaaaggaaatgcaattgtggaaaatggggctgccaagccattagctgcagcaaacttgatacggtcacgcagtaaatccaataatcttcatgcagttcaacctgacccagttgctgcagatattctacgaaaagaacctcagcaagaatcatttgtcaagctgctaactactccaaaggagattccgactgctgatgaaattgaggtgttcaaaatccttcagaagtgcctcgagttaagagactcttatctctttagagaggaggttgctccatgggagaaggaggtcataaatgacccctgtactccaaaacctaaccccaacccgttcacttatgtgcctgaaccaaagtcagagcatgttttccaaactgttgatggcgttatccatgtttatgcggataaagattgtacggagagcatttatcctgtggctgatgctacaaccttcttcactgacttgcattatattctccgagtaacggctgcagggaacacaagaactgtctgccataatcggttaaatcttcttgagcataagtttaaattccatctgatgttaaatgcggatagggaatttcttgcccagaagactgccccacatcgtgatttttacaatgtcaggaaggttgacactcatgttcatcattcagcatgcatgaatcaaaaacatctgttgaggttcataaaatccaaactaagaaaagaacctgatgaggtggtcattttcagagatggtacttatatgactttaaaagaggtttttgagagcttggacttaactgggtatgatctgaatgttgatttgctagatgtccatgcagacaaaagcacatttcatcgttttgacaaattcaatctaaaatacaatccatgtggccaaagtaggctcagagaaattttcctcaaacaagataatcttattcaaggccgttttcttgctgagttgacaaagcaagttttctctgacctttctgctagcaaatatcagatggcagaatataggatttcaatctacggaaggaaacagagtgaatgggaccaacttgcaagttggatagtgaacaatgaattgcacagtggaaatgttgtctggctggttcagattccacgcttatataatgtgtacaaggaaatgggtatcgttacatcattccaaaatcttcttgacaacattttcgttcctctttttgaggttactattgatccagcttcacacccacagctccatgtcttcctgaagcaggttgtagggttggacctggttgatgatgaaagtaaaccagaaaggcgtccaacaaagcacatgcccacacctgaacagtggaccaatgtgttcaaccctgcattttcatattatgcgtactactgctatgctaacttattcaccctaaacaagctgcgtgagtcaaagggaatgaccactatcaaattccgtccacatgctggagaggctggagatgttgatcacttggcagcgacatttcttctctgtcacaacatatcacatggaattaatctaaggaagtctcctgtgcttcagtacttgtactatcttggtcagattggtctggcgatgtccccattgagcaacaactccttatttcttgactatcatcgcaacccttttccaacgttcttccaacgaggtctgaatgtctcattatctacggatgaccctttgcaaattcacctgacaaaagaaccattggtggaagaatacagcattgctgcttcgctgtggaagctcagttcttgtgatttatgcgaaattgcgaggaactctgtttaccaatctgggttttcacatgctctcaaggcgcactggattggtaagaactacttcaaaagaggacctgctggaaatgatattcacagaaccaatgtaccgcacatcagggttcaatttagagagatgatctggagaaatgaaatgaaactagtgtactctgacaatgagatcttaataccagacgagctggacctgtaagatgtccagcctcgtgtataccagacgagttgcgttgtagctgctatgggaattatacttcatgttttggtatgctttccttatctatggcaaattcaacttcgaacttcatctttgttgtcgttttcatccaattgatgtctctcgccaaaaaaaacgatattatctgtataaacaggcagtgcggagaataataacatgcattttgtgttggatt

SEQ ID NO: 138566 - DNA, 777 bp, Zea Mays
atgctactgctgctactgctaaaatccccctcacactcacacccctctcctaatcatccgcttaaacccacgagcccggcaggcaggcaggcagcccggtgccgatggactcctcgggctccgcctcgtcctacaagctgcagctcgccctcgcggcactcgttggtgcctccgccgccgcttcagcggcctactacctgcactgccgtgccgtcgcgcaggttgctcgctccgcctccacgagccgccgtaggccccgcgcccccgcctccgccgctagcggcggcggcggcggcggcgtgaagctccctccaccgcgccgcgctgccgtcggctcagcctcgcttcccgacctctctgcgttctatgatgtcggcagccgcggcggcggcgggctcgccgccggcgggtacctcgtggaggaggaggaggacgacgatgcggatggggtcgtgggcccgcacgtgaacggtggcgcgctcgaccccgcggagttccttcagataccccagggcttgcctagactgcacgtgggccccgacggtatgtttttgttccccatatacggacacgtgcgggtgtgtgcggttggcgtgggtgcggagtactgcagtgtgaggtggataggattggggaaagcttgctcggagagaggtgggttatataggtagcggaaaggctttcaatcgaaaaaaaattctgtacatctccgatataaacatcctctttagtcattcgtatccactacttaaaaggtccaaaaaaacatatcaaaat

SEQ ID NO: 138567 - DNA, 858 bp, Zea Mays
atctcacacaagcaaagcagcagcaacagccaacacctaaactaaagaacagtagtagtccctgtgtacgtctagcaacgatccgcaccgagctcgccagttttgctcgttagtttggggacggcgatggcgtccggtcaggaaagcagggaggagctggcgcgcatggccgaggaggggcagaccgtcgtccccggcggcaccggcggcaagaccctcgaggcgcaggagcacctcgccgaagggcgcagtcacggcgggcagacccggagtgagcagctgggccatgaggggtacagcgagatgggcagcaagggcgggcagacccgcaaagagcagctgggccacgaagggtacagcgagatggggaggaagggcggcctgagcaccatgcaggagtccggcggcgagcgcgccgcccgggagggcatcgagatcgacgagtccaagttcaggaccaagtcctagatctgatgcgtgcccccgcttagcatgtagtacgtagctgcaggaatgtagtgtcgtcgtagtagtagggtagtcgtacgacgtgccgctcctcgtttggcacgtgtgccctgaataatgtagtgctgtcagtcgtcgtcctagcacgcgtgtaggagaccatacgtgcgcgtatgatcatgcgtgcttcgcttcagttaggttctgatgttggtcgtcgtcaccgtgtttgaagcaggcaggtctcttcaggctttgtcgtcgtagcagcctgtgttctagctctacgaccccatactcatagcgtgtggtggtgggtcgtgatgccttaaggtctccgagtttgtatccgtgcttgtttcgttaaggtagtttggttcataactcaaa

SEQ ID NO: 138568 - DNA, 276 bp, Zea Mays
atggcgtcaggtcaggaaagcaggaaggagctggaccgcaaggcccgcgagggcgagaccgtcgtccccggcgggaccggcggcaagagcgtcgaggcccaggagcacctcgccgaagggcgcagccgcggaggccagactcgcagggagcagctggggcagcaggggtacagcgagatggggaagaagggcggtctgagcaccacggacgagtccggcggcgagcgcgccgccagggagggcgtcagcatcgacgagtccaagttcaccaagtag

SEQ ID NO: 138569 - DNA, 357 bp, Zea Mays
atgacacagttacaatcactaaccccatggctaatacaggtgttccacaacttgttaagcccacaacttcagcacaggcaaattcattgggcactggtcacacttcgtgaaaaacgatatagcctctgctgctctgcatacatagatgggataaagatggctggcagaatggtttgtgaagaattttatggctacgtgacaccaccaagtgatcttgtaacttgtatacaaccatcaatttggtctagacggacggacaccgatatagaaggtgctctcaaagacattgaaggacctctcagaggtattgaggaaactctgatcgctactgaaggagatctcatggccattgaatga

SEQ ID NO: 138570 - DNA, 1196 bp, Zea Mays
gtaatgcttatgtactgttttagttgactagtgataaaagttttaactgatattaacattgacaatacatgggcgatagatgaggctatcatcagtttgaattctttctgtcttaggacatccaacatgatatactgggaagaaaaatatttttacacccttgtgaattccgccactttttacattctctgcaaattctgctagaagcattacttttgcactctccgtcttgtttgcagtttggtgttttcttctttggtatgtatacaagacagcctcaaatcatctcctaacaaaaaagggggttaatattaggtgcatcttagtagatatgaaatatagtactatataagagagccacatgttacaagacaattgggttatagctacaagttagttatacgttctgccagcttcgttatatgttctgacatgagttacttttgtgttatgcagaaaaacaagaatcgtgagtgcaatggcaaatggaaggtgaaggtccttttgattgacaacttaggtatatttactgtttcattacacaccttgcgcaggtaactataagcctgcttccttcctatgacgcttagccatttttagtctggatagctgccttcctagcaatacctatttattgaaaaattatagcacactttcatattcacatgataataacaaagtagtatcaaggaactgaataatgtgtccacctgtaagcaaaatatgcctggtcgctggagcacttgtctggggatatagtgaggcaaagtttggatcatgatattggtctagctattgctcatttcttgagctgtttcattgggaacatttcttgaaaagtttggatcatgatattggtccaactatttcttgatgagatagcaaatgttcgagaacagttgctcgacttcttcatgaatgaggtgatagacattgttggattatgcagggttgaggatgcttcacataactaaatctagcattcatatgacctttttgatatgccataatataaggtgttcaactgtgtctaactactcactattgtcttctcttatttgtcgtataggaaaagatggaatggaactcaaattttggtggtcggtcaagtgtgtagagttgaaatcatatatacttagttaggctcaaatttagcgcaaactgttggtgaccatgtttttcagttagtattttag

SEQ ID NO: 138571 - DNA, 1321 bp, Zea Mays
attccgaaactgatctaaagctgctcgctgtactgcactatgcactctctcacctccctttatatttgaccaccgcccctctccaccaagcgcatccacctcgacctccatccctagcgctctcgccccaaagcacgccgcaggcgcagagccatcaccaccatccttccccccctctatctctctctaccccatccctcctctctctcctcatataccagcgacgctgcctccttccatggaagccagcaacaatgagtccgcgcccacggccgaggcagctgcaggcagcggcccggccggcggagaagggcggaagggcaaggcgcccaagggcgggcccgagaacggcaagttccggtaccgcggcgtgcggcagcggagctggggcaagtgggtggcggagatccgcgagccgcggaagcgctcccgcaagtggctcggcaccttcgccaccgccgaggacgccgcgcgcgcctacgaccgcgccgcgctcctcctctacggcccccgcgcgcacctcaacctcacctccccgccgcctcctacgctcgccgcgccgcgctcgcacccgcactcctccgccacgtcgtctgccccgccagcgctccgcccgctcctgccgcgcccgccactgcaccagctctccagcgacggtgctcctgcaccggatttccactaccacaaccagttccagcgccgtctcttgccgcagccgacacccacactatactacgccaacacggccacggcgtccacagtgaccaccagtgtgccgacacgggtggcggttccgcaggagccggccatcgcgcccgcagtaggctcctcgacgtcactacaggagccgcaggtaggtacgccggaggaggcgcgcggggaggcagggtgggactacaacggcggcgaggaggaggattatgcggcggcgctgctgtgggacgagccggagcccttcttctggtttgatgtcttcctcaagtgatggccagcgcacgacgctgcatgccaactcgaatcctgcatggttggtttggagtttcggagtgacggcagctcatgctcatgcatctgcatgcatgtgttgggcagtaagcaagcaagaaaggtagataggcttgctagctagggtttctgattcctttgtactaaattatctttatattttttttatcttatccttcttttttccctaagggtgtgattgaggtatagtaatgtgaggtggtattactggtgggaggatttagggttctttgttgatttaaagattcaattttgaatcacatcgaatcgatttcttgcatggggatgcaatcta

SEQ ID NO: 138572 - DNA, 1141 bp, Zea Mays
tccaaacgccccgtaagtggtatgggtttgggtaagacaaccgatcccagtgcggccgagcacggagtacgtcagaaaccggcaggaagcaggaaacgggaggcaggcatgtcgtcgtccaaggacgctcctctcagccctcgatcccagctggcgctcagttgcttcgaggagctcctcgactgcgccgtggcggacgtcgcgtcggagtgccaccgcatcgcgcgcctcggcctggaccgcagcgtcgacggcgaggaggaggagctccgcgtctgggcggcacgtgcggcggccgccgccgctggaggtgaccaccaccaccctggaggaggcggggccgccgaggagggtgggagcaagggcggggtcgacgtgttcggccagacgcaccccgccatcgccgccgatgtcgtcgagtgtatgaactgcggtcgccctgtcgtcgccggccgcttcgccccgcacctcgagaagtgcatgggcaagggacggagagcccgaacgaaaattacaaggagcagtacggctgggcgcatgagaagcagcaatggcagcgttgccactccctactctccatactccaccacggcgaaccctaatagggcaagcatccctaatggtgtgactgacggcggcggcggcgcaaggggagattacagcaaccatgcgccctaggtgtgctgactgatcctctactcaagtttggttgtgccgtagcgggtgctggctgactcagcctgtattcatgtttccttgccgtggatggcatgaaacacgttttgttgataagtatggtctatgtatgaacccccgaaaaccactctggtgaccagtgaaggtgaggagccatgggcgaaggtttgaatcatgtctttgaaccccgtcgagaagatcacctgttggtcagtggatttaaccttttgtacagcttgttggttcgatcagtatccagtagtttgttgcagtacattttgtagagcactctgtatgactcgtctatggcgcatctggatttgcgagaagaaaagtgaggcagactgagcaagctgctgaactgatccgtgccaccatcgcccacgtgagtaggcatatgttatggttacgacaaatgacagagatcataacctactttgttttc

SEQ ID NO: 138573 - DNA, 1199 bp, Zea Mays
tccgttgccatccctacgcagcagcggccatcgtttcggagaaaacaagcagcggataattaccagtttagcagcaaccatactgtgggcctgcccgtcacaggtcaccacgaacggataagatcggcctcccgacacgacaaaaagatcccgtcgcgtcactgctattaataatcatcatcgtctccaatccagagagccgtaccaatccccatcgccccagaccacagcgcgacagtgagtacagcagcagcagctgagagcgtgagagcgtgcgaagcaggagggaggacaagaagaagccgatggcggttgtgagcggcagcggcgggaggctgaacccctgggcggagcccttcgtgccttccggggcgcggtaccgcggcctgcggaccgtggaggcgacgccggagcaggaggtggaggacttctcccccgagtggtggcgcctggtgtccgcctccccggccttccgcgaccgctggctgcgcgagtacggcgcgctcggcctactcgacgccgaggacgacctggacgacgacgtcgacagcttcctccccgacgacttcttctcgcctccggccccgcgctacgggacggagagcccgaacgaaaattacaaggagcagtacggctgggcgcatgagaagcagcaatggcagcgttgccactccctactctccatactccaccacggcgaaccctaatagggcaagcatccctaatggtgtgactgacggcggcggcggcgcaaggggagattacagcaaccatgcgccctaggtgtgctgactgatcctctactcaagtttggttgtgccgtagcgggtgctggctgactcagcctgtattcatgtttccttgccgtggatggcatgaaacacgttttgttgataagtatggtctatgtatgaacccccgaaaaccactctggtgaccagtgaaggtgaggagccatgggcgaaggtttgaatcatgtctttgaaccccgtcgagaagatcacctgttggtcagtggatttaaccttttgtacagcttgttggttcgatcagtatccagtagtttgttgcagtacattttgtagagcactctgtatgactcgtctatggcgcatctggatttgcgagaagaaaagtgaggcagactgagcaagctgctgaactgatccgtgccaccatcgcccacgtgagtaggcata

SEQ ID NO: 138574 - DNA, 1105 bp, Zea Mays
tccgttgccatccctacgcagcagcggccatcgtttcggagaaaacaagcagcggataattaccagtttagcagcaaccatactgtgggcctgcccgtcacaggtcaccacgaacggataagatcggcctcccgacacgacaaaaagatcccgtcgcgtcactgctattaataatcatcatcgtctccaatccagagagccgtaccaatccccatcgccccagaccacagcgcgacagtgagtacagcagcagcagctgagagcgtgagagcgtgcgaagcaggagggaggacaagaagaagccgatggcggttgtgagcggcagcggcgggaggctgaacccctgggcggagcccttcgtgccttccggggcgcggtaccgcggcctgcggaccgtggaggcgacgccggagcaggaggtggaggacttctcccccgagtggtggcgcctggtgtccgcctccccggccttccgcgaccgctggctgcgcgagtacggcgcgctcggcctactcgacgccgaggacgacctggacgacgacgtcgacagcttcctccccgacgacttcttctcgcctccggccccgcgctacgagagcgagcgggaggacgccgcgggcaggagggcgggccgagggcttgaggtggcggcgtggggcatcgacaggtggtggagggcgcacggtgggccgccggagaccccgaggtacgcggagaaggcgccgcggagggtggccgccgccgccagggtgagcccccgccccatccagcagccgcgctgaaggaccagatccgttcatccaccgacggcgacggctgctcagtcagtgtcacatcttggcacggggggaaaaataggcacgaaaaaaaaagagttccctttcttgaatcgatgcagtttgctttggtgttcgtctcgcgcagtttctggatctgggctccgcttcagctcgagatcgactgggatgggaagatcctctgctgcgttgtcttgtctgtgctcatccgtgtgtactgtgtaaatatgaagatgtaataacaaaaacacgcattttagctttcagtttcgggctttgacaggcgcaatcatccatccatgttccct

SEQ ID NO: 138575 - DNA, 1188 bp, Zea Mays
tccgttgccatccctacgcagcagcggccatcgtttcggagaaaacaagcagcggataattaccagtttagcagcaaccatactgtgggcctgcccgtcacaggtcaccacgaacggataagatcggcctcccgacacgacaaaaagatcccgtcgcgtcactgctattaataatcatcatcgtctccaatccagagagccgtaccaatccccatcgccccagaccacagcgcgacagtgagtacagcagcagcagctgagagcgtgagagcgtgcgaagcaggagggaggacaagaagaagccgatggcggttgtgagcggcagcggcgggaggctgaacccctgggcggagcccttcgtgccttccggggcgcggtaccgcggcctgcggaccgtggaggcgacgccggagcaggaggtggaggacttctcccccgagtggtggcgcctggtgtccgcctccccggccttccgcgaccgctggctgcgcgagtacggcgcgctcggcctactcgacgccgaggacgacctggacgacgacgtcgacagcttcctccccgacgacttcttctcgcctccggccccgcgctacggtaaagccgcctcctctgtctgtgtacctgtctttgctgctacaagtacctttagcaattagcactgctgactcggtgtgtgtgtgtgtgtgtgtgtgtcgtggcgttcggacggagcagagagcgagcgggaggacgccgcgggcaggagggcgggccgagggcttgaggtggcggcgtggggcatcgacaggtggtggagggcgcacggtgggccgccggagaccccgaggtacgcggagaaggcgccgcggagggtggccgccgccgccagggtgagcccccgccccatccagcagccgcgctgaaggaccagatccgttcatccaccgacggcgacggctgctcagtcagtgtcacatcttggcacggggggaaaaataggcacgaaaaaaaaagagttccctttcttgaatcgatgcagtttgctttggtgttcgtctcgcgcagtttctggatctgggctccgcttcagctcgagatcgactgggatgggaagatcctctgctgcgttgtcttgtctgtgctcatccgtgtgtactgtgtaaatatgaagatgtaataacaaaaacacgcattttagctttcagtttc

SEQ ID NO: 138576 - DNA, 928 bp, Zea Mays
ccggatatatacaaacctggtgagcgctaacttgcgcgacccgccagcttgaacatccaactgatccaaccaccgacccgggcgagcaagccatctccgtttccttgccagtcccgcgagcaccattcaccacaccagcgcagccgccatggccgacgtcgagaaggccacccccgtggccgcaccggccgagggcgcgggcggcgacgtggccgccgggagaaccggcgcggtggccgccctgctgcggcggtggcggacccaggacctgctggaccggtcggggtccgcgctgcgcgccgcggcgtgggcgttctccctgctggcgttcctcgtcatggcctgcaacgagcatggggactggaggcagttcgaccgctacgaggagtacaggtacatcgttgccatcggcctgctggccttcgtctacacgacgctgcagctcctccggcacggcgtccgcctcaccggcggccaggacctggagcccaagaccggcctcctcgttgacttcgccggggatcaggtaaccgcctacctgatgatgtcggcgctgtcagctgcgatcccgatcaccaaccgcatgcgcgagggcgctgacaacgtgttcaccgactcgtcggcggcgtccatcagcatggccttcttcgccttcgtctgcctggcgctctccgccctcgtctccggcttcaagctcgccaagcagacatacatctgatctgatactccgtacacggacacttgcatatacacttcacatatttatttgctccgttgtgtacagtctgaattgcgtgcgttgtgtacagtctgaattgcgtgcgtcatttaccattgttctcattgtatacatagatttggttcattgtgactgtataagagctacctcccaatttgaacgtagacggtgtacgtatgggcgtgtggt

SEQ ID NO: 138577 - DNA, 2096 bp, Zea Mays
acgagcacagcaaggcctacgctacgccgacggcttgcgcacgaagtagcggtaggcggcgaccttccgcttccgggaaccggagttgtctatggacagcaccatcctgccggcctcccgagccgtgaaggcgttgtgcagcggcccggcgtcggcgtcggcggttgtggccgggaccgtcctcgccttctccacgcagagggtgtagctgccgtcggccgccggcacgtactcggcgccgtactccaggtcccagcccccgacgacgaggtcccacgttatcgttgcgccggcctggaatgcggattaaggacgctttcatgggttagagaaagagaagccgcgcgcggcggcaccatgcatgaccacacaacacagctcacactccaggtagtattaacttggcgcgtaaaaataataaacaatcttgaaagtgttcacatttcgcttatccgatccctggaattcaggtaacgtatactctgtatccggttgtttgtttatgtacgtcagacaattccagttgatcttggcgtgttcttggtatagccggccatatcagtttcttcggcacgggccccctataccatgtgcaagaatcgcatgaacattgccctgcccctgcctcaagtagacagcgctacacgtacagtggacgtctacacatacacactatcgctgtctatttcatcttttatttaaaaccctgcgctactattctatacagtgcgtctacaacgctaaaacagtgttctatacggctggtacatatccgtacgggagtgtttattgtttagggttcgcttcagattaaagctgtctctctttgtaaccactgaggagcaatagctacttattaagacctaaattgccaattacaaacaaaagtttgtaaccaaacaccgaaggcctcgtttatcctgttactagtggaggcaaagaaaactacgtacaaagaacagcgacgggcttttttctcaacttccaaagggccgcttgcacacacagtatctctctcacacacacacacatgtatgtatgtgccatgcgcagtggaggagatgacagcacgtggaaactggcgccgtggcgtgagctgcaaactggaaaaaagtaagcaaggctacaggaaaggcgcactgcctgccgtctgtgcaccgtgctgtgtgccctgcatactgcacgtccgcacctgacttttttttaaccctcacgaaattctcgcgtcgcgacagctgacagcaacggcgtgcagagctggatagtgtgcagcgtgcaggtgcgttgcgaaatttacatcgaaatcacttgccattgcatgacctgtgtggaaacggctaatggcaaaggtgtgtatagtctcctcatgtgaaccggaagacacggaacgggcgggcatccgtgtcagttccgctgttccagagagcagtgtttactggtgcaccactgtactctgcgaacgcaacgcaacgacgcccaaagtcctctgcttttgcagccgtgcccagcggccagcggggacagccgctcccacgccacactgtcagcgacagatttcaattttttttaaaagaaaacagggactcccaccctcccatgcgcctgcgccagtcgccactgccaactcgaccatttctatactcctactagtacacgtgtatttacacacacctagcgctgcgtatcacgtcacacaaaaaaaagattcatcaaggggtgggaaaatggtcaagcacaaaagagctggaaccaagcaacctaggccatggtgaaagccggtggaaataataaaaaaagaaagaagctcaacgaggctttgttcttgttcttgggtgcttatctttgtctgatctctgctcgtaaaagcacgcacgcagtaccctaggcggagacacgcacatgacagagattgcatacgccaaatttacaagtgatcccagaatgctgccgggtttaaactttgaccgtgtggtttctttgcgcccaggcccagcccacagtaggcagattttcagcaataacgcagaataaatttggggggcggtatatagtatacaggtacctcgataccgtcgatctccaggaacaccttctcg

SEQ ID NO: 138578 - DNA, 918 bp, Zea Mays
ccctggtgggaattcgtggattaaccttcgtccaaattggccatagatgagcaagtagcttgaataacaatcaattctgacatcctccaggaaagcaatatccacttctagccgtggatggtgacagagcccaatttcctggcacctttcttgtaatcccaatcctgtatgagatctatggctccacaagggaagaagaagaagaaaggcgggccatctgagcgaccaaacacacctcacctgcaggcaattcggagctccgttcagtgcatgactgacactctccagagagtccagaaatgtctgtcagaacagatgaagccagaagagcaagctctagacatgctggtgtcacatttgcaaggaaccggtgccgaaggccctggacagatcgcccgtatcttggacgagagcgcagcagctgccagctccgaaatcggtggccggatcgcccattctctagagccgtggagccgcgccggcgtgatgagaagaatagttggggctgagaatgagacgatagccgagttgatgaagatctgcacctcgaagctcaagctccttgcgtccgcatcagcttccctgtccttggtgttgcactaggctgggaaattttgatcgtgagattttttttatcctcatccccgactgctgtcgtgccttcctcttgcccccttgatgttgtaaaccaaactaatgtgcgctggtgtttgttgtttcgatgcaattttggtttgagtgacatgctagtttccgagctgtttgcatgcctgctgtctgtctttggtcgtggtggaactgttgctagaatccatacgtcgtttgtgatcgtgatggattgatgacctccgtttcttgaactgtatttgtctactggttgagggcacttaagaattttactggattgtatttggtttc

SEQ ID NO: 138579 - DNA, 502 bp, Zea Mays
gcagatttggtcatttgtcttgctcagcatctgatgttgaaatttaccttcacatgctatccaacaatgagatatctgagctgctagatgaaattactagatcttttgatgcatcatcaatttcagttaacacactgggttcaacaattactcttttcaaggtccaggaacttttgggaacttcattcacaaaaccaacttcagaacttgagggcattgcaaaaagaatggttgataccttttacaaaaacctgcctctatcaaattacttggatcctcaggaaagcatgtacggtgaagagcttctgtcaatggccagcagtatccttgtgcagctatactggcgcaccagggatttaggatacctacttgaagcaattttgatactggagtttggattgactgttcgcaagtatgtctggcaatacaaggttactctggtccatctgtactcttacctgggggcacttcctttagcacataaatggtaatttctcctttg

SEQ ID NO: 138580 - DNA, 1505 bp, Zea Mays
ccgactcgataaacccttctctcgtccgcctccgcgcctcactccctctcctcctctgcttcgtcttccccacccgcggcgcgcagcacacccaaaaccgtaaccctagattgcaagaggacatgaccagcaagtttgggctcgccggcggcatcccggagcggcgggtgagaccgatctgggacgcagtcgactcacgccagtacaagcccgcgctcaagctctgcaccgcgctcctcgccaagcaccctacatccccctacgcgctcgccctcaaggctcttattctggagaggatgggaaagcctgatgaagcattgagcggggccctgaatgctaaggagctattgtattcagacaacatttttcattttgatgatcttacacttagcactctacagatagtatttcaaaggcttgaccgattggatcttgctacttcatgctatgagtatgcctgtacaaagtatccaagtaacttggaattaatgatggggctttttaattgctatgttcgagagtactcatacgtgaaacaacagcagacagctctcaaaatgtacaaaactgtaggagaagaaaggtttttgctttgggctgtttgcagcattcagctgcagtgtagtgtgtttgatttggttgcgtcgctggatcatttgtcacaggtgcattttagcagtggtggtgtgaaattattggcactagccgaagcattgctgaagaagcacataaattctcatagtttacatgagccagaagcactttctctctatgtttcaattttggagcaagagaaaaagtatgacactgctttggaagttctttctggagacttgggatctcttcttggaagggaggaggacaagcttcgtttgcagtcgctcttcgcatccgagtcgtcttcgtcggggtcgtcggagtcgtcctcggcctcctcggatgtgaagctagatctatggtggcatggcgagcgggacggcaatctcgtgggacggtgcctgcacggtcgtgcgggtgagatacatggccaatgtgggcggcgggagtggcacggcaggggctgggaggctgcttcatgctcgggcgtgggagggggcggggcatccaggggtgtggacgccttccttgctcttatagttgctacaaacatatcattatccaacaagacttctcttgacaaggagctggttgaatctcgccttacaagtgcgttgtcatttgtgcaaagtctacaagaaaataactcaagcgattgtgtcagaggacctcatctggcaaaaattgaaattgaacggcagcggtgcctcaatggaaacccagataatatcaagcttatggaagctttggtgcagtacctccacagcgctctagcagtctgttggtttctaatagtttaatgatctggttgctacgagagaacaattatattactagctagttataagattgtttcttcattgctgttacgtttatactataataacactgcttttgctgaaaaaggg

SEQ ID NO: 138581 - DNA, 98 bp, Zea Mays
tctttcacacacttgtccttcacaaaaaaaggaattcagtcaaaatgcttgatgtggttcaagcattacatattattaattccacacaatacataata

SEQ ID NO: 138582 - DNA, 1276 bp, Zea Mays
gcacgcagtaacttgaatccctcagttccagcgcgtggtccgccaggtccactgtccgtctttcctctggcgctcacgatccttttccctgcgtacgccgagctcacgcaggacaggagggagcggatgagatagacaaacagaaagagcccgtgtgcgtgacgcacggacgccgtgactccgccgcaaagagagggagagtccactctctgaagaagcaacggcgacgcctccgacgacgagcacagctgcccagcaaactagcagcgccctcgtcagttccgtctcgttcccaacctctcccggattcgattcgattgacccgtccgctccaaatcgaatctaatcagcagttttggagttgcggaagggagaaagagagagagagagagaggagaggggcatggatcaggtgctcaacaaggtggggagctactggttcagcaaaagggccagcaaggaaatcgactccatcggcgacgacatcagctcgatctcaagcagcattggagggtcagccaaatggatggtgaacaaaattaaagggaagatgcagaaagcacttccagatctcctcaaggaatatgacatgccagcagggctcttcccacgggacacgactaactatgagttcaatgaagagacaaagaagctgacagtgtacatcccgtcagcctgtgatgttggttacaaggactcgtcagtgctgcggttcttcacctgtgtgaccggctaccttgaaaaggggaagttttccgacatcgagggcatgaagaccaaagtgctggtctggaccaaggtgactgccatcaagaccgagggcccaaaggtccatttcactgcaggcgtgaagaagactcggagccgtgatgcctatgaggtcgtcagagatggtatcaccatagacaagttctagagcatatacctggcatgaaaaatgtgacgcggttattcatatatgcttctctcctctcagttggtacaccgaaattcatacaatatcgtgggctaattctgcatttgtatgaaagtttaatatgcttgacgtgttaatcacactgctagagcatgcgataaatcgcagttggttcattattaggaaattgcattgagctgtaatcagatatgcttctctcctctcagttggtacaccgaaattcatacaatattgtgtgctaattctgcatttatgtatgaaagtttaatatgcttgacgtgttgattaaataacactgttagagcatgcgataaatcgcagttggttcattattaggaa

SEQ ID NO: 138583 - DNA, 824 bp, Zea Mays
tataaatatcgctcgtctcacactccgcagtcgtcgccattattgcttcgctgtgcctgtgctagctcgatcctcctcgctctcttcactggagtgtcaagatatatacatcgacctcaagatatatacatatatatatatatatagcagtgttacttagtgttactactataccatcatatcgatagacgatcagctagctagctggccggggttatctagctacatgggcggtggctcgccgtgcgcgtcgtgcaagctgctccggcggcggtgcaccaaggactgcatcttcgcgccattcttcccggccgacgacccccacaagttcgccatcgtccacagggtcttcggcgccagcaacgtctccaagatgctccaggagctcccggtgcagcagcgcggcgacgcggtgagcagcctggtgtacgaggcgaacgcgcggatgcgggaccccgtgtacggctgcgtcggggccatctccttcctgcagaaccaggtgtcgcagctgcagatgcagctcgccgtcgcgcaggccgagatcctctgcatccagatgcagcgccgggacgacggcgccggccccgacgtcgacgtggtggtcccgccgccgtcgctcgtcgcggcggcggcggcggccggcgccagccaccaccaccaaatgacggtggaaatgcagcagcaggcgatggccaccgacgacgacgtggacgccttcctcatgcagaacgccggcgccggagccatcccgccgcagctcatgtgctacggcggcgccgcgtcggcactcaagagggagtctctgtggacgtaggcgtagctac

SEQ ID NO: 138584 - DNA, 1273 bp, Zea Mays
agcttgattctctctgcctggtacgcggtagtctcgctctctctcctactacctaaacggctacacttaaacggcagcaggcagggagagctgctaacggatcgatcggggagttgctggccatggagcctggtccggacgcgcctgccggtggtggtggcggaggaggaaccagtgagccagcagaggccgggccgtcgccgtcgtcgtcctcggccgccgcagcagcctcctcgtcgagccggcagcaggcagagcaggaagcacagcagcaacaaggagcacagcagagggaacagccagcagtaagggcccaggcgcagccgcagccgcagccgctaacgcagcagcctccggcggggctcagccggtacgagtcgcagaagcgccgggactggaacacgttcctgcagtacctgcggaaccacaagccgccgctgacgctggcacgctgcagcggcgcacacgtcatcgagttcctccgctacctggaccagttcggcaagacgaaggtgcacgctgagggctgcgcctacttcgggcagccgaacccgccggcgccctgcacgtgcccgctgcgccaggcctggggtagcctcgacgcgctcatcggccgcctccgcgccgcgtacgaggagtccggcggccgccccgagtccaacccgttcgcggccaaggccgtgcgcatctacctccgcgacgtgcgggaggcgcaggccaaggcccgcggcatcccgtacgagaagaagaagcggaagcgcgggagcgccgccgcgcctccggtcgcgccgcctcctgttgtaactgcagaggccgccgggacgtcgtcaggggccggcggtggtgatgacgaggacgacgacgaaccatcgccatctgcagatgaaccacaacgacagcagaccgccacgccggctcctcctgcaagtattatttccagtgctagtgcaagtagtagcagtgtcgccccagccacgacgacgacgacaagcaagaaggagaaagaaggatccgcgccaagctcgtgataagtgtgtagatcatctactagccttctgaattctgattcaatcgtatcatcgccgtcctccaaattctaatcccaaccgcttccatcttgaatttttagttgctcactattattactatatattgttattgtttactggcatatataaagagaggtctaagggacttgtaggatcatgttaattaggaggaagtacgtacatataaagaaaacatatatcatttcacttcaagaaaaaaaaaa

SEQ ID NO: 138585 - DNA, 1001 bp, Zea Mays
atgtggttgtcgtgggtccgccggagcaagacctccgggcggctcacgcagtcgccgtccttctcagcgcccacggtttcgtcgcccaccggcaaggaccacccgggcatcggcgctgtcctcgatgacgacgcagcggtcggctccggcgacggcgccggcgcaggcagcaagatcgtcctccaccgcgcgcggtcggcgtccaggctgcgggcgtgcaagtcgttcgcagcggccgcggaggccgcggcagcctccgtggcgggggagcgccacgttgtgctttacttcacctccctccacgccgtgcgcgccacgttcgagggctgcctcaccgtgcgcaccatcctgcgggggctccgcgtctccgtcgacgagcgggacgtgtccatggacgccgcctacctcgccgagctctgcgcgctgatgcggcgggaccgcccgtccctgccgcaactcttcgtcggcggaaggctcctcggggacgccgaagaggtgctcctcctgcacgagagcggggagctccggcgcgtcctggccagcgcggtgcaggcggcgcccgcgccatgcgcgtcgtgcggaggctcgcggttcgtgccgtgcggcgcctgttgcggcagccaccgacggttcagcgacaagaccggcggtttccgcgtctgcacgtcctgcaatgagaatgggcttgtccggtgtgccgcctgctcctccggcagctgacgtgcacagatgagatcaatatcatcccatcatcaaagagattgaagacgaactgcggacgaattcctacatcacttgtgccgcgctggagaaggtctcgattcatcaaaccaaaacgtgttccccagctggaattgttctatcagagtaattgtgtgtttctgagcgcgtagccaatgttcatggttagaaacatcaaggaataagtccactttggactccctccagagatttttgttgtctaatggaaatggtgctcgcaagtttcctgatccaacgct

SEQ ID NO: 138586 - DNA, 987 bp, Zea Mays
gcacctattccaaatgccaatagtgaagatgttaatggtttaaagttcaactcggatcacattatttctgatccgagacttcatattcaattgattcttttgctcctaatattagagatgaagttagaatgactttcatagctaaaggtccgactcaaccaaaattggtcataattttcctcggtcacatggtaaaaggatcttctaaaaacattggttcggacaacatagttggttggaatatagtgtggataagaataaggcttattgcttcgattattacctttttaagcatgatcgaatgaatgataaatttggccatgatgcatttacaaaagttggcttctcatagtggagaattgtttgtacggaatttccaaaacatgttggtgggcctaatagcatacacaatgttgcagcaacaacattccatgatttttgtaaccaaaggtcaagtgttactcagaaggtttcaaattatagccaagatgcattggtcaaatatgagacacgattggaaacttccttaagtattgttagtcttcttgcattgcaagctgaatcatttcggggacatgatgagactagtacttcattgaacaaagtgattttttagaatttcttgattggtacaaacaaaggaatgaagaggtgagaagagcttttgatgaattgtgtcccagaaattccaagatgacttcgaggacgattcaaaaagaacttgcaaactgttgtgaagaagcagtcacacatgcaattaaagaagaaatgggggattgtttattctctgttcttgttgatgaatcctgtgatatatcggttaaagaacaaatggctatagttgtgaggtttgtcaataaaaagggtgaagtaatagaaagatttttgggcatcaagcatgtgaaggacacaacatcggaatcattaaagaaagcattagttgagatgtttagtgatcatggattaattgttgcaaaactttgaggg

SEQ ID NO: 138587 - DNA, 3161 bp, Zea Mays
ccctctttttcactccccctcccccgccggagttgcgtttcatttgaataggcgagcggggaagcatctcctaaacaacctccgcactccccaaccgccccgaacactcgcctccattccgcgccgccgccgccacctcgcgtcgccgtccggatctcttgggctcgtgtgcggcagggatccattgatttctcctctgcgagccatggatatcactcaggttctgctagctgctcaatctccagatgctaaccttcgaacagtagcagaaggcaacctcacacagttccaggagcagaatcttcctaacttcctcctctccttatcaatagagctctcgaacgatgaaaaacctccagagtctagaaggcttgctggtattatccttaagaattctttggacgcaaaggattctgcgaaaaaggagctactgactcagcaatgggtaagcgtggacccatctatcaaattgaagattaaggagtcgttgctggtgacactaggatcttcggttcatgatgcaaggcatacctcttcacaagtcattgccaaggttgcttcaattgagataccacgtcgagaatggcaagatctcattgccaaattactggagaacatgacttctccaggtgcatctgctcctttgaagcaagcaacactagaagcattggggtatgtgtgtgaggagatttctccacaggacttggagcaggaccaagtgaatgctgttctgactgctgttgtccagggaatgaaccaggcagagctcagccctgaagttcgtcttgctgcagttaaagccctatataatgctcttgactttgctgagagtaactttgcaaatgaaatggagaggaattatataatgaaggtggtttgtgagactgctatgtctaaagaagtggagatcagacaggctgcatttgaatgccttgttgcaatagcatccacatattattcacacttagacccttatatgcaaaccatattcgacctgacagctaatgcagtgaaaggcgatgaagaaccggttgcacttcaagctgtcgagttctggagcgctatttgtgatgaagagattgcactccaagacgaatatgagggatctgaggatggcaactctactgtacactttcgctttattgaaaaagccctccctttactcgttccgatgcttctagaaactttgttgaagcaagaggaagatcaagatcaagatgataatgtttggaatatttctatgagtggtgggacgtgcctcggactcatttctagaactgttggtgatgcagttgtccctcttgtgatgccatttgtggaggccaacatcacaaagcctgattggcattgtcgtgaggcagctacctttgcatttggttctatccttgaaggtccctctgttgaaaaacttgctccactggtccaggctgggcttgatttcttgctcaacacaatgaatgatgcaaatagccaagtaaaagatactactgcttggactcttgggagggtatttgagcttttgcattctccagctggtgcaaacccaatcattaataattcaaaccttcctcgtatcatgtctgtgttgcttgagagtagtaaagatgctccaaatgtggccgaaaaagtctgtggagctatttattttcttgcccaaggttatgaagatgcggagtcaatgtcttctgtgctcacgccttatctacctaatatcattgctgcacttctttctgctgcggaccgtgctgattccacccattccaggcttcgtgcttctgcttatgaagcactgaatgagattgtgagggtcagcaacatacctgaaacttcaggcatcataggccaattgttgcaggagatcatgagaagattaaaccttacatttgatctccatatactttcttctggtgataaggagaagcaaagtgatctgcaggctttgctatgtggtgttctgcaggtcatcatccagaaactgagcagcactgatgcaaagtccatagtttctcagactgctgatcagctgatgatgctgtttctgcgtgtctttgcctgccacaattctactgtccatgaagaagcaatgcttgcaattggtgctcttgcatatgctactggtccagattttgtgaaatacatgcctaacttcttcacatacctggaggctggtttgcagaattatgaagaataccaagtgtgttccatctctgttggggtggttggtgatatttgccgtgccttggaagataaaattttgcccttctgtgatcgcattatgactgttcttcttaaggacctatcaagctctatgctcaatcggtctgtgaagcctccgattttctcatgctttggagatattgctcttgctattggtgagaattttgagaaatacctaccatatgccatgccgatgcttcaaggagctgctgaacttcttggtactcttgatcagagtgatgatgatatggttgattatggcaaccagctcagacgtggcatttttgaggcatactctggtatactccagggcatcaagggcccaaaagctcagctgatgatcccatatgcaacacatctactacagttcactgaagctgtcttcaaagataggagcagggatgacagtgtgacaaaggctgcagttgctgtccttggggatcttgcagacacgcttggccagagctcaaaggatctgttcaagacccacctattccatgttgagttcttgagggagtgccaagcacaacagttggatgatgaagttcgggagactgcacaatgggcccaggggatgataaaccaggcggtggtctcctaatgtaggttgattttggtttgtttgttatgggagatttcttgtggttgtgccaagttcatttgccacagacgaaagaaaggctaccaatatatatgtagcgtcagtcgtaggatcctggtagacatatttgtgcgttgttggtctgtcaagtcggtgcgcgtcacattgtaccgagtggtttctgtccgagtatgtcttgaacagcaaaacttggttcatttatcttggtatttttcaatgctggtcatgtgtttcctttttttttcatttcttgtccagctgatcaagtttatatatgatacacacgcagactgatacatttaatcaaaatttgatctgcttg

SEQ ID NO: 138588 - DNA, 2105 bp, Zea Mays
ggacactcatctgcccttcctctcccccgccccagtcgccgtcggcattcagccctcccttccttggcttgggccacgtcgccccttctcctccccacacatccatactgaagcctcaaaatcctccgcctcactcccatcccatgccctcctctcaaccctagtccttccccatcccttactcatggcgctctcttcccacgccaccaccgctgctgcggcggcggccgtcggcacctttccccaatccactcgctcctcttcccggcgattccccgcgtcgtctgtctccccccgccccccgccgcccccgcgctccctacgcctcgaccatgccgtggcgccgtccctctcccccgccaccatgcccgcgcccgacggtctcctcgctgcagccatcgaacacctggagcgcgagccagcatccgtcgcagccgacgaggctccgctcgcggcgctgtccccgcgggagctgcagctggtgctcgtctacttcgcgcaggaggggcgcgacacctactgcgcgctcgaggtctttgactggctccggcgcgccaaccgcgtcgacggggagaccatggagctcatggccgccatcgcctgcggctggatcgagcgcctcgtgggggccggcggggacgtcgccgacgttgctgcgctgctcggggagatggactgcgtcgggctgcggcccgggttcagcctcgtggagaaggccgtcgcgctctactgggaccgcggggagaaggagctagctgtcgagtttgtcagagacgtgctcaggagagggggactcggagccggcgcgggaggggagcacagctctgccagtggcgatggtgagcggggagggcccgttggctacctcgcctggaagatgatgatggatggagactatcggaatgctgtcaaattggtcattgaatttaaggagaccggtctcaaacctgaggtgtatagctatctcattggcttgactgccttggttaaagagcaaaaagaattctcaaaggctctgcgaagattaaatgcatcggtgaaggatggctcaatttctaaactggatgctgagagcatgcatagtatcaacaagtatcaatcggatttgttaagtgatggtgttcttttatcgaactgggtagtacaagagggcagcagcgaagttctaggacttgtgcgtgagaggctcctatcattgtatacttgtgctggttgtggcttggaagctgagcaccaactttgggaaatgaagcttcttggccgagaacctgatacacagctctatgatgttgtattggcaatttgtgcttctcaaggggaagctgctgctgttcgccgcttgcttgcaggagtcgagtcaaccagcgccggaagaaggaagaagtctatgtcatggctactgcgaggctatgtcaaaggtggcttcattctagacgcctcagaaacactcattcagatgctggacatgggcttgcttcctgattacctggatagagctgctgtactgactgcactgcggaggaacatacaggaatccggcagcctagagtcctacttgaagctttgcaagcgactatctgagacagatctgattggaccatgtattgtgtatctatatgtccgcaaattcaaattgtggatggcacacatgctttagagttctgatgaaccctttcgtcatatatccactcatggcaggtacaaaatggagatctctaaaaaatgtgtgtggctcaaacgcttgtccctgatgaacaagacatagaagcttcaatttcggtgaaccggttggtacataataatggttccttgtatatttttgaccgaagtagaggtatcaactggttgtttgttgtaaacagcgctgttgtagtactctgaacagagtccatatcgtacatgtaaattctctgtgtcactgttctcatatgcagttgctgttgaaatctgtgcgttactgcagcctgtaggggataggcaaaatggaaacttttgttgatataaatataatgtacagttctgtcgtgactgaacttctaaagttgtaccgagatgaacttctaaagttgtaccgagattacacgatacatctctgtttttctgtt

SEQ ID NO: 138589 - DNA, 1973 bp, Zea Mays
actcccgtcagccactcctctaccggtgacgcacgcacccaatctctgatctgatctctccccctggatctcgacctccgcctggctgctccgctctgcgtcgctcgccatggcgtcctcgacggggagcttggagcacggcgggttcacgttcacgccgccgcccttcatcacctccttcacggagctgctctctggggcagcagcggacatggtaggagccgcgggcgccgatcatcaggagcggtcgccgagggggctgttccaccgcggcgccaccaggggcggcggcgtaggcgtgcccaagttcaagtcggcgcagccgcccagcctgcccatctcgccgccgccgatgtcgccctcctcctacttctccatcccgcccgggctcagccccgccgagctgctggactcgcccgtcctgctccactcttcctcgaacttcttcgcgtcgcccaccaccggcgccatcccggcgcagaggttcgactggaagcatgccgccgacctgatcgcgtctcagtctcagcaagacgacagccgggctgcggtcggcagcgccttcaacgacttctccttccacgcgcccaccatgcccgcgcagaccacgtccttcccttccttcaaggagcagcagcaacagcaagtcgaagcggcgaccaagagcgccgtcccgtcgagcaacaaggccagcggcggcggcggcggcaccaagcttgaggacgggtacaactggcgcaagtacgggcagaagcaggttaaggggagcgagaacccgcgcagctactacaagtgcacgtaccacagctgctccatgaagaagaaggtggagcggtccctggccgacgggcgcgtcacgcagatcgtgtacaagggcgcgcacaaccaccccaagccgctgtccacgcgccgcaactcctccggcggcgtggcggcggcggaggagcaggccgccaacaacagcagcctctctggctgcggcggcccggagcactccggcggcgccaccgccgagaactcgtccgtcacgttcggcgacgacgaggcggagaacgggtcgcagcggagcggcggtgacgagcccgacgccaagcgctggaaggcggaggacggtgagaacgaaggcagctcaggcgccggcggcggcaagccggtgcgcgagccgcggctggtggtacagacgctgagcgacatcgacatcctggacgacgggttccggtggcgcaagtacgggcagaaggtggtgaaggggaacccgaacccgcggagctactacaagtgcaccacggcggggtgccccgtgcggaagcacgtggagcgcgcgtgccacgacgcgcgcgccgtgatcaccacgtacgagggcaagcacaaccacgacgtgcccgtgggccgcggcgccgccagccgcgcggcggccgccgcgccactgctgggctccggcggcggccagatggatcatcgtcatcagcagccctacaccctggagatgctgagcggcggaggaggagggtacggcggcggctacgcggccaaggacgagccgcgggacgacctgttcgtcgactcgctcctctgctagagggagaggctagagctggcgagggggatgcggagccggtccaccaatctcggtgcggcggcggtgtctgtagcctgctgtacgtgtacggcgggggtatacgtagcgtgcacgctcgccttcgcattcagaattcagatacgtgcagtatacacacacgcacgcacacacaacacgctgtgtgcaccggatctaggttagctaggaatgggaatttgttgattcgttggaggccttcctgccacgcgcgcacggcacggtactcgtacagacagtcatacggttgtgtcgttttgtagttgtagcaacggtgccgctaacgcctgtgtggaaaggccctataccgtatatatagtgtgacaaagtcaataaagctgaaaagatcgcgttattt

SEQ ID NO: 138590 - DNA, 1967 bp, Zea Mays
actcccgtcagccactcctctaccggtgacgcacgcacccaatctctgatctgatctctccccctggatctcgacctccgcctggctgctccgctctgcgtcgctcgccatggcgtcctcgacggggagcttggagcacggcgggttcacgttcacgccgccgcccttcatcacctccttcacggagctgctctctggggcagcagcggacatggtaggagccgcgggcgccgatcatcaggagcggtcgccgagggggctgttccaccgcggcgccaccaggggcggcggcgtaggcgtgcccaagttcaagtcggcgcagccgcccagcctgcccatctcgccgccgccgatgtcgccctcctcctacttctccatcccgcccgggctcagccccgccgagctgctggactcgcccgtcctgctccactcttcctcgaacttcttcgcgtcgcccaccaccggcgccatcccggcgcagaggttcgactggaagcatgccgccgacctgatcgcgtctcagtctcagcaagacgacagccgggctgcggtcggcagcgccttcaacgacttctccttccacgcgcccaccatgcccgcgcagaccacgtccttcccttccttcaagcagcaacagcaagtcgaagcggcgaccaagagcgccgtcccgtcgagcaacaaggccagcggcggcggcggcggcaccaagcttgaggacgggtacaactggcgcaagtacgggcagaagcaggttaaggggagcgagaacccgcgcagctactacaagtgcacgtaccacagctgctccatgaagaagaaggtggagcggtccctggccgacgggcgcgtcacgcagatcgtgtacaagggcgcgcacaaccaccccaagccgctgtccacgcgccgcaactcctccggcggcgtggcggcggcggaggagcaggccgccaacaacagcagcctctctggctgcggcggcccggagcactccggcggcgccaccgccgagaactcgtccgtcacgttcggcgacgacgaggcggagaacgggtcgcagcggagcggcggtgacgagcccgacgccaagcgctggaaggcggaggacggtgagaacgaaggcagctcaggcgccggcggcggcaagccggtgcgcgagccgcggctggtggtacagacgctgagcgacatcgacatcctggacgacgggttccggtggcgcaagtacgggcagaaggtggtgaaggggaacccgaacccgcggagctactacaagtgcaccacggcggggtgccccgtgcggaagcacgtggagcgcgcgtgccacgacgcgcgcgccgtgatcaccacgtacgagggcaagcacaaccacgacgtgcccgtgggccgcggcgccgccagccgcgcggcggccgccgcgccactgctgggctccggcggcggccagatggatcatcgtcatcagcagccctacaccctggagatgctgagcggcggaggaggagggtacggcggcggctacgcggccaaggacgagccgcgggacgacctgttcgtcgactcgctcctctgctagagggagaggctagagctggcgagggggatgcggagccggtccaccaatctcggtgcggcggcggtgtctgtagcctgctgtacgtgtacggcgggggtatacgtagcgtgcacgctcgccttcgcattcagaattcagatacgtgcagtatacacacacgcacgcacacacaacacgctgtgtgcaccggatctaggttagctaggaatgggaatttgttgattcgttggaggccttcctgccacgcgcgcacggcacggtactcgtacagacagtcatacggttgtgtcgttttgtagttgtagcaacggtgccgctaacgcctgtgtggaaaggccctataccgtatatatagtgtgacaaagtcaataaagctgaaaagatcgcgttattt

SEQ ID NO: 138591 - DNA, 2063 bp, Zea Mays
actcccgtcagccactcctctaccggtgacgcacgcacccaatctctgatctgatctctccccctggatctcgacctccgcctggctgctccgctctgcgtcgctcgccatggcgtcctcgacggggagcttggagcacggcgggttcacgttcacgccgccgcccttcatcacctccttcacggagctgctctctggggcagcagcggacatggtaggagccgcgggcgccgatcatcaggagcggtcgccgagggggctgttccaccgcggcgccaccaggggcggcggcgtaggcgtgcccaagttcaagtcggcgcagccgcccagcctgcccatctcgccgccgccgatgtcgccctcctcctacttctccatcccgcccgggctcagccccgccgagctgctggactcgcccgtcctgctccactcttcctcgaacttcttcgcgtcgcccaccaccggcgccatcccggcgcagaggttcgactggaagcatgccgccgacctgatcgcgtctcagtctcagcaagacgacagccgggctgcggtcggcagcgccttcaacgacttctccttccacgcgcccaccatgcccgcgcagaccacgtccttcccttccttcaaggtaggaaataataggaattgcttgttgctgtatcacaagctactaaagctaccaaacagaagcaagtagctgacagtggtcgtcgtgcaggagcagcagcaacagcaagtcgaagcggcgaccaagagcgccgtcccgtcgagcaacaaggccagcggcggcggcggcggcaccaagcttgaggacgggtacaactggcgcaagtacgggcagaagcaggttaaggggagcgagaacccgcgcagctactacaagtgcacgtaccacagctgctccatgaagaagaaggtggagcggtccctggccgacgggcgcgtcacgcagatcgtgtacaagggcgcgcacaaccaccccaagccgctgtccacgcgccgcaactcctccggcggcgtggcggcggcggaggagcaggccgccaacaacagcagcctctctggctgcggcggcccggagcactccggcggcgccaccgccgagaactcgtccgtcacgttcggcgacgacgaggcggagaacgggtcgcagcggagcggcggtgacgagcccgacgccaagcgctggaaggcggaggacggtgagaacgaaggcagctcaggcgccggcggcggcaagccggtgcgcgagccgcggctggtggtacagacgctgagcgacatcgacatcctggacgacgggttccggtggcgcaagtacgggcagaaggtggtgaaggggaacccgaacccgcggagctactacaagtgcaccacggcggggtgccccgtgcggaagcacgtggagcgcgcgtgccacgacgcgcgcgccgtgatcaccacgtacgagggcaagcacaaccacgacgtgcccgtgggccgcggcgccgccagccgcgcggcggccgccgcgccactgctgggctccggcggcggccagatggatcatcgtcatcagcagccctacaccctggagatgctgagcggcggaggaggagggtacggcggcggctacgcggccaaggacgagccgcgggacgacctgttcgtcgactcgctcctctgctagagggagaggctagagctggcgagggggatgcggagccggtccaccaatctcggtgcggcggcggtgtctgtagcctgctgtacgtgtacggcgggggtatacgtagcgtgcacgctcgccttcgcattcagaattcagatacgtgcagtatacacacacgcacgcacacacaacacgctgtgtgcaccggatctaggttagctaggaatgggaatttgttgattcgttggaggccttcctgccacgcgcgcacggcacggtactcgtacagacagtcatacggttgtgtcgttttgtagttgtagcaacggtgccgctaacgcctgtgtggaaaggccctataccgtatatatagtgtgacaaagtcaataaagctgaaaagatcgcgttattt

SEQ ID NO: 138592 - DNA, 1549 bp, Zea Mays
actcccgtcagccactcctctaccggtgacgcacgcacccaatctctgatctgatctctccccctggatctcgacctccgcctggctgctccgctctgcgtcgctcgccatggcgtcctcgacggggagcttggagcacggcgggttcacgttcacgccgccgcccttcatcacctccttcacggagctgctctctggggcagcagcggacatggtaggagccgcgggcgccgatcatcaggagcggtcgccgagggggctgttccaccgcggcgccaccaggggcggcggcgtaggcgtgcccaagttcaagtcggcgcagccgcccagcctgcccatctcgccgccgccgatgtcgccctcctcctacttctccatcccgcccgggctcagccccgccgagctgctggactcgcccgtcctgctccactcttcctcgaacttcttcgcgtcgcccaccaccggcgccatcccggcgcagaggttcgactggaagcatgccgccgacctgatcgcgtctcagtctcagcaagacgacagccgggctgcggtcggcagcgccttcaacgacttctccttccacgcgcccaccatgcccgcgcagaccacgtccttcccttccttcaaggagcagcagcaacagcaagtcgaagcggcgaccaagagcgccgtcccgtcgagcaacaaggccagcggcggcggcggcggcaccaagcttgaggacgggtacaactggcgcaagtacgggcagaagcaggttaaggggagcgagaacccgcgcagctactacaagtgcacgtaccacagctgctccatgaagaagaaggtggagcggtccctggccgacgggcgcgtcacgcagatcgtgtacaagggcgcgcacaaccaccccaagccgctgtccacgcgccgcaactcctccggcggcgtggcggcggcggaggagcaggccgccaacaacagcagcctctctggctgcggcggcccggagcactccggcggcgccaccgccgagaactcgtccgtcacgttcggcgacgacgaggcggagaacgggtcgcagcggagcggcggtgacgagcccgacgccaagcgctggtacgtgtgattatctcaccagatcgattcgctgctcttccgatccttcacgagttgaggcacgcggtgccgtgtgtttcctgtgttcgtggaactcatatatacaccaccatgtatgtccgctttattattgatcaggaaggcggaggacggtgagaacgaaggcagctcaggcgccggcggcggcaagccggtgcgcgagccgcggctggtggtacagacgctgagcgacatcgacatcctggacgacgggttccggtggcgcaagtacgggcagaaggtggtgaaggggaacccgaacccgcggagctactacaagtgcaccacggcggggtgccccgtgcggaagcacgtggagcgcgcgtgccacgacgcgcgcgccgtgatcaccacgtacgagggcaagcacaaccacgacgtgcccgtgggccgcggcgccgccagccgcgcg

SEQ ID NO: 138593 - DNA, 104 bp, Zea Mays
atagcttgttacattataggatttgaagttatgtatcaactaaagatggtcacaattatttgtatttcgccgcttatgtattaaaaaccggctctttgctctgc

SEQ ID NO: 138594 - DNA, 760 bp, Zea Mays
ctcacgcctcgcgcctcgttgcttcttatcctttatttttttccccaacccgtcgtcggctgccggctgcggcactctgggaggaaggccccaagcccttgccgccggagacgaaccgaaacgatggtgggcgccaatgaagtgggcgggctggagtgcgagcggaagccgctggcggaggtggtcggcgactgcgtccagcgctggttccaggacgcgtacaaggaggcgcgcaaaggcgacgtcgccaaccaagtgcttgtagcgcagatgttcttctcgggttatggaacccccaagaacgagtataagggaaaacaatggatggatagggcgtcaaggttcaggtcttcagctttgaaggttggcatgaaacgtccaggatacaatgcaagtgactcggactccgatgatgcaaatgatgatgccaaccaatgacagtcagttacaaattgagttattattagttaggagattcacaggtcacggctgcaggtagcagaagacgctggaggcaggaaggccttgaatgccgcagtgcatgtgaacgaagagctttcctttgcaagttacgtttggctgctgacgggtgtgtgtccggaggtcgcggctgacaccacacgcacgtctgctggtcagctgcagctacatctatgggtccatagacgatcccgcaagtggttgaaaagaaggtacattggatcaaacttgttatgaccatcgaaccattgaaagaaaaaacactcttggtcctaaacaa

SEQ ID NO: 138595 - DNA, 410 bp, Zea Mays
ttaattcatcaagcttgttcgtcgctgctgctgctgcttgctgtggctttaatccggctgcggcttctgcagtattttgtttctatagatagatgaagcagtctgaacagttgcagtaactgccgctcctctcctgcagtcacggctgcaggtagcagaagacgctggaggcaggaaggccttgaatgccgcagtgcatgtgaacgaagagctttcctttgcaagttacgtttggctgctgacgggtgtgtgtccggaggtcgcggctgacaccacacgcacgtctgctggtcagctgcagctacatctatgggtccatagacgatcccgcaagtggttgaaaagaaggtacattggatcaaacttgttatgaccatcgaaccattgaaagaaaaaacactcttggtcct

SEQ ID NO: 138596 - DNA, 772 bp, Zea Mays
ctcacgcctcgcgcctcgttgcttcttatcctttatttttttccccaacccgtcgtcggctgccggctgcggcactctgggaggaaggccccaagcccttgccgccggagacgaaccgaaacgatggtgggcgccaatgaagtgggcgggctggagtgcgagcggaagccgctggcggaggtggtcggcgactgcgtccagcgctggttccaggacgcgtacaaggaggcgcgcaaaggcgacgtcgccaaccaagtgcttgtagcgcagatgttcttctcgggttatggaacccccaagaacgagtataagggaaaacaatggatggatagggcgtcaaggttcaggtcttcagctttgaaggttggcatgaaacgtccaggatacaatgcaagtgactcggactccgatgatgcaaatgatgatgccaaccaatgacagtcagttacaaattgagttattattagttaggagattcacagggtaagaaagtttggtataagctgttgctcaccttttcatgatttctaatattcccctgaccttggtgtcgggacttcaggattgaattacttggtgatttatgcatttatcactacgtttgaatcactgtcacactgagcttgtggtgattagccagattaggtgtcctgacctttgttgttccgtgtgtcactgttgcatgctctatagcgcaatggaattcctcaggtgtttaatgacagaactgaatttatattttgatgtaattacaaggttgtggttactatag

SEQ ID NO: 138597 - DNA, 1200 bp, Zea Mays
gtgttcaaatatacttcacaagtttcattgatagtttataggcttcttgtgaatgtacgtttagtataaagcaagagaaacctgaaaccccttgagcttgcctctgaatcatcaccatcaccaactcacacagtcacatgtcacatcacacaggtgccatttggtttgcttcaattattttcacttttttttaatgtgtggctcatttgattcatccatgtccaattgtaaccacattgcagacatgcacaagcataataagctaagccacaccgccagttggctgggcaacaacctatatgtcgcatgattcgcatccgatccggtcagatcgcaagcacgaggccagggaggttcctgcgagcccggtcgggcagccggctctgccacacctgcttcgacggcgatggcgacagcgagcacgtggccttggccctctccaccgctgcgccgccgccgccgagcctcgtgacgacgagcgcggtgttgcagtactcgcgcaccccggtgacgcggccgccggggcccacggtccacgcgtgcacccagtagagcgcgcccgtcgcgtcggcgccctcggccagcaccgtcggcccgaaggcgtccagggaccggatcttgaacgggaggccggcgccggcgccggtgccggtgagcaggcgcatgagcaccaggtgctggtgcgcgcgcgggccgtggaaccaccagtccacgtccgggttcagcaggcggcgcacggcgtccacgtcgccgcgctccagcgcgcggtacagctcctcgaccaccgccttgctgctcacggcggacgagtcctcgccgtcatcgaggcgcgggccggcgtcgccgccgccgccgacggtgtcgcgcttgtcgctagccagctcggcgacgcgagtgaagcaaaggctccggccgggaaagggggagaagagaagtgtacgtacagtgtgtagccaagcgtgtgcggctgtgcgctagagtagaggtcggcttgtcctttatatagagaaaacttgttgggtagtcgctcgctggcgctgccttgtgatgtgagtaggattccaaaagcatataatttcccccctttttgtgggataaatctagatagtggtaatgcgattcagttgcagatatataccttgttgctgcaagttaagagtattggatcagctactttttgagtacaattggactgagcaa

SEQ ID NO: 138598 - DNA, 1871 bp, Zea Mays
gcttcagattgttattggatatgctcccaacccattgatctctccgtgtggtttcctccccctctagctagttgctactaaccggtacatggactccgtggataattcacgccatgatcaagatcaccacgccgatgtagcgttcagtgtcgagctggaggcggagctcgtcgaagggcacggcaatggcgccgccgcccccacccgtacccgtaccgtcctcgagcaagaagaacccgagccaagaacagaaggccggcggcggcctggtcgcgcgcggcgcctcgcccggaggctccaccccgcgaccgtcgctcgcgcgtgctggcgctggctaaagcacccggcgcacctcgccctggtcgcgtgggcgctctgcgtggcggcgtccggctccatgctagcgctcctcctcctcgggtcgctcaaccgcgcgttcccccggaggtcgcttcgcaaccggtggatcgagatcaacaaccaggtgctcaacgcgctgttcacgctcatgagcatctaccagcaccccgcgctcttccaccacgccgtgctgctgctccggtggcgccccggggacgccaaggagctcagggaggcctactgccggaagaagggcgcggctgcgggctcccggcgcggcgagcgggctcacgtgtccgtggtggtcgcgctgctgcacgtcgcgtgcctggcgcagtacgccatgtgcgggctctactgggggtactcgcgcagggcgcgcccggacgccgccctgaccgcgctcaccgtggtcggcaccgcggcgccggtgatcgccggcctgtacatctacttcagccctctagggaggaaacgcggggggcggagcgtgcaccatgagcccgacgaacgttccgaccacagcgatgggactgtcgcggttgaggtggcggccggcgcggactgggccggcggcttgctcgacgtcggcgacgacccgacggcgtgctggctctcgtgcctctgcacgttctgcgtgttcgggtggaacgtggagcgcctgggcttcgggaacgcgcacgtgcacgccgtcatgttcgcgctgctctgcttcgcgccgctgtgggtgctcagcgtcgcggcgctcaacatccgggacgacgacgtcggcttcgcggtcggcgtggcgggggtggtcctctgcgcgctcggcctgctctacggcgggttctggcgcgcgcggatgcggcggaggtacgggctccctgccaccaacgcctgctgctgctgtgccgccgcgccgtcgctcgcggactacgcgcggtggatgttctgctggggctgcgcgctggcgcaggaggtgcgcaccgctaacctcctcctcctcgacgtcgaggctggaagcgtcggccggcgagactccgatggccgtcgagtcgatgctgacgcgcaaactctgcagcctttgccgagagagagtggagtcaagtcgtttcatcagggaggatcttcgcatcctgcaaagccggcgacaactgacgcccactctgttcagctgtcgaattactcgacgagtagtcaaggcgatgagtcgccattgctgtggcaatatcaggtgactaggtcttcttcgcgagaaatgacgcctcctgtgccgccatcgataccagaagcagaacgtcgacgagttcaggagtaacagagcagttgcaaatcaatgcatcgacctgcgctccaggaatgccaatatgcgtgtacagactgcagagttcgcgtcgttttttcgcctttacttttcctttcgactttctccagggattcagatgtttgctccaatcttgaaacccaaacaagttgtttccagtttttgaatcgatggctaacgaggcacatgatatccatgctcgttc

SEQ ID NO: 138599 - DNA, 372 bp, Zea Mays
atggggacgttggaggctggagataatcggaatcacccagactggaacaagattgcagagtttctggatgatgttgctagaaggatgcggcaagaaggccatgatcctaagaaaaagtatgctctgatgggtgccgatgatgcagtgcatgacgaggcactatgtgggcacaactgaaagctcgccatcgcattcgatgtgctgaatataccggagggacagccaattcgtgtgacaaaaaacttagaagtctgcagccactgccatgaggctgccaagttcatatcaaagatgtgcaacagagagatcattctgagagattcaagcagattccatcgttttgaaggaggcaggtgttcttgcagagggtac

SEQ ID NO: 138600 - DNA, 870 bp, Zea Mays
ggaagaccacaatcatagagggaaaagaagagcaagttgagctggaggtgttcaacttcactggtgtaggaggagttgccttatcaatgtacaacactgacgaggtgcacttggtgcttgctactattccattaagaaatggccattgtatcttcgcaccaagaacattattttgaagaaatattatggcaagttcaagtatctccagtttcttgttttaccatatccaatccaatttgtgcatgggcctccgacgatgccacggtgatcaaggtagacatcgtcaatagccatgacacgctgctcgccgtcgtccaggtcatcgccgacctcaacctaataatctggaaggcatacttctcctctgatggcagctgattcatggacgtgttcaatgtcaccgaccgtgaagtaacagggttctcgacgcccaatcatcctacatccagaagacgctgtaggtggatgactggtactatctggaggcacgcaacacggtgggcatcgtggcattggaggactacacctccatcgatctcatgggcacagacccgggcctgctattcgaggctatctgcccagttaacaagaagatggcttttgtcggttatgccagagcatgagcttgttcatgttggtccagatacccgcttgaactacaaagttatcgagctacgaacactctcaaaccaagccatattccagatctagtgtcaagttgaaaacgtaagtgtgacataatatttttattgccaatctgttattgttcatatatttgataaaagattgttgtcctacaactccatacttaaattgtaatacccactttgtaaaaaaaactaaagggagagattatattcctttatatgt

SEQ ID NO: 138601 - DNA, 631 bp, Zea Mays
cactctcctcgccccaccatcggcgtccactatccatcgaaaagtcccgccttcctagtcccccttccccacctacgacgaccgccgcggacgtatcaaaaaagattcctcctcccagtgtcgcctccacgcgtggaggcggcgatccattccgccccctaggattttgctcctcccgatccggacgtcatatctcgcgtggcggcacgcggatctgggggtttctctagaggcggcggtggcggccggaacaggggcagatggcgctctcggggatgcgagggctcttggtcttcatcagcgacatacgcaactgccacaataaggagcaggagcacctccgcgtcgagagtggacaccacacttcacccattccttctcggcgctcgcccaggaagactatagccaggtacgatgatactatatattatgtagtgttccttgcacaatctagcagaccgggacgccagtggggaggcgacgggtgttcgtgtagatagagactggctgcattctcggcatgtacctggaccgcggggacaacatgcacaccgtcaagcgctacttgcagctcacgctcaacgtgcccagcggcgagaccttgctcaccttcgacgatcgcgtcctagac

SEQ ID NO: 138602 - DNA, 1270 bp, Zea Mays
gttctctcgttcctctcctttcctaccgcacccgtctcctggcgcacctcgcccttgccccaccccggatctcagcctccagtcctcgctgctgctgctccagcgccacgaattgctcgcctcgtctccctctcccttcgaccccgcctcgtcgtggtcgtggtgaccaaggaacccaagctcggtggtggcggatcgggggccggcgacggcgacgacccgagggaagaagctcacgccgctgcacctggccgcgagcccgcgacactagcggaggacaagcgcgacatcctacggtaggccatcacaggggcgttgggggacgacggagtggctcgggacttgttcgagcacgcgttgagcaacgcgccggagaagcttccattgcagtcctcgccgtcaaaatccgtccgggtgtccacgacactggtcgaggtcctgcgccgcgcgcagtccacgcagaaaaagcgcacgaacgctgctcgatctgctccaggactcacagatctccgtggagtagctccacatccccactcgctagataagatcttccctcgcttgtttcttccgctgctggtccgctgtttgctcactgttctgatgttttttcaggtccacatgccgaaagcaatggcgacgctgaggagatagctgctcgtgaagcctgcccgagcctcctcgtgccagtgtttcgtatctgcctccaaactacccaacctaatgcagatgataaatatgtagctattgataaatatatggttctcattacttgtattatttgtcaagtgttcctagaaaactctcagagattattacagttgaagaggccaaagagttctacccactctttgggctaggtgccaatgtggcactcatcttttctggacacacattgaagtatttctcaaatatgaggaagattaggtcctagagtggatggttggccaaattcgttgaaggacatgacgagcatattggttgtaccgggtcttgtcatcactggtgtctattggggagtgaacagatttgttattgatacctcatcaatgtagcggaaaaagaaggtcaaaccaaagctcatcatgggtgagagcttgaaggttctattgtcatcttggtatgtgagggattttgcaacattggtcgttgattatggaataagcattaaccttatcgaggtggatcctttgattctattgaaaatgcaatgctcaacatttttattgttgttaacttttctaattaaacagaatgcagagtttttaacaac

SEQ ID NO: 138603 - DNA, 1225 bp, Zea Mays
gttctctcgttcctctcctttcctaccgcacccgtctcctggcgcacctcgcccttgccccaccccggatctcagcctccagtcctcgctgctgctgctccagcgccacgaattgctcgcctcgtctccctctcccttcgaccccgcctcgtcgtggtcgtggtgaccaaggaacccaagctcggtggtggcggatcgggggccggcgacggcgacgacccgagggaagaagctcacgccgctgcacctggccgcgagcccgcgacactagcggaggacaagcgcgacatcctacggtaggccatcacaggggcgttgggggacgacggagtggctcgggacttgttcgagcacgcgttgagcaacgcgccggagaagcttccattgcagtcctcgccgtcaaaatccgtccgggtgtccacgacactggtcgaggtcctgcgccgcgcgcagtccacgcagaaaaagcgcacgaacgctgctcgatctgctccaggactcacagatctccgtggagtagctccacatccccactcgctagataagatcttccctcgcttgtttcttccgctgctggtccgctgtttgctcactgttctgatgttttttcaggtccacatgccgaaagcaatggcgacgctgaggagatagctgctcgtgaagcctgcccgagcctcctcgtgccagatctggccaaacttgaatcagttgtttactgatttctcccgagcatatgtgtgctgctggcaacttaccacatgggattattacagttgaagaggccaaagagttctacccactctttgggctaggtgccaatgtggcactcatcttttctggacacacattgaagtatttctcaaatatgaggaagattaggtcctagagtggatggttggccaaattcgttgaaggacatgacgagcatattggttgtaccgggtcttgtcatcactggtgtctattggggagtgaacagatttgttattgatacctcatcaatgtagcggaaaaagaaggtcaaaccaaagctcatcatgggtgagagcttgaaggttctattgtcatcttggtatgtgagggattttgcaacattggtcgttgattatggaataagcattaaccttatcgaggtggatcctttgattctattgaaaatgcaatgctcaacatttttattgttgttaacttttctaattaaacagaatgcagagtttttaacaac

SEQ ID NO: 138604 - DNA, 1175 bp, Zea Mays
gttctctcgttcctctcctttcctaccgcacccgtctcctggcgcacctcgcccttgccccaccccggatctcagcctccagtcctcgctgctgctgctccagcgccacgaattgctcgcctcgtctccctctcccttcgaccccgcctcgtcgtggtcgtggtgaccaaggaacccaagctcggtggtggcggatcgggggccggcgacggcgacgacccgagggaagaagtctcagtcgccaccccttcctcgcagctcacgccgctgcacctggccgcgagcccgcgacactagcggaggacaagcgcgacatcctacggtaggccatcacaggggcgttgggggacgacggagtggctcgggacttgttcgagcacgcgttgagcaacgcgccggagaagcttccattgcagtcctcgccgtcaaaatccgtccgggtgtccacgacactggtcgaggtcctgcgccgcgcgcagtccacgcagaaaaagcgcacgaacgctgctcgatctgctccaggactcacagatctccgtggagtagctccacatccccactcgctagataagatcttccctcgcttgtttcttccgctgctggtccgctgtttgctcactgttctgatgttttttcaggtccacatgccgaaagcaatggcgacgctgaggagatagctgctcgtgaagcctgcccgagcctcctcgtgccagattattacagttgaagaggccaaagagttctacccactctttgggctaggtgccaatgtggcactcatcttttctggacacacattgaagtatttctcaaatatgaggaagattaggtcctagagtggatggttggccaaattcgttgaaggacatgacgagcatattggttgtaccgggtcttgtcatcactggtgtctattggggagtgaacagatttgttattgatacctcatcaatgtagcggaaaaagaaggtcaaaccaaagctcatcatgggtgagagcttgaaggttctattgtcatcttggtatgtgagggattttgcaacattggtcgttgattatggaataagcattaaccttatcgaggtggatcctttgattctattgaaaatgcaatgctcaacatttttattgttgttaacttttctaattaaacagaatgcagagtttttaacaac

SEQ ID NO: 138605 - DNA, 1672 bp, Zea Mays
gttctctcgttcctctcctttcctaccgcacccgtctcctggcgcacctcgcccttgccccaccccggatctcagcctccagtcctcgctgctgctgctccagcgccacgaattgctcgcctcgtctccctctcccttcgaccccgcctcgtcgtggtcgtggtgaccaaggaacccaagctcggtggtggcggatcgggggccggcgacggcgacgacccgagggaagaagctcacgccgctgcacctggccgcgagcccgcgacactagcggaggacaagcgcgacatcctacggtaggccatcacaggggcgttgggggacgacggagtggctcgggacttgttcgagcacgcgttgagcaacgcgccggagaagcttccattgcagtcctcgccgtcaaaatccgtccgggtgtccacgacactggtcgaggtcctgcgccgcgcgcagtccacgcagaaaaagcgcacgaacgctgctcgatctgctccaggactcacagatctccgtggagtagctccacatccccactcgctagataagatcttccctcgcttgtttcttccgctgctggtccgctgtttgctcactgttctgatgttttttcaggtccacatgccgaaagcaatggcgacgctgaggagatagctgctcgtgaagcctgcccgagcctcctcgtgccagatctggccaaacttgaatcagttgtttactgatttctcccgagcatatgtgtgctgctggcaacttaccacatggggtattcttcatcttactagatcaagtctcacctaaattgaattgaaactgaatatttttaacaaattgagcagcgacttacagctccaggtttataataactgtagctaacatatattttcaatttgcttctactggcagtggcggtgttgtatgtttcttttcttataaggtggtccaaagcaaaatctgagtcgaaatagtcatgattcgacaactatagaaacaacttcatatatatttgttggatgttgccatattagctgtaaaattggccatgattcttggtatattttcatatgacacagtgtttcgtatctgcctccaaactacccaacctaatgcagatgataaatatgtagctattgataaatatatggttctcattacttgtattatttgtcaagtgttcctagaaaactctcagaggtcagagttgttctttgatttgacaaaccaccctgctctgcctagatgccgcgctactgctcccgcctactccgccaccgccacggcccccgagcccaaggacaacgcgtcgtccaggttcctgggcgtggaggcgaagacactcctctacaccaggctcactgacgtcctctccaaggaagcgctcttctacatcgtcatcttcctgttcattgccttcttcggtgcctttgcctatgtgctctaccccatgtgcgacgccatccaccctatcacgctcgatgaccacctcctcgcctcgctcgggcccaacttccttggatttgttgccatcctccgtgtctggagcttctacctcttctacgttatggctgagctccggggagcatcgtcatattcatcctcttctgggggtttgcccattaggtgtggttcgcccaattcaatttttgtgctctgtctatcacaactaatactttaa

SEQ ID NO: 138606 - DNA, 1083 bp, Zea Mays
gttctctcgttcctctcctttcctaccgcacccgtctcctggcgcacctcgcccttgccccaccccggatctcagcctccagtcctcgctgctgctgctccagcgccacgaattgctcgcctcgtctccctctcccttcgaccccgcctcgtcgtggtcgtggtgaccaaggaacccaagctcggtggtggcggatcgggggccggcgacggcgacgacccgagggaagaagctcacgccgctgcacctggccgcgagcccgcgacactagcggaggacaagcgcgacatcctacggtaggccatcacaggggcgttgggggacgacggagtggctcgggacttgttcgagcacgcgttgagcaacgcgccggagaagcttccattgcagtcctcgccgtcaaaatccgtccgggtgtccacgacactggtcgaggtcctgcgccgcgcgcagtccacgcagaaaaagcgcacgaacgctgctcgatctgctccaggactcacagatctccgtggagtagctccacatccccactcgctagataagatcttccctcgcttgtttcttccgctgctggtccgctgtttgctcactgttctgatgttttttcaggtccacatgccgaaagcaatggcgacgctgaggagatagctgctcgtgaagcctgcccgagcctcctcgtgccagatctggccaaacttgaatcagttgtttactgatttctcccgagcatatgtgtgctgctggcaacttaccacatgggtggcggtgttgtatgtttcttttcttataaggtggtccaaagcaaaatctgagtcgaaatagtcatgattcgacaactatagaaacaacttcatatatatttgttggatgttgccatattagctgtaaaattggccatgattcttggtatattttcatatgacacagtgtttcgtatctgcctccaaactacccaacctaatgcagatgataaatatgtagctattgataaatatatggtaactccctcaaatctccaatatgtagatatttctcattttattggccatgcttactgattaatacactttgctatttatc

SEQ ID NO: 138607 - DNA, 262 bp, Zea Mays
atggtcaataaatttcagttcaagaaaactagagtctttgagtggtctcgacgtagcttatacaagaaagctcattttattgtactgtataaagtctggaaatccgtgtagccctttaactatttgctacattagacatagtgggcttaaaatccatcacgttatactatcaacctatcgctatagcattctcaatagaaccagttcaatatatgtttggttgtgtgcttgtgtgggttgtacactaaatacttctcattaa

SEQ ID NO: 138608 - DNA, 830 bp, Zea Mays
accgcagggcctaatcattcaacataaaacccttccttcgtcttcgattcagcgatttccgatctttccgtcctcggtcttcttgatttttccttcctacctccacctgctagcgccgtccgccgttcctcaggaaaatcctctcacctgagtatggagcagcaccccacttgcgcccagccaccggcgccggcgcccctggctgggcccgtcgtcccggtggacttcaaggtcgtcaagaagggacccgagatggcgatgcacgacgcgatcggccgcctcgccttccgcgtcgcgggcagcgccggcggggccacggcgctccaggatgacgctggaggtgtcctggtcaccgtcaggagcagcggccagggtgagtggcaagcattcagtgggaatagtttggaggagagacacatcattttcactgcaaaagctatacctgcttcttcaagtcgagaggaggtacatgtgttcatctcaccaagaagcactgttgaagattcaaaaccaagctacagactcgtaggaagtgcattccaaagagcgtgcacagtaataaagggggactccatcgttgctcagacaaatctcttgtacaaactcaagcagaatatctattcacggcgtaaattcagagtgactatttaccctgcaaatgataacatccttgtcatggcaatggttgctacattctttatcaaaaaatgacagatgatatggatgcctgctttggtttcgaaactttggtggctaactctgctaataaatcatgtgcactgttctcgttatggatggtttctttcattttaaactttttatatcactca

SEQ ID NO: 138609 - DNA, 1094 bp, Zea Mays
cccagatcaaccccgcacgcgacatcaatagtccctaccattcggcgaacgtacaaatcaaagtgcggcgtgcccgctcgcaaactttgagtacgtactgctactccggctcgtcctcctctcttctccatcgccgttggttctctcacgccacacggtcatccgatccctgtccaccgcgttgggagcggcgcagcccatggacgacaacgagagagagaaagagaatgagaatgagaaggagaagcactacgggactgacgtcgaggatgaagaagaggacgaggaaggtaacaagcgagtcgtggtgcttggcccccaggtccccctcaaggagcagctcgagctcgacaaggatgatgagagcctgaggaggtggaaggagcaactccttgggcaggtcgacacagagcagctgggagaaactgcggaaccagaggtcaaggtggtggacctgacgatcctgtcacctggcagaccggacctgatccttccgatcccgttccaggctgacgagaagggctatgcgtttgccctcaaggacggcagcccctacagcttccgcttctccttcatcgtctccaacaacatcgtgtcaggcctcaagtacaccaacactgtctggaaaactggagtcaaagtggagacccagaagatgatgctggggacgttcagcccccagctagagccctatgtctacgagggcgaagaagagaccacccctgctggcatttttgcgagaggttcttattctgccaaactaaagtttgttgacgatgatggcaagtgcttcctggagatgagttactactttgagattagaaaggagtggccaggaactcaatgatgtgtggaccagcatggctgattcgtcggagtatgttagagctcatagctaagccaagcacaagatgtggactcatcttcaagaatgattcattcgctacttcatcgttaatcgcattttaatttgttttgaattgtcattgtacgtcgtttatgacataaaactgtttattcatcacatatataattcatgtatcgagatatatattcagatatttttttttagtgttgttgaacttcttgacctg

SEQ ID NO: 138610 - DNA, 240 bp, Zea Mays
atgaatatgaaggtcatgcggattcttaacagtggacaaggagtgttgaaggacgagtgttggaacttgactgaaggactggagaagccaagtgaccaggtgacaccttatgacataagtaagcacgatgacatggtggagaggatcgtgttgccaacatggttaaaaactgacggaacacgtgcctatgatgtgggatacacatatggagcatgctacctacgaaggtttggtggttga

SEQ ID NO: 138611 - DNA, 507 bp, Zea Mays
atggtttccaaggagcagaataagcgaggagctttgcatgagaagctcaagattctccgcagcgttactcactctcatgcgggggataaagtgtcgataatagcggacgcgtcatcgtacatcaaggaactaaagcagaagatcgcgaagctaagccaagagatggcatcgtcgtctccgcagcacgccactactggtgtctgccaacaacaaccgtcgtcgtcgtcggtgagtgtgggagtcctgctggacaagaagggccgtttcctcgtcagtgtgttcatggacgagagctgcggcccgccgccggccgggctactcgcttccgtcctcgaggccttcgacgacatcggactcacggtgctcgaggctagggctacctgcgctggttcctttcggctagaagctgtaggagaggaagtagtagtagatgggggcctcatcatcgacgcgcacgcggtggagcaagcagtagttcaggcaatcaagaattgccctgcaaattaa

SEQ ID NO: 138612 - DNA, 2452 bp, Zea Mays
ctctcccaagtttaggcattcccctcccctcccctccccacctccccgtcgtcgtagtcccctgttcatccatcgcaagaactccctcggatcgcgctcggttcgccgcttgcatgcatgcacgcacaagcccgcgagcccggccggggtgccagcatattcgttcgctagctcgtgggctcttctccgtctccgatccgttccgtccgcgctgaagaacacgcgcgcgcgccgggctgtttagatccgatccgatccaggccttcttccgttgcaacctgcgccttgaggcctcctggtgatcgatcttctgcattaattgctggctcaatggtcgccacagccacaggcgtagagtgctgcaagatctttggttttgttgctctataaacactgcatgtgttccgtattgtgaggccattttaaggaatgcagaaagatgtgtttgagtgaaaaagatttctgctctgaagaggagcacatttctccaataaatttcaaatcgctaataattcttgatgagcgaggatttcaagcacacattagacgcatagtagaaaatagctgtgatgcaactgatgtcagaagaaatatcgcaatgctatgtcatataatttctgaagacggctgaagttctctctttaccgacttgtcgtcctacgagttcctacaatcagttggtagcaggtgtctatatatataatatgatggaagcagagaagaatggaaacattcttatgcaaaagtatgaggttggaaaattattggggcaaggaacatttgccaaggtataccatgctaggaacatagagacctctcaaagtgttgctatcaaggttattgacaaggacaaaatttttaaggttgggctaatggagcagatcaaacgagagatatcggtgatgaaactggtgaggcacccaaacatcgtgcaactttatgaggtcatggctactaaatcaaagatatactttgtgcttgaatatgtcaagggtggtgaattgtttaacaaaattgctaaaggaaagttaagagaagatgcttccaggaaatacttccagcaattggttagtgcggttgatttttgtcatagtaggggtgtgtatcatcgtgatttgaagccagaaaacctacttgttgatgagaatgggaatctaaaaatttcagattttggattgagtgctcttgctgaatcaagacgccaagatggtcttctacacacaacttgtggtactccagcatatgtggcgccagaggttattagccgaaaaggatatgatggcgcaaaggttgacacatggtcctgtggtgtgatcctatttgttcttatggctggatatcttcctttccaagattcaaatttgatggagatgtacagaaagattggaaaagcagatttcaaatgcccaccatggtttccatctgatgtacgcaagttagtgtcaagaattcttgatccaaatccaaggactagaatgccaattacaaaaatagtggaatgcttttggttcaaaaagggcattgacaacaagctaatccgaaagaatatcgagatgaaagggaaagtttcagctctcactgatgttaatgtagttttctcatccacgggtattggtagcaacaataacaaattggttgatgtggaacaagatgtagcgaagattaccaacctgaatgcttttgacattatttccctttcagaaggctttaatctttcaggcttatttgaagagtccgagaaaagaaaagaggcacggttcacatctagtcaatcagcttcaactattatctcaaaactagaagatgctgccacctgttcaaagatgacaataaagaaaaaagaaggtggtgtgctaaaaatggaaggtgcaaatgaaggaaggaaaggtgtactatctattgatgctgagatctttgaagttactcctgctttccatcttgtagagattaagaaaaataatggggatacactagaatatgaaaatttgtttaagcaggacatgaaaccagcgcttaaagacattgtttgggcatggcaaggtgagagtaaggaccaacaggccaaggatcacaatcaatcataaattactcaaccagtttgtttccatagtaagaaataatgtttgttagtgttcaaaagttgtatctacttcaaactttctcgtatttgacataaacatgtgatttgattcataatttgttaagaaacatagtattgttatgttacatctatcattaattgttttactatattgataatctatcactagattggtgaatgtatagttgttacatcaaatcggtttagatagtacgctagatgcttattttacatggtaatgggtcatttctagacattccttttttgttaaaaaactctaaccaaaccttatgtacgtattaaaaagggcaacataaaactttctgtgtgaatctacttgacatatttaat

SEQ ID NO: 138613 - DNA, 2260 bp, Zea Mays
aggaggagtatgcatagatacaaagtttcagttaaatgtcgctttcctctagggttaggaaaccagtggatcgtcgggtttcctttaattctacacgcaccgcctcttctcgctgcgacctgctgcttcttgttcagttctagtatttttattaatttgtacactttctttcgtttctttttccttgcttgtaattgtaatattccattccattcaccgtatttttactgcatgcttaatacttagaagctaggagtggcaattaattaatgttccttatatgggaagtcgatagtgatacagtaaataataaatttaccgtggttaattaatcaagtaataataaggcccattagtaagcacgggattaacgttaataagacgaagcggagagaggagagggaggcgggtgcagtgtgtggcgtgcgaacagataaggctttttcttccgagtgtgtgggcaacgggaggctatagagactgacatcttcgcattgtgtagcacgacattgttcatccaaaacaaccatggactttttttattaataataagacgaaagcatgatatattggtatcactagcattaattatgattaactaataagtattggtacgacgtatgtgcgtttcgatcgcaggtgctgaggccatcggggtgtgctacggcatgagcgccaacaacctgccggcggcgagcacggtggtgagcatgtacaaggcgaacggcatctcggcgatgcggctgtacgcgccggaccagggcgcgctgcaggcggtgggcggcacgggcatcagcgtggccgtgggcgcccccaacgacgtgctgtccaacatcgcggctagccccgcggcggccgcgtcgtgggtgcgcaacaacatccaggcgtacccgtccgtgtcgttccgctacgtgtgcgtgggcaacgaggtggccggcggcgcggcgcaggacctggcgccggccatggagaacgtgcacgcggcgctggcggcggccgggctgggccacatcaaggtgacgacgtcggtgtcgcaggccatcctgggcgtgtacagcccgccgtccgccgcggagttcaccggcgaggcgcgcgggtacatgggccccgtgctgcagttcctggcccgcaccgggtcgccgctcatggccaacatctacccgtacctggcctgggcatacaaccccagcgccatggacatgagctacgcgctcttcacctcctccggcaccgtcgtgcaggacggcgcctacgggtaccagaacctcttcgacaccaccgtcgacgccttctacgtcgccatgggcaagaacggcggctccggcgtgccgctcgtggtgtcggagagcgggtggccgtccggcggcggcgtccaggccacgccggccaacgcgagggtgtacaaccagtacctcatcaaccacgtcgggcgcgggacgccgcgccaccccggcgccatcgagacctacctcttctccatgttcaacgagaaccagaaggagagcggcgtggagcagaactgggggctcttctaccccaacatgcagcacgtctaccccatcagcttctgaagaaccgttaaccgtaccgatccaagctagctgctagctggccctggtggtggctccgaccgacgacggacgacgacgatcgacctgcagccgtatgtgtcgatccggccgtatacagatgatagtacgtagcatgtatgtatatatatggtatatgtgggcttgctttgcgaccgctgggagtgagtatccgatccaattggtacggtagctactcccagatgcgtacgccgtgagtgatgctgagtacgtattttatatgtatatgttatacacatcgaaagggatctttcggagacgacgcgcgcgcgcggttaccgtatatattgataaatacggtaacgtcgtcgtcaattggtcgatgatctcccttcgtagctatagtagtatacagagagagaggttggtgatggataagatacacatgcatgtacattatcacgcaccgtataaattaatatacggtttttaattaacttgagataattgtacgcgtacttcaatcaattctatcatccatttccctggttccaaaaaaatagaatacaactttcgtttttaagaaatcatcaaatgcttctaagttagattaagggtttacaaaaaatattaatatttatgatctaaacatatattagatgaaaagatgtactttttctataataaatcgatttggagatgtagatatg

SEQ ID NO: 138614 - DNA, 2021 bp, Zea Mays
gtggattggattggaccgaaccccctgtccgcctcctcctccgatgatgatgatcctcggcatctatataaggggacctgctgccactacttgtttcgccaaggaaacacacaattcagcacacgcaccaccaaaaagagggagaagaggggatctcggagaagagtcttcgcctcggagagacgtgctctgcctagcatatatagccacgaaagagagtgctggccctgccggccttcgtctagctatagctaactagccagcagcagcgtgcgtgcgtgcgttcaaggcagcagaggtagagaggttttgagagagagaatggcaagcaggcaaggtgtagccgcctccatgttcgccacggcattgctcctcggcgtctttgcatccatcccacaaagtgctgaggccatcggggtgtgctacggcatgagcgccaacaacctgccggcggcgagcacggtggtgagcatgtacaaggcgaacggcatctcggcgatgcggctgtacgcgccggaccagggcgcgctgcaggcggtgggcggcacgggcatcagcgtggccgtgggcgcccccaacgacgtgctgtccaacatcgcggctagccccgcggcggccgcgtcgtgggtgcgcaacaacatccaggcgtacccgtccgtgtcgttccgctacgtgtgcgtgggcaacgaggtggccggcggcgcggcgcaggacctggcgccggccatggagaacgtgcacgcggcgctggcggcggccgggctgggccacatcaaggtgacgacgtcggtgtcgcaggccatcctgggcgtgtacagcccgccgtccgccgcggagttcaccggcgaggcgcgcgggtacatgggccccgtgctgcagttcctggcccgcaccgggtcgccgctcatggccaacatctacccgtacctggcctgggcatacaaccccagcgccatggacatgagctacgcgctcttcacctcctccggcaccgtcgtgcaggacggcgcctacgggtaccagaacctcttcgacaccaccgtcgacgccttctacgtcgccatgggcaagaacggcggctccggcgtgccgctcgtggtgtcggagagcgggtggccgtccggcggcggcgtccaggccacgccggccaacgcgagggtgtacaaccagtacctcatcaaccacgtcgggcgcgggacgccgcgccaccccggcgccatcgagacctacctcttctccatgttcaacgagaaccagaaggagagcggcgtggagcagaactgggggctcttctaccccaacatgcagcacgtctaccccatcagcttctgaagaaccgttaaccgtaccgatccaagctagctgctagctggccctggtggtggctccgaccgacgacggacgacgacgatcgacctgcagccgtatgtgtcgatccggccgtatacagatgatagtacgtagcatgtatgtatatatatggtatatgtgggcttgctttgcgaccgctgggagtgagtatccgatccaattggtacggtagctactcccagatgcgtacgccgtgagtgatgctgagtacgtattttatatgtatatgttatacacatcgaaagggatctttcggagacgacgcgcgcgcgcggttaccgtatatattgataaatacggtaacgtcgtcgtcaattggtcgatgatctcccttcgtagctatagtagtatacagagagagaggttggtgatggataagatacacatgcatgtacattatcacgcaccgtataaattaatatacggtttttaattaacttgagataattgtacgcgtacttcaatcaattctatcatccatttccctggttccaaaaaaatagaatacaactttcgtttttaagaaatcatcaaatgcttctaagttagattaagggtttacaaaaaatattaatatttatgatctaaacatatattagatgaaaagatgtactttttctataataaatcgatttggagatgtagatatg

SEQ ID NO: 138615 - DNA, 1540 bp, Zea Mays
atcgaagcaaatacaagcagagagttttttttggagaggcgtgtaagcataggcagaagatacacagtagcctcttgttgaacacggggatggcaaggcagagtgcagcctccatgttggctactacgacgccgttgcttctcagcgtcttggccaacatcgccgtggtggagtccatcggggtgtcctacggcatgagcggcgacaacctgccgccggcgagcaccgtcatcggcatgtacaaggacaacggcatcccgctgatgcggatctacgcgccggaccaggcggctctccaggccgtgggcggcacgggcatccgcgtcgtggccggcgcgcccaatgacgtgctgtccagcctcgccgccagccccgccgcggccgcgtcgtgggtccgcaacaacatccaggcctaccccaaggtcgccttccgctgcgtctgcgtgggcaacgaggtggaaggcggcgcggcgcagagcctggtcccggccatggagaacgtccgcgccgcgctggtcgccgccggcctggacggcatcaaggtcaccacgtccgtgtcgcaggccatcctcggcggctacaagccgccgtccgccgccgagttcacggacgaggcgcaggggttcatgggccccgtcctcaggttcctggcgcgcaccggcgcgcctctcatggccagcgtctacccctacttcacctacgccaccaacccggctgccatggacctcagctacgcgctcttcaccgctccgggcaccgtcctccaggacggcgcctacgagtaccagaacctcttcgacgccaccgtcgactccttctacgtggcgatggccaaccacgggggctccggcgtcacccttgtggtgtcggagagcgggtggccgtccgctggcggcgtcgcggcgtcgcccgagaatgcggccatctacaaccagaacctgatcaaccacgtcggccggggaacgccgcgccacccgggcgccatcgagaccatcctcttctccatgttcaacgagaacctcaagcagagcggcgtggagcagaactgggggctcttctaccccaacatgcagcgcgtctaccccatcaagttcaactgaagctagctcgatcgaggaacacgtccacataccctacagtctacacacatcaatcaataggtatatatgtatcactgcatgcaacctgtatacttatgcatcccagctgcaggcgatcatgtattgctttgcgaccaccactgggagtgtctaaggctactctcagatgagtatgccatgaggattcttatacgcgtcgagtcgtcgagagaccaacgcatgggcaacgcgtgtgaagtgtgatcaatatttttctttgatttttttgtgttttcactgaaattgaacttcgaataaaaaagccagctctttggacggctaagggatttatgtcactaagttatctgttgactttgtgtcgaaactttcagtggactttctgtgctactaatacgtatttaatgaattcactagtcacagtgaacattgatgtagtttct

SEQ ID NO: 138616 - DNA, 2333 bp, Zea Mays
cgcataaacattagccatttcttacttagttttttcatccgcggtggcatccacgagttgctgaagccagcccataaaatccatcctgcgcgcgtgcggcctctccattttccccgtcttcccgccaccccgaaaatttccgcccgaattccatttcaacattctcacatttcgcttcccagttgccacgaagaactcgaaatccaatccccggcgtcctagctcctccagattccgcagaccccgatccatcctcgacagcgactggcatagcagattccttcccagatcagatggggagaccgcggaagaccaaggccgagccggagccagcccccgccttcccgatcggcaactgcaaggtggagatccgtgggagcggactgcggtgcgagacgacagagcagggtctgacaatctccggacccaggggcgccaaggtcgtcgtctctgtttctggggatcagaagggcgcttcgaatggcgtcggtgagggctctcagttcatccttctcaatccaagcgatgcagatagccaaaccaagtccttgcttgaggaagtgctaatgctttataagaaagaacttcctactatggactatgctgcagacactgggagaaagtcagggtttcttgaaacatgcacaactaatgggaaatacaagactctaattctgatgtctagctctgcagcacagcatgaagaggtcatagctactgtatcgtatcagattgtgccagctgacactcagtatgctgaaatacctctggcagttgtgagatcatcttatcaacgtgtgggtattggcaagctcttatataaggaactatcgcagaggcttcagaatgttggtgttacatccattttctgctgggcagataaggtctctgagggtttttggctaaaacagggttttgtatctgttggagaagtgaatactaaaggtaagattcgaaagattccagtaagggctgatataaagagagcattatgctttccaggaggatcaacacttatggttgcccaccttaataaagaattgccagtcatgcaaacatgggagaaaccccagacatcactccatactgtagtaccagatagtatctctcctggtgataccaatgtctcatgtgagaacatggtcctccaaacatataaacgtcgtgttgttagaaatactgcaaaggtggcaacaaatgaagtcagcaatgcttatagtgaaagttcattatctgagcaagagccaaagaaacgcatgtacaaaacatcgtcatcatcactaaagtcaaaaagaataagatgtagcaatcatgacgacaattgccaagacatgaatcaaattggtgtgcatgacaataacttgtgcagttcccctgagaattcactgcatgtaattcttaaagaacatcacattcctagcactggagctcatatttattctaatggtagtggaagccctacaattatgctcatgaatattgcagacgaacaaaagaaggcacgccttacaaaggttgttgaaacacttagggggtttgttacttgcgatggacattcatgcacacatgttgttactggaaaagctcgcaggactatgaatttctgtattgctttgtgctctggtgcttggataatttccccaaactggttaaaagaaagcttcagagaagggcagtttgtaggagaagcacaatatgttctggaagatgaagaatataggatgcaatataagtctgaacttagagatgcagttatgagagctaaagaaaggcctaactctttatttgctggttatactttctgtctgtcaaagtacatccagccctcttttgatgttctctcagccattattaaatctaccggaggcaagatcataaaaaaactgagtgagttagatgagctgtcccggacaatctttttggtgtgtgaagaggaggcagaacttgcattggttgcagcaaaaagtggcatcaaaacattcagcagtgactggttcatgagctgtgtcatgaaacaggaacttgaccttgaggcccctcagtttattgtatctctatgatgtgcctacagttcaagtcctcctaactcctaatatatctctttctttggttgggatataaattgtttctcctggttcttcgtggatatacaaattttctcatttccttagttacaaaagctgaagtagtgtcaaactagttatcatcctgtgacgatgatgacctgtttaaatggaaaaggttgcggtggagctattccaatttctgtataggcccatttgattcccttcattttgagtaaatggaaactaactaatggagtaggttatttc

SEQ ID NO: 138617 - DNA, 1803 bp, Zea Mays
ggcgtcctagctcctccagattccgcagaccccgatccatcctcgacagcgactggcatagcagattccttcccagatcagatggggagaccgcggaagaccaaggccgagccggagccagcccccgccttcccgatcggcaactgcaaggtggagatccgtgggagcggactgcggtgcgagacgacagagcagggtctgacaatctccggacccaggggcgccaaggtcgtcgtctctggtgagggctctcagttcatccttctcaatccaagcgatgcagatagccaaaccaagtccttgcttgaggtcatagctactgtatcgtatcagattgtgccagctgacactcagtatgctgaaatacctctggcagttgtgagatcatcttatcaacgtgtgggtattggcaagctcttatataaggaactatcgcagaggcttcagaatgttggtgttacatccattttctgctgggcagataaggtctctgagggtttttggctaaaacagggttttgtatctgttggagaagtgaatactaaaggtaagattcgaaagattccagtaagggctgatataaagagagcattatgctttccaggaggatcaacacttatggttgcccaccttaataaagaattgccagtcatgcaaacatgggagaaaccccagacatcactccatactgtagtaccagatagtatctctcctggtgataccaatgtctcatgtgagaacatggtcctccaaacatataaacgtcgtgttgttagaaatactgcaaaggtggcaacaaatgaagtcagcaatgcttatagtgaaagttcattatctgagcaagagccaaagaaacgcatgtacaaaacatcgtcatcatcactaaagtcaaaaagaataagatgtagcaatcatgacgacaattgccaagacatgaatcaaattggtgtgcatgacaataacttgtgcagttcccctgagaattcactgcatgtaattcttaaagaacatcacattcctagcactggagctcatatttattctaatggtagtggaagccctacaattatgctcatgaatattgcagacgaacaaaagaaggcacgccttacaaaggttgttgaaacacttagggggtttgttacttgcgatggacattcatgcacacatgttgttactggaaaagctcgcaggactatgaatttctgtattgctttgtgctctgggagaagcacaatatgttctggaagatgaagaatataggatgcaatataagtctgaacttagagatgcagttatgagagctaaagaaaggcctaactctttatttgctggttatactttctgtctgtcaaagtacatccagccctcttttgatgttctctcagccattattaaatctaccggaggcaagatcataaaaaaactgagtgagttagatgagctgtcccggacaatctttttggtgtgtgaagaggaggcagaacttgcattggttgcagcaaaaagtggcatcaaaacattcagcagtgactggttcatgagctgtgtcatgaaacaggaacttgaccttgaggcccctcagtttattgtatctctatgatgtgcctacagttcaagtcctcctaactcctaatatatctctttctttggttgggatataaattgtttctcctggttcttcgtggatatacaaattttctcatttccttagttacaaaagctgaagtagtgtcaaactagttatcatcctgtgacgatgatgacctgtttaaatggaaaaggttgcggtggagctattcc

SEQ ID NO: 138618 - DNA, 1173 bp, Zea Mays
cccgccaccccgaaaatttccgcccgaattccatttcaacattctcacatttcgcttcccagttgccacgaagaactcgaaatccaatccccggcgtcctagctcctccagattccgcagaccccgatccatcctcgacagcgactggcatagcagattccttcccagatcagatggggagaccgcggaagaccaaggccgagccggagccagcccccgccttcccgatcggcaactgcaaggtggagatccgtgggagcggactgcggtgcgagacgacagagcagggtctgacaatctccggacccaggggcgccaaggtcgtcgtctctgtttctggggatcagaagggcgcttcgaatggcgtcggtgagggctctcagttcatccttctcaatccaagcgatgcagatagccaaaccaagtccttgcttgaggaagtgctaatgctttataagaaagaacttcctactatggactatgctgcagacactgggagaaagtcagggtttcttgaaacatgcacaactaatgggaaatacaagactctaattctgatgtctagctctgcagcacagcatgaagaggtcatagctactgtatcgtatcagattgtgccagctgacactcagtatgctgaaatacctctggcagttgtgagatcatcttatcaacgtgtgggtattggcaagctcttatataaggaactatcgcagaggcttcagaatgttggtgttacatccattttctgctgggcagataaggtctctgagggtttttggctaaaacagggttttgtatctgttggagaagtgaatactaaaggtaagattcgaaagattccagtaagggctgatataaagagagcattatgctttccaggaggatcaacacttatggttgcccaccttaataaagaattgccagtcatgcaaacatgggagaaaccccagacatcactccatactgtagtaccagatagtaagcctacactccatacttattatgtaacgttttaggtttttgaatcacaaatgtgctgtttttgaagcctgtgtcatggcaaatgtaagtttgatgtaaggtacatcttgcaagcttataccaacttttaggtctattataatcagggccatccttttttcgttttgttatttttcaaatttatctgtg

SEQ ID NO: 138619 - DNA, 1096 bp, Zea Mays
ctagtcatactcatatatagacttttaatatctttctataatttaattgaatttctcgattaagcctagcccaggaatccaacggttccctcggtcacaagccaaacagtgcaacagtggttgctgtgcaatcagctagtagctaggtagtcgaggttctccttgcctctccttggctccttccatcattccatcgtctttgctcgaggagtcgaggttcaggttccacggtgcggcgagagctagctcgcagccatggagagcaagagcccatggtcgctgcggctgctaatttgctgcgcggcaatggtggccatcgcgcttctcccccaacaaggaggccaggccgcttgtttcgtgccgacgccgggtccagctccggcaccgcccggctcctccgcgacgaacacgaacgcctcctccgctgctcctcggccagccaagcccagcgcattcccgcccccaatggtgagtgagtactaccgatagtacaatcaaacacagtatcaagactgatccaatgaatgtgcctttgattttctgcagtacggtggtgtcacccccggcaccggcagcctccagccccacggtccgtaccgtacgcgactttagctaaaagagagcagcacctctctgaagtctgaaccgcacggtcgtcgtcaattaataaaggtttcgctgtgctgcgtgtgcgtgtttgcaacagagtgcggcggccggtgcgcggagcggtgctcggcgacggcgtaccagaagccgtgcctcttcttctgccgcaagtgctgcgcggcgtgcctgtgcgtgccgccgggcacctacggcaacaagaacacctgcccctgctacaacaactggaagaccaagcggggaggccccaagtgcccctagtagccctccctctcggtctacttgatgagatcttctgttcaaaaaatcaaaaggaataagaatctgtttaactatctttagatttcacaaataaaacaggtttcaatttatctttgtagtgaaacgcttgcagctcatgtgtgaatctcatccaatattagtgtcagatccctagctagctgattgattactaaggccatgtttggtt

SEQ ID NO: 138620 - DNA, 988 bp, Zea Mays
tttaattgaatttctcgattaagcctagcccaggaatccaacggttccctcggtcacaagccaaacagtgcaacagtggttgctgtgcaatcagctagtagctaggtagtcgaggttctccttgcctctccttggctccttccatcattccatcgtctttgctcgaggagtcgaggttcaggttccacggtgcggcgagagctagctcgcagccatggagagcaagagcccatggtcgctgcggctgctaatttgctgcgcggcaatggtggccatcgcgcttctcccccaacaaggaggccaggtcgatctgtccctctctcgtattggcatggcacaagagatcgagcacatttgtttcttggtctcatcacatcaatagttctaccgtaattcgcagctgtttcttgctcatgtgcggtgggtttcttttccggacgttcatattcaggccgcttgtttcgtgccgacgccgggtccagctccggcaccgcccggctcctccgcgacgaacacgaacgcctcctccgctgctcctcggccagccaagcccagcgcattcccgcccccaatgtacggtggtgtcacccccggcaccggcagcctccagccccacgagtgcggcggccggtgcgcggagcggtgctcggcgacggcgtaccagaagccgtgcctcttcttctgccgcaagtgctgcgcggcgtgcctgtgcgtgccgccgggcacctacggcaacaagaacacctgcccctgctacaacaactggaagaccaagcggggaggccccaagtgcccctagtagccctccctctcggtctacttgatgagatcttctgttcaaaaaatcaaaaggaataagaatctgtttaactatctttagatttcacaaataaaacaggtttcaatttatctttgtagtgaaacgcttgcagctcatgtgtgaatctcatccaatattagtgtcagatccctagctagctgattgatt

SEQ ID NO: 138621 - DNA, 882 bp, Zea Mays
ctagtcatactcatatatagacttttaatatctttctataatttaattgaatttctcgattaagcctagcccaggaatccaacggttccctcggtcacaagccaaacagtgcaacagtggttgctgtgcaatcagctagtagctaggtagtcgaggttctccttgcctctccttggctccttccatcattccatcgtctttgctcgaggagtcgaggttcaggttccacggtgcggcgagagctagctcgcagccatggagagcaagagcccatggtcgctgcggctgctaatttgctgcgcggcaatggtggccatcgcgcttctcccccaacaaggaggccaggccgcttgtttcgtgccgacgccgggtccagctccggcaccgcccggctcctccgcgacgaacacgaacgcctcctccgctgctcctcggccagccaagcccagcgcattcccgcccccaatgtacggtggtgtcacccccggcaccggcagcctccagccccacgagtgcggcggccggtgcgcggagcggtgctcggcgacggcgtaccagaagccgtgcctcttcttctgccgcaagtgctgcgcggcgtgcctgtgcgtgccgccgggcacctacggcaacaagaacacctgcccctgctacaacaactggaagaccaagcggggaggccccaagtgcccctagtagccctccctctcggtctacttgatgagatcttctgttcaaaaaatcaaaaggaataagaatctgtttaactatctttagatttcacaaataaaacaggtttcaatttatctttgtagtgaaacgcttgcagctcatgtgtgaatctcatccaatattagtgtcagatccctagctagctgattgatt

SEQ ID NO: 138622 - DNA, 920 bp, Zea Mays
ctagtcatactcatatatagacttttaatatctttctataatttaattgaatttctcgattaagcctagcccaggaatccaacggttccctcggtcacaagccaaacagtgcaacagtggttgctgtgcaatcagctagtagctaggtagtcgaggttctccttgcctctccttggctccttccatcattccatcgtctttgctcgaggagtcgaggttcaggttccacggtgcggcgagagctagctcgcagccatggagagcaagagcccatggtcgctgcggctgctaatttgctgcgcggcaatggtggccatcgcgcttctcccccaacaaggaggccaggccgcttgtttcgtgccgacgccgggtccagctccggcaccgcccggctcctccgcgacgaacacgaacgcctcctccgctgctcctcggccagccaagcccagcgcattcccgcccccaatgtacggtggtgtcacccccggcaccggcagcctccagccccacggtccgtaccgtacgcgactttagctaaaagagagcagcacctctctgaagtctgaaccgcacggtcgtcgtcaattaataaaggtttcgctgtgctgcgtgtgcgtgtttgcaacagagtgcggcggccggtgcgcggagcggtgctcggcgacggcgtaccagaagccgtgcctcttcttctgccgcaagtgctgcgcggcgtgcctgtgcgtgccgccgggcacctacggcaacaagaacacctgcccctgctacaacaactggaagaccaagcggggaggccccaagtgcccctagtagccctccctctcggtctacttgatgagatcttctgttcaaaaaatcaaaaggaataagaatctgtttaactatctttagatttcacaaataaaacaggtttcaattta

SEQ ID NO: 138623 - DNA, 703 bp, Zea Mays
atgaacacgaggtctccactctccagtctccacgttgcccttctcttccccactcgcctccgctcaccttgcctcgatcgttccaggagtaataaaacactaaaatggcgatggcggcggcgaggagagcgctcctggcccacctccgcgtgccggtggtccaccctgcagcggcggcagcgaccatccccgcggcagggcggctcctgtcgtcgacgacggagacaaaggggtcgttcctcgacaagggcgaggtcgctgaccgtgtcgtctccgtcgtcaagaacttccagaaggttgaaccctcaaaggtgacacctagtgctcattttcagaaggaccttggacttgatagcttggacactgtggagatcgtgatggcgtttgaggaagaattttcctttgagattcctgacaacgatgcagagaagattgactccatcaagacagcggttgatttcattgcttcgcatcctcaagcaaaataagaggatttctttttttttcgtatttcaaagtgtgttttgcacttttgcatccagaactttatgcgacacgggactagttttatctagcttgccgcagtagataggaagtcatttctttacctttctgaatccgcgtgtaccaaacgattgttgtgttcttgtgacctcattggtacgctaatccataaatccatttggacttcctttctgcttca

SEQ ID NO: 138624 - DNA, 174 bp, Zea Mays
gtttttttaatttaattttagctaggcgtgggatgcacgtgggaatgggaataggctttgtgggagagggaatgagaaagacacgtgatagccgggaatggaaatgtgaatgggctttgcagggagagggaatgagaaagacacgtgatagtcgggaatggaaatgtgaatggg

SEQ ID NO: 138625 - DNA, 2968 bp, Zea Mays
ctcggctagatctcgcttccctccacctccagagtccagatccaccccgaactctccgaaggccgcccccgccatggcagcgccgccccccaccactccccgtctcctctcgccgacgtccaaggaccttctcacagccgcctccttcacctcgccgccctcccccacctccgacgatcccgcctccccgctcgacgccttcgcctccgatcccgtcctctccgccttcctgtcgccgtccttctccccttctgtcttctcctccgccgcgctttcctcaggactcgctgcctcccgcgccgagcagctgcaggatgccatccgcctcctccgccgccatctccgcgtcgaggtgctgcgccgccaccccctcctcctctcccacctcctttctctccgctccgcctccgcgtctctctcctcgctcccatcccacctcaaccttctctcctctcacctctctctcctctcctcccacctctcggccccgcgctcccatctcgctcactcctcggcttccctttccagcctcttggccacagccgacctcctcctccactcccaccgcttagtgcgcctctcctcccgactcctcgcctcctcccctgcgcccgatcttgcgcgccaggctgagctctaccgcgagatccgcctcctctatgaggagaagaacctctccgggattaatgccgttgacgaggagatgcgcaaggtggatgccgctgcgtcaaagctgcgctcagaggccagcgctgtgatcgatggcggtgtctacgagtccaaccagaacgacgtgtggtgcgggctgcaggtgtactacaatctcggggaactgaagacagcagtggaggggcttgtgggaaagcacaaggcagcgggtgcaaagagtgtgtctgtcgcactggacatgaaggcgatatcaatgactgctggcgttggaggtggtcctggaggggtgcagaggagtggtacgccgcagattggtgggagtaagaaggctgcagaggcactatgggataggatgaggcagtgcatggatgagctccaccgagcagtgactgctgcttggcagttgcagactgtgctcactaagaagcgtgtgccattcacacaaatgctttttcttgaggaggtttggcaggagggtgagcctcttataacagagagagtttgggatgcaattgtcaaggcctttgcaagtcagatgaagactacctttacggcttcaagctttgtgaaagaaatatttactcttgggtatccaagactgttttcgatggttgaaaacctccttgagaggatttcaagagatactgatgtaaagggcacccttccagctctcactcctgaaggaaaagatcatatgatttcagccattgagatgttccagacagcctttttggctctgtgtcatagtcggctatctgattatgtcaacagcatatttccaatgtcaaaccgtggaactataccttcaaaggatcagatctcaagattggtttctcgcatacaagaagaaatcgaagtagtgagaactcatgggcatttgcttgttcttgttctacgtgaaattggaaagaccttgcttcttttagcacagagagcagaatatcagatctctactggccccgaagctcgacaagttaccggcacagcgactgcagcccaactaaaaaattttgctctgtgtcttcaccttcaggaggttcacatgcgcatttctagcgtcttgtcaacactcccaaatgttgcttctgaagtcctttcaccctcccttggtgttgtttatggtgttgcttgtgattcagtgacttccctgttccaagcgatgcttgatcgtctcgagtcatgcatcctgaaaatgcatgagcaggactttgcaggtcagggaatggatgcatcaatggataacaatgcatcagcttacatggaagagcttcagaaatgtgctgtccacttccgcagcgagttcttatcgaagctgttgccttcatcatcctctcgatcagaaaccatatgtaccatcatggttagaaggatggcctcaagggtactcatattttttataaggcatgcttctcttgtcaggccactctcagaagcagggaagttgagaatggcacgggacatggctgagctggagcttgctgttggtcagaatctgtttccagtggagcagctgggggcaccataccgggcactacgggcattccgtcctgtcttgttcctggaaacatctcagcttgacaagtttccgctccttcaggacttgccgcctagtgtgatcctccaccatctgtattctcgagggcctgatgaactgcagtcgccattacagcgcaacaagctcacacctttgcagtactctctgtggcttgattcacaaggcaaggaccagatctggaagggggtcaaagcaaccctagatgactacgagatgagggtcagatctcgaggagacaaggaattcagtccggtgtatcctctcatgcttcagattggatcttcattgtctcagcccaacacctaacatgtctctggttcaatcttgcatctgtatcatcttgtaggcattgatttttgaggggtcgggtgaagcttcggcatagtctatacacatgaaataggggatttgtgtttgttcctgaaaataatggttagcgtacattgtcttgatgttctgctagtttctgtatctttttgtaactctgatccgtgaaatatttgaaaaaggtgtcgtttcacaaatacatcagcgtcgtggaaggaggtaaatatagaggttaaaaaaggcgagaagacctcttgtgatcaacttcatccaatttcgtattttttttgctagacatagttgcttgattcgagtaggaccatacaataaaacaaaactagttagttgttagatgagtgctctctttctagataggtttaaattccaacagatgtatatttttttaatattttccgc

SEQ ID NO: 138626 - DNA, 1242 bp, Zea Mays
ccagccgcaaaaccaggtgcttgcccgcgcgctccgtggcacgcctggcatgggcatggcagccctatccgtgccggggcccggggatcgacgagtcgactcgttcgtcttcatccgacgcgcggcgcgagagggacgcgcaaaccgcggagctggcgagcccaaaccgcggagctgtggctcccctcccgaaagtttggcggtgcgtgcgaccccaacggaaacaactaaccgcggccggttcacgcggcccgcctaaatcccgctctcctccctcgcccctccctctctctcctcatccaccaccagtgcctccacgaatcttcaacaggcaaagccaatcaataatcaccagccacatcaatccattccctttcctctcccgctccacttccatgggcaaggttcggtccttcttctcgcgctcccgcagcggcaagcgcggcagcgcccggagagcaggctcgtcctcgccgcactcctccgcggccagcgcgccgccgtccccgtccccactcccgaggaggtcaccgtcgtcgtcgtcaaccacaaccagggacgagacggagcgcgtgttccgcaagttcgacgcgaacggcgacgggcagatctcgcggtccgagctggcggcgctgttcgagggcgtgggccacgccgtgaccgacgacgaggtgtcgcgcatgatggaggaggcggacgcggacggcgacggctgcatcagcctgcccgagttcgccgcgctcatggagtccgcgtccgccgacgccgccgccgtcgaggaggacctgcgccacgccttcatggtcttcgacgccgacggcaacggcctcatcacgcccgccgagctcgcgcgcgtcctgcgcggcctcggggagtccgccaccgtcgcccagtgccgccgcatgatccagggcgtcgaccgcaacggcgacggcctcgtctccttcgacgagttcaagctcatgatggccgcgggcggcggcggcggattcggcaggatcggtgcctaggaacaaggatcctgtgcctgtcctgctctgcctctgccccgctccgctccgctcccacaaattggatttctttcattttattatgtatgtacatatactacactggaatcacacggacagcgccacgtaaaaaagccccctttttcatttggtttttgtgtactatacaatgcaaatctgcatccattgtactgctatggatgttcaatggaattgtttcggctttcatcaa

SEQ ID NO: 138627 - DNA, 2026 bp, Zea Mays
acagaaccccccacggaaatgcgtcgcccaatcgctttcgaacccctccccttccagctcgttgcgagctcccatttttgaccttcaccagcgccaccttccacgccaaggctacgacgacaatggtggcgaggagcccgaacgccaagccggacaggcagaaggctgcagccctcgccgcggctgccgcgctcaacccggctctcctcagggagacgctcaagaaggttgaccgatgcatggcacggctgcaggagctgcagtacacggtagccggcggcgccaaggtcgtctccggcgtcagtctcagcccccgcagcacgcgcgggtacctccggaccagcctccggtgcaagcaggagaccgtcaggatgaggggcggcgcgtcggcgcagaagaggtccccaagcggcaagttcgggggcggcgtcggcggagagggcgcgcagtggcgacgaatgtcgctgccggcgatgctgctcggcgagaccgtgctagagatcgtgcaggccagccagttcgcgcgggacatcgtgacggccgccggcgctacgaatcgggagcccccaaggaccccgaaaccggctcccaggaccaggaagccggcggcgggcgagccgacgcctctccgcgcgcggcgtgcccgggagaagcagagccatcggggtggcgccgcgacacggggcgccgacgccgccacgccgccgtcgcgcagccgcgtgcggtcccggatccagttcaagcccgtgtcgccggtcgccgtcggccggccgtccgtgtccgccaaccgcgtctcccccaagaaccggccgtgggcaaagaaggcggtgatgttcccgaaccccacgttccacgcctccacctctgccgccaccgacccgtgcgcgacgccgtcgccttccaagaagcagaagcggctctacaagacgcggtccccggtcgcggcccggcagacgccgcacaagttcctggtcaagtcgccaccgagcgcgctgggatcgaagctcaggatgcacgggaaggccctgcccgcgagacccgccgccgtgtcaccgccgccgcccgtgaaggcgcaggcatcacctgcaaaaacgcggcgctgctcgttctcgccgtcgaggttggcgacaaggctcatgtcgcctatcaaagcgaggctgtcgctgggcaggagcagggacagcggcgtcggtgtcggcggtggcccgatgagcgggctgaagcagcggccaggtgttagcttgacggtgcggacggtgtcgagcaagatatcatcgaggtgatgatcttcgtttgtcttcggcgtcatgtgaagacgagagggggtacagattgcagagaagagaattgcgttgatcttcttcagaaataagatattctctgctgggaaagcctcctgtcttggggtgcttgtacacacactcgttacggttatatgtaattttcgttgatccttggtgataatacaggggtggtctcctcgaccctataatcgaaaggcaatacacttgatctgcgattgttgttcagtcaggacttgaggctttcagaagatactgcgcttgcactagaatctcggaaattttgcaaacagcaatttcggaagctgcaattcagcaggatcaagcagccggcgggaccaaacaagttacttttaagggcagtgccgatgagacttggacttggaagcaagcacgtgctcgcccgtcaaaggtctagctgtcaggctctactacaagcactacctgctaaatactttgttggtagggtgtttcagtgtttgaatgcactcaactaatagttagcttcttaaattagttgaagacatccaaacagtctatttgatagttcaactattagttatttttatcaaattgcctaatagttggctgctaactaattctcctagcaatttgtagccaactaactattagctctagtggattcaaacactttcttaagacaatatttgaatgcactagaactaataggtgactgctaaaattgaataaaagagtacattctt

SEQ ID NO: 138628 - DNA, 1571 bp, Zea Mays
gctcgttgcgagctcccatttttgaccttcaccagcgccaccttccacgccaaggctacgacgacaatggtggcgaggagcccgaacgccaagccggacaggcagaaggctgcagccctcgccgcggctgccgcgctcaacccggctctcctcagggagacgctcaagaaggttgaccgatgcatggcacggctgcaggagctgcagtacacggtagccggcggcgccaaggtcgtctccggcgtcagtctcagcccccgcagcacgcgcgggtacctccggaccagcctccggtgcaagcaggagaccgtcaggcaagtgttttggttgtgttccccctccgaattcggccctagaagatccttggctcacgcgtgcgaatctgtctcttactctgactcttgccggcgcaggatgaggggcggcgcgtcggcgcagaagaggtccccaagcggcaagttcgggggcggcgtcggcggagagggcgcgcagtggcgacgaatgtcgctgccggcgatgctgctcggcgagaccgtgctagagatcgtgcaggccagccagttcgcgcgggacatcgtgacggccgccggcgctacgaatcgggagcccccaaggaccccgaaaccggctcccaggaccaggaagccggcggcgggcgagccgacgcctctccgcgcgcggcgtgcccgggagaagcagagccatcggggtggcgccgcgacacggggcgccgacgccgccacgccgccgtcgcgcagccgcgtgcggtcccggatccagttcaagcccgtgtcgccggtcgccgtcggccggccgtccgtgtccgccaaccgcgtctcccccaagaaccggccgtgggcaaagaaggcggtgatgttcccgaaccccacgttccacgcctccacctctgccgccaccgacccgtgcgcgacgccgtcgccttccaagaagcagaagcggctctacaagacgcggtccccggtcgcggcccggcagacgccgcacaagttcctggtcaagtcgccaccgagcgcgctgggatcgaagctcaggatgcacgggaaggccctgcccgcgagacccgccgccgtgtcaccgccgccgcccgtgaaggcgcaggcatcacctgcaaaaacgcggcgctgctcgttctcgccgtcgaggttggcgacaaggctcatgtcgcctatcaaagcgaggctgtcgctgggcaggagcagggacagcggcgtcggtgtcggcggtggcccgatgagcgggctgaagcagcggccaggtgttagcttgacggtgcggacggtgtcgagcaagatatcatcgaggtgatgatcttcgtttgtcttcggcgtcatgtgaagacgagagggggtacagattgcagagaagagaattgcgttgatcttcttcagaaataagatattctctgctgggaaagcctcctgtcttggggtgcttgtacacacactcgttacggttatatgtaattttcgttgatccttggtgataatacaggggtggtctcctcgaccctataatcgaaaggcaatacacttgatctgcgattgttgttc

SEQ ID NO: 138629 - DNA, 774 bp, Zea Mays
atgtccttgctgttatttcttgatcaggtatctcagatttgtagatatcatcagagagcttctcttctgccttcccttgtccagcagacgcctccaggatgttgtcttcatctcttccacccagctcctcgcatgcctccactctgcaagcaacaccttgatctgagaggatctcctggtcacggaccaaattcgttgtattctcctcatcagcagcatcctctttgtattcatcagaggatctaccggacgttccttgctctgcttcttgctccacagaaaactctgctccaacaacctcctgttccccaattctctgttcttccaagatctcatcgtccaagctatcatcatactcgtatccatggtacttcaaccatggcaactcctcgacgaaatcgttgtcgatgtgtaccccactgcactccgacaagctgtccccgaaggcaccatgcttctgttgcaacaccgggcgaggctcaggttcaccatcatcgcaaaccgcaagatccttgcccttctcaccgtcctcgtccgcgccgcaccgatcgaacacgacgaactccatcctccgcaccgtggcatccatctcgtcgagagacatgtcgctgcagctcatgtccgagctcaccctcgggccgccgtacacctcgacgaagaagtcgccgaccgcctcctcgtcgatcaaaggcgcgatctttgcacctccaccactgccacttccgccgctggtcctctcctcggatttcttgcggaaggccgagacgcccttga

SEQ ID NO: 138630 - DNA, 1666 bp, Zea Mays
ctagctagattaatgcttaagcacatacctacacacgtgtaaactactgacggccctttcataattaggcgcagagattctatacgtgtgtaaaagcagacatatcaaattgcctgcatcgccctttgtataattgtcttccaaaacacacggtttcgcgttgcagtataaagatcatccagcaaacaactcgagaagcataccagagcacacacagaaacagaacgaagtcctcgatcgctcatcgtctcctctgctccggtttcgttggagatccaggcaatggccgacgaagtgcagcaactcaccagggccttctcaggccttggcgggctcggcgtggacgagccggcgatggtgtcggcgctggcacggtggcgcgggcagcccgagaagcggtccgcgttccgcaagggattcccgggcttcttcagcagccacggcggcgacatggaccggcgcgaggaggagtacatgctgcacctggccgccgagttcgcgcggttcagggacctggtggtgctgtgggcgacgcacccgtgggagcgcgacgcgcggctggcgcaccacgtcctgcaccaccaccaccaccacccgcccgccgtcgtcgtggaggtcgcctgcgcgcggtccgccgacgagctgctgggcgcgcgccgggcgtaccaggcgctcttccaccgctccctcgaggaggacgtcgcgcaccgcgcccgggacaagccctactgcagcgtgagcgccgcgcacagctggatggacggagctgccgacgctcgcgctctctctggcagcaaagctcctctgctcctgacctgaccgcgatttttttttcctgcgtgtgcgcagctgctggtcgggctggtgagcgcgtacaggtacgagggcccacgggtggacaaggaggtggcgaaggcggaggccgaggcgctgggtgccgccgtgaagcgcgccgggaacgggaagctggtggagaacgacgaggtgctccgcatcctgaccaccaggagcaagccccacctcgtgcagacgttcatgtactacaaggagatgcacggcaggcacgtcgaggaggacctgcgccaacgcggggaggagaccctgctggagaccgtgctctgcctcgtcgcgccggccaagtacttcagccaggtgattgagggcgcgctgagggacagcgccgaccaccacgggaaggaggccctgacgagggtggcggtgacgcggtcggaccacgacatggacgacatcagagccgcctaccaccagcagttcggggccaagctggaggacgtcatcgcggccaaggcgcacggacactacagggacgcgctgctctccttggtgggcgccggcaattcatcagtctgaagcgctgctgcctgctcaggagtcgtcaggcccaataagatgtgcaagagtttctttattacgcactttcgcgaggaaaaaaagtcgcattttccactcgatgaggaaaggttgttgcttgttcttttgcttctcctatgcgtttcgtctatcattgactacaggattcccaataaacatttttaatttctactttggtctcaaacgtttttatgaatctattcctatatgcccatacacattattcttaggttgtgaacatgtttcagtttcgaggccgctcttggtgctcagt

SEQ ID NO: 138631 - DNA, 1478 bp, Zea Mays
ctagctagattaatgcttaagcacatacctacacacgtgtaaactactgacggccctttcataattaggcgcagagattctatacgtgtgtaaaagcagacatatcaaattgcctgcatcgccctttgtataattgtcttccaaaacacacggtttcgcgttgcagtataaagatcatccagcaaacaactcgagaagcataccagagcacacacagaaacagaacgaagtcctcgatcgctcatcgtctcctctgctccggtttcgttggagatccaggcaatggccgacgaagtgcagcaactcaccagggccttctcaggccttggcgggctcggcgtggacgagccggcgatggtgtcggcgctggcacggtggcgcgggcagcccgagaagcggtccgcgttccgcaagggattcccgggcttcttcagcagccacggcggcgacatggaccggcgcgaggaggagtacatgctgcacctggccgccgagttcgcgcggttcagggacctggtggtgctgtgggcgacgcacccgtgggagcgcgacgcgcggctggcgcaccacgtcctgcaccaccaccaccaccacccgcccgccgtcgtcgtggaggtcgcctgcgcgcggtccgccgacgagctgctgggcgcgcgccgggcgtaccaggcgctcttccaccgctccctcgaggaggacgtcgcgcaccgcgcccgggacaagccctactgcagcctgctggtcgggctggtgagcgcgtacaggtacgagggcccacgggtggacaaggaggtggcgaaggcggaggccgaggcgctgggtgccgccgtgaagcgcgccgggaacgggaagctggtggagaacgacgaggtgctccgcatcctgaccaccaggagcaagccccacctcgtgcagacgttcatgtactacaaggagatgcacggcaggcacgtcgaggaggacctgcgccaacgcggggaggagaccctgctggagaccgtgctctgcctcgtcgcgccggccaagtacttcagccaggtgattgagggcgcgctgagggacagcgccgaccaccacgggaaggaggccctgacgagggtggcggtgacgcggtcggaccacgacatggacgacatcagagccgcctaccaccagcagttcggggccaagctggaggacgtcatcgcggccaaggcgcacggacactacagggacgcgctgctctccttggtgggcgccggcaattcatcagtctgaagcgctgctgcctgctcaggagtcgtcaggcccaataagatgtgcaagagtttctttattacgcactttcgcgaggaaaaaaagtcgcattttccactcgatgaggaaaggttgttgcttgttcttttgcttctcctatgcgtttcgtctatcattgactacaggattcccaataaacatttttaatttctactttggtctcaaacgtttttatgaatcta

SEQ ID NO: 138632 - DNA, 1266 bp, Zea Mays
gcgatgcaaatcgagtggtttcctcctccccatcctccgcccgccctggcacacacacttgccaggcgaaagcaaaagcggagctgcccccgtgccaaggcgagagcaactgcaagctgctcgtctcgtccaataatagccgcaggagcgcaagcgcgaccgaattcggtgcgttgctcttgtcgccatcgcatccgcctccgcctccgcccccatccccacctccccctccaatccccgcagaaaccaccggcgccgtcgaccgcaaccagcagtggttccgttgccggcgcggggttgggccaccagccgcggttgtcgatcggccgaatgattgattgatcgatcgatcggtcggtccaccgcggcaaggccggggagggagccgtcgtcggtggttcctggcggttgcatgtatgcgggcggggagagccggcccaatggtgggggcggaggcggagacgcgctcaggcggcggaggcagcccggcccgtccgcgtctcccgctgcgtcgtcgtccggcaggggagcggaggaggaaggcggggaggagcgtgggcgaggccagaagcaaccgcggcgcaagaagcagcaggggaggcgcgaggcggtggccagggcgatccggggcgggctgccctcctgctggggcggcgtctcggtagctgaggaggccgcctccggcggctggaggaccggggggaggaggtggagccggcgggaggagagggcggccgccgaccgagacgcccgtgccgccggtgacggcgacggcgacggcgacgatggttccgggcgcccgggctcagcgccggcggcgtggtgctgcgcgtgtccgggcggggactgctcgctggagcccaacccgagcgccaacggcaaggaggacgtcggcgtccggtctctcctcgagcgcaacgacttcttctccgccgactgcaacccgcacgccgacgccgtcctccccgccagcgccgacgccgccgcggcctacgactcgacgtagcgcaggcccatcgaccggttcagttaggtgctgccacattgccagctactcatccgcgttctccccgcaaacgttgcggcacacaattttctttttttacagatgatggaagaggaaagtttggttccggtggagctggatcggattatcgattccttgctttcttctctccattgcttccttgcccgtaatctgtacatgtggttgccgtggttgggagcaactgatttttgaactcgaagacactctgtccgtcagca

SEQ ID NO: 138633 - DNA, 2571 bp, Zea Mays
ggcaagcaagcagagcgcgcgcgcgctcccctccctgtctttcttgtctctctgttctgagtgcttcctggtggaaagcttcaagatctagaagatcgccattggcaagctaagctagtggtggtgggtgccgtgatgaagcgtgcgtgcatgggtgcgtaacacgtccaagcaagcgagctggcctgtgatttgcaaatggaagacgacgagatcagcgagctatatctgctgagccgcttcgcgccatcctcgtccaccactcatcagcagaggcttgcagagatgcccatggatcaggacctgtcctcggagctggacccggcgctggtcatgtcgacgtcgacgtcctcctcgtcgccaccggactcggcggcctcgccctcctcctccttctccctcccatcaccgccccgctacacctttgccgtcaacaacctctcgtgccccgcccctcgccgccgcgccgccaacctcctaccgtcgttcctgtcctactcctcctccgccgccgcttcgccgacccccgatgccgccggcgcggcgggcctgctcaagtccgtgtccttcaccgcgtccagctccaacatcctcgctgtcgtgggtcccagcggcgccggcaagtcgacgctgctccgcatcctgtccggccgcggcacgggctccgagatcgccaagcccggcacggtgtcgctcaacgggcacgcggtcacctcccgcgcgcagctgcggcggctctgcggcttcgtcacgcaggacgacaacctgctgccgctcctcacggtccgcgagaccatcctcttcgccgcccggttcaggctccgcgccgccgcgacagccgcggagcgcaacgagcgcgtggaggcgctcatgcaggagctcggcctgtccgacgtcgccgacagctacgtcggtggcggggacggctgcggcgggccgtccgccgcccgcggggtgtcgggaggcgagcggaagcgggtgtccatcgcggtggacatcgtgcacaacccaccggtgctgctgctggacgagcccacgtcggggctggacagccggtccgccctggacgtgctgcagctgctgcacgacgtgtcccgcgcgcggcgccaggtggtggtgctcagcatccaccagcccagctaccgcatgctgcactacatctcctcgctgctcctgctatcccgcggcgccgtcgcgcacgtcggcacgctcgcgtcgctggaggacgcactggcgcggttgggccacaagatccccatgcagctcaacccgctcgagctcgccatggaggtcaccggccagctcgaagaggacagcagctccaggatcgccgagcacaatgccgacgacgaggatgaggtgagcggccttgtcagtggacgacgcctcgacgtcccggaccaaggctactgcagccgcttcacggaggtggcaacgctgaccgtgcgctgctggcgcaccatgtaccgcacgcgggagctgttcgcggcgcgcgccgcgcaggccgtggtgggcggcctcggcctcggcagcgtctacttccgcctcagcccggacagccccgacggcgtggcgctccggctgggcctcttcgccttcaccctcagcttcctgctctcgtccaccgtggaggccctgcccatcctgctccacgagcgccgcgtgctgatgcgggaggcctccaggcgcgcgtaccgcctctcctcctacgtgctcgccaacgcgctcgtcttcgcgccgtgcctcctcgccgtgtcgctcctcttctcggcgcccctctactggctcgccgggctccgcgccacgccgctcgccgccttcgccttgttcgtccttgccgtctggctcatcatgctcatggccagctccctcgtgctcttcctcagcgccgtgtcgccggacttcgtgctcgggaacgccctcatctgcgtgttcctgggcgtcttcttcctcttctccggctactttatccccaaggacaacatcccgaggtactgggcgttcatgtactacgtgtccatgtacaggtacccgctggacctgctgctcatcaacgagtacgggggcagcgcaaggggcaggtgcgtggcgtggatgggaggaaaaaatgacgccatgcccggaggcgtgtgcttgaggaccggagccgacgtgctcagggacaggggtatcgacgaggggatgaggtgggtcaacgtcggagtcatgctgggcttcttcctgctctacaggatcttgtgctgggctgtgctcgtcaggagggcctccaagaccaccctgtgattgtgatcttttcagggagcagggttaggttgattccggcgaacagctctgtgtctcatcatgcatcattttctgtttggaggtgaagagagtcattggttgattaaattggatcatgtaattattccaatatcttatgttgtattcctttactttgaaactttttttcctatattttgggactggtgttaagtaagtaaaagtaatgttaatccgcggcgtgctgtggaatctgaatatatttttggtaatcaatcacagttatttcaataacaaattgctcaaatt

SEQ ID NO: 138634 - DNA, 2740 bp, Zea Mays
aatgcagataatggtatagatcaaatattttgattgaataatggtctcactataatactcgattttcgtgtaatgacatacatctggaaaaaaaaagcagccagctgagaggccgagaggcacatcccttcccagttcccacttcccacttcccacggcccgcgctgcctattcggatcccctttctctctttcggtcttcccccttccccccactttctccgacccacccggccgcggcagcgacggttctcgcctctcggtctcgggtcagcccctgctgcgacctaaactctagcggtgccaaatgggctacctctcctgccgcgcggactcgtccgtggcgacgtgccgctccatcacggccatctcgccgctcccactctcgcgccgctcggggtcggggtcggggggcggctcgtccaggcccccgctgccgccggcgcaggcggccatcgagcgcttcgactacgcggagctggaggcggccacgtcccacttcgcggacgcggcgctgctgggccggggcagccacggggccgtctacaaggccgtgctcccctcgggccgcgccgtcgccgtcaagcgcccctccccgcgccgccccgaggtggacaacgagatccgcatcctctcctccgtccggggcccgcggctcgtcaacctcctcggcttctctgaccccggccccgccccgcgcctgctcgtcgtcgagtacatgcccaacggcacgctctacgacctgctccactccaacccgcgcccgccgggctggccgcgccgcctgcgcctcgcgctccagacggccagggccctgcgcgcgctccacgacgccgacccgcccgtcatccaccgcgacgtcaagtccgccaacgtcctgctcgacgccaacctcggcgcgcgcctcggcgacttcggcctcgccctccgcgtgcccaaggccaccgccggcgccaatgccgccgccgccgccgcccccacgccgccgcccgccggcacgctcggctacctcgacccggcctacgtcacgcccgagagcctcagcaccaagacagacgtcttcagcttcgggatcctgctgctcgagatcatgagcggccgcaaggccatcgacgtccagcactcgccgccgtccgtcgtcgagtgggccgtcccgctcttacggaaaggcaaggtcgcctcgctgttcgacccgcgtgtggcgccgccacgagacccggtcacccgcaaggaccttgccgcgctggccgccagctgtgtgcgctcctgcagggagcggcgcccgtccatggccgacatcgtccagcgtctcgtgcttctcagcaaagccgtgtcggccaaggtgtggaacgggctcgccgacgggcttgccgtggtagggaacccttgtgcggttgttgatgttcagaagaccatctccaagcgaggtgctgccagccgcagggctgaatcagagagggagtcgacttcagcattggtgtttgacgacgatgaaaaggaggatgtagatgcagaggccttggaggaagatcaggtgccatccaacaagtcaccaccccgaccactgaagaacgggatagtgttttccgaggcaggggctcgggagaggagaaatctcttggacctgatggctcggatcgatggtgttgccggccaaagattcggcattaccagagcaagaacagtgcgtgctaatggtgagctcatcgaaaaggatgcagtgttgctcctaaggaggaaccagacggtaagagttgttggatcagaggcactgccgaagtctggaaggatttctcgctatgatgtgaagatcaaacacaaagcaggggaagagcaagaggagacagggaaagcccaagacaaagtagagaaaatccaagttaatgcaagcgggattcaagaaagttccaaggaaatattaggcaagacagataaattgttggatgcactggagccaaaccttgacaaagaagagaaggttcaagaaaaggaagagcaacacctcgatgaagtggataatgttcaagagaatgaaggcaaagtccaatgcccggcagagaaaatccaggaaggtggagaagtccaatgcccccggcagagaaaatccaggaaagtcgaggattctgagacaaagtagaaaagtccatttgaagagtgaggggagttttaaatccatacaatgtttttgaggttggcttaaccaactatcacctggcagcttacctggagcccacgagatacaaatctcattccccatgtatcatcatggtaactgggattgtaccagaaatgttccctggtcttgatgattggctgatacatccttgaattaaaacccaagcgatgtgatctgctatttcgaatgccagcaatgacaacaactcccccagctattgattgaatcttggttctcgggtgatgtccaatgcaatggcttgcttgcgatatctcctagcgtagctctgagatcgaaatcacaaagagctgtaagatcttcggattcaatttaagcagctagtgataacttcgctgcttcaaactgattcagatggagcttcaaaatgaccactagttgaggtagattgttccttgtagtattcttttgttgattacttttcctgcctgcataaaacgagaagcacaagtgtggaattgttttgtatgtatgtaggcatggtggtagctgcagcggatgttaacttttgtatatatctaagcggcctcttaacccctcatcatat

SEQ ID NO: 138635 - DNA, 667 bp, Zea Mays
atagatatgatgctgcactgcacatttgctatatctgaggctcctgcgcgcgccttggcccttggccaggtgtctgtcatgcgggcgatgccgcaggaagaagaagccgcggtggcgacgacgaccatggccgggggcaaggtggcggcgctgctggccacggcggccgcgctgctgctgctgctcccgctggcgctgccgccgctgccgccgccgcccacgcagctgttgttcgtccccgtggtcttgctgctcctcgtggcgtccctcgcgttctgccccgccgcgacctcctcgccgtcgccgatgcatgccgccgaccacgggtcgttcgggaccactggatcaccgcacctatgttgacgctgacgatgagaggtctcgtcgatcgacggtcggcttgcaatggcgcgtcggaatcaagcagttcgcagttcgcacacgcatgcatatgcctgacgacgatgccatggatcggagcgaggaaaaaaaatgtacagtacagggtaaacttgctagtagagtaattggattgcttaggcgcttatagcttagctgcggccttgtagcgtgagtgtgcgtaacagtgctctggttctttctttccattctcatcagctgattgatcagctgacgtacatcatgatttactcatccggttccctcc

SEQ ID NO: 138636 - DNA, 1599 bp, Zea Mays
atgccagatccagatcataggttcaccggcaccgaccaacgcggcgtgactgtagagtgtagaggtagcactactccacaagtccacacgcccacccggaagcctgaaactcgtctccagcgtttggcaatgtcgctccaccagcggccgcaccagaagccgccggccgcgggcgactctctcccagtttcctccccaaccgcctccaccgccgcatcacgcccgcaccccctcctcacactcccctacctcttctccctccttgcggttctcctgttcgttgcactcctcgtgccctggggcccagcagcgcgcccgccctcgtcctcgtcctcgtggcgttcctacaccctccaggatgccgccgcctcggctgccgcagcgggaaacggcaccgtgctcctcgctgctgtctccggaccgtacctccccttcctctccaattggctcatcagcgtccgtcgcgccggccgcgcggatcaggtgctcgtcatcgccgaggactacgagaccctcgaccgcatcaatgccgcctggccaggacacgccgtcctcgtgccccccgcgcccgatgcccagaccgcccacaaattcggatctcaggggttcttcaacttcacctcgcgccgtccacggcacctgctgcagatccttgagctcgggtacagcgtcatgtacaacgacgtcgacatggtgtggcttgccgacccgttcgcttacatcgtcgagaatcacgacgtgtactttatggacgatatggctcctgtgaaaccacttgatcattcacatgaattgccaccacccgggaagaaagggcgtacatatatttgcagctgcatgctattcctcaggcccactgaaggtgccaagctcctgttaaggaagtggatcgaggagcttaaggagcagccctggtcgaagcaaaggaagtcaaatgatcagccagcattcaactgggctttgaacaagactgccgggcaggttgatgtttacctcctgcctcagtctgcatttccaaccggaggcctatatttcaagaataaaaaatgggtcaaggagacaaagggcaagcatgtcattatacataataactacatcactgggtttgagaagaagataaagcggttccgggatcatgggttgtggttggtagatgagcacagcgatgagtcaccgcttggcagaatctgagcgaccaaggctgaaacacatctcttcttgctgcagcatcacaattttgtaattggtatttgactattgaaggcagtatccatctaaaccaaacggtgtatgcagcagtcaaaaatcaaatccattcgcagaagatattacttgccaacatcttttttttggctgtatgtcaagcgcttgtagagtatcctttaccatgtggccatgatgattgttttttattgtatttgttctttactgaaaatggtgtatttgagagcagttgagatcttaggatgtggcgaaacagagccttagtacattggctgatgattcacttattgtatagcataaagtttgatagcttgcatcaccattgctgaaagaaaattgtacttttttgcctctatatcaatgattcgtgaaata

SEQ ID NO: 138637 - DNA, 1168 bp, Zea Mays
ctttctcttgcgctgtcccactatcgatgagcttggctgcttctccaaggttggctgcgcgctcaaaccgtcttcaacagttgcctcttggaccacctctcctaatattgtagttcgtttaggggatacagtcctcttcgctggcgatttcttctctcacactacaaggaggggaactctacgagctcgcgctcgttgcctgccatcccacttcctctctccacctcgtctttggaagtctccaaagcgattgtgcagtctggcaggacaacctggaggattcttcgccgaacgagttttccgagcgcggagtctccgccactgcgccacaccaccgcgtcgcagcaatgccgccgccgcgacgaaagcggaaggcggcctcgtacgagccacggcggcgctcgccatcccgcctggagtttcgtgccacagtggacggcgcgtggtacgaggcacgcgtggctgtgcagtgcggcgcgctgcgggtcatgtacgaggagttcctcgaggagcaggacgagtggtacgaccccgccgggctcgcgacttcctccgcgtgggacgtagtcaagctccgcgccaggtttcgtgtgccgtccacacccctggaagacacccagtgccgcgatctccaagccggcgcacgactctgcgtctcctgctcgctcgacggcggtgacctcaagttctacgacgccatcctcgattccgtgtatccagcggctcacgagatcgttgacggcatggagcggtgcgcctgccgtttcgcggtgcagtggtcggatggaccgcgcgctgggagcatggaggaggtcggcattgagcgggtttgctgcgtgcagtcctcgccggtgcaagacccagtgcttatggagttcctggacggcgtgaccaagctggccggggatgccaacgtggaaacagtgtctcaggagatccacgtcgcgccggtagtcaaaggcggcgtccctgcaaacgccctgcaaacgcgtcaccgtgatttcaacggaaaatttggtccagcaagtaggcaagcggtttgatgtgcgtggttctgaggttggctatttggtgcctctgattttgtgttgctttaacaatctgatcatgcacataaatcttctcttccaaattctctatccacttggtttgagttcggccgttaaaa

SEQ ID NO: 138638 - DNA, 1459 bp, Zea Mays
ctcctgcgtggatcacgttgtctcctctttctcttgcgctgtcccactatcgatgagcttggctgcttctccaaggttggctgcgcgctcaaaccgtcttcaacagttgcctcttggaccacctctcctaatattgtagttcgtttaggggatacagtcctcttcgctggcgatttcttctctcacactacaaggaggggaactctacgagctcgcgctcgttgcctgccatcccacttcctctctccacctcgtctttggaagtctccaaagcgattgtgcagtctggcaggacaacctggaggattcttcgccgaacgagttttccgagcgcggaggtcagtaccacgttcatcatcgtcaccgccgttcttcactttcctccggtgattcgttctcactcgtcgacggaagggtgcgcatcgatccacagcgtgacctctcctacccgatctggttctttggatctcaaactactcagtctccgccactgcgccacaccaccgcgtcgcagcaatgccgccgccgcgacgaaagcggaaggcggcctcgtacgagccacggcggcgctcgccatcccgcctggagtttcgtgccacagtggacggcgcgtggtacgaggcacgcgtggctgtgcagtgcggcgcgctgcgggtcatgtacgaggagttcctcgaggagcaggacgagtggtacgaccccgccgggctcgcgacttcctccgcgtgggacgtagtcaagctccgcgccaggtttcgtgtgccgtccacacccctggaagacacccagtgccgcgatctccaagccggcgcacgactctgcgtctcctgctcgctcgacggcggtgacctcaagttctacgacgccatcctcgattccgtgtgttccttctatttcatccttgcacataatacgcagatgcaaatgacaacgtcgtttgttttatttcttgtttggcgtttgagatctgagaccgtttgttttatttcttgtttggcgtttgagatctgagaccgtgagagctggacacgctgatgcaggtgtatccagcggctcacgagatcgttgacggcatggagcggtgcgcctgccgtttcgcggtgcagtggtcggatggaccgcgcgctgggagcatggaggaggtcggcattgagcgggtttgctgcgtgcagtcctcgccggtgcaagacccagtgcttatggagttcctggacggcgtgaccaagctggccggggatgccaacgtggaaacagtgtctcaggagatccacgtcgcgccggtagtcaaaggcggcgtccctgcaaacgccctgcaaacgcgtcaccgtgatttcaacggaaaatttggtccagcaagtaggcaagcggtttgatgtgcgtggttctgaggttggctatttggtgcctctgattttgtgttgctttaacaatctgatcatgcacataaatcttctcttcc

SEQ ID NO: 138639 - DNA, 1943 bp, Zea Mays
gagtctagagatttgttgtaggacgaaacgagttctttgtcctgggcctttgtcactcttctctgtgtaacgacttcctccctttcctgccgcaccacgcaatcaccggggcggaggcggctgccggcgagcacttgggcgtctccggccaccgcctgcctcgttgtggctccccgttgactcccgcgatttgttacccgctggcgctgccgcacacagctcaaaaggagtagcagcgcccctggttgccggttggagcgtcaaggatgagcgggaggaagaatgcgggcaaggtttccccctggttgctcgtcctcatctgtttagggtgcttctttgtgacctacaacctcctgacgatgcccagccggggacgggatgggccgcgcaagttcctcggcggcggcggggatcgccactcaactgcctcgttggggtcaggctctgattcggaccccgcgaagcggttccacgtcgcgcttacggcgacggacgcactgtacagtcagtggcagtcgcggataatgcactactggtataaggagatgagggaccgacctggttccgacatgggtggcttcactaggatccttcactcgggcaagcctgatggattgatggatgagatacccaccatggtggttgatccccttcctgaaggcaaggatcagggatatattgtcttaaataggccttgggcttttgtccagtggatccagaaagcaaagatcgtagaagagtatatattaatggcagagccagatcatgtctttgtgaagcctttgccaaacttatctcatggtgatgagccagcggcatttccgtttttctacatcaaaccgactgagaatgagaagatattgaggaagtttttcccagaagaaaaagggcctatttcaaatattgatcctattggcaactctccggttataatcaagaaggctcagcttgagaagattgctccaacctggatgaatgtttcattaaaaatgaaagaggatcaggagacagacaaagcattcggatgggtcttggaaatgtacgcatacgctgttgctagtgcactgcacggtgtgcaccatagtctccataaagattttatgattcagcctccttgggacctgaaaacggacaacacattcatcatccattatacgtatggatgcgattattcaatgaagggtcagcttacttatgggaaaatcggtgaatggcgttttgacaaaagatcttaccttcaatctccaccaccaagaaatctttcactgccccctccaggagttcctgaaagtgtggtcacccttgtgaagatggtcaatgaggccaccgcaaacattccggggtgggaggacgatagatgattgatggtctggctgagttgtagtttattccagcacccagctggtatggcttttgttcaaaaacatggaagaatatcattggtcaataaaagaaaagcatttgattaatatcaatatttgaagtgcaggactgtggccacatttctatagtttaacataggttagtgtccgggaagaaaaaagatatattaacgttgatctaggagtttgatcattttttgtattgtaagacagaaatatagggttttggttactctggtccatgttgctgtgttgtaaagcagtgatgtagtttagattcccccaagccatgccttgagagatttgtttagtagtatcgtcttgggaaaacttctgccgggtattgacaacatcctgctgagttctgactgctgagtactatgactggaaaccacctaagccttcagaattaatccaaatatacttggacttgcactttcctacatataggtgtaatatggtttgctttgaaacctatgttttaatttgttgtataacattatttttgcaatgctcataatacaaatgttgtctcaaggcgagcctttgcgcacttggagc

SEQ ID NO: 138640 - DNA, 2100 bp, Zea Mays
aaataagaattgtttaagctgttttttatgagtctagagatttgttgtaggacgaaacgagttctttgtcctgggcctttgtcactcttctctgtgtaacgacttcctccctttcctgccgcaccacgcaatcaccggggcggaggcggctgccggcgagcacttgggcgtctccggccaccgcctgcctcgttgtggttagtttccctcaccttccccttacctcactgccatattccttctcccgatccgtcagtttcgccagctgaagacgatcccaatctcagatccaactaggaactcacccagcgctatctcccggcaggctccccgttgactcccgcgatttgttacccgctggcgctgccgcacacagctcaaaaggagtagcagcgcccctggttgccggttggagcgtcaaggatgagcgggaggaagaatgcgggcaaggtttccccctggttgctcgtcctcatctgtttagggtgcttctttgtgacctacaacctcctgacgatgcccagccggggacgggatgggccgcgcaagttcctcggcggcggcggggatcgccactcaactgcctcgttggggtcaggctctgattcggaccccgcgaagcggttccacgtcgcgcttacggcgacggacgcactgtacagtcagtggcagtcgcggataatgcactactggtataaggagatgagggaccgacctggttccgacatgggtggcttcactaggatccttcactcgggcaagcctgatggattgatggatgagatacccaccatggtggttgatccccttcctgaaggcaaggatcagggatatattgtcttaaataggccttgggcttttgtccagtggatccagaaagcaaagatcgtagaagagtatatattaatggcagagccagatcatgtctttgtgaagcctttgccaaacttatctcatggtgatgagccagcggcatttccgtttttctacatcaaaccgactgagaatgagaagatattgaggaagtttttcccagaagaaaaagggcctatttcaaatattgatcctattggcaactctccggttataatcaagaaggctcagcttgagaagattgctccaacctggatgaatgtttcattaaaaatgaaagaggatcaggagacagacaaagcattcggatgggtcttggaaatgtacgcatacgctgttgctagtgcactgcacggtgtgcaccatagtctccataaagattttatgattcagcctccttgggacctgaaaacggacaacacattcatcatccattatacgtatggatgcgattattcaatgaagggtcagcttacttatgggaaaatcggtgaatggcgttttgacaaaagatcttaccttcaatctccaccaccaagaaatctttcactgccccctccaggagttcctgaaagtgtggtcacccttgtgaagatggtcaatgaggccaccgcaaacattccggggtgggaggacgatagatgattgatggtctggctgagttgtagtttattccagcacccagctggtatggcttttgttcaaaaacatggaagaatatcattggtcaataaaagaaaagcatttgattaatatcaatatttgaagtgcaggactgtggccacatttctatagtttaacataggttagtgtccgggaagaaaaaagatatattaacgttgatctaggagtttgatcattttttgtattgtaagacagaaatatagggttttggttactctggtccatgttgctgtgttgtaaagcagtgatgtagtttagattcccccaagccatgccttgagagatttgtttagtagtatcgtcttgggaaaacttctgccgggtattgacaacatcctgctgagttctgactgctgagtactatgactggaaaccacctaagccttcagaattaatccaaatatacttggacttgcactttcctacatataggtgtaatatggtttgctttgaaacctatgttttaatttgttgtataacattatttttgcaatgctcataatacaaatgttgtctcaaggcgagcctttgcgcacttggagc

SEQ ID NO: 138641 - DNA, 2010 bp, Zea Mays
aaataagaattgtttaagctgttttttatgagtctagagatttgttgtaggacgaaacgagttctttgtcctgggcctttgtcactcttctctgtgtaacgacttcctccctttcctgccgcaccacgcaatcaccggggcggaggcggctgccggcgagcacttgggcgtctccggccaccgcctgcctcgttgtgatccaactaggaactcacccagcgctatctcccggcaggctccccgttgactcccgcgatttgttacccgctggcgctgccgcacacagctcaaaaggagtagcagcgcccctggttgccggttggagcgtcaaggatgagcgggaggaagaatgcgggcaaggtttccccctggttgctcgtcctcatctgtttagggtgcttctttgtgacctacaacctcctgacgatgcccagccggggacgggatgggccgcgcaagttcctcggcggcggcggggatcgccactcaactgcctcgttggggtcaggctctgattcggaccccgcgaagcggttccacgtcgcgcttacggcgacggacgcactgtacagtcagtggcagtcgcggataatgcactactggtataaggagatgagggaccgacctggttccgacatgggtggcttcactaggatccttcactcgggcaagcctgatggattgatggatgagatacccaccatggtggttgatccccttcctgaaggcaaggatcagggatatattgtcttaaataggccttgggcttttgtccagtggatccagaaagcaaagatcgtagaagagtatatattaatggcagagccagatcatgtctttgtgaagcctttgccaaacttatctcatggtgatgagccagcggcatttccgtttttctacatcaaaccgactgagaatgagaagatattgaggaagtttttcccagaagaaaaagggcctatttcaaatattgatcctattggcaactctccggttataatcaagaaggctcagcttgagaagattgctccaacctggatgaatgtttcattaaaaatgaaagaggatcaggagacagacaaagcattcggatgggtcttggaaatgtacgcatacgctgttgctagtgcactgcacggtgtgcaccatagtctccataaagattttatgattcagcctccttgggacctgaaaacggacaacacattcatcatccattatacgtatggatgcgattattcaatgaagggtcagcttacttatgggaaaatcggtgaatggcgttttgacaaaagatcttaccttcaatctccaccaccaagaaatctttcactgccccctccaggagttcctgaaagtgtggtcacccttgtgaagatggtcaatgaggccaccgcaaacattccggggtgggaggacgatagatgattgatggtctggctgagttgtagtttattccagcacccagctggtatggcttttgttcaaaaacatggaagaatatcattggtcaataaaagaaaagcatttgattaatatcaatatttgaagtgcaggactgtggccacatttctatagtttaacataggttagtgtccgggaagaaaaaagatatattaacgttgatctaggagtttgatcattttttgtattgtaagacagaaatatagggttttggttactctggtccatgttgctgtgttgtaaagcagtgatgtagtttagattcccccaagccatgccttgagagatttgtttagtagtatcgtcttgggaaaacttctgccgggtattgacaacatcctgctgagttctgactgctgagtactatgactggaaaccacctaagccttcagaattaatccaaatatacttggacttgcactttcctacatataggtgtaatatggtttgctttgaaacctatgttttaatttgttgtataacattatttttgcaatgctcataatacaaatgttgtctcaaggcgagcctttgcgcacttggagc

SEQ ID NO: 138642 - DNA, 1806 bp, Zea Mays
aaataagaattgtttaagctgttttttatgagtctagagatttgttgtaggacgaaacgagttctttgtcctgggcctttgtcactcttctctgtgtaacgacttcctccctttcctgccgcaccacgcaatcaccggggcggaggcggctgccggcgagcacttgggcgtctccggccaccgcctgcctcgttgtgatccaactaggaactcacccagcgctatctcccggcaggctccccgttgactcccgcgatttgttacccgctggcgctgccgcacacagctcaaaaggagtagcagcgcccctggttgccggttggagcgtcaaggatgagcgggaggaagaatgcgggcaaggtttccccctggttgctcgtcctcatctgtttagggtgcttctttgtgacctacaacctcctgacgatgcccagccggggacgggatgggccgcgcaagttcctcggcggcggcggggatcgccactcaactgcctcgttggggtcaggctctgattcggaccccgcgaagcggttccacgtcgcgcttacggcgacggacgcactgtacagtcagtggcagtcgcggataatgcactactggtataaggagatgagggaccgacctggttccgacatgggtggcttcactaggatccttcactcgggcaagcctgatggattgatggatgagatacccaccatggtggttgatccccttcctgaaggcaaggatcagggatatattgtcttaaataggccttgggcttttgtccagtggatccagaaagcaaagatcgtagaagagtatatattaatggcagagccagatcatgtctttgtgaagcctttgccaaacttatctcatggtgatgagccagcggcatttccgtttttctacatcaaaccgactgagaatgagaagatattgaggaagtttttcccagaagaaaaagggcctatttcaaatattgatcctattggcaactctccggttataatcaagaaggctcagcttgagaagattgctccaacctggatgaatgtttcattaaaaatgaaagaggatcaggagacagacaaagcattcggatgggtcttggaaatgtacgcatacgctgttgctagtgcactgcacggtgtgcaccatagtctccataaagattttatgattcagcctccttgggacctgaaaacggacaacacattcatcatccattatacgtatggatgcgattattcaatgaagggtcagcttacttatgggaaaatcggtgaatggcgttttgacaaaagatcttaccttcaatctccaccaccaagaaatctttcactgccccctccaggagttcctgaaagtgtggtcacccttgtgaagatggtcaatgaggccaccgcaaacattccggggtgggaggacgatagatgattgatggtctggctgagttgtagtttattccagcacccagctggactgtggccacatttctatagtttaacataggttagtgtccgggaagaaaaaagatatattaacgttgatctaggagtttgatcattttttgtattgtaagacagaaatatagggttttggttactctggtccatgttgctgtgttgtaaagcagtgatgtagtttagattcccccaagccatgccttgagagatttgtttagtagtatcgtcttgggaaaacttctgccgggtattgacaacatcctgctgagttctgactgctgagtactatgactggaaaccacctaagccttcagaattaatccaaatatacttggacttgcactttcct

SEQ ID NO: 138643 - DNA, 1382 bp, Zea Mays
cctgtcttctcctccctttgccggcgtagcttcttcctccctgtcgagcgactcttgctcccgcgcccctgctgctcgtttgtgcttgccgcgtggtctcgtgctcctgcgcgcggcttcagctcgccggatctccatgcctcgagctcgcccccatggcgttttcccctgctggctcgccggctccgtgctccctgctcgccgcactccgggtcgcctgccaacagttcagctcgtgcccagctttctcctccagccgcgccctcccctgcaagctcaccacacccctgattccagccatggcgcgcccatctccctgcagttccctcctcacgtttcctgctcgcgccgccgtcgagcttcctgatgtgcgcgcccgaccggagttccctgtccactcggcgtccaactccttggttgctcgccatggaccttcctgcgcgcgcgctcctctactcttacgcgctcccaattttccatgtcgctcggccacacaaagccttcatcggccatggggcctcgtcgtcgttgtccctgcttccctgcagctcggtcttcgtttctctgcatcgtcgtacacggcaagtcgtcgctgctccccaccgtgccgagccgctcacgttcctgctcccttcgatcactgtcgacccctgcatgcgtgctcctagtcgccccataatgcgctcgcttcgaccaccatcgtcggtcgctgttcgcctgttcccagcagctttcaccttcgtcggacagtcaagttttttgagcttcgcccaagcagtaactttgtcgactccatcgctcagaagacaacccctcggatccaatagtgtagcagcaaggctcgtgcaacacttactcagtgtctgataaaaagcccaaacgaatcatctccgtcgaatggagatcgtcgtgctgacgcgccgatgtcgtcgatcgctatcctcgtctatgccaaaaatccgagaagattagacgcggaaggaaacaaattagtatgcgacgggaaaattctcgatgtggaagaaaaggtgtgattcgatgcggcactcaccatgtattcgggggaaaagctagagctgaaaggcgtcgtcaatttcatgatttcaagccggatttaggtaagctgattcgctactactattattttgttttaatggatggagtgataggtatgtatgtcgcgacgattatcccacttgtagcccgggcacgtatttatttgatgcttgttggaatacggggctacatgtagcgggataattgtgtccacgatggtgaagtcgtcgtgccgcatagctaagttcaggttaggcgagaagaattaaatcggtgtttcgtatccaatgagtagtcgaattaataatataacagataggttaaat

SEQ ID NO: 138644 - DNA, 209 bp, Zea Mays
ctaggatcaaaagttctagttgtcaatctacttgtttaattgtgttaggaacctcattttattcactcttatatgtctaatctacctcaagaccacttcgtttggattgaaaatacttatgtattgttgcttacacatgaagcatttaattgatctgttatatatatgaaccttgtgtcttgtatatatatgtgctcaaattgagtgtt

SEQ ID NO: 138645 - DNA, 843 bp, Zea Mays
gatagagtaatcggacggctaggtagtaccacatgccttctcgtcacaaatcgactagggcgtctgagactctgagacacaggaacagaaccctctctgcgccgccgccgccgttgcagtcgcggccacatcgtcgcctatccatccccaccgctcccactgccacgattcacaagaggtgtcgagatgtctcagaacaacccctcccagctcctcccctcagagctgatcgatcggtgcatcgggtccaagatctgggtgatcatgaagggggacaaggagctcgttggcaccctctgcggctttgatgtctacgtcaatatggtgctggaggacgtcaccgagtatgaatacactgctgaagggcgccgcattacaaaacttgaccagatcctcctaaacggcaacaacatagccattttggttcctggtggttcaccacccgatgtgtaatgagcttttgctccccagagtaaccattcgaggcgaaggcatctccatggactttgcacgttattttgggtaatcattggatgtttcgtcatctcggatgtgttcatcctgttcgtgattataccaagtttattgttaactctctttcagcatggaagctgccttctgtatcgaacttactgacctgaagtagtgtgcttgcatagctgtggttatatgattggctatgctaattctgtgtatgtctgctcgccatcattgtactgcaatgtgaattccaggtaatggattatgcagtaacctgataactggaagtgcatcggttgcatttggcgttcgcttgtcagcattactgatttaagaaatcccatttctattccacctccgtcc

SEQ ID NO: 138646 - DNA, 89 bp, Zea Mays
aacacaagcaaattgaactgtcgatataaaacacatgtcacaggcaaaccattacataaaaaacgatgtactaaaactagttacataaa

SEQ ID NO: 138647 - DNA, 1559 bp, Zea Mays
aatgaagaggttcgtgcacgcactgtgttcaacgcaattccaattttctatccgagtgatgagtgactgtgcacatacatcgtactacaggtgggacccgcttactagatcagattctaacatcctgttcgtggagtcgtctcggcggcggcggaacaagccgggaacctaccgcaaagggcgccaccgatgctaaagccacagacgtcgtggacagcttccctccctctccttctcatccgccgctgctcgagaaccgcggccagtccatctcctgccgggtctgcaagcggcggatgagcacgctggcgcatcccaggtttgcccctctccctacggagcaaactgaatcccaaacagatggcggggctgcacggtaccagttccggctggtctcttacaacatcttggcccaggtttatgttaagagtacgctttttcctcattccccatctgcgtgcctcaagtggaaatctcgatcgggagctattcttacagaactaaagagctttgatgctgacttcatgtgcatacaggagttggatgaatatgataccttctataagaaaaacatggaaaactctggatattcaagtatttacattcagcgatctggagacaaacgagatggctgtggtatattctataaacctaaaagtgcagaactggtgcagaaagaagtaatactgtacaatgatttagtagaaaaatatgttcctagtgataatgtaaatagtgctctggaaaataattcttcagcagaagaagacaagaatgcaaagccagataatagcaagcgtggagatccaaatgatccacgcgttagattgaagcgggactgtgttggtttactcgcggctttcaagcttagtgatccttgtgatcaaattttgattgtggcaaacacacatatttattgggacccacaatggatcgatgtaaagttggctcaggcaaaatatcttctttcgagagtatctcagtttgagcaactcatctcaaataaatataattgtaaaccttcagtgatcattgctggtgacttcaattcgacacctggtgacaaggtatacaattaccttttatctgccaacctaggatctacggacgaagctccaatcaagttacgcagcctttatgctgcgaatggaggggagccagagtacacaaactacactcctggttttaccggaacactggactacatattcttgtcggatggtagttcgataaaacctactagcctacttcgtttgccgcgaggggattctgaggatgtgaaaggaggcttgcccaactttcgacatcctagcgatcatctcccaattggtgctgattttctggtagtcaacatctagtgcaggtgttgattgctttttcaacagaaatagtaaatgccgttgaataatttgtgttgttggctcaagtttcagagtttaaatgtaatatctcaaggaacaagcgtttcttttcttgtagagcaattaacaatgcgaattttattcatcaattttaatataataggagtattgtctatgggcattgaagggtttgttctt

SEQ ID NO: 138648 - DNA, 1588 bp, Zea Mays
ttttaatgaagaggttcgtgcacgcactgtgttcaacgcaattccaattttctatccgagtgatgagtgactgtgcacatacatcgtactacaggtgggacccgcttactagatcagattctaacatcctgttcgtggagtcgtctcggcggcggcggaacaagccgggaacctaccgcaaagggcgccaccgatgctaaagccacagacgtcgtggacagcttccctccctctccttctcatccgccgctgctcgagaaccgcggccagtccatctcctgccggtgaccggccgctctcctttgtcccggtctgcaagcggcggatgagcacgctggcgcatcccaggtttgcccctctccctacggagcaaactgaatcccaaacagatggcggggctgcacggtaccagttccggctggtctcttacaacatcttggcccaggtttatgttaagagtacgctttttcctcattccccatctgcgtgcctcaagtggaaatctcgatcgggagctattcttacagaactaaagagctttgatgctgacttcatgtgcatacaggagttggatgaatatgataccttctataagaaaaacatggaaaactctggatattcaagtatttacattcagcgatctggagacaaacgagatggctgtggtatattctataaacctaaaagtgcagaactggtgcagaaagaagtaatactgtacaatgatttagtagaaaaatatgttcctagtgataatgtaaatagtgctctggaaaataattcttcagcagaagaagacaagaatgcaaagccagataatagcaagcgtggagatccaaatgatccacgcgttagattgaagcgggactgtgttggtttactcgcggctttcaagcttagtgatccttgtgatcaaattttgattgtggcaaacacacatatttattgggacccacaatggatcgatgtaaagttggctcaggcaaaatatcttctttcgagagtatctcagtttgagcaactcatctcaaataaatataattgtaaaccttcagtgatcattgctggtgacttcaattcgacacctggtgacaaggtatacaattaccttttatctgccaacctaggatctacggacgaagctccaatcaagttacgcagcctttatgctgcgaatggaggggagccagagtacacaaactacactcctggttttaccggaacactggactacatattcttgtcggatggtagttcgataaaacctactagcctacttcgtttgccgcgaggggattctgaggatgtgaaaggaggcttgcccaactttcgacatcctagcgatcatctcccaattggtgctgattttctggtagtcaacatctagtgcaggtgttgattgctttttcaacagaaatagtaaatgccgttgaataatttgtgttgttggctcaagtttcagagtttaaatgtaatatctcaaggaacaagcgtttcttttcttgtagagcaattaacaatgcgaattttattcatcaattttaatataataggagtattgtctatgggcattgaagggtttgttctt

SEQ ID NO: 138649 - DNA, 1415 bp, Zea Mays
gggcattcccacccctaaccctgtcccttgtttcctctcttgcactcttcgttctaacgcttcactggatacgcaaaattagggtctgcaagcggcggatgagcacgctggcgcatcccaggtttgcccctctccctacggagcaaactgaatcccaaacagatggcggggctgcacggtaccagttccggctggtctcttacaacatcttggcccaggtttatgttaagagtacgctttttcctcattccccatctgcgtgcctcaagtggaaatctcgatcgggagctattcttacagaactaaagagctttgatgctgacttcatgtgcatacaggagttggatgaatatgataccttctataagaaaaacatggaaaactctggatattcaagtatttacattcagcgatctggagacaaacgagatggctgtggtatattctataaacctaaaagtgcagaactggtgcagaaagaagtaatactgtacaatgatttagtagaaaaatatgttcctagtgataatgtaaatagtgctctggaaaataattcttcagcagaagaagacaagaatgcaaagccagataatagcaagcgtggagatccaaatgatccacgcgttagattgaagcgggactgtgttggtttactcgcggctttcaagcttagtgatccttgtgatcaaattttgattgtggcaaacacacatatttattgggacccacaatggatcgatgtaaagttggctcaggcaaaatatcttctttcgagagtatctcagtttgagcaactcatctcaaataaatataattgtaaaccttcagtgatcattgctggtgacttcaattcgacacctggtgacaaggtgaaagagccacaacttcatcgcaaaaagggattaagcacgcagtcaggcaataaaaaggagattaatgatcctgatcacatattcaagggctcatggcatattgagcctagaccacaacctacttgcaatatagtaagggctttgttcaacatatttcctcttcattgtcctatcagatctaacgatatatctcaattgctggagctcagtttggaggagaactattcagaactatgctttctattgatggaggtatacaattaccttttatctgccaacctaggatctacggacgaagctccaatcaagttacgcagcctttatgctgcgaatggaggggagccagagtacacaaactacactcctggttttaccggaacactggactacatattcttgtcggatggtagttcgataaaacctactagcctacttcgtttgccgcgaggggattctgaggatgtgaaaggaggcttgcccaactttcgacatcctagcgatcatctcccaattggtgctgattttctggtagtcaacatctag

SEQ ID NO: 138650 - DNA, 1051 bp, Zea Mays
ttttaatgaagaggttcgtgcacgcactgtgttcaacgcaattccaattttctatccgagtgatgagtgactgtgcacatacatcgtactacaggtgggacccgcttactagatcagattctaacatcctgttcgtggagtcgtctcggcggcggcggaacaagccgggaacctaccgcaaagggcgccaccgatgctaaagccacagacgtcgtggacagcttccctccctctccttctcatccgccgctgctcgagaaccgcggccagtccatctcctgccggtgaccggccgctctcctttgtcccggtctgcaagcggcggatgagcacgctggcgcatcccaggtttgcccctctccctacggagcaaactgaatcccaaacagatggcggggctgcacggtaccagttccggctggtctcttacaacatcttggcccaggtttatgttaagagtacgctttttcctcattccccatctgcgtgcctcaagtggaaatctcgatcgggagctattcttacagaactaaagagctttgatgctgacttcatgtgcatacaggagttggatgaatatgataccttctataagaaaaacatggaaaactctggatattcaagtatttacattcagcgatctggagacaaacgagatggctgtggtatattctataaacctaaaagtgcagaactggtgcagaaagaagtaatactgtacaatgatttagtagaaaaatatgttcctagtgataatgtaaatagtgctctggaaaataattcttcagcagaagaagacaagaatgcaaagccagataatagcaagcgtggagatccaaatgatccacgcgttagattgaagcgggactgtgttggtttactcgcggctttcaagcttagtgatccttgtgatcaaattttgattgtggcaaacacacatatttattggcaagtgaaacagaattttactctctttggaatttgctttcacaattccctgcacatttttgttgtttttagtctcagctacattgtttggcagttgtccagc

SEQ ID NO: 138651 - DNA, 632 bp, Zea Mays
gttcgtgcacgcactgtgttcaacgcaattccaattttctatccgagtgatgagtgactgtgcacatacatcgtactacaggtgggacccgcttactagatcagattctaacatcctgttcgtggagtcgtctcggcggcggcggaacaagccgggaacctaccgcaaagggcgccaccgatgctaaagccacagacgtcgtggacagcttccctccctctccttctcatccgccgctgctcgagaaccgcggccagtccatctcctgccggtgaccggccgctctcctttgtcccggtctgcaagcggcggatgagcacgctggcgcatcccaggtttgcccctctccctacggagcaaactgaatcccaaacagatggcggggctgcacggtaccagttccggctggtctcttacaacatcttggcccaggtttatgttaagagtacgctttttcctcattccccatctgcgtgcctcaagtaagcccttgattgatcagttgtttgtgttgtgtattggattttctctctcgaaaacgctgtttattggactttccttatagtcatggtacttaaggttctaatgctgtatagtcatggtgtctgagaaagtaagaaatctttggaatt

SEQ ID NO: 138652 - DNA, 975 bp, Zea Mays
gcatcggaaaacacacttcatgacatagtttctcgatacagttacatggatctttggccatgctcatcaaaagaattggattatctagcgagacaagagtggcttgcgaaaaacattgttaagaaggttgagaaaccagctatgttaaatagcggtagcatgctagacaaaggtgctgcaggatttagtgcgagtgcgaggttattaccacaatctgccaaagttgttcgtcctgagacttctcaaatggttatttatgatccaagacagatgaaaggcccagagtttgcagcaactagcagtgggtacacgaaggaggttgaagccacgctcaaagtgctatcgccgtcgatggtgtcctttattaagaatttgcctgctattgaaggaccatcgccggatatcgatgtggtgctcagcgtgctgctgcagagcacattgccagttgcacagagtgctgggaaagcaggtggcgtgagtgagctctcaggcgttggaaaaacgggactgaaccagaatggatctgtccatagacctccaagggagagaaggaaggacgtggagaggcaaggggcgcaggaggaagaggatgcgtcggcggtgcagagcagggcagctgtgccacgagacatcttcaggcttcggcagattcagaggagccgtggcctgggtgtgggtggtgccgccgtttcgcagtctgggtcctcggcattttctttctcgggcggtggaagcgccttctctggggaccactcagctagcacagattagcctactcaccagacatgttcaacagctcagctcaaagctcaactgcgagtagtgagctcaaaggctacctccagcagatttatatcacattccttttctcatcccctatttcaaacatcactttgcaaacaatatcatctatagtttcatgtcccctattttacactacatgctggagacagtctaaggacataatgacatact

SEQ ID NO: 138653 - DNA, 578 bp, Zea Mays
tttttttggttatgtctagagcagcattcctggcttaatttgatccatgaaattctcttttagattctgaagtacttaagtatgcctttgctgaaatggaagagtccagaggggcgatacagactgctaagacagtatacgaatctcttctaggtgaaaatgctagtgagacctcacttgcaaatattcagtttattcgatttctaaggagaactgaaggcactgaagcagcccgtaagtactttttggatgctcggaagtcaccaagctgcacttatcatttgtatgttgcttatgctacaatggcattctgcgttgacaaggatgcaaaggtggcacaaagtgtttttgaagcaggtttaaagaggtttatgcatgagccaggatatatccttgaatacacagacttcttgtgtcgtttaaatgacgatagaaatgtacgtgctttgtttgagagggcactgagcttacttcctcccgaggaatccacagaggtatggagacgatttgcacaatttgaacagaactatggggatttatcaagcatgcttaaggttgaacaaagaaggaaagaggct

SEQ ID NO: 138654 - DNA, 1321 bp, Zea Mays
tgcagaattccggaggaggcgccgcccatggcgatggcggcgacatctacaatgtccgggccgccgagatcctcgccaacgaggccctcctgctccccatcaatgaggccgccccaatctacgagaatctgctcgccactttccccacggccgccaaatactggaagcagtatgtcgaagcctacatggccaccaacaacgatgaagccgccaagcagattttcagcagatgcctgctcaactgccttcacattagtctatggcgctgttacatcaactttatcaggagaattaacgataaaaggggctctgagggtcttgatgagacgaagaaggcttttgatttcatgctcaactacgttgggaatgatgcagcttctggccctgtttggatggagtatattaatttcctcaagtccatgccggttgtgacgccccatgaagagtcgcatcgcatgactactgttcgtaaagtgtaccagaaggcaattttagttccaactaatcatgtagagcagttgtggaaggattacgagaacttcgaaaattctgttagccgcaccttggcaaaaggcttgttatctgaataccaaccaaagtttaacagtgctaaggctgtatatagagagcgaaaaaagtacattgatgatattgattggaatgtactggccaccccccctacaggctcgtacaaggaagagcaacagtgtatggcatggaaaagactcttggtatttgaaaaggggaaccctcaaagaattgatgctacaacagctaataggcgtatcacctttacttatgagcaaattctgaagtacttaagtatgcctttgctgaaatggaagagtccagaggggcgatacagactgctaagacagtatacgaatctcttctaggtgaaaatgctagtgagacctcacttgcaaatattcagtttattcgatttctaaggagaactgaaggcactgaagcagcccgtaagtactttttggatgctcggaagtcaccaagctgcacttatcatttgtatgttgcttatgctacaatggcattctgcgttgacaaggatgcaaaggtggcacaaagtgtttttgaagcaggtttaaagaggtttatgcatgagccaggatatatccttgaatacacagacttcttgtgtcgtttaaatgacgatagaaatgtacgtgctttgtttgagagggcactgagcttacttcctcccgaggaatccacagaggtatggagacgatttgcacaatttgaacagaactatggggatttatcaagcatgcttaaggttgaacaaagaaggaaagaggct

SEQ ID NO: 138655 - DNA, 600 bp, Zea Mays
ttgcaggtaaaaggggagaaaaatccaagagggaatataacagcagtggtattcaagaagcagagagaaataaactgtttttctttgagggctcttcatataattttgacttggaggatctattgagggctttggctgaagtccttggaaaaggaagttatgggactacgtacaaagctgttctggaggatggaacaacagtggtggtcaagagattgaaagaagtggtggcgggaaagagggaatttgaacagcagatggagctaattggcaaggtttgccagcatcaaaacactgtcccattgcatgcttactactactccaaggatgagaagctcttggtgtatgactatgtcccactaggtagcctttgtgctgctttgcatggtaacaaagctgttggaagaaccccattggactgggagaccagggtgaagataactctgggcacaacacgcggaatggcttaccttcactccgtgggtagcggcgggaagttcattcacgggaacatcaagtcaagcaacatccttctctcacaggaactcggcgcctgtgtcaccgagttcggccttgcccagctcatgtccacgccccacg

SEQ ID NO: 138656 - DNA, 292 bp, Zea Mays
aagcagtctcaaaatcaagtgatggcttccgtataagagggacttttcagggtctcttgctcatcattcggtgccaacgatggagacaactctttgctggcttgagccttaactatgccaagggtattcatcatctctttaaccaaaaaacagaagtctgcttgtgttacgcacttaaacaggattactcaatggacgtgcattacttgttcttaatatcatatgcatataaactacttcatttgtttctacagcttaatgactcaaatgtcaaggagataaagagcaagac

SEQ ID NO: 138657 - DNA, 461 bp, Zea Mays
cccgccagccttaccgtggaggtgggcgacgtggtgggtacaacgatgggcaggctgggaatgagttcggacgtcctcgccgggcatatgagcgccacagcggcactggccgtggctacgggatgaagcgtgaaggggttgggcgtggaaattggggaactgcaactgatgaaggccttgaacaggacactgtggatgctgttaatcctgaggaaactactgccgtggtggaggatgagaagaaacctgaagatgcaccacagtctaaggttgagaaggacaaggagggcgcggagaatgaagaacaagaaaaggaacctgaggataaggagatgactctggaggaatatgaaaaggtactggagcaaaaacaaaaagctttactctcccttaaggctgaggagagaaaagttgaaattgacaaggagctacaggccatgcaacaactgtcagttaaaaag

SEQ ID NO: 138658 - DNA, 79 bp, Zea Mays
caaatctataaggattgttctttaggagagttcaagggcctgttcgtttactccagccgttccgaaatgatgagtttat

SEQ ID NO: 138659 - DNA, 405 bp, Zea Mays
atgtcgggtgggtatggtatggcttcttctccagcgtggccactgccgaggcgaagggctgggcactggcgggtgtgggatgcaaggctgccgcgccctcggatggttggatacagtcgctgtggcggcggcgaagttggtggccagcgccgtgcgaacgcggcggcgagagaccgagaagctaggtcgctgagcggcgtaggcggcgcgggcagatgggaagcgaagagagagatgcggcgagaggcggtggcgcacggcggggttggcggaggtgcctgggttgcccatcgcggcgctaccctctggaaggcccggagcaggaactgccggaatgccggcggtgagtgcgagggggaagcaggactggaggcggacagaggcagcgtgggagcgagaggctag

SEQ ID NO: 138660 - DNA, 855 bp, Zea Mays
ctttggttccattcagataccattacaatgtagtagatgccaaacctcatcaacactctactaaatcaatcttatatgttacaaaaacaggatttgagcctagctcagttggtgggagatatgggcgtgcaccccccattagctaaagtcctctttttgcaatgtacctagttcctcctaggttggtttagtttactgtaagggccttcttattttatataaaacagcaaacaacactatagaaaagcattaaactgaagtagaataaggacatggacaaacattaggaagaacaagatgactgacactcaacttatatgcggacaaaaaaattgaaaaaagaacataaacgcaaaaatagtcaaaatgggataagtggtcttaaaacagataacatgtagataccttgtacacatcattctttgtgcaaatcagtatgtgtaattcatttgaatgagtggcctcaaaagtcaaaaataaaacaaaaaacagtagttcatctttgggttgtatggagacaatttattcctcaaaagaaaaagggaagcattgtgtgcaaatcaatctgtgtagttcatcttcgggtaagtattgcacagaccagaaccacctcttctgcaaggaaaaaggaaacacaagaagtataggtttcgtagttatctcctaatcatccattgctctcattttacatgtgcataactgcatatgcttaaagaaaagttagctccattttgaatataacaaccctgaagtaaagggaaaaataatattagactgatgaaagcaccatggcagcacaaatatgccaaatagatccactgtcagccttcaggcacaaactcaaccaacgaaaaa

SEQ ID NO: 138661 - DNA, 795 bp, Zea Mays
ccagcaaattattcaatgagaattaagatcagttggcattctaacttgtacacatagaatcagttatgaaatgaaatgacgtgccgcaaaaactaattctaaacaaaatctgctccttctctatagagcattgaatttaactatcaacctatatcaccctccatttggtggcaacaagtagctctcacttttgagtacttctgtgcctaacgaccacaatgtcgataacaatgacttcttgccttctcagagatttaaacaccccatgaatgcaacccaacactaatctattgatatgtcaaggacagacataacaagaaacaacttttatttaggtggcaccatatgtatcttcaagaagtaagcaggattggtgtggcctagcaagcggttgcaggccttcacatgtgcacacagtgatgttggaatcatggcctgcgctcctagagatgggtaagtatttcattaaaataccatgaagttgctccccctgtggtgtatgttcattattctgctggtgttcttcgagagctctgttttatatgataagccgttcactaagtgaatatgtttcactgccttctaatagccttggctgccatagtctcctgcacaaatgtacatcatccgataaaaaattgaagggcgagggaaacagaaaaataaagatggaaccaatccaagtcccttctcttcaccaaccataattgagcgcagggactgcagttctatgtcttttataggaatgaaaataggaggggattaaggagtgagcgcttacatttggtggagccg

SEQ ID NO: 138662 - DNA, 1359 bp, Zea Mays
aaaaaataaagctacgtaatagcataatttatctgtaaaacagcactgaacatgaaaaggcgtcagaatggtatcacattccttcagttcgttttgatatgtttttatgattaactcaatagtatcacttatataacttgccaaaacttcatcatcatcaccttattgacttgtgggctaaatctacatggcacaataagggatataaaggaactatacactgtacagcgacatataaggaatcagttctatgttccttcgatttctgttttctggatggcacaatactaccatctttgctggtcatacttgaactccttttacatttcatcaggtatttgcccaaggtttttgaaagatacagtggtgctgatggatttgtgttcctccaagaccacatggttcttaactactggaacctgatgcaagctgacaaggaaaaactttggattacaaataagattgcacattcttgggttactgttccattggagacgaataaagaggaatggtttgtaaagcaaggtgatatggtcaagcaggtcattggcagttccccagttcatttccaaacaaactacaaggagagcatgggcgaagataaaattatattctgtggtagtgaactattctacgtgccccggcggtttgttgaggactttggtgaccttgtgggtcttgtcggcaatttggatttgcatcacaagattgcggtcccaatgttcttcttggcaatggactcgactcaaaattttgactctgatgctctggctggaacagtgttcaggccacagttgccagctaatgcgacgttctcgtctatttatacagctcaagcacctgctgttttccctgtgaaagttatgaatgagattgatttcataaaggtgattcggctaatgtccataggagacccacttctgatggagttggtttaaaggtgttatgtgtagttgaagtgcaagcttatccttgtggccatgaggacagagtagaaaaggcatagttttgtgttttctggtgtttttgtaatttcatttattttgttcattctgtagctgtttattcctctgctgttgtatattggtgtaccattagtgacaaggttacttgggatctgctcggtccagctgtcctgctgaaagaaaggacggcctgtcagatacgagtcacggagaagagcttcgccctggccagctactgttttgcaagattttttggttgccaatagtaaagatccacacttgggcaatttgttgtaccatttaaactgatacaaactctcagaggaatattttgttttgtgctcgttgcagaaagcattgatataatgaaaatttgtaagtttgagcaaaaaaa

SEQ ID NO: 138663 - DNA, 3051 bp, Zea Mays
tggagtaacgcacactccactcccagtccggccgtccccgagtcccgactccgaccgacacacccgcgctccggcgcctcagcgatcgcgacgccccaccgcaccgcgacaccgatcccccgccctcctccacgctgtctgtcggcgcccgccaagcccaccgtccccagctccgcccaaccaccccaaatctcgcgcctccccccccccccccccccgaatcccagccgatacagacacaccacgcccgctctccacttctcgtcccccagatccgccccgcccgacgcgagatgctcgtccaggaccgcgcgtccccgcacgcggccgccgcgggccagaagccgtcctcgtccccgcgcggcgcgccgggggcggaccgccggcacccgcggcccttcgccaagaacctcgacttcgccacatgggcgtccgagcactcctccaagctcctgctcctcctcctcgcgatcgcatccgccgccgccgtcttcctcctgcgcggcgcggcccccgacgccgccgcgctgctctgcctcgaccgctccgcccgctcgcgctcgggcgcccccgccaagctcccgtacccggacgtcgcctggtccaaggtcccgccgctcgcgatcgctgcgggtagccccttcgcgtcattccgggcggagcggtggatcgtggtcgctgtctcgtccccacctaccgcggcgctggccgcgctcgcccgcgtcaagggctggcagctcctcgccgtcggcgattcccacacgcccgcagggtgggagcttaagggcgccgtcttcctctccctcgagctgcaggcacagctcggataccgctccgtcgacttcctgccctacggctcccacgtccgcaagacggcgggctacctcttcgccatccagcacggggccaaggtgatcttcgacgccgacgaccgcgccgaggtgcccgggaacgatctggggaagcatttcgacgtggatttgggatctggagtcaccaaccacccagtgctgctccagtacagccacgcggatcccaatcgcacagtggtgaacccctacgtgcacttcggccagcggtcggtctggccaagggggctgccgctcgataaggttggggaggtcgcccatgaggtgttctacaccgaggtcttcagtggccggcaattcattcagcaggggctgtcggacgggttgccagatgtagatgcggtgttctacttcactagaaaaccaccaacttcggcgttcgatctgaggtttgattcggaagccccgaaggtggcactacctcagggcatgatggcaccagtgaactcgttcaatacattgttccagtcacctgctttctgggggctaatgatgccagtgtctgtgagctcaatggcagcagatgtgatccgtgggtactgggcgcaacggatcttgtgggagattggtggatatgtggctttctatccacctactatttacaggaaggactatattcaggcatacccatttgcagaagagaaggatcttcatgtgaatgttggtcggttgatcaagttcctgaatgagtggaggtcaaacaagaggacactctttgagaagattcttgatttgagttatgccatggctgaggaagggttctggacagagcaggatgtgagattaacagctgcttggctgcaggacctgctcgctgtgggctatcggcagcctcggctcatgtcattggagattgataggcagcgtgcaaccatcggagaaggtgacatgaaggagtttgtgcccaagaagctgccatctgtgcatcttggggttgatgagattggcacagttaactatgagattggaaatcttattaagtggagaaagaactttggaaatgttgtgatgatcatgcacgttagtgggcctgtggatcgcacagcacttgagtggaggctgctttatggaaggattttcaagacggttatcattcttgctgagcagagcaatgcagagcttgctgttgaacgctgcacgttgtcacacgcttataagtatttgcccaaggtttttgaaagatacagtggtgctgatggatttgtgttcctccaagaccacatggttcttaactactggaacctgatgcaagctgacaaggaaaaactttggattacaaataagattgcacattcttgggttactgttccattggagacgaataaagaggaatggtttgtaaagcaaggtgatatggtcaagcaggtcattggcagttccccagttcatttccaaacaaactacaaggagagcatgggcgaagataaaattatattctgtggtagtgaactattctacgtgccccggcggtttgttgaggactttggtgaccttgtgggtcttgtcggcaatttggatttgcatcacaagattgcggtcccaatgttcttcttggcaatggactcgactcaaaattttgactctgatgctctggctggaacagtgttcaggccacagttgccagctaatgcgacgttctcgtctatttatacagctcaagcacctgctgttttccctgtgaaagttatgaatgagattgatttcataaaggtgattcggctaatgtccataggagacccacttctgatggagttggtttaaaggtgttatgtgtagttgaagtgcaagcttatccttgtggccatgaggacagagtagaaaaggcatagttttgtgttttctggtgtttttgtaatttcatttattttgttcattctgtagctgtttattcctctgctgttgtatattggtgtaccattagtgacaaggttacttgggatctgctcggtccagctgtcctgctgaaagaaaggacggcctgtcagatacgagtcacggagaagagcttcgccctggccagctactgttttgcaagattttttggttgccaatagtaaagatccacacttgggcaatttgttgtaccatttaaactgatacaaactctcagaggaatattttgttttgtgctcgttgcagaaagcattgatataatgaaaatttgtaagtttgagcaaaaaaa

SEQ ID NO: 138664 - DNA, 2646 bp, Zea Mays
gtttctccttgtcctccgtgtgggcccgctgttctgtattcttcttcttcttcattccttccaccgctcacctcttctcctccccagtccccactcatcaaactccgcccccatgaatatgatcgggagaagctgctagcatcatctctcgcctccacttcgtcacctcctcgccattctattctatccttcccgccagctgcatatatccccgcgcccaattcggtccccggtgtgtgaggccagctgttttagctcagcgcgcggcgtggcagcaaaaaaaaaaaaaggagagcaaggagagcgccggcgccggcgaagcatgcggcggtgagagagagagagaggaggaggaagggaacggagagaacgagagccggaggacgatgcagctgccgcagcatcatcagaagccctccgcccactcctgctgctcgtcgtggatccggaggtccccgccgccgtcgccgccgccgcacaagagagcgggcggcgtcgggaggagccggtatgcctgccgcctcgtgcccctgctggtgctcaccgtgtacagcgtcgtcaccgtgcttcgcatccccagctcctccctcgtcgtgtccaccgccgattcagagcgcgtggaaaggcgggaggacctggaggcgctcaagacccacctgccgtcgaaccagaacggcctggaggcccgcgaggagacgcggtcggtcgcctccctcccctgctccgccttcatcagcggtgaggcggggcacggcgcggccgcggacgcggagggcgtgctgtgctgcgaccggagccactaccgcagcgacgtgtgctacctccgtggcgacgtgcgcacggacccgtccaccacgtcggtgctcctgtacaacgcgccccgcgggagcgccccggagaaggtgcggccgtacacgcgcaagttcgagggcagcgtcatgagcagcatcgacgaggtgaccatcgtgcccgtgccgcccggcggcggcggcggcggcgcccacagcaacatgagcgtcggcgtcggcggtggtgggcggcggtgcgacgtccggcacccgcgcggcgtggcggcggtggtgttctcgacgggcgggtacacgggcaacgtgtaccacgagttcagcgacgggctggtcccgctgttcgtgacggcgcagcggttcgcgggggaggtggtgttcgtggtgctggagtaccactactggtggctgggccgctacggcgccgtcctggagcagctcaccaactacagggtggtggacttccggcacgaccgccgcgtccactgcttcgacgagatggtcgtcggcctccgcatccacggcgagctcgtcgtggaccccaagctcatgcccgacggcaagagcatcaaggacttccaggcgctgctacaccagggctacagccggacgacgacgacggcgtcggcgtcgtcgtcgtcgcccacgccactactccctcttgcgccgccaacccggccgtgcccgcgctcggccaacaagccgaagatgctcatcttcatccgcaagcagaaccgggtgctgctgaacctgccgcaggtggtgacggcgtgccggcgggcggggttcgcgccgcacgtgatgaacctgcggcggcagaccccgctggccgcgatccacgcggcgctggcgtcggcggacgccatggtggcggtgcacggcgcggccgtcacccacttcctcttcatgcgcccgggctccgtgctcctgcagatcgtgcccgtgggcctcgactgggcggccgacgccttctacggcaagcccgcgcagcagctcggcctcgactacctcgagtacagggtggcgcccgaggagagctcgctggccgccgagtacgggctcaacagcaccgtggtgcggaccccctgggtcatcagcagccgcggctggtgggagatgaagaaggtctacatggaccgccagaacgtcaccgtcaacgtcaagcgcttcgccgacctgctcagggcggcgcgtgctcgcctcaggaacaccacggcgtgcgccgccaagcccgcagcgccgctcaggtagacgctagctgctgattgggcttgggttaggtgtcaattactttagtcacacttgccgatttctttgtgctttcgtcctctttttggccgggggataaaaaaggagacgaggtcctgtaaatatgattgggggtacggttggctgagagattggtgggggatctatccatcgcctcctttcgcggtgcattcgtttggttcttggtgttgctggagggagcagcagaaggtgaagaataataatttatggcagggacggctctcctgaaacactttgttcacagtagatcataggggtatcagctctttttatttcgttgccctttctttcttttttttcttttttttttggttttctcattctttgggtgtccagatgatgtataagggcatgtacagtggtgtttaatgtggaggctcttaaggtgtttaagggggttatttgcaaaaaaatcttagagccgtctctccgcgaagagacgcctctggctcgtaaaccaagtagcaacagacgcctcacttcccactgtacgaatttgttgtctgttctatcgatctgatgctatacaaatacatttaattctgtatttatt

SEQ ID NO: 138665 - DNA, 5382 bp, Zea Mays
atgcgagtaccatgctgctcgttatgcaacgtcagatatgacgaggaggagcggacgccgctgctcctccactgcggacatggattctgccgcgcgtgcctctcccgcatgctagcggcagcccccggagccacgctgccgtgcccgcgatgccgccatctgaccgccgtaggcaactcggtctctgcgctgcggaagaacttccccattctctctctcctctccacatccccctcatccccgtctttcctccactccgactcggggtcatcctctgacggctccgaagacgaggacgacttcttcgcgcgccccagtcgccgccccgcgcccgcgcccgctgccgcaccgcccggatgcagcttcttcgacctcgcctcgcacccggacctcaagctcgcccgtcgcatcgggagcggcccgcccgggcccgccgggcaggaggtgtgggccggcacgctgtctcgtggcggtggggtcaagcggtgcaagcaccaggtggcagtgaagagggtgcccctggccgcaggggacgggctcgaggttgttcaagaggaggtggagcggctgaggcgcgcctccacatggtgtcggaacgtgtgcacattccatggtgctgtgagggtgggcggccacctctgtttcgtgatggatcgctatgtggggtctgtgcaggcggagatgcggcagaatggtggacgccttacgctggagcagattctcaggtatggagcagatattgctcgtggaatagcagaactccatgcagcgggtattgtttgtatgagcataaagccgtcaaacattcttttggatgcacatggacatgcattcgtttcggattacggtctttcagcaattctgaagaaccttactagtaggagagtacctgatgactccagtgctggcattgatgctacactgcttagccccaattatacagctcctgaggcatggggaccactgaagaagtcactgaatatgttttgggatagtgcaaacggtatatcaccagagtcagatgcatggagttttggttgcacgcttgtggaaatgtgtactggtgctgttccatgggctggactgagtgcagaggaaatatgtaagtctgttgtaaaagaaaagaagccaccgcctcaatattcaagagtagtaggtgtaggacttcctggggagctgtggaagatgattggtgaatgcttgcaattccgagcttcaagaagaccatccttccaggacatgctgaaaacttttcttcggcatcttctggacataccacggagcccacctgctagtcccgaaattgattttgcaaatgaaaacttgcccaatggcatgcaacctccaacaacctccatcttagagatggttcatgataatccaaatgccttgcatcatcttgtatgcgaaggagatgctgctggtgttagggatctacttgcaaaagctgcatcagagagaaacgatagtttaatccgttctctcttagaagcacaaaatacagatgggctcactgccctacatttagcatgccgccgaggctcggcagagcttgtggaagctattgttgcttaccaagagaatgtagatatattagataaggatgaagaccctcctatagtatttgctttggctgctggctctccacgatgtgttcgtgcacttgtaggcaggtctgctagtataaattctaggcttagagaaggcctgggtcctactcttgcccatgtctgtgctcatcatggtcagccggagtgcatgcaggagctgctgatggctggagctgatcctaacgcagtagacggggaaggtgaatctgtgctgcatattgccgtggccaggagatataccgattgtgctattgttatactggaaaatggaggctgcagatcgatgggcatatcaaattctcaacataaaacgccattgcatttatgtattgagacatggaacacagctgtggtaagaagatgggttgaagttgcatctttagaggatatagcagaaacgattgatgtacccagccctgttggtacagctttatgcatggcagcagctcttaaaaaggagcatgagaaagagttccataaggtccaggattactggacaatcatgttcttccatctattccagaccctgttcgttctaatagtaaaattacttctacttgcagagggtcgagagttagtaagaatattgcttgctgctggtgctgattctacggcacaagatgatccacactgtagaactgcattacatactgcagcaatgatcgatgatgtggagctggttaagattatactggaagcaggagttgatgttaatataagaaatgctcaaaatacaaccccactgcatgttgcacttaatagaggtgcaaactcatgtgttggcttgcttttagcagctggtgcaaactgcaacatacaggatgatgatggtgacaatgcttttcacatagctgctgatgcagcaaaaatgatacgtgaaaacctggcttggattgctcaaatgctactacagccgtcacctgctgttgatgtgagaaaccaccgaggttggacactacgagactttcttgagaggcttccacgagaatggatttatgaagaattgatggaaacacttgaagataaaggagtccatctctcaccaaccatatatgaggttgcagattgggtgaaatttagaagaactgttacttcacctgcttttggctggcaaggtgcaggacctagaagcattggttttgtccagtctgttgttgacaatgaccaccttgctgtgtcattttgtactggagaagcccatgttttgacaagtgaagttatcaaagttattccattaaataggggccaacatgtgcaactcaagcctggtgtttcggaacctagtatttatctggatgctgagataattgaattagtaggtatactgaactggagatctaccatgtgtcttttatttggatggcgcggtcaatcacgggatagcattgggacagttctctgtgttgatgacgatggaatcttgagggttggtttcccaggagcttctaggggatggagagctgatcctgctgaaattgaaagggttgaagaatataaggttggtaactgggttcggattcgtccctcactgacggttgctgtacatggcatggagtcgattactcctggaagtgttgggattgtatactccatcagaccagatagcagtcttctattgggcctttgctatttgtccaatccatggctgtgtgaaccagaggaggttgaacacgtcgacccattcaagattggggaccaagtatgtgtaaagaggtctgttgcagagcccagatatgcatggggtggtgagactcatcacagtgttgggaaaataattgacatcgagagtgatggtctgctcatcattgatattcctaatcgggctgcgccatggcaagcagatccatcggacatggaaaagattgagaactttaaggttggcgattggattagagtcaaagcaacagttccttcacccaaatatggttgggaggatgtgactcgtaatagtattgggattgttcatagtctacaagatgatggggatgttggtgttgctttctgcttcagaagcaggctttttctttgctcggttgcagatgtcgagaaggcacagccatttgaagtaggggagaaggttcatgtgtcaccttccatatctgagccacgcctcgggtggttaagtgaaactgcagctactattggagccatatcaaggattgacatggatgggactttaaatatcaaggtttctggccgaaaaggcttgtggaaggttgctcctggtgacgctgagaggctttcagcatttgaagttggagattgggtccgcctgaaaccaagtattgggagcaggcctacctatgactggaatagtgttgggagaataagcattgcagtagtccatagcattcaggactctggttacttggagttagcaggttgtttcaggaatgggaaatggttaacccataatacagacattgagaaagtgcagaccttaaaaattggtcagcatgttcgattccgtgctggaatttcagagcctagatggggatggagagatgcgaaccctgattctagaggcgtcatcgctggtgtacatgctgatggagaggtaagggttgccttctttggtgtgcctggattgtggagaggcgaccctgcagatcttgaaattgagaatatctttgaggttggagagtgggttaggctgacgaacgatgtggaacaatggagatcgctcaaacctggtagcattggtgtggtgcatggggtgggatatcaaggtgatgcttgggatggaaccattcatgttgctttttgtggtgagcaggaaaggtggattgggccttctagccagcttgaaggagttagcaagtttgttgttgggcagcgtgttcgaatcagaggctgtatccgccagccaagatttggttggtccaaccataatcattcaagtatagggacaatctcatctattgacgcagatgggaagctgaggattcatacaccagctggtgccagggcttggttgatagacccagcagaggtggaagaagtggaggaggaggaagtctgtgttggggattgggtaaaggttaaggactccgttggaaccccagtttatcaatggggtgatgtgaaccacagcagcataggggtggtccaccgggctgatgatggagagctctggattgctttctgcttctgcgagaggctatggttatgcaaagcatgggaggtggaaaaagtgaggcccttcagacaaggtgacaaagtaaggatacgacctggtcttgtatcccccagatggggttgggggatggagacctacgcgagcaaaggcgaggttgtaggtgtggatgcaaatggaaagctgaggataaagtttcggtggagggatagactttggattggggaccctgctgatattgttcttgatgatgtccacttattgacggaggcttctaatggcttggctttttgttcataggcttgtggtattctttcgataccatatctgatatattgcacccatccattttgcagcatttcaaatttagcaaaatcttaacctgcagtggacttgcaagttgcacataactatcatcgcatcggcatgccagggtgtatttcatgttgataaccggggaatgagaagacaacgatagtgtagagctggtaaccatcacctagttttttcttctttggtttacatgtataattatgcctcctgacacctttttgggtttcagtgtatcatataccagtgtacaggttcggacctgaacattaatttaattgatagtggtcttgtatgtttacttga

SEQ ID NO: 138666 - DNA, 2465 bp, Zea Mays
gggcagagcctatgtattcgaattgaggctgtcttttatgtaaataaaattgaaccgccaaaaaggtccaatagttttattattagacatgacatttggatataggtatgggcatcgtaatgcccacaaccttgtgaaccaccatgtacattgtggctctgccacccattattaacttctgcttttagtccttcccaagatacaaaattgcagattcattgtgcggtagacaataataaagaaaatgaagcctgcaggatatagacaaacaatctggtactgactattaccaccgacttcactcagtagcaatttgattgtaactatagacaatgtttgactcagttggtggataatggatcttcaaaaacattcctttaagttgatcgtgggaagtcatctcctccaaaactttatcttctgagataaacttagaacagtgctccatttcagctttagataacatgttcctaacattattgaactcgtcttctgtagagaagaccaacttggataagtgatccttttctgcttgcctatcatatttgtcaccttcacctgttccataagttatcaaattatatgtatatacaaatttcttctgacctatcctaaatgctctgctgatggcttgccttccaacagctgggttccaaacaacatctagaagcacaattcttgaagcacctgtcaagctaatcccttcacagcatgctcttgtagatgcaagtaacaccctggaatcattatttggattattgaaggcttcaatggaagcctggcgatatcttggaaggatctttccatccatttgaagaatttctttcccttctctccatttgaagaacttgcgaagatgctcttttatcaactctagaggctgaataaattggctaaaaatcaaaaccttctctcttaatgcttcagacaaacgaacaacttcgatcacaaatcttgtttttaccccttcatatggatttgatctcactttagcaagcataggtttatcaataagtgaagcttcctcctcagacatgttaatggcggttacaagggaagggtgtgtagaagctaaagaaatgacatattcatgttcgaagttgttaccagaaccaatgttttccacctttttaatgatactcttttgaaggggaagaggcttcagaataattacactctccctgagtcctggaagagttcgaagaatattgccattatgtatatgaacaaatggtttcaatattgatcttactttttccgcattatcatcagttacattgctagtcagtgatgcccaaacacccttttcatatttatcagaaaacttatccttttgcttttttgagacataatgtcttcgacctactcttgacttcgtcaaaaacatttcaccaaatctaggccttaccagacaaagaatgttgtaaagctcaagaaaattgttctgaaaaggagttccggataaaattatacgcttctcagttttcacatttcctagagttttccacataacactgcgttcattcctaggtgtatgtccttcatcaagaacaagtaagccagggttatcaagaagaatgcttcttactttgttttcttctgtgcagccaggtttttcagaggtcagttttgtgtacagaccataacttattccaagaataccatgacctttgttccatgaaagcagtttgactagtcttgtcaacttttctgtcctatgttctttctttattaacttgcatatctcccgatcctcttttccagtgtaatcagttgtgtttagtatatgaaaaggaacatcaacattccatttcttaaattcctcatcccaagcaaagagcataccacgtggtgcaataatcactggccgacagtctggaaacaccttcatgtatgtctggataaacacaatagctaatcgtgtctttcctgttccaggagcatgacagataacacatccaccaacaacatcaggttttgctccatgctttatctcatcaagtctaatatcaccaactaaatttgtccacataaattcaaatgcttcacgctgatgctcatacatagtactgatgacccctggaataagattccacaccgttccatattgatgaatatcttgagattgttcagtgtcattgactccttgttcataaagatcatgaaacatcagtgtatttttcacgcctttgtcatttggccatgctgatttctcggcaaacactgacacctaaaagaaaatgatgacttaaatgaccaaatttaaaagcttatactgtagaatagatgtcatgatttatgaccataataaagcttaccagtgatggaaacatgaatttgatctccaggtttaccaaggaacagtatttgcatctgatccctatttgatcatcaataacaaattcatgcttcccacgagaacagggtgttactggggcaagagaaaaatctagttgattgccttc

SEQ ID NO: 138667 - DNA, 1520 bp, Zea Mays
agcaaaaaaatgccccacactcccacggtcccacccggcgtggcggctggcgtacccgtccccactcgtcgcccatcttccgtgacgtcaccccattctccatcggttcccttcctcgcctcggttcgcgggtacccgagtcgcagacgcacctcaatcgcaaccttttggactcgaaggggggcaatagacagcagggaaagaactgagcgaggagattcccaaggatctcgtcggacgctagaggaagggacgggggacaggcgatggcgggggacgccggcagcggggtggactgggagagcctggcggaggccacctccggggcaatcggctcgctcgtcagcaccaccgtgctctacccgctcgacatctgcaagaccaagttccaggccgagcttcagacgcaccagggcgcgcagaaatataggaacctttcagatgtgttctgggaagcgatttataaaaggcaatttttgtccctatatcagggccttaacacgaagaacattcagtcttttgtttcctcgtttttttatttttatgggtatagctattttaaaagactctacctggagaagagtggagcaaagtctattggaacaacagccaatttgttagttgcagctgctgctggtgcttgcaatgcaatcgtgacacagccattagatacagcaacttctagaatgcagacgagtgcctttggaaagtctaaagggctgagggaaactcttgcagaagtacactgcatttgatcagctcaagaaaaggataattcagaggcagcgacgcaaaaatgcagcatcggcagaggataattccatagtgtctctttctgctttctcagcttttctgcttggtgccgtctcaaaaagtattgctacagtattgacttatccattaatcaggtgcaaggtgatgattcaggctgcagaccctgatgaggatgatgacgttgattctgaaaggccaagcaagtcaagaacaccaaaaacaatgctaggtgccttgcatgctatctggagcaaggaaggcattccaggcttcttcaaaggcctgaatgctcagatccttaaagcagttctgagctccgccttgctgctgatgataaaggagaagatctcgaagttcacatgggtctcgttgcttgccctgcggcggtatcttttcgtttctcagaagaggatcaagagtgtaactgtataaatactagctccaaacatagcgacatcgtgcttctgtagatgttatgccaaggaattaatctgaggaataatgagcagaaatactgaagcaagagagtgtgtaaagtgtgtatgtgtgatcgatagcatcagagggctcttcaataagtttgttcattcttttttcccctctgaatctctgatagctagtgacacaggtgttgcacggatctgaaactggactgtacttttggctttggttgtctgtaatgtgtaaaatgaattgattggcacataccaagaggggttgtaagtcttgtgatatcacaccaacta

SEQ ID NO: 138668 - DNA, 1588 bp, Zea Mays
agcaaaaaaatgccccacactcccacggtcccacccggcgtggcggctggcgtacccgtccccactcgtcgcccatcttccgtgacgtcaccccattctccatcggttcccttcctcgcctcggttcgcgggtacccgagtcgcagacgcacctcaatcgcaaccttttggactcgaaggggggcaatagacagcagggaaagaactgagcgaggagattcccaaggatctcgtcggacgctagaggaagggacgggggacaggcgatggcgggggacgccggcagcggggtggactgggagagcctggcggaggccacctccggggcaatcggctcgctcgtcagcaccaccgtgctctacccgctcgacatctgcaagaccaagttccaggccgagcttcagacgcaccagggcgcgcagaaatataggaacctttcagatgtgttctgggaagcgatttataaaaggcaatttttgtccctatatcagggccttaacacgaagaacattcagtcttttgtttcctcgtttttttatttttatgggtatagctattttaaaagactctacctggagaagagtggagcaaagtctattggaacaacagccaatttgttagttgcagctgctgctggtgcttgcaatgcaatcgtgacacagccattagatacagcaacttctagaatgcagacgagtgcctttggaaagtctaaagggctgagggaaactcttgcagaaggtacttggatggaagcatttgatggcttaggcatttccattatattgacttgcaatccttctattcagtacactgcatttgatcagctcaagaaaaggataattcagaggcagcgacgcaaaaatgcagcatcggcagaggataattccatagtgtctctttctgctttctcagcttttctgcttggtgccgtctcaaaaagtattgctacagtattgacttatccattaatcaggtgcaaggtgatgattcaggctgcagaccctgatgaggatgatgacgttgattctgaaaggccaagcaagtcaagaacaccaaaaacaatgctaggtgccttgcatgctatctggagcaaggaaggcattccaggcttcttcaaaggcctgaatgctcagatccttaaagcagttctgagctccgccttgctgctgatgataaaggagaagatctcgaagttcacatgggtctcgttgcttgccctgcggcggtatcttttcgtttctcagaagaggatcaagagtgtaactgtataaatactagctccaaacatagcgacatcgtgcttctgtagatgttatgccaaggaattaatctgaggaataatgagcagaaatactgaagcaagagagtgtgtaaagtgtgtatgtgtgatcgatagcatcagagggctcttcaataagtttgttcattcttttttcccctctgaatctctgatagctagtgacacaggtgttgcacggatctgaaactggactgtacttttggctttggttgtctgtaatgtgtaaaatgaattgattggcacataccaagaggggttgtaagtcttgtgatatcacaccaacta

SEQ ID NO: 138669 - DNA, 1297 bp, Zea Mays
agagtctcgaatctgaaatcgatcgtgttgtatatgttccacgatcccaacgacgtaaaatggttcaagcctattgagtggtggacaaaacatggtcgtcgtggccgcatcatggagaccgttggttctcatggtgcgtcggttcaccaatcaaatgctttttgacagcttagatctagtttatcattatatatatatccctatttctagacctcttgctaatgttttctttccctaagcaggtgccatgaaatgtttattcaacagcagcatgatactgtgtgcatgagcttgtacaaacacgtgtacctaaaatggccttaacagctctaccacggggtaactctacctacatctatcttgtacttgaacatcacacccccattctccttggatcaaatttaaaccaacaacaaattcacttgtatgtggaggcatctattttactacttacatgtatgcatcttgactagctcgctgagggggatggcctggtggatctgttgttggtttgcttgtaggtgattagctagattgtgttgttttaagtcccgacaattcagtttctgtacatgctcgacctttgttgaatctacccttacaggtatcctcgacgtctggtggagttgcgccgcctccacgccactgtcaagcgcttcctcggcgtctgcttcggacaccagctgccaatcccatacccgtccagatataagcaagctataatgtgcatttgaaatacaagcgaatattgttgtagcatgctgcttgagcttagcattcctctttctttctttcttttttcttttgcagcataagaaacactcttacgaagctcttaccaaatctaacggttacaagattcagttcatacttgggttttgctcattgtattgtcttcaagcagggtatgcagaatagtacagatggaacaatttcttctctgttagtggcacattgtcaatggtgtgtctgacaacattctcaaccacatcatcctagagaacaatgagaacaagcctgtcacaaacagtcgtgacactcaggagatatgccttgaacaaggccttcatatcctcaagatattcgaggattatcatgtcagcaaaacatccatccggaacgaccttgcctcagcaatgggaaacactccaaacccatacgagcaagccatgtccacttgtgtgaatgaccaagcgatgatgctatcgcatatggtgtggcatgagtctacaatttcactatagttatgaaaactgatcagtcaatgatgatgaatcatacgaaccttttttacttc

SEQ ID NO: 138670 - DNA, 351 bp, Zea Mays
atggtctaggaactcccagccttactcgtcgctcgccgtcagctggttgcccgacatgtacaacgactgtgggcagagcatgccgatgactcactgctcctttgtatccttatgctattgttttcattcgacaacatcaactgcaataaacataagatggagagatttctgcaccatggcaggttttatgttgcctttgtatatgctccaatttccttccctccacttcctctaatagttttgaagaacagagatggcgagcaatctaccattgcagctgtaggttcgctaaaaagtatggatccagatcggatcattctgaagaaaattgttctgaccatgtaagcttgg

SEQ ID NO: 138671 - DNA, 280 bp, Zea Mays
agggatgattgacatatttcccaattattcctactgtttctatgttggggaagtttatgtcattgttcacatattgggcatagtttctttcgtacttgtttataatcagtcaaactataacgaatgatgaacaacctaaacttctatatgcttttatgaaaacccaggaggcatggcaagaggttgatccagatgaatactcttatgaggcaagttacattgcttgttgtcttatccttacttctccaagcccctcatttgaagcttcatctctactact

SEQ ID NO: 138672 - DNA, 2184 bp, Zea Mays
ctgttctccctcctcccctgttcgagcccaagggaaacaggagtacaggactagcttgcacgcatctcgcctcgccatcgccagtcgccacaacagcgcaagatgcagcgccgcgcgccgcgtctccgcgtcctcctccatctcctaatcctcgtcccggccctctccgaggttcctgaccactatgcctccccgcgtgtgggctcgggcaccagaacgggcctcagtaattcgccggcgcaagagtatcttgaccccacctatccggtcccgcggtccccgccgggggcgtcgacctgcgtcttgccggtgctctcctactccttcgccaacacctacggcactccccccgccaaggcggcgtacgcgccgccagccgagtgccctgcgccctggtccctcgtcgttctctccttctccgtcgccatcgccggtgaccagtacgaccgcgtcgcagccgtctggctcgacggcgccgagctcctccggaccaccacggccgagcccaccaccgacggcgttcgctggaccatccacaaggacgtcacccgctactccgcgctgctccggtccccgcgcggcggcgagctttctgtcatgctggagaacctcgtcaacgacgtgtacaccggcgtatacaacgtcagcgtgtccctcgagttccacggcgtccctgcttacctcggcgacgcggggtcctcctcagctgccggctctgcggaacccggcggccaggcgacactaaaactgccggcgtcgtacttccagccggcggatctgatcctgccaatctcggagggcatgggcagcagcaatggcttttggttccgcatccagaattcgtcggacccgcggtccaagcttgtgagaattccatcgaacacctaccgcgcagtcctcgaagtcttcgtgtccccgcactcaaacgacgagttttggtattccaacccgccggacctctacatccgcgagaacaacctcaccacgggacggggcaacgcggcgtaccgcgaggtcgtcgtgagcgtggaccgccatttcgccggctcgttcgtcccgttccccgtgatctacacgggcggcatcaacccgctgttctggcagcccgtggcggcgctgggcgccttcgacctcccgacctacgacgtcgagctcaccccgtttctgggaatcttggtcgacggcaagccgcacgagatcgtcctaagcgtagtggatggcatcgccgagtggcttgttgacgccaacctgcacctgtggctggaccccgcttcgacgaatgtatcggccgcgctcagccggtacaggacgccgcgtctgtccatcaagcgccggtacagcacccggcggccactggacggaaagttcaagatccgtgccaagaggaagtcccagttcagcgggtgggtgaagtcgtcgttcggcaacttcacgacgaacgtggagacggagctggaggtgaccagcctggtggacttcaccagccagggcaggaacaagactgtccggctgcaggtggagcaggacacggaggtcgtcgtccggtcgtcggagacgcggaaggcggtcggcaaggtggagacggaggctaagtacccgctgtggctggagatggtgacggaggacggcgagaacgacacctacgtgatgagggcgaacctgacacactccctcagcgtcgagaccgacgccgaggccgaggggctgtttgatggcgagacgagggtggtcgacgagcaagccgccgcggggtggatgctcgtcagaggccacgacgtgctcgacggctccgcggctacgacgcaggcgtacaggtatagcaacgaggcggggaggtatgagcgagccatcgacacactggatggtgcggtgctgagcgacaacgtgaccgagagctaccgggcctcgggagacggcttggcttggcttgctgctggacccgcgggagggggtgccatggaactgtgacggccagcagtttggacattactgctatgtaggaatccgtcgtcagactgggagttgagttgtccagacttcttcaaaatgtgttgattacgtgcgatcgttatgtgtgcatatgtaattctcctgtgcattcttgtttcataagtgaaatcgacctacgggcactatatttgggttttggtgtcataacaacagctacaatcattttcggcggcc

SEQ ID NO: 138673 - DNA, 189 bp, Zea Mays
atgactaatgtccatgacaccaaaagctcctgttggaatttacaacaacgagttcatctatatttacctcttgttataatagcaagaaccataggctcttccggcttgattccatgcgttttatcggctacgtttttagagttacctcctcttttcaagaagaggttcgacaaggttcacttgttttga

SEQ ID NO: 138674 - DNA, 2439 bp, Zea Mays
atgtcggcgccccactcggcgccccaccacccatccctccccgccggggacgccaagaagcagccacacctcggggccgaccccagcaagaaggcctcctgcttcggcggcgggggcgaccaccaccccaagaagcccggcccctccgcagcgaagctcgcgctcgcgtccttcctcggcgtcatcatcctcctcgccgccgacgcctcccttaccggcgccggcgcgcaccgccgcctgcggcagcagtacctgcattacgtcggcgttggcgttggaggcggaggcatcaccgactcgctctcgtggctctccgtgccggaccgccccaacttcaccgacgacctactcgcgcggtggctcgcgcccgggggttccccgtgccgggacgcgcgcacggcgaacatctccgtggaggttcttgacgacgccgcggcgaggggggaggcgaccactctcggcgcgggcgagatccacgaggtcacgttctgggcgctggacgaggctgggcagcgccgctgcctcggcggggactacttcgaggtcgacctctccggggacgcctggaagtcgcggccccccatcgtggaccacggcgacggctcctactccttccgcctccaggtcgcaccgcgcttcgccgcgggggagttccgcctcaccgtcgtcctcctcttccgcagctgggaggggctcaagttctcctcgtcgaggttcaagtaccgcgccgagctgcgccgcatccccctcctgttccggccggacaataacgcgtccctgccggcgctggagacgtgccgcgccgcggacttctctcgcgatgcctggtcgggacggtggacgcggctcgccaagaacgacagctgcgaggacgtcgacgcagcggggcggtaccggtgcctggagtcggaccacccgtgcgaggcaccgtggtgcgacgggccgctcggcgcgctggagagcaacgggtgggtgtactcggcgcactgctccttcaaagctctttgcggccgatgcttcgtggcggtgccttgacgggaagtggctcttcttctggggcgactctaaccacgtcgacaccatccggaacctcctcaccttcgtcctcggcatcacggacacgtctgttgtgacgcgccggtttgatgcagtgttcaccaatcccagtggtggggcagggactctgaggatcacaagcatcttcaacggccactggaacatgagcatgaactatctcggcttgcattccctccggaacagaggtttccggcagctcatccggtcctacttcatgtccggtgatcgtgttccggacgtcgtggtcctgaactctggcctgcacgatggctgctactggaccagcgtccgcatctacgcgcaggctgcggatttcgcagcacagttctggtccggagtcatggacaaagtccgggctcgtgggcgtgcagtgcccagggtgttctaccggacgacgattgccactgggggctacgctagggacctggcattcaatccaaacaagatggaggcgttcaatggtgtgcttgttgagaagatgaggcggcacggggtgctaactggtggagtgattgacaattttgacatgacattcccatggcactatgacaaccgctgcaatgacggcgtgcactacgggcgtgcaccggcgaagctggtgtggcgggatggcaaggttgggcaccagtacttcgtcgacctgatgctggggcatgtgctcctcaatgccatctgcaatgaatgaggattgctggttccatgttctgtaagtttctggcgttcaattgtggaaactggaataggatggttagggaactgaatctggggtgatgagatatcaacaattgggtagtgcagtatgtgtgtaaatctgatggagacggcgagagcgaggtttagctggagcaatttgtatggtaaaacatttggtctctcagcatcgtgtattggcctgatcttgctctagcaaagaagatcgagtccggtcagagctagtgatgagtgaaaatcaggcacatgtaaatatatatagcatgactattcgagaacatctaatgctgcacaaattatgtaggtccagtccgatgatattgttcactgctggtttagtttcttactaatgttcagttctgttcattgttctttgtgatcgtgtgtcttgcaactatcaggtatgcaaatatagaaatgttaaactgctggagtggtttgctgatgtttctttgtgctccagtttgatgtggtttaagtaggacaaggcatgtgataagcagagaaggcagacaatggaattactttttgagtgcagaatagtgatcagaaatgtgattgtaaagctgatgtgttactgctctaaatttcgtgatggcgtcgcaagtcttataatctgggaagggtccttttctcatctaaagttgggta

SEQ ID NO: 138675 - DNA, 2495 bp, Zea Mays
gccaagcccgaccccgtgtgacctgtgtcggcgtcgtccagagcagcaagtccaaaaaagaccccacaaaaaaccctccagcggcaagcgaaaacttccgctgctcgcgttcgcctcgccatcggcaccatcccagtcccaatctggcaatcccatcctccctaccccgtcccccctcctccccgcgcgaccagcgccctcgcacccgcggacgcatgcgaggccacaccgcgcgtagcccccagtagcaaccccgcccggcaatgtcggcgccccactcggcgccccaccacccatccctccccgccggggacgccaagaagcagccacacctcggggccgaccccagcaagaaggcctcctgcttcggcggcgggggcgaccaccaccccaagaagcccggcccctccgcagcgaagctcgcgctcgcgtccttcctcggcgtcatcatcctcctcgccgccgacgcctcccttaccggcgccggcgcgcaccgccgcctgcggcagcagtacctgcattacgtcggcgttggcgttggaggcggaggcatcaccgactcgctctcgtggctctccgtgccggaccgccccaacttcaccgacgacctactcgcgcggtggctcgcgcccgggggttccccgtgccgggacgcgcgcacggcgaacatctccgtggaggttcttgacgacgccgcggcgaggggggaggcgaccactctcggcgcgggcgagatccacgaggtcacgttctgggcgctggacgaggctgggcagcgccgctgcctcggcggggactacttcgaggtcgacctctccggggacgcctggaagtcgcggccccccatcgtggaccacggcgacggctcctactccttccgcctccaggtcgcaccgcgcttcgccgcgggggagttccgcctcaccgtcgtcctcctcttccgcagctgggaggggctcaagttctcctcgtcgaggttcaagtaccgcgccgagctgcgccgcatccccctcctgttccggccggacaataacgcgtccctgccggcgctggagacgtgccgcgccgcggacttctctcgcgatgcctggtcgggacggtggacgcggctcgccaagaacgacagctgcgaggacgtcgacgcagcggggcggtaccggtgcctggagtcggaccacccgtgcgaggcaccgtggtgcgacgggccgctcggcgcgctggagagcaacgggtgggtgtactcggcgcactgctccttcaaagctctttgcggccgatgcttcgtggcggtgccttgacgggaagtggctcttcttctggggcgactctaaccacgtcgacaccatccggaacctcctcaccttcgtcctcggcatcacggacacgtctgttgtgacgcgccggtttgatgcagtgttcaccaatcccagtggtggggcagggactctgaggatcacaagcatcttcaacggccactggaacatgagcatgaactatctcggcttgcattccctccggaacagaggtttccggcagctcatccggtcctacttcatgtccggtgatcgtgttccggacgtcgtggtcctgaactctggcctgcacgatggctgctactggaccagcgtccgcatctacgcgcaggctgcggatttcgcagcacagttctggtccggagtcatggacaaagtccgggctcgtgggcgtgcagtgcccagggtgttctaccggacgacgattgccactgggggctacgctagggacctggcattcaatccaaacaagatggaggcgttcaatggtgtgcttgttgagaagatgaggcggcacggggtgctaactggtggagtgattgacaattttgacatgacattcccatggcactatgacaaccgctgcaatgacggcgtgcactacgggcgtgcaccggcgaagctggtgtggcgggatggcaaggttgggcaccagtacttcgtcgacctgatgctggggcatgtgctcctcaatgccatctgcaatgaatgaggattgctggttccatgttctgtaagtttctggcgttcaattgtggaaactggaataggatggttagggaactgaatctggggtgatgagatatcaacaattgggtagtgcagtatgtgtgtaaatctgatggagacggcgagagcgaggtttagctggagcaatttgtatggtaaaacatttggtctctcagcatcgtgtattggcctgatcttgctctagcaaagaagatcgagtccggtcagagctagtgatgagtgaaaatcaggcacatgtaaatatatatagcatgactattcgagaacatctaatgctgcacaaattatgtaggtccagtccgatgatattgttcactgctggtttagtttcttactaatgttcagttctgttcattgttctttgtgatcgtgtgtcttgcaactatcaggtatgcaaatatagaaatgttaaactgctggagtggtttgctg

SEQ ID NO: 138676 - DNA, 1149 bp, Zea Mays
acataacgcaagcaaagcctctgctgcgtgctctgctcctctctctcctccatttgctgccgcagctctccgagctcgccgccgccgcctcagcgcaggcgcagcacagcacagattcggagagcctgcccttagcacgcagcgccagtgaagaaggccgagataatggaggtggagacgatgctggacgacgacgtgttcttcgccgagctcagcaagcggatatcgctgctcatcaccgacgacgacgagggcgcggacttctccgccgcgcagttcatccccgccgccgccgccgccgccgcgcccctccaggggttcgcgtcgcgcgcccatgtgccgtcgcaggcgtcgctgctggcgccaccggcctacgcgctgtaccaccactaccaccacggcgccagctacggcggggacgacagcgccagggcggcgtggcagcagctgcagtgcggcagcaagggcaccggcgtgttcatcccgcggtccacgccaggctccgcgcaccccaagaagaagggcaagagccggggcgccgccgccgccgccgccaaggccgcgcgggcggccggcgcgggcgcaccgcccaggaagcgcgtctgatctccgcttctctgcatcgtgatttaatggatcagcaagaaacaaaaacaagaagaagaaaaaggaggggtaaaaaaaagagcagaactacgaactaaccccagatgcagcgctcgtcggaaccagccggattagcttgatatatgtttaattaatcattaattttcagtgttgttgtcattcttatatggtaaataataaaaaaaaccatagctactcccccctgggttaaaatgtataatgtgagccctaggggatcaggctgtgggctggggcaccaccgcaccaataatctctctgtttgtatatatagtaaaagctagcggttcgtagtgccgtagttttcctggctaagtcgatttattaattatttctttgtatttcctttcttcccacatttttgtaagatgaagaaatgaattgtgctattggtgtaccactactatactagagtatagtgcagtgctaaaagaggatgggaatgtcaaatgtgcaatggttagtgtactagtacttttaagctgatgcctcgcgctccgtgct

SEQ ID NO: 138677 - DNA, 105 bp, Zea Mays
atggcaccccgcgcccgcgccgccgccgcagcagccgcagccgaccgcgctgacggggcctccgcccgagttcgtggagcaccagcaggcgcagaaggtggctaa

SEQ ID NO: 138678 - DNA, 2214 bp, Zea Mays
cgccccccgagccgagcgttcccctcgttgccgcgggccggccggaggtaggattccttcaaattcccgctgcgtgcgacggcacgccggcggtcgccgctatgtccccctctctcgtgctggtgcactcactcccgctcccttctcgccgcgcgctccccatccagctgccccgccgcctcgcccccaaacacccgtcccagtggtcgctccgcacgcctcgacgtctcgctgtctttgccagggcttcggcgtccgttgtggtgtcgccgcacggcgagggaggtggtggcacggcggcggggcggaagagcacggggtataggaaccggttcctggacctggcgcggctgggggccgtggcggagggcgcggcggaggccttcttccgcagcgagatccggcggcggctggccgtcactgccgcgctcatcgtgctcagccgcgtggggtacttcatcccgctccccgggttcgaccgccgcctcatcccagactcttacctcagcttctccgcgctccctgcagatgaccttggcgatttctcctcagaattgaagctttcttttttccagctggggatcagtcatcaaatttcagcatctattgtcatgcaggttctctgtcatgttcttccatcacttgaaaagctccgcaaggaaggattagatggccatgagaagttaaaaggctatatgtgtgtctagttgtctatctatcttgaaccatggtggctttctttgtggtttgcaactgtggctgcttttactgtgtcatgcttttccctgcagtattcagtatatgctgcaagttacagggtcaagcatgtaattataacaagtcttctgcttgttcttggtgcaatgtcaatgacatggatttgtgacaccattacagaatttggatttggacatggctcatctttgattatctgtgtgggaattttgactggctacacagatacactacacaagatgataactcagttttcagggaatttttcctattgttggccttacatcttgggagtagctggaatttttatgatactcaccatgggggctgtgttggtgactgaaggatgcaggaagataaagcttcagtactatggattcaaattagcatctggtgcagggaatgaaagcagcccagttacagaggttgagccatatatccccttcaacatcaatccaactggaatgcagcccttgcttacaacctcatacttactagcttttccaagtatcatggccagtatttttgcctcacccttttgggaaaacttgagggaaattttgaatccaaagacttcaactggtggtagtccctgggtttattacttgacatatgctttccttgtcttcatcttcaatatttttgatattgctaacttacccaaagagatatctgattacctgaataagatgtgtgcgagggtaccaaggataaagcctggaagagcaacagtagactatcttacaaagatacaaacatcaacacgtttctggggaggtctactgctaagcttgcttgcaacttcctctttattgcttgaccgatatctcaggcaaataaatgaagggttgtcaataggattcacatcagtcttgattattgtgggctcaattattgagcttagaagatcatatcaagcgtacaatgtgatgccagcactgagcaaagttttgaggagatatggtgcttaagagtatgtaagctgatacgttggtgatgatggcaccatccactagctcgtggtgttgcaaggtcgattggtctttagaaacagcatggatatgatgagaagtttaccgctcaagcttctgttagattaaaaggtggaaggaacatggctttacaatcacatcggactttatcgacaaggtgaactgaggaagcaacaaacatgcccaacaacatggctgtgtgtatttgttggaagtgatctaaaatcttccatgtcctaatcgccatactggatcacatagctaatctgttgggttctataaattctccaccgttcaaatgctccgaaaggaagggcctttggataagtttctctttttttccctttttttgtttgggtgtgcacacattgttggacgggctgtagttgaatgagtagagtgtacgcctcgggctgaagatgagtcggattcaacgacgaacatttttgttgtgcccgcgaatggccaatatttcgctttcatgtac

SEQ ID NO: 138679 - DNA, 2184 bp, Zea Mays
cgccccccgagccgagcgttcccctcgttgccgcgggccggccggaggtaggattccttcaaattcccgctgcgtgcgacggcacgccggcggtcgccgctatgtccccctctctcgtgctggtgcactcactcccgctcccttctcgccgcgcgctccccatccagctgccccgccgcctcgcccccaaacacccgtcccagtggtcgctccgcacgcctcgacgtctcgctgtctttgccagggcttcggcgtccgttgtggtgtcgccgcacggcgagggaggtggtggcacggcggcggggcggaagagcacggggtataggaaccggttcctggacctggcgcggctgggggccgtggcggagggcgcggcggaggccttcttccgcagcgagatccggcggcggctggccgtcactgccgcgctcatcgtgctcagccgcgtggggtacttcatcccgctccccgggttcgaccgccgcctcatcccagactcttacctcagcttctccgcgctccctgcagatgaccttggcgatttctcctcagaattgaagctttcttttttccagctggggatcagtcatcaaatttcagcatctattgtcatgcaggttctctgtcatgttcttccatcacttgaaaagctccgcaaggaaggattagatggccatgagaagttaaaaggctatatatggtggctttctttgtggtttgcaactgtggctgcttttactgtgtcatgcttttccctgcagtattcagtatatgctgcaagttacagggtcaagcatgtaattataacaagtcttctgcttgttcttggtgcaatgtcaatgacatggatttgtgacaccattacagaatttggatttggacatggctcatctttgattatctgtgtgggaattttgactggctacacagatacactacacaagatgataactcagttttcagggaatttttcctattgttggccttacatcttgggagtagctggaatttttatgatactcaccatgggggctgtgttggtgactgaaggatgcaggaagataaagcttcagtactatggattcaaattagcatctggtgcagggaatgaaagcagcccagttacagaggttgagccatatatccccttcaacatcaatccaactggaatgcagcccttgcttacaacctcatacttactagcttttccaagtatcatggccagtatttttgcctcacccttttgggaaaacttgagggaaattttgaatccaaagacttcaactggtggtagtccctgggtttattacttgacatatgctttccttgtcttcatcttcaatatttttgatattgctaacttacccaaagagatatctgattacctgaataagatgtgtgcgagggtaccaaggataaagcctggaagagcaacagtagactatcttacaaagatacaaacatcaacacgtttctggggaggtctactgctaagcttgcttgcaacttcctctttattgcttgaccgatatctcaggcaaataaatgaagggttgtcaataggattcacatcagtcttgattattgtgggctcaattattgagcttagaagatcatatcaagcgtacaatgtgatgccagcactgagcaaagttttgaggagatatggtgcttaagagtatgtaagctgatacgttggtgatgatggcaccatccactagctcgtggtgttgcaaggtcgattggtctttagaaacagcatggatatgatgagaagtttaccgctcaagcttctgttagattaaaaggtggaaggaacatggctttacaatcacatcggactttatcgacaaggtgaactgaggaagcaacaaacatgcccaacaacatggctgtgtgtatttgttggaagtgatctaaaatcttccatgtcctaatcgccatactggatcacatagctaatctgttgggttctataaattctccaccgttcaaatgctccgaaaggaagggcctttggataagtttctctttttttccctttttttgtttgggtgtgcacacattgttggacgggctgtagttgaatgagtagagtgtacgcctcgggctgaagatgagtcggattcaacgacgaacatttttgttgtgcccgcgaatggccaatatttcgctttcatgtac

SEQ ID NO: 138680 - DNA, 779 bp, Zea Mays
ctcttgtgtgtgctccttggatattgaattctcttatccaaattttggtgttgtaataatgtatgcatcagtacttttgctgaatatgaattgctttgtctttacagcactaatgtttgcttatgacaatggagtcacctacaactgccgctggtggtgaactggagagctacttctccttgggtttgacagtatcccactcacagaaagataatgctgaatttccaaaggtttttcaataatgcatactacgggagagttggaggaattagcacaagagagatgaatatgcttgaactggatttattgttcggtctggacttcaggctcaaagtggatatagagactttcgaaagctactgcttacagttggaggaagcactggttcttgttttggagagaccaattcaggtccaagaggccaacgtaactaaacacttgatttgtaacagcagcgccgatgagacttgcaaacacgagctcgggcttgaaaggtacagcagtcaggctgtccaagggtgtagttggtaaatgtgattgggcagatagttttgaaaaaagtgtatgggtccgagtattggtaattcttttatttgacatttaagttgttcagttggccttgtttagtagggccgttattctacttctctacaacactagtgcttgtgagccacgccgttcagtttttttgcggagtgagtttgaaaacattactggagtccggccacgttcaagtatcatttcattaattatatttttactaggtgaacgtgtgcatt

SEQ ID NO: 138681 - DNA, 1864 bp, Zea Mays
gcaaaccatgttcctgctcgcagcaacatatttggaagcatgttgtcacaaagcacatgaattcgacttttgaccctgcatcttatgggaagtgatgaacctctggagctcttgtgtgtgctccttggatattgaattctcttatccaaattttggtgttgtaataatgtatgcatcagtacttttgctgaatatgaattgctttgtctttacagcactaatgtttgcttatgacaatggagtcacctacaactgccgctggtggtgaactggagagctacttctccttgggtttgacagtatcccactcacagaaagataatgctgaatttccaaaggttctgttgcttctctcagcgtatcttgacaagacagttcagcagaatgaagagttactagactccagtaaaataaaggagtcgaccactatctttcatggtcagagggtgcctgaacttagtataaagctgtatgcagagcgtattttcaagtatgcaaagtgcagcccatcttgctttgtgctagcacttatctacatggagagatatctacaacaaccaaacatttacatgacgtcatttagtgttcatcgcctgcttattacaagtgttgttgttgctgccaaattcatagatgatgcgtaaggacccaccataacagctttaagttacatttgtgcatatgtactttgtatggaagtatgatcttacatactgttggccatagactgatatcaggtcttctgtgtgatactgatcatagatgcaaactcaaacttagctgagtcaataaactaatgtcactaggaaatgtctaaatatgatctttaaccatctggaacaacctgacatggtttatggtcagctatcttctttggtatgtaagcaatttacctttttttatattatataagaattaataagcataaacctctttatctctaaatgctagacttatgttttctcagttgtcatttttgtatttcggatggatttcatgtttcccgtagtacttttttttgttaaaccaccagttaatagggatgcatcaatcaattagttgcaacagtcggtagcctatggtggaatttaataggatagtaatgaggtgaggaaaggtcggcaagagtcagatgttgatggccaatatgccccagattagtaagtgaattccaccctgactttggaaaataaacttataatggcacttcaagtagaaggaagatgatattattgttcagggttttgtttattccataacaaatgtaaactgaagaaagttttcgaataacttcttggatatattttatttgcaggtttttcaataatgcatactacgggagagttggaggaattagcacaagagagatgaatatgcttgaactggatttattgttcggtctggacttcaggctcaaagtggatatagagactttcgaaagctactgcttacagttggaggaagcactggttcttgttttggagagaccaattcaggtccaagaggccaacgtaactaaacacttgatttgtaacagcagcgccgatgagacttgcaaacacgagctcgggcttgaaaggtacagcagtcaggctgtccaagggtgtagttggtaaatgtgattgggcagatagttttgaaaaaagtgtatgggtccgagtattggtaattcttttatttgacatttaagttgttcagttggccttgtttagtagggccgttattctacttctctacaacactagtgcttgtgagccacgccgttcagtttttttgcggagtgagtttgaaaacattactggagtccggccacgttcaagtatcatttcattaattatatttttactaggtgaacgtgtgcatt

SEQ ID NO: 138682 - DNA, 1181 bp, Zea Mays
agtgagtggcccttcttcctctcaatacccctctctccctcttgtgggtagcgttgtgcgtcttttcctcagcagcaaccggagagcggctgctcgcctgctcctcctcctagggaaaggacagcggcggcggcggcggcggcgagaagttgggcctgaagcccggacgctttctcccgagataccgcaatactgctagagcactgtcactaatgtttgcttatgacaatggagtcacctacaactgccgctggtggtgaactggagagctacttctccttgggtttgacagtatcccactcacagaaagataatgctgaatttccaaaggttctgttgcttctctcagcgtatcttgacaagacagttcagcagaatgaagagttactagactccagtaaaataaaggagtcgaccactatctttcatggtcagagggtgcctgaacttagtataaagctgtatgcagagcgtattttcaagtatgcaaagtgcagcccatcttgctttgtgctagcacttatctacatggagagatatctacaacaaccaaacatttacatgacgtcatttagtgttcatcgcctgcttattacaagtgttgttgttgctgccaaattcatagatgatgcgtttttcaataatgcatactacgggagagttggaggaattagcacaagagagatgaatatgcttgaactggatttattgttcggtctggacttcaggctcaaagtggatatagagactttcgaaagctactgcttacagttggaggaagcactggttcttgttttggagagaccaattcaggtccaagaggccaacgtaactaaacacttgatttgtaacagcagcgccgatgagacttgcaaacacgagctcgggcttgaaaggtacagcagtcaggctgtccaagggtgtagttggtaaatgtgattgggcagatagttttgaaaaaagtgtatgggtccgagtattggtaattcttttatttgacatttaagttgttcagttggccttgtttagtagggccgttattctacttctctacaacactagtgcttgtgagccacgccgttcagtttttttgcggagtgagtttgaaaacattactggagtccggccacgttcaagtatcatttcattaattatatttttactaggtgaacgtgtgcatt

SEQ ID NO: 138683 - DNA, 656 bp, Zea Mays
gcgttgtgcgtcttttcctcagcagcaaccggagagcggctgctcgcctgctcctcctcctagggaaaggacagcggcggcggcggcggcggcgagaagttgggcctgaagcccggacgctttctcccgagataccgcaatactgctagagcactgtcactaatgtttgcttatgacaatggagtcacctacaactgccgctggtggtgaactggagagctacttctccttgggtttgacagtatcccactcacagaaagataatgctgaatttccaaaggttctgttgcttctctcagcgtatcttgacaagacagttcagcagaatgaagagttactagactccagtaaaataaaggagtcgaccactatctttcatggtcagagggtgcctgaacttagtataaagctgtatgcagagcgtattttcaagtatgcaaagtgcagcccatcttgctttgtgctagcacttatctacatggagagatatctacaacaaccaaacatttacatgacgtcatttagtgttcatcgcctgcttattacaagtgttgttgttgctgccaaattcatagatgatgcgtaaggacccaccataacagctttaagttacatttgtgcatatgtactttgtatggaagtatgatcttacatac

SEQ ID NO: 138684 - DNA, 2816 bp, Zea Mays
ctaccgcgccggaatcatactccttgcgccttctccttcctcaatccgacacgctctccgcgccgccgtcgacctatcgaatggaggcggagcagcaaaagcagcagcgcccgcgccagcgcccgcgccgcaaggggcagaagcggaagttggaggacgaggcatccgccgccaccgccgccgccgcgtcctcgctcggcagtgcgggcgccgacgatgacaacgaggaggaggacggctcggcgggcacccccgagatctgccgccactcccacgcggcgcttgcgcgcgaggtccgcgcgcaggttgatgtcctcattcgctgcgcctcttcgtggcgccacgcagaccgcgccgccgccaagcgcgccacccacgtcctcgctgagctcgccaaaaacgaggaggttgtcaacatgattgtagagggtggcgccgtggcggccttggtgtgccacctagaagagcctgctgtggcggcgcaaacgcaggaggaacaacaactgcggccgtttgagcttgagcctgaacatcaacaatttatagttgatgctggtgcactacctcccctagtgaaacttttgaaaaggcagagaagtactacaaattcaaggatggttaatagcgttatcaagagagcagctgatgcaattaccaaccttgcacatgagaatagcaacatcaaaactagagtcagaatggaaggtggaatcccaccacttgttgaattgctagaatctcaggatcttaaggtgcagagggcagctgcaggggccttgcggactttagcctttaaaaatgatgaaaataaaactcagattgttcaatgcaatgctttgccaactttgatcttaatgctgcgatctgaagatgccgcaattcactatgaagcagttggtgtcattggaaatttggttcattcatcacctaacatcaagaaggaggttcttaatgcaggggcactgcaacctgtgattggattattaagctcatgttgtacagaaagccaaagagaggctgctttgttgctagggcaatttgcttcagccgactcagattgcaaggtccatattgtgcaaaggggtgcagtccgtccactaattgaaatgctacagtcggctgatgtccaactccgggagatgtctgcttttgcactcggcaggcttgcccaggacacacataaccaagcaggtattgcatataatggtggcttggtgcctttgtttaaactccttgactcaaaaaatggatctctgcaacataatgctgcatttgccctttatggagttgcagataatgaggactatgtatctgacttcattaaagtaggaggtgtccaaaagttgcaagatggggaatttattgtgcaggcaacaaaggactgtgtggcaaaaacattgaaaaggttagaggagaagataaatggacgagtgttgaaacacttgctttatttgatgcgagtaggagagcaatctgtgcaaaggcgtgttgctctggctctcgcacacctttgtgctcctgaagatcaaagggcaatttttattgataataatggtctcgacttgcttcttgatcttctgatttccatgagcccaaaacatcaacaagatggctcagcagcattatacaaattggccaacaaagctgcagcactttctcccatggatgctgcccctccatctccaacacctcaggtttatcttggtgagcaatacgtgaatagttcaacactttcagatgttactttcttggtagaaggaaagcgcttttatgcacacagaattgctttgcttgcttcttcggatgcatttcgtgcaatgtttgatggcgggtatagggaaaaggatgcaagagacattgaaattccaaatatcagatgggaggtctttgaactcatgatgagatttatctatacagggtcagtgcagattaacagtgaaatttcacaggatcttcttagagctgctgatcagtatctcttagaaggactcaaacgcttatgtgaatatactattgcgaaggatgtgaatctagataatgtatctgacatgtatgacttgtccgaagcctttcatgccgtgtcactgagacatacatgcatcttgtacattctggaacattttaacaagatctgcaccagagccggttctgcacagctgatccagcgtgttattccagagatccgcaattttctaaccaaggcactgaattcatcaagaagtccaagtccaagcgacaggaactcgcagacttgatgagtcccaattcattggcaccgacgccgtcatctgaccaaagttgctggagatcctgtacagtaaaatttctggcgctgagcgttcaatggtatctattttgggtacatggtggcgcggtccttgaaattaacatcagcaatgtaacaaaattttctaagatctagttgaggataaggataaggagaacatatctcgtactcatgcatcgaccagcttacactgggataggctatagttggatggtcctggccgtaattcgtcggtctcagctttgattgagtttagtgttgtttccactttccagttcacagttcagtgtatgcccgcatctgtttatttaaagtattaagcgtgaacaagttagacattaggacatgtacaatgatatcttgaggtgtctaaagggtttgcaaaaaaaattatggagccgtctctccgtgaagagacgccttctctgactcgtaacctaagtagcaatagatgcctcatttcttattgtacgaattcgtcgtatgttttttcattcggcgctgtataagtgtatttacttttgtattt

SEQ ID NO: 138685 - DNA, 2861 bp, Zea Mays
ctaccgcgccggaatcatactccttgcgccttctccttcctcaatccgacacgctctccgcgccgccgtcgacctatcgaatggaggcggagcagcaaaagcagcagcgcccgcgccagcgcccgcgccgcaaggggcagaagcggaagttggaggacgaggcatccgccgccaccgccgccgccgcgtcctcgctcggcagtgcgggcgccgacgatgacaacgaggaggaggacggctcggcgggcacccccgagatctgccgccactcccacgcggcgcttgcgcgcgaggtccgcgcgcaggttgatgtcctcattcgctgcgcctcttcgtggcgccacgcagaccgcgccgccgccaagcgcgccacccacgtcctcgctgagctcgccaaaaacgaggaggttgtcaacatgattgtagagggtggcgccgtggcggccttggtgtgccacctagaagagcctgctgtggcggcgcaaacgcaggaggaacaacaactgcggccgtttgagcttgaggttgagaagggcgctgccttcactctgggcctcctagctgtaaagcctgaacatcaacaatttatagttgatgctggtgcactacctcccctagtgaaacttttgaaaaggcagagaagtactacaaattcaaggatggttaatagcgttatcaagagagcagctgatgcaattaccaaccttgcacatgagaatagcaacatcaaaactagagtcagaatggaaggtggaatcccaccacttgttgaattgctagaatctcaggatcttaaggtgcagagggcagctgcaggggccttgcggactttagcctttaaaaatgatgaaaataaaactcagattgttcaatgcaatgctttgccaactttgatcttaatgctgcgatctgaagatgccgcaattcactatgaagcagttggtgtcattggaaatttggttcattcatcacctaacatcaagaaggaggttcttaatgcaggggcactgcaacctgtgattggattattaagctcatgttgtacagaaagccaaagagaggctgctttgttgctagggcaatttgcttcagccgactcagattgcaaggtccatattgtgcaaaggggtgcagtccgtccactaattgaaatgctacagtcggctgatgtccaactccgggagatgtctgcttttgcactcggcaggcttgcccaggacacacataaccaagcaggtattgcatataatggtggcttggtgcctttgtttaaactccttgactcaaaaaatggatctctgcaacataatgctgcatttgccctttatggagttgcagataatgaggactatgtatctgacttcattaaagtaggaggtgtccaaaagttgcaagatggggaatttattgtgcaggcaacaaaggactgtgtggcaaaaacattgaaaaggttagaggagaagataaatggacgagtgttgaaacacttgctttatttgatgcgagtaggagagcaatctgtgcaaaggcgtgttgctctggctctcgcacacctttgtgctcctgaagatcaaagggcaatttttattgataataatggtctcgacttgcttcttgatcttctgatttccatgagcccaaaacatcaacaagatggctcagcagcattatacaaattggccaacaaagctgcagcactttctcccatggatgctgcccctccatctccaacacctcaggtttatcttggtgagcaatacgtgaatagttcaacactttcagatgttactttcttggtagaaggaaagcgcttttatgcacacagaattgctttgcttgcttcttcggatgcatttcgtgcaatgtttgatggcgggtatagggaaaaggatgcaagagacattgaaattccaaatatcagatgggaggtctttgaactcatgatgagatttatctatacagggtcagtgcagattaacagtgaaatttcacaggatcttcttagagctgctgatcagtatctcttagaaggactcaaacgcttatgtgaatatactattgcgaaggatgtgaatctagataatgtatctgacatgtatgacttgtccgaagcctttcatgccgtgtcactgagacatacatgcatcttgtacattctggaacattttaacaagatctgcaccagagccggttctgcacagctgatccagcgtgttattccagagatccgcaattttctaaccaaggcactgaattcatcaagaagtccaagtccaagcgacaggaactcgcagacttgatgagtcccaattcattggcaccgacgccgtcatctgaccaaagttgctggagatcctgtacagtaaaatttctggcgctgagcgttcaatggtatctattttgggtacatggtggcgcggtccttgaaattaacatcagcaatgtaacaaaattttctaagatctagttgaggataaggataaggagaacatatctcgtactcatgcatcgaccagcttacactgggataggctatagttggatggtcctggccgtaattcgtcggtctcagctttgattgagtttagtgttgtttccactttccagttcacagttcagtgtatgcccgcatctgtttatttaaagtattaagcgtgaacaagttagacattaggacatgtacaatgatatcttgaggtgtctaaagggtttgcaaaaaaaattatggagccgtctctccgtgaagagacgccttctctgactcgtaacctaagtagcaatagatgcctcatttcttattgtacgaattcgtcgtatgttttttcattcggcgctgtataagtgtatttacttttgtattt

SEQ ID NO: 138686 - DNA, 309 bp, Zea Mays
atgacggccacggcgacgagcagcacgaggccgatggccagagccgagaccggcagtatggtgaagagcgggttcggccggccgctgccgctgccgccgccgctggcgtggtcccggcgcggcgccggccacggggagaacgtccacggcgcgagccgcgcgtccgcgaggtcctccgcggagtctggggccggtgccggtgccggtgccggcggcggcgaaggcggggagaaggcgtccttcattccaatccagcctttcgacgacgaacgatggccggccgggtacgtagccaggacagggcagtga

SEQ ID NO: 138687 - DNA, 1357 bp, Zea Mays
gtggggagaatatgagtattattacgattacgtgtggaggaagataaaattgttcatagggttcagaatctagaaagtgacggattcctactattacaacgactcaaccgattatgtgtttatgttgatttggatggtttttgcccccaacaaattttatagaagctggatgaaaaactgagcgtttggcagtccgcagcagcttttggtggctagaagcttccagaagccgaaacgcttgaaccggccgccccgagcacgaatgtacacctatccgagtccacccaactaatcacgcccaatcagaacagactcggtcgcttcaccactccactcgccgcaggccgccgggcgccgccgaggggatcggagcaagatgttcttccacatcgtgctggagcggaacatgcagctgcacccacgacacttcgggccgcacctccgcgacaagctcgtttccaagctcatcaaggacgtcgagggcacctgcagcgggcggcacgggttcgttgtggcgatcacgggtgtggaggacatcggcaaggggctcatccgggaaggcacgggatacgtcaccttccccgtcaagtaccagtgcgttgtctttagacccttcaagggcgagatcctcgaagctgtcgtcaccatggtgaacaagatgggcttctttgcggaggctgggccggtgcagatcttcgtgtccaaccatttgattccagacgatatggagttccaatcaggagatgtgccgaactacacaacttctgatggatcggtgaaaattcaaaaagagagtgaggtgcggctgaagattattggtactcgtgtcgatgctacagaaattttttgcattggcacaataaaggatgattttctgggtgttatcagcgatcctggtgcggcagtgtaaatggtctaagaagcgagattgtactccattgttctgacttctgagtactatcgcagacgtgtgtaatcgctggtccgttaaaactgcaatggctgtactgactgcggaacttgttgagaatgatgtgactaggaccttgtttagggcctgtttggttctttagtatggccctgattggcacaactgctgcttattgaaaaaacagcttatctgataagctggtgaaaaatagcttctgcttgttgactgcttttagtgtattttgagaagcagctgaactgataagctgctgcagaagctaactgtttggtaaaacttttgcttaaatttgtgaagaagttgaaaataagctgtgccaaacaaggcctatagaggctaaagtttagtccctaccttgtttggttgcatggactaaaaatattcgtattaaatgacttgtaagaagac

SEQ ID NO: 138688 - DNA, 1158 bp, Zea Mays
tgcctgactgccccctactagtgctgtgcgaatagccgcttgtcgactatcgtcgtcccgactgccgtcgcccttcggccatcgcctagggcccaggcacccagctgcgagccactggccgcccggcgcggcgatgccccgttccggggccccgccgatcgccgtgggcccttggcggcttggcgccctctgctgctccatcgtgtggcttgtgcagcactgtagtagagccacgctggcggttgccgccgtgcagttagcgcctgtcgcggtgtcaccccgtccgccatcaaggtcgaggctcatcccaggaggcagccgtccgccgatttgtgaagttgaagttgaggtcctgatttgaaaatgaagaggaagatcaatgctaccactgatttgagagcttttttagcaagagctgctgcaaaaaagaaagatagtgctgctccatcttctaatgaaagagagatgcaattggtgatattccaaggacagactgaaactaataatgcaacgcccgcagaacgagagagttgagcctgaacctccaataatagaagatgttgaagacaatgatgattttgaatcagtgcacttgaatgggacaacatcgagtgaggataatgatagtgatgataatgatatttatggcattgagcatgatcctggattcaggactccattctcaagctattttattaataaccaagatgcggttagaagggcttatattgcattggggccatgtcaaccaaatataaagaaggatgattttccccaacatgaatgtggaggcataagtcgcttcctaccaaagtggttttccgagtttaattggcttgagtatagtatggataaagatgttgtattgttttgtttgctatctgttcaaagataacaacaaattctctggtggagatgctttcgttaatgaaggtttagaaattggaatgttaaagctagattgcttaagcatgttggtgttgttgatagtgctcattgtgaagctgaggagaaatataatttatttttgacacctaaagcatcaatttgtgagtcagttgcctcaaatacttcattgtataaggatcaatacctagctcgtttgacaggcaattcttcttgcaagtcaaggatgaggacattatcactcaatttcaa

SEQ ID NO: 138689 - DNA, 228 bp, Zea Mays
atgccccgttccggggccccgccgatcgccgtgggcccttggcggcttggcgccctctgctgctccatcgtgtggcttgtgcagcactgtagtagagccacgctggcggttgccgccgtgcagttagcgcctgtcgcggtgtcaccccgtccgccatcaaggtcgaggctcatcccaggaggcagccgtccgccgatttgtgaagttgaagttgaggtcctgatttga

SEQ ID NO: 138690 - DNA, 2657 bp, Zea Mays
cgacccgcatcgtcttcctctgttttgccagggccaaccaagccaacgggtcgagttgaaccaacgccattacgagagaagaggggttggggaggtagacgagtggcgtagggaactcggtcgtggggcggtagagtgagcgagtgagagagaggcagggctgtcacgagcgtgggcaggcgatcgcgggagcgatgacgacggcggccggcatgccggggttgccggtgggctcggccgccgcggctggggttcccgcggcgcccgaggtggcggccagggacgcggtgatcggctggttccgcggcgagttcgcggccgcgaacgccatgattgacgcgctgtgcggccacctggcgcagatcggcggcggcgggcccgagtacgatcccgtcttcgccgcgatccaccgccgccgcgccaactggttccccgtcctccacatgcagaagttctaccccgtcgcggacgtcgccgccgagctgcgccgagttgcggacgcccgcgccgccgcagggtcctgctgctactccgaggaggccgcgtccacggtgatccacgagcccatggaagaggctgaggctgaggctgaggctgagcccgaacccgagcaggagcacgagcaggatccggcaccggcggccgagctggctgacggcgccgtggagtaccacgagccggacgtggaagttgattcatcgggagattcgtcggagcggaagcccccctccaccgaagatgacaccgtcgcagacggacatcatactgatcaaggatctcaaggggaacacagcctaccagagagctatcccatctgctctgaccacgaggagtgcattgcccgtcctgagaggatcaagatccagaaaggtttcgtggccaaggaatccgtgaaggggcacatggttaatgtcgtgaaaggcttgaagatatatgaagatgcgtttacgacatcagagatcatgaaagttgcagatttcatcaacgaaattcgtcaggctggcagaaatggagaactttcaggtgagactttcatattcttcaacaagcagatcaaaggaaacaagagggagatcatacagcttggtgtaccgttatttcaacctaccacagaggatgctaattgtcacacagaaccaatcccccttgtcctgcaggctgtcattgaccaccttgttctttggcgtttaataccagaaagcaggaaaccaaatagtgtcgtcatcaacttcttcgatgaggatgaacattcgcagccctacttcaagcctccccatcttgacaaccccatttgcactcttctgctgtctgaaaccacgatggcatttggcaggtcacttgtcactgacagcaacggtaactacaaaggacctctcacactttcactaaagcaagggtccttactagtgatgcgtgggaacagtgccgacatggcgcgacatgtggtgtgcccgtcgtccaaccggcgcgtgagcatcacgttcgcaagggtgaggccatcgacgccggtggacatgagcccactcccgtcccccaccaaggccatgacaccctggcagccgcagccggtcacggcctcccaggtgccgtcgcccgtgagcatgacgcagaagcccccggtcagcggtgccataatcggttatgccccgaccccgcaggccgtgctggcgcccgcagcctggggcatggccatgcgcgcgcccgtcatgatggtggctgcagcgcctgcgaggcccatggtgatggcctcatcgggcaccggcggcggcaacatcagcaagcggatgggccgcagcggcaccggcgtgttcctgccttggacggtcggcccgaagcggtacaacaagcaccttccaccgcgcatccagaagcgccggttctcggcgatgatgtcgcccatcgaggcgcagggctgaggacccgcccgacgtcatgtcgccgtcaaaccgaacggccaagatcaagtaggacccggtgcaacgagccaccgtttaattcctagggttcttggagtgttttttttttctctctcgtcgtcgagtcaaaaaaagaaaaaagaaaagaaatggtcaaaacgcgcggacagtgagtttggacgtctgtgtatttcggtgacctgtgtttttttttttctctggagggcttttggtccgcatgtaatttagccgggtttgtgacttgtgactttgtgagtgagtagcggagtttagaagcggtagaagaatatgggtctagggataggtgaagtcagaatcaggacaaggtttttcgtttgttttcatccttcttttttcagttttttaagatgatgcttttagttttgctatatcctcgtcttttccttttttttttcgtaccctatttttccgtaccgagaagaatgttgacatgcatatatgcatttcatgctgagtttgaagttctataagcaaaagatgcatcttgtgttgcccacttactggacgtcaatctttttgcttatatctttaatcttgaggtcttgtttggttatttcgaattgaaagaaaaatgatctcaatattttttaaatcgattttggtgtttgacgtccattataaatcacatggactaactaatttggctaattgctatttttctcatgtgcataaagttcaacataaacataaataaaaaga

SEQ ID NO: 138691 - DNA, 2855 bp, Zea Mays
tttgtccacatgttgctgttgttagtcagcttatctttttgcaacccgtctcgattttagaagatttcagtcgtcctctcccaaaactcccaaccgatggactatgactttcttttttaaaatgaaagtagatggaaaaaaattcgtgtgtttcttgtgcgtgcgatggaccattgcgaaagctaaaaagaaaaaggagagaatgatataagtagagcgggttactggagtatcatctttttatacctgtccttgcccaataattgaacatgtatactgctgctggtgagctggtccctgctttcattcggttcgtgcacggtgcacctacatatctatactacaatgcccgtgttcacttctttcagctttggcgaatctcgtctatgcgctctcctctttatcatatatattcatatatcgaggaggacactttttcccctccaatcatgctatagtttctataaaggacaaacctagtggagtggtgaaagctgtctcaccgagtcaccaattgtggatttgaagtagcatgtccgtatttacttacagggaaggcttgtctcggtttttttctttatcagatcctactcatgtcagagcctccgatactgggcaagcccatgctatactccgtagaaagtgacaccaaaagggtgcagcagcttgagattcaacaaaaaaatgaaatcagttctttctgggttatgattaatattttgaagattcaacgggtgataaaagcagcatatcacagaacgatatgtgagaatttgaacgggccatagattggaccggttgttgctgatcgagggaccttgccccctagaaaactcccaagtgatgatttaatcatgccatgcgagaagagtgaggattaagtacagtctgtattttattttactgaaatgtttgtgttcttggatccgtttttctctccctcgaacacttgtatccgtaggcgttttaatttatttttcttgctttctcctaagttaaaagttttgatacccagcaataagaatgttatgtcctaaatgagatagtttcgttgaagaatttggtgtctatttgcttttttactgcaagccgtagtatatatatatccaacaatggtaggatagcctctgaggttatatattacttagcagatcatactgatcaaggatctcaaggggaacacagcctaccagagagctatcccatctgctctgaccacgaggagtgcattgcccgtcctgagaggatcaagatccagaaaggtttcgtggccaaggaatccgtgaaggggcacatggttaatgtcgtgaaaggcttgaagatatatgaagatgcgtttacgacatcagagatcatgaaagttgcagatttcatcaacgaaattcgtcaggctggcagaaatggagaactttcaggtgagactttcatattcttcaacaagcagatcaaaggaaacaagagggagatcatacagcttggtgtaccgttatttcaacctaccacagaggatgctaattgtcacacagaaccaatcccccttgtcctgcaggctgtcattgaccaccttgttctttggcgtttaataccagaaagcaggaaaccaaatagtgtcgtcatcaacttcttcgatgaggatgaacattcgcagccctacttcaagcctccccatcttgacaaccccatttgcactcttctgctgtctgaaaccacgatggcatttggcaggtcacttgtcactgacagcaacggtaactacaaaggacctctcacactttcactaaagcaagggtccttactagtgatgcgtgggaacagtgccgacatggcgcgacatgtggtgtgcccgtcgtccaaccggcgcgtgagcatcacgttcgcaagggtgaggccatcgacgccggtggacatgagcccactcccgtcccccaccaaggccatgacaccctggcagccgcagccggtcacggcctcccaggtgccgtcgcccgtgagcatgacgcagaagcccccggtcagcggtgccataatcggttatgccccgaccccgcaggccgtgctggcgcccgcagcctggggcatggccatgcgcgcgcccgtcatgatggtggctgcagcgcctgcgaggcccatggtgatggcctcatcgggcaccggcggcggcaacatcagcaagcggatgggccgcagcggcaccggcgtgttcctgccttggacggtcggcccgaagcggtacaacaagcaccttccaccgcgcatccagaagcgccggttctcggcgatgatgtcgcccatcgaggcgcagggctgaggacccgcccgacgtcatgtcgccgtcaaaccgaacggccaagatcaagtaggacccggtgcaacgagccaccgtttaattcctagggttcttggagtgttttttttttctctctcgtcgtcgagtcaaaaaaagaaaaaagaaaagaaatggtcaaaacgcgcggacagtgagtttggacgtctgtgtatttcggtgacctgtgtttttttttttctctggagggcttttggtccgcatgtaatttagccgggtttgtgacttgtgactttgtgagtgagtagcggagtttagaagcggtagaagaatatgggtctagggataggtgaagtcagaatcaggacaaggtttttcgtttgttttcatccttcttttttcagttttttaagatgatgcttttagttttgctatatcctcgtcttttccttttttttttcgtaccctatttttccgtaccgagaagaatgttgacatgcatatatgcatttcatgctgagtttgaagttctataagcaaaagatgcatcttgtgttgcccacttactgga

SEQ ID NO: 138692 - DNA, 2616 bp, Zea Mays
cgacccgcatcgtcttcctctgttttgccagggccaaccaagccaacgggtcgagttgaaccaacgccattacgagagaagaggggttggggaggtagacgagtggcgtagggaactcggtcgtggggcggtagagtgagcgagtgagagagaggcagggctgtcacgagcgtgggcaggcgatcgcgggagcgatgacgacggcggccggcatgccggggttgccggtgggctcggccgccgcggctggggttcccgcggcgcccgaggtggcggccagggacgcggtgatcggctggttccgcggcgagttcgcggccgcgaacgccatgattgacgcgctgtgcggccacctggcgcagatcggcggcggcgggcccgagtacgatcccgtcttcgccgcgatccaccgccgccgcgccaactggttccccgtcctccacatgcagaagttctaccccgtcgcggacgtcgccgccgagctgcgccgagttgcggacgcccgcgccgccgcagggtcctgctgctactccgaggaggccgcgtccacggtgatccacgagcccatggaagaggctgaggctgaggctgaggctgagcccgaacccgagcaggagcacgagcaggatccggcaccggcggccgagctggctgacggcgccgtggagtaccacgagccggacgtggaagttgattcatcgggagattcgtcggagcggaagcccccctccaccgaagatgacaccgtcgcagacggacatcatactgatcaaggatctcaaggggaacacagcctaccagagagctatcccatctgctctgaccacgaggagtgcattgcccgtcctgagaggatcaagatccagaaaggtttcgtggccaaggaatccgtgaaggggcacatggcgagttccaactttacaccactcggcaatctttctgtacagaaggactaggagatgctgtaggaagtagtagcacttctattcatcttaaatttcatttcatctgaatagactcttttcttactgatgttcatgaccattttctacaaccaggttaatgtcgtgaaaggcttgaagatatatgaagatgcgtttacgacatcagagatcatgaaagttgcagatttcatcaacgaaattcgtcaggctggcagaaatggagaactttcaggtgagactttcatattcttcaacaagcagatcaaaggaaacaagagggagatcatacagcttggtgtaccgttatttcaacctaccacagaggatgctaattgtcacacagaaccaatcccccttgtcctgcaggctgtcattgaccaccttgttctttggcgtttaataccagaaagcaggaaaccaaatagtgtcgtcatcaacttcttcgatgaggatgaacattcgcagccctacttcaagcctccccatcttgacaaccccatttgcactcttctgctgtctgaaaccacgatggcatttggcaggtcacttgtcactgacagcaacggtaactacaaaggacctctcacactttcactaaagcaagggtccttactagtgatgcgtgggaacagtgccgacatggcgcgacatgtggtgtgcccgtcgtccaaccggcgcgtgagcatcacgttcgcaagggtgaggccatcgacgccggtggacatgagcccactcccgtcccccaccaaggccatgacaccctggcagccgcagccggtcacggcctcccaggtgccgtcgcccgtgagcatgacgcagaagcccccggtcagcggtgccataatcggttatgccccgaccccgcaggccgtgctggcgcccgcagcctggggcatggccatgcgcgcgcccgtcatgatggtggctgcagcgcctgcgaggcccatggtgatggcctcatcgggcaccggcggcggcaacatcagcaagcggatgggccgcagcggcaccggcgtgttcctgccttggacggtcggcccgaagcggtacaacaagcaccttccaccgcgcatccagaagcgccggttctcggcgatgatgtcgcccatcgaggcgcagggctgaggacccgcccgacgtcatgtcgccgtcaaaccgaacggccaagatcaagtaggacccggtgcaacgagccaccgtttaattcctagggttcttggagtgttttttttttctctctcgtcgtcgagtcaaaaaaagaaaaaagaaaagaaatggtcaaaacgcgcggacagtgagtttggacgtctgtgtatttcggtgacctgtgtttttttttttctctggagggcttttggtccgcatgtaatttagccgggtttgtgacttgtgactttgtgagtgagtagcggagtttagaagcggtagaagaatatgggtctagggataggtgaagtcagaatcaggacaaggtttttcgtttgttttcatccttcttttttcagttttttaagatgatgcttttagttttgctatatcctcgtcttttccttttttttttcgtaccctatttttccgtaccgagaagaatgttgacatgcatatatgcatttcatgctgagtttgaagttctataagcaaaagatgcatcttgtgttgcccacttactgga

SEQ ID NO: 138693 - DNA, 1134 bp, Zea Mays
cgacccgcatcgtcttcctctgttttgccagggccaaccaagccaacgggtcgagttgaaccaacgccattacgagagaagaggggttggggaggtagacgagtggcgtagggaactcggtcgtggggcggtagagtgagcgagtgagagagaggcagggctgtcacgagcgtgggcaggcgatcgcgggagcgatgacgacggcggccggcatgccggggttgccggtgggctcggccgccgcggctggggttcccgcggcgcccgaggtggcggccagggacgcggtgatcggctggttccgcggcgagttcgcggccgcgaacgccatgattgacgcgctgtgcggccacctggcgcagatcggcggcggcgggcccgagtacgatcccgtcttcgccgcgatccaccgccgccgcgccaactggttccccgtcctccacatgcagaagttctaccccgtcgcggacgtcgccgccgagctgcgccgagttgcggacgcccgcgccgccgcagggtcctgctgctactccgaggaggccgcgtccacggtgatccacgagcccatggaagaggctgaggctgaggctgaggctgagcccgaacccgagcaggagcacgagcaggatccggcaccggcggccgagctggctgacggcgccgtggagtaccacgagccggacgtggaagttgattcatcgggagattcgtcggagcggaagcccccctccaccgaagatgacaccgtcgcagacggacgtaagtacaaacactctcgaccggcaaattaaatcctcccgtgtagagcagagttcctaaaattgtcaaaataaaatttcggccacttcgtaacttttggatccggtagccaggtgtggcttcctccgcaagttttttcccttagtaatctcctaccttttgggcctaactataacgggatgagtaatgtcttttttgggaattctatttatgttttcgattcaggaggttaacaagcttccagattacgcttaatcatggcactattgcttaaagctgcacaggagcattggttcatgtgaaatgggaatggagatggcgcacgggtccatttcttctggtggttagtggaaaattggagcggaggtccaataa

SEQ ID NO: 138694 - DNA, 102 bp, Zea Mays
ctgcgaaatttaaacccccaagcgagttctcaatgcaaactgcggtccgcactgaggcacgttaattatagagcacgaacacaagttgatcatccataaccc

SEQ ID NO: 138695 - DNA, 1130 bp, Zea Mays
aggattcacaagtgctcgtagcaaatctacaaaatccccaaccgcctctcaacaaagtctccccacggaggtacacagctacgcgcaaaccgcgtctcgcgcgaagaatccgcatttccccttccccgcaccgcaccgcacccaacccccgtcggagagagagatggcatcggtggcggagatgcagcccctcgcgccggcggggtaccgccgcgcgccggagatgaaggagaaggtggaggcgtcggtggtggacctggaggccgggaccggggagacgctgtacccggggatctcgcgcggggagagcgccctccgatggggcttcgtccgcaaggtctacggcatcctcgctgcgcagctgctcctcaccaccgccgtctccgccctcaccgttctccaccccaccctcaacgccacgctctccgactccccgggcctcgcgctcgtgctcgccgtcctgcccttcatcctgatgatcccattgtatcattatcagcacaagcacccacacaatttcgttttcctgggtctgttcacgttgtgcttgagcttcagcatcggtgtggcttgtgctaacacccaagggaaaatcgttctggaggctttagtgctgacggctggcgtggtggtttctctgactgcgtatgctttctgggcgtcaaagaagggttttcttcccactgggacccgtgtcggtgggcttgttcggtgggctaggggctctggtcttctcaggcttcatcctgtacgacaccgagaacctgatcaagcgccacacctacgacgagtacatctgggcgtcggttgggctgtacctcgacatcctgaacctgttcctctccatcctgaacatgctcaggagcatgcaatccgacaactagcctcttgatcgaacacggtatacccccatggtaaatgcggtcctgtgctctggttgttagaggacgggatcgacgtgcgacatatgtattgtgtgagcccactcgtgtcaacactgcaaacaattgtggtcatgtcaccttgtatgttcttggtcacttttcaaacaattgtaagtacctcatatcgttttgcgctcgtgctattcgcgctaaaaatcacaatgatccagtaacaggttgtcatca

SEQ ID NO: 138696 - DNA, 1204 bp, Zea Mays
aggattcacaagtgctcgtagcaaatctacaaaatccccaaccgcctctcaacaaagtctccccacggaggtacacagctacgcgcaaaccgcgtctcgcgcgaagaatccgcatttccccttccccgcaccgcaccgcacccaacccccgtcggagagagagatggcatcggtggcggagatgcagcccctcgcgccggcggggtaccgccgcgcgccggagatgaaggagaaggtggaggcgtcggtggtggacctggaggccgggaccggggagacgctgtacccggggatctcgcgcggggagagcgccctccgatggggcttcgtccgcaaggtctacggcatcctcgctgcgcagctgctcctcaccaccgccgtctccgccctcaccgttctccaccccaccctcaacgccacgctctccgactccccgggcctcgcgctcgtgctcgccgtcctgcccttcatcctgatgatcccattgtatcattatcagcacaagcacccacacaatttcgttttcctgggtctgttcacgttgtgcttgagcttcagcatcggtgtggcttgtgctaacacccaagggaaaatcgttctggaggctttagtgctgacggctggcgtggtggtttctctgactgcgtatgctttctgggcgtcaaagaagggcaaggaattcgggtacctggggcctatcctgtcttccgcgcttactatcctcgtcctaactagctttcttcaggttttcttcccactgggacccgtgtcggtgggcttgttcggtgggctaggggctctggtcttctcaggcttcatcctgtacgacaccgagaacctgatcaagcgccacacctacgacgagtacatctgggcgtcggttgggctgtacctcgacatcctgaacctgttcctctccatcctgaacatgctcaggagcatgcaatccgacaactagcctcttgatcgaacacggtatacccccatggtaaatgcggtcctgtgctctggttgttagaggacgggatcgacgtgcgacatatgtattgtgtgagcccactcgtgtcaacactgcaaacaattgtggtcatgtcaccttgtatgttcttggtcacttttcaaacaattgtaagtacctcatatcgttttgcgctcgtgctattcgcgctaaaaatcacaatgatccagtaacaggttgtcatca

SEQ ID NO: 138697 - DNA, 1734 bp, Zea Mays
aaaagccttgatgtgtccgtctccgtcatgaagacaaacattcaccgagccgaccgttgccttccccccaactcccagccccagcgtcaactgactacactcgctgactcgctcccccggttccccttctctgctcgccatcttttgctctccgcttggctcgtcaatcacctcctacgctccacacgccgccggcgactacaactgcttctgccgtggttacagagaagaagggtttggggagaagacaacctaaatcaattggatctgggagtatcagatctaaaaagtcaggttttcatcaaggtagaaaaagaaacttttctgtccggtcatggctttcccaactgcagcagctgttttgcttaatgagaacatgcagattcataaaggaaacagggttgatgcaccaagtgccaaaccactgaaatcatcagccaaacctgagagaaaggctcttcaggatgtgtctaacattcctaaaggcactgctttaaagaacagatccacagtcaaagaggggtccgccttgaaagaaaggcctgcactccacaatgtgtctaacaacctcaaagagaggtccatcctgaaagagaggcctcctcttcaggatgtgtctaacacccgcaatgagaggtccatcctgaaagagaaatctgccctgtgtagccatgaagctattaagaacccagtgaatatttttgctgatgacgaagagaccaaagggtgccatgaatgggctaaggatgggatggagggcactcacttcactggaaatgattctcagaagttggataaagatgtgcaacacaaacgtatcaagaagaaagtggcaaaagttacgtcagcattgtatggctggtcacatgaggtatatggtcatgtgatgtttatggctatggttcccaagttttctgaagaatcgaaagagctggagctggaaccagagattcttccagacatcactaggtgtatgtctacctcaggcaagagggatgatgcaccaagcgccaaacggctgaagcctaagcttcaagaaccgaaggctcttcaggttcaggatttgtctaacactgtcaaagggagcccttctctgtgcagccatgaagctgtgaagaacccagtgaaaatattcactgttgaagagaccaaaaagtgtcatgaatcggctaatgatgtgtcggagggcactcacttcacaggaaatgatcgtcagaagctggataaggatgtgcaaggtgacaaaacacagctggttgaagattctcctactgatgatgagcttgacgactacccatttttggacaacagtcctgttaagtttgagctgaaagatgagtcagtgattccagatattggagcaatctgaagtgatagtgtttgtgcgattgttctgtagcaatctatgtagtacgatgtttagtacatgttgtttgttctgtagcaaactatgtagtttgagctgaaagatgagtcagtgcctcatcgggtacttttgagtaccgtagcggttgtcaagtttcatgctctcctgaaacatccttcgcaactcgcaagtgaaactctggtttatgccctgaatcagctgctgaataagctaatgattgcatgagtatccgttgatgcatagtagtgaaaggaatggctaagagggagtgaattagtttttttttaattttgctcaaatctatgttttcagttttcagctaatgattgcatgagtatccgttgtac

SEQ ID NO: 138698 - DNA, 1659 bp, Zea Mays
catgaagacaaacattcaccgagccgaccgttgccttccccccaactcccagccccagcgtcaactgactacactcgctgactcgctcccccggttccccttctctgctcgccatcttttgctctccgcttggctcgtcaatcacctcctacgctccacacgccgccggcgactacaactgcttctgccgtggttacagagaagaagggtttggggagaagacaacctaaatcaattggatctgggagtatcagatctaaaaaggttttcatcaaggtagaaaaagaaacttttctgtccggtcatggctttcccaactgcagcagctgttttgcttaatgagaacatgcagattcataaaggaaacagggttgatgcaccaagtgccaaaccactgaaatcatcagccaaacctgagagaaaggctcttcaggatgtgtctaacattcctaaaggcactgctttaaagaacagatccacagtcaaagaggggtccgccttgaaagaaaggcctgcactccacaatgtgtctaacaacctcaaagagaggtccatcctgaaagagaggcctcctcttcaggatgtgtctaacacccgcaatgagaggtccatcctgaaagagaaatctgccctgtgtagccatgaagctattaagaacccagtgaatatttttgctgatgacgaagagaccaaagggtgccatgaatgggctaaggatgggatggagggcactcacttcactggaaatgattctcagaagttggataaagatgtgcaacacaaacgtatcaagaagaaagtggcaaaagttacgtcagcattgtatggctggtcacatgaggtatatggtcatgtgatgtttatggctatggttcccaagttttctgaagaatcgaaagagctggagctggaaccagagattcttccagacatcactaggtgtatgtctacctcaggcaagagggatgatgcaccaagcgccaaacggctgaagcctaagcttcaagaaccgaaggctcttcaggttcaggatttgtctaacactgtcaaagggagcccttctctgtgcagccatgaagctgtgaagaacccagtgaaaatattcactgttgaagagaccaaaaagtgtcatgaatcggctaatgatgtgtcggagggcactcacttcacaggaaatgatcgtcagaagctggataaggatgtgcaaggcaagcgtgacaaaacacagctggttgaagattctcctactgatgatgagcttgacgactacccatttttggacaacagtcctgttaagtttgagctgaaagatgagtcagtgattccagatattggagcaatctgaagtgatagtgtttgtgcgattgttctgtagcaatctatgtagtacgatgtttagtacatgttgtttgttctgtagcaaactatgtagtttgagctgaaagatgagtcagtgcctcatcgggtacttttgagtaccgtagcggttgtcaagtttcatgctctcctgaaacatccttcgcaactcgcaagtgaaactctggtttatgccctgaatcagctgctgaataagctaatgattgcatgagtatccgttgatgcatagtagtgaaaggaatggctaagagggagtgaattagtttttttttaattttgctc

SEQ ID NO: 138699 - DNA, 1657 bp, Zea Mays
catgaagacaaacattcaccgagccgaccgttgccttccccccaactcccagccccagcgtcaactgactacactcgctgactcgctcccccggttccccttctctgctcgccatcttttgctctccgcttggctcgtcaatcacctcctacgctccacacgccgccggcgactacaactgcttctgccgtggagaagaagggtttggggagaagacaacctaaatcaattggatctgggagtatcagatctaaaaagtcaggttttcatcaaggtagaaaaagaaacttttctgtccggtcatggctttcccaactgcagcagctgttttgcttaatgagaacatgcagattcataaaggaaacagggttgatgcaccaagtgccaaaccactgaaatcatcagccaaacctgagagaaaggctcttcaggatgtgtctaacattcctaaaggcactgctttaaagaacagatccacagtcaaagaggggtccgccttgaaagaaaggcctgcactccacaatgtgtctaacaacctcaaagagaggtccatcctgaaagagaggcctcctcttcaggatgtgtctaacacccgcaatgagaggtccatcctgaaagagaaatctgccctgtgtagccatgaagctattaagaacccagtgaatatttttgctgatgacgaagagaccaaagggtgccatgaatgggctaaggatgggatggagggcactcacttcactggaaatgattctcagaagttggataaagatgtgcaacacaaacgtatcaagaagaaagtggcaaaagttacgtcagcattgtatggctggtcacatgaggtatatggtcatgtgatgtttatggctatggttcccaagttttctgaagaatcgaaagagctggagctggaaccagagattcttccagacatcactaggtgtatgtctacctcaggcaagagggatgatgcaccaagcgccaaacggctgaagcctaagcttcaagaaccgaaggctcttcaggttcaggatttgtctaacactgtcaaagggagcccttctctgtgcagccatgaagctgtgaagaacccagtgaaaatattcactgttgaagagaccaaaaagtgtcatgaatcggctaatgatgtgtcggagggcactcacttcacaggaaatgatcgtcagaagctggataaggatgtgcaaggcaagcgtgacaaaacacagctggttgaagattctcctactgatgatgagcttgacgactacccatttttggacaacagtcctgttaagtttgagctgaaagatgagtcagtgattccagatattggagcaatctgaagtgatagtgtttgtgcgattgttctgtagcaatctatgtagtacgatgtttagtacatgttgtttgttctgtagcaaactatgtagtttgagctgaaagatgagtcagtgcctcatcgggtacttttgagtaccgtagcggttgtcaagtttcatgctctcctgaaacatccttcgcaactcgcaagtgaaactctggtttatgccctgaatcagctgctgaataagctaatgattgcatgagtatccgttgatgcatagtagtgaaaggaatggctaagagggagtgaattagtttttttttaattttgctc

SEQ ID NO: 138700 - DNA, 2198 bp, Zea Mays
gaaaccgcatgcatgcggctgccatgtttttcggatctgtcataaaaataggatcgtaataacaacatactaaagctatcaacctctaattgactcggtatttacgcttataattgagggattttatgctcaaaacttaaggtttttacgcttcacccggagatgcgtccaccagtgaacaacatgtcagattttttacgcagtgatcgtaataacaacctactagagctatcaacctctcacattggctcggtatatacgcttataattgagggattttatgctcaaaacttaaggttattacgctccaacccggaggttagtgaagttagaagtttggaaagggatcaagtagagagcgatctaacatttgctggttttgcggtcttcaattgtcctataaggagcgactctggtgctgtcctacaagaactgggacaatcttcccatgacttggtcatgatcaccggagaccaagctttgactgcctgccatgttgctagccaagtacatatatcttccaaacctgttttgattttgacacggataaagactggtggttttgagtgggtttcgccagatgaaactgatagagctccatacagtgctgtggaggttgcagtgttatcagaatctcatgacctttgtattaatggggactgttttgaaatgctacaaagtactgaggctgttctccaggttatcccttatgtgaaggttttttcacgtgttgctccagaacaaaaagaacttgtactaactacattcaaaagtgttgggagggtgacactgatgtgtggagatggaaccaatgatgttggtgcactgaagcaggcacatgtcggcgttgctcttttgaatgctgaaccagttcagaaagtggattcaaaatctaaagctgaaaataaatctgggaaattgaaaaacaagaagcctgctaatgaagcatcatcacaagtgactccggtagctaatagttctggtaaagcatccagcagcctttccttgactgctgctgagaggcagcgagaaaagctgcagaagatgttggatgaaatgaatgatgaaagtgatggtcgttcagcaccaattgttaagcttggtgatgcttctatggcttcacctttcacagcaaagcatgcatctgttacccctactcttgatatcatccgtcagggaagaagcaccctagtcactacacttcaaatgttcaagattcttgggctcaattgccttgcgacagcttacgttctcagtgtcatgtacttggatggtgtcaaactgggcgatgttcaggctacaattagtggtgtcttcactgcagccttcttcctcttcatctccaatgctcggccactccaaacgctgtctgcagagcggcctcagcctaacatattctgtgcatacgttctgctctcgattcttggccagttcgccatgcacatattcttccttatcacggctgtcaatgaagcatcaaagcatatgccagaggaatgcattgagcctgactcagacttccatccaaaccttgtgaatacggtttcgtacatggtgaacatgatgatccaggtggcaacctttgctgtaaactacatgggccacccatttaatcagagcatatccgagaacaagcccttcaagtatgcattgtatggagcggttgctttcttcacagtgatcacatcagatatgttcaggggtttgaatgactacatgaaacttgaacctttgccagagggaatgcgtggcaaattgatgttgtgggctattctaatgttttgtggttgctacggatgggagcggctcctgcgatgggtgttcccggggaagattccggcgtgggagaagcgccagaaacaggcagttgcaagcttggagaaaaaacaccactagaattcttttagttgtctgcacttctttaccctttgatgcccatttcgatacttggtagtacatactgatcatgtcttgtcatggtttcaatctaatctgtagcctaggggaattttggcagtgaaagccctaaatgatagcatagagggtcacttatcaggattgttaaattttcggttacaatatgaaagttaatattagatggcaatgcatatcgggtgatgtacaaggcaaaatacagaaactatgccaggatttccttcattcttctactcttacaatgcgcattgatcttaatgtgt

SEQ ID NO: 138701 - DNA, 2193 bp, Zea Mays
atacttttgtcatactttagctttagcatcttcaccatacagttgagtgtctctcggatccacctgtttttgctctgtacaaactttgcttaaattacgaaagaaaaaggaaaaggaaaagtctctcgagaattcgaaataattggaattagatcgtcgtggggattccacatcgtaaccactgaagacgaggcggcggacgagacggagagcagaaccgcgcagcgaagcagcagcggcgacaagccctcgcgtcggtagaggcgccgtccgccgtccgccccctcaactccggtagccgctggccgctgcaggtcgagtcccgtcgagccgactcgctccgcagcgcttcccgatctgggtggccgcggcgccggcatggcgcggttcgaggtgaacggcaagtcggtgcaaggcgtggacttgctgcggcggcgccactggccgtcgcgcctcgacttctggcccttccttgcactctatgcgctctggctgctgcttgctgtcccggcgctcgacttcactgacgctctcatcatccttgccgcgctctccgctgctcacattctcaccttcctcttcaccgcctggttcgtcgatttccgtgccttcgtcgggtactctaaggtcaaggatatccatgccgctaacacgtgtaaggtgactcctgctaagttctcggggtcaaaggagattgtacctctgcacaaacagaaaaatgtggcctcaacttcagctgcaggtgagacagaggagatttactttgattttcggaagcagaggttcatctactcggctgagaaagataactttttaaaactccggtacccaacgaaggaattgatcggtcattatggcaagggcactggttatggaactgaggccaagattagcaccgcagtggacaagtggggcagaaatgtattcgaatatccacagcccacatttcagaaattaatgaaggagcaaatcatggaaccattttttgttttccaggttttttgtgttgctctatggtgcctggatgcgtattggtactacagtttgtttacacttttcatgcttttcctgtttgagtctactatggcaaagaataggctgaagacattgactgagctaagacgtgtgaaagttgatagccagattgtgttgacctatagatgtgggaaatgggttaaagtccctggaactgaactactaccaggagatattgtgtcaataggccgctcaactagtggtgaagatagatctgtaccagcagatatgctattgttagctgggtctgcaatagtaaatgaagctattcttacaggagaatctactccacagtggaaggtttcaattgctggacgtggtcctgatgatatgctatctataaggcgagataagaaccatatcctatttggtggcactaaagtattgcaacacactgcagataagtctgtaaatcttcgatcacctgatggtggctgtctagcttttgtattgaggactggatttgagactagccaagggaaattgatgaggactatcttattttcaactgagagggttactgcaaataacaaagaaagtggcctgtttatactctttttgcttttctttgcaatcattgcgtccggttatgtgcttgtgaagggattagaggacccaacaaggagcagatataaacttttattgagctgttcgttgattattacttctgtgataccaccggaattgccaatggagctctccatagcagtcaatacatctttaattgcattggctcggcatggtattttctgcacagagccattcagaataccatttgctgggaaggttgacatatgctgctttgataagacagggactctgacatcagatgatatggaatttcaaggtattgttacatcggaaggtgatgacttaatatctgatgcaaataagctgcctctccgaactcaagaagtgctttccagttgccatgcactggtatttgttgacaacaagctggttggcgatcccctagaaaaggctgctataaagggcatagactggatctacacatctgatgagaaggccatgtccaaaaagcctggtggtcaacctgttcaaattgtgcacagataccattttgcttctcacttgaagagaatgtctgttatcgtccgtattcagcagaaattttacgctttcattaaggtaagaatt

SEQ ID NO: 138702 - DNA, 1143 bp, Zea Mays
cacacccaaacccgtggcgcggggcagccggcagggcgcgccttcgccaccacaattccacaaagagacctcgcgccccaccagtctaatctcccgcgggcgggcagataacggctcgcggtacggaaagggcgagagagggggagcggagagcaccagtccaccgagaggcgcggagcaggagggcacacatggaactggaggaggcggtgccgccggccgcgatggtgggggaggacaacgcggcggcgccgacccaagactttgggctccccgctgagctgatagccgtgctgccatcggacccgttcgctcagctggacgtagcgcgcaagatcacctccatcgcgctctcgcaccgcctcggcctcctcgaggccgaagcagcgcgcctgcgctcgcagctcgccgaacgcgacgccgaggccgaggacctccgggagcacgtcgagcagctcgacgccgcgctcgccgtcgccaccggccgcctccgccacgccgaggaggaaaaggacgcactgcagcgggacaactctgagctgtccaacaccgttaggaagttgaacagagatgtcgccaagttggaagttttcaagaagacacttgtgcagtcactccaggaagatgacagcagtgataatactgctcccagggaaagagctgcagcagcttcaaatttctcctctgcaccatcagatgaagattctgcattttcgacttccaaatcatcacaggtttcagaaaccgcaagttcagtttcagaggaaaataaccaagttgacccagatgcacctaggcggccaccccggccacatgtatttttgcaatcatacaacagcacaccgaggatgactcccccagactcacctccaaggcgttttgcatcggtatcaccgccaaggcgacattcaatctctgttacatcgatgaatatgtttaatgacaggtcctcaggcttttctggtcagcatagctctccatttgacgctccaagtcaaacaggacgaacaagagttgatggaaaggagttctttcgtcaggtcagaaatagattatcttatgagcagtttggtgcattcctggctaatgtgaaggagctgaacgcacataggcagaccagagaggataccttaagacaagctt

SEQ ID NO: 138703 - DNA, 701 bp, Zea Mays
ctgtgctcagcaatgctgcaagcactgatgtacaaaatgggtgtctcaccactgtcgattctggacagcaggaggcgtctcattctcacagctcagtggagtttacccagtatttccaagagggctattgtaaaatatcagaactcgatgactgccgtgagttaactgaagctgttactgatgctgacagcagcagcagccactgcgagagagagaagcccgaggaagatggggataacgatgatttgctcggaggagtttttgccttcagcgaagaaggttgaacttactatatactgccttacttgagatcgagatataacgaaaaatgtgctcaaaacaaaacattcagtgtgcaatagtatgtaggggatggctttcatggaataaagctgtgtggaatcgatcatctggtacatatttttcaaggagttggtgttgtcgagaagttgctattgcctgccgtaacaccagttccttagcgttggtttgtacatatactgtaagacccatttgttttgtgccatacttccgggacatttgggtggttctggatctcgtaccttggcagccgtatttgttgaccgcctctgccagggcctgtgaatgttccatgtttatttgtacatatactctctgttttttttgggagaaaggaaaaaaaatgtagtgacaaattaactttataaacattcagtaaa

SEQ ID NO: 138704 - DNA, 613 bp, Zea Mays
ctgtgctcagcaatgctgcaagcactgatgtacaaaatgggtgtctcaccactgtcgattctggacagcaggaggcgtctcattctcacagctcagtggagtttacccagtatttccaagagggctattgtaaaatatcagaactcgatgactgccgtgagttaactgaagctgttactgatgctgacagcagcagcagccactgcgagagagagaagcccgaggaagatggggataacgatgatttgctcggaggagtttttgccttcagcgaagaaggttgaacttactatatactgccttacttgagatcgagatataacgaaaaatgtgctcaaaacaaaacattcagtgtgcaatagtatgtaggggatggctttcatggaataaagctgtgtggaatcgatcatctggtacatatttttcaaggtaaaccttgcgcctagttctcaaaatgtgaggccaagattcctccaggcaatttactaatctgtggatccacgttgaaactttggaaggagttggtgttgtcgagaagttgctattgcctgccgtaacaccagttccttagcgttggtttgtacatatactgtaagacccatttgttttgtgc

SEQ ID NO: 138705 - DNA, 1188 bp, Zea Mays
ccccatgtcagtcaaggccatggtggtcaaagccatcctttcttatggaccaacagcttcaccaagttccctcaactgtgacacattcggttgtcagtaggataaagaataacacttctggttggctaaataatgtcagcaatgtggctgcttctgcaagtggaaaactatctgtaccatctggcgctgtaactgctgttttccataattccatctaccagggttctttgccagttccatctaaggctaatgctttagagcatctactggtgtattcgccatctggtcatgtcattcaacatgaacttttaccttcttcaggttctgagtcctctggtagcagcccaagagttggttcaggtcctaacttgcaactacaagatgatgagatgcatgttactgctgaaccaattcaatggtgggatgtgtgccgtaggacaaactggccagaaagagatgaaaacattgccaacattgtattgtataaccaaagaagcagtatgatggctatgggtgcttctgactgtgaagatagcgagcattcggattccactgcatcaaatgatggtatctctgggaaagagattatgagaatccgagaaaggtcaagctggtatctatctaatgcagaagtacagataaactcgtggcggattcccatctggcagaaatctaagatttgcttctatgtgatgggctatcctgctgcagagttggtcgaatcagttagcagtggtggtggagaaattgagattgagaagttacctcttcacgaggttgagatcaggagaagggaattgctccctgtattcaagcagttccaatattctgatcgacattccagtgataggaatattgcaaatggaggctttcagaatgccttgtcccacatcagtaatgcacagaatagctctgtaaaggataatggtgaatatgaaaccaaaccggtggctttgtctgggttttacgcagacacgaggaaaacagctaacacaaatggtctagctaggcaaacattctcagctgttaatcttcagcaagtggggaagtgcaattctattgaatctcttaacactgcaattgtgtctggcaaaacagagaatgggaacaatggctatatatccacgccacctgaaacaaaagcgtctatcagatcattgagcagctattctctcttggatggacatg

SEQ ID NO: 138706 - DNA, 1065 bp, Zea Mays
ccccatgtcagtcaaggccatggtggtcaaagccatcctttcttatggaccaacagcttcaccaagttccctcaactgtgacacattcggttgtcagtaggataaagaataacacttctggttggctaaataatgtcagcaatgtggctgcttctgcaagtggaaaactatctgtaccatctggcgctgtaactgctgttttccataattccatctaccagggttctttgccagttccatctaaggctaatgctttagagcatctactggtgtattcgccatctggtcatgtcattcaacatgaacttttaccttcttcaggttctgagtcctctggtagcagcccaagagttggttcaggtcctaacttgcaactacaagatgatgagatgcatgttactgctgaaccaattcaatggtgggatgtgtgccgtaggacaaactggccagaaagagatgaaaacattgccaacattgtattgtataaccaaagaagcagtatgatggctatgggtgcttctgactgtgaagatagcgagcattcggattccactgcatcaaatgatggtatctctgggaaagagattatgagaatccgagaaaggtcaagctggtatctatctaatgcagaagtacagataaactcgtggcggattcccatctggcagaaatctaagatttgcttctatgtgatgggctatcctgctgcagagttggtcgaatcagttagcagtggtggtggagaaattgagattgagaagttacctcttcacgaggttgagatcaggagaagggaattgctccctgtattcaagcagttccaatattctgatcgacattccagtgataggaatattgcaaatggaggctttcagaatgccttgtcccacatcagtaatgcacagaatagctctgtaaaggataatggtgaatatgaaaccaaaccggtggctttgtctgggttttacgcaggtaagcatatgatgtcaatgtatatgtcattgttgtattatactattgttgattggaaaatctttctattgtagacacgaggaaaacagctaa

SEQ ID NO: 138707 - DNA, 1879 bp, Zea Mays
aaaacacgatacggtggccttccctgctcacacacagcgaatcaacgctgaattcaccatccaacggactgcacccaacatgcttgcgaacgtctgccggcggcggctcaccatccccctctccccaatcctcgccgccgccgccgccgccgccagcggcaagaatcccatccactccaaccacgcgcgcgccctcctctctcaaagctactactcgtccgccgttcaggcggcgcccgaccgcgagccctgccccactacggtctcctacctggtttcctgcggtgtctcccccgccgtcgccgccgctcgcaaggtccgcatccgggacacggaccgggccgacgcagttcgggccctcctgcgcaagtacggcttctccgaggcggatatcacccgcacggtgcgtttagacccgctgctgctcaccttcgatccagaccgcaccattcgccccaagctcgacttcttcgtctcgctcgggatccagccccgcttgctcgccaccgagccccacatcctcgcccgcagcctggaaaaacacatcataccctgcatcgagtttttccgcaccatccttcgtaccgatgacaacatccgcatcgccgtctcccgcgtgccccgcgcgctcatgaccgatatcgagagcaccatgcgccccgccgtcgaggcgttcctcagccacggtctctccatggaagccatcgccaagcttctcatgattcacatgggaatgatcaagacaccgccggagcgcatccgcgaggccttccatgacctcaaggcgctcggcctccgcgtcacggatacgggcttcctctacggcttccgcgtcatttgcagccttaggagggagactatggtgcgcaaggtggcggttttcaagagcttcggggtgtccgaatctgaccttttcagggcgttcaagacgcagcccaccatactgctcgtcggagatgagaccataaagaagaagttcaggtttttcttggatgtgatgaagcttgagatagctgatgtgatggcgcagccactgactctggcgttgagcttggagaagaatatcatgccaaggtgcgccgtgctgagcatattgatgaaggagggtaagcttaagcggacacagaagttgattccaccactgctttccaattctagggtcttctcggagaggtatgtgttgaggcatgctaaggatgtgcctgatgttgttaaggcatttgagggcaagattaaatttcaagggtttggggaatcagaggttaggacttctgtgccactgaatgactgaagcccaaaccccaggattctgaaatcatgcttatttgttagaggtaaggcagatcaatgcatgtttgcaattgtaatcttgttccattcatactcatagtgaaatgtctatttctggggccatgtcgaatgtcatggttttgcatttttatgatacccatgcatccaggaacatgtacgttgtgacgttctcagctgtggtcgatctggcatgtgtggcctgccagttcttaaatcatgctgtggttcatatgcttatgacccggatggatttgttcattttgaaactctgattatttgtactgctctgctgagtggaaatgctcatgttactggaagttctgtgattttcttctctccccaaatgtaatattcaccctatcgattttgttttggttagtgagaactatgctgatgatgtgccagtcctccggatatgttatggtattttagtgtagttaaatctgatcacgtatggggaatctgaatatttgtgactggagtcaatctgattcttctgagatcaaatttgttctttgttagggaccatctttcatttcagacaaatttgttgtgaggcggaagtcca

SEQ ID NO: 138708 - DNA, 754 bp, Zea Mays
ttaggcacgaccggcgccgggagagggggtggagtggaagcctcccacgcttccctcgccgaagcgcccctctcctcctgcgtaggcacacacgcacgcgtcagtcgccatgggaacagaggtgctccgcccgcatgactgcctcgcccgtgctaggcggccgcggccgctgcgccccactgccgggaggaggacggcggcgcgccagggctgtggcacacgcggcgacaggcggagcccctcggcggcggtgacggtgccgaggcatgtcgtacggaccaaggtggcgatggcggacgcgtacgcgggcccggcgttcggtgccatgtcgccgtcgccgcgggcgctgcccctgccacggttttcgtccaggacggtcgtccacgcgacggtgtcaggcgtggacgccgccgccacgcgggagcttcggcggctgctggggctccattgactcgtatgatcaggcaaattgtacaaaagagtaatggacggggccatggctgcccatgagcccagcaacacgtacgcaagggtcagatgcgtgggtgtctcttcccatctcgatcttctcggtttgctgctcttttgtccgtctgccgtgcggcccgagcgccggcttcggaatgcctccctttgcctgatgtttttgtgggggacaaagggaggccagaagcggtagcaccgccgccgcgtcatggttcgccggagacatacacaaagacaggaagcaaaacatgcaaaattgccaccgctt

SEQ ID NO: 138709 - DNA, 532 bp, Zea Mays
ttactggacagcttaggttttcctgtgaggtggattgactggattgctacaatcctttatacttcatcctcaagagtaaccgttaatggggtgcctaatcctcctattcgccatggcagaggccttaggcagggcgaccctctctccccccttctttttgtattggcgatcgacccgttgcaaaaaaatcctgaagattgctgctgagtctggagctttgagcaagctggggaaccgctcgcctaccctcaggatttcgttgtatgccgatgacgcggctctgtttgttaagccaaaaaaagaggaaattgagacaattgtcagtttgctgaccttatttggagaggcttctggtctgatgaccaattttcgaaagtccacaattgtgcccatttgttgccagggactaccgcttgacgacattcttgacggcctccctgctggaagagcaaccttcccgatccgatacttgggtctgcctctcacttcggctaggctatggaaacgggaccttcagtttttggtagacaag

SEQ ID NO: 138710 - DNA, 1341 bp, Zea Mays
cgccacacggatggtataagagtaaagacaaccttttcgccgaaccccccctcggaaggatggcggcggcggtttccagggccatctgcgtccagaaaccgggctccaaatgcagcagggacagggaagcgacctccttcgcccgccgaacggtcgcggcgccgaggcccccgcgcgccaaagccgccggcgtcatccgctccgactccggcgcgggacggggcccagcagtgctcgccgctgagggcccgtcgttgacgccgcgtcgatacagacgaccaaaaagagcaaatggcgcctcagtctcccgcgcgcaagctacaacggttcagggtccggtgctgcggcggctgagccgtctaccgtgggagacaccttggaacgggaggagggcggcggcacagaggcaggcgcttcggctgatgagtcatccaaccggaagcagccgccccctgttgaccccaagattgagaaggagctcaagaaggtagttcagaagactgcggcaacctttgcaccaagggcgtccacgaaaacaaagaaccctgctgtccctggaagtaccctgtacaccgtctttgaagtccagggctatgtttccatgctgttgggcggagcactttccttcaatctcatattcccatcgaatgagccagacatctggaggttaatgggaatgtggtccatttggatgttcactataccttcgcttcgggctcgtgactgctccaataaagagaaagaagctctcaactacttatttctcctgattcctctgatcaacgttatgattccattcttcgtgaagtcctttgctgttgtttggtcagcagatacagttgctttcttcgtgatgtatgcatggaagcttggatggctgcaaaggttgaaatgaagatttttggtgtgctctcttggtgatgtgtgtatgaaagcttggatatttggtttgaaaaggtggagtcggtagcttttttgctgagagaaacatttgtcctcaaaattttcacatcttttggagggagctgcatgattagtttattccaagatttagttcatatagccttttatatcttgtgtatatgcagggagtacgaaaaaacagcctttcacatttaggccttgttcggttagcttccaatccacatggattgagtgggattgggtgggtttaaatcccaactaagtcaaactctttcttaattttttccaatctcatccaattcatgggtaacgggattaaccgaacaaggccttaagtgataaatatatgtacctgaagtctgaacatttttgttgactacgaactgaacagctctaaatggttcttgatttctcaat

SEQ ID NO: 138711 - DNA, 1158 bp, Zea Mays
cgccacacggatggtataagagtaaagacaaccttttcgccgaaccccccctcggaaggatggcggcggcggtttccagggccatctgcgtccagaaaccgggctccaaatgcagcagggacagggaagcgacctccttcgcccgccgaacggtcgcggcgccgaggcccccgcgcgccaaagccgccggcgtcatccgctccgactccggcgcgggacggggcccagcagtgctcgccgctgagggcccgtcgttgacgccgcgtcgatacagacgaccaaaaagagcaaatggcgcctcagtctcccgcgcgcaagctacaacggttcagggtccggtgctgcggcggctgagccgtctaccgtgggagacaccttggaacgggaggagggcggcggcacagaggcaggcgcttcggctgatgagtcatccaaccggaagcagccgccccctgttgaccccaagattgagaaggagctcaagaaggtagttcagaagactgcggcaacctttgcaccaagggcgtccacgaaaacaaagaaccctgctgtccctggaagtaccctgtacaccgtctttgaagtccagggctatgtttccatgctgttgggcggagcactttccttcaatctcatattcccatcgaatgagccagacatctggaggttaatgggaatgtggtccatttggatgttcactataccttcgcttcgggctcgtgactgctccaataaagagaaagaagctctcaactacttatttctcctgattcctctgatcaacgttatgattccattcttcgtgaagtcctttgctgttgtttggtcagcagatacagttgctttcttcgtgatgtatgcatggaagcttggatggctgcaaaggttgaaatgaagatttttggtgtgctctcttggtgatgtgtgtatgaaagcttggatatttggtttgaaaaggtggagtcggtagcttttttgctgagagaaacatttgtcctcaaaattttcacatcttttggagggagctgcatgattagtttattccaagatttagttcatatagccttttatatcttgtgtatatgcagggagtacgaaaaaacagccttaagtgataaatatatgtacctgaagtctgaacatttttgttgactacga

SEQ ID NO: 138712 - DNA, 846 bp, Zea Mays
cgccacacggatggtataagagtaaagacaaccttttcgccgaaccccccctcggaaggatggcggcggcggtttccagggccatctgcgtccagaaaccgggctccaaatgcagcagggacagggaagcgacctccttcgcccgccgaacggtcgcggcgccgaggcccccgcgcgccaaagccgccggcgtcatccgctccgactccggcgcgggacggggcccagcagtgctcgccgctgagggcccgtcgttgacgccgcgtcgatacagacgaccaaaaagagcaaatggcgcctcagtctcccgcgcgcaagctacaacggttcagggtccggtgctgcggcggctgagccgtctaccgtgggagacaccttggaacgggaggagggcggcggcacagaggcaggcgcttcggctgatgagtcatccaaccggaagcagccgccccctgttgaccccaagattgagaaggagctcaagaaggtagttcagaagactgcggcaacctttgcaccaagggcgtccacgaaaacaaagaaccctgctgtccctggaagtaccctgtacaccgtctttgaagtccagggctatgtttccatgctgttgggcggagcactttccttcaatctcatattcccatcgaatgagccagacatctggaggttaatgggaatgtggtccatttggatgttcagtaagtaagaattttgcaagttttgttcttagtaagagcacatcgttgatatggtctactagagcctgatgtttatctttgtattgcagtccaaaactgtgctttgtttcctacactggataatataagtgattgatttattgtgtca

SEQ ID NO: 138713 - DNA, 837 bp, Zea Mays
tccaggcttggtatatcgtaccctgaattgacagagatgcaagcccgggccatttttgaagctgctatagcaatgaccaaccagggtgttcaagtgttcccagagataatggttcctcttgttggaacaccacaggaactggggcatcaagtgactcttatccgccaagttgctgagaaagtgttcgccaatgtgggcaagactatcgggtacaaagttggaacaatgattgagatccccagggcagctctggtggctgatgagatagcggagcaggctgaattcttctccttcggaacgaacgacctgacgcagatgacctttgggtacagcagggatgatgtgggaaagttcattcccgtctatcttgctcagggcatcctccaacatgaccccttcgaggtcctggaccagaggggagtgggcgagctggtgaagtttgctacagagaggggccgcaaagctaggcctaacttgaaggtgggcatttgtggagaacacggtggagagccttcgtctgtggccttcttcgcgaaggctgggctggattacgtttcttgctcccctttcagggttccgattgctaggctagctgcagctcaggtgcttgtctgaggctgcctcctcgttggcaaccggattgcctgctgctggtggatgtggtgatcaacagtattattacagagccatgctatgtgaacattactagtagcagtgctcataaaagctacaatcccatctcccttttttttccagtcatgtaaaacttccaaactgctccatggttcaaaactctgttcttcaatacatcatcaattatcgattatatacgtggca

SEQ ID NO: 138714 - DNA, 923 bp, Zea Mays
tccaggcttggtatatcgtaccctgaattgacagagatgcaagcccgggccatttttgaagctgctatagcaatgaccaaccagggtgttcaagtgttcccagagataatggttcctcttgttggaacaccacaggaactggggcatcaagtgactcttatccgccaagttgctgagaaagtgttcgccaatgtgggcaagactatcgggtacaaagttggaacaatgattgagatccccagggcagctctggtggctgatgagatagcggagcaggctgaattcttctccttcggaacgaacgacctgacgcagatgacctttgggtacagcagggatgatgtgggaaagttcattcccgtctatcttgctcagggcatcctccaacatgaccccttcgaggtcctggaccagaggggagtgggcgagctggtgaagtttgctacagagaggggccgcaaagctaggcctaacttgaaggttggttttgggacactgcttcgtacgtctccttactccttagaaaaccacggtttgattgttgtttggtgttggtgtgcaaacaggtgggcatttgtggagaacacggtggagagccttcgtctgtggccttcttcgcgaaggctgggctggattacgtttcttgctcccctttcagggttccgattgctaggctagctgcagctcaggtgcttgtctgaggctgcctcctcgttggcaaccggattgcctgctgctggtggatgtggtgatcaacagtattattacagagccatgctatgtgaacattactagtagcagtgctcataaaagctacaatcccatctcccttttttttccagtcatgtaaaacttccaaactgctccatggttcaaaactctgttcttcaatacatcatcaattatcgattatatacgtggca

SEQ ID NO: 138715 - DNA, 2320 bp, Zea Mays
catttatttgtcactgatcgttgttcagcctagctagctagcgctgtttccctgtgctaatggcgcccgttcaatgtgcgcgttcgcagagggtgttccacttcggcaagggcaagagcgagggcaacaagaccatgaaggaactgctgggcggcaagggcgcgaacctggcggagatggcgagcatcgggctgtcggtgccgccggggttcacggtgtcgacggaggcgtgccagcagtaccaggacgccgggtgcgccctccccgcgggcctctgggccgagatcgtcgacggcctgcagtgggtggaggagtacatgggcgccaccctgggcgatccgcagcgcccgctcctgctctccgtccgctccggcgccgccgtgtccatgcccggcatgatggacacggtgctcaacctggggctcaacgacgaagtggccgccgggctggcggccaagagcggggagcgcttcgcctacgactccttccgccgcttcctcgacatgttcggcaacgtcgtcatggacatcccccgctcactgttcgaagagaagcttgagcacatgaaggaatccaaggggctgaagaacgacaccgacctcacggcctctgacctcaaagagctcgtgggtcagtacaaggaggtctacctctcagccaagggagagccattcccctcagaccccaagaagcagctggagctggcagtgctggctgtgttcaactcgtgggagagccccagggccaagaagtacaggagcatcaaccagatcactggcctcaggggcaccgccgtgaacgtgcagtgcatggtgttcggcaacatggggaacacttctggcaccggcgtgctcttcaccaggaaccccaacaccggagagaagaagctgtatggcgagttcctggtgaacgctcagggtgaggatgtggttgccggaataagaaccccagaggaccttgacgccatgaagaacctcatgccacaggcctacgacgagcttgttgagaactgcaacatcctggagagccactataaggaaatgcaggatatcgagttcactgtccaggaaaacaggctgtggatgttgcagtgcaggacagggaaacgtacgggcaaaagtgccgtgaagatcgccgtggacatggttaacgagggccttgttgagccccgctcagcgatcaagatggtagagccaggccacctggaccagcttctccatcctcagtttgagaacccgtcggcgtacaaggatcaagtcattgccactggtctgccagcctcacctggggctgctgtgggccaggttgtgttcactgctgaggatgctgaagcatggcattcccaagggaaagctgctattctggtaagggcggagaccagccctgaggacgttggtggcatgcacgctgctgtggggattcttacagagaggggtggcatgacttcccacgctgctgtggtcgcacgtgggtgggggaaatgctgcgtctcgggatgctcaggcattcgcgtaaacgatgcggagaagctcgtgacgatcggaggccatgtgctgcgcgaaggtgagtggctgtcgctgaatgggtcgactggtgaggtgatccttgggaagcagccgctttccccaccagcccttagtggtgatctgggaactttcatggcctgggtggatgatgttagaaagctcaaggtcctggctaacgccgatacccctgatgatgcattgactgcgcgaaacaatggggcacaaggaattggattatgccggacagagcacatgttctttgcttcagacgagaggattaaggctgtcaggcagatgattatggctcccacgcttgagctgaggcagcaggcgctcgaccgtctcttgccgtatcagaggtcctggaccagaggggagtgggcgagctggtgaagtttgctacagagaggggccgcaaagctaggcctaacttgaaggtgggcatttgtggagaacacggtggagagccttcgtctgtggccttcttcgcgaaggctgggctggattacgtttcttgctcccctttcagggttccgattgctaggctagctgcagctcaggtgcttgtctgaggctgcctcctcgttggcaaccggattgcctgctgctggtggatgtggtgatcaacagtattattacagagccatgctatgtgaacattactagtagcagtgctcataaaagctacaatcccatctcccttttttttccagtcatgtaaaacttccaaactgctccatggttcaaaactctgttcttcaatacatcatcaattatcgattatatacgtggca

SEQ ID NO: 138716 - DNA, 2369 bp, Zea Mays
atgcaccagggacagggaagcgacctccttcgcccgccgatcggtcgcagcgccgaggcccccgcacgccaaagccgccagcattgctcgccgctgagggccgtcgttgacgccgcgccgatacagacgaccaaaaagagggtgttccacttcggcaagggcaagagcgagggcaacaagaccatgaaggaactgctgggcggcaagggcgcgaacctggcggagatggcgagcatcgggctgtcggtgccgccggggttcacggtgtcgacggaggcgtgccagcagtaccaggacgccgggtgcgccctccccgcgggcctctgggccgagatcgtcgacggcctgcagtgggtggaggagtacatgggcgccaccctgggcgatccgcagcgcccgctcctgctctccgtccgctccggcgccgccgtgtccatgcccggcatgatggacacggtgctcaacctggggctcaacgacgaagtggccgccgggctggcggccaagagcggggagcgcttcgcctacgactccttccgccgcttcctcgacatgttcggcaacgtcgtcatggacatcccccgctcactgttcgaagagaagcttgagcacatgaaggaatccaaggggctgaagaacgacaccgacctcacggcctctgacctcaaagagctcgtgggtcagtacaaggaggtctacctctcagccaagggagagccattcccctcagaccccaagaagcagctggagctggcagtgctggctgtgttcaactcgtgggagagccccagggccaagaagtacaggagcatcaaccagatcactggcctcaggggcaccgccgtgaacgtgcagtgcatggtgttcggcaacatggggaacacttctggcaccggcgtgctcttcaccaggaaccccaacaccggagagaagaagctgtatggcgagttcctggtgaacgctcagggtgaggatgtggttgccggaataagaaccccagaggaccttgacgccatgaagaacctcatgccacaggcctacgacgagcttgttgagaactgcaacatcctggagagccactataaggaaatgcaggatatcgagttcactgtccaggaaaacaggctgtggatgttgcagtgcaggacagggaaacgtacgggcaaaagtgccgtgaagatcgccgtggacatggttaacgagggccttgttgagccccgctcagcgatcaagatggtagagccaggccacctggaccagcttctccatcctcagtttgagaacccgtcggcgtacaaggatcaagtcattgccactggtctgccagcctcacctggggctgctgtgggccaggttgtgttcactgctgaggatgctgaagcatggcattcccaagggaaagctgctattctggtaagggcggagaccagccctgaggacgttggtggcatgcacgctgctgtggggattcttacagagaggggtggcatgacttcccacgctgctgtggtcgcacgtgggtgggggaaatgctgcgtctcgggatgctcaggcattcgcgtaaacgatgcggagaagctcgtgacgatcggaggccatgtgctgcgcgaaggtgagtggctgtcgctgaatgggtcgactggtgaggtgatccttgggaagcagccgctttccccaccagcccttagtggtgatctgggaactttcatggcctgggtggatgatgttagaaagctcaaggtcctggctaacgccgatacccctgatgatgcattgactgcgcgaaacaatggggcacaaggaattggattatgccggacagagcacatgttctttgcttcagacgagaggattaaggctgtcaggcagatgattatggctcccacgcttgagctgaggcagcaggcgctcgaccgtctcttgccgtatcagaggtcctggaccagaggggagtgggcgagctggtgaagtttgctacagagaggggccgcaaagctaggcctaacttgaaggtgggcatttgtggagaacacggtggagagccttcgtctgtggccttcttcgcgaaggctgggctggattacgtttcttgctcccctttcagggttccgattgctaggctagctgcagctcaggtgcttgtctgaggctgcctcctcgttggcaaccggattgcctgctgctggtggatgtggtgatcaacagtattattacagagccatgctatgtgaacattactagtagcagtgctcataaaagctacaatcccatctcccttttttttccagtcatgtaaaacttccaaactgctccatggttcaaaactctgttcttcaatacatcatcaattatcgattatatacgtggca

SEQ ID NO: 138717 - DNA, 2667 bp, Zea Mays
acccgttcgcctctcaccttttcgctgtactcactcgccacacacaccccctctccagctccgttggagctccggacagcagcaggcgcggggcggtcacgtagtaagcagctctcggctccctctccccttgctccatatgatcgtgcaacccatcgagctacgcgcgtggactgccttccctgggtcggcgcaggaggggatcggaaggatggcggcgtcggtttccagggccatctgcgttcagaagccgggctcaaaatgcaccagggacagggaagcgacctccttcgcccgccgatcggtcgcagcgccgaggcccccgcacgccaaagccgccggcgtcatccgctccgactccggcgcgggacggggccagcattgctcgccgctgagggccgtcgttgacgccgcgccgatacagacgaccaaaaagagggtgttccacttcggcaagggcaagagcgagggcaacaagaccatgaaggaactgctgggcggcaagggcgcgaacctggcggagatggcgagcatcgggctgtcggtgccgccggggttcacggtgtcgacggaggcgtgccagcagtaccaggacgccgggtgcgccctccccgcgggcctctgggccgagatcgtcgacggcctgcagtgggtggaggagtacatgggcgccaccctgggcgatccgcagcgcccgctcctgctctccgtccgctccggcgccgccgtgtccatgcccggcatgatggacacggtgctcaacctggggctcaacgacgaagtggccgccgggctggcggccaagagcggggagcgcttcgcctacgactccttccgccgcttcctcgacatgttcggcaacgtcgtcatggacatcccccgctcactgttcgaagagaagcttgagcacatgaaggaatccaaggggctgaagaacgacaccgacctcacggcctctgacctcaaagagctcgtgggtcagtacaaggaggtctacctctcagccaagggagagccattcccctcagaccccaagaagcagctggagctggcagtgctggctgtgttcaactcgtgggagagccccagggccaagaagtacaggagcatcaaccagatcactggcctcaggggcaccgccgtgaacgtgcagtgcatggtgttcggcaacatggggaacacttctggcaccggcgtgctcttcaccaggaaccccaacaccggagagaagaagctgtatggcgagttcctggtgaacgctcagggtgaggatgtggttgccggaataagaaccccagaggaccttgacgccatgaagaacctcatgccacaggcctacgacgagcttgttgagaactgcaacatcctggagagccactataaggaaatgcaggatatcgagttcactgtccaggaaaacaggctgtggatgttgcagtgcaggacagggaaacgtacgggcaaaagtgccgtgaagatcgccgtggacatggttaacgagggccttgttgagccccgctcagcgatcaagatggtagagccaggccacctggaccagcttctccatcctcagtttgagaacccgtcggcgtacaaggatcaagtcattgccactggtctgccagcctcacctggggctgctgtgggccaggttgtgttcactgctgaggatgctgaagcatggcattcccaagggaaagctgctattctggtaagggcggagaccagccctgaggacgttggtggcatgcacgctgctgtggggattcttacagagaggggtggcatgacttcccacgctgctgtggtcgcacgtgggtgggggaaatgctgcgtctcgggatgctcaggcattcgcgtaaacgatgcggagaagctcgtgacgatcggaggccatgtgctgcgcgaaggtgagtggctgtcgctgaatgggtcgactggtgaggtgatccttgggaagcagccgctttccccaccagcccttagtggtgatctgggaactttcatggcctgggtggatgatgttagaaagctcaaggtcctggctaacgccgatacccctgatgatgcattgactgcgcgaaacaatggggcacaaggaattggattatgccggacagagcacatgttctttgcttcagacgagaggattaaggctgtcaggcagatgattatggctcccacgcttgagctgaggcagcaggcgctcgaccgtctcttgccgtatcagaggtcctggaccagaggggagtgggcgagctggtgaagtttgctacagagaggggccgcaaagctaggcctaacttgaaggtgggcatttgtggagaacacggtggagagccttcgtctgtggccttcttcgcgaaggctgggctggattacgtttcttgctcccctttcagggttccgattgctaggctagctgcagctcaggtgcttgtctgaggctgcctcctcgttggcaaccggattgcctgctgctggtggatgtggtgatcaacagtattattacagagccatgctatgtgaacattactagtagcagtgctcataaaagctacaatcccatctcccttttttttccagtcatgtaaaacttccaaactgctccatggttcaaaactctgttcttcaatacatcatcaattatcgattatatacgtggca

SEQ ID NO: 138718 - DNA, 873 bp, Zea Mays
ctattcaaagagcaagaggactacatgaaatgaaacccagagctctccagtgttaatagaggtgcacggcagaagtgatgtctatgaaatgtagtacctgagcagacggctgaagttgatcaggacatgttggccctgcaactaaattttgaacctgctaccttttgttaaccattcttgttgtgcacacaagttatacagctggttatgggacataaagtcatagaagacatccagggcatttatcaagacgatacatcacactcaccatacatgatgcagcaaggcgaaggtgaggtgcctttgtgattggtatcgcggttccagcttcatcatagtggaggcactacatggagattttggctgaatatttattcagctgccatgcttttctgccatgttgggaaatcagcaagtttcattgttctcaagcaatcagcgctctcctttggaatctcaatagtggtgttagagctcaagtggcgatacatgcgaaatgtacttgtacagtacctcgtcgatcatatgaactgaaaggaaccaaacatgtaggagattttttcattagggtcattatagtggtgccgccgaggcatttctgtgttatctcgttttcaggctaaaaggcatgacctataatgttagcctttcgccgctaataattgacgttcgcaccagtttttaatgttcgtgcaatgattcttttgccaatcatacaagctgtactcacgatgactgtagttgtcgagcgtgtctgaaagtttttgtcttccttccatgtaccatggcctctcctttagcagctgcaaataattgtagggcctctgtcttattgctttcagattggaatccaggtgcttccaatttgtttgg

SEQ ID NO: 138719 - DNA, 1269 bp, Zea Mays
tacatcatatatgatgtatgcatgtttatatctcgattaagtattaaggagcccttttataactagctagaaaagactgagctagtcttttctcggctaaaatgttatggtcaccccaatctatggtttcatctttgtcatcaaatctttccacttcagtcatggtctgccattcctcagtggtgtttaccccaataccccacaagcgcgtttgttacaaccatgtagaaatagtaaggttctatttacatcctcatgacattatgattaggtttgaagtagaagcactaccgtagacagttctttgtaattctgtcatgcatctgtggttctctaagcagtctttgccagaggggctgtatgttcttattagttcttcactaagagattacaataaagaattattcctttgattcttattttctaatagggtatactttagagctcatgaaaagcttatgaatcatattttcttgttttcacttttctttacccttcctgaaacaaacctttgtctgtgaagactatgtcctcaaatcagttggttataaccataccttacgattacttcgtccatgttctgtgacaggctgacagcagtctgatatctcgattattattttattgatgctttgcttgacacatacgatatcattcatactcccacaaccgcatagataaagcagtgttgtaacaccccgtccaatccctagaccggcggtacttactcctgccagctctctaggatcatatatcgtctccacagaccaacacaggtcttttgtgcgcactttgtcctcactcatacgcacccgagaaaactttccggtcggtcacccatcccaaattgctccaagccaagcacgcttgatttggaggttcttttgagataggcttccgaaaaaaagatgcaccttgttggtatgaatactctattaattctattaagccttgggccaggatatcccatcccaggggccattgatatcacaagggtggactcttttttctatgttaactacacccttgattttatgttatatcaaggtatcaaagctatactattccacatttgataaattcggtaaatctacatctagtttatccatattagtgccttccatttgtggatttttcttgatgttaaaattgtgttggcacccaactgaaatattttcactagcaagaacatatccgatattttggggggcccatgattaaaactatgattaatggttaatataagtgatatctgcttgaaattttacc

SEQ ID NO: 138720 - DNA, 1584 bp, Zea Mays
cctagcctaaacccctcgcgccgccgccggcctacgccgccgcagcctcctcccatgtcccgccgccccgcctgttccctcctccctctgctccgaagccgccgctgcctttacgacgccaccaccgctaggcccttcacctccgtctctgtcccacccgacgtgatctcctccacctggccgccgcactccccgtcgcctcttcatcctccgcccgatccggccgggacgtggtgctcagcctcttgttcttctacctcgccggcgctcccgccctttaccgcatcccatctccgagccgccgtctccttgctcgccacctcgctcaccgcgctcccggggcctgacccggacccggtgtccgccctccacgaccactccttccctaccctcctcgccgtctcgccgctcgcgtcacttgagctcctctcgctgctccggtccaggcctcggttagggctcgctgtattctcattccgccgtgtgctctccccggtgccctctatcagtgagtttgccctcgccatctcgctcgcgggccgcgccggagaccatgacgcggcggccgcgctctttgccgacggcaccgctattcattcccctaacctagggctttacaacgctcttatgtcggcatacatgcacagcggcctccttgacaactgcatcgaggtcttccacgcgctggagcgcgatcccaggtgcggtccgcctaacgtggactcgtacaacatcctcatcgccctgttcggtcgctccatcctcgttgaccacatggagcgcacgctccagtcgctggacgcttctggccaaccccgcactattggtacttacaatgcaatcatctctggttacctcaccgcatggatgtgggacaaaatggaagcgtcgtttcaggagatggtgtcgttccatgttgctccagatgctactacgcataagttgatgttaagaggatatgcacatgccgggatgatctgtaaaatggagcaagcttatgagcgtgcttgcaagcttggcataaaggttgacattttgcatatacgtgcaatgctgtgcgcatactgcaagttttaccatgtaggtagaatccaaaagattgaggatttgctcaagaagttgggtcctgatgattacaggccatggctaaatgtcctcttaattaaggtgtatgctcaggaggggttgaccgaggggatggagctgtatatttctgaggcattggaacgcaataccattgttaccgcagtaaaggtgatgcggtccatcatatgtaactattttcagtatgacgcggttgacagacttgcactttttgtccgacgggccgaagatgctggttggaagctgtgccggagtttgtaccactgcaagatggtgatgtatgggaagcactatcggttggaagagatgcatggggtgctcgatgagatggaatgtttgaagtttgatcgaacaaagaagacattttggatcatgtacaaggcatatgttagttgtggtaggaggactgaagccaacactataattggcatgatgtggaagcatgggtttgctgttcgtgacgacatgtctgatcaataa

SEQ ID NO: 138721 - DNA, 2142 bp, Zea Mays
ccacgcccgccagttataaatagccaagcgtatggttggggccacagacagagagagaccctcccctctggcggtctggcctccgtccccacaaccaaactgcgcgagcgcgaaggagcacggacagcacagcggcacagcgcagacgcggcggcggcccaatccggagggcgcgaccgttcctttttctgtccgtcccttcctccctcccttcgttcgttggcctcctcctcctgttcctcttcttggcgcggcaagaggaggaatagcaggagaggggcgccccgatccatagggcaacgaccaacggcacgccgccgccgccgctgccacgacaagatggcgcggttcatccttagcctgatggagctcggggtcagcgccaccgtgcacatgctcttcggcctctacgtcttcagcacggccgtcgccgcagacatctcgcaggcggccgcggcgtcggggtgtctcctactgcgccggccaccccccgcggcggcgggctcgaccgggggagcgctcgtcgacgtcgccgcggcgggtgagagcgacgagctcaggggcgccgcgcccgtcatcctcgatgcatcgccgccgcccatcgtcctcgtccacggcatcttcggcttcggcaaagggaggctcggtggcctctcctacttcgccggcgccgagaagaaggacgaccgcgtgctcgtgccggatttggggtcgctcaccagcatccatgacagggcgcgtgagctcttctactacctcaagggtgggcaggtggactacggcgaggagcacagcaaggcttgcggccacaacaggtttggaagaatatatcacacagggcactatcctgtgtgggacgagcacaacccagtgcattttgtggggcactctgctggcgcgcaggttgtgagggtgctgcatcagatgcttgccgacaaggctttccctggtcatgatacttctgaagattgggttgtaagcctgacttccttgtcgggtgcacttaatggaaccacaagaacttactacgatggcatgctggtcgtagatggtaggtccatgaaatctatctgtcttcttcagctctgccggctcggagttattgtctacgattggctagacattccttggctgaagaattactacaattttggttttgaccactatgagatgtcgtggaggaaagtaggcttttcaggtctaattaatctactgctggggcacacgggcccatttgccagcggggattggattctacctgacctcacaatccaaggatccatgaaactaaactctacacttaggacctttcccaatacattctacttcagctatgctacaaagaaaacaagaaaaatatttggaattacagttccttcaagtgttcttggagtgcaccccattctctttctgagagtcctccagatgtgtatgtggcggcaccctcaaaatgcacctctgccttacaaaggatacagggatgaagattgggaagacaacgatggggctttgaacacaatctctatgacacacccccgcattcccatcgagcatccacaccattttgtagtcgatgattctgactgccatcctttgcaacctgggatatggtattacaagattattgaagctgaccacattctattcattgtgaaccgggaaagagctggagtgcagtttgatttgctgtacgatggcatttttcagcgctgcaggaaacatgcctttaggaagagcccacctactgtaccaaacgaaacgagccgatagcaaaactaagctgaagtatgtgtaggtagtacataggaagaaacaaggtgccacgacattttcattaactgtaaattacattgttgattgaacggcaataacatatttgcttctccaattttcggaatggggttcatggagactgggaacttgcatgctttcttgtcataatactccgactgccaatttaatgcttcgccctacagtctaatgcaaaaaaaaggtatggatggatggttgtacggacaggctgaataatgcaaaaagtgatatggatggagggttgtaccgtacggatggtgtaacattgtactagtaagggtttagtgagaaggcacacagatgacattatttcaagtggactattgataa

SEQ ID NO: 138722 - DNA, 1549 bp, Zea Mays
ccacgcccgccagttataaatagccaagcgtatggttggggccacagacagagagagaccctcccctctggcggtctggcctccgtccccacaaccaaactgcgcgagcgcgaaggagcacggacagcacagcggcacagcgcagacgcggcggcggcccaatccggagggcgcgaccgttcctttttctgtccgtcccttcctccctcccttcgttcgttggcctcctcctcctgttcctcttcttggcgcggcaagaggaggaatagcaggagaggggcgccccgatccatagggcaacgaccaacggcacgccgccgccgccgctgccacgacaagatggcgcggttcatccttagcctgatggagctcggggtcagcgccaccgtgcacatgctcttcggcctctacgtcttcagcacggccgtcgccgcagacatctcgcaggcggccgcggcgtcggggtgtctcctactgcgccggccaccccccgcggcggcgggctcgaccgggggagcgctcgtcgacgtcgccgcggcgggtgagagcgacgagctcaggggcgccgcgcccgtcatcctcgatgcatcgccgccgcccatcgtcctcgtccacggcatcttcggcttcggcaaagggaggctcggtggcctctcctacttcgccggcgccgagaagaaggacgaccgcgtgctcgtgccggatttggggtcgctcaccagcatccatgacagggcgcgtgagctcttctactacctcaagggtgggcaggtggactacggcgaggagcacagcaaggcttgcggccacaacaggtttggaagaatatatcacacagggcactatcctgtgtgggacgagcacaacccagtgcattttgtggggcactctgctggcgcgcaggttgtgagggtgctgcatcagatgcttgccgacaaggctttccctggtcatgatacttctgaagattgggttgtaagcctgacttccttgtcgggtgcacttaatggaaccacaagaacttactacgatggcatgctggtcgtagatggtaggtccatgaaatctatctgtcttcttcagctctgccggctcggagttattgtctacgattggctagacattccttggctgaagaattactacaattttggttttgaccactatgagatgtcgtggaggaaagtaggcttttcaggtctaattaatctactgctggggcacacgggcccatttgccagcggggattggattctacctgacctcacaatccaaggatccatgaaactaaactctacacttaggacctttcccaatacattctacttcagctatgctacaaagaaaacaagaaaaatatttggaattacagttccttcaagtgttcttggagtgcaccccattctctttctgagagtcctccagatgtgtatgtggcggcaccctcaaaatgcacctctgccttacaaaggatacaggtgaatcctctgctctaagacaaaatacatctcttgaaaagtaccttcacttgtttggcatggctttaatt

SEQ ID NO: 138723 - DNA, 1553 bp, Zea Mays
ggcaaactttgtataaacaaagctactcaaagcatggatgatggatctcagggagtgacgaagcagatcggtggctcagtgcacgagctggcggcgaaggtggacgagtacgcccgcggcatgatcagcgggcccggctcctcgctcttcgaggagctcggtctctactacatcggccccgtcgacggccacaacatcgacgacctcatcaccatcctcaacgacgtcaagagcaccaagaccaccggccccgtcctcatccacgtcgtcaccgagaagggccgcggctacccctacgccgagcgagccgccgacaagtaccacggtgtcgccaagtttgatccggcgaccgggaagcagttcaagtcccccgccaagacgctgtcctacaccaactacttcgccgaggcgctcatcgccgaggcggagcaggacagcaagatcgtggccatccacgcggccatgggcggcggcacggggctcaactacttcctccgccgcttcccgagccggtgcttcgacgtcgggatcgcggagcagcacgccgtcacgttcgcggccggcctggcctgcgagggcctcaagcccttctgcgccatctactcgtctttcctgcagcgcggctacgaccaggtcgtgcacgacgtcgatctgcagaagctaccggtgcggttcgccatggacagggccgggctggtcggcgcggacgggccgacccactgcggtgcgttcgacgtcgcgtacatggcctgcctgcccaacatggtcgtcatggccccgtccgacgaggccgagctctgccacatggtcgccaccgccgcggccatcgacgaccgcccgtcctgcttccgctacccgagaggcaacggcgttggcgtcccgttgccgcccaactacaaaggcactcccctcgaggtcggcaaaggcaggatcctgcttgagggcgaccgggtggcgctgctggggtacgggtcggcagtgcagtactgcctgactgccgcgtccctggtgcagcgccacggcctcaaggtcaccgtcgccgacgcgaggttctgcaagccgctggaccacgccctgatcaggagcctggccaagtcccacgaggtgctcatcaccgtggaggaaggctccatcggcgggttcggctcgcacgtcgcccagttcatggccctggacggccttctcgacggcaaactcaagtggcgaccgctggtgcttcctgacaggtacatcgaccatggatcgccggccgatcagctggccgaggctgggctgacgccgtcacacatcgccgcgtcggtgttcaacatcctggggcagaacagggaggctcttgccatcatggcagtgccaaacgcgtagaacttgtgctgatctgggcctatagagatgattgtacattttgtcgttaactagagtgtctgaacttgggagattagtcttctttggatgaaagtgtcgccggaacaacagttaccgtttctttttttgaaagagaaaggcaaaagatttgccattccaatatattagaagaggtaaaaataaaactttat

SEQ ID NO: 138724 - DNA, 1794 bp, Zea Mays
cagtccgtagattcgagtaatgcccactactaggcaaactttgtataaacaaagctactcaaagcatggatgatggatctcaggtcgcagcaagttgactctagaaatagtttatcatgctactcgagctgtatccaagtttgactgacattggttcatcttctactggactggtcataatattacctgggctaggttttgaccggcccattcttgttgggccgacaaggattgtggaaggaatgggcggcccaggtttgcagctctgagtctctgaccgatcgctggcgtgcgtgcttgtgcttgtgcagggagtgacgaagcagatcggtggctcagtgcacgagctggcggcgaaggtggacgagtacgcccgcggcatgatcagcgggcccggctcctcgctcttcgaggagctcggtctctactacatcggccccgtcgacggccacaacatcgacgacctcatcaccatcctcaacgacgtcaagagcaccaagaccaccggccccgtcctcatccacgtcgtcaccgagaagggccgcggctacccctacgccgagcgagccgccgacaagtaccacggtgtcgccaagtttgatccggcgaccgggaagcagttcaagtcccccgccaagacgctgtcctacaccaactacttcgccgaggcgctcatcgccgaggcggagcaggacagcaagatcgtggccatccacgcggccatgggcggcggcacggggctcaactacttcctccgccgcttcccgagccggtgcttcgacgtcgggatcgcggagcagcacgccgtcacgttcgcggccggcctggcctgcgagggcctcaagcccttctgcgccatctactcgtctttcctgcagcgcggctacgaccaggtcgtgcacgacgtcgatctgcagaagctaccggtgcggttcgccatggacagggccgggctggtcggcgcggacgggccgacccactgcggtgcgttcgacgtcgcgtacatggcctgcctgcccaacatggtcgtcatggccccgtccgacgaggccgagctctgccacatggtcgccaccgccgcggccatcgacgaccgcccgtcctgcttccgctacccgagaggcaacggcgttggcgtcccgttgccgcccaactacaaaggcactcccctcgaggtcggcaaaggcaggatcctgcttgagggcgaccgggtggcgctgctggggtacgggtcggcagtgcagtactgcctgactgccgcgtccctggtgcagcgccacggcctcaaggtcaccgtcgccgacgcgaggttctgcaagccgctggaccacgccctgatcaggagcctggccaagtcccacgaggtgctcatcaccgtggaggaaggctccatcggcgggttcggctcgcacgtcgcccagttcatggccctggacggccttctcgacggcaaactcaagtggcgaccgctggtgcttcctgacaggtacatcgaccatggatcgccggccgatcagctggccgaggctgggctgacgccgtcacacatcgccgcgtcggtgttcaacatcctggggcagaacagggaggctcttgccatcatggcagtgccaaacgcgtagaacttgtgctgatctgggcctatagagatgattgtacattttgtcgttaactagagtgtctgaacttgggagattagtcttctttggatgaaagtgtcgccggaacaacagttaccgtttctttttttgaaagagaaaggcaaaagatttgccattccaatatattagaaga

SEQ ID NO: 138725 - DNA, 2629 bp, Zea Mays
cctacgtggtcatccacactcccctcggcatcccgcatcccctcgtccccggacccgccgcactactgctataggcgcatccccggcgccttcgcacactctctccccggccacttcccaaatccgcccgccattcatgcacccttctgtgcactgtcagcgccaccattagctcgcagctcaagctcgccactaccattttggtcggttcttgaggaaatcgatcgaaccgttggagtgccaccactggcagaggctgttgcattcttgagttgagcaggaagaggagaggaagcaatggctctgtcgacgttctctgtcccaaggggattcctcggtgtgccggctcaggactcccatttcgcttcggcggtcgagctccatgtcaacaagctgctccaggccaggcctatcaatctcaagcctcggcggaggccggcatgcgtgtcggcgtcgctgtcgtcggagcgcgaggcggagtactactcgcagaggccgcccacgccgctgctggacaccatcaactaccccgtccacatgaagaacctgtctgtgaaggagctgcggcagctggccgacgagctccggtccgacgtcatcttccacgtctccaagaccggcggccacctcgggtccagcctcggcgtggtggagctcaccgtcgcgctgcactacgtcttcaacgcgccgcaggaccgcatcctctgggacgtcggccaccagtcgtacccgcacaagatcctgacggggcggcgcgacaagatgccgacgatgcggcagaccaacggcctggcgggcttcaccaagcgcgccgagagcgagtacgacagcttcggcacgggccacagctccaccaccatctccgcggcgctcgggatggcggtgggccgggacctcaagggcggcaagaacaacgtggtcgcggtgatcggcgacggcgccatgacggccgggcaggcgtacgaggccatgaacaacgccgggtacctggactccgacatgatcgtcatcctcaacgacaacaagcaggtgtccttgcccacggcgacgctcgacgggccggtgccgcccgtgggcgcgctcagcagcgccctcagcaagctgcagtcaagcaggccgctcagggagctcagggaggtggccaagggagtgacgaagcagatcggtggctcagtgcacgagctggcggcgaaggtggacgagtacgcccgcggcatgatcagcgggcccggctcctcgctcttcgaggagctcggtctctactacatcggccccgtcgacggccacaacatcgacgacctcatcaccatcctcaacgacgtcaagagcaccaagaccaccggccccgtcctcatccacgtcgtcaccgagaagggccgcggctacccctacgccgagcgagccgccgacaagtaccacggtgtcgccaagtttgatccggcgaccgggaagcagttcaagtcccccgccaagacgctgtcctacaccaactacttcgccgaggcgctcatcgccgaggcggagcaggacagcaagatcgtggccatccacgcggccatgggcggcggcacggggctcaactacttcctccgccgcttcccgagccggtgcttcgacgtcgggatcgcggagcagcacgccgtcacgttcgcggccggcctggcctgcgagggcctcaagcccttctgcgccatctactcgtctttcctgcagcgcggctacgaccaggtcgtgcacgacgtcgatctgcagaagctaccggtgcggttcgccatggacagggccgggctggtcggcgcggacgggccgacccactgcggtgcgttcgacgtcgcgtacatggcctgcctgcccaacatggtcgtcatggccccgtccgacgaggccgagctctgccacatggtcgccaccgccgcggccatcgacgaccgcccgtcctgcttccgctacccgagaggcaacggcgttggcgtcccgttgccgcccaactacaaaggcactcccctcgaggtcggcaaaggcaggatcctgcttgagggcgaccgggtggcgctgctggggtacgggtcggcagtgcagtactgcctgactgccgcgtccctggtgcagcgccacggcctcaaggtcaccgtcgccgacgcgaggttctgcaagccgctggaccacgccctgatcaggagcctggccaagtcccacgaggtgctcatcaccgtggaggaaggctccatcggcgggttcggctcgcacgtcgcccagttcatggccctggacggccttctcgacggcaaactcaagtggcgaccgctggtgcttcctgacaggtacatcgaccatggatcgccggccgatcagctggccgaggctgggctgacgccgtcacacatcgccgcgtcggtgttcaacatcctggggcagaacagggaggctcttgccatcatggcagtgccaaacgcgtagaacttgtgctgatctgggcctatagagatgattgtacattttgtcgttaactagagtgtctgaacttgggagattagtcttctttggatgaaagtgtcgccggaacaacagttaccgtttctttttttgaaagagaaaggcaaaagatttgccattccaatatattagaaga

SEQ ID NO: 138726 - DNA, 2319 bp, Zea Mays
ctcgcccgcccgcccgaccgaccgctgtctcgctcgcctcgtctcgtctcgtctcgcttcgtctccgtttcctccgcacaccaccacagccgcgtcaagccgtcaaccaaccaaaccctagaaggctctcgcccccgtccccaatccttcgccgctccccgatcctcgccgcccgcaggccaaaaccccacgcctctccctcgacgccgggtatatccagtgtaatcactttgtcagaaatgccttctgcatccaagtccaagtcaaaagatagatcagctgcaaaagttgcaaaagagcaacccaaggtttctgcaaagccactgggaaatggtacgcttgcaagttcttataacaacctctctggaaagttccatgttctggaaccatcagcttctttgttgggtagccaaggcatcaataaattcaggaataccgatgagatagatgaacattctcgcagctcccatggtacaggggatttcgattgtgcctccaacaacggtagctgctctgacgagtcagaagatccaaaggaaaaaccaactagtagtgtgtctcgagtagagtctgttcctggatgtgatattgataaacgagagaaaatcagacagaaaaatgagaagaagcatcaaagacagaaggagaggcgtgcccaagaattgcacgagcgttgtaagggttatcttatgtctagaaaattggaggcacttgcgcagaagcttgttgcgatgggtttctcagcagatcaagcaacgatggcccttatacagaatgagggttgcgttgaggagtctgttacctggctctgcaactttgatggcagtgaggaagctaagcaacaacttgcagctgatcaacagtccggtgttaacttgaagattgatatagctgatgagctttcaaagattgtgagcttggaggtaaaatataagtgtacaaagcaagaagttgaaagagcagttgtttcctgtgaaggtgatctagaaagggctgatgaggccttgaagacacacaagcaagaatcaactgcagtcccaccaaagcctgagggatctagtgactcaagtgccttgcctaacaagcagcaagttgtacttgcacagaaccctgcaagggctcaaacaaatggattttcatcagtaggatctcagcagacgagaagagaggaggagataagctataagcttttgatgaatggtagtggtccaaaggatcctgcaattaaagggtttcagccaatggcagcaccaactaagccagatttgggccgtcagcaatttgttcaacctgagaagagacgtctcaatcccaactcgattccatcaattccttatgtggcatcatctcctttgcctgttgcagtgccacaactgaagtcagacatgcggcatgtggcaggaactaatgaggttaaaagttcgatgcccaatggaagcttgcgagagtcggtaattgtaatgcagcgtcctcaatctgcaggtaccaagcaaagcctaccatccactagccatagcatgtttgcgtcagaaccatctgcaagggattggtacttaaatggcgcatcaggtgtcaatatgatgttgaatgggggcttaggtcatggactaaggaatatgagcttggacagtgttagttctggcaggtcgtttgggcatgcaaaccatcaacaaagttttgtttctaatcctatagagttggctgccaatggttggggtggcacatggagttctggaggtacatcatcttcccgtcctgtggtgtcatcatttggggcgtttagagggtggagttcatccgagtcgtcccctgcattgcctcattctgattggagagccaatggggcagcaccttatgactacacctcagtagactggagcctggacacaacgttattgaacccagcagcaaagagcgagcggctgtcggacacatggtcaaccatgttcatgggtggcagatcaacaaggacacctgggaacctcagtggcgcaggcatagctgggttgcatgacagtaaccatccaatggatcctgctccatcacctcgtccatatgagtggcctactttctgcaggggaggatcttcctagttccccctaccatgtaggtaagaggacattgaataaaaaaagtaaaagctgccatttgtttcttttcttgttttggtctcaggtgcagttggttgaaaaagttttactttgtgtatcgaactgagcttgtgtaccttgactgttggctgagataagtcatctttctgtgaaatcgttgtgcatgaaaaatgaagggagaaaattgaatttatcttggctgaaatgc

SEQ ID NO: 138727 - DNA, 1086 bp, Zea Mays
gcccgcccgcccgaccgaccgctgtctcgctcgcctcgtctcgtctcgtctcgcttcgtctccgtttcctccgcacaccaccacagccgcgtcaagccgtcaaccaaccaaaccctagaaggctctcgcccccgtccccaatccttcgccgctccccgatcctcgccgcccgcaggccaaaaccccacgcctctccctcgacgccgggtatatccagtgtaatcactttgtcagaaatgccttctgcatccaagtccaagtcaaaagatagatcagctgcaaaagttgcaaaagagcaacccaaggtttctgcaaagccactgggaaatggtacgcttgcaagttcttataacaacctctctggaaagttccatgttctggaaccatcagcttctttgttgggtagccaaggcatcaataaattcaggaataccgatgagatagatgaacattctcgcagctcccatggtacaggggatttcgattgtgcctccaacaacggtagctgctctgacgagtcagaagatccaaaggaaaaaccaactagtagtgtgtctcgagtagagtctgttcctggatgtgatattgataaacgagagaaaatcagacagaaaaatgagaagaagcatcaaagacagaaggagaggcgtgcccaagaattgcacgagcgttgtaagggttatcttatgtctagaaaattggaggcacttgcgcagaagcttgttgcgatgggtttctcagcagatcaagcaacgatggcccttatacagaatgagggttgcgttgaggagtctgttacctggctctgcaactttgatggcatagctgggttgcatgacagtaaccatccaatggatcctgctccatcacctcgtccatatgagtggcctactttctgcaggggaggatcttcctagttccccctaccatgtaggtaagaggacattgaataaaaaaagtaaaagctgccatttgtttcttttcttgttttggtctcaggtgcagttggttgaaaaagttttactttgtgtatcgaactgagcttgtgtaccttgactgttggctgagataagtcatctttctgtg

SEQ ID NO: 138728 - DNA, 1608 bp, Zea Mays
ccatccagtggttgtatgtaggtatatcaccacacataactgaagttgatagcatttatataccggaacaaatttggtgattccaagcagctcacgtatcacgtagcacatatgatcagtatcccgcacgtacgtgcggaataatacgtccttattcaatggcgtgagatgaagctcttgatggcatcgatgagctctcgggctcgttccccggtggttgagtccatgtcgacggcgtacttgttaaggtagaaggagtggctcatgccgtggttgatgagcacctccacctccttgccagcggcgcgcagcgcgttgcagtactcgaggttagtgtcgcggatgaggtcgttctcggccacggacacaagcagcggcggcaggtgcacggactccagcggcggcgcctgcgggcccatggggcaggtgaaggggtggtccttggtggcgccctccggcagcgccaaggcaaggaacttgtccagcatgtccagcgtgaagaacaccgagtccgccttcgtctccagctccgaccggctccgggtggcgcgcacgaaccccgggtgaatggggacgccgccggcgacgcggaggggggcccagctgcccgcgtccgcctccctcgccacgcgggccgccacgaggtggacgaggttgccgcccgagctgtccccgacgaggaacacccgggacacgtcggcggcctcgcggaggagcgcggccgccgggtcgtcgagggcgccgtcgtcctcggccagcgcgacggagcggagcctgcggagcgcggcgacgccggcgtcgatgtgcgcgggcaggcgccgctcgggcgcgagcggcagctcgacggcgaccaccacggcggggacggcgcacgcgaggcgcgcgtagaagtggtggtacatgagccaggacgggtgggagatgcagaagcccccgccgtggagctgcaggatgacgggcaggcgcgcgccgccggcctccacgttcgcctcggggaggtacacgcgtaggttcggctccccgggcaggtcgtggagcgtgtgcccgtctcgcggcaccgcgtacggcgccaccggctccatcagcgggagggcctcgcgcgggccggtccacgtgcggtccacgctgccgtcctccagcacgcgcagccagccggaaacctcgtccaccacctttcggccaaccgccgctaccacctgcggctgtggctgctgctggacattggccgttgccatcggtgttgctgcggagactgtgatgtgcaccggggagaagggtcgacgaagttcgtgcgtcgttgtatgagtacgtctggcctgcgcacggtggagccgggcattttataggcagcggttgaggcagttggtagctagagaatcgagaggccagaatcccagcgcgggggttgcgtgtggttgtgcttaccttgccgctcatggttgggcgatctcgatcagaattgcgggttaattcctgacgtccgtcgtgtcgtcggaacaaccgaccgcgtgagaagagcagcagcgcgacgcgacgccgggccggaggtggctgtgtgccgtgtggcttgtgctgcatgtgaattgcgggttccttactcctgaggac

SEQ ID NO: 138729 - DNA, 2205 bp, Zea Mays
aaaatgtagggccatgtgaaggtcgcgttcgttccttcgttccccaaggccttgccttgttctggttcagcatcagtgacgcttagcttcacaggaaccaggaccagcgaggtctctggctctctgcaacttgccatggggaccgcaacggcagcaatggacaggaatgcagatggagagcagggcaagaggaagaagaagggaggcttcaggaccatgccgctgatactagcaagcgaagtctgcgaccggtttgccacggccggcttcggcgccaacctgatcacgtacctgacgcagcagctgcacctcccgctggtggaggcctcgaacacgctaaccaacttcagcggcacgtcctccttgacgcccatcctaggcgcgttcgccgccgacgccttcgccggccgcttctggaccatcatcgcagggtccgtggtgtaccagctcggcatggtcggcgtggtggtgtccgcggtcctcccctcgctccggccgcccccgtgcgacgacccgccggcggccaccccgtgccagcgcgcctccgggtggcagctcgccctgctgtacctctcgctgctgctcacgtcgctgggctccggcgggatccggccgtgcgtcgtggcgttcggcgccgaccagttcgagcggctggacagcgccgaggaggaggagaaggccaaggccaaggcggaggcggagcggaagcggcgctacttcaacctctacttcttcaccatggggctggcggcgctgctggcgctgacggtggtggtgtacatccaggagaacgtggggtgggggtgggggttcgggatcccggccgtgggcatgttcatgtccatcgtcgtgttcctggtcggctacccgctctacgtgctggtcaagcccgggggcagcccgttcacgcggctcgcgcaggttgtcgcagccgcgttcaagaagcgcaacgccgccgtgcccgaggacccccgcatgctgtatcaggacaaggagctcgacgcgctcatctccaccaacggcaggctcctacacaccaatcagcttacgttcttcgaccgggcagcaatagtgacggcgggcgacatctccccgtccgggcaaccagacccgtggcgcctgtcgacggtgcaccgcgtggaggagctcaagtccatcgtccgcatgctgcccatctggtcggccggcatcatgctggccaccgccagctcgcacaactacaccttcaccatcatgcaggcgcggaccatggaccggcacatggggccccacttccagctcccgccggcgacgctgtccatcttctcgaacgcggccatgctcgtcaccctggccttgtacgaccgcgtcttcgtgcccctggcgcgccgcgtcacgggcctgccgtccgggatcacctacttccagcgcatgggcatcgggctggccatctccgtgctcagcgtcgccacggcggcgctcgtggagaccaagcgccgcgacgccgccgcccggcacgggctcctggacagcccggccgccgtcgtcccgctcagcgtgttctggctggtgccccagttcgccgtccacggcgtcggcgacgccttctcgtccgtggggcacatggagttcctgtacgaccaggcgcccgagagcatgcgcagcagcgccgccgcgctcttctggctcgccgcctccatcgggaactacatgggcacggtgctcgtcacggcggtgcagcgcgccacgcgtgggcgcggcgagtggctccaggacaacatcaaccgcggcaggatcgacaactactactggctcgtcacctgcatcacgctactcaacttgggctactacctcgtctgcttctatttctacaccatgaagccgctggaggtggcggatgactgtgacaaggactgtgagctctcctccctccagaaaaatggcagtggcgcggcgctagtgtgatggtgtaattaactggaagactagaaagcaagaatggtcttgttgttaataactagctatatacaatcagcagcgctgcaatgcacacggattacaatttactatagggatattgtagtgtatatcgagagtttataactataagctgtggtcgagcatgcatacgtacggtcataggaagatacaaacgcaacgatcatgatcgtgatcatgcaagctaaaagcaccatcgcatacagtttagtgtattttattgtgtcc

SEQ ID NO: 138730 - DNA, 174 bp, Zea Mays
atggctctggctccatggctgctcagggccggcatagctcgattggcttgtcctcagctcctggactggctccattctgattgtctgactctgaccaactttttactttatgatgaagatgtaaaggatagacatagcataggccgaaaggacacagccaagataagattgtaa

SEQ ID NO: 138731 - DNA, 390 bp, Zea Mays
atggaagagaagtcctctcgatccgcgttggctgccagtgtcgaccgcatcattggcaacatgttacctgaggctccctggaagagtccagagaggcattgcagattgccgagaccgacggtgttcggtgaaatgcacctgagaagctgtcttgtgtgcatatcgtcgagaccgacagttgctgaaacaatggccaagaatggtaaaggaatgccacttagatttattttagggaagagcaagatgatcctaggctttgctgaaggcttcccaacaatgttgaagggtgaaattgctatgttcttggtaggaagacaatatgtactctcaggaagtcctgatggtactgccatggcttggaatgttgattctggcaaaggagaggaataa

SEQ ID NO: 138732 - DNA, 984 bp, Zea Mays
atccagcaggctcgtaccatggaccgtgacatcacgccacacttcaagatcccgccggcctccatgctcatcttcaccaacttcgcgcacgggcgtgggactgacgatcgccatgctgtccaacgtggtggccgcggtcgtcgagcggagacgcaagtccgttgccgctgcgagtgggctgctcgacgctcccaaggccaccctgccgatgagcgtcttctggctggtgccgcagtacgccatccatggcatcgccaacgccttcatggacgtcggccgcatggagttcctgtacgaccaggcacccgagagcatgcggagctcagcgacggcgctctactggctgaccttctcgatcgggagctacctcggcacgctgctggtgaccatcgtgcacgacaagacgaagcgaaccgggcaatggctcccggacaaccttaaccgagggaagctagacaactactactggctagtcgtggctctggaggtggtcaacctcgtctacttcttcatctgcgttaagtactacacctttaagccattggagatggtgagcggtgaggaggttgagctctaccaccatggcaatggcaccgacgacgccaagaagcaaggtgtggaagcttagagtgagcaaatccggatcccaacaagaaggcttgggtccggatgaaataattgtacttcgacatctctttaaaaaatagcacctatcttaaagcagttctgaattagttaaccattttgttaattattttcatctgaataccttctggactctgaacaatcaggagcggacttgctccagtccagcacaaggcaaagcgaacacagagctctcatagctccggttctagtaagaatcactccggtaaagtcgagcagtaaaaatctaaactgctacatggtcggattggagtgaatctagtgattctagtctatgttttgtactataaagtaagagaaaaaaaaatgtttcccacc

SEQ ID NO: 138733 - DNA, 109 bp, Zea Mays
cttatacttagtaattgctaataaaattttgaccaacttattaaaagtaatgcttagccttaatcatgccttttatgtccatcaaataagtactccaaagtttcatagt

SEQ ID NO: 138734 - DNA, 1182 bp, Zea Mays
cacaaattgcagtactctgaactggcagctgaagtacaaagaggacgtggacggattcctgtggcagattacaaaatagtgaagtctgttggtgaaagagacgcagagaatgaacttgacatagctgagccaactcgcagttgctactcgttttgtatgtgccctggtggacaggttgttctaaccagcacaaacccatcagaattgtgcatcaatggcatgtcgttctcacggcgtgcatcaaagtgggcaaactcagctcttgtagtcactgtatcatcccatgatttcaagccatttcaatcccatggtcctcttgctggcgttgaattccagagacaatttgaaagaagagcagctatgatgggtggagggaatttcgttgttcctgcacagtgtgtcaccgattttatcagcaacagactgtcagttacaacactgccaccatcaagctatagattaggagttcgtccatctaatcttcatgagctattccctccttacataactgaagctttacaagagtcactaataatgattgatagagagatgccaggctttgtttctagcaaggccctacttcatggtgtggagaccaggacaagttctcccttacaaatttcacgacatggagaaacatacgaaagtacatcactgcgaggattatatccaactggggaaggtgctggctatgctgggggcatcttaagtgctgctgtggatggtatgtattgtggttttgctttagctaaacaactttctttattccatggcgatatagagccatttctaggcaaaacacaaaaacaaacaggttttataaagtattgaatggactagtgcttggtattttgttgttccaattttttgggggaaaagatcgatgtcattatagctttaaccataggatatttttgtcatgtttagagcagctgtgattgccttactaaattcatcagctaatttgtgcacggttgatgtagaagggtagagcaaggcattgatgttgtaggagaggttctggtataggtatagctatgtaacaaataatttataacttcctatgtgatgccaccttaattttgtcaagataattcaccaagcataataccatatattctcttgtgtgatggattgatgaacattaatgtgaagaagattacaagctcaagtattaactga

SEQ ID NO: 138735 - DNA, 296 bp, Zea Mays
tgcaggtacgtggagtgatgggaagctgatgaccaggataggaaaaaacactgatggtgttcaggctgttatgaaaacatttgttcactttggagcccctccaaacattttagttgatgggaaaccacacttgggtactgataaacttgttccactgctgcgaaaattcaggcatcacttaagagagttgggtgttaccataagatttaatgctagagtagatgaccttatagtagaagatgggcaggtaaaaggaattgtggtctctgatgtggaactacagccaggtcctgcca

SEQ ID NO: 138736 - DNA, 1243 bp, Zea Mays
atccacagggccgcgcaagcgctctggcttcttccagtccagtccaccatccgcgccatggcgatggcgttcgcggctgcctccgcctggagcctcagtcttacagccttctccctcccgctgccccagtctctgcgcccgaaacctagccaactcctccatggcgcgaccagctcgttcccgcggccacgccgatgcgggtggggcgccgtggtgcgctgcgcgaagcgcacggggaagcagcggtacccgtcggagaagaagcggttgaacaggcgaaaacaggagttgctacgccaggccgccccggaggaggggagcaaggggcgggagtccgggtactggcggctctcgaagctcgctgttcccgcccgcgacgacccaggcaaggacttcaccggcatctccctgccgctactccaggccatcgccaaagccatcaagttcccggttccttctatgctccctgacgaggctttcactgtcatccgcaagtcatttgacgcacgaaaggttttgaaagaacctcaattcacttatattgttgatatggatgttaagaagattcttaatattgagccaagggcatgggattttattgctcggttggagcccaaacttggagttgtggaatacatgaccgaagagaagttagcagttgatctggtcagcatgctaaatgttagtagcaaaggttccaataatgtactaggaattagagacactcatagtggcatgatttatcgtcaacaaaagaagcccagagtggcagttataggaagtggaccatctggcttgtttgcttcccttgtgctaggtgaacttggtgcagaagttaccttattggagcgtggtcagcctgttgaacagagaggtcgtgacattggtgcactagcagttagacgaattctacaaccagagagcaacttttgctttggcgagggtggtgcaggtacgtggagtgatgggaagctgatgaccaggataggaaaaaacactgatggtgttcaggctgtgagaatcttcctgacctacatcgatctgttcccataaaactttactctcatagtctcatatatcattttcttagtagtacactattttttcacggtgtccaggcgtgagaaaattcctactgtacctcagcggctcaacctcaaacattgttttgtgtaatagctcacattcatgttccaattgttcaagagttcatgacttttttttggaatgaaatagctttctc

SEQ ID NO: 138737 - DNA, 2668 bp, Zea Mays
agagtctctacccgtgatttccattctaaaaattatccttcctcccgtgcctacagtcctacacctcgacgatgccaaaaccctagcgcagcagcgcgaactacacctctccccgtcctgttcctcgtggcgcggtagccatggcggagccggccatcctcgacccctcccccttcgatctccgccactatccggcgcacctcttcgacccggacatccccctcgccgccgccgacttcccactcggtgaattcgccggagacgacggctgtgatggcctagacttcgacgtgcccgtagatttctctatcgacgacttcctcctccggtctcctgaccgcgggcacgacggcgacgactccggcgagggctctgctgccggatccggccccaccgcatcttccttggcctccccggccacctccggcactaactccgccgtggccaacgtcggcaaccgcaaggtgaagcacgaggactcggacgagggaaggagcggcgccaccccgaattggagcctcaagcggaagcaggtgagtcccggagaagcaacctcggatggggccaagtgccgccgatccggcgatggggatgtttcgccatctgcatcggcgtcgcgtgcagccacggaggactccgatgagaggggcgtgggcggcgaggaagaggacaagcgccggactgcgcgcctgatgcggaaccgtgagagcgcgcagctctctcggcagaggaagaagcggtacgtggaggagctggaagagaaggtgaaatcgatgcactcggtgataaatgacctcagttgtaagatctccttcatcgctgcggagaacgccacactgaggcagcaactcggtggtgtgggggtgagtggaccaccacctggggtgtatccaccgccaccgccaggcattcatttcccttgggtttctgggtatgcaatgcggcctcatggctcccatgttccacttgttccaatcccgcgattgaagccgcagcatgcagcagctgcagtgaaggtatccaagaaaccagatgtcaagaagtctgtggagagcaagagtaagaccaagaccaagaccaagaccaagaaggtggcaagtattagccttcttggtttgctgtttgttgcatttgtctttggcgcttttgttccggggttcaatcatagtctcggactgagaggaaggagcgacaatgtgatgtttggaaattttggccagtctgatgctagggtgtttagtgtcactaaccatggtaaaggacctaaaggcagtttcaacagtagtgacatgatcagtactgatcatgacatgatgactgggcatgatgatggagcggggcagaaacaccgagctgcaaataactctagtgagatcttgcctgctttgttgtatgtgccgaggaatggaaaacatgttatgatcaatggcaatttgattattcattctgtgatggctagtgagaaagcagtggcacataagggctcaaatagtcagtcagttaaagatcacaaggagaccagtgttgctatagctcgctatctgtcaccacctggaaaggatatgaattcaaaagagatgttcccgccagatgcaccactgccacaatggttccgtgaaggaatggaaggacctgttttgaactcgggaatgtgcagtgaggtatttcagtttgatatttctccagcttcggccaaatctggtggcattatacctgcttcggccaaatctgcctcaagtgtcaatgctacccagaaaattctgaaaccttctcctgcttataggggcaagctgaaaaacaggaggatcatgtataacgaggcaattccacttactggaaaaacagcgaacaacacaaagcctcaggcttttaacagtactgctgaaagcagcaaggtacctgatactgatagcaagcctgcatcatcagttatcgtctctgtgctagctgatcccagggaggctggcaatggggatggtgatccaagagtatcaccaaaacccctctccaggatatttgtcgtcgttctgctcgatggtgtcagatacgtgacttactcgtgcacacttcctttcaagagtgccagcccacaccttgtgaactaaccttggggccggtgcagctttctggtccatgagcggctaaatagttggggttttctgatgcattggaggtagatgaatgaatacagtaatgtggtgttgcttgctaacaatgaaaacagacttcaagactcgcactcggcctgaggtaatttgagtttgtcgaaggtttgtagtgtggactggcgaaatgttgtgcaagttcaaccttaacccatgaggtttgtgcttctatgtagtcgagttattatactcacctctttctctggtactctttattgcggagctggaaaatataacagctgatgagagaagacaatatttggaaaataactttgtactagtatatattatatatatagtgtactatatatagggatgtaatatggttcggaaaatatccgtccggatccggattctaagatggtgaacactggttcggatggaattttcggatatgcggacttttttctggataacggatacgaatacagatattttgttcggatatcgaattcgaatacaatgtatcggatatcgaatattcggatattttctcgggtaaa

SEQ ID NO: 138738 - DNA, 2546 bp, Zea Mays
agagtctctacccgtgatttccattctaaaaattatccttcctcccgtgcctacagtcctacacctcgacgatgccaaaaccctagcgcagcagcgcgaactacacctctccccgtcctgttcctcgtggcgcggtagccatggcggagccggccatcctcgacccctcccccttcgatctccgccactatccggcgcacctcttcgacccggacatccccctcgccgccgccgacttcccactcggtgaattcgccggagacgacggctgtgatggcctagacttcgacgtgcccgtagatttctctatcgacgacttcctcctccggtctcctgaccgcgggcacgacggcgacgactccggcgagggctctgctgccggatccggccccaccgcatcttccttggcctccccggccacctccggcactaactccgccgtggccaacgtcggcaaccgcaaggtgaagcacgaggactcggacgagggaaggagcggcgccaccccgaattggagcctcaagcggaagcaggtgagtcccggagaagcaacctcggatggggccaagtgccgccgatccggcgatggggatgtttcgccatctgcatcggcgtcgcgtgcagccacggaggactccgatgagaggggcgtgggcggcgaggaagaggacaagcgccggactgcgcgcctgatgcggaaccgtgagagcgcgcagctctctcggcagaggaagaagcggtacgtggaggagctggaagagaaggtgaaatcgatgcactcggtgataaatgacctcagttgtaagatctccttcatcgctgcggagaacgccacactgaggcagcaactcggtggtgtgggggtgagtggaccaccacctggggtgtatccaccgccaccgccaggcattcatttcccttgggtttctgggtatgcaatgcggcctcatggctcccatgttccacttgttccaatcccgcgattgaagccgcagcatgcagcagctgcagtgaaggtatccaagaaaccagatgtcaagaagtctgtggagagcaagagtaagaccaagaccaagaccaagaccaagaaggtggcaagtattagccttcttggtttgctgtttgttgcatttgtctttggcgcttttgttccggggttcaatcatagtctcggactgagaggaaggagcgacaatgtgatgtttggaaattttggccagtctgatgctagggtgtttagtgtcactaaccatggtaaaggacctaaaggcagtttcaacagtagtgacatgatcagtactgatcatgacatgatgactgggcatgatgatggagcggggcagaaacaccgagctgcaaataactctagtgagatcttgcctgctttgttgtatgtgccgaggaatggaaaacatgttatgatcaatggcaatttgattattcattctgtgatggctagtgagaaagcagtggcacataagggctcaaatagtcagtcagttaaagatcacaaggagaccagtgttgctatagctcgctatctgtcaccacctggaaaggatatgaattcaaaagagatgttcccgccagatgcaccactgccacaatggttccgtgaaggaatggaaggacctgttttgaactcgggaatgtgcagtgaggggcaagctgaaaaacaggaggatcatgtataacgaggcaattccacttactggaaaaacagcgaacaacacaaagcctcaggcttttaacagtactgctgaaagcagcaaggtacctgatactgatagcaagcctgcatcatcagttatcgtctctgtgctagctgatcccagggaggctggcaatggggatggtgatccaagagtatcaccaaaacccctctccaggatatttgtcgtcgttctgctcgatggtgtcagatacgtgacttactcgtgcacacttcctttcaagagtgccagcccacaccttgtgaactaaccttggggccggtgcagctttctggtccatgagcggctaaatagttggggttttctgatgcattggaggtagatgaatgaatacagtaatgtggtgttgcttgctaacaatgaaaacagacttcaagactcgcactcggcctgaggtaatttgagtttgtcgaaggtttgtagtgtggactggcgaaatgttgtgcaagttcaaccttaacccatgaggtttgtgcttctatgtagtcgagttattatactcacctctttctctggtactctttattgcggagctggaaaatataacagctgatgagagaagacaatatttggaaaataactttgtactagtatatattatatatatagtgtactatatatagggatgtaatatggttcggaaaatatccgtccggatccggattctaagatggtgaacactggttcggatggaattttcggatatgcggacttttttctggataacggatacgaatacagatattttgttcggatatcgaattcgaatacaatgtatcggatatcgaatattcggatattttctcgggtaaa

SEQ ID NO: 138739 - DNA, 1115 bp, Zea Mays
aacaaagcatcttgagtgttcgacagcgagccatggagaagacgtccgagaacgccatcccgccggcggcatccccgctgatgctgttcgggtcgtgggcgagctcgtacacgcaccgcgtgcagctggcgctgcggctcaagggcctggagtacgactaccttgacgacgcctggccggagacccgcccgctgctccccgccgacgccttcgaccgcgcgctcgcgcggttctggtgccacttcgccgacgacaagctcgggccggcggtgggcgcggtgttcgcgtcgacgggggagggccaggaggcggcggtgcggcaggtgcacgagaacctggcgctgatcgagtccgagctccgcgacggcgcgttccggggccgccgcttcttcggcggcgacgaggtgggcctgctggacgtcgtcctgggctgcggctcctactggctcgccgtgttcgaggaggtgaccggggtgcgcctcgtggacgccgacgccttcccgcgcttccacgcctggctgcgcgacttcgaggccctggacgaggtccgggagaccatccccgcggtggaccgcctgctcgagtacgcgcgcggcctccgccacatgctgctcggcctcgcgggggccggcgccggcgccggcgcggacgcgccctccaccgacgcccccgccgcaccgccggcctcggctgacatcgccgtcgacatttgaacgcagggcgtcgtcgcgccgggcgtctgccagcgccgtccggctagccatcagtagctagtacgtagtaccagtatagtttgcagagtcgattgcgccatgtgtggtggctgcgtgcctgtgcctgcctgccggcctggcctggagtgcggttctgctgccgccacagttaattggcccagtttgtctagctgtcgagtttttttttttcaactctctctgtctctctccgactcttcccttctttttgataaagttcgtccctgcagttaaatctctgtttgctgcgacttgttcttcttgtgtgtgagagtgggacgaaatctcgtgtgtttgtatgtggcagtttggctcgcttgtttgaatgtaagccatgtgcgcgtggtcatttctactgcaata

SEQ ID NO: 138740 - DNA, 1242 bp, Zea Mays
acgcaacaaagcatcttgagtgttcgacagcgagccatggagaagacgtccgagaacgccatcccgccggcggcatccccgctgatgctgttcgggtcgtgggcgagctcgtacacgcaccgcgtgcagctggcgctgcggctcaagggcctggagtacgactacgtggaggaggacctggggaacaagagcgacgagctgctgcgccacaaccccgtccacaagaaggtgcccgtgctcgtccacggcggccgcgcgctcccggagtccgtcattatcctccagtaccttgacgacgcctggccggagacccgcccgctgctccccgccgacgccttcgaccgcgcgctcgcgcggttctggtgccacttcgccgacgacaagctcgggccggcggtgggcgcggtgttcgcgtcgacgggggagggccaggaggcggcggtgcggcaggtgcacgagaacctggcgctgatcgagtccgagctccgcgacggcgcgttccggggccgccgcttcttcggcggcgacgaggtgggcctgctggacgtcgtcctgggctgcggctcctactggctcgccgtgttcgaggaggtgaccggggtgcgcctcgtggacgccgacgccttcccgcgcttccacgcctggctgcgcgacttcgaggccctggacgaggtccgggagaccatccccgcggtggaccgcctgctcgagtacgcgcgcggcctccgccacatgctgctcggcctcgcgggggccggcgccggcgccggcgcggacgcgccctccaccgacgcccccgccgcaccgccggcctcggctgacatcgccgtcgacatttgaacgcagggcgtcgtcgcgccgggcgtctgccagcgccgtccggctagccatcagtagctagtacgtagtaccagtatagtttgcagagtcgattgcgccatgtgtggtggctgcgtgcctgtgcctgcctgccggcctggcctggagtgcggttctgctgccgccacagttaattggcccagtttgtctagctgtcgagtttttttttttcaactctctctgtctctctccgactcttcccttctttttgataaagttcgtccctgcagttaaatctctgtttgctgcgacttgttcttcttgtgtgtgagagtgggacgaaatctcgtgtgtttgtatgtggcagtttggctcgcttgtttgaatgtaagccatgtgcgcgtggtcatttctactgcaata

SEQ ID NO: 138741 - DNA, 1377 bp, Zea Mays
acgcaacaaagcatcttgagtgttcgacagcgagccatggagaagacgtccgagaacgccatcccgccggcggcatccccgctgatgctgttcgggtcgtgggcgagctcgtacacgcaccgcgtgcagctggcgctgcggctcaagggcctggagtacgactacgtggaggaggacctggggaacaagagcgacgagctgctgcgccacaaccccgtccacaagaaggtgcccgtgctcgtccacggcggccgcgcgctcccggagtccgtcattatcctccagtaccttgacgacgcctggccggagacccgcccgctgctccccgccgacgccttcgaccgcgcgctcgcgcggttctggtgccacttcgccgacgacaaggtacatatgtatatatatacaccaccgtcgtcgtgccgtgcgtctgcggagcgaggaggcgatgcgtgcctgagcctgcctgacacgtacgtacgtgcccgtctcgtacgtttttgtccccgtgcttgtctcgttgcagctcgggccggcggtgggcgcggtgttcgcgtcgacgggggagggccaggaggcggcggtgcggcaggtgcacgagaacctggcgctgatcgagtccgagctccgcgacggcgcgttccggggccgccgcttcttcggcggcgacgaggtgggcctgctggacgtcgtcctgggctgcggctcctactggctcgccgtgttcgaggaggtgaccggggtgcgcctcgtggacgccgacgccttcccgcgcttccacgcctggctgcgcgacttcgaggccctggacgaggtccgggagaccatccccgcggtggaccgcctgctcgagtacgcgcgcggcctccgccacatgctgctcggcctcgcgggggccggcgccggcgccggcgcggacgcgccctccaccgacgcccccgccgcaccgccggcctcggctgacatcgccgtcgacatttgaacgcagggcgtcgtcgcgccgggcgtctgccagcgccgtccggctagccatcagtagctagtacgtagtaccagtatagtttgcagagtcgattgcgccatgtgtggtggctgcgtgcctgtgcctgcctgccggcctggcctggagtgcggttctgctgccgccacagttaattggcccagtttgtctagctgtcgagtttttttttttcaactctctctgtctctctccgactcttcccttctttttgataaagttcgtccctgcagttaaatctctgtttgctgcgacttgttcttcttgtgtgtgagagtgggacgaaatctcgtgtgtttgtatgtggcagtttggctcgcttgtttgaatgtaagccatgtgcgcgtggtcatttctactgc

SEQ ID NO: 138742 - DNA, 2109 bp, Zea Mays
aaaatcaaaaaaatatggtaccggcataggggcgggctcctcgctcttgcgccgcgcttcggcccctcccacaacccgagaacatccgccgcccgttgcgcaattcgacgagaaaaccccacagcctgcacctcggggacgccggcgcggagggatggagtgccacgccctacagtgatttctcccccgctccgatccccggcgcatgaccgggtcggctggcctatgcatcgcagcaggagttgtcgtcgattgcccctgcctgccccagttaatcccgcccggtcgcaatccagcattagaggcgccgatctcctgccccgtcctgccctgtggattatcgacagcggcgccggataccacggaagagaaggaagacaaggaaggggccgaaactaacttgcttgtgccggggcaaggacgagatcgagggcagccgagccggtacccgaaactctaggcgaggttcccacaatagaagtatacccaatggatcgtggaggttctcaaaagaaaagacataaatctgttacaaatgttgacatcatcagtaatctacctgatgttattaaagacaaaattctctgctgtttgccaataaaagaagctgtaagaacatgtctcttgtcaaggaaatggaggtacacatgggcttcaatgactgaattgatgttcagagaagatgattttgctttaggcaatggtaatgaagacggtgacagcgacagatttgtttacttcgtcataacgtttctctccctccatgatggccctattttgaagtttgaaatgaatgctcgacgggttcacatgttttctcctggaggacacatccacaggtggatgcttatgctgtcaagaaatggaataaaagaaattcaaattaagacaaggatatggaggaattacaaaatcccttcttctttcttctcatgcgtggaattggaatatgcttgcctgcaaggatgtatattccagttgccacctctgtttgcaggctttaagcggatgcgtacccttcatttcgttgagttctgtgcaacggaaaacaatattggggaattagtagcgagctgcccgaacttggaggaacttattctctccaggttgctcagctttgctgatatcaccatccactcaacaaagctcaaagtcctaagagttgatggcatgtttaaacatctcaatcttgtgacgccgcacgtctcttcagcagtgattaacctgcaagttaacactggttatgtcaaaagggctgggtccaactttaatctttcccaattcattggttctcttttggatattgaaaatatttcattgctcgggcacgcttttgagtgtgcagcacatggaatcgtgcctggtaaactaccgagatcgttaaatcggctgaccgagataaccctggagcttgaccttggtaacctgaaggaagcaaacgcggctcactgtttgtttcaaattgctcccaacttgcgacgcatggagctacagcttatgcacaggggctattctgcacccacctcgagtttctgggactcggttgatcgtcaggattgtctcttcaagaacctttacacagttgtcatgaacaacttcactggttcctgtgcagagtcaggcttcttgaaacttctgctcgatgacgcgcctgtacttagaagtgcgcggatagaagacaacaacaaactggacaaagaatccctcaaacgcctcctgaagatgagaagagcatccaaggacgcagaaataatcctcctttgaggcgtggtcccctggctccagtagatgcccactgttctttcctggtgaagcgatttggtctgctgtgttataggttttattcaactaggcgtttgggcacaacttcgtctgaacaaaagttgtgtcttcgcgtatacctgtgtttcagtgtgtcaccttcagcaaagctaaatgttgcacccgagtcagagtcgtgtttcttttagcattttgtgttggtacttcgaaattctcttgctgcgctggccaacatgggtttgcttatatggctttggaatgatggacaaaatagtgcttgttagttgtggaattgtccatttaggcaacaaagtttttgaaaaccac

SEQ ID NO: 138743 - DNA, 2212 bp, Zea Mays
atgacagatcatttcgctctaggtctaggtgctcttcttcttttgctgctaagtagcagctgtttcagttccgaccttgatgtccaatgcctgagagacgttaagcaatcagtgaccgatcctactggcatactaaaatcctcatgggttttcgataatacctctgtgggtttcatatgcaaatttcctggtgtggaatgctggcaccctgatgagaaccgagttctcgcattgcgtctcagcaactttggccttcagggcccattccctaaaggtctcaagaactgtaccagtatgactacgctggacctgtcgagtaacagcttcacaggtgccattccttcagacatccagcagcaagtgccgttcttagcatctctggacctctcctacaacggtttctcaggcggaatcccagtgctcatctataacatcacgtacctaaacacccttaatcttcagcataaccagttgagtggtgacattccagggcagttcagcgcccttgctcggttacaggagttcaatgttgctgacaaccagctgtcagggactatcccaagctctctacagaaattcccggcatcaaacttcgctggtaatgacggactgtgtgggcctccattaggtgaatgccaagcttcagcgaagagcaagagcactgcatcgatcatcggggctgttgttggcgtggtagtcgtcgtcattatcggtgcaatagttgtgttcttttgtctgcggagggtaccggccaagaaggcggcaaaggatgaggatgataataagtgggcgaagagtatcaaaggaacaaaaactatcaaggcaataacctttctcacaaaaagtaaccaggaacttctcggtgacataatgatcatttctattattatccaggtatctatgtttgagaatccagtttcaaagatgaaactgagtgatctcatgaaagccacagacgagttcagtaaagagaacatcattggtactgggaggacagggactatgtacagggcggtgctacctgacggctccttcctagccgtgaaaaggctacaggactcgcaacattccgaatcacagttcgcatcggagatgaagacacttggccaggtgaggcaccggaacttggttccgctcttgggattctgcgtcgccaagaaggagaggttgctggtgtacaagcacatgcccttgggctcgctctacgaccagctaaacaaagaggaaggtagcaagatggactgggcgctgaggctacggatcggcatcggtgcagcgaaagggcttgcgtatctccaccatacctgcaaccctcgagttctccaccgcaacatcagctccaagtgcatcctcctggacgaggactacgaaccaaagatatcggacttcggtctcgctaggctcatgaacccaatagacacccatctcagcacctttgtcaacggggagttcggagacctcggctacgtggcgccggagtacgcgcgtactctggtggctactcccaagggcgatgtctacagctttggcgtggttctccttgagctcgtcaccggtgagaggcccacccacgtctcctcagccccggagaatttcagaggaagcctagtggaatggatcagtcatctgtccaacaacgcactcctccaagatgctatcgacaagtcgctggtggcgaaggacgctgatggtgagctgatgcagttcctgaaagttgcgtgttcctgcacgctcgccaccccgaaggagaggccaaccatgtttgaggtttaccagctcctcagagccattggcgaaaggtaccatttcactgccgatgatgacctggtgctgccacctcttagcacggacagtgacggtgtgacactggacgagctcattgttgccaagtaattgcaaaatcatacttatgtagcagaagacaaaacaagactgaacgtcttctttttcccccctccaagagagttatagtaatgatgaagtgagtaagatggcttataagatgtatgttccaattagtagcatcccgctgtatagttgttgtagcgtggttggtagttggtacccgccctttggagatgatagtagctgtaaaggataattttcatgtaaccaatttggggacgagacacatgttacttgtaagtttgttacaggtaaagtcatttcatattaaactgatatgatcatatttgattagactgtggccgtg

SEQ ID NO: 138744 - DNA, 2378 bp, Zea Mays
gctcgctcgctctagtcctccgactccaagacctcgagtcctcttcctctcccctcacctccctcaacctgcagcttcgacgtcacctcctctcttcccgtctgcgctctctcccctggtgcgccgggctacaggtttcctccagggctgcaggaagcagcttctgttgcagcttgaatcgagaagtggcgtggtaacatcaccagggagaagttggattgttccgccagagtgctcgatgacagatcatttcgctctaggtctaggtgctcttcttcttttgctgctaagtagcagctgtttcagttccgaccttgatgtccaatgcctgagagacgttaagcaatcagtgaccgatcctactggcatactaaaatcctcatgggttttcgataatacctctgtgggtttcatatgcaaatttcctggtgtggaatgctggcaccctgatgagaaccgagttctcgcattgcgtctcagcaactttggccttcagggcccattccctaaaggtctcaagaactgtaccagtatgactacgctggacctgtcgagtaacagcttcacaggtgccattccttcagacatccagcagcaagtgccgttcttagcatctctggacctctcctacaacggtttctcaggcggaatcccagtgctcatctataacatcacgtacctaaacacccttaatcttcagcataaccagttgagtggtgacattccagggcagttcagcgcccttgctcggttacaggagttcaatgttgctgacaaccagctgtcagggactatcccaagctctctacagaaattcccggcatcaaacttcgctggtaatgacggactgtgtgggcctccattaggtgaatgccaagcttcagcgaagagcaagagcactgcatcgatcatcggggctgttgttggcgtggtagtcgtcgtcattatcggtgcaatagttgtgttcttttgtctgcggagggtaccggccaagaaggcggcaaaggatgaggatgataataagtgggcgaagagtatcaaaggaacaaaaactatcaaggtatctatgtttgagaatccagtttcaaagatgaaactgagtgatctcatgaaagccacagacgagttcagtaaagagaacatcattggtactgggaggacagggactatgtacagggcggtgctacctgacggctccttcctagccgtgaaaaggctacaggactcgcaacattccgaatcacagttcgcatcggagatgaagacacttggccaggtgaggcaccggaacttggttccgctcttgggattctgcgtcgccaagaaggagaggttgctggtgtacaagcacatgcccttgggctcgctctacgaccagctaaacaaagaggaaggtagcaagatggactgggcgctgaggctacggatcggcatcggtgcagcgaaagggcttgcgtatctccaccatacctgcaaccctcgagttctccaccgcaacatcagctccaagtgcatcctcctggacgaggactacgaaccaaagatatcggacttcggtctcgctaggctcatgaacccaatagacacccatctcagcacctttgtcaacggggagttcggagacctcggctacgtggcgccggagtacgcgcgtactctggtggctactcccaagggcgatgtctacagctttggcgtggttctccttgagctcgtcaccggtgagaggcccacccacgtctcctcagccccggagaatttcagaggaagcctagtggaatggatcagtcatctgtccaacaacgcactcctccaagatgctatcgacaagtcgctggtggcgaaggacgctgatggtgagctgatgcagttcctgaaagttgcgtgttcctgcacgctcgccaccccgaaggagaggccaaccatgtttgaggtttaccagctcctcagagccattggcgaaaggtaccatttcactgccgatgatgacctggtgctgccacctcttagcacggacagtgacggtgtgacactggacgagctcattgttgccaagtaattgcaaaatcatacttatgtagcagaagacaaaacaagactgaacgtcttctttttcccccctccaagagagttatagtaatgatgaagtgagtaagatggcttataagatgtatgttccaattagtagcatcccgctgtatagttgttgtagcgtggttggtagttggtacccgccctttggagatgatagtagctgtaaaggataattttcatgtaaccaatttggggacgagacacatgttacttgtaagtttgttacaggtaaagtcatttcatattaaactgatatgatcatatttgattagactgtggccgtg

SEQ ID NO: 138745 - DNA, 2196 bp, Zea Mays
gaagcaaaacccacgagccgaaaactcccaaaccctcctgtcggctgggctctccctccggcgaggccaccatgctagccgccgctcgcccccttcgccgcctctcctcttcttgttcctcttccgtcggcgcccttcgccgcgtcctcctacaccctccagcacccccgccttcgcttcagcctcctctttcgcctctccggacccttacgcgcgcccttcttccgtccctcgccgccgcccacaggttctccactacatccttctctacctccgccccatcacgcctaggagaatgcgttggcgtgttgggagctccggcgatagccgaggaggaggagggggaggagacgggggcgttggtgcggcatgacacggatgcgtacgcggcggtggagctggctctggactcagtggtaaaggtgttcacggtgtcgagcagccccaactacttcttgccatggcagaacaaggcgcagcgggagagcatgggctccgggtttgtaattcctggaagaaggatcgtgacgaatgcacatgtggtagctgatcatacttttgttcttgtgaggaagcatggttcgcctactaaatacaaggcagaagtccaagctgttggtcatgagtgcgacttggctctgttgacagttgagagtgaggagttttgggatggggtgaacagtttggagcttggagacatcccctttttgcaagaagcggtcgcagtggttggctaccctcaaggtggagataatatttctgtcaccaagggggttgtatctagagttgaaccaacacaatatgcccatggtgctacacagcttatggctatacaaatagatgcagctataaatccaggtaatagtggagggcctgccattatgggtgataaagtagccggagttgctttccagaatttgtcaggagcggaaaacattggttatatcataccagtgcctgtaattaagcgtttcatttctggagtagaagagagtggtaaatattctgggttttgtactcttggtgtatcttgccaggctactgaaaatattcagttaagagagtgctttgggatgcggcctgaaatgactggagttttagttagtagaataaaccctctatctgatgcttacaaggttttgaagaaggatgacatccttcttgagtttgatggtgtgcctatcgcaaatgatggcacagttccattccggaatagagagagaatcacctttgatcatctggtgtccatgaaaaaacctgaagaaacagctgttctcaaagtattacgagatggtaaagagcaagaattgggagtaacacttagacctctgcaacctttagtcccagtccatcaatttgataaattaccaagctactacatatttgctggttttgtttttatcccacttacccagccctatctccatgaatttggagaagactggtataatgcctcaccacgccggttatgtgaacgggcactaagagagcttccaaagaagactggtgaacagttagttatcctatctcaggttctaatggatgatatcaatgtcggttatgaaaggcttgctgaactacaggtaaagaaggtaaatggtgtggaggttgaaaacctgaagcacctgtgcagcctcgtggaaggctgcaccgaagaaaacttaaggtttgacttggacgatgaaagagtcattgtcctgaagtaccagaacgcaaggcttgccacatcccgggtcctcaaacggcacaggataccgtcagccatatcgagcgaccttgtcgaagatcaagtaactgatggcgaggttgagacgtcatgcaccagctaatgcgagcctcttttttagacctaattgggagttccctgctgtagctcagctcaaggagcgagctgcattgttggcgaggcaagcgcacctggctgcctggctgcctggagtacatggtatcacttcctctaggacggctttagttttgacataaggaggagtgtctttagaaaataagattatgagctccagggcttttcagtctgaatgtaacggtaacataaccattctttactagaacatttattttttccatcattgacaaagcaccccacatggtctgtatcatcaggaaacatatacatcgtataaaaaacatcggaaaaaggaaagagttgcagttcaatgtttgttggccagtgtgatt

SEQ ID NO: 138746 - DNA, 2063 bp, Zea Mays
actcccaaaccctcctgtcggctgggctctccctccggcgaggccaccatgctagccgccgctcgcccccttcgccgcctctcctcttcttgttcctcttccgtcggcgcccttcgccgcgtcctcctacaccctccagcacccccgccttcgcttcagcctcctctttcgcctctccggacccttacgcgcgcccttcttccgtccctcgccgccgcccacaggttctccactacatccttctctacctccgccccatcacgcctaggagaatgcgttggcgtgttgggagctccggcgatagccgaggaggaggagggggaggagacgggggcgttggtgcggcatgacacggatgcgtacgcggcggtggagctggctctggactcagtggtaaaggtgttcacggtgtcgagcagccccaactacttcttgccatggcagaacaaggcgcagcgggagagcatgggctccgggtttgtaattcctggaagaaggatcgtgacgaatgcacatgtggtagctgatcatacttttgttcttgtgaggaagcatggttcgcctactaaatacaaggcagaagtccaagctgttggtcatgagtgcgacttggctctgttgacagttgagagtgaggagttttgggatggggtgaacagtttggagcttggagacatcccctttttgcaagaagcggtcgcagtggttggctaccctcaaggtggagataatatttctgtcaccaagggggttgtatctagagttgaaccaacacaatatgcccatggtgctacacagcttatggctatacaaatagatgcagctataaatccaggtaatagtggagggcctgccattatgggtgataaagtagccggagttgctttccagaatttgtcaggagcggaaaacattggttatatcataccagtgcctgtaattaagcgtttcatttctggagtagaagagagtggtaaatattctgggttttgtactcttggtgtatcttgccaggctactgaaaatattcagttaagagagtgctttgggatgcggcctgaaatgactggagttttagttagtagaataaaccctctatctgatgcttacaaggttttgaagaaggatgacatccttcttgagtttgatggtgtgcctatcgcaaatgatggcacagttccattccggaatagagagagaatcacctttgatcatctggtgtccatgaaaaaacctgaagaaacagctgttctcaaagtattacgagatggtaaagagcaagaattgggagtaacacttagacctccctatctccatgaatttggagaagactggtataatgcctcaccacgccggttatgtgaacgggcactaagagagcttccaaagaagactggtgaacagttagttatcctatctcaggttctaatggatgatatcaatgtcggttatgaaaggcttgctgaactacaggtaaagaaggtaaatggtgtggaggttgaaaacctgaagcacctgtgcagcctcgtggaaggctgcaccgaagaaaacttaaggtttgacttggacgatgaaagagtcattgtcctgaagtaccagaacgcaaggcttgccacatcccgggtcctcaaacggcacaggataccgtcagccatatcgagcgaccttgtcgaagatcaagtaactgatggcgaggttgagacgtcatgcaccagctaatgcgagcctcttttttagacctaattgggagttccctgctgtagctcagctcaaggagcgagctgcattgttggcgaggcaagcgcacctggctgcctggctgcctggagtacatggtatcacttcctctaggacggctttagttttgacataaggaggagtgtctttagaaaataagattatgagctccagggcttttcagtctgaatgtaacggtaacataaccattctttactagaacatttattttttccatcattgacaaagcaccccacatggtctgtatcatcaggaaacatatacatcgtataaaaaacatcggaaaaaggaaagagttgcagttc

SEQ ID NO: 138747 - DNA, 1948 bp, Zea Mays
cggctcctccctctcggattcccaaacgccaaaatctcgttgtcacgcccacgcaccgcatcgttcgcttcctttcgtcaactccacttctcttctccgcgtcacctcctcttcgccgccgccgacgcttcacccggcagccagccatggatgaggagtacgacgtgatcgtactaggcacggggctcaaggagtgcatcctcagcggtctcctctctgtagacggcctcaaggttttgcatatggacagaaatgactactatggaggagattccacctcactcaaccttaatcagctctggaagaggtttagaggggaagacaagcccccagcacatctaggtgcaagcagagactacaatgtggacatggtgccaaagtttatgatggcaaatgggacattggttcgaaccctcattcacaccgacgtgacaaagtacttgtcattcaaagctgttgatgggagctatgttttcagcaaagggaagatttacaaggtccctgccactgatatggaggctctgaagtcccctttgatgggcctattcgagaagcgcagagcaaggaacttcttcatttatgtccaagattacaatgaagctgatccaaggacacatcaaggattggaccttactagggtgacaactagagaacttatagcaaaatatggtttaagtgatgatacagtggatttcgttggacatgcacttgctcttcatagagatgatcgttatctcgatgaaccggcacttgatacagtgaaaaggatgaaactatatgcagactctcttgcacgctttcaaggaggctcaccttatatctatccactatatgggttgggtgagctaccacagggttttgcacgactgagtgctgtttatggtggtacttacatgttaaacaagccagattgcaaggttgaattcgatatggaggggaaagtgtgtggtgtcacatctgaaggtgaaactgcaaagtgcaagaaggtggtgtgtgatccttcgtatttacaaaacaaggtcaggaagattggtagagttgttcgtgcaattgctatcatgagccacccaatccctaatacaaacgagtcacactcggttcaaattattttgcctcagaagcaacttggacgcagatcagacatgtatgttttctgttgctcatacacgcacaatgttgcaccaagagggaagttcattgcatttgtgtctgcagaagcagagactgataatccccagtctgagctaaagcctggaattgatctacttggttctgtagatgagattttctatgatatctatgacagatatgaaccagtgaatgaaccatctcttgataattgctttgtctcgacaagctatgatgccaccacacattttgagacaactgtaacagatgttctgaacatgtatacaatgatcaccggaaagactgtagaccttagtgtggatttgagtgctgctagtgctgccgaagaatactgatttcagtcatagtgtcatgtttatcaaagatcacatcgttggcgacagcacatgacccacattaatgaatggctggaatgcgtttattcggttccagattatatcatgccacatgtactgttctgcgtaatgtctactgggctggcagaactatgcacaatgttgattcaagttgatggatggtggtggttctgttatttactagttagtcgaatggtgcacaacattaaacagtgaccatcatggctgtgtgatgtatcataataactgttcagtaaatttgtgctctgcctgagttctgctcgatgctattgacggcgccctaggtgcttgttccactgtgaatgaaccaagtctgtcacccatcatgttcttcaaagatttttaccaaagatctttttggtctgatgtgtcagaccggctcttgtgatggacgtattgtttgccaaattatgcgattattt

SEQ ID NO: 138748 - DNA, 1050 bp, Zea Mays
aacccaaatatcatccgcaatccccatcttaccctgtcccttactattaaaccaagccatggactgagctaaaccaaaacaccgagaaaagaagatagacggatcctcccggtgaacgaacatgtcgccaagagagtggatccacgacggagactacaccccggtaatcgtggtcatgattttcattgtgctgctcacagtcgcgtccgtgcttttctcccattattgcgtcggggaccgggcgttcatgcgcactggttatgactttgaaggctatgtgatgcgcaagttcgccgtttgcgtcgacagtggccttcccaagcgggcacatcatgatataaagaatacaaaccctcatgaggttagggttgaggtcgtggaagaggtgcatgcatcagagccctctactcctgctcttcctcttgctacgcctgctcctcctactgctccttaccatgttgctacgggagcaagagcagaagaagtaccatcggcggccgaggaggagcaggaggaagatgaggactgggaggatgatggcgacgatgaggaatttgatttcgaggaagaaggagaccttctaaacctatgatctaggtttgcggaacttctagggtcctttaaaactagccttcatgtgtttcttaaaatatacccttttcaaggtattcaaggggcaacgaatctgatcatggaggatcgagaataatgagaactaaaagtgttgtcaatttccttatgcatgtcctttccatggtatttaattacctctttacatcaatctattgcttaattcaaactacgggaggaaggtccgtgccgtcttggtctatttcatatctttggattaagatctaaacggctaacgcgagcgcgggaacgatgtgtttgaacaatatgcatacgtaggatttacacttccaccctccttagagcataaattctgaatttgaaccacacaaactttttaattaatgttgacctacactccgagtatgcaagtaaactcttataacacacctaaatatttatttcaattttatcttcgat

SEQ ID NO: 138749 - DNA, 465 bp, Zea Mays
actattaaaccaagccatggactgagctaaaccaaaacaccgagaaaagaagatagacggatcctcccggtgaacgaacatgtcgccaagagagtggatccacgacggagactacaccccggctatgtgatgcgcaagttcgccgtttgcgtcgacagtggccttcccaagcgggcacatcatgatataaagaatacaaaccctcatgaggttagggttgaggtcgtggaagaggtgcatgcatcagagccctctactcctgctcttcctcttgctacgcctgctcctcctactgctccttaccatgttgctacgggagcaagagcagaagaagtaccatcggcggccgaggaggagcaggaggaagatgaggactgggaggatgatggcgacgatgaggaatttgatttcgaggaagaaggagaccttctaaacctatgatctaggtttgcggaacttctaggg

SEQ ID NO: 138750 - DNA, 375 bp, Zea Mays
atggaaggcctcatcccgctgctctacaaggccatcaaggaccggcggagcaacgccggcggcggtgggcgatcctaccgcagcggaggtgccctcctctcctccgcgcccgtggacctggacgaccccgagcagaggaggcggtggctgcagcaggagctgcggtccccggtgcacgcgggccacacccacacggcgagggcggcggcggcggcggcggcggcggcggcggccgaggggtcgccgctgcaccggcggaacctgtcgctggaggagctggcgggcgaggtggggctctcgcccgaccggcggctccgggtgccgctgcccaaggccaggagcgtccgcgccttcgcctgcatcggcgccgcctga

SEQ ID NO: 138751 - DNA, 2025 bp, Zea Mays
aattagccagagcccagagcccagagcccggaacaggcgcggcggatataacacactccaccctctccgcgactccgcctcgcggcggagacgttccgcggccattcatacggcgtggctaggagcactccttcgaatcggcatcgcaattcatacggctacaacgtctattctgtgggcacttcgtctccgatcgattcacggcaagagcgagagttcatggattcgacagggcccatgagggtctccatcaaagcccaccgccccgactggaaatcggagcttagaacaaattgcctcagaagagttagaaaggacagaaatgacttgctttggaagatcaggaagcagggactgcccggcaatgtcatggaaaaggtcagatctgctgtcaggagcgtcatatctgatgaggtagagaaactcaaacagtccaatacagaaaacgaggaccaagaaatggatgtcatatgggagtatcaaggactgcatgctgctaagcctgctgaaattgaaagtgaagatatattgcttgaaatggaaagacttgtttgtgaagatattagagaagaagtaatcagaaaacgtgtggtgcctataacctctgttattctttcattcccactgcttactgaccagcaatctgtttgcccatcttattgctggagtttagctgcaaaaacaacctgattaactgtttttgcatagttgtgcggttgtgccaattctatgatacttattttactcattggtccggaatttttcatcagttaatcatttgcagaactagaggcacttgatgaggaagatgcatatttagctcaaagtgttttggatcatatgcaactaaatgacattgaggctgccgaaactgctaagctctggtgtccagtatgcaagcaaggagatctacgagaaacacgtaatctcatatactgtactctctgtaatctacggcttgaccttggagaagataagatgacgctggagttcttacgagaacggttggccaatgcacatatggatcactttgacagaggatgcaaatcagcacccaagttctgtttacagactatgtttggcctgactgcgctctacatacagtgtgcagaatgcagtacatttgatatcgtggtataaccaacaagatgctgatatgaatcaacacttcaacggaggaaagaaatgttacaaaacttacttgaagttatttcatcgcttcatgtaagattagctggtgaagttatggcaagatggctgcaatccgaaaggtggcacacactcagcacctgaacacgttcatccattccagcttctggtcaaaacaattgacatgcatgcatgcatgtggaatttccacgtatgtccaatttaaatgttgcaaccggtgtaaggtggttagtaaatatgcacttgactatggcaacatctagtttccagcttacttgaaagttgaaactgcaactacaattggaaccaaacactacccaattgatcttgaagtcgtctttgggctagctcgcattcctttgcagatctgctaccggtggcgagcgtgtagagatggcaatggttacccgcgacccgatacctgatgggtatttactctattagggtatatatgtaggctaaataatctacccgtgggtctgttattggacaaaaatcttcacccaatgggtaaacgggtattagaacattccgccttcacccatacccgttaacccgtgggtataaaatacccaatataaacttagcccaagcataaacttgaactttattcattcatcttttttactatttaacaatcttttatgccataatgtcatagaaggtttaacggcaatttaatgaccatgtaatggaacatgtaatatactatgtagtactatcctagtgttactactttatccaattatctttggtgtgttgaatgtgtggttaaatgatgctagaaattttgtaatggtatttatatggatatacttgacatttgtataatataatattttgatagatgtacaa

SEQ ID NO: 138752 - DNA, 1827 bp, Zea Mays
aattagccagagcccagagcccagagcccggaacaggcgcggcggatataacacactccaccctctccgcgactccgcctcgcggcggagacgttccgcggccattcatacggcgtggctaggagcactccttcgaatcggcatcgcaattcatacggctacaacgtctattctgtgggcacttcgtctccgatcgattcacggcaagagcgagagttcatggattcgacagggcccatgagggtctccatcaaagcccaccgccccgactggaaatcggagcttagaacaaattgcctcagaagagttagaaaggacagaaatgacttgctttggaagatcaggaagcagggactgcccggcaatgtcatggaaaaggtcagatctgctgtcaggagcgtcatatctgatgaggtagagaaactcaaacagtccaatacagaaaacgaggaccaagaaatggatgtcatatgggagtatcaaggactgcatgctgctaagcctgctgaaattgaaagtgaagatatattgcttgaaatggaaagacttgtttgtgaagatattagagaagaagtaatcagaaaacaactagaggcacttgatgaggaagatgcatatttagctcaaagtgttttggatcatatgcaactaaatgacattgaggctgccgaaactgctaagctctggtgtccagtatgcaagcaaggagatctacgagaaacacgtaatctcatatactgtactctctgtaatctacggcttgaccttggagaagataagatgacgctggagttcttacgagaacggttggccaatgcacatatggatcactttgacagaggatgcaaatcagcacccaagttctgtttacagactatgtttggcctgactgcgctctacatacagtgtgcagaatgcagtacatttgatatcgtggtataaccaacaagatgctgatatgaatcaacacttcaacggaggaaagaaatgttacaaaacttacttgaagttatttcatcgcttcatgtaagattagctggtgaagttatggcaagatggctgcaatccgaaaggtggcacacactcagcacctgaacacgttcatccattccagcttctggtcaaaacaattgacatgcatgcatgcatgtggaatttccacgtatgtccaatttaaatgttgcaaccggtgtaaggtggttagtaaatatgcacttgactatggcaacatctagtttccagcttacttgaaagttgaaactgcaactacaattggaaccaaacactacccaattgatcttgaagtcgtctttgggctagctcgcattcctttgcagatctgctaccggtggcgagcgtgtagagatggcaatggttacccgcgacccgatacctgatgggtatttactctattagggtatatatgtaggctaaataatctacccgtgggtctgttattggacaaaaatcttcacccaatgggtaaacgggtattagaacattccgccttcacccatacccgttaacccgtgggtataaaatacccaatataaacttagcccaagcataaacttgaactttattcattcatcttttttactatttaacaatcttttatgccataatgtcatagaaggtttaacggcaatttaatgaccatgtaatggaacatgtaatatactatgtagtactatcctagtgttactactttatccaattatctttggtgtgttgaatgtgtggttaaatgatgctagaaattttgtaatggtatttatatggatatacttgacatttgtataatataatattttgatagatgtacaa

SEQ ID NO: 138753 - DNA, 1998 bp, Zea Mays
gcccgtccccatccaatttcttttcccggccaagttaccgccggacaaaaagacgggaaaaaaaacacggcggaccaccacgcctgttctcagtcacgctagtagtaggaaatcctagcgcgtcgctgcttccattaccgcctccgcaaccagcccgccgcgcccccgagcgtttcgttccgggagcggcaagactgggacacgccagccctttatttcgagctttctgcgtgcgggaggggggttgacaggcgatggcggccgagggcgaggcggcggcgctggagttcacaccgacgtggatcgtcgcggcggtctgctctctcatcgtgctcctctcgctcgtcgccgagcgatgcctccactacctcggcaagacgctcaagaggaagaaccagaagccgctcttcgaggcgctgctcaaggtcaaagaagagttgatgcttctggggttcatctccctgctgctgacggtgttccaggggatgatccggaggacgtgcatccctgaacgctggacattccacatgctgccatgcgagaagccagatgagaaggccggtgaggccgccaccatggagcattttgtagggacgcttggcaggatcggtaggcgtctgttgcaggaaggcactgctggggctgagcaatgccagaagaagggaaaagttccacttttgtcccttgaagccatacatcagctgcacattttcatatttgttctggcaatcacacatgttattttcagcgtcacaactatgcttttaggaggtgcacagatacaccaatggaaacagtgggagaatggaattaaaaaagatgctcctggaaatgggcctaaggtaaccaatgtacatcatcatgaatttatcaagaaacgttttaagggtattggcaaagattctataatattgagttggctgcattcttttggtaagcagttttatagatcagtatctaaatcagattacaccacaatgcgtcttggttttatcatgactcactgccctggaaatccaaaatttgatttccatagatacatggtaagggttttagaggcggattttaagaaagtggtaggcataagctggtacttgtgggtcttcgtggtgatatttctgttgctgaatgttaatggctggcacacatacttttggattgctttccttccccttattcttctgttagccattggcactaagctggagcatgtcatagctcagctagcccatgatgtagctgagaagcacacagcggtcgagggcgatgtgatcgtaaaaccatcagatgaacacttctggttcggcaagcctagggttatcctttacctgatccacttcatcctctttcagaatgcgtttgagattgcgtttttcttctggatactgagcacttatggattcgactcgtgcatcatgggacaagttcgttttattgtgccaaggcttgtcatcggggtggttattcagcttctctgcagctacagcaccttgcctctgtatgcaattgtaacccagatggggagctgctacaagaaggagatcttcaacgagcatgtgcagcagggcgtcctgggctgggctcagaaggtcaagatgaaaaagggactgaagggagctgcatctgctagcaaggacgaatcgattaccaatgccgattcggcaggaccttccgttaagattgaaatggcgaaggctggggaggatgttgagatcgttggaaacacaggttgattgggacaatagggtgcccgtgttgtaatgatgtaacaggttaatatgccatcatctttttttgtagatactagatagcttgctgtggcaataccgcaatagcggtgaactagagaaggtgagtttgggcccgggagcctcatctgttatcggtccagtaggaagcaaattcttatatacgggatatcgataagaaatgaactaagaacatgttcctggattcattaccactaaaaattagctagctaaaagctgttattttttt

SEQ ID NO: 138754 - DNA, 3343 bp, Zea Mays
tctcctccccgtattcgttcgacaccagtcccgacactgacccgcgcaatggctattccatgtccacgagggtgtttcacagcatgcacgcaccatcgttttcgccgtcgtcggacgtccattcgtcttcccggccttcgccatattcttcctccccagcctgctgcccctgcccacggtcacagccgcgagccgaccgacgctcgtcgacgcgggtacgggcgagtcggtcttgctcctggcttttcttcgtgcgtgccgccgaggaggacacgatgacgcctgccatgtttaggttatcttggcgatgacgagtccagatctgagatattggacaaccaaggcccatagtgcaacaatagtcggcatatgctacggagttggtggtggtgttgtgtcgcctcggcgggtctagggctggaaggtactcgcattctctcgcccttttcggactgacgcctggtgcctctcggtttggagctgctctgactggtcttctttctccgtttgcatgctctctccatatatgtatctagcggtatactagctatgtcgagatgtccatgtattcgtcatgttcttcttcggcaacggacatgtatgaccgcatcttcccttaccttcctgctctacgaaatttgaaagtgggggaggcgaggatggagtctttgatttgctacctatgatactcattcgatggctcgatattgcttttctacataacattttctttaccacgatgtcgattcaattagtcaaataaaaaaatattatacagagagtaaaatcaatcaataaaaatcttgagatctttttgataaataatttatatgagtattgttataagccgccgcaaggcacagccaacctaccgaagctgaactggtgacatttaacgtggttcgaattagcccttccaacttcgaactgccctccttcatatgcatgctccctcccgccgccgcagccgccattcgcgccacggcgggcttgccgcgggctgtacgccgcgtccacgctcgtctgctgaaggaggggctcgcggaccttccctccgcgccggcgctccttgtgtccgcctacgccaggtcgtgcctcctccccgacgctcgccgcgcgttcgacgatgcgccgcgccgggacctccacctctactcagcgctcctcgccgccgtctcccactcctccgatccagagctcgttctcccgctcctccgccgcatgctctcggacgacgcgcttcgcccagaccacttcgtccttgcctccctcgcgagcgccgctggcaggctgcgcagcctccgccttggcaggcagctccacgcccactttgccgcctccccgtacagtgctgacaacgtcgtcaagtcgtcgcttatcgacatgtactgtaagtgtggcgtccctcaggatgcccggaaggtgttcgacagtatcggtgtcaagaacagcgtcgtgtggactgcactgatttctgggtacgcgtccaatggctgcaccggtgaggcgcttgacctcttccagagcatgcctgcacacggcctcttcacgtggactgcgctcatctctggttttgtcaaggccgggaactatactggcgccatggggctgtttgttgagatgaggcgggatgatatcaggattcatgacgcgttcgtgctggcaactgtcatcggtggtgctgcagacctggctgcgcttgtgctgggcagacagctgcatggttttgtaatgaggcttggcttcctgtccagtatgattgttgggaatgcactggttgacatgtactctaaatgcagtgacatacactctgctagggaagtgtttgaggggattacagtccgtgatgtcatctcatggacgacaattcttgttggagaggcacagcatggtcgagctgaggaggtatttgctctttacaacaggatgcttcttgcaggaatgaagcccaatgaggtgacatttgttggattgatctatgcttgcagtcatgctggtcttgttcagaaaggacggcagctatttgattcaatgaagcgggaatatggcatgaagcctggagtgcaacattatacctgctatctggaccttcttagtcgctcgggctatttatcagaagctgaaaaactcatcactacaatgccatatgagcctgacgaagctacctggggggccctattgagtgcttgtaagaagcacaatgatactcagatgtgtctcagggttgctgataatttactagagctgagaccaaaagatccttcaacatatatcttgttatctaatgtctatgcagttaattgcaagtgggattctgtggccaaggtaagaaaaatcatggctgaaatggagataagaaaagtgccaggttatagttgggttgaagctgggagggaatctcgtatatttcatgctggggaggttccacttgatgttggagaagaaattacttgttttcttgaggaattggtctcagagatgcgcaagaggggttatgtccctgatactagctctgtgatgcatgacttggaagagcatgaaaaggagcagcatctgttcgtgcacagcgagaggctagctgtagcttttggaatactcaagtcccctccgggatcagtgatccgggttgtaaagaatcttcgtgtctgcggggactgtcacacagtaatgaagtttattagtgcgattgcacagaggaagatcatcgtgagagatgctagtcgtttccaccattttgaggatggtaactgctcttgtagtgaattctggtagctgatctactgatgttcagttgtatttagtctcagtattcctatgtccattacaccatttgtgttgagtttgtgatccaagttttgaagaggaggctaagttggcgagcgaagcggaggtccgtcgccgggaggcttgggccggagcatgttcctgacattacaaattagcccctagtcaccagaaggcttggaccggaacatggcaaaagccatgttcatattgttaagtttgagatatgctcaagcttagttggtattacaaattagcccctagtggctgttggcgccggcaagatgatgatgcattgtttgaggtggagtttgttattatgatgctacaaagaatttgtctcaaggttgagtttgtgatcatgttccctgttagtttaggtttcacctctataaatattcttgtaagccgcaggagatagttatctcaattataaatctcctgtgatctgtaaacacccgaaaaatactgagattgttgctgaccggcgcctgtggtttcccccttcgcattggaggaggttttcacgttaaatttgtatcttctctgtgtttgatct

SEQ ID NO: 138755 - DNA, 2567 bp, Zea Mays
ctcttatcctgtcctcccacttgcctcgcacccccaaattccacgcctcctcctcggcgcagtgctcccctcggcgttgccctagcccccgctggctcgccgccgcttccagcgcgcgctatgccatgagcagagacctcgaggacgggcacggcgccgtcggcaacgttattgcggcagcagcagctgcaggaggggaggcggtgggtgccggcgaggccggggacgcgcacgacaacgacgtggtgatgccggggttccggttccaccccacggaggaggagctgatcgagttctacctccggcgcaaggttgagggaaaacgcttcaacgtcgagctcattgctttcctggacctctaccgcttcgacccatgggagcttccagcaatggcggtgatgggcgggaaggagtggttcttctacgtgccgagggaccgtaagtaccggaacggagaccgcccaaaccgggtgacggcgtcggggtactggaaggcgacgggcgctgaccggatgatccgaggcgagaacaaccgccccatcgggctgaagaagacgctcgtgttctactccggcaaggcgcccaagggcgtccgcagcagctggatcatgaacgagtaccgcctcccgccaccacccaccgacgccgacccattgattcccaagtccgagatctctctctgccgcgtctacaagcgctcaggcatcgacgacggccacgggcagtcatcctccagcacccaagcttcctcagcgcggcggcggatctcctcccgcactggtggtgtgccgacgacggccgttcagcacggatcgacgccgtcatcgatgccactttcaccgacgccgcagcagctcagcagcttccatccgctccaaggagaatgctcgtctgcgtcaccgccggagcccataatggatcaagttgcggtcaccgtgcaccgtgcgtcgcctcagcttctccctcaccgtcaccgcccgaggccctgcccgtacgcgccggtgatggcaacggtatcagcagcggaagctgcgccgcaattggcacacgcggcgactgcccacgcctccacgtattcgctcttcaacatggccgctgccgccgccgcgcctatggccgccagctcaaggtcgaccattgacgagctgacaacgctggttgctcccacccaggcctacgccaacctctcggccgcgacgacgggcggccacctcctcccattactgacgccgccgccaccgccaatgctacaaatgacgccgcttggtgcgctgccgatcgtggcgccgccattgtcgtcttcagtcgctgacaagcttagcagctgggactggaacccgatacctgacacgacagaccgggattacaatccttctggttttaagtgatcccaaactcactgctatgttctgaaaaccctgccataagtgtaggctaacttatatacccttcagtgtcggtccacatggactacgtacaaaatgcatgtcaactagtacatatatatgatcaagaatactaaatgatcaggattttattcagaactgaagatatataggtggtttgtaagcataatgagatcactaacaataatctgcttcatgcatgcaagtttaattcttcctgattccatatgcgtgccttttaacaactagcggtagttattatttttcttaatttgccaaaaggtttgggtaggtttcatttttttcagttaaactgcaaggcacatgaaataatgtgagcatgattggacgcagaccgttgcagaagggtgtttgtttctttctgcatgattgggaggaagacttgcaggaggaggagatggacgacaaaggttatataaaaagctttgcatgtgcccacaggacttgtgtattctctttcagatctactagtctagaggtgaaaactgtccttttgcatccatggaatgattcatgtgattattgcaacagcttttgttctttatctctgcaatatttacttggtgctaacagtcacagagcatatattattgtgtgtggttttctttttctgctgatgcttaattgctgaagaggaaagggcaaataagacaagcagctgaagatgcatattcgatcggggttataagttaatgtctgattgatgaaacagagacgatctatgtggcagatgaccaaaagcctactcaatttgttctatcgatcaattcgacaagcttgttctctctggagtcatccgtgttggatgcttcatgttttggtgcgttctctggagtctataattctcgttgcctttatgtacagaaagatttatggtctacttaaggacgtcagcccgatcgacagctataaatattaaatagctggctgtagctagaagcagcggtgttcccagctgctaattattgaatcacgttaccagagcaaaagagatgaatagtgcaactcaaggtcacaaatccgaaatcacacaaccttcttttattttcagattataaggtcttgcaaagttttttttgctagtttgaaaacttaaatacttgtcgaatatttgtcgcgttactgtaaactagctaatcg

SEQ ID NO: 138756 - DNA, 1747 bp, Zea Mays
ctgtcctcccacttgcctcgcacccccaaattccacgcctcctcctcggcgcagtgctcccctcggcgttgccctagcccccgctggctcgccgccgcttccagcgcgcgctatgccatgagcagagacctcgaggacgggcacggcgccgtcggcaacgttattgcggcagcagcagctgcaggaggggaggcggtgggtgccggcgaggccggggacgcgcacgacaacgacgtggtgatgccggggttccggttccaccccacggaggaggagctgatcgagttctacctccggcgcaaggttgagggaaaacgcttcaacgtcgagctcattgctttcctggacctctaccgcttcgacccatgggagcttccagcaatggcggtgatgggcgggaaggagtggttcttctacgtgccgagggaccgtaagtaccggaacggagaccgcccaaaccgggtgacggcgtcggggtactggaaggcgacgggcgctgaccggatgatccgaggcgagaacaaccgccccatcgggctgaagaagacgctcgtgttctactccggcaaggcgcccaagggcgtccgcagcagctggatcatgaacgagtaccgcctcccgccaccacccaccgacgccgacccattgattcccaagtccgagatctctctctgccgcgtctacaagcgctcaggcatcgacgacggccacgggcagtcatcctccagcacccaagcttcctcagcgcggcggcggatctcctcccgcactggtggtgtgccgacgacggccgttcagcacggatcgacgccgtcatcgatgccactttcaccgacgccgcagcagctcagcagcttccatccgctccaaggagaatgctcgtctgcgtcaccgccggagcccataatggatcaagttgcggtcaccgtgcaccgtgcgtcgcctcagcttctccctcaccgtcaccgcccgaggccctgcccgtacgcgccggtgatggcaacggtatcagcagcggaagctgcgccgcaattggcacacgcggcgactgcccacgcctccacgtattcgctcttcaacatggccgctgccgccgccgcgcctatggccgccagctcaaggtcgaccattgacgagctgacaacgctggttgctcccacccaggcctacgccaacctctcggccgcgacgacgggcggccacctcctcccattactgacgccgccgccaccgccaatgctacaaatgacgccgcttggtgcgctgccgatcgtggcgccgccattgtcgtcttcagtcgctgacaagcttagcagctgggactggaacccgatacctgacacgacagaccgggattacaatccttctggttttaagtgatcccaaactcactgctatgttctgaaaaccctgccataagtgtaggctaacttatatacccttcagtgtcggtccacatggactacgtacaaaatgcatgtcaactagtacatatatatgatcaagaatactaaatgatcaggattttattcagaactgaagatatataggtggtttgtaagcataatgagatcactaacaataatctgcttcatgcatgcaagtttaattcttcctgattccatatgcgtgccttttaacaactagcggtagttattatttttcttaatttgccaaaaggtttgggtaggtttcatttttttcagttaaactgcaaggcacatgaaataatgtgagcatgattgga

SEQ ID NO: 138757 - DNA, 519 bp, Zea Mays
attaagcctgagcaacatgagctgctgagggcaaccgagtgaatcaacagctgcttgatgtgctcagctcgtgcaggcgtgatcttgacacacttcccatggtaccaccgctcgcaactatcacaacagatccagaattcgtccttgccgtcatttgttccacaggatccacataaggtgttatcacgctcttcctcttcttcatactcttcaccgctctcatcatcttcatccttagggggcgccacttttgtcgccttcaaatgagactcggtgtctaaactttaccattttcgaacttggtttgttgcttttgctggtattattgggttccttctccttgttttgtttcttggcaaccccagtcgctacttcaaatattgtgggcaagttatttatcatgttgaagagtcgccgcctgttaaggagaaacgcaaaccacacattttcaagcatccatatagaagcataaacctgtttattctatgcaaaaatagtcatctgaatactccgaactgg

SEQ ID NO: 138758 - DNA, 2148 bp, Zea Mays
ctggattcttcgagagatagctcactgcgctgcggcgataccgaacgtggaaaccctatcggccgctgctccttcaaggcgtcagcgtcatcttcgtcgaactgccagcaaccgtgcgttctacggttcttcggcgccgtccacggccccatcccccatgcaccctatcgccggctgcttcttcaacgcatcgtcatcgccgtcggctgcttcttccacgcgtcatcgtcgtctccgtcgaactacccatgatcgtgcactccttgcttcttcagtgccgtccatagtcctccgcaacctatcggtgcctgcttcttcaacacgtcgtcatccccgtccaactgtcggcagcggcgagctctacacaaagcttcggtggaatttctgtgcgacacaggtaccctgccctctttgctcccccccctccccatttcaagaagataatggtaccttgcttatccatccacatccagccaaacatacaaaagaactgttgtgtgatccatctgaaattttgaactaacaaaataggaatttggatggtccaatccatccgaccaaataaactggtgtgagaatcggcagcagctgctattgcagctataccatgcgcatcttcaatgtgacataggtattgaacttcatttacatttcctccgaaatgcgaacaatttgtttgaatagtctaaaatttatattcatagtacttatagtttccttttttgtccaccatacacaatctgttacctatttgcatactttaattttatgctcctagcatatcactaatgcgctgcgacatgcagttacactaccggaatcgccgtctttgccgagtgcctgaagcactcggcaaagtcttaaaaacactcgacgctataaatctgtttattgctaattagctccttttgtaatctttaagaccaatgcttctaagattaagaccaccctgctcctaacctgcttctgtggtcattaacaccactgcttttgatccacattcatatagctacgcctactgtattgtaatctctaagctcttctataatataatctctaagaacttcatgctgttacatttccagaacttgaaaacttcattactacaaaaaaaagtacaatccaagttggctattatagctaccttacgtcatatattgataccttatcaaattgaactcagcgctacaaatctgtttattgcatttggctacaatgttccatcaatgctaagcttcagcacttgcattttacgtacacttagatttgtatgccgttgtctacccatctttgtccaaaaccatgaaacgctttgatttatgttgatataatgttcacaaaaaaaatttagttactatccagtttgatacaagttaattcaactgtgctcatgtaccgtttgtaccactcgcgagtttctagtaaagattaaggcccttttcgtttgttctggaacattccagctagaatggtatgtttatttatattaacatagattagccagaatagctcctggtctcaaaccgacgaggagctagactatctacagtgcatgcttcttccattcgtcctcctgtagaggcttgtcgcttcgtgccctccatggagcacactactttgcggaggtcactctctctctccaaggcaagcggcacgctattttcctttgtcacgctcactgtgaagtcgttcgtgcccacgtcccttagcctggcaggtgctatcgacgccaccatggctggggtggaggatgaagacaagttcaaggacgctccagcagtcgccgatcgccatcgcaacgatgcggcggttgtgtgggcggcgccgcgccacgacacccaatcagcattcgcagcccaccacctgcggcgccggcggagggggcgccaccctcgagcgccactgcaagtggccgttgttgacctcgtcttgagagccaaagaagaggaagttgtcgatgctgacctcgtctcgagagccaaaagaagaggaagttgggggactctgggtcggcctcgggtatgtggagtgggaacaaatggttttttttgttgacgatgatgcaatcggggtttaagaatcgattaaattttgctcctgacaatattatttagtaacaatgtcaaaataattacaattaacaataaa

SEQ ID NO: 138759 - DNA, 551 bp, Zea Mays
ctggattcttcgagagatagctcactgcgctgcggcgataccgaacgtggaaaccctatcggccgctgctccttcaaggcgtcagcgtcatcttcgtcgaactgccagcaaccgtgcgttctacggttcttcggcgccgtccacggccccatcccccatgcaccctatcgccggctgcttcttcaacgcatcgtcatcgccgtcggctgcttcttccacgcgtcatcgtcgtctccgtcgaactacccatgatcgtgcactccttgcttcttcagtgccgtccatagtcctccgcaacctatcggtgcctgcttcttcaacacgtcgtcatccccgtccaactgtcggcagcggcgagctctacacaaagcttcggtggaatttctgtgcgacacaggaatttggatggtccaatccatccgaccaaataaactggtgtgagaatcggcagcagctgctattgcagctataccatgcgcatcttcaatgtgacatagcctggcaggtgctatcgacgccaccatggctggggtggaggatgaagacaagtt

SEQ ID NO: 138760 - DNA, 2163 bp, Zea Mays
ccacatctgaatctcacccacccacccacccccgcgtcccccacctcatggcgccggcgatggggctgaagcggcctgcggcgggagcaggggcggcagcagcgcagaccgtcacgctgtccgcgcctgccgtgcgggacgcggtgcgcaccgccgtaagggaggccgaggccacggcgaaggctaccgccccggccgccagggtcccggcgacggcggcagtgccggcggagatcgctagggatggggtgctgtgcctggaggaggtcgacgggaggcggtggagctatgtggtcgacgccgccggcgccgcggtcaaggccaagggaagggcgtccgtcggcggcgccttcaaggccgtcccgctccagtccccgatgccgcccgtcgaggaaatcatgtcctttataagatcatatgttgtgcccgaaggctttccagatagtgtcacaccttcatatgttccatacatgacatggagagcattgaagcatttctttggtggagcaatgggtgtgtttacaacaaggaccttgctcaactctgttggagtctcccaaagcagggctgcatctggtgctgtggctatcaactggattctcaaggatggggctgggcgtgttggaaagatgctttttgcccgccaagggaagaaatttgattatgacctgaagcagctacgcttttctggtgatctcttgatggagttaggagctgggatagaattagctactgcagctttcccacagcttttcctaccaatggcatgcatagcaaatgttgttaagaatgttgctgctgtcacttccacctctactcgaacaccaatttacaaggcgtatgcaaaaggagaaaacatcggtgatgttactgctaaaggagaaagtgttggaaacattgctgatctgttgggaactggaatgagcatactaatctcaaagagcaatccatcactggtaacttcatttgccttcttgtcgtgtggatatcttctcagttcatatcatgaggtgagatctgttgtactaaacaccctgaatagggcaaggttcactgtggctgtggattctttcatcaggactgggtatgtaccctcgctgaaggatggaaactcacaagagacaatatttaatccaccttggcgacatgagccagttgcaataggatcaagatttggagatgcgtttcaagaacctgcttcgtttcttgctataaaacctttgttcgaggatgagaggtatattgttacatataacccaacaaaggacaaggtatatgctttgctcaaggaccaagcaaagccagatgacattctcaaagctgcttttcatgcacatgtgttactgcatttcatcaatgcctcacatgctaacctgaatgcacggaagcgcatgaactccaaccggtcgtaccagtatgacccactgaacatggactttgtaccacacatcgaagagtcgtgcaagatcgttatgtcatcttatggagttttcaagaagaaagcaagagaacagggatggataatgtctgaatcacttcttaacccgggacgagcaagattgtgtggagcagtaccacaatgatccaagcctttttcgtttttcatgatgaagaggatgagttctttttcatacaattggtatgtgagtcagcgaaactaacttaagtcgacaatcagctcaagtacataaaatgcaccaaattgtcatgagtcctgatcctgcaggaacagtacttgaacctggagcgttagatcgcaacaaccaccatgacaggggggtgctgactcaggaagggtccgtgaaggctccaaactgcggaagatcgactaacaatcagctcttgtatattcttttggtattgtataatggaggcggctatctttcctaatgttgaccggactaagtggtcatcggctgatttgttttgactatctgacaacaatcccccctgctaaccttgcggtatcgtggtcctcatttccctaatttggggagcggtacatgccagttttcgtaaagaatatcagtgtttatatgcaaattgatttgatcatttgtctcaggcctgtttggaacaagggagatgttttctgcgtatgtttcgtgaaattaaactgattcctatgattttttgcactattcctacgaattactgcacttc

SEQ ID NO: 138761 - DNA, 153 bp, Zea Mays
atgggcgcagcgggacgtgcagtgcggagggatgaagagcggtcagcggcggctgggcgcgtgcgaagatatgctacgaagaagatcggcggaggacaacatggaagatcggcgaaggacactaagcttatcgtgtacatcccaagtggttag

SEQ ID NO: 138762 - DNA, 1250 bp, Zea Mays
ccaaggcctaaccgccaggccgacaagcgccaccaccgcgcgctcaagcagccagacaccacccaaccaaccacgaggccaccagcccaccatcacccccacgaaaaaagcgaaccgagggagaggaaggatcggcgcgttccggccggagatgaggggcggatccagaccggccccggtcgtcctgtttctcctcgctgcgtccgggatctgcgcccagttcaccgcagtgctagctggtgatccccaaacatccaacgatgataagaaggctgaagctcagccaaagggccataccggcaaaacagttttgttcgtcctcctaggagtgggggctgtcattctgttgtcatttgttattttcaagtattggcagaagaagaaaaggcaggaacagcatgcacgtctgctaaagctatttgaagaggatgacgacattgaggttgagcttggtcttcgagattgataatcttcaattgtacagcaagagtatcttggctgacaaggtgatttctatggtaccgtatttacagtatgaaaacatttttcccttgtgcatattttttaaatattttaaattgtgcacaggttttgctggcttgccttcaaagcattttcatgttaatgtaaagaatttgttgtatttaaacttgaaaggcctccacaagaaaggtctgttgtactttagctttatatatatgatgaacatctctgtgtgcaggatgcttgataatagctttaaggaggaagtatcaaggtttggagaacattatttgatttttgaagttttctgaatatatatatgtgcatctagtaaagaaactcgtagactatgatacttatatcctgtggtgtgatgacccccactgtattccttttagggttcgagaggctaactggaattaatttgtcgtctttttcaagatgttctattttctggggtttcatattctaattcctaatgcaatacactgttttccttagaatgctgccgctgttgttaatatcacgctactaggttcattcctcaggataaatcatcgcaatgacgctatggatttgagtagtataggtaatggttgtcatacgtcttcgttggtgaacaaagaatgttcaggaatgagaatataaacagcacgaaattacgtacagaaggttggtagcagtgcaaattatgggtagcttggatcagtggaagttatgaagcatcttgtaacaaaagttatattaagtgcacaaataaacaaaaa

SEQ ID NO: 138763 - DNA, 1044 bp, Zea Mays
ccaaggcctaaccgccaggccgacaagcgccaccaccgcgcgctcaagcagccagacaccacccaaccaaccacgaggccaccagcccaccatcacccccacgaaaaaagcgaaccgagggagaggaaggatcggcgcgttccggccggagatgaggggcggatccagaccggccccggtcgtcctgtttctcctcgctgcgtccgggatctgcgcccagttcaccgcagtgctagctggtgatccccaaacatccaacgatgataagaaggctgaagctcagccaaagggccataccggcaaaacagttttgttcgtcctcctaggagtgggggctgtcattctgttgtcatttgttattttcaagtattggcagaagaagaaaaggcaggaacagcatgcacgtctgctaaagctatttgaagaggatgacgacattgaggttgagcttggtcttcgagattgataatcttcaattgtacagcaagagtatcttggctgacaaggttttgctggcttgccttcaaagcattttcatgttaatgtaaagaatttgttgtatttaaacttgaaaggcctccacaagaaaggtctgttgtactttagctttatatatatgatgaacatctctgtgtgcaggatgcttgataatagctttaaggaggaagtatcaagggttcgagaggctaactggaattaatttgtcgtctttttcaagatgttctattttctggggtttcatattctaattcctaatgcaatacactgttttccttagaatgctgccgctgttgttaatatcacgctactaggttcattcctcaggataaatcatcgcaatgacgctatggatttgagtagtataggtaatggttgtcatacgtcttcgttggtgaacaaagaatgttcaggaatgagaatataaacagcacgaaattacgtacagaaggttggtagcagtgcaaattatgggtagcttggatcagtggaagttatgaagcatcttgtaacaaaagttatattaagtgcacaaataaacaaaaa

SEQ ID NO: 138764 - DNA, 717 bp, Zea Mays
ccaaggcctaaccgccaggccgacaagcgccaccaccgcgcgctcaagcagccagacaccacccaaccaaccacgaggccaccagcccaccatcacccccacgaaaaaagcgaaccgagggagaggaaggatcggcgcgttccggccggagatgaggggcggatccagaccggccccggtcgtcctgtttctcctcgctgcgtccgggatctgcgcccagttcaccgcagtgctagctggtgatccccaaacatccaacgatgataagaaggctgaagctcagccaaagggccataccggcaaaacagttttgttcgtcctcctaggagtgggggctgtcattctgttgtcatttgttattttcaagtattggcagaagaagaaaaggcaggaacagcatgcacgtctgctaaagctatttgaagaggatgacgacattgaggttgagcttggtcttcgagattgataatcttcaattgtacagcaagagtatcttggctgacaaggatgcttgataatagctttaaggaggaagtatcaaggtttggagaacattatttgatttttgaagttttctgaatatatatatgtgcatctagtaaagaaactcgtagactatgatacttatatcctgtggtgtgatgacccccactgtattccttttagggttcgagaggctaactggaattaatttgtcgtctttttcaagatgttcta

SEQ ID NO: 138765 - DNA, 105 bp, Zea Mays
ccctattcaccccccctctaggcgactttcacgaacaatatttggtttcaagtatacacgaggccagagactgcacctgcaactgcatgataaactagaaatagc

SEQ ID NO: 138766 - DNA, 564 bp, Zea Mays
acgatgagccgcgcagcgaccaacagcggcgcggagcggcggtgccggtacaggggcgtgcggcggcgggcctgggggaagtgggtgtcggagatccgggtgccgggcacgcgggagcggctgtggctgggatcctacgcggcgcccgaggccgccgccgtcgcgcacgacgccgccgcgtgcctcctccgcggctgcgcgggccgccgcctcaacttcccgggccgcgccgcctgctactacgcctgcggcgggcagcagccgctgtcgccgcgctccgtgcagcgcgtcgcgtccgacgccggcatggccgccgacgcgcagatcgtcgacgcgcgggcggccctcgcctcgccgccgcccgttgtccagcccgccgctctcgctggcattattggcggcgccgcgcgagaaggcggcggaggcgtgcgaggccccgcgtgcgcgccggcgccgccaagcaacggcgctggcagcagcagtacgtattggtccacgccgagcagtgagccgccgcttgtttacggggacattagcgtagacgacatagagatcttgatttga

SEQ ID NO: 138767 - DNA, 1972 bp, Zea Mays
cacacacctccatacccacagggcacgagcacaggcgccggcgcggcgtgtccaagcctccaaggccaagaaacacaaacacccacgcctcgcggacccggccgccccctcgccccgcccgcatcctgtcgacgacgacgacgtcgtcgtcgtcgtcgtcgtcgccctctttcctttcccgcacagccgcggctccatacgaccatacggcagccagctagtctagcttctccgccacagctcatcagggcgcagcaaccgcaaaccccacgcaggcgacgaaaagctgccgagccaccaccaggcaccagcagaggggagcaagcgaccacgcgggggaccgcgcgaccgagccactcccctcccctccctccctctctcttcgcctccggatctcgcatgcgcggtggccgccgccgccgccgcgcccgacggaggagggcgaggagtcagtgagggcgctggccggcggcgtgatggggggagcgcagctggtggggagatgggtggagtcgtacacggggatgtcgccggacaacatcaagggcctgctgctcgcgctctcctgcagcctcttcatcggcgccagcttcatcgtcaagaagaaggggctcaagaaggctggcgcgtccggcgtccgagcaggtgttggtggctactcatacttgcttgagccattgtggtgggcaggaatggtaacaatgattgttggcgaaatcgctaactttgcagcttatgcttttgctcctgctatcctggtcactccacttggtgcacttagcataattatcagtgctgttcttgcccatattatgttgcgggagaaacttcatatatttggtatacttggctgtattctttgtgtggtgggttcaacaacaattgtgcttcatgcccctccagagcgtcaaattgagtctgtggcagaagtgtgggatctcgctactgaaccggcattcctattctatgcagctgttgtatttgcagcagcttttgtgctcatatgccattttgtccctcagtatgggcagacacatatcatggtatatattggcatatgttctcttgttggatctttatcggtcatgagtgtcaaagctcttgggatagccttgaaggtgacattttcagggatgaaccagcttgtctattcacaaacatgggtgttctcatttgttgtaatcttgtgcatcgtaacacagatgaactatctaaacaaggccctcgacacattcaatactgcagttgtttcacccatatattacacaatgtttacatccttgaccatcttggctagtgtaataatgttcaaggattgggatcgtcaaaatccaacgcaaattgttacagagatgtgtggcttcgttacaatcctttccgggacttttcttcttcacaagacaaaggatatggtggatggtctcccaccaaatttaccaattcggcttcctaaacatgcggatgaggatggctatgcagacgacataattcctctcagatctgctgctgacggtattccactcaggtcgccaagggctacagattcatttcgctcgtcgtgatgtcctgagatttgcaagtgcgctgaatcatgtagattccaggctcatacccagcagccgtcagtctatatacatgggaagcggaaaatatcccccaattcactcggttggagaccacaacgtaggttaactgtaggattcaacaggtaacaactcggctaaccccccaaccctaatttgagtcattggtacagaattttgacgattatatcagttgtatacttatccgggtaacatcatcaccaagatgaccaagaatatatgttttgggctatatgtatatcgcggtgagccatataggttattatgttatattgaattgttgtattctttcaacacaaacactctgaatacaggaagagttgaacaagcacatcatgccgttaaccatttaccacttttatctgaac

SEQ ID NO: 138768 - DNA, 97 bp, Zea Mays
tttattttgatctatttggcttactcgaaatggctttcagtcacaaaccaatatcatcaattgtgcaggttattttcagaggtactcactgattcag

SEQ ID NO: 138769 - DNA, 3700 bp, Zea Mays
tacagtacttccagtgcctgctcagtcagagctcactgctcagagctcaataataaacgcgcctccacgtgcccgggtcaccctgccgcgcgcgcgcacacgccgctcgctccgtcctcggcttcctctttgcgaccaccaccaccctcgccggtcgccgcgctcgcccaccatttttttttacgttgccacgctactttgctcccggcccctgctcactctgctgcctgccctacctcgactcccgcccgttacttccacccctcggtttgctgcgggagcgagccagcactcgcgggctcgcggcgtcgcgggcaatgccggcgacggcgagcgagtagggggctcctccagggacggaggagagggatgggctgccggagctcgcggctggacgcggcggacgtgtccccggcggccgcgctgtgccgggagcgccgggacctgctccgcgcggccgcggaccaccgcgcgcgcctcgcggccgcgcacgccgcctacttccgagcgctcccgcgcgtggccgacgcgctcgcgcggttcgcgagccaccaccacgccgccacgccgccgggctcgccggtgctcacgctgccgccgccctccgaccacgcggacgccgacgccgacgccgagcccaagaagcagcggagcggctccgcgtccggctccgcgacaccgcacaccggctccggccactcccacatccacttccactccgacgattcctcggaatccgatccagactcctcgaccgacccctgcgccggccccggaggctgtggcgctggccacgtcgacggcgacggcgacggcgacggcgaggtcccgcggccggcgcctgcccttcggcctggcgttcccttgcccggccgcggcggccacggcgagccccaggaacgccaaatccaagacccagcttttgccaggccggagatgccgtgggagtacgcttcgtacgacccctatccttcgttcccaaacaccgagttccaaaatgccacatttcctaggtactactacatgaaggccagctcgacgccggcgaacacggtgtatcaagaaccgtacggctacggcaacttcgccaccagttcgtcctacatggggtacaacaacccgatgtacggcgtcccgttgcaacctgatggggatcgcccggtggaggatcgtggccgggaatcggtggctccgccgccggcggcgccgccgccaatgccaatgcctgagacgtcaccgtgggacttctttaaccccttcgattcatatgagcaggagctcccgcagtatagaggcaaagggtacgattccaatgggtcgttcaccagcagtcccaactcgagtgaggtgagggcaagggaggggatcccggagctcgaggaggagacggaactggagtctatgagggagtctgtgaaggcaaggaaggctgtagagagcacggcgtctaaccggattgacaatgcggatgtcagtgccaaggtgaaagtgtccatggagcacaaggaagttgagattgagagtgtgtacagtgtttcggtacttgagtcaggggacgagagtgtgtgcagttgcgattgtgaccatgccaacactagaacagaggggccaatgcaggtgcctgcaggagatgatcaaggggggaaggtgagctcagaggatcactcatccatagttgtcggagaggatgtatggccgccagagatcactgggacaagagatgtcgccgtggttgtagaggaaataaaggagcagttcaaatcagtggctgcttgtggagatgacgtcgcaaggatccttgaggtggggaggatgcagtatcgatcacggaatagagtcttgagattgatattctcacggatgatggggaccttcgccttgttgttttcttccatatctgagccaacagtgaagagcatggaacaaacagctataaattcatccaaaataaaacagaattccagtaaaagatttgattttcccagtgatgttgaacttaatactctttccgcaacaatggacaggctgtatgtgtgggagaaaagacttcataaggaaattatggaggaagaaaaattgaggattacatatgacaaagaatggaagcgcttgaaagagctggatgctagtggtgcagagccatataagatcgattcaacccgggcctcaattagggcactgctcaccagaatcaacatttccatcagatcagctaaagttatttctaggaggatccacatactacgagacgatgagttacacccacaccttgttgcgcttatccaagggtttgttagaatgtggaagttcattcttgagtgccaccggaagcaattccataccatacttgaaactaaatctcacattctgatccctaagaatggaccggaaagaagctcgtccaaggttacactggaactagaaatggagctcctgaactggtgttcctgtttcaggaactggatcctgtcccaaaaggcttatatcgaagctctcaacggctggctagtgaaatggcttccccaggaaaaggaggagactccggacggcattgcgcccttctctcctggcaggcttggagctcctgccgcgttcgtgacagccaacgactggtgccaggccatgagaaggatgccggaaccggaaggcggcgtagtagacacgatggaggctttcgctgtcaacgtgcatacgttgtgggagcggcaggacgaagagcagcggcagcagaggctgagagctgactacctctccagctccagggattttgaaaagcggatcagatctcttcagaaggagcatggctcgcaggggcagtttgacgctggcagggcagcggtgcttcccgccgttgccgacaatggcagggcagttgataaccgcatggttgcactggactcgttgcacaagggattggacgaacagagggcccggcacgagcacgaggaaaccgtgaggcagatccgcgaggccagcgcggctgatctgaaggcaggtctggctccgatattcgaagcgctggaatcttttaccgcggagacgctgagagggtacgaaaatgtcaggatccctgccaaaagcattggcgggtgataccttttaagccccccacggttttttttttctgttggcagcagttcttggtacatccaaggaactattgtcaatcttttagactgtcttcagtttgccagccatgcgcaagcacaaacaaggccccattgtggttggggtaatgtagagttcatccagtgtacaagaaagggcggcccagaagttcctgcatgattgcgcacgaagcagtgttgccatggatgctttttgagataatcctgatttctgtggtagcaaattcatgtggatctttgagactagtcggtagctagagctacttatccacagagagctgctaggagcctgaactcctagttgcagccccgcaaaggagtggggggagccggggaggggatggcagttttgtactagtcattttcagctcctgtacatattgattatattagctaagttggtgaattatctatctatctatctatctatctatctatcaggctagctcgccatccgtgtacaattttatctgtgcatcgtacaagttgtatttaatgccgtatggttatgccacgtggacggcctggtcctgtatggcgctgcctgctgaagactgaaggaagagtctgca

SEQ ID NO: 138770 - DNA, 2724 bp, Zea Mays
atgggctgccggagctcgcggctggacgcggcggacgtgtccccggcggccgcgctgtgccgggagcgccgggacctgctccgcgcggccgcggaccaccgcgcgcgcctcgcggccgcgcacgccgcctacttccgagcgctcccgcgcgtggccgacgcgctcgcgcggttcgcgagccaccaccacgccgccacgccgccgggctcgccggtgctcacgctgccgccgccctccgaccacgcggacgccgacgccgacgccgagcccaagaagcagcggagcggctccgcgtccggctccgcgacaccgcacaccggctccggccactcccacatccacttccactccgacgattcctcggaatccgatccagactcctcgaccgacccctgcgccggccccggaggctgtggcgctggccacgtcgacggcgacggcgacggcgacggcgaggtcccgcggccggcgcctgcccttcggcctggcgttcccttgcccggccgcggcggccacggcgagccccaggaacgccaaatccaagacccagcttttgccaggccggagatgccgtgggagtacgcttcgtacgacccctatccttcgttcccaaacaccgagttccaaaatgccacatttcctaggtactactacatgaaggccagctcgacgccggcgaacacggtgtatcaagaaccgtacggctacggcaacttcgccaccagttcgtcctacatggggtacaacaacccgatgtacggcgtcccgttgcaacctgatggggatcgcccggtggaggatcgtggccgggaatcggtggctccgccgccggcggcgccgccgccaatgccaatgcctgagacgtcaccgtgggacttctttaaccccttcgattcatatgagcaggagctcccgcagtatagaggcaaagggtacgattccaatgggtcgttcaccagcagtcccaactcgagtgaggtgagggcaagggaggggatcccggagctcgaggaggagacggaactggagtctatgagggagtctgtgaaggcaaggaaggctgtagagagcacggcgtctaaccggattgacaatgcggatgtcagtgccaaggtgaaagtgtccatggagcacaaggaagttgagattgagagtgtgtacagtgtttcggtacttgagtcaggggacgagagtgtgtgcagttgcgattgtgaccatgccaacactagaacagaggggccaatgcaggtgcctgcaggagatgatcaaggggggaaggtgagctcagaggatcactcatccatagttgtcggagaggatgtatggccgccagagatcactgggacaagagatgtcgccgtggttgtagaggaaataaaggagcagttcaaatcagtggctgcttgtggagatgacgtcgcaaggatccttgaggtggggaggatgcagtatcgatcacggaatagagtcttgagattgatattctcacggatgatggggaccttcgccttgttgttttcttccatatctgagccaacagtgaagagcatggaacaaacagctataaattcatccaaaataaaacagaattccagtaaaagatttgattttcccagtgatgttgaacttaatactctttccgcaacaatggacaggctgtatgtgtgggagaaaagacttcataaggaaattatggaggaagaaaaattgaggattacatatgacaaagaatggaagcgcttgaaagagctggatgctagtggtgcagagccatataagatcgattcaacccgggcctcaattagggcactgctcaccagaatcaacatttccatcagatcagctaaagttatttctaggaggatccacatactacgagacgatgagttacacccacaccttgttgcgcttatccaagggtttgttagaatgtggaagttcattcttgagtgccaccggaagcaattccataccatacttgaaactaaatctcacattctgatccctaagaatggaccggaaagaagctcgtccaaggttacactggaactagaaatggagctcctgaactggtgttcctgtttcaggaactggatcctgtcccaaaaggcttatatcgaagctctcaacggctggctagtgaaatggcttccccaggaaaaggaggagactccggacggcattgcgcccttctctcctggcaggcttggagctcctgccgcgttcgtgacagccaacgactggtgccaggccatgagaaggatgccggaaccggaaggcggcgtagtagacacgatggaggctttcgctgtcaacgtgcatacgttgtgggagcggcaggacgaagagcagcggcagcagaggctgagagctgactacctctccagctccagggattttgaaaagcggatcagatctcttcagaaggagcatggctcgcaggggcagtttgacgctggcagggcagcggtgcttcccgccgttgccgacaatggcagggcagttgataaccgcatggttgcactggactcgttgcacaagggattggacgaacagagggcccggcacgagcacgaggaaaccgtgaggcagatccgcgaggccagcgcggctgatctgaaggcaggtctggctccgatattcgaagcgctggaatcttttaccgcggagacgctgagagggtacgaaaatgtcaggatccctgccaaaagcattggcgggtga

SEQ ID NO: 138771 - DNA, 1633 bp, Zea Mays
gggatggttttgcaacataaccatacaggtgttacatgtttttttacatttgcaaaaaaaaaagttagtttgggaatccgaatccctttgagattggaggggattgagcaaccctctctaatcccagacgaaatttaagttgccaaactagctttaagggacatacacaaaaaccaagtaacttatagggtggggttttcagtttcccctagtatagatagggcctgtcgaagtgaatttctaaagtaacagtctaatccctctaggcttttgtttccttcgcaaaaattccaacagagccatgcattcgccatcaagagatttaggcagatctgactgcaaaagtgcaaccctacagagtcgatgaatgaatacacattggatcttaaggcaactagataccacattttttctggtcaatgtccaggtagcactggagtacatgccattctctagaaattcgccactccatgattatcacacaaagtcctaccacagcagtgccttatcacaccgccaagtttcgagtttatgtacacagggagcttcctctacacctggacgacgccatcaccccccaggcatgcgtccccattcgcgagaactatcagcgcaaagccaccaacatgtttattagtacgcatggttggccatcagggctctcccggcacggtgtgggtggagggcgcaggcgcagtggactgacgtgaggctgaggcagccactgatgatgagggagtgcctctcggggcaggtgtgcagcgccgggaaggagtcgcagacggcctgcaccgccgggggcgtcagggcggtgcactggctgatgttgaggttcgcgagcccgtctttcactgcatcccacctcccacgcttgctcttcacgcggctgtttgcgagggagtacatggcgcggtccgtgatgttctggcagaagtagaggcccagcgagcgcaggtgcggacatccgttggcaagagcaaccacactctcatctgcaatggagaattgaaaagatgagaagactatggagctcaaggctcagtataagctagtgaagaacaaacactcaatgtgcttagtctaagagtcagaaataataacaacaaacaccgatatctagtgaagaacaaacgaagaaatctagtgaagagcaaacaaattcactcttgtatacagtgatcaactgccccagaaaacgttcagttaccccagaggctataagcaagtatgctgatattgatatgctcagttacccccgaggctataagtactgccatcatagacttaactggctgcggccaacaagcacaaaagaaaactaagccactaaataatcagatcaaatacctgttataagaacacaaccgcacaagtctacggctctgagatcagggcatcctgacgctaagctggtcactcccttatctgtaacatcatcacaccagcctaggttcaaagactgcagctgcccacagttctgagcaatagcctgcaccaaaactatagaaactaagtagaagtttcatactagaaacatggttcgcaaaacttgatataacggaaagtacctgcaaagctctgtcagtaacagccttcacgcatccacacaagttcaggcacttgaggtttttac

SEQ ID NO: 138772 - DNA, 999 bp, Zea Mays
gggatggttttgcaacataaccatacaggtgttacatgtttttttacatttgcaaaaaaaaaagttagtttgggaatccgaatccctttgagattggaggggattgagcaaccctctctaatcccagacgaaatttaagttgccaaactagctttaagggacatacacaaaaaccaagtaacttatagggtggggttttcagtttcccctagtatagatagggcctgtcgaagtgaatttctaaagtaacagtctaatccctctaggcttttgtttccttcgcaaaaattccaacagagccatgcattcgccatcaagagatttaggcagatctgactgcaaaagtgcaaccctacagagtcgatgaatgaatacacattggatcttaaggcaactagataccacattttttctggtcaatgtccaggtagcactggagtacatgccattctctagaaattcgccactccatgattatcacacaaagtcctaccacagcagtgccttatcacaccgccaagtttcgagtttatgtacacagggagcttcctctacacctggacgacgccatcaccccccaggcatgcgtccccattcgcgagaactatcagcgcaaagccaccaacatgtttattagtacgcatggttggccatcagggctctcccggcacggtgtgggtggagggcgcaggcgcagtggactgacgtgaggctgaggcagccactgatgatgagggagtgcctctcggggcaggtgtgcagcgccgggaaggagtcgcagacggcctgcaccgccgggggcgtcagggcggtgcactggctgatgttgaggttcgcgagcccgtctttcactgcatcccacctcccacgcttgctcttcacgcggctgtttgcgagggagtacatggcgcggtccgtgatgttctggcagaagtagaggcccagcgagcgcaggtgcggacatccgttggcaagagcaaccacactctcatctgcaat

SEQ ID NO: 138773 - DNA, 1364 bp, Zea Mays
catccatgtatccatccatccacacacacaaacagacaagcatacaacaccgttgccatttagctgttcttgctaggcagttgcgcgcttacattgagccgcagctagctgtctactacggcacaactatctcctgcgcgcgtgctcgatcgatctgaaggccagacctgtgcctgtccaattttgccttgttctacccaccacaccagtagtcgagaaggttccatataagcgcaagcagacagcagcaaaagagctaaggagagtctgagacaaggttcgaacagatggaggatgtggtgaagttcgtctttggagtttccggaaatgtcatcgctctcttcctcttcctttccccagtgcctacgttctggaggatcatcaggaggaagtcgacggaggatttctcgggggtgccgtacagcatgacactcctcaactgcctcttgtcagcttggtacgggctgccgttcgtgtccccgaacaacatgctggtgtcgacgatcaacggcgcgggcgcggcgatcgaggccgtgtacgtggtgatcttcctggcgttcgcgtccagccagcggacgcggctgcggatgctgggcctggcgtcggcggtctcggcggcgttcgccgccgtggcgctggcgtcgatgctggcgctgcacggacagggccggaagctcatgtgcggcctcgccgccaccgtctgctccatctgcatgtacgcctcgccgctctccatcatgaggctggtggtgaagaccaagagcgtggagtacatgccgttcctgctgtcgctggccgtgttcctgtgcggcacgtcctggttcgtctacggcctgctcggccgggaccccttcgtcgcgattcccaacgggtgcgggagctttctgggcgcagtgcagctggtcttgtacgccatctaccgcgacagcaacagcggcggcaagcagcaggccggcgacgacgtggagatggcctccgacgccaagagcagcaagaaggtcgccgacgacgtcggcggcaaggaggaccgcctggtctagcatggagctagccactttctctttcggtgcgcgagcgtatgtttcctccccccgtgattgtgtgtgtgtgcatgtatacgagagtgcgtgctgtactgtactacctctgcgtgtgtgcaataatgtaactgggtgtttcatctcgcaatggggtgtctctctccaagcgcgatttgctggccgtcggaggccaaggtggacgatagggatgccgtagttttccggcgccgctatgctagctgttcacatggtgccgatcggcgatcgtgagccacggacggagtgccttccaggccgcatggctgcttcgcgggcccagccata

SEQ ID NO: 138774 - DNA, 1349 bp, Zea Mays
catccatgtatccatccatccacacacacaaacagacaagcatacaacaccgttgccatttagctgttcttgctaggcagttgcgcgcttacattgagccgcagctagctgtctactacggcacaactatctcctgcgcgcgtgctcgatcgatctgaaggccagacctgtgcctgtccaattttgccttgttctacccaccacaccagtagtcgagaaggttccatataagcgcaagcagacagcagcaaaagagctaaggagagtctgagacaaggttcgaacagatggaggatgtggtgaagttcgtctttggagtttccggaaatgtcatcgctctcttcctcttcctttccccagtgcctacgttctggaggatcatcaggaggaagtcgacggaggatttctcgggggtgccgtacagcatgacactcctcaactgcctcttgtcagcttggtacgggctgccgttcgtgtccccgaacaacatgctggtgtcgacgatcaacggcgcgggcgcggcgatcgaggccgtgtacgtggtgatcttcctggcgttcgcgtccagccagcggacgcggctgcggatgctgggcctggcgtcggcggtctcggcggcgttcgccgccgtggcgctggcgtcgatgctggcgctgcacggacagggccggaagctcatgtgcggcctcgccgccaccgtctgctccatctgcatgtacgcctcgccgctctccatcatgaggctggtggtgaagaccaagagcgtggagtacatgccgttcctgctgtcgctggccgtgttcctgtgcggcacgtcctggttcgtctacggcctgctcggccgggaccccttcgtcgcggtacgtaagcacgtcatatatatgcagctagcagctaggcatatgcaaagcttgcagctactagtagctgttcctttctaggcgtgtctgatgcgtcgtcgtcggttagccggtagcgttccgttgtcgtcgtctccgcctctctggctctgctggatgaatgctcttgacctgccggcatattcgagcaaggccgagtggcatagtgatatatggcgaccatgcacgcgcagtgacgcgcgcagtctgcagccacatgcgtgcacgccgcgcgcgcgggtgccactgccaacgtggtcgagtaaattaaatgggccgtgcccaagcggcgaggcaacgcccacgcgcgcgcggacacaccgccttcaattgcgcacgcctcgttaaaccaaagtgacattgatgcgtgtgggtgggtgcagattcccaacgggtgcgggagctttctgggcgcagtgcagctggtcttgtacgccatctaccgcgaca

SEQ ID NO: 138775 - DNA, 2855 bp, Zea Mays
ctcacacccacacaaaccgcacctcatccctgttgacccgacggtggcgctcatctcctccccgacggtggcgctcatcttccccccgacggttctccccatcgacctgctggcttcccttcgtcttccccgacactgatcctcaccactcatgtctgctgaagttgccggaggaaacccttatttcctctcatgctacttctggttcatatactgcataaaattccgagatttcacttgatacaagtggaacactaggagttttgtgcaaatacttcctaccatgtgaatcagttgtagctggtgaatttggcaagactcaagtcctctcatctgggttcagaaaacatctgtcggttgattgcttggtctcctgtttcctttgagtcttgccaaccaaagttttctctcagcatcattgtgatctacgaactctttctgtgacttgaccaacatctcttttggtcctgtcaatcttgcaacactcccttctaaagacttgtctagaggttggattgccctgctctctgctggcgctgcagcctcccttagtcttcccttgctgcattctgtgctcactttcgaaagctgctctgttctgctctgctttattgatttgtgcacttggattctcttgtctgtgtaatcaagcttctctcttctggggcacaactagtcaccccattgaagcatttcagcttttgtcttgagatctttctatcagtgctaaaggcaaaagaggtcttagggcgatggcgcaaactagcctgcctcctggatttcgtttccacccaactgatgttgagattgtttcctactatttgaagaggaagattatgggaaagaagcttattgtagacgctatatcagaggttgatctctacaagtttcctccctgggatctccctgaaaagtcctctcttcgaagcaaagatcttgaatggttcttcttttgtcctcgtgacaagaagtaccctaatgggtctaggacaaaccgtgccacaccaaatggttactggaagactagtggaaaggatagaataattatgcttaactctcgcactgttggaatgaagaaaacattgatatttcatgaaggcaagccccctaagggtgatagaactgattgggtgatgtatgaatacaaaatggaagatgaatatttggtttctactggtttctcaaaggatacttatgtactctgcaaaattttcaagaaaagtggccttggtccaaggattggggagcaatatggggctccgtttgacgaagccgaatgggacaatgcagaagctgaaacctctatatttcctttgatgacctcttcagaagtagtgaacccaacagagggaccacacactcagcctgttgcccctgctggtgctcttcaggaacctctacataattcatctgctacttgtgttgtagagggatcgccatttgatcatgccactgcaaatacttgtgctgagggtgtaacatttggctatactgttgctagctctgctattgaagatatgcctgctcagctgtcaggagatggtgtggtttctatgaacaacatatccagtgaggtcaatgatatgtacagtcctcatgactgtgatgaatttctattggaggagatgtctagattcctgaatgattctccaatgcgtaacactccttatggagagtgctctggtcttcctccaatgtctgaagctgaggctcatgcttttgaagtcaactcttttgacctctacaaagaattatcagggcttgttgagttaggaggcatggacaataacttcaacaccagcaatgtggaaaccacagattaccttgtgctgccacctgacagagaattgtccacggatggttacatggaacttaatgatctccttgcttctgattcaagcttccccatccccagtgaatttcctgctcaggacaatcaatctatgcagtatcctctggctgagtacaatgtgcattatgatgtcgctactctgtcaggtcctttggaaccaacaatgcctagcattttcgacgattttcctcccaataatggaccccatgtcacagatgaggaagacgactacttggacccgaccatccctttcccgtgattggtcgaataatatgcctgcccttttttgtgtccttacatgtttggactgttccgatgttgcaacttgcagttctttgctactacaactctatccaccttggatgtcgcgatattgttgatgcaatgcctgggctcatgtcagctgagagctgaccttggcagcttggctgtctgctgaccttggctggaagcacggtttttggatgaatctgcatcgactaccacatgcaagttccaactggttgagctgaccgcctatcttgtatcgctctgctcaatatcggtaggacttggcatgtaaatctttgattatgtctatgctgagtatcaataagacttggcgtgtaagtctttgattatgatattacctgtctgtattgcaacctgcatgattgccaccattttaagcaatttgtcatttgtgtattcacaatatgcaaaccattattattgttgtaatgtgatattgaatgtttaatactatattttaccctgaccctgtgtcattgtcttttggatcgtttacgttcacttcccgaatagtggtttattgcctttcagatcggtggcgcctttttccccctcttgaatgctcttcgaagtatttctgctgtttgaacacgtttgaatatgcccgtgacaggttgtttggttcacaatccttgaaaaggctctagagcttctcaatttccgaccatctactcctacatggatctcaaaccaaaaaaaaaggccaatagaa

SEQ ID NO: 138776 - DNA, 3377 bp, Zea Mays
cttttatatttgtcgtttagagattttctaaaagttttttctctatattttatttctctttaacgatattctatattcacatcctttggacattaaagatctatattaaaacatattttacttgaaaactagagaaacctttatcgtgtctggttagagtcacggccgactccgtggaaatttggaaaccacggtcacgtactgctgggactgggaagcttcctgtccagaatgctgcggcctgcgggagttggaagcaaagaaatagaaaaacccattggtcccgctcgccagtgtcccggtacaactgcagacccccgcgcttaaaagagccctttccctagcctgcgattcctcattcctcacacccacacaaaccgcacctcatccctgttgacccgacggtggcgctcatctcctccccgacggtggcgctcatcttccccccgacggttctccccatcgacctgctggcttcccttcgtcttccccgacactgatcctcaccactcatgtctgctgaagttgccggaggaaacccttatttcctctcatgctacttctggttcatatactgcataaaattccgagatttcacttgatacaagtggaacactaggagttttgtgcaaatacttcctaccatgtgaatcagttgtagctggtgaatttggcaagactcaagtcctctcatctgggttcagaaaacatctgtcggttgattgcttggtctcctgtttcctttgagtcttgccaaccaaagttttctctcagcatcagttgtggtctacgaactctttctgtgacttgaccaacatctcttttggtcctgtcaatcttgcaacactcccttccaaagacttgtctagaggctggattgccctgctctctgctggcgctgcatcctcctttagtcttccaagttttctcttggcagcagttgtgatctacgaactctttctgtgacttgaccaacatctcttttggtcctgtcaatcttgcaacactcccttctaaagacttgtctagaggttggattgccctgctctctgctggcgctgcagcctcccttagtcttcccttgctgcattctgtgctcactttcgaaagctgctctgttctgctctgctttattgatttgtgcacttggattctcttgtctgtgtaatcaagcttctctcttctggggcacaactagtcaccccattgaagcatttcagcttttgtcttgagatctttctatcagtgctaaaggcaaaagaggtcttagggcgatggcgcaaactagcctgcctcctggatttcgtttccacccaactgatgttgagattgtttcctactatttgaagaggaagattatgggaaagaagcttattgtagacgctatatcagaggttgatctctacaagtttcctccctgggatctccctgaaaagtcctctcttcgaagcaaagatcttgaatggttcttcttttgtcctcgtgacaagaagtaccctaatgggtctaggacaaaccgtgccacaccaaatggttactggaagactagtggaaaggatagaataattatgcttaactctcgcactgttggaatgaagaaaacattgatatttcatgaaggcaagccccctaagggtgatagaactgattgggtgatgtatgaatacaaaatggaagatgaatatttggtttctactggtttctcaaaggatacttatgtactctgcaaaattttcaagaaaagtggccttggtccaaggattggggagcaatatggggctccgtttgacgaagccgaatgggacaatgcagaagctgaaacctctatatttcctttgatgacctcttcagaagtagtgaacccaacagagggaccacacactcagcctgttgcccctgctggtgctcttcaggaacctctacataattcatctgctacttgtgttgtagagggatcgccatttgatcatgccactgcaaatacttgtgctgagggtgtaacatttggctatactgttgctagctctgctattgaagatatgcctgctcagctgtcaggagatggtgtggtttctatgaacaacatatccagtgaggtcaatgatatgtacagtcctcatgactgtgatgaatttctattggaggagatgtctagattcctgaatgattctccaatgcgtaacactccttatggagagtgctctggtcttcctccaatgtctgaagctgaggctcatgcttttgaagtcaactcttttgacctctacaaagaattatcagggcttgttgagttaggaggcatggacaataacttcaacaccagcaatgtggaaaccacagattaccttgtgctgccacctgacagagaattgtccacggatggttacatggaacttaatgatctccttgcttctgattcaagcttccccatccccagtgaatttcctgctcaggacaatcaatctatgcagtatcctctggctgagtacaatgtgcattatgatgtcgctactctgtcaggtcctttggaaccaacaatgcctagcattttcgacgattttcctcccaataatggaccccatgtcacagatgaggaagacgactacttggacccgaccatccctttcccgtgattggtcgaataatatgcctgcccttttttgtgtccttacatgtttggactgttccgatgttgcaacttgcagttctttgctactacaactctatccaccttggatgtcgcgatattgttgatgcaatgcctgggctcatgtcagctgagagctgaccttggcagcttggctgtctgctgaccttggctggaagcacggtttttggatgaatctgcatcgactaccacatgcaagttccaactggttgagctgaccgcctatcttgtatcgctctgctcaatatcggtaggacttggcatgtaaatctttgattatgtctatgctgagtatcaataagacttggcgtgtaagtctttgattatgatattacctgtctgtattgcaacctgcatgattgccaccattttaagcaatttgtcatttgtgtattcacaatatgcaaaccattattattgttgtaatgtgatattgaatgtttaatactatattttaccctgaccctgtgtcattgtcttttggatcgtttacgttcacttcccgaatagtggtttattgcctttcagatcggtggcgcctttttccccctcttgaatgctcttcgaagtatttctgctgtttgaacacgtttgaatatgcccgtgacaggttgtttggttcacaatccttgaaaaggctctagagcttctcaatttccgaccatctactcctacatggatctcaaaccaaaaaaaaaggccaatagaa

SEQ ID NO: 138777 - DNA, 668 bp, Zea Mays
ggcttcctgtagggagccgggagtccaaccctagccgccacctcgttttcctcctctcacgatcgctggctactcgccgccgttcagccttcaaaccgcgcccaccgatcctccacacatacaacctccgatcggtgcgaggcagggaacagcagcataccactggttagcagttgcagagtattggtataataccagcatgcattcatctttgggacgatcacccttcgaagtactttatggatatactccaaagcatttcggtctgccagatgcagctgttgtgaaggcaccagagttagcagagtgggttcgcgaacgagaactgatgtctaaagtcatcaagttgtacttgcattgagcacaagatcagatgaagcgtcaggctgataagaaggggactgaacatgtatttgaagtaggagatttggtgtatctcaagttgcagccgtacacacaatccttagtggcaacccgctccgacaacaagttgtcattcatgttctttgggccatacaaggtggtcgaacgagtgggcaaggtggcatatcgtctttttctacccgcttctaataccgtgcaccccgttttcatgtttctcaactcaagtcagcagtgggccacaatcaggtactggttcctaattttcccactgatgagtctgctat

SEQ ID NO: 138778 - DNA, 909 bp, Zea Mays
tagtaaagatgttgacttgctatggatttaaacatatcaagactatccaaaacccaccctttaaaaggtgtattctgtcaatggtacacgagtacgatcctggagcgtcgatggcggctatggatgcggtgatgcaacgcgtcctcgaccagttgtcccaaatggagagtcgataacagacgccatgattgggcgctgcagcgagctcgagcaacgaatcaaagcgtcggagcacaaggtggagacccgattcatctccctagagatggatcaggcgcggttcgaggagtggcgcccagatgtggagaagcgcctcgacaacatgttcttgaactcgccagggcgaccaggctcctggagcgcggcaccttcactgccgaagcttccaaacccggtctgattgtgtcttcggggtcggcgttcaggcgctcacctgccggattccacaacgccgacgggccggatggccactgcgtcgaacacaatcaccgggagcgtgagtttggtcgcatcccgacccaacctcacggcccggtcaagggaggaggcgttggcgtcagggagatggcaatgcggagcttcgtctaatcatcgatccttgcttccacactacgggttccagtcgggatcgcctaaatggggtcaaccacctgacagccacaagacatcatccgctgaagataaattggatgtgttgcgccgatttcgtcgagcaagaggtctttgtgaaaagtgcgcagagaaatagaatcatggtcacaaatgcattgctgctgctcatcttcatgcactagaagaggtttgggaactcttggtaactgatcaacatgaaactgaatcacagaatccagaggagtctaccacagaataactgtttgtgttagtatccatggctgcttggggaggtgc

SEQ ID NO: 138779 - DNA, 2645 bp, Zea Mays
gcttttcctttccctcctcttctgtcgtactactacgctggcctggctgccagtgccacgcacgcacgaacgcgcgcttctctcagccctcgccccgcgtcctgcgctcacgttgtgcctcttccttgcctcgtattttgttcgtagaaataaccctctcatcgatcccctctatctttttttttctctctctcgttatactgccagtatctttggtaaaagccgctagggcggcggggttccgttggcctgcatgttttacatgacatttcgcccttctttttttttcattttgtttgcctcaggtgtgcgaagcggcgcaacggcggaggcggctctagcatcaccggccgacggtcctcctccttctcacgaaaggcactagaggagcggcggcggcggcggcgcatcaagcaccgcaccgatgggcccactggagccgcgctaccgtccaggcggcgcccccgaggacacgactaagagaagggcctccaagagcaagagtttcaaagacgccgagaacttcgaagtcctcgtccttgagaagagctgcggttgcaagttcaagtctttgaggatcttgctcatagccatcatctccgcgacagtccttacccttgtaaccccgaccttatacgagcgccagttgcagtcagcctcccggtacgtggatgtcgggtggatgtgggacagagcgagttccgatccgcggtacgcatcttctgccgatgttgggtgggaggatgtgtacaaagcactgggaaacctaagaagcggtaaccgccagagtcatctcagagttgggctcttgaatttcaacagcaccgagtatggctcctggacgcagttgctcccagctgacagccacgttatctccactgtaaggctcgagcacgccaaggacagcgtcacctggcagacgctgtaccctgagtggatcgacgaggaggaagagacggagataccctcttgcccgtcgctgccggagccaaacgtgccaagaggtgcgcgctttgacgtcgtcgccgtgaagctcccatgcacccgtgtggcgggctggtcgagagacgtcgcgcggctccatctgcagctctcggcagccaaactggctgtggcgtcctcgaagcgcaaccacgacgtccatgttctcttcgtcactgactgcttcccgatcccgaacctcttcccttgcaagaaccttgtcacacgtgaaggcagcgcctggttgtacagtcctgactccaaggcgttgagggaaaagctcaggcttccagtcgggtcctgtgagcttgccgttccactcaaagccaaatcgaggcttttctcggtagatcgacgaagagaagcgtacgcgacgatactgcattcagcgagcgaatacgtctgcggcgcaatctcggcagcgcaaagcatccgccaggcaggatccaccagggacctggtcatccttgtggacgagaccataagcgaccaccaccggagaggcttggaggcggcggggtggaaggtcagagtgatccagaggatcaggaaccccaaggcggagcgcgacgcgtacaacgagtggaactacagcaagttcaggctgtggcagctcaccgactacgacaaggtcatcttcatagacgccgacctcctcatcctgaggaacgtcgacttcctgttcgccatgccggagatcgccgcgacgggcaacaacgccacgctcttcaactccggcgtcatggtcgtcgagccctccaactgcacgttccgcctgctcatggaccacatcgacgagatcacctcgtacaacggcggggaccaggggtacctcaacgagatattcacgtggtggcaccgcgtccccaggcacatgaacttcctcaagcacttctgggagggcgacagcgaggccatgaaggcgaagaagacccagctgttcggtgcggacccgccggtcctctacgtcctccactaccttggcctcaagccgtggctgtgcttcagagactacgactgcaactggaacaacgccgggatgcgcgagttcgccagcgacgtcgcgcatgcccggtggtggaaggtgcacgacaggatgccccggaagctccagtcctactgcctgctgaggtcgcggcagaaggccaggctggagtgggaccggaggcaggccgagaaggccaactctcaagatggccactggcgcctcaacgtcacggacaccaggctcaagacgtgctttgagaagttctgcttctgggagagcatgctctggcattggggcgagaacagtaacaggaccaagagcgtccccatggcagccacgacggcaaggtcgtgatctgtagatatacgaacaccccatccccatatggcaaccatacatgcatagcaatagcttgtataggtagctatgctttagttcttcgctatatatacagaatacaccactcgatccctgttgttgtcaaggctgcagctctatgtcgctgccggcctgccaccatggctaacgattcttttgggttggctgctgtaataagtttcaggtacatgtaaatttccctgctgaaattacgtgaccgcgtgtgagaaatgaatttgtacagggcgccaaataataattggttggtgcatacaacatatgaccagtcttttgcagt

SEQ ID NO: 138780 - DNA, 2526 bp, Zea Mays
gcttcgtcccctcccgagctcgcacaccgagttcttcttcttaatcttcctcttcgtctccttctagtagtgggcagagagagatcgagtgctaggggagaagcaagcaagccaggcagcagcaaccgcgcctggtttcctcctcctcctcctcgtgggctcacacaaggcttccttcggttcgggggtgtgcgaagcggcgcaacggcggaggcggctctagcatcaccggccgacggtcctcctccttctcacgaaaggcactagaggagcggcggcggcggcggcgcatcaagcaccgcaccgatgggcccactggagccgcgctaccgtccaggcggcgcccccgaggacacgactaagagaagggcctccaagagcaagagtttcaaagacgccgagaacttcgaagtcctcgtccttgagaagagctgcggttgcaagttcaagtctttgaggatcttgctcatagccatcatctccgcgacagtccttacccttgtaaccccgaccttatacgagcgccagttgcagtcagcctcccggtacgtggatgtcgggtggatgtgggacagagcgagttccgatccgcggtacgcatcttctgccgatgttgggtgggaggatgtgtacaaagcactgggaaacctaagaagcggtaaccgccagagtcatctcagagttgggctcttgaatttcaacagcaccgagtatggctcctggacgcagttgctcccagctgacagccacgttatctccactgtaaggctcgagcacgccaaggacagcgtcacctggcagacgctgtaccctgagtggatcgacgaggaggaagagacggagataccctcttgcccgtcgctgccggagccaaacgtgccaagaggtgcgcgctttgacgtcgtcgccgtgaagctcccatgcacccgtgtggcgggctggtcgagagacgtcgcgcggctccatctgcagctctcggcagccaaactggctgtggcgtcctcgaagcgcaaccacgacgtccatgttctcttcgtcactgactgcttcccgatcccgaacctcttcccttgcaagaaccttgtcacacgtgaaggcagcgcctggttgtacagtcctgactccaaggcgttgagggaaaagctcaggcttccagtcgggtcctgtgagcttgccgttccactcaaagccaaatcgaggcttttctcggtagatcgacgaagagaagcgtacgcgacgatactgcattcagcgagcgaatacgtctgcggcgcaatctcggcagcgcaaagcatccgccaggcaggatccaccagggacctggtcatccttgtggacgagaccataagcgaccaccaccggagaggcttggaggcggcggggtggaaggtcagagtgatccagaggatcaggaaccccaaggcggagcgcgacgcgtacaacgagtggaactacagcaagttcaggctgtggcagctcaccgactacgacaaggtcatcttcatagacgccgacctcctcatcctgaggaacgtcgacttcctgttcgccatgccggagatcgccgcgacgggcaacaacgccacgctcttcaactccggcgtcatggtcgtcgagccctccaactgcacgttccgcctgctcatggaccacatcgacgagatcacctcgtacaacggcggggaccaggggtacctcaacgagatattcacgtggtggcaccgcgtccccaggcacatgaacttcctcaagcacttctgggagggcgacagcgaggccatgaaggcgaagaagacccagctgttcggtgcggacccgccggtcctctacgtcctccactaccttggcctcaagccgtggctgtgcttcagagactacgactgcaactggaacaacgccgggatgcgcgagttcgccagcgacgtcgcgcatgcccggtggtggaaggtgcacgacaggatgccccggaagctccagtcctactgcctgctgaggtcgcggcagaaggccaggctggagtgggaccggaggcaggccgagaaggccaactctcaagatggccactggcgcctcaacgtcacggacaccaggctcaagacgtgctttgagaagttctgcttctgggagagcatgctctggcattggggcgagaacagtaacaggaccaagagcgtccccatggcagccacgacggcaaggtcgtgatctgtagatatacgaacaccccatccccatatggcaaccatacatgcatagcaatagcttgtataggtagctatgctttagttcttcgctatatatacagaatacaccactcgatccctgttgttgtcaaggctgcagctctatgtcgctgccggcctgccaccatggctaacgattcttttgggttggctgctgtaataagtttcaggtacatgtaaatttccctgctgaaattacgtgaccgcgtgtgagaaatgaatttgtacagggcgccaaataataattggttggtgcatacaacatatgaccagtcttttgcag

SEQ ID NO: 138781 - DNA, 587 bp, Zea Mays
gcttcgtcccctcccgagctcgcacaccgagttcttcttcttaatcttcctcttcgtctccttctagtagtgggcagagagagatcgagtgctaggggagaagcaagcaagccaggcagcagcaaccgcgcctggtttcctcctcctcctcctcgtgggctcacacaaggcttccttcggttcgggggtgtgcgaagcggcgcaacggcggaggcggctctagcatcaccggccgacggtcctcctccttctcacgaaaggcactagaggagcggcggcggcggcggcgcatcaagcaccgcaccgatgggcccactggagccgcgctaccgtccaggcggcgcccccgaggacacgactaagagaagggcctccaagagcaagagtttcaaagacgccgagaacttcgaagtcctcgtccttgagaagagctgcggttgcaagttcaagtctttgaggatcttgctcatagccatcatctccgcgacagtccttacccttgtaaccccgaccttatacgagcgccagttgcagtcagcctcccggtaagtacgacgacgtctcgtttgaaacatctgtgctgcggt

SEQ ID NO: 138782 - DNA, 449 bp, Zea Mays
aagaaacaatgtgtactgtctcaagctgcctgatgtgaagtactctgtgatgatatttacaatgtccttgtcctcatcgatccaagaggcaaacagctttacaatgttcttgtgcttgaaggttctcaacagttggatctctgtgcttagctgctctatattctatgagcaaaccatgacggagtcgttgatccttgactgactccatgcaacctcaacaccctccagcttgtcaaaggctttatagctatatatccatatcaaatcagagttgaggaacacataggagcagttggatctctatggattgattggttgattagctagcctcctcctgtctagtgcttttttcacaaaaagtaacaattttgtctcatatacattttcagttgtggtctagactttgtatttctaaacaaagaaactacatttaatccagtaaacaagaa

SEQ ID NO: 138783 - DNA, 423 bp, Zea Mays
gtggttagctttggataaagaggaaaaaaagctttcggttgaaacaacaactaatcaggatcctctggtgactaaaggtgcaagcttggttccgctgttggggattgatgtctgggaacatgcatactatctgcagtacaagaatgttaggccggattacctgaacaacatctggaaggtgatgaactggaaatatgctggagaggtgtacgaaaatgttcttgcttgaattgtcttaacagacaatactcatttgcgcgcgcgggtttcggctgtttgatcatgtgaaataaaagatggacctgtctagcggctggaccttgtgtacatttcgctgagatagactaatgcacggcctgccgattttgttcgtcctgcttgtgtgctactctgtctctgctccttttgtctcccttcatttcg

SEQ ID NO: 138784 - DNA, 2513 bp, Zea Mays
aatctatgatgcttattcaggagtgaatcccataatagagatatgggttctctcactgacattggagtttctgcgggactaaacatactatctgcagtgggtttccttcttgcatttgctgttctcaggatacaacctattaacgatcgggtgtactttcctaaatggtaccttaaagggacaagaagcagcccaaggcagttgggaaatgttttcttgaagtttgtgaatgcagatttctcaacatatatccggtttctaaactggatgcctgcagcactgaaaatgccagaacctgaacttattgaacatgcgggacttgactctgcggtatacgtccgcatctatcttcttggtttgaaaatatttgtgccaattgcgctactagcatttgctgttctagttcctgtcaattggactagtggaacattggaaaatgaaaagggactaagttatgaccagattgataagctttcaatatcaaatcttggaaaaggttcgaaaaggttttgggcacacatagcgatgtcctatgtgtttacattttggacgttctttgtgttgtatcatgagtataaggttgtgacaacaatgaggttgcgctttcttgctaatcaaaatcgtcgacctgatcaatacacagttcttgtgcgaaatgtacctccagacccagatgaatcagttagtgagcacgttgagcacttctttgctgtgaatcaccgtgatcattaccttagtcaccagattgtatacaatgcaaaccacctttctggcttggttgagaagaaaaaaggcctgcaaaactggttaatctactacgaaaacaaacatgctaaaaaccctgcaaaaaggccaaaaataaagacaggactgtggggtctttggggacaaagagtggatgctatagaatactaccaaaaagaaattgaggatttatgtaaacaggaggatgaggagagacaaaaggtggtcaatgatccaaattatatcatgccagcagcatttgtgtctttcaaaacacagtggggggctgctgtttgtgctcaaacacagcagacaagtaatccaaccgtgtggttaactgagtgggctccagaacctcgtgatgttttctgggctaatctcgcaatcccttttgttgagctctcagttaggaggcttattgtagctgttgccttcttctttctgacctttttcttcatgataccaattgctattgttcagtccttggcaaacctagatgatatcgtcaaggtgcttcctttcttgaaacctataatcgaaagaaattctcttaagtcagttatccaaggcttcttgccaggaatcatattgaaaatctttcttatacttctcccaacaattctaatggccatgagcaagattgaaggacacacatcgctctctggattggacaggaaaacagcaacgaagtactacattttccttttcgtaaatgtattcttggggagtgtaataactggaacagcattccaacaactagacaacttcatacatcagtccgcaaataaaattccagaggttgttggagagtccattcctatgaaggcagcatttttcatgacatacataatggttgatggctggtctggtatagctgctgaagttcttcggttgaaggcattagtcatattccatataaagaatgcgttcttggtcagaacggagcacgaccgtgagcaggccatggatcctggaagcctggatttttacaactgtgaaccacgattacagctgtattttctgcttgggcttgtatatgcagttgtcacgccaatgcttcttcccttcatcatagtgttcttcagccttgcatatcttgttttcagacatcagataattaacgtatatactcagcactacgaaagtggtgcacaattctggccagatgttcacatgcgactaattatagcgctgatagtatcacaaatcctcctactggggctgctgagtacacaggaggcagagaagtctactgttgcccttctcccgcttcctgtcctctccatttggttccactatgtttgcaagggccggtttgaaccagcgtttgtgaagttccccttgcaggatgctatggtaaaggacacattggaacgggcgcatgacccgactttaaatttgagagagtacctaaagggtgcttatgtgcatccagtcttccagaaaaatgatatctacaaggttatcgccgtcgacgaggaagagaagaaccccatggttgtgacaaagaggcaatctcgcatgaacgcaccggccggaagctaattgaattccagttctggtggtactaacgaaggggaattcagttggatgcctcctacctaaagcctgattctttcatgagcaaatagcccagtaatcttgtaaatgtttggggaaaatggaaatacaggaggcagtaggatagtgaaacaggctgtattatatatgatccacaatttattaatttcattagtgattacaattattaataaaaacaaatttacaat

SEQ ID NO: 138785 - DNA, 171 bp, Zea Mays
gcaactggtgtttaccttccacctgaatgcccaatgtatacaagaacacttatgagtcccccagaactgagaattctgctggcagcttgcaatgctaactcagttgttctaggcacttgtgattacaattttatctcctcctggaaggtagcccaagttgaaaattgaaag

SEQ ID NO: 138786 - DNA, 1329 bp, Zea Mays
aaaatagtaattttcccgctcgcggcttgccactctgcttccgtgcttggcttgctcgctttcctttcccgtctcgactctcgagtctcgactcctcgcattcgccgctgcgtcaacgtgtcttccttcccgcggtctctccgccgcctcccagatccggcggccatggcaaggaacccgggctgcaccgtcttcataggtaacttggatgacaaggttcctgagagggttctgtatgaaattcttattcaggtaggtcgtgttgtagacctacacatacctcgtgacaaggaaactagccgaccaaaaggctatgcttttgctgagtatgaaacagaggagattgcccaatatgctgttaagctattttctggtcttgttcgacttcataataaaacgcttagatttgcgatctctgggcaagacaaaccctcattaaatggcaatatccctgtaactcctaggttaaactctgtaccacagccaaagcctcatcaacctatgaggtctagtgatactcctttgccacagcatgcagcagtgaatggcaggaatgccgggtatggtatcccaccaaatcattcatacgacacgcacactcaagcacaagcattcgtgatccgcccaattggctctcagggtgatcaagttataccgtttctgttacctggctgctgtccggtatttgcaagttgacctgttgtcatttccaagttcattagcgtggaagctggtgctgctggattttcacttaactggtgacttatcttgcattgtgataatgccacttcatcctagtcagaaaccagctggctttctgagtggcaaaccagcaggataccacaaatccaccatattgttggtcaagatgggttagatgcacatttctcatcgggttgtatctggaagccccatgactgcgattatgatgagctcatatatctactgaccgttgtatctgtctgtgatttgagctcgtgtacctgcagtaggccgataaaagaatggtaagatatcaatacttctgaagttcgaacttggccaagtcccgttgggatccaaattacaggttgtcggagttcgtaatagacgctcagactatgaaatcaatccgggacagaaaatatgatagtgcaccatttaccattacgatccattttgtattgtgtaagtaatgaacattcatggtgatctgaaccttctgtcagtttttcttttcacagcacacagcagtgcctcaatttgtgtcactacagaattgaaccatcgtctcgagacaataagacaataagggagtgtttggtttaaggaatcactacatttaaaatg

SEQ ID NO: 138787 - DNA, 1901 bp, Zea Mays
aaaatagtaattttcccgctcgcggcttgccactctgcttccgtgcttggcttgctcgctttcctttcccgtctcgactctcgagtctcgactcctcgcattcgccgctgcgtcaacgtgtcttccttcccgcggtctctccgccgcctcccagatccggcggccatggcaaggaacccgggctgcaccgtcttcataggtaacttggatgacaaggttcctgagagggttctgtatgaaattcttattcaggtaggtcgtgttgtagacctacacatacctcgtgacaaggaaactagccgaccaaaaggctatgcttttgctgagtatgaaacagaggagattgcccaatatgctgttaagctattttctggtcttgttcgacttcataataaaacgcttagatttgcggtgcgtttctttttactccctcattttacataagttacattagtgtagctggatagttgaatgttactgtccctttttatggtatataatactccctcaatccctaaatgtttgatattaattagttcaaaattaaactaaccaacgtcaaatatttagggatggggtaggagtatctattactatgtatgtatgtatgtgccggaacttgggactcagattgagcctatccccatatatttttgtacttcactaattgaggcactttcaattactatattctttttagtataagactcaactctgaaataactgtaattttggcagatctctgggcaagacaaaccctcattaaatggcaatatccctgtaactcctaggttaaactctgtaccacagccaaagcctcatcaacctatgaggtctagtgatactcctttgccacagcatgcagcagtgaatggcaggaatgccgggtatggtatcccaccaaatcattcatacgacacgcacactcaagcactgtcgagtgggttaccgaatagaggactaagcaacggtacatatgaatatagtaggcgtgtatttggttctgttctgaatgatgttagccgtcgagctaccagggaaccaatcccgtacccgtcctactagcatgttgagccccggtgactgtgactctgtgctgacagaaaatatttctgaagatgttgtctgttgtgtcagccacctgtaatatctctgtactcaccatttcatgcctgtaaatatgggttatggtggtaggacatatgcttgtttttttggttctgcttcgcattgtagtgagacttgtccctgcttgttaggtccttctcatcccctagtgtgaaggccatgcctccactagtatggctgcactaggaaataccattcctagttacatgaatgggtggcaatatgctggcaattgtgttttaacattagtgccattagctatttcaatgttacagcagggcgtgtttgtgtttgcgatattagtatttggtggattttgtgcttctcatcatgtatctgggacatctgaaggagaaacattgttttaaaagaaaattgtgaaataagtcccacaatttatgatgtttgagtatatgaatatttggttacatatgactttttgtttgcttgtgctgtatgtctgtcgcagcacaagcattcgtgatccgcccaattggctctcagggtgatcaagttataccgtttctgttacctggctgctgtccggtatttgcaagttgacctgttgtcatttccaagttcattagcgtggaagctggtgctgctggattttcacttaactggtgacttatcttgcattgtgataatgccacttcatcctagtcagaaaccagctggctttctgagtggcaaaccagcaggataccacaaatccaccatattgttggtcaagatgggttagatgcacatttctcatcgggttgtatctggaa

SEQ ID NO: 138788 - DNA, 1574 bp, Zea Mays
aaaatagtaattttcccgctcgcggcttgccactctgcttccgtgcttggcttgctcgctttcctttcccgtctcgactctcgagtctcgactcctcgcattcgccgctgcgtcaacgtgtcttccttcccgcggtctctccgccgcctcccagatccggcggccatggcaaggaacccgggctgcaccgtcttcataggtaacttggatgacaaggttcctgagagggttctgtatgaaattcttattcaggtaggtcgtgttgtagacctacacatacctcgtgacaaggaaactagccgaccaaaaggctatgcttttgctgagtatgaaacagaggagattgcccaatatgctgttaagctattttctggtcttgttcgacttcataataaaacgcttagatttgcgatctctgggcaagacaaaccctcattaaatggcaatatccctgtaactcctaggttaaactctgtaccacagccaaagcctcatcaacctatgaggtctagtgatactcctttgccacagcatgcagcagtgaatggcaggaatgccgggtatggtatcccaccaaatcattcatacgacacgcacactcaagcactgtcgagtgggttaccgaatagaggactaagcaacggtacatatgaatatagtaggcgtgtatttggttctgttctgaatgatgttagccgtcgagctaccagggaaccaatcccgtacccgtcctactagcatgttgagccccggtgactgtgactctgtgctgacagaaaatatttctgaagatgttgtctgttgtgtcagccacctgtaatatctctgtactcaccatttcatgcctgtaaatatgggttatggtggtaggacatatgcttgtttttttggttctgcttcgcattgtagtgagacttgtccctgcttgttaggtccttctcatcccctagtgtgaaggccatgcctccactagtatggctgcactaggaaataccattcctagttacatgaatgggtggcaatatgctggcaattgtgttttaacattagtgccattagctatttcaatgttacagcagggcgtgtttgtgtttgcgatattagtatttggtggattttgtgcttctcatcatgtatctgggacatctgaaggagaaacattgttttaaaagaaaattgtgaaataagtcccacaatttatgatgtttgagtatatgaatatttggttacatatgactttttgtttgcttgtgctgtatgtctgtcgcagcacaagcattcgtgatccgcccaattggctctcagggtgatcaagttataccgtttctgttacctggctgctgtccggtatttgcaagttgacctgttgtcatttccaagttcattagcgtggaagctggtgctgctggattttcacttaactggtgacttatcttgcattgtgataatgccacttcatcctagtcagaaaccagctggctttctgagtggcaaaccagcaggataccacaaatccaccatattgttggtcaagatgggttagatgcacatttctcatcgggttgtatctggaa

SEQ ID NO: 138789 - DNA, 1362 bp, Zea Mays
aaaatagtaattttcccgctcgcggcttgccactctgcttccgtgcttggcttgctcgctttcctttcccgtctcgactctcgagtctcgactcctcgcattcgccgctgcgtcaacgtgtcttccttcccgcggtctctccgccgcctcccagatccggcggccatggcaaggaacccgggctgcaccgtcttcatagatctctgggcaagacaaaccctcattaaatggcaatatccctgtaactcctaggttaaactctgtaccacagccaaagcctcatcaacctatgaggtctagtgatactcctttgccacagcatgcagcagtgaatggcaggaatgccgggtatggtatcccaccaaatcattcatacgacacgcacactcaagcactgtcgagtgggttaccgaatagaggactaagcaacggtacatatgaatatagtaggcgtgtatttggttctgttctgaatgatgttagccgtcgagctaccagggaaccaatcccgtacccgtcctactagcatgttgagccccggtgactgtgactctgtgctgacagaaaatatttctgaagatgttgtctgttgtgtcagccacctgtaatatctctgtactcaccatttcatgcctgtaaatatgggttatggtggtaggacatatgcttgtttttttggttctgcttcgcattgtagtgagacttgtccctgcttgttaggtccttctcatcccctagtgtgaaggccatgcctccactagtatggctgcactaggaaataccattcctagttacatgaatgggtggcaatatgctggcaattgtgttttaacattagtgccattagctatttcaatgttacagcagggcgtgtttgtgtttgcgatattagtatttggtggattttgtgcttctcatcatgtatctgggacatctgaaggagaaacattgttttaaaagaaaattgtgaaataagtcccacaatttatgatgtttgagtatatgaatatttggttacatatgactttttgtttgcttgtgctgtatgtctgtcgcagcacaagcattcgtgatccgcccaattggctctcagggtgatcaagttataccgtttctgttacctggctgctgtccggtatttgcaagttgacctgttgtcatttccaagttcattagcgtggaagctggtgctgctggattttcacttaactggtgacttatcttgcattgtgataatgccacttcatcctagtcagaaaccagctggctttctgagtggcaaaccagcaggataccacaaatccaccatattgttggtcaagatgggttagatgcacatttctcatcgggttgtatctggaa

SEQ ID NO: 138790 - DNA, 672 bp, Zea Mays
aaaatagtaattttcccgctcgcggcttgccactctgcttccgtgcttggcttgctcgctttcctttcccgtctcgactctcgagtctcgactcctcgcattcgccgctgcgtcaacgtgtcttccttcccgcggtctctccgccgcctcccagatccggcggccatggcaaggaacccgggctgcaccgtcttcataggtaggtcgtgttgtagacctacacatacctcgtgacaaggaaactagccgaccaaaaggctatgcttttgctgagtatgaaacagaggagattgcccaatatgctgttaagctattttctggtcttgttcgacttcataataaaacgcttagatttgcgatctctgggcaagacaaaccctcattaaatggcaatatccctgtaactcctaggttaaactctgtaccacagccaaagcctcatcaacctatgaggtctagtgatactcctttgccacagcatgcagcagtgaatggcaggaatgccgggtatggtatcccaccaaatcattcatacgacacgcacactcaaggtgaggaaaactctggtcattttggaatccaagttaatgttgaattatgtgttaagtctcacaactccccttttgaccagcactgtcgagtgggttaccgaatagaggactaagcaacggt

SEQ ID NO: 138791 - DNA, 1761 bp, Zea Mays
gaatcctcctctcagtcacagacacactcgttcgctcgctctcactctctgctgttcgtccatccatccggatccgtcttcctcggtctcccacgagcagcgaggaggctacagctgggaccggccaatggggaacaaaccgccggagctgtactacgacatcctccacgttgccagggacgcctccccgcagcgggtcagggcggcgtacaggagcctggtccgccaatggcaccccgacaagcaccctccggagtccaggccagcggcggaggcccggttcaaggccatcaccgaggcttacgaggcgctgctgggccagcaggggaacatgtcggcggcgcccgcagtcgcagcgcgcgacggcgaaaggagtagccccgccgacaaggaccgcgccgactccgcggcggtgtcagccaggcccagggcggcgcggagcggaaaggccggcggcgcgccctgcacgccggagcgggaggagccggccttcaagacggtggtgtacagcgccagcagcagcgtcggcggtggccggggccggcgcgcgctcgccgagttctccagctacgtggtgcgcaaggcgccgccgctggagcggagggtggagtgcaccctcgaggagctctgcagcgggtgccacaaggaggtcaggtacacccgcgacgtcgtcaccaagaacgggtaagctgtcgctcacccaaaagaagggggaaaaaagaagcttgtattttgaaagactcaggcaaagtggctatgcaagcggagctgttactgtgtaatactgtaatgcttatcagaagtggtccttttgggcattataggtggtgtgtaatgcttgctgcctctgcttgcatgtgaggacgccggtcgccggccaatcgagcaggggacagtgaccctgcacttcccttgtgcagttcttctgccttgtgctgctgattggactgaccacttaccgcgccgtcacattttcacgctatagctacctgctaccggtggatcaacctcgagcgtttcatgtcctgatgatggcagactggtcaccaaggaggaggcgacgcggacggtccgggtgaagcccgggatgaggaaaggcgcgacggtgacgctggagggcgccggcgacgagcggccgggctgcctgacgggcgacgccacgttcgtcgtatccgagaggaggcaccggcggttcaagcggctcggcgacgacctggtgctcagggcccgggtgccgctggtcggcgcgctcacggggtggcagctctcgttcaggctgctcggcggcgacaggttccggtgcgcgttccgggacgaggtcatctgccccgggtacgtcaaggtcgtcaggggcggcggcatgcccgtcgccggcggggccaagggcgcgcgcggggacctcgtggtcaagttcgacgtcgtgttccccgaggacctcacggacgagcagcggaaggggctcgccgagattctgaggggctgcggatgaagcttgcaggtcaactcaaactgcggcctcgtcctgtgacggcttcgtgccgtgtaaaaatttttgttaggcgcttctgttgatagacagctcgggacaggaggactctacagcgcacgctgacagcgtgtacatagattacagaggttctgtttttgaaccgataatatacgtggttgtaacctgcaagaactgtatacggcgattttttgtagtttctcttttatttattacgtggatctaaatatttatcggttaccacaccagctagc

SEQ ID NO: 138792 - DNA, 1404 bp, Zea Mays
gaatcctcctctcagtcacagacacactcgttcgctcgctctcactctctgctgttcgtccatccatccggatccgtcttcctcggtctcccacgagcagcgaggaggctacagctgggaccggccaatggggaacaaaccgccggagctgtactacgacatcctccacgttgccagggacgcctccccgcagcgggtcagggcggcgtacaggagcctggtccgccaatggcaccccgacaagcaccctccggagtccaggccagcggcggaggcccggttcaaggccatcaccgaggcttacgaggcgctgctgggccagcaggggaacatgtcggcggcgcccgcagtcgcagcgcgcgacggcgaaaggagtagccccgccgacaaggaccgcgccgactccgcggcggtgtcagccaggcccagggcggcgcggagcggaaaggccggcggcgcgccctgcacgccggagcgggaggagccggccttcaagacggtggtgtacagcgccagcagcagcgtcggcggtggccggggccggcgcgcgctcgccgagttctccagctacgtggtgcgcaaggcgccgccgctggagcggagggtggagtgcaccctcgaggagctctgcagcgggtgccacaaggaggtcaggtacacccgcgacgtcgtcaccaagaacggactggtcaccaaggaggaggcgacgcggacggtccgggtgaagcccgggatgaggaaaggcgcgacggtgacgctggagggcgccggcgacgagcggccgggctgcctgacgggcgacgccacgttcgtcgtatccgagaggaggcaccggcggttcaagcggctcggcgacgacctggtgctcagggcccgggtgccgctggtcggcgcgctcacggggtggcagctctcgttcaggctgctcggcggcgacaggttccggtgcgcgttccgggacgaggtcatctgccccgggtacgtcaaggtcgtcaggggcggcggcatgcccgtcgccggcggggccaagggcgcgcgcggggacctcgtggtcaagttcgacgtcgtgttccccgaggacctcacggacgagcagcggaaggggctcgccgagattctgaggggctgcggatgaagcttgcaggtcaactcaaactgcggcctcgtcctgtgacggcttcgtgccgtgtaaaaatttttgttaggcgcttctgttgatagacagctcgggacaggaggactctacagcgcacgctgacagcgtgtacatagattacagaggttctgtttttgaaccgataatatacgtggttgtaacctgcaagaactgtatacggcgattttttgtagtttctcttttatttattacgtggatctaaatatttatcggttaccacaccagct

SEQ ID NO: 138793 - DNA, 498 bp, Zea Mays
cacgcaacgcagggtgccccgtccccaccgagacgagaccctagccgaggatccgagaacaaaccgtatcggcatcgggacgccgacggatggacgcggcgacaaatccgccagggagtcagggaaaattgcaatcttcttcactgccgcgcagggcacaattatggccgcggagatggacgggagacggctggtcgaccgcgcgcccgttccctctcggcattcgcgggcgccatgatggtgcgggtcgtaccgggcgactggtgcggcgaggcgaggcgaggatggtggcactacgtagctcctgggcacaggcttttgccaccacgggtgcaggctggttcatcatgaaacatcattcccgggacttgaaggtgccgctccgccgacccgatttcatggcggcagttacgcttcccggagtcgtgaactcgtgatggtgtacactgtaccttttgatctcctgctgtaagatgaagaagatagaagaggcgatat

SEQ ID NO: 138794 - DNA, 1857 bp, Zea Mays
ctttaaaacaagaaagaacgttacatcacgcacacacgcgcaccaaagccaagcgcccaagcccagcactcgacaccaccacagcgcgcagccacgctcacgcacaccgagctgcgggagtggagtagtggaccgatggggagcagcgggggcagcagcgagcacttcctgcggcagctgagttcgagcgacggcggcagcgcgccgcaccatctgctgcagcgagagtgggagtgcggcggcgtcaccggcagcggcagcaggcgcgggtcgcggaagaagaccagggcgcggggacaccgccgccgcggcggcgggttctgcagggcggaggaggctgcgccggggcggaagcgggtaatggtggtggtggaccagagctccggcgccaagcacgccatgttgtgggcgctcacccacgtggccaacaagggcgacttcctcaccctgctccacgtcctgccgccggagagcggccacagcagccgcggtgctgcggaggacgcctccgcgctcgccaactccctcggcgcgctttgcaaggcctgcaagcctgaggtcgaggtggaggcgcttgtgatccaggggcccaagctgccgaccatcctcagccaggtgaagaagctggaggcgtccgtgctggtgctgagccaacgcagcccctcgcctttctgctgcttcccgcggagcagcagcgaggagcttgtggaggagtgcatcgaccgggcggagtgcctgacgctggcggtgcggcggcagagcaagggcgtcggcggctacctcgtcagcacccggtggcagaagaacttctggctcctcgcgtgatccacaaccatatatttccccccttctttggaaggcgttcggtttgagtttgaaagcatgggatggaacggaacgggctgggaaatggcgtttggttcagggatacgaggtttgggaattgggatcgcctacaggagtgagcgtgtttccatggattcgggaataacgtacctaatccctgcaggtcggagggacgggatagtcctctatatatgaacgtcgtttcttccgtcatcagtcttcttcctcgcgtccgtgtgtcctcttcttcttcctcgccagttgtctctcatcctgtttctctcaacgtcttaatatgctctccaggacgctggaagcaaacgaacttgctttgatgtcaaaactaggccctggcattttgctggtagtacaactaattagcaccaaactgctaattgtagttactacagctacaataggacggcaacctcgtttaaacccttgccctcctcgacctggcccaggttcattaacacgcaacagtgactgcttcacatcagccaggctcctaaacacgcaacgcagggtgccccgtccccaccgagacgagaccctagccgaggatccgagaacaaaccgtatcggcatcgggacgccgacggatggacgcggcgacaaatccgccagggagtcagggaaaattgcaatcttcttcactgccgcgcagggcacaattatggccgcggagatggacgggagacggctggtcgaccgcgcgcccgttccctctcggcattcgcgggcgccatgatggtgcgggtcgtaccgggcgactggtgcggcgaggcgaggcgaggatggtggcactacgtagctcctgggcacaggcttttgccaccacgggtgcaggctggttcatcatgaaacatcattcccgggacttgaaggtgccgctccgccgacccgatttcatggcggcagttacgcttcccggagtcgtgaactcgtgatggtgtacactgtaccttttgatctcctgctgtaagatgaagaagatagaagaggcgatat

SEQ ID NO: 138795 - DNA, 1189 bp, Zea Mays
ctttaaaacaagaaagaacgttacatcacgcacacacgcgcaccaaagccaagcgcccaagcccagcactcgacaccaccacagcgcgcagccacgctcacgcacaccgagctgcgggagtggagtagtggaccgatggggagcagcgggggcagcagcgagcacttcctgcggcagctgagttcgagcgacggcggcagcgcgccgcaccatctgctgcagcgagagtgggagtgcggcggcgtcaccggcagcggcagcaggcgcgggtcgcggaagaagaccagggcgcggggacaccgccgccgcggcggcgggttctgcagggcggaggaggctgcgccggggcggaagcgggtaatggtggtggtggaccagagctccggcgccaagcacgccatgttgtgggcgctcacccacgtggccaacaagggcgacttcctcaccctgctccacgtcctgccgccggagagcggccacagcagccgcggtgctgcggaggacgcctccgcgctcgccaactccctcggcgcgctttgcaaggcctgcaagcctgaggtcgaggtggaggcgcttgtgatccaggggcccaagctgccgaccatcctcagccaggtgaagaagctggaggcgtccgtgctggtgctgagccaacgcagcccctcgcctttctgctgcttcccgcggagcagcagcgaggagcttgtggaggagtgcatcgaccgggcggagtgcctgacgctggcggtgcggcggcagagcaagggcgtcggcggctacctcgtcagcacccggtggcagaagaacttctggctcctcgcgtgatccacaaccatatatttccccccttctttggaaggcgttcggtttgagtttgaaagcatgggatggaacggaacgggctgggaaatggcgtttggttcagggatacgaggtttgggaattgggatcgcctacaggagtgagcgtgtttccatggattcgggaataacgtacctaatccctgcaggtcggagggacgggatagtcctctatatatgaacgtcgtttcttccgtcatcagtcttcttcctcgcgtccgtgtgtcctcttcttcttcctcgccagttgtctctcatcctgtttctctcaacgtcttaatatgctctccaggacgctggaagcaaacgaacttgctttgatgtcaaaa

SEQ ID NO: 138796 - DNA, 2781 bp, Zea Mays
gtccagcacgctccagcgtaccacaagccgcgcatccaagctagtcctagatatagcacactagttgctgggcagcagcaggaagtcgcagcgttgcgtgatgaagaacaacccgagcttcgagaacacgtgcagcgccgccgccggcgggtccggctctggctccttcaacgtccggaacctgtccaaggtcatcctcccgccgctcggcgggccgtccggccagagccagtcccatggcgggtcggacaagtgggtcatctcgccgctcgactccagatacaggtggtgggacacgttgatggtagtcctggtggcgtactcggcgtgggtgtacccgttcgaggtggccttcatgaacgcgtccccgaagggcgggctggaggtggcggacatggtcgtggacctcttcttcgccgtcgacatcgtgctcaccttcttcgtcgcctacatcgaccccaggacccagctgctcgtccgcgacaggaagaagataaccctcaggtacctgtcgacgttcttcatcatggacgtggcatcgacgatcccgttccagagccttgcctacctcatcaccggcgaggtcagggagaacgccgcgtacagcatgctgggcgtcctacgcctctggcggctccgcagggtcaagcagttgttcaccaggctcgagaaagacatccgcttcagctacttctggatccgcagcgcgcgtctaatcgcggtgaccttgttcctggtccactgcgccgggtgcctgtactacctgatcgccgaccggtacccggacagggagaagacgtggatcggcgcggtgaaccccaacttccggcaggctagtctgcggatccgctacatctcctccgtctactggtccatcaccaccatgaccacagtcggctacggcgacctgcacgcccagaacaccgtcgagatgatcttcaacatattctacatgctcttcaacctcgggctcaccgcctacctcatcggcaacatgaccaacctcgtcgtcgagggcacccgccgcactatggagtttaggaacagcgtaaggacagcgtcgagtttcgtgggccggaaccacctgccgccgcggctgaagcagcagatcctggcctacatgtgcctcaagttcagggcggagagcctgaaccagcagcagctcatggaccagctgcccaagtccatctgcaagagcatctgcgagcacctcttcgtgccggtcgtcaaggatgtctacctgttcaagggtgtctcaagggaaatgctgctgtccctggccaccaagatgaagccggagtacatcccgcccaaggaagacgtgatcgtgcagaacgaggctccggacgacgtgtacgtcgtcgtctctggcgaggtggaggtcgtactgttcgacggcgtcgacgagcgggtggaggcgacgctggggacgcgcaacatcttcggcgaggtgagcgcgctgagcgaccggccgcaggcgcccttcacgttccggacgaggacgctgagccagctgctgcggctgaagcaggccacgctcaaggaggccatgcagagctggcccgacgacagcgtcatcatcatcaagaattacgtcaagcatcaggtcgagatgcatggcatgaaagccgatgactcgctgggagacaacactagcgagcacgacgacgacgcgaatgtgctcacagtcgccgcgatgggaaacagcggcttactcgaagacctcctcagggcagggaaggacgctgacgtcggtgacgccatgggcagaacagcattgcacatcgcggcgtctaaggggtacgaggactgcgtgctggtgctgctcaagcacgcgtgcaacgccaacatcagggacgcgcagggcaacacggcgatgtggaacgccatcgcggcggggcaccacaagatcttcaacatcctgtaccactccgcgcgcgcgtcgaaccctcacgccggcggagacgtcatgtgcctcgccacgcggcgcggcgacctcgacgcgctccgggagctcctcaagctcggccttgacgtggactcggaggaccacgatggcgccactgcgctgcgcgtcgcgatggccgagggccacgcggacgcggcaaggttcctgatcacgaacggggccagcgtggacaaggcgagcctcgacgacgacggctccggctccggcgccgcgcggcttacaatgtcgccgacagagctgcacgagctgctgcagaagcgggagctcgtccactcgataaccatcactgactcgccaccggtggtcccggacggcggctcgtcggggcacagccgtccgggcagattacagagcacaggctcggacaacacgcgctggcctcgggtgagcatatacaggggccacccgttcctcagaaaccgcagctctgaagctggcaagctgatcaatctgccagccaccatggaagaattcatagccgtcgtcggtgagaaattgaaggttgatacggagaaggcgctgattgtgaacgacgaaggagcggaggtcgactcgatcgacgtgatccgggacaacgacaagctgttcgtggtcaccgaagaagatctgacgcggctggcaccaatggactcggtgccttcgtcatagcatttgtagattcaggtttttccgtagcaagtcacacggtagatgtgcacccaactaacaaaatgtgtattcctcggggtctcaagatagtcaatatttcatgtttttaaatacaactttttaaattttgatcgaatatatacagaaatactaaactttatggt

SEQ ID NO: 138797 - DNA, 1109 bp, Zea Mays
gccgtagattattattgcttgctgcgttggatgtttaggtaatctagatttgagtcttgttgtagtccttgctgtttttttaggggatttggattggaatttctggaggcagctcttaagttatttgttcctgtatttgagtcactgttccttagattgcgccaatacaatgtatcggcttagtcttgatttgattttagatttattctatctgtttttatttagcaaaataatttggtatttatgctatccaatcactcattcaagcaaccatcgttgtctcgacgtgctattgagttcacacctcttccgaactgtttacagccaaaacttgacagtacgatttttgggtacttactaatggaatagaggtaaagctgcagcggaatgctttaagtgtgattgaacctccgacaggcaacgaggatgatgataaatttgattgtgaaaacctgcggtggaatagttcagacttggtctccgatgatgcacaatcaccaaagccacaaaggtcaaggagcaggcagcataggggtttccacagaaaatcctttagccgttcaatgtcatgtgactcccaatctaagacgtctgtttcatcttcctcgagagctcacacgaaagttgacctgagcaagttagaactgactgcactgttgagatattggcgccacttcaatctcgatgcatgccctaatccatccagggagcagttagttgatgctgttcaaaggcacttcacggcccagcaattggatgagttgcaggtcattgtcagctttgtgcaagctgcaaagaggctgaagacaactatgaaagtggcctgacagtgaagcatgaagttcaactaacagattcaagataggatgcagcatgtttgatgaatgttgccgtgctatgtaatatatatgcatgaagttctttagattcaggtggtaatggacaactagactatgttagcctcatctgatgtagatatgcagtatcctgtctaaagatgtttcaacctctagctcagttctttcctgctgactggatgtgaatcgaaatggcaagcttaaaacaagttctttttgtcatccttttcgaagtttcattatatttagccc

SEQ ID NO: 138798 - DNA, 1160 bp, Zea Mays
aagaaagtcacgcagtcacacgcatccgcagcactccgccactccctctgcttcagacagaccagtgcgcgctcaattaccccccgacccctaccgcgtccaccacaccaaaccgtttcacccggacctgcccccaacaccctgctctatcctcatagcaaaccaccgcctgaattgggcggcaattgggagaggattcgcggcaggtagggcgctgatccgttggcgagatgattgcggctgtcaaccgagtgccggcaggctggggcgaggatgagatgtccgtgctgccgcggcacaccaaggtggtggtcaccggcaacaaccgcaccaagtcggtgctcgtgggcttgcacggagtcgtgaagaaggccgtcggtctcggaggatggcattggctggtacttactaatggaatagaggtaaagctgcagcggaatgctttaagtgtgattgaacctccgacaggcaacgaggatgatgataaatttgattgtgaaaacctgcggtggaatagttcagacttggtctccgatgatgcacaatcaccaaagccacaaaggtcaaggagcaggcagcataggggtttccacagaaaatcctttagccgttcaatgtcatgtgactcccaatctaagacgtctgtttcatcttcctcgagagctcacacgaaagttgacctgagcaagttagaactgactgcactgttgagatattggcgccacttcaatctcgatgcatgccctaatccatccagggagcagttagttgatgctgttcaaaggcacttcacggcccagcaattggatgagttgcaggtcattgtcagctttgtgcaagctgcaaagaggctgaagacaactatgaaagtggcctgacagtgaagcatgaagttcaactaacagattcaagataggatgcagcatgtttgatgaatgttgccgtgctatgtaatatatatgcatgaagttctttagattcaggtggtaatggacaactagactatgttagcctcatctgatgtagatatgcagtatcctgtctaaagatgtttcaacctctagctcagttctttcctgctgactggatgtgaatcgaaatggcaagcttaaaacaagttctttttgtcatccttttcgaagtttcattatatttagccc

SEQ ID NO: 138799 - DNA, 1129 bp, Zea Mays
acacgcatccgcagcactccgccactccctctgcttcagacagaccagtgcgcgctcaattaccccccgacccctaccgcgtccaccacaccaaaccgtttcacccggacctgcccccaacaccctgctctatcctcatagcaaaccaccgcctgaattgggcggcaattgggagaggattcgcggcaggtagggcgctgatccgttggcgagatgattgcggctgtcaaccgagtgccggcaggctggggcgaggatgagatgtccgtgctgccgcggcacaccaaggtggtggtcaccggcaacaaccgcaccaagtcggtgctcgtgggcttgcacggagtcgtgaagaaggccgtcggtctcggaggatggcattggctggtacttactaatggaatagaggtaaagctgcagcggaatgctttaagtgtgattgaacctccgacaggcaacgaggatgatgataaatttgattgtgaaaacctgcggtggaatagttcagacttggtctccgatgatgcacaatcaccaaagccacaaaggtcaaggagcaggcagcataggggtttccacagaaaatcctttagccgttcaatgtcatgtgactcccaatctaagacgtctgtttcatcttcctcgagagctcacacgaaagttgacctgagcaagttagaactgactgcactgttgagatattggcgccacttcaatctcgatgcatgccctaatccatccagggagcagttagttgatgctgttcaaaggcacttcacggcccaggttgataaaacaaatttaacttctgactccagtaacttgcatcactatggtgtgaggtcctgacagtctgctttgttgtgttaattccaatatatgcttttgcccatgcggaagcaattggatgagttgcaggtcattgtcagctttgtgcaagctgcaaagaggctgaagacaactatgaaagtggcctgacagtgaagcatgaagttcaactaacagattcaagataggatgcagcatgtttgatgaatgttgccgtgctatgtaatatatatgcatgaagttctttagattcaggtggtaatggacaactagactatgttagcctcatctgatgtagatatgc

SEQ ID NO: 138800 - DNA, 237 bp, Zea Mays
atgtcgggctggtggtcaagcagctggcaggctgtacctgctgggacccagaccaacgaccctcatcaggcggcggcgctcctcaccttgaaccggcacagcagcttcttcttcctggacgccgggttgttcacgcccagcaccagcttgccgggctccgtggccttgaagctgcccttcatgatgggctcctcgtgggcggggaccttccgcgtcttctgcacgatgacggtgtag

SEQ ID NO: 138801 - DNA, 843 bp, Zea Mays
tgccgtattttgtcaaaaacacagccagagtccgcagcagagctcaactttgcgagaggggtagagctcctccgaagaagatccggagtcagccagaaagaaagaaaacaaaaacagagaagcaatttgcaagtaggcaggtgcaatggtacatctcctcctctgcgctgaaactactaccgtgccatggttcaagctaggcacgccatgaaccaagatgcgccctttccttaattttttatttatttttctgcttcttttcagggaaaaaaaggagagagagagagagagaggaaggaacaacctccctggttttttcgttcttgttattctatctaatgaaaagcacgagagagagaagatagagagaacgagaaggcaaaacagcacgtacgcatggtctgcgtctgttaagcccaagctgggcgtggccgctgtcgaagaggagaggagaggtctcctgcatcggggcgaacgactgggaaggaagccagacaggctagggcgacgcgagagctagctcgacaaggttcaagatttcctcagattcaatgatacggtcctcctccatgcacacttgcacagggccacaggcacagctaacacagcggttggtggtagctggtagtagttcatccgtgctccttgctgtctgctgtggtggcctcgctgagtcgcaggacgacctccatggctccatggccctgccccgcctgcactgcaacggccaacggcaacctcatgtgatgactgatgagtgactatactactgagtactgacagtggccccacgaatgctccctcggtccctccctccctccatccacctgctttccatgcaaa

SEQ ID NO: 138802 - DNA, 948 bp, Zea Mays
atgcctttaaatatagatattgatctgttcaagctggatattgatgagctgatagctgattattccaaggagaactgtacgtcactctttgaattcaaacgagtatggatgggcaagaaattttcttatatctatgaaggcaggcctaagacaaactcgggtttattcatgcagtccctctttctgcattgtattggttatttgacttctcaaagttcactgcaccaaagattggctgggctatactgcctttactgtctgtatgagtgccagccatacaagccgcagttcaagatttacttgtctcttgaggagtgcaggcaactgaaagatatcgttgttatggcgaagcaaaatggactgcagctcgtgcctgcacttgtcaaaaggatgctggataaagacatgtttttgtttggctacatgaatttgatcgacgacaacggggacaagcaggtcgaggaattgaccgcattgcagaacaagcgagtaaaatttgcatgtgacaagttatttgcaaatacccaagcagaaagatatttgcacatggacttgggtgctgagttcgagcttgatagcatcaagaaattgtcaaaggagtatgcagaagcaaaggaactggcccttgcagaggcaagccaaactgtcgaagttgacgatgctaagcacctccttcagagtgagaggctgttgggcgacaagatagatgaagtcgtcaaagaatgggatgtccagaaggaggggttctacgagaggacaggattatcctcatcccctggcgaccagctcatggccatcgacaacgatgaatcaggagctcaatgtcacgaggatggatcccgtggcgatcagctcatggcggtcgacaatgatgaatcgggagtacaggatcacgaggacctcgacgacgacgacggctttgccgagttagaactgctgctagaatga

SEQ ID NO: 138803 - DNA, 681 bp, Zea Mays
atgcctttaaatatagatattgatctgttcaagctggatattgatgagctgatagctgattattccaaggagaactgtacgtcactctttgaattcaaacgagtatggatgggcaagaaattttcttatatctatgaaggcaggcctaagacaaactcgggtttattcatgcagtccctctttctgcattgtattggttatttgacttctcaaagttcactgcaccaaagattggctgggctatactgcctttactgtctgtatgagtgccagccatacaagccgcagttcaagatttacttgtctcttgaggagtgcaggcaactgaaagatatcgttgttatggcgaagcaaaatggactgcagctcgtgcctgcacttgtcaaaaggatgctggataaagacatgtttttgtttggctacatgaatttgatcgacgacaacggggacaagcaggtcgaggaattgaccgcattgcagaacaagcgagtaaaatttgcatgtgacaagttatttgcaaatacccaagcagaaagatatttgcacatggacttgggtgctgagttcgagcttgatagcatcaagaaattgtcaaaggagtatgcagaagcaaaggaactggcccttgcaggtgcctgtccattgccattgtcggatatgtgcattttccttctcctttac

SEQ ID NO: 138804 - DNA, 1054 bp, Zea Mays
ctttcatctccaagccgaaaaaacacccacagaaccctaccctcccgagtcccgaccccgtcctgctcgctccgccgtccttcgcccgccacccgccacccgccggactgccaaagcccggaggcctgaggcccgagttacgcgaggagcagccgaaccagcggcccggcgcctcatccctcagcggccccgcccctggggccgtgtagtcagcaagcggccacgcgagtgcgcggtcggcgcggagtgagcaggagcaacccgtggctggcggtcagtcggtggctagctggagcctggagttgcgacttgcgagcggcgttagaactcgctccacctataatttttgtgtggctccgtcactgattccacccgttctgtggccggcgacagaggcacagagaagcgccaatccgccggcttgatctgaagcatggacagggagaactgtacgtcactctttgaattcaaacgagtatggatgggcaagaaattttcttatatctatgaaggcaggcctaagacaaactcgggtttattcatgcagtccctctttctgcattgtattggttatttgacttctcaaagttcactgcaccaaagattggctgggctatactgcctttactgtctgtatgagtgccagccatacaagccgcagttcaagatttacttgtctcttgaggagtgcaggcaactgaaagatatcgttgttatggcgaagcaaaatggactgcagctcgtgcctgcacttgtcaaaaggatgctggataaagacatgtttttgtttggctacatgaatttgatcgacgacaacggggacaagcaggtcgaggaattgaccgcattgcagaacaagcgagtaaaatttgcatgtgacaagttatttgcaaatacccaagcagaaagatatttgcacatggacttgggtgctgagttcgagcttgatagcatcaagaaattgtcaaaggagtatgcagaagcaaaggaactggcccttgcaggtgcctgtccattgccattgtcggatatgtgcattttccttctcctttac

SEQ ID NO: 138805 - DNA, 1569 bp, Zea Mays
atggcgtcggtcaggccgtgcgtgtccgtgaagcccgccgtgcgcccggtcaggtacagatccacgagggctgggccggccggcttgggaaggctgcgcgtatgttcctgctccctggcgctcggcggcgacggtggctgcacccgcagcagcgggaggagcgtcgacgtcagtggtgccggtctcggcttgctcggcggcgatggactgaggatccacaggcggggcgggcgggaggtcctcgccatgtgcagcgcaagcttcgacggggtccgccccgccgccgtggcgagcgccgttcagcccgtgccggcgttccccgaacgggccaaggtggtgtcgctggtggcggctatcatgctgctctgcaacgccgaccgggtcgtcatgtccgtcgccgtcgtgccgttcgccgcgcagtatggatggtccagctccttcgtcggcatcgtccagtcttcatttttatggggatatgttttgtcatccatggttggaggagctttggcagacaaatacggcgggaagaaggtgatggcaggtgctgctgcactctggtccttggccacaattctcactccttgggctgcctcccgctccaccatcatgttgcttgctgtacgtgcactctttggccttgcagaaggtgttgcgtttccgacaatgagcactttcctaccaaagtggttcccaacgcatgagcgtgccactgctgtcgccatttccatgggtggattccatcttggaaatgtcataagcttcctagcaacaccgatcatcatgtcacacataggcctctcgggaacatttgccttcttcgcatcgcttggttatttgtggctctctgtatggatgatgaacgtagaaagtgatcctattgacagccatactataagcaagtctgagttgcaattaattctagatgggagaattggatctaaagtccaaggaagtaaattcccatccctaagagaattgttctcaaagactcaattcttggctgtcactttggccaatgtggtcaacaactggggctattttgtcctattgtcatggatgcccgtgtatttcaatacggtttataacatcaatctgaaacaagcagcgtggttcagtgccataccttgggcagtcatggctatgtccggttatgttgcaggagcctctgcagattttcttatcaaatctggtttctctattggactagttcgaaaaattatgcagtccattggttttatggggccttgcgtgtcattgctgtgcttaaggtttgcccaaactccatcagttgctgcagtcctcatgaccattgcgctgagcttgtgttcttttagccaagccggatacatgtgtaacatacaggacattgctccaaagtatgctggatccttgcacgggctgacgaacggcatagggacggtggcagccatagttagcaccatcgggatcggctacttcgtccagtggctagggtccttccaggccttcctcacgctcacggcggcgctctacttcagcgccaccatcttctacaacgtctacgcaaccggcgacctgatttttgactga

SEQ ID NO: 138806 - DNA, 2489 bp, Zea Mays
aaagacatcacggtgtggtgtggaagaagcgaggcgttgggccccgtgattcccttcaactttcgctttctccccctcgggcctcgcctcctctctctctctctctctctctctctctctctctgcgccagtgcgccccacgctgcatcctcaaaaccattctccatcgaatccgtcgcgctcaaagcacgcccttcacagcacagctgcgagtgtgcgtgccaccgccgtgcgagccaagaaacgtgatgccgcgccgcggctaaaaatcaggtgtattcttcaggctaacaagcgcgcgagacgacgcaatgacgctgcagatggagccgccggtgccgccgccgcggcggtcggtgtcgacgacctgcgacctccacccaggagaaaccttcacgggcttctgcgccgcctgcctccgcgagcgcctcgcggggctcgagtccaccggcggctccgccgcggccgccgcgccgggccgcaggtccacctccgccatccgctcgctcttcacccgcccgttcgccgccgccgccggcggggctccgtcgggatccggcgccgccgcgctgccggacctccgccgctgcaagtccttctcctgcgggcgcgggggcgacgcgctggccgccgcgggcgagccgcagcggaggtcgtgcgacgtgcgcgggcggagcactctctgggcgctgttccaccaggacgaccgccagcgggttcgcgacggcaccgcgttcggcgccttcccggcctcgtcctccgccgccgcggccgcgctcgccgccgaggtcctcccgcccccgcagccgccacctcccgcgtgcgtccctgagatgttctcggaggaggagatcgctgtggccgaggactctgacgagattgtcgcggtgatggagcccgtctcagtcgtgggcacctctggggagatggagacggaggtgagtgcggcgcgggacgttagggccatgaaggatcacatagatctcgaggcctcgcagtcgcagcagcccaggaagctgccgcccaaggacctcaaggagatggccgggagcttctggcttgccgcctccatgttcagcaagaagtggcagaagtggaggggcaagcagaagctcaagaagcaggaggccgcgggcagcaaggcggcggcggcggcaatgcccccgccggagaagccatccaagccctcgttcctccggcgtagccgcttccgccgtggcgaagccggctccgagttcgccggcggccggcgctcgtgcgacaccgacccacgattctccttggacgccggccgcatgtccgtcggtgacatgggcttctcctgggacgagccccgtgcgtcgtgggacggctacctgttcggcgccggcaccggcattggtctcggccgcgcgccgccgctctcccgtcttcctcctatcctctcggctatggaggactcccccgccggcattctggagcgctccgacggccaaatccccgtggaggacgactcccagccggagcccgaccacgacgcaaacgtccctgggggctcggcccagacgcgagattactacatggacacctcaagccggaggcgccggagccttgacaggtcgagctctgtgcggaggtcctttgaagtcaccgacccaaagccagtgccagtgccagtaccagtacctgttccagtgaccgcaccggccgccattgtcaacggcaaggaatcccctgcaatgggcagctcggagttctaccacttccaccacgccgaagacctgttcgaccaccgcttcagcaccaactcactcgtcgaggacttctccgccagcctggacgctgccttccacggccccgcgaagaagccgccgcggtggcgcaaggcgtggagcctctggggcctgatccaccgccgcgccgcggggcgcagggacggcgcgtccgacgccgccgaccgcgcgttctcggagccatggccggacctgcgcgtccgcgggtacaacggcaggatgcagcggtgcaacagcaacgccagcgcgcggagctcgttcagcagcaacagcggcggtctgggcagctccaggcgcagctacctggacgcccacgggaagcggaggcgcgaggagtgcgcggcgctggagcggaaccgtagcgcgcggcactcgccgggcaacgcggacaacggcctgctgcggttctacctcacgccgatccggagcgccagcggccgccggacaggcgtcctcccggtgaaaggcggtcggcagctgaggtcgcagtcgttcgcgcggacgatgctggggctgtactagagtattgacgacggccacctgattgctggtcaagctgcttcatttcagtaggcagtagctgatggcttacatgttgagtagtttgggtgggtggtataaccaaaatcgtttacatctttgtgtagtgcagtgatccttttgttcattcggagggctggataaaatgaagtttaatctcgtaatcacgacttgact

SEQ ID NO: 138807 - DNA, 2030 bp, Zea Mays
gtcaacacaagtacacaccacaaacacccatctcctccgcctctgctcccttctgctcacccgcacgatggcgccggaggcgcgaggtgaggcggcgctggtgtacagagacgcattggcgccagtggaggaaagggtgcgagacctgctgggccgcatgacgctgcgtgagaaggcagcgcagatggcccagatcgagcgcaccgtcgcgacgccgcgagccctcacggagctcggggctggcagcgttctcaacgccgggggaagcacgccctgcgagcaagcctcccccgccgactgggccgccatggtcgacggcttccagcgccttgcgatctcctcccgcctcggcgtccccatcctctacggcactgacgccatccacggacacaacaacgtctacggcgccaccgttttcccccacaacgtcggtctcggcgcctgcagggacggagagctcgcgcgtaggatcggcgaggcgacggcgctcgaggttcgcgccactggcatccactggacctttgcgccgtgcgtcgccgtctgtcgggatcctaggtggggcagatgctacgaaagctacagcgaggacccagagatcgtgcgctcgttgaccaccatcgtcagcggtttgcaggggcagccgccagcagaccatcctcatggttaccccttcctcgcttcgcctagggagaatgtacttgcttgtgctaaacatttcgtaggggatggtggcacggacaagggggtcaatgaggggaacgccatttgctcctatgaggatttggaagcaatccatatgacaccttacccggattgtatagctcaaggggtggcaacagtaatggcgtcctactctaagtggaatggggagccattgcattcaagtcgctacttgttaacagatgttctgaagggcaagttaggctttaagggttttctcatttcagattgggagggcattgacaggatctgtgagccacaaaagcctcgagggtctgattatcgctattgcattgcacaatcagtaaatgcaggaatggacatgattatgatacctcacaggtttgagaaatttttggatgatattgtgttcttggtggaggcgggggagataccaatgtctcggattgatgatgctgttgaacgaattctgagggttaagtttatttctggagtgtttgagcatccattttcagaccaatctctactggacatagttggttgtaaggaacatcggttactagcgcgtgaggctgttcgcaagtctttggtacttctgaaaaatggcaaggatcagaataagccattccttccattggccaaagatgcaaaaagaatactggttgcaggaacacatgctgatgatattggatatcaatgtggtggctggacgatagcatggcatggagacagtggaaaaataactcttggtacgagcatattggaggccatacaagaattagtgggagtgcaaactgaagttgtgtatgagaaatgcccaaccgaagctatgattgaaactggggggttttcctatgcggtggtggttgttggagaggttccatatgccgaatgggacaggagatagaactgaccttagtattccgtttaatggctctgaccttatcatccgtgttgcaagtaaaatccctaccctagtgattgttatatctggaaggccattaattattgagtcacaagttttggaaaagatagaagctctagtcgctgcctggctgcctggaagtgagggcatgggaattaccgattgcctctttggagatcatgattttgtgggcacattgcctgtgacatggtgtaagtctgttgatcaattgcctatagatgctggagactctaactatgacccgctattccctgttggatatgggctaaaaatgtttcgaagcgataatgattcaacataactttattatttattgggtacatttgaatctttgtgatgttaaatactctgtatttattggctattggaacttaaaatgaaataatatattgttgtagtatgc

SEQ ID NO: 138808 - DNA, 1928 bp, Zea Mays
gtcaacacaagtacacaccacaaacacccatctcctccgcctctgctcccttctgctcacccgcacgatggcgccggaggcgcgaggtgaggcggcgctggtgtacagagacgcattggcgccagtggaggaaagggtgcgagacctgctgggccgcatgacgctgcgtgagaaggcagcgcagatggcccagatcgagcgcaccgtcgcgacgccgcgagccctcacggagctcggggctggcagcgttctcaacgccgggggaagcacgccctgcgagcaagcctcccccgccgactgggccgccatggtcgacggcttccagcgccttgcgatctcctcccgcctcggcgtccccatcctctacggcactgacgccatccacggacacaacaacgtctacggcgccaccgttttcccccacaacgtcggtctcggcgcctgcagggacggagagctcgcgcgtaggatcggcgaggcgacggcgctcgaggttcgcgccactggcatccactggacctttgcgccgtgcgtcgccgtctgtcgggatcctaggtggggcagatgctacgaaagctacagcgaggacccagagatcgtgcgctcgttgaccaccatcgtcagcggtttgcaggggcagccgccagcagaccatcctcatggttaccccttcctcgcttcgcctagggagaatgtacttgcttgtgctaaacatttcgtaggggatggtggcacggacaagggggtcaatgaggggaacgccatttgctcctatgaggatttggaagcaatccatatgacaccttacccggattgtatagctcaaggggtggcaacagtaatggcgtcctactctaagtggaatggggagccattgcattcaagtcgctacttgttaacagatgttctgaagggcaagttaggctttaagggttttctcatttcagattgggagggcattgacaggatctgtgagccacaaaagcctcgagggtctgattatcgctattgcattgcacaatcagtaaatgcaggaatggacatgattatgatacctcacaggtttgagaaatttttggatgatattgtgttcttggtggaggcgggggagataccaatgtctcggattgatgatgctgttgaacgaattctgagggttaagtttatttctggagtgtttgagcatccattttcagaccaatctctactggacatagttggttgtaaggaacatcggttactagcgcgtgaggctgttcgcaagtctttggtacttctgaaaaatggcaaggatcagaataagccattccttccattggccaaagatgcaaaaagaatactggttgcaggaacacatgctgatgatattggatatcaatgtggtggctggacgatagcatggcatggagacagtggaaaaataactcttggtacgagcatattggaggccatacaagaattagtgggagtgcaaactgaagttgtgtatgagaaatgcccaaccgaagctatgattgaaactggggggttttcctatgcggtggtggttgttggagaggttccatatgccgaatgggacaggagatagaactgaccttagtattccgtttaatggctctgaccttatcatccgtgttgcaagtaaaatccctaccctagtgattgttatatctggaaggccattaattattgagtcacaagttttggaaaagatagaagctctagtcgctgcctggctgcctggaagtgagggcatgggaattaccgattgcctctttggagatcatgattttgtgggcacattgcctgtgacatggtgtaagtctgttgatcaattgcctatagatgctggagactctaactatgacccgctattccctgttggatatgggctaaaaatgtttcgaagcgataatgattcaacataa

SEQ ID NO: 138809 - DNA, 2457 bp, Zea Mays
gcatggcatccccagctggatcgcgcagaagtaaacgccgcatcccaaatccccatcccacctcgtcctcctctccactctctcttctccctccaataattttctcctctctgcttgctccagttccaagcaccaccgaatcagggcgagtgggagcagagggaatcccatgtctccgcccctcgctggagtagatcctcggggagccggcgtggagctgccgcggtagaaagccagctgagcctgcgagcgcctgatccagcccgatcgggatcgatgggtggggaggcgccggagccgcggcggctgacccgcgctctgagcatcggtggcggtggcggcggctgggttcccgatgagatgctgcaactggtgttggggtttgttgaggacccgcgcgaccgggaggccttgtcgctggtgtgtcgccggtggcaccgcatcgacgcgctctcgcggaagcacgtgacggtgcccttctgctacgccgtgtccccggcacgcctgctcgcgcggttcccgcggctcgagtcgctcgcggtgaaggggaagccccgcgcggccatgtacgggctcatacccgacgactggggcgcctacgcccgcccatgggtcaccgagctcgccgcgccattcgagtgcctcaaggcgctccacctgcgacgcatggtcgtcacagacgacgacctcgccgagctcatccgtgccagggggcacatgctgcaggagctgaagctcgacaagtgcaccggcttctccacggatggactccgcctcgtcgcccgctcatgcagctcactgagaactttgtttttggaagaatgtcaaattaatgataaaggcagtgaatggatccgcgatcttgcagtcaactgtcctgttctggcaacattgaatttccacatgactgagcttgaagtgatgccagttgacctagagcttcttgcaaagagctgcaagtcactgatttccttgaagattggcgattgtgatctttcagatttgatagggttcttccaatctgccacatcactggaagaatttgctggagggacatttaatgggcaaggggaactcaccaagtatggggatgttaaatttccatcaagaatatgctccttgggacttactttcatgggtgcaaatgaaatgcctattatatttcctttttctgcgatactaaagaagctggatttgcagtacactttcctcaccaccgaagaccattgccagctcattgcaaaatgcccgaacttactagttctcgcggtgaggaatgtgattggggatagaggattaggagttgttgcagatacgtgcaagaagctccaaaggctcagaattgagcgaggagacgatgaaggaggtgtgcaagaagagcagggaggggtctctcaagtgggcttgacagctatagcggtaggctgtcgtgaactggaatacatagctgcctatgtgtctgatataaccaatggggccttggaatctatcgggacattctgcaaaaaactctatgacttccggcttgttctgctcgatagagaagagaggataacagatttgccactggacaatggtgtccgggctttgttgaggggctgcaccatgcttcggaggtttgctctgtacttgagaccaggagggctctcagatgcaggtctcggctacattggacagtgcagtggaaacattcaatacatgcttctcggtaacgttggggaaaccgatgatggattgatcagtttcgctctgggatgtgtaaacctgcgaaagcttgagctcaggagctgttgcttcagcgagcgagctctggccctcgcaatactaagtatgccttccctgaggtacgtatgggttcagggctacaaagcgtctcaaacaggccgagacctgatgctcatggcgaggcccttctggaacatagagtttacacctcccagttcccagaatgctggtcggttgatagaagatggggaaccttgcgtagatagtcatgctcagatactggcatacggctctcttgctggtaagaggttggactgcccacaatccgtggtcactttgtatcctgcgtgagtgtaaatagactgagggcccgtttggtgcccatggaaccgttgtctggaacaatttctggtaggattgcttgctgatttgtataggctttgatcagctggaaacaaatgaacaaggcctaagctcgtgtctttctctcacgtccttgctttcttagcctcatggtcaacaagaatggtgttgataacacgatatgtgcttattgtattgatctagatggctagctgctacgtactgcaatcagctactagtagttgagatgacctggattctggaataagcccttgctatcttcgcctgtactgctatctaatcctaggaagcatgtatatgtatactggtaaaagtaacgatggaagatgtgagtctgattgcccgccc

SEQ ID NO: 138810 - DNA, 421 bp, Zea Mays
ccacaagtccacaaccctagtcgaagtcagccgcccgccgcccccaagccgcagcccgccgccccaagccgcaggaacgccaccacccaccgccgactgcagcttccggctccggcgtgcgctcagctcaactgctccaagcctccagctctcgcttgccgcccagctaccacccgtcaggccccatcccctcaactgctccaagcctccagcttcctggtgttgtgctacaaggtgatgtcgatggatggtgcagtttgcttgctgtgtgcctctgtgcagtgctcttagactagtgttgtgtctgttcacaagttgcagtttgtagtttactccaagcgaccaagttgtgtaactgaatgaggttggcaaggtgcctagtcggccagccctacctgtttgctgtttggcggtggcttgg

SEQ ID NO: 138811 - DNA, 109 bp, Zea Mays
cgtttatattgttaaactaatgtctcaattacttatcgaatatttcatccatttcaaaataatatttggtttagctcttcttattttttatgtttatattgatgatgat

SEQ ID NO: 138812 - DNA, 641 bp, Zea Mays
cagacattagtttatgtgttgataccgtcatacgccgttgtttcataacaacgcccatcggacagatagagagtgacgacgacactagctcacatatgaagtgcaaaggttttcttccttcttgcatgttggtgtaaagagcaggtaaacctgcttgcgcgatggtacaagcagcagcaacagagcttttttcaaaattcttcgaagaggccgccactaaatggctccatgaataaatgggtgtgaagtcttggattcttggtttgctcacagggattgtattctcctactagccacatgatcaggctgtggagtacggagttcacaaaatctaggagatgaacaaccttggggtaaccctctcactatctcatgccagcagccgcacccacgccctgttccgtctcgcacgctctcgccaacttgtggttgtccatctgccgccaagcacccggccccagcagtcgcactattgcttctgtgaaaattatatggaacaagcagactgggcactcagaaggctatggttttattgagttttcctctcgagctgctgcagaacatactctatgaacttcaatgggcagatgatgccgaatgttgagatgacttttaagctgaactgagcttctgctagcact

SEQ ID NO: 138813 - DNA, 411 bp, Zea Mays
atggatccgaagaagcatagcccacctttggcccatgatggacctgcggcctttctcggcctcggaagccctgcgcttctgcactgggccctcatattgattgatacccgtgctgcggcctctgtgcccgccaccgccggcggcggaggttcctcgcagcaggctgcccatctgacgccagcgtatgcagtccagcatcgtgttcttagtggtgacgtggcggagcagagcggagcgggtcccgagcgctcgtgcttcgggacgacccgcctgttctcgtcggcgtcgtctggagttggagatcacgtcgtcgcagcgccgcgccccgccccgtgggaagacgtcgtctcgctcgccgccacggaaccgcgcagtgcttgtgtctctggcgacgagtactgtactgcctga

SEQ ID NO: 138814 - DNA, 120 bp, Zea Mays
cgcggaacggggaaggtcagaacggcagactactcttaccttcttaataagtagtatagatatatataggatcaaaagttacacaagctctttggcccaaaacctcaaaaaaagcataga

SEQ ID NO: 138815 - DNA, 429 bp, Zea Mays
atatgtacccctctgtggcgtcgcaaccctctttcgtcccttcatctttctctcttcatttctttctgtcggtgagagcagggttcgtggttatctcggttagggttcttgaccaaaaagcgcagtacatgttggccgtcaaactggtgtctactcttcctgggaagcttgccatgctcaagtaaatggttgcaaaggagcttgctacaaaagatacaattcaagagaagaagcgatgacagctttcaatggtcacgacaatgaggacaaacaacaggaagttccagtacttcttaggaacaaagctagtgctattacaattaaagatgtaataatatttgcaggaggtgttgtaatattagttcaagctttaatcattacaattttagtttccaaattgatgtaataatggttacattagctgtttta

SEQ ID NO: 138816 - DNA, 786 bp, Zea Mays
atgcagccgcgttcgcgcgggaagctcctagggttaccgcctcctttcgcgccaatctctgggttcgtggttatctcggttagggttcttgaccaaaaagcgcaggtgtacaaccacttacgtaaatggagacagaggtggatgagggtggcaaaattaagagagttgagtggtgccaattgggatgaagacttatgcatgataagtctggaggatgagcactacaatggccacattaaggcccaccctaaggatgctgagttcttaaacaagcctatagaaaactataaggagatgatgactatatttgggacaggattagcaactgggaagtatgctatgggttcaaatgaagctttaggatctccatgcgaggttgctactagctctgttaagactgattcccttgatgaagacaagagtggtaagtcagttaagactgattcccttggtgaggcaacaaaggatatgaaagaaggtagtagtggtgtaggcaataagaggaagaggggtgtgctcactgatgaggacactctgatgttgtctaaaatgacagatgctgtcaaggatgtggcagctgctattcgtgagaccaaagtggaggtgattaatcctgacctatatgttgcagtcatgtatatgcctggatttagtgaggaagctttaatttgtgctttctctcatctggtggacaacaaggcgcagggggatgcttttgtccacatgactgactcccatcgtgtcctgtggctaaggacatggctagccaagaactacttcctgtag

SEQ ID NO: 138817 - DNA, 908 bp, Zea Mays
ccagttctgtgccaagatccagcaaccagagttctccaaagcgcgaagctccagctccatctccaggcagccgtcaccgtcaccgtcagggaacgcgcgcagcaatggccttctactacggcgtgggcggacagtcgtcggcgtgggcggcgccgggcggcagcaggccatggaccaaggcggaggacaaggtgttcgagggcgcgctggtgatgttcccggagcacctgccgaaccggtgggcgctggtggcgtcccggctgtacgaccgcacgccgcaggaggcctgggaccactaccaggcgctggtgaccgacgtcgacctcatcgagcgcggcatggtggaggccccggactcctgggacgacgacgcggctgccgccggagggggacgctcgggccgcggccgcgggggcggcagcggcagcggagaggagcgccgccgcggggtgccgtggaccgaggacgagcacaggctgtttctggaggggcttgagaagtacgggcgcggcgactggcggaacatctcgcgctggtcggtgaagacgcggacgcccacgcaggtggccagccacgcgcagaagtacttcatccgccaggccagcgccgccagccgcggcgacagcaagcgcaagagcatccacgacatcaccaccccgtgatgcctcctgctcgtggaggacaaagctagcaccgagatccagccctgcctactgctgctacctgcattttatctttacctttgcgagacgggatcaaaaaacaaacagccgtccctgtggttgtagaaatgtaggcaaagctaagctagcctggctggtatctggggtctggtataactgtattaagcgacactacaatgaatattgaataaataagttttgcaagtttaaaaaaaaaatatcaaa

SEQ ID NO: 138818 - DNA, 819 bp, Zea Mays
atggccgagttcgccccagggttccgcttctacccgacggaggaggagctcatctgcttctacctcaggaacaagctcagcggcacgcgccgcgccgacatcgagcgcgtcatccccgtcgccgacgtctgcacccttgatccatgggacctgatctcaggcacgttcattcgacaggcgcaccgcggcgcgtgttccggcaacgaggagccgtggttctacttctgcccgcggcaggagcgcgaggcgcggggcgggcgccccagccggaccacgccgtccggctactggaaggcggcgggcaccccgggcttggtctacgccgccgacggccgccccatcgggaccaagaagaccatggtgttctaccgcggccgcgcgccggcgggggccaagaccaaatggaagctaaacgagtacaaggctttcgaggacgacgacgccaccgccgccgtcgctgctccggcgccgccgagccatgctctccagacgtggagccagtacagcctgtgtcggctctacaccaagtccgggtgcctgcggcagttcgatcgccgccggtccagcaccgccgccgcgacgggtggcggcaacgagaacaagccgccggcgccatctactgcgctgccagacggtgaccaaacgggacagaagaggaaaagggctgcgcccaccgacgacacatcttccagctacgaggacggcgacgaggacgtctccacgcagcagcggctgcggctggcacagagaggggccgatgatgagggagtcaaggacatgaccgactggtggtcagagttcttggacgactgcatttga

SEQ ID NO: 138819 - DNA, 2767 bp, Zea Mays
gtgtaggcccagcgtgtcagacactgaggctgttgcagccgtgattcccgagtcccgacgactcgcgcggtcgcgcccctcgccttctccgctggtcgactggtccggctggtcttccccctcggcatcgcactcgcacctcccaagcgtgcctgaatctcagacttgtccccccactgcctcggccatggctgtgcgagccacggtctcccgcttcccggccacgccggaggcgctggagtcgtgcgccgtccagtggggcgtcgccgtgacgcccttcgccgccgtcgacgagcgcggccagcccccgaccaccggcgccggcggggaccgcatcccacgctgcgagcactgctgggcgtacttgagcagccactgcgatctggagcgctggggctggacctgcgcgctctgcggcacgctcaacggattcgacgacgaggccgagcgacggttccagcgtcccgacgcctgccccgagctcaattcctctttcgttgacctcgagatcgcagtggatgaggcaggggctggaggagacggcgtgcaggcgctgcctgtttatgtggccgcagtggacctcgcatgctctgaagagttccttgaacttatcaagagtgcacttcttgcggccctagaagctcttattccgggctccttatttgggcttatgacattcagccacaagattgggttgtatgatgtccaaggtccgattccacttgtgaaaaatgtttttattcctccggacttggaagaagatggtctgcctgttgcccttgaagatgccatgcccctactttcttttttggctccagttgacacatgcaaggatcgaattgctgctgccctggagacactgcgacctacatcttcatgggagagaggggctgcttctgggcatgaagaggatgctgttttgcttggcggacgtggttttgggacagccatgtctgctttaattgagtacctaagttcaggatatggttctacttttgctttggctcgagtatttgcttttctgtctggtgctcctgattatggagctggtctgctagataccaggagatatggggagcaatatgctagtaaaggggtagacgctaaccttgcattgctccctgaacagatacctttctacagagacctagcagctgttgctgttcagtcaggagtttgcatagacatatttgctgtaactgatgaatacacggatttggcttcactgaagtttttaagtattgaaagtggtggatatctatttctttatgcaaatgcagatgattcaacacttcctcaagacatataccgcttactaagtcgaccctacgcatttggttgtgttctaaggctgagaacatcttcagattttgaaccaggcaattcttatggacatttctttcctgaccctcagtatgaaagtgtgcaacacattatctgctgtgattcatttgccacttatgcatatgactttgagttttcccataacaacggtttctccaggcatacagatcctgctgttgtgcagatcgcttttcagtacagcgtgattgaacctgccaaggagacatcaggcgatggatcacaatcatctgcaagttataagttctctctaaagaggcggctgagaataagaacattgcagtaccgtccagctaggaatatcagtgaaatttatgacagtgtagatccagaggttgtactgcatatccttgttcataaggttattttagaatgcgtggataagggggttagagaaggcaggcatcaagttcatgcttggctatccctccttgcagcccggtataatcaggtcctgagttctgatgtgcgaactccactatcgagcatagacattgacttctcgcagtgcccgcagcttcaaacgatacctcaacttgtttttgcattgttgagaagtcctcttcttcgcttgcatgaagaaggtgtacacccagattacaggatatatctacaatgccttttcagtgcactggagccatcttctctagctaaagctatatatccggttttaatatcgtattcctcgcctgacaagcaagcattcccacgacacactctcagccgtgctgctctaatcatgagcgagagcccaatatttcttcttgacacatttaccaaccttatcgtttactattcctcaactgctgatccttcatttccttttcctccaccccgtgactgtcttttgagaacaacaatcaataaactgaagcaggacagatgtataaccccaaagcttacattcatccatggaggggaagatgattcaacattgtttgagagctatctcattgaagagcaagatgtcgatggatcaggtcttacaactggttcaggttttgtagccttccgtgagagcgttaggaatgttgcaggagagatcatccaggaagaaattggaagctagtttcagctagaagacccttttggtcccgctgcagagcgtataaactcggatgctttttaaccctaattaatatcgtagtagttaacttagatagccaaaatggagaaacaatgtcaaaataatatgaggggccacatgatttgtagttgcttctggcaataactgctttaggcttgattaatcagagaagcctttctggtacactggtaaaagggtcgagtacaccaatacaccgtgtgatcctggctgtctgattttttttggagaactcaaattttggtgtatattaatgctgctgtttattccgattaaattgaggccgttcgaaacctagag

SEQ ID NO: 138820 - DNA, 1316 bp, Zea Mays
cgtgggatcctggtgtcagtaagggttggctgtgctgatccgccccctggacccccaccaagggtcgtcggctcatcgcgcgaatcatacgtcctcctcttgtgatcggcaatcttggcaccaccacggcctttcgctcaaggagccagccgtgtgcctgccgaccagccgtccagcccagaggcgtcgaggccgatgggcagcaagacgacgctgcccctattaataaagccgccatgcgtgtgcccggcactgcacagcatccatcgtccatcgacccacccaaccacctcctccgccccgcgcttcgcctgggtaccggcgtccgccgcgccccgtcccgtccaggaacaggaagagcagtaacccatccacccatccatcggggatcaccaggggagcaagatgtcgactgccaccgccgcaagattgcccgctcccagatccggggcaagctatcactatcagaccgcggctccggcggccaacaccctctccttcgccggccacgcgaggcaggcggcccgcgcgtccgggccacggctgtccagcaggttcgtggcggccgcggcggccgtgctgcacaaggtgaagctggtcggcccggacgggacggagcacgagttcgaggcccccgacgacacctacatcctcgaggcggccgagaccgccggggtggagctgcccttctcctgccgcgccgggtcctgctccacctgcgccgggaggatgtcggccggcgaggtcgaccagtcggaggggtccttcctcgacgacggccagatggccgaggggtacctcctcacctgcatctcctaccccaaggcagactgcgtcatccacacccacaaggaggaggacctgtactagagattgggttgctttatgcatatgcagtggctgctccaaaggtggtggtgcgttcgttgctgttccgtgccaccagcggaaggggggtttcgttgttgagatgggctagttcttgtcatcaatttcggtcgttcgatgagatcatggcatatgagttgtggcaataatgctggcaatatggttttgcaattcaaactgcaaatgtgaccagcaatgtcaaaaactgcacactgtgtctgtgtgcgaacttgtgaaattggcattgagttcaattggctagttggctcgagatttcagttttcatctccatttagaggtcatttgggcctaagttggtgcttagtgtggccggatagaagcccactaaggccttgttcgtttgtgtcggattggtgggtcggaacgatttctagccggattgtttctctaatttatataaactttga

SEQ ID NO: 138821 - DNA, 1756 bp, Zea Mays
gacaacctggctgttcgtgaaacatcaacacggaagaggaaaaggagccgccaaacggagcgcaaccgagccgcaataagcggacaccaaccaaacgaatttcccctccaaaaacgagctctagagccacgcgcacgaattcgccctcgcgcgctgtctcgcagcgcgcctcgtccctccctcctggccgttcggggtccgttcggcggcgggacggaccggatcccgctccatggcggagggcttcgggcggtgggagtcggatctgctgttccccgccgccgagtgcgtgcaggactccgccgatagaatggagggtgtctaccgcttacttttgcatgaaaggaaagttatgcaggatggtacttctgatgcaaagtttcatgctccaatacaatctgagagagatgtgattactgctcttggaactaccaaatggcagctggagcaatttgagagggaagtgaatgctgctgcattctctgacaagtcaaagtcaagagaaaatgcaatcttaaaattcaggcaattcattagagcaattgcagaccagatttctcaggtggaagaaaatttggagagtcttaggctaggttctagcagaactccaaaacatttatactcaagtgaacatgatggtgatgggctggcatccttcctttctggttccagcaaggatgaccatgcatatcattccactggtacagatgaaattgtggagcttaagcttgacaatgttcctttagtaaatggttatcattccacccaagaacatacaacatatgaacacaggaattcagataaagatgtggaaggagcggggaaacgtaaatgttcatgtggagaaggtgcatgtgaaggggatcataacaatagcaatatgtttgttttggatgttgatgattctacaagtaggagatttttttgcaaaaacaaactgagcagacaataccataattttataagaaacctatggtttacaaaacgacgtcgtgatcgtgaaagctttaccaagaggaggaaggatggagaagatatggatagcttgagaaatggaaacatgctaccttctttcaatctacctcaatctggaagggttatgtatttctggcctgaagtcattaagaggagattatgtagatctggttattttacagatcataatcattctcaaatccgtttagtgacagcagtactgattgcacttgctgttctctgcctgctggtatcacatgtgaaatgaccgaatcccgttaatagttttggttcacgttgtgttatatattaccacagtccacgctgtactcatagtgatcacgcttgtgctgtgtcatggattctggaggaccatcattgtttcaaagcatttcaatgttgtgctccaatgtgccatgccctacagatggtagttctggttgcttgcttgtcagtggcatgatctgtcataaaaaatattattcactaatccctgtatttattcagcaccaacacatgatgtaaaagtttttgctcatgcatcatatataactcagaattggcaggtcaacgagagtggaatttctggggtgcggttacctagtgttaatatattgttatgaaagtgaaggtcgaattgaatagaaatgatccattgtattgaacctatagtttgtaactgcccttacctgggatattgtatcaaatacggtttcctgcatggacctggaactctctccaattgctgccatttcgtttgacttatcagattcattgagca

SEQ ID NO: 138822 - DNA, 141 bp, Zea Mays
tttgactattaatattacaataaaacttaaaataaatattgaaggcccattcataaattatactagggtgataagttttagccgagttttttttttgcaatttaaccttttttttaaaaaaatactctgcaaagaacgagc

SEQ ID NO: 138823 - DNA, 797 bp, Zea Mays
gataaattactgggacatgaataggttccttgtcgaacagctatgaggggtagtttcccacttaatggcacttactttcaagtcaatgaggtatttgctgaccacagatctagccacaacccaatccatgtggaaagggagatgctatggaacttgcaaaggcgcatggtctttttcgggacttcagtacccaccatattcaaaggttgtctccctcataaacaattcattgaaattatatttgttctggtaccaactacagttgttttgattatgtaggtctaagaacagaagaaatactaccaatgcttctggaggggatttgtctgtgtgcgaggattcgacatggagactagagcactcaggcctctgtgcctcccattagcacatatagcaaggccgaaggcccgcaagacagcagcaactgagcaagtactctaatcagcaaagatatcagttttatgaacatcatgtttattgtgatatgacatctatagctctcgacctatgcatggaatcatattaatttcctgcctggcgatggccattgtttaggaaatataagccatggatggggtccgagactgttagttatgagacgagaggactaatgaagcatcaggaagcaccaaataattttcacttttttgtttcagatctactgtatgtaaattagcatctagctgttagtccatgtaagatgccattgctatcctttctgagacaaactaccttatcaacatttcatttggttaacatttgttctgagtattgggaagcctgccagaattttgttt

SEQ ID NO: 138824 - DNA, 202 bp, Zea Mays
taattctattagtcttcctgtttgcatgagagtaaagcagttgttacccccaagaaccatatgctacctggtcaagaaagctgagagcgggtggtggccaaggctgcagaaaaaggagggcaaggcacctgtgttcttgaaggctgactaggacaaatgacaggatgaggatgatcaagatgttggatgttagtattttagt

SEQ ID NO: 138825 - DNA, 837 bp, Zea Mays
ccagtattctggaccatagtatattcaatctcagcttacaagattctcatgattatcacacagtgactattcagtgatgaagaaaatcgttcagtcactacatgattgatctgtagtcatcaaagtttttaaaataacctgagaatagtataggcatcttgtaatagtggaacaattaatgctagagaccaaacttccagtatggatgcagagacaaaggaattgatgtgcatgtttattcataagcttacatttcagacacacaaaggtcatgaacggaagcagtctctaggtttcaactccacaatgaatttctgaacgaaacaagtaaactgtggctgtcttacgcaggatttgtctgtgtgcgaggattcgacatggagactagagcaccaaggcctctgtgcccccatttgcacattatagcaaggccgaaggcccgcaagacagcagcaactgagcaagtactctaatcagcaaagatatcagttttatgaacatcatgtttattgtgatatgacatcaatagctctcgacctatgcatggaatcatattacttcctgcctggcgatggccattgtttaggaaatttaagccatggatggggtccgagactgttagttctgagacgagaggactaatgaagcatcaggaagcaccaataattttcacttttttgtttcagatctactgtatgtaaattagcatctagctgttagtccatgtaagatgccattgctatcctttctgagacaaactaccttatcaacatttcatttggttaacatttgttctgagtattgggaagcctgccagaattttgttttcgtacctgt

SEQ ID NO: 138826 - DNA, 3198 bp, Zea Mays
caggggacaggcgcttttctccttggaaaggatctgtagtcgattctgtagtaggagtgttcctcactcagaatgtagctgatcatctttcaagctctgcctatatggcccttgccgcaagttttccttcacggccagtcaacaataattgtaaggatgatggtaccacagaagacaataaacaaaccaccaggatgagtgagctagtaggagagaaaagtgtgtttgaccttttctacaatggtgttagacctgatctagaagtgggatgtgaggaggtatcaatgacttgcaagaagacacacatggaaccaacagacaatactagggatagtgaatttattgaaggtgaaacctattcctttgattacaaatcaacagatgaaagcgtttgcaatcacaaagggataggtatagaacataaagaacaacaattaccagatttctcctcagcagaattaactgtgtctacagaactcgtgcagcagatacaaatccagaagatctcatcctctcaaattttaacttcagaaaccatacaatcaagattatctttgagttctgagatacctagaaattttgtttgtggtggttctgctgcagcttatcagcagctgggaagcaatttcgaccagggaagctcattaacagaaaatgatgccacagccagtgaaattgaatgtcacagactccaaatggctgcaataaatgattatggatttggtaaacctgagattccttctagttcctcaatgccatttttcttggctgttgatcctcaacaactgaaattgagaaatgagacaaatgtttcttcaacatcttccaacattccttcagattctgcatcaccaaacttgaaaaatggcacggatcctcttttgatgccatttaattcctacatggcagattggagcagcgataagataacttacaccactctgaacactccaaaaataagcacagaacttccagtcaagttacaccatgacaaaagtagtagctttgaagcaccaaacctgaaggagcatgaatcagtctttgcaacacatgaaatgacggtagaagcaacaagaaaagaagacgaacacacatcaaaatctagttttacttcctacaatggagtaccagatacagctgcacaagcatcaaagccaaagaaaacaagaaccacaactgcaaagaacacagagaattttgactgggaaaaattacgaaggcaggcttgtagtgaagggcagatgaaacaaagaagttttgaaagaagagactctatagattgggaagcagtacggtgtgcagatgtacgaagaatatctcatgccattcgggagagggggatgaataatgttttagcagagcgaatccagaattttctgaatcgtttggttagagatcatgggagcattgaccttgagtggctaagatatattcccccagactcagcgaaggattacctactaagtatacggggactggggcttaaaagtgttgaatgtgttcgtcttctcacactgcatcatcttgctttccctgttgacaccaatgttggtcgtatatgtgtaagactgggatgggtgcccattcaacctcttcctgaatctctacagctacatctcttggagctatatcctatcttggaaactatacaaaagtatctttggcctcgcctttgtaaactcgatcagcagacactgtatgagctgcattatcagatgattacatttggaaaggtcttttgtaccaaaagacagccaaattgcaatgcatgcccaatgaggagtgagtgcaagcattttgcaagtgcatttgcaagtgcaaggcttgcacttcctgctccccaggaggaaagcttagtgaagttgagcaatccatttgctttccagaatagcagcatgcatgctatgaattcgactcacctacctcgccttgaggggagtatccattcaagggagtttcttcctaagaattcagagccaataatcgaggagcctgcaagtccaagagaggaaagacctccagaaaccatggaaaatgatattgaagatttttatgaagatggtgaaatcccaacaataaagcttaacatggaagcttttgcacaaaacttggagaattgcattaaagaaagcaataacgaactccagtctgatgatattgcaaaagcattggttgctattagcactgaagcagcttcgattcctgtaccgaaactaaagaatgtgcttaggcttcgaacagaacactatgtgtatgagcttccagatgcacatccacttttacaacagctaggacttgaccaacgggaacatgatgatcctaccccatacttattggccatatggacaccagatggaataaaggaaataactaagacaccaaaaccatgctgtgaccctcaaatgggaggcgatttatgcaataatgaaatgtgccacaattgtactgcagagaaagaaaaccaatctagatatgtcagaggcacaattctggttccttgtcgaacagctatgaggggtagtttcccacttaatggcacttactttcaagtcaatgaggtatttgctgaccacagatctagccacaacccaatccatgtggaaagggagatgctatggaacttgcaaaggcgcatggtctttttcgggacttcagtacccaccatattcaaaggtctaagaacagaagaaatacaacaatgcttctggaggggatttgtctgtgtgcgaggattcgacatggagactagagcaccaaggcctctgtgcccccatttgcacattatagcaaggccgaaggcccgcaagacagcagcaactgagcaagtactctaatcagcaaagatatcagttttatgaacatcatgtttattgtgatatgacatcaatagctctcgacctatgcatggaatcatattacttcctgcctggcgatggccattgtttaggaaatttaagccatggatggggtccgagactgttagttctgagacgagaggactaatgaagcatcaggaagcaccaataattttcacttttttgtttcagatctactgtatgtaaattagcatctagctgttagtccatgtaagatgccattgctatcctttctgagacaaactaccttatcaacatttcatttggttaacatttgttctgagtattgggaagcctgccagaattttgttttcgtacctgt

SEQ ID NO: 138827 - DNA, 3067 bp, Zea Mays
caggggacaggcgcttttctccttggaaaggatctgtagtcgattctgtagtaggagtgttcctcactcagaatgtagctgatcatctttcaagctctgcctatatggcccttgccgcaagttttccttcacggccagtcaacaataattgtaaggatgatggtaccacagaagacaataaacaaaccaccaggatgagtgagctagtaggagagaaaagtgtgtttgaccttttctacaatggtgttagacctgatctagaagtgggatgtgaggaggtatcaatgacttgcaagaagacacacatggaaccaacagacaatactagggatagtgaatttattgaaggtgaaacctattcctttgattacaaatcaacagatgaaagcgtttgcaatcacaaagggataggtatagaacataaagaacaacaattaccagatttctcctcagcagaattaactgtgtctacagaactcgtgcagcagatacaaatccagaagatctcatcctctcaaattttaacttcagaaaccatacaatcaagattatctttgagttctgagatacctagaaattttgtttgtggtggttctgctgcagcttatcagcagctgggaagcaatttcgaccagggaagctcattaacagaaaatgatgccacagccagtgaaattgaatgtcacagactccaaatggctgcaataaatgattatggatttggtaaacctgagattccttctagttcctcaatgccatttttcttggctgttgatcctcaacaactgaaattgagaaatgagacaaatgtttcttcaacatcttccaacattccttcagattctgcatcaccaaacttgaaaaatggcacggatcctcttttgatgccatttaattcctacatggcagattggagcagcgataagataacttacaccactctgaacactccaaaaataagcacagaacttccagtcaagttacaccatgacaaaagtagtagctttgaagcaccaaacctgaaggagcatgaatcagtctttgcaacacatgaaatgacggtagaagcaacaagaaaagaagacgaacacacatcaaaatctagttttacttcctacaatggagtaccagatacagctgcacaagcatcaaagccaaagaaaacaagaaccacaactgcaaagaacacagagaattttgactgggaaaaattacgaaggcaggcttgtagtgaagggcagatgaaacaaagaagttttgaaagaagagactctatagattgggaagcagtacggtgtgcagatgtacgaagaatatctcatgccattcgggagagggggatgaataatgttttagcagagcgaatccagaattttctgaatcgtttggttagagatcatgggagcattgaccttgagtggctaagatatattcccccagactcagcgaaggattacctactaagtatacggggactggggcttaaaagtgttgaatgtgttcgtcttctcacactgcatcatcttgctttccctgttgacaccaatgttggtcgtatatgtgtaagactgggatgggtgcccattcaacctcttcctgaatctctacagctacatctcttggagctatatcctatcttggaaactatacaaaagtatctttggcctcgcctttgtaaactcgatcagcagacactgtatgagctgcattatcagatgattacatttggaaaggtcttttgtaccaaaagacagccaaattgcaatgcatgctatgaattcgactcacctacctcgccttgaggggagtatccattcaagggagtttcttcctaagaattcagagccaataatcgaggagcctgcaagtccaagagaggaaagacctccagaaaccatggaaaatgatattgaagatttttatgaagatggtgaaatcccaacaataaagcttaacatggaagcttttgcacaaaacttggagaattgcattaaagaaagcaataacgaactccagtctgatgatattgcaaaagcattggttgctattagcactgaagcagcttcgattcctgtaccgaaactaaagaatgtgcttaggcttcgaacagaacactatgtgtatgagcttccagatgcacatccacttttacaacagctaggacttgaccaacgggaacatgatgatcctaccccatacttattggccatatggacaccagatggaataaaggaaataactaagacaccaaaaccatgctgtgaccctcaaatgggaggcgatttatgcaataatgaaatgtgccacaattgtactgcagagaaagaaaaccaatctagatatgtcagaggcacaattctggttccttgtcgaacagctatgaggggtagtttcccacttaatggcacttactttcaagtcaatgaggtatttgctgaccacagatctagccacaacccaatccatgtggaaagggagatgctatggaacttgcaaaggcgcatggtctttttcgggacttcagtacccaccatattcaaaggtctaagaacagaagaaatacaacaatgcttctggaggggatttgtctgtgtgcgaggattcgacatggagactagagcaccaaggcctctgtgcccccatttgcacattatagcaaggccgaaggcccgcaagacagcagcaactgagcaagtactctaatcagcaaagatatcagttttatgaacatcatgtttattgtgatatgacatcaatagctctcgacctatgcatggaatcatattacttcctgcctggcgatggccattgtttaggaaatttaagccatggatggggtccgagactgttagttctgagacgagaggactaatgaagcatcaggaagcaccaataattttcacttttttgtttcagatctactgtatgtaaattagcatctagctgttagtccatgtaagatgccattgctatcctttctgagacaaactaccttatcaacatttcatttggttaacatttgttctgagtattgggaagcctgccagaattttgttttcgtacctgt

SEQ ID NO: 138828 - DNA, 1494 bp, Zea Mays
caggggacaggcgcttttctccttggaaaggatctgtagtcgattctgtagtaggagtgttcctcactcagaatgtagctgatcatctttcaagctctgcctatatggcccttgccgcaagttttccttcacggccagtcaacaataattgtaaggatgatggtaccacagaagacaataaacaaaccaccaggatgagtgagctagtaggagagaaaagtgtgtttgaccttttctacaatggtgttagacctgatctagaagtgggatgtgaggaggtatcaatgacttgcaagaagacacacatggaaccaacagacaatactagggatagtgaatttattgaaggtgaaacctattcctttgattacaaatcaacagatgaaagcgtttgcaatcacaaagggataggtatagaacataaagaacaacaattaccagatttctcctcagcagaattaactgtgtctacagaactcgtgcagcagatacaaatccagaagatctcatcctctcaaattttaacttcagaaaccatacaatcaagattatctttgagttctgagatacctagaaattttgtttgtggtggttctgctgcagcttatcagcagctgggaagcaatttcgaccagggaagctcattaacagaaaatgatgccacagccagtgaaattgaatgtcacagactccaaatggctgcaataaatgattatggatttggtaaacctgagattccttctagttcctcaatgccatttttcttggctgttgatcctcaacaactgaaattgagaaatgagacaaatgtttcttcaacatcttccaacattccttcagattctgcatcaccaaacttgaaaaatggcacggatcctcttttgatgccatttaattcctacatggcagattggagcagcgataagataacttacaccactctgaacactccaaaaataagcacagaacttccagtcaagttacaccatgacaaaagtagtagctttgaagcaccaaacctgaaggagcatgaatcagtctttgcaacacatgaaatgacggtagaagcaacaagaaaagaagacgaacacacatcaaaatctagttttacttcctacaatggagtaccagatacagctgcacaagcatcaaagccaaagaaaacaagaaccacaactgcaaagaacacagagaattttgactgggaaaaattacgaaggcaggcttgtagtgaagggcagatgaaacaaagaagttttgaaagaagagactctatagattgggaagcagtacggtgtgcagatgtacgaagaatatctcatgccattcgggagagggggatgaataatgttttagcagagcgaatccaggtaatagtccaatagttactaggattatatggtgatttatatgagccacattaaaaagaagatactgtgtaggtttggagcaagtgcagaataatatttttatctgattgacattttaaccccc

SEQ ID NO: 138829 - DNA, 2373 bp, Zea Mays
tgttcagtaacatgaatccagcttgagtaccgcaagtttggttatcagatgcaaacagtttacaaactttgtatcaagtgcttttggtgtgatttttcccaggggttttggggatatttgagcacaattcgaaatgttgtggttatttatccgtattctgatgatgttcttcctgcaggccctggaagaagcaaggattcaccctcaagctcgaaactgaacgcaactcccgaagacccggtgaagccatgtctgcggggagaggcgatccaaacacccctgccaacaggcctctgttcctgagtgctggggtgcccaacttaggctgtcacaatgttgcagctccagctgcagcaggcaacagcggctcgatcgcctcgcaagtcttattctccccatgctccacgtctgtcctgaatactattcaggaggttcctgctccacaatctgctctgttgagtccgataaaccgtgcaactgaacaaggtgatgtgccctgcatccagccatcctggaatatgcctgggggttgcacgcaggtgcctattaatatcatagtgttccatagggaactcactagaaggggttcgaggccgcagttgtcgccgtcggccactgccttacctgatgtttcagagggagcttccattcggcttgctgggagtaatttcttgtcacatggaagaacacctagcatcgttgcaggtgatatgacaacgaattcttcacagctagccactgcagataaatacaattcagagcatcggatgaattgtttacatgatgaagcatccaagactgaaaatggaaaaggaagtacccaacttccacaattagcaacagcaattttccgtgacagctacaatgatttggaatcagtggttcctgcagctacctgggaaacacgagtgcaacattctcaagaatcaaccacctgtcttgcagaaagtaccactgatgacaacattcatatgtaccaatctatgcaaaaaaggctcaagacacaaatcaacaagagtgaacacacaccattgtcagcaccaactgtacccaaggagaaaacactgactcaaattgagacgcagctagcaagtgccgagaaaaccgaaatgttcaggaatgaggaaaccccagcgctgaaaatgaaggctcggaagaaaaaacacagaccaaaggtaatcagagagaataagccagccaaagtgcagaaacctgattcaacaccagatggaaaatctccgaaccaaaaggtcaagagaagttatgtccggaagaaaagaaacctcagctctctggagaattgctctggtcctgttagcgatcaatcaatctctggagcaacaggagttgcagctagaagcagaacatcatcagttcgacgaagtctgcaatttgaatccaaagaacaaggattgcagggcggccattcgtcaatggccaacatacaccatcacaactatgagaaacctggccatgctcaaagttctttctactcagagtcagaagtgcagactgggcgtgtgatgcaagaaggtatggagaattcaccaggagaattagctttcgacatgagtcgcagactgaacaaatttttagatgagtacatacatttgccagatatgctaaaacctacacaagaagtttcggctgcaacttctgcatcatttagtacggaactggcaagggaagaagataatgtgggaagaacttgcaaacctgatggcaaaagtaagtgcagtttgtttgctgatgaaagggtggtaaaccccacaatagaagggaacaaaaaggacttggaattaaactattctgatgctgatggtcttgtttcctcagctaggtctttacctcaaatggatcccacaagaagtcagatgggtaaggtgtcggaagtggaaaaccccacacaccatagcaatggttcgctacctggcacacgggactctgttgtcttgagggctgcagctgagatgttcgcatttttccaagcgggtgcaataaaaaagaagcgatctgcccgactccgcagaaattcccccttttatactatggatcttaagaataatactctacaagcatcaacaagactgccacagccatgcatggatgcgctgcatagaagttcttgcattaagtttttgaccaaaaaacgttcagaaaaggcaagaccgcactgttccagtgtaattcaaccaaatgatgagctgaaggacaggctttcagctggaagcactttttatggcgcaactaatggatgcaaaatatcagaagagagttctccaaacttttcatctcagaccctggacaataaaagaatcaacgttgatactcattgtgaagtagcagaagggagatcaaccaacacatcaacag

SEQ ID NO: 138830 - DNA, 338 bp, Zea Mays
taccggagtatggcagcgcaggctcggtccacaggatggcggcactgcggtggaggaggaatcacgtcgagcgattcgtcgtcagcacgaactccacactcacgacgattgccacgaacgggttccagacatgtcggcgaaccaccagcgtgggttcttactgttaatgaggcactgtcggtgtggttcgactgcggcggcggtgggacgattgggcggcggtgttcgactacggctgcgctggatctaggttatggaggtcaaggcagccgagcagggcactgctttataccgggtcgaccacccccctccacttcccccgcgagccgagctacacg

SEQ ID NO: 138831 - DNA, 1835 bp, Zea Mays
ggaccgagacctcccggagtcacgaaacccgaaacgccctcctgcccacgcgcgagatcctacggcagacgaccgacgagcccacccccgccccacgctgattgtctgtctcactgtgccgcgctcgcactcggcacggcagtcgtctcgtcgccatctccccaccacctcgtcaccgcagaccatgcccccacggggcccccgcgcggccgtggcctaccggtgaacgccacccagacacacgggaccgcgcagccggcgagcacggcatcgcacatcacgggcgcggccaagaggcgggagccgtgcgctgcgaagtgcggaagcgcctgttaattgctctccctccagtgccgcgcagtgcgcacagggttttaggaagggggcgacaccggtatcgccattcgccagccatggaatccgcaacggcggccgtccgcagcgcgtcgctagcccgggcccggcccgcgccgctcgtccacgggcgcgcgcgcggggcgggtcgcgtcgtgggcgctggcctcgccgcgcgcgcccggcggagggcgctcgtcgccgtagcctcccaccaggagcaccacgagccgctcccgccgcgcgcgcaggagggcggcgccgtggctgtggcgacgcaggctgacgaggcggaggtccatgcgattgacgctccggcggctgctgctgaaacctcgtcttcccaactggctgctggcaagacagtgcgtgttcgatttgtgctgaaaaggcagtgcacgttcgggcagagcgtctgccttgtcggcgacgaccctgcgctcggcctctgggatctgtcgaacgcgtttcctttgaagtgggcggaaagccacgactggaccttagagaaagatttgccggccaacaagctgattgagttcaagttcttgctccaagattccacaggaaagttgcattggcagggtgggccaaacagaagctttcagacaggtgaaaccgccgcaaacacattggttgtgtttgaagattggggtgatgtgaagaatcagaaaatagtagaagaggggggagtggcgtctgctgggatagaacaaactgttgtttcaaatgacagcgaaagcagaaagggtactgttttagaagctgagctccaagtagatgataatctggtccaagaagatgaattcgttgttgccaaggaggacaagaagccagcggttgccacagatgcttctgttcaagtagattgggtgaagacagacgaagctaaccctcaaaagtccaagttgcatgaggaaatggaagttctagacgaacttcttggaaaagaaaacatggagaacagcggtatttcgagcactgatgagaattatgctgaaaaaactggagatgatatcttgtttgaggatggcgttctgattgagaatgggttagccactgcttatgaacatgatttgctttggggttggaaggccctgcagcagctgctgatgagcctgggtttcaaaatggatacaacatgaaaaaggcataatctattgccatatatctaatgttcgtatgtcgcaattcggatgcaatggtgttgctttccaggataattttgttttgacccctgaggagactgccttgtggatgttcacggaaaaggctttgcactctagaaagctgctggcattgtggtattgtatgtatataatatgttcgttttccaggcgtgctgtatcttagcaggaatgagaacctgttattataaataatcaaccatcagttttactatcatctgtgctcgaaacttatcctatctcatctccgtgaagatgttatggtctgcagacgctgcatgggaactgtatata

SEQ ID NO: 138832 - DNA, 1079 bp, Zea Mays
ggaccgagacctcccggagtcacgaaacccgaaacgccctcctgcccacgcgcgagatcctacggcagacgaccgacgagcccacccccgccccacgctgattgtctgtctcactgtgccgcgctcgcactcggcacggcagtcgtctcgtcgccatctccccaccacctcgtcaccgcagaccatgcccccacggggcccccgcgcggccgtggcctaccggtgaacgccacccagacacacgggaccgcgcagccggcgagcacggcatcgcacatcacgggcgcggccaagaggcgggagccgtgcgctgcgaagtgcggaagcgcctgttaattgctctccctccagtgccgcgcagtgcgcacagggttttaggaagggggcgacaccggtatcgccattcgccagccatggaatccgcaacggcggccgtccgcagcgcgtcgctagcccgggcccggcccgcgccgctcgtccacgggcgcgcgcgcggggcgggtcgcgtcgtgggcgctggcctcgccgcgcgcgcccggcggagggcgctcgtcgccgtagcctcccaccaggagcaccacgagccgctcccgccgcgcgcgcaggagggcggcgccgtggctgtggcgacgcaggctgacgaggcggaggtccatgcgattgacgctccggcggctgctgctgaaacctcgtcttcccaactggctgctggcaagacagtgcgtgttcgatttgtgctgaaaaggcagtgcacgttcgggcagagcgtctgccttgtcggcgacgaccctgcgctcggcctctgggatctgtcgaacgcgtttcctttgaagtgggcggaaagccacgactggaccttagagaaagtgagcctttgttttgtgcgcatgcgcattgtgtgctatgatctgcgtgcttctgaagtgacgacgtcaccctttctgtctatcctgttttgaccaggatttgccggccaacaagctgattgagttcaagttcttgctccaagattccacaggaaagttgcattggcagggtgggccaaacagaagctttcagacaggtgaaaccgccgcaaa

SEQ ID NO: 138833 - DNA, 846 bp, Zea Mays
atgcagaggtatcgtatctgccagagacattttactctgcttaccattgcctctggtgcagccaatgaagccactggtgttttcggatcaaatgagactggtctgggaagatcaagaaccaaggcctcggctaaagttgttctccctgctaagtcaacaaatagttttgatcataaagatagtactgggttaagctcccttaaaggtgctcttctcggcctcgctagttatgattcagatgatgacgacgatgctgacactgacagcaaggataagatgccaatatcaaatttatcttctaaagataatgctggtgatataaatactgaaggtgataaaagcactcttggtaaaaggaatgggaatcacaatgaacagaattcttcacttggaagtgctccatcaggggaagatcttaaatctaataatcaaaactttcaaaggagtgcgaatgcagaacctgaacaaatgcatattcgtgatacagagaatggggagttccgtttcaaggccaaaacttgtactgagccaatgggtgcatttgacagaatggatgagaaggcaaatacgtatgcagagcacaatgatttggaaagccgtcacagacattcagaaaagagcagcacagaggactttgttaatgaggtgaaggctgatcatacaaaagaactcgaatattctagagcagaaaaatataataacgatgacaaatacagcatgtatggaaatattgacaaaaggggtagctgcaaggagggaaaaggttctggtagggctgcaaagcatgaatctgatacaagggagccacattacagaggtaactctaagcttgatggtgcaaagtga

SEQ ID NO: 138834 - DNA, 237 bp, Zea Mays
atgagggccgccgccgcgtccgtggcgtccggagcggcagctcttagacggggcacggcagcggcacgccgaggcagagtctgcgcgcgcgtcgagacctggcgagcggaggacggagcaagacgacggtggctgctagggtgcgtgcctggtagcgagaatagagagaaggagaaggatagcggatgtagagacgacgtgagtatcaatggtttaatcatagacgttaccttgtaa

SEQ ID NO: 138835 - DNA, 1883 bp, Zea Mays
aaaaaaaaaaaaggctccggttccactgcttctatccctcctttactcgcaggccaatttggtgtcgaagctactcaagcagatggcgaaagcctggaaggccgagagcgggtatcggtagtccatggtgaacatgtccttggccaccttaccgaactggaggatgaccttgtcctggtcctgcggagccggctcagcgggggcctgagcctgcaggcttggcgccgccgcgatcagctggaagttcttcaccgaggcgatggtcacgcggccgcggaagttgaggcaccagcactgcagctgctcgtgccatctcggggccttgttgcggagcacgagcggcctctccctatcctgccccccatctccaccgcctccgtcgacaatgtcggagaaccgggcgctgctgaagtcgcggaagctgctgctgctgccgccgccgaagtccacggaccggtccatgatggatgctgacgacttggagaaggaggtggtgccggtgccggtgccggtgcggcggaacgacgaatcctcctcctcctcctcctgctcctcctccagcagcgcccggggcaggatccgctcgggctgtccggggaccgtgccgcccggctccaccgcggacgccggtatggagcgcatgacgcagtgcatccgcctggggcctctcgtgcccagcacgttcagctcgtacgtcacctgggctatgctgtagctgccaccaccggcaccgcccggggccggcaccttcggggagaccttcctggagtcgaatcgccggcttgcccgccgcccagcagcacgagggggagggggtgcagccccgctgtatctgtatgggggcggctgcgtgtctgagaccacgaacttcgtgcccaggaagtttgacctgggagtggccggaatcgtctcaattaatagccgacgtacgtacgtagtcaaatgaacccgatcgcttgttgcattgcgtttcgattctgttacctcagctttccgatgtacgtgctgctagatctcgatatgttgtcggcgtccatcgagatgatatactgcgtgcaggttgttctgcggctccttttagctgataagaggaacttgccgttctccatgagcacagctgataagagggagagcagagtcaacaattgtaggaattcagtaaaatatctactcatacaagcaaaagaaatacacagcataccagtactcaggcacaagtagagacgatacgtggacttggatttatcgcgctttatgaaacactgaatcatcccgtctcgaggcccaggctgtgaaggcaaacaatactgtcaaatgttagtaatactacccaaaaaaaacattcaggtaattaggccaaaggactaagttttacctgcttgagagagaccgggaaggtaagcttcccgcagacctccgggctgagcacgatctcccggcacatctccctccacgcgcggcagacggcggcgcaggacacgacgtgcttgcggttcggccaggcgctctcgctggcctccagcctccggaccacgtcgcggaggagctcgggagggaggctggcccagcggctctcgtcctgctggaccacgacacgcgtgtcccggagctcgtgcaccgtgctctgagacctccccctgcgatgttgcgcggcggtgcgtccggagaggccgccggcggcggctgcagcagtcacctcgaagttgcgcctcgacaggctgccgatgctgtctcggacgtcgcggacgatgctgcggaacgacatctttcttcgccaactagctagaacaggcgcaggaaacttggggcttcagcctgccaagtagtacgtatgtaacagtggaggtcctccgacagcctccgtggttgctccactgatagag

SEQ ID NO: 138836 - DNA, 398 bp, Zea Mays
cttattgctttttttactttaatttggtattttagaaacattaaatccacacaagttaaattttaggatatagagtttgaatttaattgattaaatatttgaatacaaatatggattcgaacattcgttttgtattcgtatgcgagaatatttagattcatattcaaatcggattaaaatatggtaaattataacattcgaattcgtatccttacgtattcgatccgttcccacccctactccgcacccccgtcaggccgtgtcaatgtcccacctggtaaaaaagcagccaatgccccccacgttccgtggttcaatcacagcatcggccatcattcgccgcaacgccggaggagaatccaatccttggttccgtcgcatcgcacttgccagtggcg

SEQ ID NO: 138837 - DNA, 1942 bp, Zea Mays
cttccattccaagctctcagaagtcgcagtcgcttcgcttctctctcgttcgctcggttcccctcgtctcgctctcgcccgtcgcccctcccgggacaagaaagcaacggaacatcgcggaaagcgagagccggcctgacctgtcctcactcgacctgcgctagccgactgtctgaagttttgcccccccttttctccttcccttttgggccgtgggccggccgcgcgccccggcgcatggcgtcgtcgcgggtgatggcgtcctcgtccccgccgcagcacgccggcgccggctcgtcctcggacctagcgcgattcaggagcagcggcggcatcggatccatgaacatggacaacattatgcgtgaaatctacggccccgaggccgtcaacgccaccgtcaacggccgggtggagccctccccggcggccccggaggctgctgcccggcggacgtcggaggaggtgtggaaggagatctccgccgccggggggctctccgctcccgtcctccctccccctcccgccgccagcaccggcgccggggccagaggcggcggcggcggcgcctcggagatgacgctggaggatttcctcgccagggattcctgcgccatggcggcggtgatggagggggacatggcgctagggttccctaactgtgaaggagacgcggcagggagcgtggcgggggaagcaggcggcgggaggggaagcaggaagcgggctcttctggatcccgcggaccgtgccgtcatgcagcggcagaagcgcatgatcaagaaccgagagtccgcagcgaggtctagggacaggaaacaggcctatatcgcggagctggaatcgcaggttatgcagctggaggagtatcaagcggaactgttaacggagcaggaggaccgacgccaaaagagacttaaggaggtaaacattgttttcaatataattgcttgaaatcatgtttagctttggtatgcttttggcagtcagattaacatgtgtttcagaacctgaacttgtattatgcttctgtatgatttcagtgagaaacaccctttctgtaatgtcaatttctttctttttggcaatataattagctcctttttggggagaaatttaattagctcatttgcttgcaatgcctggaaggaaactttttttttcatctttgattgtagtctgaattctgaagagtgcatgcctactagttatgttttcatctgttgctgtattaataaattctgccactagcttatctgttactgataattatctcgcagcattataccgcatgccaatcttaagaatcgtaataacattatttgtatcatcttatggtcttaccctctatcgatcaggaggagggtgttgttctacagtacataatgaaaaatagtttccaattattttagcatagcaattaaaggttcaacactgattagacatggtgattttctccatgtctgcactatcacgattttctcaaatctattgccatggttagttgagtactctgcaaattcaaacatgcaacagttgcttttttttgtcagtcgttaaagaagttaacctgtttgtgcagctagttgaaagggtagttccagtcatcaggaaaaaatcaccacaagatcttagaagaaacaactccatggaatggtaaaaatgacactgagccctgatgttcttctcttagaatttacagggtttctttttcttttagatttctgttctcctagttttctttggcagctatttagattagtggaaaacatttaggtgattgtgcgtgataaaaaagtcacgccattcagaattgatctgttgtcagctgattgtttccttgtcaatgtggccgagtgttgtataaacaagaacaataaggtttgcttgaagggtggaccaaagtatcctaattacaaaggcatctatttgacatatccca

SEQ ID NO: 138838 - DNA, 1284 bp, Zea Mays
cttccattccaagctctcagaagtcgcagtcgcttcgcttctctctcgttcgctcggttcccctcgtctcgctctcgcccgtcgcccctcccgggacaagaaagcaacggaacatcgcggaaagcgagagccggcctgacctgtcctcactcgacctgcgctagccgactgtctgaagttttgcccccccttttctccttcccttttgggccgtgggccggccgcgcgccccggcgcatggcgtcgtcgcgggtgatggcgtcctcgtccccgccgcagcacgccggcgccggctcgtcctcggacctagcgcgattcaggagcagcggcggcatcggatccatgaacatggacaacattatgcgtgaaatctacggccccgaggccgtcaacgccaccgtcaacggccgggtggagccctccccggcggccccggaggctgctgcccggcggacgtcggaggaggtgtggaaggagatctccgccgccggggggctctccgctcccgtcctccctccccctcccgccgccagcaccggcgccggggccagaggcggcggcggcggcgcctcggagatgacgctggaggatttcctcgccagggattcctgcgccatggcggcggtgatggagggggacatggcgctagggttccctaactgtgaaggagacgcggcagggagcgtggcgggggaagcaggcggcgggaggggaagcaggaagcgggctcttctggatcccgcggaccgtgccgtcatgcagcggcagaagcgcatgatcaagaaccgagagtccgcagcgaggtctagggacaggaaacaggcctatatcgcggagctggaatcgcaggttatgcagctggaggagtatcaagcggaactgttaacggagcaggaggaccgacgccaaaagagacttaaggagctagttgaaagggtagttccagtcatcaggaaaaaatcaccacaagatcttagaagaaacaactccatggaatggtaaaaatgacactgagccctgatgttcttctcttagaatttacagggtttctttttcttttagatttctgttctcctagttttctttggcagctatttagattagtggaaaacatttaggtgattgtgcgtgataaaaaagtcacgccattcagaattgatctgttgtcagctgattgtttccttgtcaatgtggccgagtgttgtataaacaagaacaataaggtttgcttgaagggtggaccaaagtatcctaattacaaaggcatctatttgacatatccca

SEQ ID NO: 138839 - DNA, 1438 bp, Zea Mays
cagaaatcttccattccaagctctcagaagtcgcagtcgcttcgcttctctctcgttcgctcggttcccctcgtctcgctctcgcccgtcgcccctcccgggacaagaaagcaacggaacatcgcggaaagcgagagccggcctgacctgtcctcactcgacctgcgctagccgactgtctgaagttttgcccccccttttctccttcccttttgggccgtgggccggccgcgcgccccggcgcatggcgtcgtcgcgggtgatggcgtcctcgtccccgccgcagcacgccggcgccggctcgtcctcggacctagcgcgattcaggagcagcggcggcatcggatccatgaacatggacaacattatgcgtgaaatctacggccccgaggccgtcaacgccaccgtcaacggccgggtggagccctccccggcggccccggaggctgctgcccggcggacgtcggaggaggtgtggaaggagatctccgccgccggggggctctccgctcccgtcctccctccccctcccgccgccagcaccggcgccggggccagaggcggcggcggcggcgcctcggagatgacgctggaggatttcctcgccagggattcctgcgccatggcggcggtgatggagggggacatggcgctagggttccctaactgtgaaggagacgcggcagggagcgtggcgggggaagcaggcggcgggaggggaagcaggaagcgggctcttctggatcccgcggaccgtgccgtcatgcagcggcagaagcgcatgatcaagaaccgagagtccgcagcgaggtctagggacaggaaacaggtagtaaggggggctaaaaattgaattatctcggtggcgcgcagaatttgattgactcttgcgtgattttgaactgttctctgtgcgtacttggttttggttacttgagcatctgaatttgatgctttcgtttggtcccatgtataggcctatatcgcggagctggaatcgcaggttatgcagctggaggagtatcaagcggaactgttaacggagcaggaggaccgacgccaaaagagacttaaggagctagttgaaagggtagttccagtcatcaggaaaaaatcaccacaagatcttagaagaaacaactccatggaatggtaaaaatgacactgagccctgatgttcttctcttagaatttacagggtttctttttcttttagatttctgttctcctagttttctttggcagctatttagattagtggaaaacatttaggtgattgtgcgtgataaaaaagtcacgccattcagaattgatctgttgtcagctgattgtttccttgtcaatgtggccgagtgttgtataaacaagaacaataaggtttgcttgaagggtggaccaaagtatcctaattacaaaggcatctatttgacatatccca

SEQ ID NO: 138840 - DNA, 1349 bp, Zea Mays
atgcatggcgcgcgcggaagccaacgcaggggtcaaaagcgcgacgccgccgacgcgcgctatatatccgtcgcattgcaacctaacgctacgtcgtgtgcgcgagtagtagtgctgtgctgtgtgcctgtgtggctgtgtgctcatctcgatctacatatcgtgtccacgcacgcaggaggagagcgggcggtccacgacgacgtgcagcgcgcggcggccatggagggccactactcgcccacggccgcccccgaggtgagcggcgagcggcggttccgcggcgtgcggcagcggccgtggggcaagtgggcggctgagatccgggacccgcacaaagcggcccgcgtctggctcggcacgttcgagaccgccgaggccgcggcgcgtgcctacgacgaggccgcgctccgcttccgcggcagccgcgccaagcttaacttccccgaggacgcgcgcctcaccacgccgtcgtccgccgcggccacggccgccaccgcggcggcgggatccacgaggacgatggccgtggcctccacgggagggtacccggccagcgccgcctctgctgactacctgcagtaccagatgtttctgcagggtccgcagggagccaccagcggcagtcatggaggggggtatcctctgtactacgactatggcggccacagcggggttggcgatggttccgtgagcagttcttcgggctcctactcttttccggcctccacggttaccgtggcttctgtgccctcctctgctccgagctacgacgaggcagcgcagtggacaagctggccggagagtagtgctagtgcgtggagctatccggcgaccacgggttcttggtctgcttcaagccagtatccaccgtcaactcgtccacctcagtagtccatgctcaatgttttatttcataacacgttcgtggcctccctaagaagacatatagattgatgattttgttcaagatgcatgcttccgtgcaagatccaatagaaggttgcaatattgtgtttcttcttcgcttggtggtgttgaatcctgtatttgatcatgggataatgattttggttgcaacttcatcgaagacgcgcgtgataaataataatatttcgttaagaagtacttaatttctcttaatgaacactaccgaaaacgagcgctttgtcgagtgcccgaagcactcggcaaagccttaaaaacactcggcaaagaaggctcgataaacagtgcatcggcaaagccttctttgtcgagtactttttctcgcgcactcggcaaagaaaagcagccattacggcgacggggtgacggagacggtgtctttaccgagtgtcacggatgac

SEQ ID NO: 138841 - DNA, 1903 bp, Zea Mays
aaaaagaaaagcttttcattttacacctcacctccccgtcccaccacgtacaaaggcgacgcgagcagcgtttgcttccctttccctgctgtgctcggcctcgccgcttcctctgccctggctcaacgattcctccgcttttcctttttcaaaatcgccctttcctcgtgcgcgtgtcgactccttcctgctcgccgccgggtctgggctgggtgacgctgcctcggatgaggccgcgctgaccggagccgtagccggaccacccgcccacccatggcgcgcccgcagcgcgtgtatgaggcttggaaagggaacaataaattcttctttggtgggaggctcatattcggacctgacgccaagtcactgatcctgtctgtttcgctcattgtggccccggtattggtcttctgcggattcgttgctcggcatcttcgccaccacttcccggcttacaatgctggatatgcgattcctgcggtagctgtagtgtttatgatttatgtgctagtcctgctcttgattacatcagcgcaggatcctgggatcgttccccgcgcagcccacccgccggaggatgagttttcttatggcaacgctttgtctgggggcacgcctgggaggctacaattcccccgtgtaaaggaagtactggttaatgggatgcctgtgaaagtgaagtattgtgacacctgcatgatttatcggcctcctcgatgctcacactgttcgatatgcaacaattgtgtagagcgctttgaccatcattgcccctgggttggacaatgcattgggcagcgcaattaccggtactttttcatgtttgtttcttcctcgactcttctctgcatttatgtatttgcaatgtcagccttgtacatcaagtttctcatggatgaggattatccaacagtatggaaggctttcaaacactctcccgcttctttggggcttctgatatattgtttcattgctctctggtttgttggtggactcactggatttcatttgtacctcattagcaccaaccagaccacgtacgagaatttccgatacagatcagacagcaggcctaacatctatagccaaggatgtctgaataactttctacaagtcttctgcagcaagacaaaaccttctaaacacaagttccgggcctacgcgcaagaggaagtgcggcctccaacggttagcttcggcagggaggtcgatgaggaaccggtcggcgggcctcggccgaaagttgaggacgatcttgaaattggtaccgatcttctgaagatctctcagcggcgcaactacgaggacgtcgatgcagaaacgggaggccgtcgcagtcgcagcagcgaggtggaaggcacggccagtgccagacctgctgtggcgtgctcggagtcccagatccctgcggtcgggggtactgacgtgagggtgcggcactcgagctgggaccggcgaagcgggaactgggacatgtcggctgtgcttacgaggagcgcgtcagatgtgattggacgtagcagcgtgttcgccgcggacgctgcacgtccatctctagaagagactcgctagcgaactgtgtctgtgcatccaggaaacatgtgcgagcggttcggatagcgaggccatttgactcgtggtggtggtgacacacacccaggtgttttggctttggctgccttgattgggtttttgttaccgacccttgtcagttgtcatgtatggacagttatttttagtcagagaatctgcccccattgttgccggcatgttcgtgtgcctgtaaattgcaaatgcaggatcctcatcaacttcaattcttattgggctgtttctttgagaatgcgtaatgtgaaaaagcatctggcctagctctttataggaatggatgcaattttaaagc

SEQ ID NO: 138842 - DNA, 1569 bp, Zea Mays
gagctgtaaaccggcaagcgagtctgccgcctatataaacatggccgggtcgactacggtttagagccgcgcgcacgcctccagcagatagagaagcttggaatggcgatccaaatggacaagacgtccatcatcgtttgctcggtgatcgggtctctagggttgctgagtgccatcctggggttctcggcagaggggacaaagctcactccatataccatactggtgtacggcgacgactgcctctacccgcagaacccggcgatcgggctcgggatctgcgccgccatcttcctggtggtggctcagatcaccttctcggcggtgggcggctgctgcggctgctgcaggtcccgcgccatcccttcggagaccaaaaggatcgtcagcatcgtctgcgccgttttctcatggatagcggcggtgatcgcgttcgcgctgttcatacaaggtgcggcgtggaacgccaacgtggtgcgggtggaacaagcgccctactgcccctacctcaaggacggcgtcttcgccggcgcggccgtgctcgccctcgccgccacagcgctaagcatcacctccttcatcatgcagcggacccagccagctgcggcggcgacggcgacggcgacggcatcggctgtgggcacaccgaacatgccaggagggcagtcgccgtcccccgaggtagtaatgggccagccgctgtttccgtcgggcaaggcgcatcagaacgattaccccgtaaaaccccagggatacgagcacgagcagcagcctcatcaggtgcagcaggtccctcctcctaccgactctcaccacccaccacaaggctacgcacagtccgctgcgccaaaccaccagctccctccgcgcccagccccagcggcagcagccgcagcaccggcggcggtcgcagcggcagccgcagcctcggcaccgagcgtgctgcagccggcgctcgggacggtcgccatgggccagccgctgccgctgcaggtcccgccacagtactgccttcctgtcccggcacctcagatcggaggcgtggacattcctgccgctctcccctctgctgctgctccggcggcagggagcgggtccacgctatcgacggctatccgcaacgaagtagtgagacaagggattagaatggctgcggaggtggtgaaagattccctctttcctgaaaacgggggtagcgttctttccatgatgacggattccgctggaggcgacgctgttcaggttacaaactaattaagtaaggatatgacgatgcgcttattgcttaatgctctgtgcgttataccttgcctttagtttgctgtctgttcttcctcctgtgtatctgtcagtagcttcggcactgtgaagcatgtcctgtgtctgtatacctacttgctgtcgtttgaatcgtcctaaactcgaacttcaagtcacttttttcattgtacctgtgtaatatgtagcttttgcctagtatccatcagaattgtgcagctacactgtttatatgatgattatgcttgtatttatttggaggcgactacatcctctttcatttgcctttta

SEQ ID NO: 138843 - DNA, 920 bp, Zea Mays
attgagaattataatatatagttgtctgcacgcaaataacttcagttcgactcagctccgccgcgcgtgtcagccgatggaagagctgcgggccgccgtgacggcgcacttggaccaggtagcgggcctcgtgcaggcgctctcctccgagctccgccgcggcataggtcccgccgccgacaacctgcgcgccttcatccgcgccgttgactggacggagccatggctcatgtgcttgatggcattccatgtggttctgctgctcactgctgtagggttcaggaggaatgccaatttccagctattcttgttatttcttgcttattcaggagtgtatctagctgaaaagatgaacagatacctgggagagaactggaagagctttaccagtaggaattattttgatcgttctggagtttttatctctgtcgtctggtctgggccccttattgtcatatcgattgtcagtgtgattagcagcctcattgcattatgtcgattgatggtgaaatggaaaagagcagaacttaggcaccgggctcgacttgctcatgacaagaaggattgagagaagagaaaaaaatccttattatgggagaatcgaatgatttagtgattttgaacttttctaagtttgtatgccgcttgtcaacagggcactcaagaattaagtgttggaaatcctggataagcgaggagtgtctacagctattgttcctgctggtcactgtaggacagtagcagctagacatacttcataaaaaaatagatatggtacctgtctctatcttgttttagattgtagatgtaaacatggatgtaatcttgattgaaactgccaagatttgtagaacaaagcctcactgtttcgtttcccatcacaaatatgaaatatgagacgcggaagtgatacgagtaga

SEQ ID NO: 138844 - DNA, 1052 bp, Zea Mays
attgagaattataatatatagttgtctgcacgcaaataacttcagttcgactcagctccgccgcgcgtgtcagccgatggaagagctgcgggccgccgtgacggcgcacttggaccaggtagcgggcctcgtgcaggcgctctcctccgagctccgccgcggcataggtcccgccgccgacaacctgcgcgccttcatccgcgccgttgactggacggtattctctccggatccgccaacaggagatcgcatccggatcaccaagaccttgtttcctttcctctcccacttccagggctgacaaatatcatgcgctgcactgtgttgcgctttgaatgtgctgctgtttcaggagccatggctcatgtgcttgatggcattccatgtggttctgctgctcactgctgtagggttcaggaggaatgccaatttccagctattcttgttatttcttgcttattcaggagtgtatctagctgaaaagatgaacagatacctgggagagaactggaagagctttaccagtaggaattattttgatcgttctggagtttttatctctgtcgtctggtctgggccccttattgtcatatcgattgtcagtgtgattagcagcctcattgcattatgtcgattgatggtgaaatggaaaagagcagaacttaggcaccgggctcgacttgctcatgacaagaaggattgagagaagagaaaaaaatccttattatgggagaatcgaatgatttagtgattttgaacttttctaagtttgtatgccgcttgtcaacagggcactcaagaattaagtgttggaaatcctggataagcgaggagtgtctacagctattgttcctgctggtcactgtaggacagtagcagctagacatacttcataaaaaaatagatatggtacctgtctctatcttgttttagattgtagatgtaaacatggatgtaatcttgattgaaactgccaagatttgtagaacaaagcctcactgtttcgtttcccatcacaaatatgaaatatgagacgcggaagtgatacgagt

SEQ ID NO: 138845 - DNA, 767 bp, Zea Mays
tccaatccttgaccaactctggcgactccttcactcctccctgaccaactccagcgggcgactcctctctgatcaagaagacaagaactcaagaagatgagtaccacatctgaagtagcagccagacaacaaccatgagtctcgcttgtcttgtatgccatggcatgagcagcccctcgcactctcttagaagctactcggtgtcaagctcagaggaggaaagccggtgtggagctgttgttgcctgcttagctcgaagagtaacaccagctggaacctctactagcgttgggacatcgaaagtgaccccctttccacccgtggtgagtgatcaagttggtacagagggcgctcctcgacttcaacgcagccgtgctgtgtccagggaccttgttagagactggaacttcgacgaagtaatcgtcgcaaattagagtagccctcaacagtcgtcagctggactctgtgctctacttatcaggcaggagattccttcattcgatgtaaaattttcatagtagacgtctggaagtccatgccaatacttgatgaggaaatgctcgagagggatggtacctttcaggagcaatatttggactgttgcagttatatgtggtcacgtacctgtgtaggtaggataaatgttttgagtgtgttttcctaattttcagacgtgtataagttgtcatgtacctttatgtatattatgaatgaatccaacttcagatctcgatctaatattcaaacggaagtaatattttggtgta

SEQ ID NO: 138846 - DNA, 1080 bp, Zea Mays
aattaatttttccgattagtccacaagtcaatggctaatttgtcttcttccattcttcttctcctttccttcactctctggcttcccgatctcttctctctctctctcgtctctcacatctccagcccttcgccctcttctcggcccgacctcgacggtgttccaccatctcctaccctcttcttttcccgcccgcgccatccctttctccgctgtagccactgcaagccccgcgcgacgcacacggcagtggtccacgtcgaccaaatcgtccacagcatcgcgttctcctcggcgagggtctgtagcctgccggcgaggagctcgcagcgaagatccgtgcaagccaccctccagatcgtcacagctatgaatgactgcgacaaccaccattttcgccacaattcagcggatgcattgggttgttgggcattgatgattctatgcaggctatgcagcatgtagcagccagacaacaaccatgagtctcgcttgtcttgtatgccatggcatgagcagcccctcgcactctcttagaagctactcggtgtcaagctcagaggaggaaagccggtgtggagctgttgttgcctgcttagctcgaagagtaacaccagctggaacctctactagcgttgggacatcgaaagtgaccccctttccacccgtggtgagtgatcaagttggtacagagggcgctcctcgacttcaacgcagccgtgctgtgtccagggaccttgttagagactggaacttcgacgaagtaatcgtcgcaaattagagtagccctcaacagtcgtcagctggactctgtgctctacttatcaggcaggagattccttcattcgatgtaaaattttcatagtagacgtctggaagtccatgccaatacttgatgaggaaatgctcgagagggatggtacctttcaggagcaatatttggactgttgcagttatatgtggtcacgtacctgtgtaggtaggataaatgttttgagtgtgttttcctaattttcagacgtgtataagttgtcatgtacctttatgtatattatgaatgaatccaacttcagatctcga

SEQ ID NO: 138847 - DNA, 983 bp, Zea Mays
aaattaatttttccgattagtccacaagtcaatggctaatttgtcttcttccattcttcttctcctttccttcactctctggcttcccgatctcttctctctctctctcgtctctcacatctccagcccttcgccctcttctcggcccgacctcgacggtgttccaccatctcctaccctcttcttttcccgcccgcgccatccctttctccgctgtagccactgcaagccccgcgcgacgcacacggcagtggtccacgtcgaccaaatcgtccacagcatcgcgttctcctcggcgagggtctgtagcctgccggcgaggagctcgcagcgaagatccgtgcaagccaccctccagatcgtcacagtagcagccagacaacaaccatgagtctcgcttgtcttgtatgccatggcatgagcagcccctcgcactctcttagaagctactcggtgtcaagctcagaggaggaaagccggtgtggagctgttgttgcctgcttagctcgaagagtaacaccagctggaacctctactagcgttgggacatcgaaagtgaccccctttccacccgtggtgagtgatcaagttggtacagagggcgctcctcgacttcaacgcagccgtgctgtgtccagggaccttgttagagactggaacttcgacgaagtaatcgtcgcaaattagagtagccctcaacagtcgtcagctggactctgtgctctacttatcaggcaggagattccttcattcgatgtaaaattttcatagtagacgtctggaagtccatgccaatacttgatgaggaaatgctcgagagggatggtacctttcaggagcaatatttggactgttgcagttatatgtggtcacgtacctgtgtaggtaggataaatgttttgagtgtgttttcctaattttcagacgtgtataagttgtcatgtacctttatgtatattatgaatgaatccaacttcagatct

SEQ ID NO: 138848 - DNA, 1248 bp, Zea Mays
aaattaatttttccgattagtccacaagtcaatggctaatttgtcttcttccattcttcttctcctttccttcactctctggcttcccgatctcttctctctctctctcgtctctcacatctccagcccttcgccctcttctcggcccgacctcgacggtgttccaccatctcctaccctcttcttttcccgcccgcgccatccctttctccgctgtagccactgcaagccccgcgcgacgcacacggcagtggtccacgtcgaccaaatcgtccacagcatcgcgttctcctcggcgagggtctgtagcctgccggcgaggagctcgcagcgaagatccgtgcaagccaccctccagatcgtcacaggttctcctcttactcctctatctcttacgtcgcatggggggctcggcgggtcgtggctgtgcggtgggcgaattcgccgccccgattcgccgccggagatgtcctcgcgccacaaccaactgccgggtaggcgaggggatgcgtccctccatttgagataccatttgtggtagatgaggctataggtgaggggatgcacccccttcatttgtgggagagggagctgattttgagtatttatttacctaagtagtagaaaatttagattttgggtattgagttaaataagttgaatgattaatctgttggagccctctcggttacctgctgtttttttcggtattgggggttgatttgaataatctgttggagatgcactatttgtgttcggatctgactatatgcatgataacttcaaagtttatgaaaaatattgggtttatatgtggacatccatgtcctattccgacactaggattgagaaatgagaagttggtccttgcttctgatctggcaggggaactttccctttcctcaaaattataatgcttaggctttgctgccttgtttattgttgatcacaaaagttgtttcttaaacatatccattgccatacatggtttcgttcattggttgtggtaaagacactacaggggtttagcccttgtcattgccagagtgcacagtgtagatctgttatttccttgaattagcctaacatgttattttgtagtaatacatgcttcttggtcatataaatctgaacactgaagaataatgtcgataagaagatttaacccttgtcattactatttaccaacatgtacgtactgtatatgcttatgtgcatgctgtttccttcatatttggttcacagttg

SEQ ID NO: 138849 - DNA, 4172 bp, Zea Mays
agcgcggcagcgccccaccccttgctgactccctcagtcggtctgtccctctatttcgaaagagcacactgcacacgcctcatccttcgtccagacgcgcccacgcctccgctgagagaataggttctgtgcgagggctccctcgcactccgcaagcacgccaacctcagtcgccagccagccatggcgtctgattccggcaccgcctcctcggacccgctcctccacggccgccgcgcgccgtccacgggcggctggaaatccgccctcttcataatttgggtagaggtggcggagcggttcgcgtactacggcatctcgtcgaacctgatcagctacctgaccggcccgctcggccagaccacggcggcggcagccgcggcggtgaacgcgtggtcgggcgccgcgtccatgctgccgctcctcggcgccgccgtcgccgactcctggctcgggcgctaccgcaccatcgtcgcctcctccgtgctctacatcacgggccttgggatgctgacgctgtcatcagttttctcatcgcctcagcaatgccgtgactccgccgacgacggagaaggtatatgcccgccttcctcgcttcagacggccttcttctacgcctccctctacttggtggccatcgcccagagcgggcacaagccctgcgtgcaggccttcggcgccgaccagttcgacgcgacagaccccgacgagtccgtgtcccgggcatccttcttcaactggtggtacatgggactgtgcaccagcgccaccgtgacaattgcgctcatgagctacgtgcaggacaacgtgggctgggccctcggcttcggcgtgccgtccatggccatgctactcgcgctcgccatcttcctgctcggcacgaggacctacaggttctacggctcccgcggtggtgctggtgccagtgccagcgcgtcgtcccttttccgcaacgcgttcgtggcctggaggaaaaggtcgcgtgaagtggagctgggacatggtgagctcgcccaggacgatgccgtgctcgcggaagaggtgaaggggctggcgaggctgttcccgatatgggcgacgtgcctgctctacggcgcggtgttcgcgcagccgcccacgctcttcacgaagcaggcggcgacgctggaccggaggatcgggcggtcgttccaggtacctcccgcggcgctgcagtgcttcctcggcgccagcatcgtcacctgcatcgtgctgtacgaccgcgtcctggtgcccgtgacgcgcagggtctccggcgccgcctcgggcatcaccatgctgcagcggatcggcacggggatcgcgctgtcccttgtcactctagtcgtcgccgtgctggtggagatgaagcggctgcgagcggcgagggacgccggcggcggcggcctggtggacggctctggcaccggcacggcggcggtccccatgagcctgtggtggatcgtgccgcagtacgtgctgctcggcgccgcggacgtgttcacgatggtcggcatgcaggagttcttctacgaccaggtccccggggccctcaagagcctcgggctggcgctctacctcagcgtcctcggcgtcggcagcttcatcagcagcttcctcatcacggtgattgatgccgttacgacgaggaacggaggcaccagctggttcgccgacgacctcaaccggggtcacctagactacttctacctgctccttgcagcgctcgccgcgctggagcttctcgctttcgcttacttctcaacgtcttacgtttacaagacaaaggcaggcaatctctaatctccgtggacagaggcatgcatgtcagcatatgtatgtttattatagatagaaggattgcatggcagcgttcttcagtgtccttgcaaactaaaatgggctgcgtttagcgcgcagacagcaaagtactagaggctatcgggaaattgtaaaatggaggtgtactacggtcacaagtggggcacaataataatgaaattacgtgcttcacaaagcataaaattgtgcaaaaacaagatttttttagggtgcgtttagctagcagcctgacccccgcgcgcaatgcaaaattttatgttcagaattagtccaaaacatagcaatgccgtggatgataatttgatcatcagcagtaacttgatgaagatcacaagttcacaacggcacagcaagggcggacacaattactagactttgccttttcttgtcattttcttattggtaatccttcagtaccatgataaagagcttcttcaccatattataaagctacagccttgaggttgaggcgcgcaaaattatccaacactccgaacagagctgaatcagagctgaatccaacgacctagacgtactggcagacgaagcagagcagaggtcagtaggtcacctggctggctcctggctcaatcctccagctcggcggccggatcggccagcgtgggcagcacagggtacttgcgcgagaagcacgcgtcgcagtagttccccgactcctcgccgtagatgctgtgcagcttgtccagcgagaggaaggcgagggagtcgctgccgatctcccggcgcacgccatcaaggtccatccggttggagatgagctcgccctcgctcggagtgtcgatgccgtagaggcaggagcccacaacgggcgggctcgcgatccgcatgtgcacctcccgcgcgccggcgtcgcggagcagccgcacgatcttgctcgaggtggtgccgcgcaccagggagtcgtccacgaccacgacgctcttgccggtgatgacgccgcgcacgggggcgagcttcagcttcacggcgaggtcccggatcgcctgcgtcggctggatgaagctgcggccgctgtagtgccaccggatgagaccctgctggaactcgagccccgacgcgcgtgcgaacccgagcgcggcgtagaaacccgagtcgggcaccgggatgacgacgtcggcgcccggggcaggggactcctcggccagcgcctgcccgaaggcggtacggcgctcgtggacggcgtgcgagaacaccaccgagttgggcagcgagaagtagatgtgctcgaacacgcaggcgcggcgggggcggtgcgggacgaggcaggccgaggccaccgacatgtcgcggcggtcgaccacgaccacctccccaggctccacctcgcgctcgtaggtggcgtcgatgaggtccagcgcgcacgtctccgacgcgaagacgacggcgccgttccggcggcggcccatcaccagcgggcggaacccgtgtgggtcgcgcacggcgaagagcttgtcggccgtgaggaacaggagcgagtaggcccccgcaaggcgctcgcaggcatcgcagacccgggcgaggaggggccgcgacagcgacgtcgcaatcaggtggagaatgacctccgtatccgaggacgtgttgaagatggatcccctggcctcgagtttgttccgcagagcttggtagttgacgaggtttccgttatgcgccacggcgacctgcccgaaccggtacccggccaggaacggctgcacgttgcgcagcgacgcggcggcgccggccgtggagtagcgcacgtgcccgatggcagcggggcccgggagcgaggcgagccgggacgggtccgcgaacacgtcggccacgagccccagcccggtcacggacttgagcttgccgtccccgcccacggcgacgatcccggccccctcctccccgcggtgctgtagcttctgcagccccagatagcacagcgacgacgcgtctgggtcgcccacgaccccgattacaccgcactcctcgcgcgggtggtcatccgcgtcctcatccacgccgtatgagaacggggtaacgcggtcgggcaggagcgcccgggccgccgcctcacgccggccggagccgcagcgcagcgagagaggatacggactcgcgtagtacctgaggtggtgccggttatggcggtcgctgccagcggctgcgtagcggtagaggagacgggacgtggcagtcgtggcggcggcggcggcgacaattcccattcccgcttatttgagagatcgaggggatttggggcgggcggcggggcgagccgggcacgcggagtgatgcctctctctggctgcgcgtcaatgggccagatttgaagaagtctt

SEQ ID NO: 138850 - DNA, 1909 bp, Zea Mays
cttttcttgtcattttcttattggtaatccttcagtaccatgataaagagcttcttcaccatattataaagctacagccttgaggttgaggcgcgcaaaattatccaacactccgaacagagctgaatcagagctgaatccaacgacctagacgtactggcagacgaagcagagcagaggtcagtaggtcacctggctggctcctggctcaatcctccagctcggcggccggatcggccagcgtgggcagcacagggtacttgcgcgagaagcacgcgtcgcagtagttccccgactcctcgccgtagatgctgtgcagcttgtccagcgagaggaaggcgagggagtcgctgccgatctcccggcgcacgccatcaaggtccatccggttggagatgagctcgccctcgctcggagtgtcgatgccgtagaggcaggagcccacaacgggcgggctcgcgatccgcatgtgcacctcccgcgcgccggcgtcgcggagcagccgcacgatcttgctcgaggtggtgccgcgcaccagggagtcgtccacgaccacgacgctcttgccggtgatgacgccgcgcacgggggcgagcttcagcttcacggcgaggtcccggatcgcctgcgtcggctggatgaagctgcggccgctgtagtgccaccggatgagaccctgctggaactcgagccccgacgcgcgtgcgaacccgagcgcggcgtagaaacccgagtcgggcaccgggatgacgacgtcggcgcccggggcaggggactcctcggccagcgcctgcccgaaggcggtacggcgctcgtggacggcgtgcgagaacaccaccgagttgggcagcgagaagtagatgtgctcgaacacgcaggcgcggcgggggcggtgcgggacgaggcaggccgaggccaccgacatgtcgcggcggtcgaccacgaccacctccccaggctccacctcgcgctcgtaggtggcgtcgatgaggtccagcgcgcacgtctccgacgcgaagacgacggcgccgttccggcggcggcccatcaccagcgggcggaacccgtgtgggtcgcgcacggcgaagagcttgtcggccgtgaggaacaggagcgagtaggcccccgcaaggcgctcgcaggcatcgcagacccgggcgaggaggggccgcgacagcgacgtcgcaatcaggtggagaatgacctccgtatccgaggacgtgttgaagatggatcccctggcctcgagtttgttccgcagagcttggtagttgacgaggtttccgttatgcgccacggcgacctgcccgaaccggtacccggccaggaacggctgcacgttgcgcagcgacgcggcggcgccggccgtggagtagcgcacgtgcccgatggcagcggggcccgggagcgaggcgagccgggacgggtccgcgaacacgtcggccacgagccccagcccggtcacggacttgagcttgccgtccccgcccacggcgacgatcccggccccctcctccccgcggtgctgtagcttctgcagccccagatagcacagcgacgacgcgtctgggtcgcccacgaccccgattacaccgcactcctcgcgcgggtggtcatccgcgtcctcatccacgccgtatgagaacggggtaacgcggtcgggcaggagcgcccgggccgccgcctcacgccggccggagccgcagcgcagcgagagaggatacggactcgcgtagtacctgaggtggtgccggttatggcggtcgctgccagcggctgcgtagcggtagaggagacgggacgtggcagtcgtggcggcggcggcggcgacaattcccattcccgcttatttgagagatcgaggggatttggggcgggcggcggggcgagccgggcacgcggagtgatg

SEQ ID NO: 138851 - DNA, 2115 bp, Zea Mays
agcgcggcagcgccccaccccttgctgactccctcagtcggtctgtccctctatttcgaaagagcacactgcacacgcctcatccttcgtccagacgcgcccacgcctccgctgagagaataggttctgtgcgagggctccctcgcactccgcaagcacgccaacctcagtcgccagccagccatggcgtctgattccggcaccgcctcctcggacccgctcctccacggccgccgcgcgccgtccacgggcggctggaaatccgccctcttcataatttgggtagaggtggcggagcggttcgcgtactacggcatctcgtcgaacctgatcagctacctgaccggcccgctcggccagaccacggcggcggcagccgcggcggtgaacgcgtggtcgggcgccgcgtccatgctgccgctcctcggcgccgccgtcgccgactcctggctcgggcgctaccgcaccatcgtcgcctcctccgtgctctacatcacgggccttgggatgctgacgctgtcatcagttttctcatcgcctcagcaatgccgtgactccgccgacgacggagaaggtatatgcccgccttcctcgcttcagacggccttcttctacgcctccctctacttggtggccatcgcccagagcgggcacaagccctgcgtgcaggccttcggcgccgaccagttcgacgcgacagaccccgacgagtccgtgtcccgggcatccttcttcaactggtggtacatgggactgtgcaccagcgccaccgtgacaattgcgctcatgagctacgtgcaggacaacgtgggctgggccctcggcttcggcgtgccgtccatggccatgctactcgcgctcgccatcttcctgctcggcacgaggacctacaggttctacggctcccgcggtggtgctggtgccagtgccagcgcgtcgtcccttttccgcaacgcgttcgtggcctggaggaaaaggtcgcgtgaagtggagctgggacatggtgagctcgcccaggacgatgccgtgctcgcggaagaggtgaaggggctggcgaggctgttcccgatatgggcgacgtgcctgctctacggcgcggtgttcgcgcagccgcccacgctcttcacgaagcaggcggcgacgctggaccggaggatcgggcggtcgttccaggtacctcccgcggcgctgcagtgcttcctcggcgccagcatcgtcacctgcatcgtgctgtacgaccgcgtcctggtgcccgtgacgcgcagggtctccggcgccgcctcgggcatcaccatgctgcagcggatcggcacggggatcgcgctgtcccttgtcactctagtcgtcgccgtgctggtggagatgaagcggctgcgagcggcgagggacgccggcggcggcggcctggtggacggctctggcaccggcacggcggcggtccccatgagcctgtggtggatcgtgccgcagtacgtgctgctcggcgccgcggacgtgttcacgatggtcggcatgcaggagttcttctacgaccaggtccccggggccctcaagagcctcgggctggcgctctacctcagcgtcctcggcgtcggcagcttcatcagcagcttcctcatcacggtgattgatgccgttacgacgaggaacggaggcaccagctggttcgccgacgacctcaaccggggtcacctagactacttctacctgctccttgcagcgctcgccgcgctggagcttctcgctttcgcttacttctcaacgtcttacgtttacaagacaaaggcaggcaatctctaatctccgtggacagaggcatgcatgtcagcatatgtatgtttattatagatagaaggattgcatggcagcgttcttcagtgtccttgcaaactaaaatgggctgcgtttagcgcgcagacagcaaagtactagaggctatcgggaaattgtaaaatggaggtgtactacggtcacaagtggggcacaataataatgaaattacgtgcttcacaaagcataaaattgtgcaaaaacaagatttttttagggtgcgtttagctagcagcctgacccccgcgcgcaatgcaaaattttatgttcagaattagtccaaaa

SEQ ID NO: 138852 - DNA, 2153 bp, Zea Mays
gcgaacagcagcatcctattcctcctacctcactggctcactctcgtctcggtttacaaagcctccgccgccgcaagtccactccacccgttgtccaggttagttggttggtttcaatttcgagttcgccgagcgacagcttgcgcctgccatttctcggctccgcgtgccggagctcgttcatctccagcttctccggccgttactcgctctgaaccgacgacagtaccgataaagccccgactcgccatcctccggcgacgatgccttcccgatcggattccgactccctgctggtgcgcgccgagggcatgcgcgacgcggcgctggactaccacggccgccccgccgaccgcggcgccaccggcggctggaggtcggcgctcttcatcatagcggtggagatcgcggagcggttcacgttctacggcgtgtcggcgaacctgatcaactacctgactggcccgctcgggcagggcaccgcggcggcggcggcggccatcaacgcctggaacggggtggcgcagctgctgccgctgctgggcggggccctcgcggacaagtggctcggccgctaccgcaccatcgtcatcgcctcgctcctctacatcctcggtctgggtatgttggccttttctaccttcctctcctccggcagcggccaccagtgcaccgccgcagggggccagatctgtgcgccgtctggccttaaggtgaccttcttctacgtctccctctatatcgtggccgtggcgcagggcggccacaagccgtgcgtccaggcgttcggcgccgaccagttcgaccagaccgaccccaaggagactgtctccaggagctccttctttaactggtggtacttcggcatgtgcgccggcactgccgtcacgctcgtgctcctcagctacgtgcaggacaacatcggatggggcctcgggttcggcatcccgtgcgccgtcatggcagccgcgctcgccgtattccttcttggcactcggacgtaccggtactacgtcactgccgggcagggcctgttcgctcgtgccggcgaggctttcgctgagtggcggagcaggcgcaaggcgggccagcttgttcaggattcccaagaactcgatccgcccgcagcagatgcgccaaggttcagtgctggcgtcgatgtggaggagcaggctgcagtgagaaataatggaggcctcgtcaaggaggccaaggccatcatccgtttgttcccgatatgggcggcatgcctgctctacgcggtggcgtactcgcagtcgtcgacgttcttcacgaaacaggcggcgaccctggaccggcggatcgggcggcacgtccaggtgccacctgctgcgctgcagagcttcatcagcgtcacaatcgtggtcatcatccctatctacgaccgcgtcctcgtgccggtgtcgcgccggtactccggcaaaccatcagggatcaccatgctgcagcgcatcggcacggggatgttcctctcgctcttgtccatggtgatcgcggcgctcgtcgagaagcaccggctccgcgtcgcgggggacgctggactcgtggacaagccgaaggtcccagtaccgatgagcctgtggtggatggtgcctcagtacgtgctgttcggggccgccgacgtgttcaccatggtcgggctgcaggagttcttctacgaccaggtgcccgacaagctgcgcagcctcgggctggcgctctacctcagcatcttcggcgtcggcagcttcatcagcagcgcgctcgtgtcggtcatagacagggtgacgacggacagaggcgggagctggttctccaacaacctgaaccgtggccacgtggactacttctactggctgctcgcggcgctcagcgccgtcgagctcctcgcctatgtcttcttcgcggtgacatacaagtacaagaacagaggagccgtacatgcaactgttgatggttagcgggaggagtaagtacatagtataggttatggtgcatcgtacttgtaaatctctctttttttcctcaactaggatttgtgatccaaactttaccttcgataatgattcccgttttttatgaattggtgggccatgtggtcattcaatttttaggaatgtacaactctgagactgaatcgttttttcaagcct

SEQ ID NO: 138853 - DNA, 1885 bp, Zea Mays
ttcacaagaatggcggacggtgacgagcagggcgcgggcgcaggcgcggcagcagacggtgccgccgtcgacgcagcggtggaccaccgaggccggccggcctcccgcgccaccaccggcggctggaagtccgcttccttcatcatagcggtggagatcgcggagcgcttctccttctacggggtgtcggcgaacctcatcaccttcctgacggggccgctgggcgaaggggtcgcggcggcggcggcggccatcaacgcgtggaacggcacggcgcagctgctgccgctgctgggcgggacgctcgcggacaagtggctcggccgctaccgcaccatcgtgctcgcgtcggtcgtctacatcctcggtctgggtatgttggccttttctaccttcctctcctccggcagcggccaccagtgcaccgccgcagggggccagatctgtgcgccgtctggccttaaggtgaccttcttctacgtctccctctatatcgtggccgtggcgcagggcggccacaagccgtgcgtccaggcgttcggcgccgaccagttcgaccagaccgaccccaaggagactgtctccaggagctccttctttaactggtggtacttcggcatgtgcgccggcactgccgtcacgctcgtgctcctcagctacgtgcaggacaacatcggatggggcctcgggttcggcatcccgtgcgccgtcatggcagccgcgctcgccgtattccttcttggcactcggacgtaccggtactacgtcactgccgggcagggcctgttcgctcgtgccggcgaggctttcgctgagtggcggagcaggcgcaaggcgggccagcttgttcaggattcccaagaactcgatccgcccgcagcagatgcgccaaggttcagtgctggcgtcgatgtggaggagcaggctgcagtgagaaataatggaggcctcgtcaaggaggccaaggccatcatccgtttgttcccgatatgggcggcatgcctgctctacgcggtggcgtactcgcagtcgtcgacgttcttcacgaaacaggcggcgaccctggaccggcggatcgggcggcacgtccaggtgccacctgctgcgctgcagagcttcatcagcgtcacaatcgtggtcatcatccctatctacgaccgcgtcctcgtgccggtgtcgcgccggtactccggcaaaccatcagggatcaccatgctgcagcgcatcggcacggggatgttcctctcgctcttgtccatggtgatcgcggcgctcgtcgagaagcaccggctccgcgtcgcgggggacgctggactcgtggacaagccgaaggtcccagtaccgatgagcctgtggtggatggtgcctcagtacgtgctgttcggggccgccgacgtgttcaccatggtcgggctgcaggagttcttctacgaccaggtgcccgacaagctgcgcagcctcgggctggcgctctacctcagcatcttcggcgtcggcagcttcatcagcagcgcgctcgtgtcggtcatagacagggtgacgacggacagaggcgggagctggttctccaacaacctgaaccgtggccacgtggactacttctactggctgctcgcggcgctcagcgccgtcgagctcctcgcctatgtcttcttcgcggtgacatacaagtacaagaacagaggagccgtacatgcaactgttgatggttagcgggaggagtaagtacatagtataggttatggtgcatcgtacttgtaaatctctctttttttcctcaactaggatttgtgatccaaactttaccttcgataatgattcccgttttttatgaattggtgggccatgtggtcattcaatttttaggaatgtacaactctgagac

SEQ ID NO: 138854 - DNA, 1797 bp, Zea Mays
accttagtagtagtaggacgtatctagagccatttctacaagagatagagattaataaaaataaaataggagcggagagagaggggcaggaaataaacgaggatctcaaccacacgcaacacaagaagctgacgaagggctaatcccccggaacccgttaacgctgtgggagtgtgagcccacccggccacccgtttcggctaatcccccgctcgccttctcccatcgccatggctgccgcttcctggtccgcgcccaccacctccttcgcgccggcgccggcgccgccatgggggcggtggaggaccaaggcggcgcctttacccatcaggacgcttccccgccgagtgcttctcaacgcagttggcgaatccgccatggttgctgctggtgacacattgcttggtttgtatgagaaagagcggttaggcctgttgcagtatgccgacgacgagtctaaagaagagaggtactgggaaaccttggatgctgatttgcgttactggaccagatccctgcgcccagtgcagtggtatcctggtcatattgcaaaaacagagaaagaattgaaggaacaattgaggctcatggatgtcgtcatagagatccgtgatgctaggattcccttgtccaccagccatcctaagatggactcatggctaggcaaccggaaaaggatcatagtcttgaatcgcaaggacatgatctcaactgaggatatgaatgcatgggctacttactttggtaatcagggcatcaaagttgttttctccaatggccagctgggtatgggtacaatgaaattaggtaggatggcgaaatcagtagcatctgttgcgaacacaaagagaaaggagaagggattgcttcctcgtccggttcgagctggaatagttggatatccaaatgttggcaaatcttccttgattaatcgcttgctaaaacgaagaatgtgcccagcagcacctaggccaggtgtcacaagagagctgaagtgggttcgttttggaacagacctagagttgttagattcacctggaattttacctatgcgaattagtgaccagacatctgcaatcaagctcgctatatgtgatgatattggagaaaggtcatacgattttgctgatgtggcggcgattcttgtgcagatgttgataagacatcctgcagtaggttctgaagcatttcgaagacgatataagattgatgtagatagtgagtgcggtaaaacgtttgtcacaaagctctctgttcacttgttcaatggagacacaagccaggcagctttccgcatattgtctgactacaggaaaggcaaatttggatgggtagcgctggagagacctccaacatgaacaagcgggatatcatagatccttagataaaagacatgtgcttgttcatgtagtatcacacaatttagtgtcgttcattggaccactctcgacagttttcactggacctgcacatatacgaggaattaattcagaatagctgtccatctgatgatctaaagacaaaacttaagaaatgctcctgctgttatcagacagtccagagcaaacgagctgatttgtatgatctattgaatgagctcaactatgtttctatgtaacggaattaggtttgagaaatgaaagattgtatgtctcctaatttagttgctcatgtactttgttcttttaggaaaagttgctcctgtacttctggatgattcattagattcgggaactggtgtaacattttaggcccagacaatagacatccctctacaaattcagtttccctgctttt

SEQ ID NO: 138855 - DNA, 1808 bp, Zea Mays
accttagtagtagtaggacgtatctagagccatttctacaagagatagagattaataaaaataaaataggagcggagagagaggggcaggaaataaacgaggatctcaaccacacgcaacacaagaagctgacgaagggctaatcccccggaacccgttaacgctgtgggagtgtgagcccacccggccacccgtttcggctaatcccccgctcgccttctcccatcgccatggctgccgcttcctggtccgcgcccaccacctccttcgcgccggcgccggcgccgccatgggggcggtggaggaccaaggcggcgcctttacccatcaggacgcttccccgccgagtgcttctcaacgcagttggcgaatccgccatggttgctgctggtgacacattgcttggtttgtatgagaaagagcggttaggcctgttgcagtatgccgacgacgagtctaaagaagagaggtactgggaaaccttggatgctgatttgcgttactggaccagatccctgcgcccagtgcaggtatacttaagtggtatcctggtcatattgcaaaaacagagaaagaattgaaggaacaattgaggctcatggatgtcgtcatagagatccgtgatgctaggattcccttgtccaccagccatcctaagatggactcatggctaggcaaccggaaaaggatcatagtcttgaatcgcaaggacatgatctcaactgaggatatgaatgcatgggctacttactttggtaatcagggcatcaaagttgttttctccaatggccagctgggtatgggtacaatgaaattaggtaggatggcgaaatcagtagcatctgttgcgaacacaaagagaaaggagaagggattgcttcctcgtccggttcgagctggaatagttggatatccaaatgttggcaaatcttccttgattaatcgcttgctaaaacgaagaatgtgcccagcagcacctaggccaggtgtcacaagagagctgaagtgggttcgttttggaacagacctagagttgttagattcacctggaattttacctatgcgaattagtgaccagacatctgcaatcaagctcgctatatgtgatgatattggagaaaggtcatacgattttgctgatgtggcggcgattcttgtgcagatgttgataagacatcctgcagtaggttctgaagcatttcgaagacgatataagattgatgtagatagtgagtgcggtaaaacgtttgtcacaaagctctctgttcacttgttcaatggagacacaagccaggcagctttccgcatattgtctgactacaggaaaggcaaatttggatgggtagcgctggagagacctccaacatgaacaagcgggatatcatagatccttagataaaagacatgtgcttgttcatgtagtatcacacaatttagtgtcgttcattggaccactctcgacagttttcactggacctgcacatatacgaggaattaattcagaatagctgtccatctgatgatctaaagacaaaacttaagaaatgctcctgctgttatcagacagtccagagcaaacgagctgatttgtatgatctattgaatgagctcaactatgtttctatgtaacggaattaggtttgagaaatgaaagattgtatgtctcctaatttagttgctcatgtactttgttcttttaggaaaagttgctcctgtacttctggatgattcattagattcgggaactggtgtaacattttaggcccagacaatagacatccctctacaaattcagtttccctgctttt

SEQ ID NO: 138856 - DNA, 1791 bp, Zea Mays
accttagtagtagtaggacgtatctagagccatttctacaagagatagagattaataaaaataaaataggagcggagagagaggggcaggaaataaacgaggatctcaaccacacgcaacacaagaagctgacgaagggctaatcccccggaacccgttaacgctgtgggagtgtgagcccacccggccacccgtttcggctaatcccccgctcgccttctcccatcgccatggctgccgcttcctggtccgcgcccaccacctccttcgcgccggcgccggcgccgccatgggggcggtggaggaccaaggcggcgcctttacccatcaggacgcttccccgccgagtgcttctcaacgcagttggcgaatccgccatggttgctgctggtgacacattgcttggtttgtatgagaaagagcggttaggcctgttgcagtatgccgacgacgagtctaaagaagagaggtactgggaaaccttggatgctgatttgcgttactggaccagatccctgcgcccagtgcagtggtatcctggtcatattgcaaaaacagagaaagaattgaaggaacaattgaggctcatggatgtcgtcatagagatccgtgatgctaggattcccttgtccaccagccatcctaagatggactcatggctaggcaaccggaaaaggatcatagtcttgaatcgcaaggacatgatctcaactgaggatatgaatgcatgggctacttactttggtaatcagggcatcaaagttgttttctccaatggccagctgggtatgggtacaatgaaattaggtaggatggcgaaatcagtagcatctgttgcgaacacaaagagaaaggagaagggattgcttcctcgtccggttcgagctggaatagttggatatccaaatgttggcaaatcttccttgattaatcgcttgctaaaacgaagaatgtgcccagcagcacctaggccaggtgtcacaagagagctgaagtgggttcgttttggaacagacctagagttgttagattcacctggaattttacctatgcgaattagtgaccagacatctgcaatcaagctcgctatatgtgatgatattggagaaaggtcatacgattttgctgatgtggcggcgattcttgtgcagatgttgataagacatcctgcagtaggttctgaagcatttcgaagacgatataagattgatgtagatagtgagtgcggtaaaacgtatgctttgactgatcctctcttctttatccaaaaaatgttattctgacatagtactaggagttaattttctgatgaagttttctataagctgcaggtttgtcacaaagctctctgttcacttgttcaatggagacacaagccaggcagctttccgcatattgtctgactacaggaaaggcaaatttggatgggtagcgctggagagacctccaacatgaacaagcgggatatcatagatccttagataaaagacatgtgcttgttcatgtagtatcacacaatttagtgtcgttcattggaccactctcgacagttttcactggacctgcacatatacgaggaattaattcagaatagctgtccatctgatgatctaaagacaaaacttaagaaatgctcctgctgttatcagacagtccagagcaaacgagctgatttgtatgatctattgaatgagctcaactatgtttctatgtaacggaattaggtttgagaaatgaaagattgtatgtctcctaatttagttgctcatgtactttgttcttttaggaaaa

SEQ ID NO: 138857 - DNA, 279 bp, Zea Mays
agcagcattgttacctgatcattgcctttctcggtgcatccacaagcaacaatctgcatcaacttccttggcaacatcaaccattgcctacacaataacaggcctagccattgaagtccccagcaaatactttctttcataaattgcaccagcacgcaagcaggggtatgtatattcaccaacaaattattctttcagatacttcacaacaagctggcatgcaccactagcttttgccgtctctaatccttccagtttaatggcaccttaacaagagtt

SEQ ID NO: 138858 - DNA, 1745 bp, Zea Mays
ctccagctctcccccctctgcctgcctcttcaacttgtctccagagtccagaaccgccagccgccggcccacttgctcccgagggccgttcgccgccgccgccgctgccgctgccgctgacttctcctgaggagctaactgcctaggccgcttcccttgcagcgccgcgccgaggagcgggggagaccgaaattggcgcgccttcgccgcgctgccgcctcgccgattcgaccgacacgttcctctcccgttcgggcaggcaggtgccgatcccgcgcgccggcctgcgcgggcgcggcggcgcgaggcgtgatgtgcagcggatcggagcgcgggcgtgatcgcgtctccgccgagtagaggccggtgaggcccgcgggtgccggtgtgccaggagggtgggtgggtggggttgttgcgcgtgctggcgtgctgctgcggacttgacgatgtacatagcgcgggagacttccaaggtgtggaggaaggtggccacggaggtatcggtggagctgcagctcctgcgcgagaagtgggggctccttctcgccggtctgatctttcagtatattcatggattagctgctcgaggagtgcattatttgcatcgacctggaccactgctccaggacttgggatttatggcccttccagagctcgggcaagacaaaggttatcttagtgagactatattttcttccatcttcatctcctttgtgttgtggacattccatccttttatttatcacagcaaacgtttctatactgtcctaatctggcgcagggtgcttgcttttttagttgcttcacaatttttaaggattattacattctattcgacccagctcccaggtccaaattatcattgtcgtgagggctcaaaactggcaactcttccaccacccaatagtgtacttgaagtgctcctgattaactttcctcgtggggtactttttggttgtggtgatttgatattttcatctcacatgattttcactctggttttcgttcgaacttaccaaaaatatggttcgaaaaggtttattaagttccttgcttggttcatggctataattcagagtctccttataattgcttctcgcaagcactactcggtcgatgttgttgttgcgtggtacactgtaaacttagtagtattctttgtcgacaacaagctgccagaaatgccggatcggacgagtggactacatttgcttccattaagctccaaagaaaaagagggcaggcagaaggaggagaaagacagtaaactgaaggacgagttccacaagttactgaatgggaaccatgcggatcctactgatcggcgacagcgggcacagatgaacgggaggcacgacgaagacatcaatcacgcgctctccgaggccactgccaacggcacgtaagggcccgtcggcatctgcttttcaccgggggctttgtccttggcgctcggaggagaatcctcgcgggggtcgagaaaacctgcctggtgtggtgccccggccgcctttttctgaattatgaagctgtccgagattccagcgatccagccattcacatcatgcatcttcctgaaccgctgttgcgttgcgttgcgcaagaatcagaatctcgtggcgttcctcggtacagtttgcaccatacttcattgcaatgacatttatcagaaaggcacggtggggaaatgatcttgtacatactgatccgctaaaacatgcgtgcattcgcctcggccctgc

SEQ ID NO: 138859 - DNA, 2207 bp, Zea Mays
ctcggccggtttttaataccccctcgtcgcccgtcgacattccgttcgccttcctcgcccccatctctttctcgccgtgccactcccacctcttttcgctgataagcacgccgctactccccactccatccatccatccatccacccgccgcttttctctctgctttggagagggagccgcacgcagtggttgttgttgctgctgctgccgctggtccgccagggttccgggcgctgtgctcattccaccggtcggcggtgggcttttcaggcttcttcgacggtgtcgagagtggaggaaatgtcgaccacggagtgcgcggacctcggggaggagttctggctgccggaggactttttggacgacgacttcttctccgaggaggagaaggcggccgtggcggcccggagcgagagcgacgaggaggacagcctggcggggctctcgcgccgcctcgcgggcctcctcggcgacgggggagagcgtaaggctcccgcggccaaggcggaggtgacggttgggtcgccgcagtcgacgctgtgcgggctgcccaagtcggggcaggagagccccagcggcggggcgtccaagggcacctcgccgccgtcatcgcccctggaccagaggcccgccgacccgtgggatctgctctacgaggcggccggacaggttgcgcgcatgcgcgccgccaacagcgtgccggtgccggccgccaacggtttccacggccggagcgggttcgcgccgccgccacgcaagccctcgccaccgccaatcgcacctccctccaccaaagtccctgccggtgggcactactacgacccgttcgcgcgcttggtctcgcagcgccagatgcaggctgctcagttccatctcctgaagcaacagcaactgctcaagctacagagggagcgccaccagcttgccgctgccgcggcgtggagcgcgcgccagggcgcatgcgccaagcccgtcggctgcgttcgcggcgacgcgctgcttggtctgaacccggcggcgtgcctcccgcctcagaagccgcagcaccaccaccacccccaccatgcgccggcggctccggcctctggcatgcgtgccgtgttcctcaccccgtccggccccaagcgcgagcgtaacggcactggcgtgtttcttcccaggccggctggcgccccggcagagccgaagaaaaagacagggtgttcgacggttcttgtccctgctcgcgtcgtccaggctctcaatctcaacctcgacgacctcggcgcgcagcctcgttacccaggcggctttgttcttgatcacgaggccttgattagtaggagcaacgccatgcttgcgagccagaagcgccgggctgcctcgcaggcactgtgccacagttcttgagtgatgtcgccgccgactggagcagacgaagggaaccaccaccaccaagattccggcgacagccagccagccttcgcgtggtcgtcgctccagctacattcctaataattaaaaaaatagttccgagtaccttttgttaggtagtgtgttagcagcagagttaggaagacagtagtagcgttagcatcagtggtaggtctgttcattttggatccggtgatatattggttctttggagatggaggagaagcttagaaatccagtttggtggttcgggggaacagtaataataaggggttcgagagagagagagagagaggtgttagctgatgcaagaatgttgagatttgaaaaaaaaatgttggattagggatttatcgctcatggagatgataggaaaacaacctgtcgtttccccatccatccacgagtggcttttgcttgctttggtgggctaccagcagacgcagcaagagcctctctctctctctctcgtccctctgtttgcaaaccttttcttacttgcaaaagaagcttgccgtgggctccatgaataagggcgtttgctttgttgtcctaagtatttatcaaaggaattgtttgtgtttcgtctgtaccagtgcttgctagtagtaacagtgtccccctgtttcgctactagtaatggtgtttattagttaagtagctagttgcttagcacagctgctggttgcaggtttccagtgtcgacagcagcgatataaatttatatatatcttgtgtatgcctctcatggctttgtggtacaataatatatggaatttcactactactgaac

SEQ ID NO: 138860 - DNA, 1286 bp, Zea Mays
cgctgataagcacgccgctactccccactccatccatccatccatccacccgccgcttttctctctgctttggagagggagccgcacgcagtggttgttgttgctgctgctgccgctggtccgccagatgcaggctgctcagttccatctcctgaagcaacagcaactgctcaagctacagagggagcgccaccagcttgccgctgccgcggcgtggagcgcgcgccagggcgcatgcgccaagcccgtcggctgcgttcgcggcgacgcgctgcttggtctgaacccggcggcgtgcctcccgcctcagaagccgcagcaccaccaccacccccaccatgcgccggcggctccggcctctggcatgcgtgccgtgttcctcaccccgtccggccccaagcgcgagcgtaacggcactggcgtgtttcttcccaggccggctggcgccccggcagagccgaagaaaaagacagggtgttcgacggttcttgtccctgctcgcgtcgtccaggctctcaatctcaacctcgacgacctcggcgcgcagcctcgttacccaggcggctttgttcttgatcacgaggccttgattagtaggagcaacgccatgcttgcgagccagaagcgccgggctgcctcgcaggcactgtgccacagttcttgagtgatgtcgccgccgactggagcagacgaagggaaccaccaccaccaagattccggcgacagccagccagccttcgcgtggtcgtcgctccagctacattcctaataattaaaaaaatagttccgagtaccttttgttaggtagtgtgttagcagcagagttaggaagacagtagtagcgttagcatcagtggtaggtctgttcattttggatccggtgatatattggttctttggagatggaggagaagcttagaaatccagtttggtggttcgggggaacagtaataataaggggttcgagagagagagagagagaggtgttagctgatgcaagaatgttgagatttgaaaaaaaaatgttggattagggatttatcgctcatggagatgataggaaaacaacctgtcgtttccccatccatccacgagtggcttttgcttgctttggtgggctaccagcagacgcagcaagagcctctctctctctctctcgtccctctgtttgcaaaccttttcttacttgcaaaagaagcttgccgtgggctccatgaataagggcgtttgctttgttgtcctaagtatttatcaaaggaattgtttgtgtttcgtctgtaccagtg

SEQ ID NO: 138861 - DNA, 100 bp, Zea Mays
cggccctcctggaatggcgcgaaagcgaggcgccaggctgcgtttgaccgcggacagctggccctaagaccggcagcggcggcgcgcgcgcgcagggatc

SEQ ID NO: 138862 - DNA, 1026 bp, Zea Mays
gtttcataagacaaacatctgtccatgcatccatgtgtgcatgtactacaaataaacagcctattatttaggttacttaggtgcaaaatcatttggttttcaactgaaaacaagtggtcctatattgttatggttatgaaatttgaggtgccgacagaacataataataaccgtaatcttgaatgcagtttgccctgcatgagtgatcatgatgtacaacagcacaacgatgagcctgactacatgggacactatgtcgtaatatgtgggtatgatgctgatgattgtgaatttgagataagagatcctgccagttccaggaaacgcgaacgggtgacaatgaagagcttggacgaggcccggaaatcctttgggacagacgaggacattctcttggtctctttaacaggaaagagtgggatgaagctgtcgcgtaagctacttgcctgctccatgtagataaataaataggtcactagcaaccttgtgaatacgctgtacatgtccctgtagtagttatgactgtcgagtgccagccctgtacgtagctgagaacgttctcgcagttaccgctgataacagcagtgtggtagtgagcttagtaggcaccctgtatgttggcccatgccgtcgccaaaccatggccgcgcaaaggggttcagcggcagcaaaaggctctgctgaccttgtaaacgagcaagtgttctatgtacgattgttaactgaacgtgtacagatctccggaaataagaattaaaatcgtgctcctctctgcaaccgtgctccgtccgcttgctgtgctgtgctgggagcgctcgcgttgctgtcgcctgtcggagtgtcggtcgtgtctgaatctcgccaatcattcgaggtagcttctgccagacccaaccgctggtgagttgagtgttaggtcgcaggaatcgaactggcgccgaatccaacctctcactcacccttcctacctgcctgcacgttgctttctactagcggtttgcattttagagggagcgataataattg

SEQ ID NO: 138863 - DNA, 1904 bp, Zea Mays
gctgcgctcctcgattcgacccccgcttccctccaactcgcctccgcgctcggcagtcggcacccacccctcttcctcctctctgccggcaacaggacgcaggcgcataaaaaatagcaccgccaccaccacgctccacacgctgcagtttctggaaggccaccccctctgtccgctttaaggcgccgtccgcaccggtcgcctccctcccccactagcgctgccgcggccctcgcccatatacagcgcggccgcgcccaatcgttcgttccgttccgctccgccacagcggctccgcaccaaatacaggcgtgtccaccgcgctcgccccctgctggtctgcgctgctctcgtcttgctcgccctcttattccctctcctccccgctccgaactcccaaagcctccacccgaggaggaggcctgccaggttcgttgccggccgtgtttgttcgcccggccggccggcccgaccgaggggaagctgcagcctgctcgctcgctcgagctattgcgtaggccgttgacgatgtcatgtggcccctgtgcgtcatctccgagaagctcttcaggatggcgggcgacgacggcgcgcagggggcggcgggctcgccgtaccccgacgggcggatttcactagcacgccgatcgtactacatcgatgttccgcatgtgcagcaggccttcacctgggactgcggcctcgcttgcgtgctcatggtgctcaggacgctagggattgattgctgcgacggcattgccgatctagagaggctctgccgcaccacaagcatttggacggttgacttagcatatctgttaaacaagttttcagtcagcttttctttctgtaccgtgacccttggagcaaatccacaatattctgctgaatccttttatagggagcaattgcaagaagacatcgatcgagtggatgagctatttgggaaggcgctcgatgctggaattagcattcaatgcaggtccatcaccgcatacgacattgcttttctactgttatctgggcactgcattgctattgctttagtggacaaatcgaagctaaatttgccctgcatgagtgatcatgatgtacaacagcacaacgatgagcctgactacatgggacactatgtcgtaatatgtgggtatgatgctgatgattgtgaatttgagataagagatcctgccagttccaggaaacgcgaacgggtgacaatgaagagcttggacgaggcccggaaatcctttgggacagacgaggacattctcttggtctctttaacaggaaagagtgggatgaagctgtcgcgtaagctacttgcctgctccatgtagataaataaataggtcactagcaaccttgtgaatacgctgtacatgtccctgtagtagttatgactgtcgagtgccagccctgtacgtagctgagaacgttctcgcagttaccgctgataacagcagtgtggtagtgagcttagtaggcaccctgtatgttggcccatgccgtcgccaaaccatggccgcgcaaaggggttcagcggcagcaaaaggctctgctgaccttgtaaacgagcaagtgttctatgtacgattgttaactgaacgtgtacagatctccggaaataagaattaaaatcgtgctcctctctgcaaccgtgctccgtccgcttgctgtgctgtgctgggagcgctcgcgttgctgtcgcctgtcggagtgtcggtcgtgtctgaatctcgccaatcattcgaggtagcttctgccagacccaaccgctggtgagttgagtgttaggtcgcaggaatcgaactggcgccgaatccaacctctcactcacccttcctacctgcctgcacgttgctttctactagcggtttgcattttagagggagcgataataattg

SEQ ID NO: 138864 - DNA, 1899 bp, Zea Mays
gctgcgctcctcgattcgacccccgcttccctccaactcgcctccgcgctcggcagtcggcacccacccctcttcctcctctctgccggcaacaggacgcaggcgcataaaaaatagcaccgccaccaccacgctccacacgctgcagtttctggaaggccaccccctctgtccgctttaaggcgccgtccgcaccggtcgcctccctcccccactagcgctgccgcggccctcgcccatatacagcgcggccgcgcccaatcgttcgttccgttccgctccgccacagcggctccgcaccaaatacaggcgtgtccaccgcgctcgccccctgctggtctgcgctgctctcgtcttgctcgccctcttattccctctcctccccgctccgaactcccaaagcctccacccgaggaggaggcctgccaggttcgttgccggccgtgtttgttcgcccggccggccggcccgaccgaggggaagctgcagcctgctcgctcgctcgagctattgcgtaggccgttgacgatgtcatgtggcccctgtgcgtcatctccgagaagctcttcaggatggcgggcgacgacggcgcgcagggggcggcgggctcgccgtaccccgacgggcggatttcactagcacgccgatcgtactacatcgatgttccgcatgtgcagcaggccttcacctgggactgcggcctcgcttgcgtgctcatggtgctcaggacgctagggattgattgctgcgacggcattgccgatctagagaggctctgccgcaccacaagcatttggacggttgacttagcatatctgttaaacaagttttcagtcagcttttctttctgtaccgtgacccttggagcaaatccacaatattctgctgaatccttttatagggagcaattgcaagaagacatcgatcgagtggatgagctatttgggaaggcgctcgatgctggaattagcattcaagtccatcaccgcatacgacattgcttttctactgttatctgggcactgcattgctattgctttagtggacaaatcgaagctaaatttgccctgcatgagtgatcatgatgtacaacagcacaacgatgagcctgactacatgggacactatgtcgtaatatgtgggtatgatgctgatgattgtgaatttgagataagagatcctgccagttccaggaaacgcgaacgggtgacaatgaagagcttggacgaggcccggaaatcctttgggacagacgaggacattctcttggtctctttaacaggaaagagtgggatgaagctgtcgcgtaagctacttgcctgctccatgtagataaataaataggtcactagcaaccttgtgaatacgctgtacatgtccctgtagtagttatgactgtcgagtgccagccctgtacgtagctgagaacgttctcgcagttaccgctgataacagcagtgtggtagtgagcttagtaggcaccctgtatgttggcccatgccgtcgccaaaccatggccgcgcaaaggggttcagcggcagcaaaaggctctgctgaccttgtaaacgagcaagtgttctatgtacgattgttaactgaacgtgtacagatctccggaaataagaattaaaatcgtgctcctctctgcaaccgtgctccgtccgcttgctgtgctgtgctgggagcgctcgcgttgctgtcgcctgtcggagtgtcggtcgtgtctgaatctcgccaatcattcgaggtagcttctgccagacccaaccgctggtgagttgagtgttaggtcgcaggaatcgaactggcgccgaatccaacctctcactcacccttcctacctgcctgcacgttgctttctactagcggtttgcattttagagggagcgataataattg

SEQ ID NO: 138865 - DNA, 1176 bp, Zea Mays
gcgctcctcgattcgacccccgcttccctccaactcgcctccgcgctcggcagtcggcacccacccctcttcctcctctctgccggcaacaggacgcaggcgcataaaaaatagcaccgccaccaccacgctccacacgctgcagtttctggaaggccaccccctctgtccgctttaaggcgccgtccgcaccggtcgcctccctcccccactagcgctgccgcggccctcgcccatatacagcgcggccgcgcccaatcgttcgttccgttccgctccgccacagcggctccgcaccaaatacaggcgtgtccaccgcgctcgccccctgctggtctgcgctgctctcgtcttgctcgccctcttattccctctcctccccgctccgaactcccaaagcctccacccgaggaggaggcctgccaggttcgttgccggccgtgtttgttcgcccggccggccggcccgaccgaggggaagctgcagcctgctcgctcgctcgagctattgcgtaggccgttgacgatgtcatgtggcccctgtgcgtcatctccgagaagctcttcaggatggcgggcgacgacggcgcgcagggggcggcgggctcgccgtaccccgacgggcggatttcactagcacgccgatcgtactacatcgatgttccgcatgtgcagcaggccttcacctgggactgcggcctcgcttgcgtgctcatggtgctcaggacgctagggattgattgctgcgacggcattgccgatctagagaggctctgccgcaccacaagcatttggacggttgacttagcatatctgttaaacaagttttcagtcagcttttctttctgtaccgtgacccttggagcaaatccacaatattctgctgaatccttttatagggagcaattgcaagaagacatcgatcgagtggatgagctatttgggaaggcgctcgatgctggaattagcattcaatgcaggtccatcaccgcatacgacattgcttttctactgttatctgggcactgcattgctattgctttagtggacaaatcgaagctaaagtgagtgctttcatgttgctgttactagagtgatatgtatctgcttttgattcactctttctccatgaactaaaaatttcatagaaacaaagttgaagttggttttaaaaatg

SEQ ID NO: 138866 - DNA, 934 bp, Zea Mays
gctgcgctcctcgattcgacccccgcttccctccaactcgcctccgcgctcggcagtcggcacccacccctcttcctcctctctgccggcaacaggacgcaggcgcataaaaaatagcaccgccaccaccacgctccacacgctgcagtttctggaaggccaccccctctgtccgctttaaggcgccgtccgcaccggtcgcctccctcccccactagcgctgccgcggccctcgcccatatacagcgcggccgcgcccaatcgttcgttccgttccgctccgccacagcggctccgcaccaaatacaggcgtgtccaccgcgctcgccccctgctggtctgcgctgctctcgtcttgctcgccctcttattccctctcctccccgctccgaactcccaaagcctccacccgaggaggaggcctgccaggttcgttgccggccgtgtttgttcgcccggccggccggcccgaccgaggggaagctgcagcctgctcgctcgctcgagctattgcgtaggccgttgacgatgtcatgtggcccctgtgcgtcatctccgagaagctcttcaggatggcgggcgacgacggcgcgcagggggcggcgggctcgccgtaccccgacgggcggatttcactagcacgccgatcgtactacatcgatgttccgcatgtgcagcaggccttcacctgggactgcggcctcgcttgcgtgctcatggtgctcaggacgctagggattgattgctgcgacggcattgccgatctagagaggctctgccgcaccacaaggttctctctaggactggaacttcacaattttaagtacaattagctgtacagcagaactaaagaaatgatcgtcaccttgattttgtggccctaacccctaagcatggcacatccagaaagtagaaggaacaaaaaaaaaggaaa

SEQ ID NO: 138867 - DNA, 1553 bp, Zea Mays
acgccacgaggcgaacaaccaactgcttccttccgcgccgccgccgcctacaacgaccacttcacgtgacttacctcttctccgcctcaagtgttcacggctccatcctctctagagtctaagcccatctcgcgaagccgctaacgccgaaaacgaccctacatatggaggcgaagaagtcgggtcccgccgctgccggagccgcggcgccgccgccggctaacgggtacttcagcaccgtcttctccgcgtcgcctgcggggagcgcaaatgacgcaaagcaggccgacctgtacacgatgctgaacaagcagagctccagagggcagaatggcagtggcattacagatggcaaatcacacggccgccctacttacaaggatggaaaacatgcttatccaaatgactcgtcagaatccccttacttcggttcgtccgtgcattacggtggtcgggaattctacagcagcacgttacagaagcagccagccaatgaaccccagacaaaatacaaggaggacaagtcggatggctctgctactagaggttcactttattactgaacaatctgctgggaactctcctttttttgtgaacaaggaataaaaaaggggtggagctgagcttggtttgtcataatagtgttggaactgttgatgcgagccgttaggcatggaccgaaagtaatagctgtaatccggtcggtggaggcagtatttagatgcatcatcacacctggacagacgtggatgtaggctgcgtccttttgtgttcctgttttcgctaagtgtgttcttgtggttttagatgtgcagccgtgcagtgctgaacttactaatgaactggtaggtcagcctgaagtagttttgataaaagcagttgccaaagagtctgcagctcgcaggatcacctgctatatgtgcgtgttcctgctatctttcggaaagatttgggttgtacataatctgtccttacccttcttttttaaaaaaaaattatgttcctactattcttacttacccgtactctcagtatgatggaaaaggatgaggtggagtttggtggccctgttgtgactgaggtgtaaaccaggcttgctttctatgtccgttcgttatggactggtcacggttactcgcgctccgacagacagtgtcctttgatccgatcaacatctggtgtccaatcctgacacacgctactagacgccgcaacaagcggcaacaagagaaaccgccctgggatgctactgtaagtcagtaacacacgctactacacgccgcaacagatcatggtcagtatgtatggtagagagatcaaatgtgtggagctggaacatgcttttgagttgtgaaacatggaccttttggtgggtttaaccgtttgagctgtaggggtgctgtgcttggtgtggttttggcctttgagattaggtttcggggatccatgaggtttggtctcggatttggattatcacccaaactggtgttcgggtggtttcatatttgagtttgggtgtccggcaaaattaacagtgctgctgtgtaaatttc

SEQ ID NO: 138868 - DNA, 1568 bp, Zea Mays
acgccacgaggcgaacaaccaactgcttccttccgcgccgccgccgcctacaacgaccacttcacgtgacttacctcttctccgcctcaagtgttcacggctccatcctctctagagtctaagcccatctcgcgaagccgctaacgccgaaaacgaccctacatatggaggcgaagaagtcgggtcccgccgctgccggagccgcggcgccgccgccggctaacgggtacttcagcaccgtcttctccgcgtcgcctgcggggagcgcaaatgacgcaaagcaggccgacctgtacacgatgctgaacaagcagagctccagagggcagaatggcagtggcattacagatggcaaatcacacggccgccctacttacaaggatggaaaacatgcttatccaaatgactcgtcagaatccccttacttcggttcgtccgtgcattacggtggtcgggaattctacagcagcacgttacagaagcagccagccaatgaaccccagacaaaatacaaggaggacaagtcggatggctctgctactagaggtgattggtggcaaggttcactttattactgaacaatctgctgggaactctcctttttttgtgaacaaggaataaaaaaggggtggagctgagcttggtttgtcataatagtgttggaactgttgatgcgagccgttaggcatggaccgaaagtaatagctgtaatccggtcggtggaggcagtatttagatgcatcatcacacctggacagacgtggatgtaggctgcgtccttttgtgttcctgttttcgctaagtgtgttcttgtggttttagatgtgcagccgtgcagtgctgaacttactaatgaactggtaggtcagcctgaagtagttttgataaaagcagttgccaaagagtctgcagctcgcaggatcacctgctatatgtgcgtgttcctgctatctttcggaaagatttgggttgtacataatctgtccttacccttcttttttaaaaaaaaattatgttcctactattcttacttacccgtactctcagtatgatggaaaaggatgaggtggagtttggtggccctgttgtgactgaggtgtaaaccaggcttgctttctatgtccgttcgttatggactggtcacggttactcgcgctccgacagacagtgtcctttgatccgatcaacatctggtgtccaatcctgacacacgctactagacgccgcaacaagcggcaacaagagaaaccgccctgggatgctactgtaagtcagtaacacacgctactacacgccgcaacagatcatggtcagtatgtatggtagagagatcaaatgtgtggagctggaacatgcttttgagttgtgaaacatggaccttttggtgggtttaaccgtttgagctgtaggggtgctgtgcttggtgtggttttggcctttgagattaggtttcggggatccatgaggtttggtctcggatttggattatcacccaaactggtgttcgggtggtttcatatttgagtttgggtgtccggcaaaattaacagtgctgctgtgtaaatttc

SEQ ID NO: 138869 - DNA, 108 bp, Zea Mays
aatctccaaacaacaatcctccattcctcattgttacatcgtaaaatcctgttgttgtgttgttatattgttacttccagcaattttacacaatagagaattttattc

SEQ ID NO: 138870 - DNA, 1272 bp, Zea Mays
gattagggtagattagagtgcagccaaacaaggcctaatgtgtatcctgaatcaggagaggatacttgctacttttgcattgttctaccttgtgttcagatgtggagtcaagtgagctgtaccgttatagtcgatcttttgtaattcttagaatatgtctttgttaagattgcaaaataagttgttagtacatgaaaagaagtttatttgcggggaagaataaaacacatgcaaacaatacgttcaactcacatgcaagtaatatgttaactctttgttagaattttgttggcagatgcctacatctcttatatgttcgcaaattcttattgttttggataaatcaggtcatgttgagcttaaatgcttgttatttggaatgcattggttcactttcatcaaaggcatatacttatatgaacttgtggattgcttcgtcttacttaaaaaataaacttatgatgtgttgcaggagttgctatttttggggggcctgttgcacatgaagtattgtgcattccagaagcaaattcattccatcatgaatatagttctatggcctgcgcaattgagtttgttgatgatgtacagtcagcgattgaccatatacattgttatggaagtgcacatacagattgcattgtcactacagatgataaagtagcagaaacttttctgcgtcaagttgatagtgctgctgtgtttcataatgcaagcacacgattctctgacggggctcgttttggattgggtgctgaggttggcataagcacagggcgtatacatgctcgtgggcccgtgggtgttgaaggtctcttaacaacgcgctggatcatgcgagggagcgggcaagtggtgaacggtgacaatgatatcgcatacacccataagaaccttccattgccatgaggccgtttttgtgcttcatcaggattcgtgtctatccagtgatgtttgatagtgtcgtcagacaggagcagagagtggtgaatcttttcgatgagggacggtgaactgcaatgtccacttatccagtcatttttatctagaacattctggtgagacacccaccaccccgataaagcagtgctgggagtagtagagcactaatgtaccgaggctgtgtctagtctaggttaaacaagagaattcggttatattgttaatttttttgggtctgattgaacatatatgttgtcagtttttgtagtgatacatatatttctttaaatcctacttgatcgcaagagttatgagctatcctaattgggt

SEQ ID NO: 138871 - DNA, 352 bp, Zea Mays
ttttattcatttttactgtttgtgcaatcaattaaatgtgttttattcttgctgtcactgcgcgatgttcttttgttctgaattcaatgatgatagatatctcactgatggtatatttttctacaattgcaacagtgctgctgtgtttcataatgcaagcacacgattctctgacggggctcgttttggattgggtgctgaggttggcataagcacagggcgtatacatgctcgtgggcccgtgggtgttgaaggtctcttaacaacgcgctggatcatgcgagggagcgggcaagtggtgaacggtgacaatgatatcgcatacacccataagaaccttccattgccatga

SEQ ID NO: 138872 - DNA, 1635 bp, Zea Mays
atggccaccgcagaccagagccgtattttcatgaaggacgtcaaacgcgtcatcatcaagctggggaatcctattcctatctatggaattgaacgtgtccgggaaaaagagggaattgaacgggctgaacgggcccgggaaaaagtgggcactgcagttgtcacgaggcatgatgggcgagtatccacaggcaattttggtgttctttgtgaacaggtgaaagagataaatgctctaggatacgaggtgatcattgtgtcctcaggtgctgttggtgtggggaagcagaggctcaattacaggaagcttgtcaatagcagctttgctgatatgcaaaagccacagacggagctggatggaaaggcttgcgctgccgttggacagagtggcctcatggctctctatgatatgctatttactcaacttgatgtatcctcttcccaacttcttgtgacagacagtgattttgagaatccaaacttcagggagaggcttcgtgaaactgttgagtcactattagatcttaaagttgtaccaatatttaatgaaaatgatgccatcagcaccagaaaggctccgtatgaggattcatcgggtatattttgggataatgacagtttagccggtcttttggctatagaacttaaagcagatcttcttgttctactcagtgacgtggatggcctctacagcggtccacctagtgaacctcaatcaaagatgatacatacatacatcaaagataaatatcataacgaaattacttttggggataagtcacgtgtaggtagaggaggaatgacagctaaagtgaaggctgctctcgtggcttcaaacagtggcacacctgttgttataacaagtggatctgcatctgggagcatcattagagttctccaaggagagaagattggtactctctttcataaggacgcgagtttgtgggaaccatccagtgatgttagtgcatgtgagatggctgttactgcaagagaatgttcaaggcgtctgcagaatttgtcgtcggatgagcgcaataaaatattgctagacgtggcggatgctttggagaaaaatgagaatctaattaggaccgagaatgaagccgatgtagctgcagcgcaagatgctggatatgagaaatttttggttgatagattgaccctaaagccaggaaagatatcagccctcgcgaaatccattcgcactcttgcacgtatggaagacccaatcaaccaaatactcaaaagaacagagattgctgaaaatttaattctcgagaaaacatcatgtcctttgggtgtcctattggttatttttgagtccaggcctgatgccttggtccagattgcatctttagcgattcgaagtggcaatggtcttctcttgaaaggtggaaaagaagccatgagatcaaacaaagtattgcataagcttcatgatgtaattgatcttgtcattccaagaggcagcaataagctggtttcacaaatcaagacatcaactaagatccctgttcttggtcatgctgatggtatctgtcatgtatacatcgacaaatcagctaacatgaatatggcaaaacaaatagtgatggatgccaaaattgattacccagcagcctgcaatgctatg

SEQ ID NO: 138873 - DNA, 768 bp, Zea Mays
atgatgttcaaaactcaatccaacaagctctccttcttcttcgctattctattctactcggtatcttgtccagttcgctcggcatctttgactagctcgtccacctcgccatctcccttcttccatgcgggcgctcacgtatttctgttctcgcgcaccctctcgccgcagcgaggggccaagggctcgttgtcatcgccgtcgttcggacggaaggtggcgaggtcgcgctcagtcggctgcgacagctacagcttctcgggagacttcctggagcgcctctccaccggctttggcggctgcacgctccaccgcgtcgactcccacagtcccactgcaagcccccaagcggccaagcccaaggccgcggacgcgctaggccaccagggcggcagcgaggaacacgagcaaggaccagcaccaccgcgtcaagtgcgtcgggttcttctgtggctgcctaggcactgcagccccgccttcgtcatcctactggctctcggcacccgacgacaagaacgacgggagcacaaggggcaccggctcatggagccactggagctgggcttgggtgctagcgagcaccatgagggcactgaggctgaccagctcctcgtccaacaagagcatcatggccgcgcccacaaccacgtgaacgccaccatgcatgcgaggtttgcttcgtgggttgatcgccgcgctgctcaatggctggtgaatcatcaacccatgaacatactagaacaacataaatgtattcatctttcttga

SEQ ID NO: 138874 - DNA, 1089 bp, Zea Mays
gcaagaatacacagacattcaattttaacatgatgtacattcataggaattttcagttctctaggttgcaattatatataacggtcctaaaaattgattcacttaatgtaaagaatccatgacgttatcatggttgtgagcgcttggaactcacttctgttcttgaagatgaatgttgccattatgctaacatgagctgccctcctattttgtctggttaaggtacttttgcttattcctgtgggatttcttcaatgggtcatcatagctcttgctggtggtgcatcatcttggttcatcactttaaatttgaaggaatgcactgaaggagctgatctaatggttctgatggctagtgcatcagtgctgcaatttgctctggcactgttcatcaaagtttactttttcgcctgaggtttgcttgatgattttgcaaaggtgacctgatgcgccctttgcccacggcttgttctggaatacatcttttgaaagggcatggcagaccagttctactcgacatcgtgacatacgtactgaccctagattgttatgctttgggcgttcttcatttgaagtgtctaatctgcaagtctctatctagctagggaacagaattttacagcgtgccgtacagagtaccgagtttaggcaccaaagtctttccacgttgttcagtgaaagcccttcacttggatttgcatacaatcctttcttgggtaaagatctccagtgtgtatttgtgtgctagtacgtctcatccggttttcgaacgtccaactgacaactgatttcgcatagctcttttttttaaaaaaaatggtttagcgaataaaattagcatgctctagccacgaattttcaacgaaaaaaggtttccggatttgtttgctatttagctcagaattgaagataagaagagccttatggtcagacgtgtatcttggaatttttgtatggttgcagaagggaaggtcctgttcctaggatcaagagattagaactatgtatagttttttcaaagtaggttcatgtatgttattatttcaaataaacttcctttccacaaatttcattctgagttcatgagta

SEQ ID NO: 138875 - DNA, 1513 bp, Zea Mays
tcgacgacgacttcctctctctcacgctagagacgcgcagtcgcgcagagtcctggctttttgcccctttccggctttgccccccttccccccaaaccacaccgatcccaatcccgccgtatccggcgaacgcgcgccgcggccatgtgcagctgctgagagaaggagcgagcgcaacgacgccactggccatggacgagggctattccaacctccccaccagccacctcctcggctccgtccccgctgtgacacaagatgacaggaaattgggtccccccgccgcccaagatgcagctgccacctctcggttgcaggagttcccacctggaggtggtaatgttggagggtatcggccaccaggtggccctgcagatggagatgttgaaaaccaagcagattggaaaggatacttcaatgttgcatcttatgctccatacttcaatgttgatactgatgttgtagttgacaggctcatcagttcagtttatccaatggatggtttttacaggaaaattgatgctaatcctgacatgtatgggcctttatggatcaccactactctgattttcatgcttgctgtgtttggtaactatgccacttatctggtgcaaactaaaaaggatatggacatatggaactttgatgttggttatttcagttgggcagcatcagtcatgtatagttatgctatcattgtgcccgtcgtgttctttttcctgtttcagtattttggatcacgcccaagtcttgttcgattttggtgtatgtggggctattctctgtttatcttcatacctgcatctgtacttttgcttattcctgtgggatttcttcaatgggtcatcatagctcttgctggtggtgcatcatcttggttcatcactttaaatttgaaggaatgcactgaaggagctgatctaatggttctgatggctagtgcatcagtgctgcaatttgctctggcactgttcatcaaagtttactttttcgcctgaggtttgcttgatgattttgcaaaggtgacctgatgcgccctttgcccacggcttgttctggaatacatcttttgaaagggcatggcagaccagttctactcgacatcgtgacatacgtactgaccctagattgttatgctttgggcgttcttcatttgaagtgtctaatctgcaagtctctatctagctagggaacagaattttacagcgtgccgtacagagtaccgagtttaggcaccaaagtctttccacgttgttcagtgaaagcccttcacttggatttgcatacaatcctttcttgggtaaagatctccagtgtgtatttgtgtgctagtacgtctcatccggttttcgaacgtccaactgacaactgatttcgcatagctcttttttttaaaaaaaatggtttagcgaataaaattagcatgctctagccacgaattttcaacgaaaaaaggtttccggatttgtttgctatttagctcagaattgaagataagaagagccttatggtc

SEQ ID NO: 138876 - DNA, 1541 bp, Zea Mays
gaagcaacaccgagcacgagggcattcgacgacgacttcctctctctcacgctagagacgcgcagtcgcgcagagtcctggctttttgcccctttccggctttgccccccttccccccaaaccacaccgatcccaatcccgccgtatccggcgaacgcgcgccgcggccatgtgcagctgctgagagaaggagcgagcgcaacgacgccactggccatggacgagggctattccaacctccccaccagccacctcctcggctccgtccccgctgtgacacaagatgacaggaaattgggtccccccgccgcccaaggttatgcagctgccacctctcggttgcaggagttcccacctggaggtggtaatgttggagggtatcggccaccaggtggccctgcagatggagatgttgaaaaccaagcagattggaaaggatacttcaatgttgcatcttatgctccatacttcaatgttgatactgatgttgtagttgacaggctcatcagttcagtttatccaatggatggtttttacaggaaaattgatgctaatcctgacatgtatgggcctttatggatcaccactactctgattttcatgcttgctgtgtttggtaactatgccacttatctggtgcaaactaaaaaggatatggacatatggaactttgatgttggttatttcagttgggcagcatcagtcatgtatagttatgctatcattgtgcccgtcgtgttctttttcctgtttcagtattttggatcacgcccaagtcttgttcgattttggtgtatgtggggctattctctgtttatcttcatacctgcatctgtacttttgcttattcctgtgggatttcttcaatgggtcatcatagctcttgctggtggtgcatcatcttggttcatcactttaaatttgaaggaatgcactgaaggagctgatctaatggttctgatggctagtgcatcagtgctgcaatttgctctggcactgttcatcaaagtttactttttcgcctgaggtttgcttgatgattttgcaaaggtgacctgatgcgccctttgcccacggcttgttctggaatacatcttttgaaagggcatggcagaccagttctactcgacatcgtgacatacgtactgaccctagattgttatgctttgggcgttcttcatttgaagtgtctaatctgcaagtctctatctagctagggaacagaattttacagcgtgccgtacagagtaccgagtttaggcaccaaagtctttccacgttgttcagtgaaagcccttcacttggatttgcatacaatcctttcttgggtaaagatctccagtgtgtatttgtgtgctagtacgtctcatccggttttcgaacgtccaactgacaactgatttcgcatagctcttttttttaaaaaaaatggtttagcgaataaaattagcatgctctagccacgaattttcaacgaaaaaaggtttccggatttgtttgctatttagctcagaattgaagataagaagagccttatggtc

SEQ ID NO: 138877 - DNA, 921 bp, Zea Mays
agagtcctggctttttgcccctttccggctttgccccccttccccccaaaccacaccgatcccaatcccgccgtatccggcgaacgcgcgccgcggccatgtgcagctgctgagagaaggagcgagcgcaacgacgccactggccatggacgagggctattccaacctccccaccagccacctcctcggctccgtccccgctgtgacacaagatgacaggaaattgggtccccccgccgcccaagatgcagctgccacctctcggttgcaggagttcccacctggaggtggtaatgttggagggtatcggccaccaggtggccctgcagatggagatgttgaaaaccaagcagattggaaaggatacttcaatgttgcatcttatgctccatacttcaatgttgatactgatgttgtagttgacaggctcatcagttcagtttatccaatggatggtttttacaggaaaattgatgctaatcctgacatgtaagtttctcctatggtcacaatttgcaatctgactctttgtaaaacaaaacatgtctctttgttacctttctattgtttcagtgtcaacatttctagtgaatagtctaatatgcaatcatgtgataaaaatgtgcataaaatgatatttttcatcataactaagcattgttaatatggaaagaaatgttgcaagttgtataagatgcatattatgaatctgttttaacacttcattgtttattaactgagaaactgataatagcatgagatgacgattcagataggatagttgcagagtttttacaagagtatacaaaaatatagtgcctaagtagcattatacagattgtagcaggtagtgtgtatttgctgcaagcatagttttgggggaactagacatcacagtgttttgaatggattttgatccaa

SEQ ID NO: 138878 - DNA, 1297 bp, Zea Mays
ccttgtattcagagcctgaatagacaaacacaaatatagttgactacgataacaccttgtagctatactctgaagtcgaactgtagtagtatttgttaagcaagcagcagtcacatgtggataatcttgttgaaacacagcaactctacatacatataagaggagcagcagagaggccattatttctcaggggtttctccatgcgaagaaggcgatattctcgactgttcacgaaaagcatctcaagaaatcagaatggtcctgattctctgttctttcgtcctcgtattccacttcaccgtcccaaagatcctccaagagaacttcgccatcagatcgtaagggatggaccaatcaaatatgtcgaagttctctccgatccttgttctgtcggcactcttaggaagcacactctgccccatttgaatcccccagcgcagagcgacctgggcaggcgttttctgcaacctctcggcaacagacatgacaacggggttgctaaggacgtttggcccactgtatccaggtgatccgggtgagcctaagggcgaatatgcctgcagcaacggaaccagaggctcagccagccaatgggaagtgagagcagatgcttatatatgttctctaaaacttacagaaagatgaacacccgttgactggcacagcttgcgtagcttgtcttgctgccaaactggatggcactcgacctggttgaccgctggaggcacacgcgcaacagcgagcagatcctgcagcttcttgcaggaaaaattgctcacaccaatcgcgcgagctttgcctgcgtggtatagcttctccatcgctccccatgtagcagggatgtccgtagggataaggttttccgggataaacatggttcctttctggatacggattggaccatgaatctgtaaagtaaggtcattatcagatagatcttagcaggtaaacagttgtcagactattatctggtaggtaccaagatcaagaacaggaatttacaaggtacagatctacgtagtcgagccgcaaatcttcgagggccgagcaaagatcctcctgcacatcttcaggtgcatggttacctggcctgcaaaattcagagtttctgatcttagagcagaaaccaatgatccgcatcattgcttcagataagcttgagaagagaagccttaccatagcttagaggtgacaaacagatcttcacgcttgaccacgccatcctcaaatagtttctgtaaagccagtccaacctataaaagagaatagacttcaatctaacaactgattgtttatg

SEQ ID NO: 138879 - DNA, 446 bp, Zea Mays
ccttgtattcagagcctgaatagacaaacacaaatatagttgactacgataacaccttgtagctatactctgaagtcgaactgtagtagtatttgttaagcaagcagcagtcacatgtggataatcttgttgaaacacagcaactctacatacatataagaggagcagcagagaggccattatttctcaggggtttctccatgcgaagaaggcgatattctcgactgttcacgaaaagcatctcaagaaatcagaatggtcctgattctctgttctttcgtcctcgtattccacttcaccgtcccaaagatcctccaaggtattgtatccactgttcgggtgaactacaaactcgacttttagcagcctaacctgcatgttaggaataaaaagaaatatcagataggaaaaccagattgaaaacctaaatagaggatgcctgcatt

SEQ ID NO: 138880 - DNA, 1612 bp, Zea Mays
gttgcttgagtgttgcaattcctgaatttttccgccccccactgaatgactgaataatgtgcaggcaggttacaggcacattgactgtgctcaagcatacaacaacgagaaagaggtcgggtttggtctcaggagagtgctggacgagggcatagtcaagcgtgaagatctcttcatcacctccaagctttgggacattaaccatgcggcggaggacgtcccggttgcactgaacggcacactgaaggacttgcaaactgactacgtggatctctacctcatgcattggccggtgaggatgaagaaaggcgccggcttcggcccgcacgccgtcgtcccgtcagacatccccgcgacgtgggccgcgatggaggagctgtacgacgccgggaaggcgcgcgccatcggcgtcagcaacttctcgagcaagaagctggcggacctgctggccgtggcgcgcgtgcgccccgccgtcgaccaggtggagtgccacccggtgtggcggcagggcaggctccgcgcgttctgcgcctcccaagggatacacctctccgcctactcgccgctgggctcgccgggcacggcgacggtgaaggcgggcgcggtgctggagcacccggccgtcgtctcggcggcggagacgctggggaagacgccggcgcaggtggcgctgcgctggggcgtccagatggggcacagcgtgctcccgaagagcaccgacgaggggaggatcagggcgaatctcgacgtcttcggctggtccttgccggaggacctgctcgccaagttctctgagatcgagcaggaacggctgattcgtgcgggcttctttgttgatcccgacggcgtgttcaaatccatcgaggagttttgggatggcgagatctgaacaactgtcctgactgggaggagctgagtgacggaatttggccactggcaaggcgtactgtgcctgtggaagaataaatttatgcgtatgaactctgaaaggcagcgtagttttcaggtagtttgtgctcggcactccaataattcctcgatgctcaagtggtctatctatcctctaaactctaaaggccatgccgctcaagcggtcttttaagccagcatatgcacaatgggaaaataggtgctaagactctctccagcaagatccggtaaaaggtccggtactctaaatttatcgtttctttggctcctttttccctccagcagcgatcggtaaacgatgcgctataataccggacgcctccgttggcctgctatgtgtcagattcatccgctcactttgtcatttttttgcagcaagcctacgtggacgctcccttctcatttattgctcgttttttaatcataaaataaagtactgctcttgccattttgaaaaaaaaacaatattttgtagtgggtcaatatttttcagtaggtctacgattttgtccaatactgaataaaatgtataaaataaagtctggtagcatttaaaaaaatttagtaatataggttaccaaacgcaattaatttaattagttcgtaattcaattttgtgcatccattttattgtgtgtaatggaaacaaaacaaaaataaaactaaatggatggaaaaaaaa

SEQ ID NO: 138881 - DNA, 1866 bp, Zea Mays
atgcaacgctggttcccgggcccggcctataaactccacatgtcctccctgcaggctgctcctctcatcgtccgacgcgactgctttccatttgccactgtcggtgtcgacggacgcagatattctgtggctcaaacctttggaggcacgggcacgggcacggggcaccgaagtgttggtatacgcggcagccgggatagcgagcgtatggccacctacttcgtcctcaacaccggcgcgaagatcccgtcggtcgggctcggcacctggcaggccgacaacgggctcgtcggcgacgccgtctatgccgccgtgaaggcaggttacaggcacattgactgtgctcaagcatacaacaacgagaaagaggtcgggtttggtctcaggagagtgctggacgagggcatagtcaagcgtgaagatctcttcatcacctccaagctttgggacattaaccatgcggcggaggacgtcccggttgcactgaacggcacactgaaggacttgcaaactgactacgtggatctctacctcatgcattggccggtgaggatgaagaaaggcgccggcttcggcccgcacgccgtcgtcccgtcagacatccccgcgacgtgggccgcgatggaggagctgtacgacgccgggaaggcgcgcgccatcggcgtcagcaacttctcgagcaagaagctggcggacctgctggccgtggcgcgcgtgcgccccgccgtcgaccaggtggagtgccacccggtgtggcggcagggcaggctccgcgcgttctgcgcctcccaagggatacacctctccgcctactcgccgctgggctcgccgggcacggcgacggtgaaggcgggcgcggtgctggagcacccggccgtcgtctcggcggcggagacgctggggaagacgccggcgcaggtggcgctgcgctggggcgtccagatggggcacagcgtgctcccgaagagcaccgacgaggggaggatcagggcgaatctcgacgtcttcggctggtccttgccggaggacctgctcgccaagttctctgagatcgagcaggaacggctgattcgtgcgggcttctttgttgatcccgacggcgtgttcaaatccatcgaggagttttgggatggcgagatctgaacaactgtcctgactgggaggagctgagtgacggaatttggccactggcaaggcgtactgtgcctgtggaagaataaatttatgcgtatgaactctgaaaggcagcgtagttttcaggtagtttgtgctcggcactccaataattcctcgatgctcaagtggtctatctatcctctaaactctaaaggccatgccgctcaagcggtcttttaagccagcatatgcacaatgggaaaataggtgctaagactctctccagcaagatccggtaaaaggtccggtactctaaatttatcgtttctttggctcctttttccctccagcagcgatcggtaaacgatgcgctataataccggacgcctccgttggcctgctatgtgtcagattcatccgctcactttgtcatttttttgcagcaagcctacgtggacgctcccttctcatttattgctcgttttttaatcataaaataaagtactgctcttgccattttgaaaaaaaaacaatattttgtagtgggtcaatatttttcagtaggtctacgattttgtccaatactgaataaaatgtataaaataaagtctggtagcatttaaaaaaatttagtaatataggttaccaaacgcaattaatttaattagttcgtaattcaattttgtgcatccattttattgtgtgtaatggaaacaaaacaaaaataaaactaaatggatggaaaaaaaa

SEQ ID NO: 138882 - DNA, 2048 bp, Zea Mays
atgcaacgctggttcccgggcccggcctataaactccacatgtcctccctgcaggctgctcctctcatcgtccgacgcgactgctttccatttgccactgtcggtgtcgacggacgcagatattctgtggctcaaacctttggaggcacgggcacgggcacggggcaccgaagtgttggtatacgcggcagccgggatagcgagcgtatggccacctacttcgtcctcaacaccggcgcgaagatcccgtcggtcgggctcggcacctggcaggccgacaacgggctcgtcggcgacgccgtctatgccgccgtgaaggcaggttacaggcacattgactgtgctcaagcatacaacaacgagaaagaggtgatgtgcaccaactcttcagcaagcagatgattgatacatctgaatttcgaaaccaaagtaaccggtgctctgctctgctctgcaggtcgggtttggtctcaggagagtgctggacgagggcatagtcaagcgtgaagatctcttcatcacctccaagctttgggacattaaccatgcggcggaggacgtcccggttgcactgaacggcacactgaaggacttgcaaactgactacgtggatctctacctcatgcattggccggtgaggatgaagaaaggcgccggcttcggcccgcacgccgtcgtcccgtcagacatccccgcgacgtgggccgcgatggaggagctgtacgacgccgggaaggcgcgcgccatcggcgtcagcaacttctcgagcaagaagctggcggacctgctggccgtggcgcgcgtgcgccccgccgtcgaccaggtggagtgccacccggtgtggcggcagggcaggctccgcgcgttctgcgcctcccaagggatacacctctccgcctactcgccgctgggctcgccgggcacggcgacggtgaaggcgggcgcggtgctggagcacccggccgtcgtctcggcggcggagacgctggggaagacgccggcgcaggtggcgctgcgctggggcgtccagatggggcacagcgtgctcccgaagagcaccgacgaggggaggatcagggcgaatctcgacgtcttcggctggtccttgccggaggacctgctcgccaagttctctgagatcgagcaggcaagtcgagtggcatcggaaagtcggattgcaggtgctgcatggcaaatgtcttaccttttcttccctctccgtgagtgactgtgatttgcaggaacggctgattcgtgcgggcttctttgttgatcccgacggcgtgttcaaatccatcgaggagttttgggatggcgagatctgaacaactgtcctgactgggaggagctgagtgacggaatttggccactggcaaggcgtactgtgcctgtggaagaataaatttatgcgtatgaactctgaaaggcagcgtagttttcaggtagtttgtgctcggcactccaataattcctcgatgctcaagtggtctatctatcctctaaactctaaaggccatgccgctcaagcggtcttttaagccagcatatgcacaatgggaaaataggtgctaagactctctccagcaagatccggtaaaaggtccggtactctaaatttatcgtttctttggctcctttttccctccagcagcgatcggtaaacgatgcgctataataccggacgcctccgttggcctgctatgtgtcagattcatccgctcactttgtcatttttttgcagcaagcctacgtggacgctcccttctcatttattgctcgttttttaatcataaaataaagtactgctcttgccattttgaaaaaaaaacaatattttgtagtgggtcaatatttttcagtaggtctacgattttgtccaatactgaataaaatgtataaaataaagtctggtagcatttaaaaaaatttagtaatataggttaccaaacgcaattaatttaattagttcgtaattcaattttgtgcatccattttattgtgtgtaatggaaacaaaacaaaaataaaactaaatggatggaaaaaaaa

SEQ ID NO: 138883 - DNA, 1312 bp, Zea Mays
gtttatcctttcccttcaactgttgcttgagtgttgcaattcctgaatttttccgccccccactgaatgactgaataatgtgcaggcaggttacaggcacattgactgtgctcaagcatacaacaacgagaaagaggtcgggtttggtctcaggagagtgctggacgagggcatagtcaagcgtgaagatctcttcatcacctccaagctttgggacattaaccatgcggcggaggacgtcccggttgcactgaacggcacactgaaggacttgcaaactgactacgtggatctctacctcatgcattggccggtgaggatgaagaaaggcgccggcttcggcccgcacgccgtcgtcccgtcagacatccccgcgacgtgggccgcgatggaggagctgtacgacgccgggaaggcgcgcgccatcggcgtcagcaacttctcgagcaagaagctggcggacctgctggccgtggcgcgcgtgcgccccgccgtcgaccaggtggagtgccacccggtgtggcggcagggcaggctccgcgcgttctgcgcctcccaagggatacacctctccgtacgtgcagttagttagttagttattacaaggattcttttgaaaaccactgctggtttgatcggaggttctcgacgaccggctgtcgccgacgccgcgttggtcggtcgggtaggcctactcgccgctgggctcgccgggcacggcgacggtgaaggcgggcgcggtgctggagcacccggccgtcgtctcggcggcggagacgctggggaagacgccggcgcaggtggcgctgcgctggggcgtccagatggggcacagcgtgctcccgaagagcaccgacgaggggaggatcagggcgaatctcgacgtcttcggctggtccttgccggaggacctgctcgccaagttctctgagatcgagcaggaacggctgattcgtgcgggcttctttgttgatcccgacggcgtgttcaaatccatcgaggagttttgggatggcgagatctgaacaactgtcctgactgggaggagctgagtgacggaatttggccactggcaaggcgtactgtgcctgtggaagaataaatttatgcgtatgaactctgaaaggcagcgtagttttcaggtagtttgtgctcggcactccaataattcctcgatgctcaagtggtctatctatcctctaaactctaaaggccatgccgctcaagcggtcttttaagccagcatatgcacaatgggaaaataggtgctaagactctctccagcaagatccggtaaaaggtccggtactct

SEQ ID NO: 138884 - DNA, 1478 bp, Zea Mays
atgcaacgctggttcccgggcccggcctataaactccacatgtcctccctgcaggctgctcctctcatcgtccgacgcgactgctttccatttgccactgtcggtgtcgacggacgcagatattctgtggctcaaacctttggaggcacgggcacgggcacggggcaccgaagtgttggtatacgcggcagccgggatagcgagcgtatggccacctacttcgtcctcaacaccggcgcgaagatcccgtcggtcgggctcggcacctggcaggccgacaacgggctcgtcggcgacgccgtctatgccgccgtgaaggcaggttacaggcacattgactgtgctcaagcatacaacaacgagaaagaggtcgggtttggtctcaggagagtgctggacgagggcatagtcaagcgtgaagatctcttcatcacctccaagctttgggacattaaccatgcggcggaggacgtcccggttgcactgaacggcacactgaaggacttgcaaactgactacgtggatctctacctcatgcattggccggtgaggatgaagaaaggcgccggcttcggcccgcacgccgtcgtcccgtcagacatccccgcgacgtgggccgcgatggaggagctgtacgacgccgggaaggcgcgcgccatcggcgtcagcaacttctcgagcaagaagctggcggacctgctggccgtggcgcgcgtgcgccccgccgtcgaccaggtggagtgccacccggtgtggcggcagggcaggctccgcgcgttctgcgcctcccaagggatacacctctccgttctcgacgaccggctgtcgccgacgccgcgttggtcggtcgggtaggcctactcgccgctgggctcgccgggcacggcgacggtgaaggcgggcgcggtgctggagcacccggccgtcgtctcggcggcggagacgctggggaagacgccggcgcaggtggcgctgcgctggggcgtccagatggggcacagcgtgctcccgaagagcaccgacgaggggaggatcagggcgaatctcgacgtcttcggctggtccttgccggaggacctgctcgccaagttctctgagatcgagcaggaacggctgattcgtgcgggcttctttgttgatcccgacggcgtgttcaaatccatcgaggagttttgggatggcgagatctgaacaactgtcctgactgggaggagctgagtgacggaatttggccactggcaaggcgtactgtgcctgtggaagaataaatttatgcgtatgaactctgaaaggcagcgtagttttcaggtagtttgtgctcggcactccaataattcctcgatgctcaagtggtctatctatcctctaaactctaaaggccatgccgctcaagcggtcttttaagccagcatatgcacaatgggaaaataggtgctaagactctctccagcaagatccggtaaaaggtccggtactct

SEQ ID NO: 138885 - DNA, 1568 bp, Zea Mays
atgcaacgctggttcccgggcccggcctataaactccacatgtcctccctgcaggctgctcctctcatcgtccgacgcgactgctttccatttgccactgtcggtgtcgacggacgcagatattctgtggctcaaacctttggaggcacgggcacgggcacggggcaccgaagtgttggtatacgcggcagccgggatagcgagcgtatggccacctacttcgtcctcaacaccggcgcgaagatcccgtcggtcgggctcggcacctggcaggccgacaacgggctcgtcggcgacgccgtctatgccgccgtgaaggcaggttacaggcacattgactgtgctcaagcatacaacaacgagaaagaggtcgggtttggtctcaggagagtgctggacgagggcatagtcaagcgtgaagatctcttcatcacctccaagctttgggacattaaccatgcggcggaggacgtcccggttgcactgaacggcacactgaaggacttgcaaactgactacgtggatctctacctcatgcattggccggtgaggatgaagaaaggcgccggcttcggcccgcacgccgtcgtcccgtcagacatccccgcgacgtgggccgcgatggaggagctgtacgacgccgggaaggcgcgcgccatcggcgtcagcaacttctcgagcaagaagctggcggacctgctggccgtggcgcgcgtgcgccccgccgtcgaccaggtggagtgccacccggtgtggcggcagggcaggctccgcgcgttctgcgcctcccaagggatacacctctccgtacgtgcagttagttagttagttattacaaggattcttttgaaaaccactgctggtttgatcggaggttctcgacgaccggctgtcgccgacgccgcgttggtcggtcgggtaggcctactcgccgctgggctcgccgggcacggcgacggtgaaggcgggcgcggtgctggagcacccggccgtcgtctcggcggcggagacgctggggaagacgccggcgcaggtggcgctgcgctggggcgtccagatggggcacagcgtgctcccgaagagcaccgacgaggggaggatcagggcgaatctcgacgtcttcggctggtccttgccggaggacctgctcgccaagttctctgagatcgagcaggcaagtcgagtggcatcggaaagtcggattgcaggtgctgcatggcaaatgtcttaccttttcttccctctccgtgagtgactgtgatttgcaggaacggctgattcgtgcgggcttctttgttgatcccgacggcgtgttcaaatccatcgaggagttttgggatggcgagatctgaacaactgtcctgactgggaggagctgagtgacggaatttggccactggcaaggcgtactgtgcctgtggaagaataaatttatgcgtatgaactctgaaaggcagcgtagttttcaggtagtttgtgctcggcactccaataattcctcgatgctcaagtggtctatctatcctctaaactctaaaggccatgccgctcaagcggtcttttaagcc

SEQ ID NO: 138886 - DNA, 1156 bp, Zea Mays
tagagattagagaaacgtgtggaaaaaaaagatcggtacagaagaaggcctgggccgaataacccatactaggccggccgggcgccggattcctcattccttccattttacccctccgtccgtctctcacactgtctctctccaccctctcgctctccgacaaggcgacgacgggtaggccaccgccgccggcgccgtcccactacgacaactgctgaggccttcatcgctttcttcgccggcgacgagcacccaccaactaaggtcatggaagagatgatagatctaacgggggatggaggtgttcttaagacagtagtgcggaaagcaaaagatgatgctatagcgccatccgagagcctgcccttggttgatgttcattacgaaggtacacttgctgagactggtgaagttttcgataccacccatgaagataactctattttctcatttgaaattggacaaggcgctgtcatcaaagcatgggatatagccttaagaactatgaaggttggcgaggttgcaaaaattacatgcaaatcagaatatgcatatggagctgcaggctcaccaccagagatacctcctaatgcaacccttatttttgaggtggagctagtagcttgcaggccgaggaaaggttcaagcttaggtagtgtatctgatgagaaagccagacttgaagaacttaagaagcaacgggagctagctgctgctaccaaagaagaggagaaaaagaagagggaggaagcgaaggccgcggcagcagcccgggtgcaagcaaagcttgatgccaagaaggggaaggggaagggaaagggaaaatagatcgtgacgttgctgctgactattgttgtaaccaagaaaataattgtgggagcgtcctcaaactgctccgtcacttgctggttactgtgcttgatgttgtagcgtggactaatgtatcgaaaagacctaagtataaataatgtctggtatctacgtagatcactaaccgtatcgtatgcatcacagattggcgtggctgctgatatgagatagcatgtctgatttgggatgacatgttggtcagttcgtgttcgacaagctgcatgttttgtacatgaatgtcaaatactcaaatattggaactgcggagtttgttaaaatagtctac

SEQ ID NO: 138887 - DNA, 1011 bp, Zea Mays
tagagattagagaaacgtgtggaaaaaaaagatcggtacagaagaaggcctgggccgaataacccatactaggccggccgggcgccggattcctcattccttccattttacccctccgtccgtctctcacactgtctctctccaccctctcgctctccgacaaggcgacgacgggtaggccaccgccgccggcgccgtcccactacgacaactgctgaggccttcatcgctttcttcgccggcgacgagcacccaccaattcattacgaaggtacacttgctgagactggtgaagttttcgataccacccatgaagataactctattttctcatttgaaattggacaaggcgctgtcatcaaagcatgggatatagccttaagaactatgaaggttggcgaggttgcaaaaattacatgcaaatcagaatatgcatatggagctgcaggctcaccaccagagatacctcctaatgcaacccttatttttgaggtggagctagtagcttgcaggccgaggaaaggttcaagcttaggtagtgtatctgatgagaaagccagacttgaagaacttaagaagcaacgggagctagctgctgctaccaaagaagaggagaaaaagaagagggaggaagcgaaggccgcggcagcagcccgggtgcaagcaaagcttgatgccaagaaggggaaggggaagggaaagggaaaatagatcgtgacgttgctgctgactattgttgtaaccaagaaaataattgtgggagcgtcctcaaactgctccgtcacttgctggttactgtgcttgatgttgtagcgtggactaatgtatcgaaaagacctaagtataaataatgtctggtatctacgtagatcactaaccgtatcgtatgcatcacagattggcgtggctgctgatatgagatagcatgtctgatttgggatgacatgttggtcagttcgtgttcgacaagctgcatgttttgtacatgaatgtcaaatactcaaatattgg

SEQ ID NO: 138888 - DNA, 2205 bp, Zea Mays
ctctctctctctctctctctctctctctctctctctctctcttgcttcagttcggttcggacacagcaactagctagctgatcgatcgagagcaagcaatggccggcggccgtcgtctctcccctgcgtgcctccttcgtcgtctcaccgtcgccctcgtggtcctcaccgccctgccggagctcgccgctgcccgcacccgccgctacacgttcaatgtgactatggcaacggtgacgcgcctgtgcgtgacgaagagcgtccccacggtgaacgggcggttcccggggccgaggctcgtcgtgcgcgagggagaccgactcgtggtgcaggtccacaacaacatcaacagcaacgtaacgttccactggcacggcgtccggcagctgcgcagcgggtgggcggacgggccgtcctacatcacgcagtgcccgatccggcccggccagagctacgcctacgacttccgcatcgtggggcagcgcggcacgctctggtggcacgcgcacttctcctggctccgcgccacgctctacggcccgctagtcatcctcccgccgcgcggcgtcccctacccgttcccaaagccccacagacaagtcaccctcatgctcggtgagtggttcaacgcggacccggaggccgtcatcaagcaggcgctgcagaccggcggggccccgaacgtctccgacgcctacaccttcaacggcctgcctggccccacctacaactgctcctccgccgccggcgacgacacgttcaggctgcgggtgaggcccggccggacgtacttgctgcgcctcgtcaacgcggcgctcaacgacgagctcttcttcgcggtggccaaccacacgctgacggtggtgcaggcggacgccagctacgtcaagccgttcgcggccgccacgctggtcatctcgccggggcagaccatggacgtgctcctcaccgcctccgcctccgccgccgccgccgccccgtcgtccgccttcgccatcgccgtcgcgccctacaccaacaccgtcggcacgttcgacaacaccaccgccgtcgccgccgtcgagtacggcccgcaccagtccgccgcggcgccgctccggagcctgcccttgccggcgctcccgcggtacaacgacacggccgcggtggccaacttctcggccatgttccggagcctcgcgagcgcgcggtacccggcgcgcgtgccgcggaccgtggaccgcaggttcttcttcaccgtcgggctgggcgcggacccgtgccggagccgcgtcaacggcacgtgccagggccccaacggcaccaggttcgccgcgtccatgaacaacgtgtccttcgccatgcccaggaccgcctccctcctgcaggcgcactaccagcgccgctacagcggcgtgctcgcggccaacttccccgccgtgccgcccacgcgcttcgactacaccggcgcgccgcccaacaacacgttcgtcacccacggcacccgggtcgtgccgctcagcttcaacaccaccgtcgaggtggtgctgcaggacaccagcgtcctgggcgccgagagccacccgctgcacctgcacggctacgacttcttcgtcgtcggcacgggcttcggcaactacgacgccaccaacgacaccgccaggtacaacctcgtcgacccggtgcagcggaacaccgtcagcgtccccaccgccggctgggtcgccatccgattcgtcgccgacaaccccggcgtgtggatcatgcattgccacctggacgtgcacctgacctggggtctggcaatggcgtggctcgtcaacgacgggccgctgcccaaccagaagctgccacctccaccgtccgatatccccaggtgttgatacaatcacgagacattagtctgcagtggttttgatccgtgcaatgctcaatgcacgcgcacatggcggaaccgactcaaatcgtttggcctgtgcaacgcgaattttgtgatgatgtctggttttgtcgctgccctgtttcggtttcggagacatacaagatccgtaaaagcaagtttattaggggtcatgtgttgttgcgccattattcttttttttcgattgtttcatcgcaacttttgtttttttatgctggacattgttagtgcgtccagtgtgtaaggtatatgttacatatataatgtatcagtcgattggaccagctaatgattcttttttatca

SEQ ID NO: 138889 - DNA, 882 bp, Zea Mays
ctccgtgattgccgctcgtcgatggctacaaggccagtcgactgcgtttcccccgcctatcgatccggatacaccaccactcgacgcagaaaaagccgaggaccgccatagccatagaactcgaaccagggggagggcaccgcggtcatcccctccactcgacgctcgtcggccacctcgggcgaagccatgcgcccccaccaagcatccaagacagagtgttgtcgctgtcggtcagagacgacgaagggactcagctgtgagcggaagattgggcgccgccgcgggaccccgcctaggttgccgttcgggcctcggatctgggcctgggagcttcaccctgcggtgcgtgactcagccgtggcctcgttgtgggtagagctcttggaattgctcaccatggatacgtcgtcgccgcggatccacctgttgccgcggccctgcttctctgctgccccattactggggtgcaaaccatccgcgagtttctaaaaaaacaataattcgataacggatggacattttccaagatctcacgtcccgtgctacattccaatttccaagccaggaggcagctgcatagccttggagacggtctgtttcggcctgtttcggtgccttggagacggcctccttcagatgacacctttatgcgggctttccaagtccgctatgtcccggtcgtttccgttgcaaaatagctataattagaggcacatatataccccaacctgcttgtttattattggtaatcttattgttatatatacagtttgaggacagagaaatcccatcttcttacgatctggatcaaaaaaactactatgcataacctgccatccaatatatatgtaacgacactgtgtgtgactctcttttttc

SEQ ID NO: 138890 - DNA, 782 bp, Zea Mays
ctccgtgattgccgctcgtcgatggctacaaggccagtcgactgcgtttcccccgcctatcgatccggatacaccaccactcgacgcagaaaaagccgaggaccgccatagccatagaactcgaaccagggggagggcaccgcggtcatcccctccactcgacgctcgtcggccacctcgggcgaagccatgcgcccccaccaagcatccaagacagagtgttgtcgctgtcggtcagagacgacgaagggactcagctgtgagcggaagattgggcgccgccgcgggaccccgcctaggttgccgttcgggcctcggatctgggcctgggagcttcaccctgcggtgcgtgactcagccgtggcctcgttgtgggtagagctcttggaattgctcaccatggatacgtcgtcgccgcggatccacctgttgccgcggccctgcttctctgctgccccattactggtatggtgtacctcaatcagatcgctgggtcctccggcttgcgtagcgctagttaatcagtaggattaagcctcgaatcgcctgatggctaactccggcgaggagtgcggctgcgatcctgtgcgccgccgttagtcatgctcgcgccgccattttggtaaccgggagataggagatcagttcctggccatcgatcctgcgtggacggctgggattagaacgtggtcgcgtaaaaccttggccgtagattcatgcgccaatggtctagattgactttattacctgctgtttctcggatcaaatcttagccgcccaaa

SEQ ID NO: 138891 - DNA, 415 bp, Zea Mays
tgcgccaactccctagtaagataggatctttcaaaacattcgaatacaagattcaaaacatttgctgacaacatgaagagcccaaggcatcctatcaaccgaactgacactggaaatccaaatgcatttatttccacattggcatcatcagtgagggcgctaatttataccggtttcttatggtacaacgacaaacaagaatctatcaagaatgaacgctcaatgtacagctctaacgttgaggggaggggggactacgtgggtacagcctcaccaagtgggggagatgaatcgtcaggcagcttagcgtccttcgctggtgcttggctcttgtcgtcatcatcctggaaaccttgcttaaagaggtcgcagttggttggctccagtgccttgaatggacgttctcctggtacct

SEQ ID NO: 138892 - DNA, 264 bp, Zea Mays
atgacgtggggcaagcccccctcctttgtgggctggtttgctttgaagttgaggctgttggcggaggcggggcggaggatcaaggttttggaagtcttgctggtgaagaatcagagttgtctcgagtgggacgtctcgtggcttggcaacgacagcgtgttgcagtcttccttctcctatgccggtgtttgtagccgtcgttgtggtttctgttggccatgtgctgcccgtcttgaggagttagctgctcgtcacttgtgttga

SEQ ID NO: 138893 - DNA, 1401 bp, Zea Mays
cccttttgttccgtttcgtgcacttaagccgtccgcacgccgtcttccccatctcgcgcagcgctactgccggctgtccggagtcccgaccaccgtcctcggctccccgccgtgaatccatcatcccgtaatggagacctgcccctcggtgaagaacatcctcttgctggactcggagggaaagcgcgtcgccgtaaagtactacagcgatgactggcctactctatccgcgaagctggccttcgagaagtcggtatttaccaaaacccagaaagcgaatgctggaacggaagttgagattgtaatgtttgacggtcaaattgtggtatacaagttcatccaagacctgcacttttttgttactggaggagaagaagagaatgagcttattttagcatcagttcttcagggattctctgatgctgtcgaacgacttctcaaaaacatggttgacaaaaggacagcactcgagaatttggatatgatcctattgtgccttgatgaaattgttgatggagggattgtacttgaaacagaaggaagagagatagctgaaaaggtgtctggacatggattggagggtgcttcatcagctgagcagactttagtcaacgccctaacgcaagcaagagagcattttgcgaagtctcttctcatgtgatgctatgctttatatattagggcgacgatggagtatctattactgtgtctggataacacagtttttttttttggttagcagtggaccaaaaaaaaaaaaggtctgaaatctttgaatgtgtagaatggcatgttgtgtccaaaattttcatttgtaagccttcaaagttgtgtagcatgtttttttcttctaattttgactggtttcgttatcggtcgttttgtttaatctcttcctgttgtaaacggtaaaatagcatgcttgatggcatgttgtaacttaacaaattagggctacactttgtttaagatggtaatgtctccctgaaaccaaaacattattggaatctgccaaaaattcaccttacaattttgtatccatgttttttatattaatgggtgcaaaaagcaaagggtgacggtgagtgtttactcgccggcggtgacatggtgagacagatcgtctctccgcttgattgcattgtcgacatgtcgagacaggtcgtctctctgcttgattgcattgtcatctgcggcgtcactgaactgctgcttgtagccaaggtcatggttgcctgaaaccagttcgtctctgcttggagtcccttccatgtcgatgatgatgttggttatcaagcagcagacaaagatgatccgtggcagccggtgtttgtcaggcctccacagctctccctgaatgacacgccacctccctttgagcgtcgccaatgcggtctgcac

SEQ ID NO: 138894 - DNA, 1442 bp, Zea Mays
cccttttgttccgtttcgtgcacttaagccgtccgcacgccgtcttccccatctcgcgcagcgctactgccggctgtccggagtcccgaccaccgtcctcggctccccgccgtgaatccatcatcccgtaatggagacctgcccctcggtgaagaacatcctcttgctggactcggagggaaagcgcgtcgccgtaaagtactacagcgatgactggcctactctatccgcgaagctggccttcgagaagtcggtatttaccaaaacccagaaagcgaatgctggaacggaagttgagattgtaatgtttgacggtcaaattgtggtatacaagttcatccaagacctgcacttttttgttactggaggagaagaagagaatgagcttattttagcatcagttcttcagggattctctgatgctgtcgaacgacttctcaagttattttccctctattaaactttatctttgcaaccactgttttgttctgttacatgttgttgtgttaatgctgattgtatatgaatgtgtttccaatcttggtggtttcagaaacatggttgacaaaaggacagcactcgagaatttggatatgatcctattgtgccttgatgaaattgttgatggagggtaaatccttatcttactacatacatgatattagggcttcttttcttgttccctttattgtgtacatttattattcttcctttgctctgaaataatctgactgtcatctgccgcatgttttttttttgaactgggggccatggcaatagagtaatatccgagcgtctattttgtaatggttttaatcactggattcaaaggtttagcaataggatcattctcaagcttagagatgaataacgtcccacattagtatgtaattatttgtggcattatacctaattttcttgaatgattacacaggattgtacttgaaacagaaggaagagagatagctgaaaaggtgtctggacatggattggagggtgcttcatcagctgagcagactttagtcaacgccctaacgcaagcaagagagcattttgcgaagtctcttctcatgtgatgctatgctttatatattagggcgacgatggagtatctattactgtgtctggataacacagtttttttttttggttagcagtggaccaaaaaaaaaaaaggtctgaaatctttgaatgtgtagaatggcatgttgtgtccaaaattttcatttgtaagccttcaaagttgtgtagcatgtttttttcttctaattttgactggtttcgttatcggtcgttttgtttaatctcttcctgttgtaaacggtaaaatagcatgcttgatggcatgttgtaacttaacaaattagggctacactttgtttaagatggtaatgtctccctgaaaccaaaacattattggaatctgccaaaaattcacctta

SEQ ID NO: 138895 - DNA, 1139 bp, Zea Mays
cccttttgttccgtttcgtgcacttaagccgtccgcacgccgtcttccccatctcgcgcagcgctactgccggctgtccggagtcccgaccaccgtcctcggctccccgccgtgaatccatcatcccgtaatggagacctgcccctcggtgaagaacatcctcttgctggactcggagggaaagcgcgtcgccgtaaagtactacagcgatgactggcctactctatccgcgaagctggccttcgagaagtcggtatttaccaaaacccagaaagcgaatgctggaacggaagttgagattgtaatgtttgacggtcaaattgtggtatacaagttcatccaagacctgcacttttttgttactggaggagaagaagagaatgagcttattttagcatcagttcttcagggattctctgatgctgtcgaacgacttctcaagttattttccctctattaaactttatctttgcaaccactgttttgttctgttacatgttgttgtgttaatgctgattgtatatgaatgtgtttccaatcttggtggtttcagaaacatggttgacaaaaggacagcactcgagaatttggatatgatcctattgtgccttgatgaaattgttgatggagggattgtacttgaaacagaaggaagagagatagctgaaaaggtgtctggacatggattggagggtgcttcatcagctgagcagactttagtcaacgccctaacgcaagcaagagagcattttgcgaagtctcttctcatgtgatgctatgctttatatattagggcgacgatggagtatctattactgtgtctggataacacagtttttttttttggttagcagtggaccaaaaaaaaaaaaggtctgaaatctttgaatgtgtagaatggcatgttgtgtccaaaattttcatttgtaagccttcaaagttgtgtagcatgtttttttcttctaattttgactggtttcgttatcggtcgttttgtttaatctcttcctgttgtaaacggtaaaatagcatgcttgatggcatgttgtaacttaacaaattagggctacactttgtttaagatggtaatgtctccctgaaaccaaaacattattggaatctgccaaaaattcacctta

SEQ ID NO: 138896 - DNA, 1748 bp, Zea Mays
cccttttgttccgtttcgtgcacttaagccgtccgcacgccgtcttccccatctcgcgcagcgctactgccggctgtccggagtcccgaccaccgtcctcggctccccgccgtgaatccatcatcccgtaatggagacctgcccctcggtgaagaacatcctcttgctggactcggagggaaagcgcgtcgccgtaaagtactacagcgatgactggcctactctatccgcgaagctggccttcgagaagtcggtatttaccaaaacccagaaagcgaatgctggaacggaaggtaatttacatatgctttctcttatgcggaagtagttgtgtgagccacggcgagcgttgctgtgctcgattgaggtagtacagagtagttgattagcattatcatctcataatgaactcacgtgtgtcagtgtgtgatgtattgttataatccgttctatatatgctgatgttgggcaagaatgcttctttatagggtagaatcacttcttcgatattaaattacaccattcttgttttgattcttttgctgtgctacatgttaatttattggtgcctatgccattttattcattgcttatttgacatggcttatatacaaattatctactctactccctccattccaaattgcaagatgttttagcttttctagacatcttttgctatgtacttagatatacattatatttaaatacattatatttatatacattatatgtttttcatgtccagctgtttatcatctattaacctcagtcataacactgtttgtacgagctcccactcatgccacaaatctgtaaatgagccagggctagttttccatctgactgaccttgatttctccttaaacatgcagatatgactgtttgagtttttgttcttctcttcaagtatttcatatttttctttgtttctctttaacagttgagattgtaatgtttgacggtcaaattgtggtatacaagttcatccaagacctgcacttttttgttactggaggagaagaagagaatgagcttattttagcatcagttcttcagggattctctgatgctgtcgaacgacttctcaagttattttccctctattaaactttatctttgcaaccactgttttgttctgttacatgttgttgtgttaatgctgattgtatatgaatgtgtttccaatcttggtggtttcagaaacatggttgacaaaaggacagcactcgagaatttggatatgatcctattgtgccttgatgaaattgttgatggagggattgtacttgaaacagaaggaagagagatagctgaaaaggtgtctggacatggattggagggtgcttcatcagctgagcagactttagtcaacgccctaacgcaagcaagagagcattttgcgaagtctcttctcatgtgatgctatgctttatatattagggcgacgatggagtatctattactgtgtctggataacacagtttttttttttggttagcagtggaccaaaaaaaaaaaaggtctgaaatctttgaatgtgtagaatggcatgttgtgtccaaaattttcatttgtaagccttcaaagttgtgtagcatgtttttttcttctaattttgactggtttcgttatcggtcgttttgtttaatctcttcctgttgtaaacggtaaaatagcatgcttgatggcatgttgtaacttaacaaattagggctacactttgtttaagatggtaatgtctccct

SEQ ID NO: 138897 - DNA, 2223 bp, Zea Mays
agtgcaccacatagcatccggtgtcaggctttaagctcaccggtcggtggctgggcgccttgccgccttgggttaatcacctgcaccgcaagtaacccaacactgtcttccaatgcaagtgactgccccgacccatcatgcgccaggcgaatcaaaccactacctgatttgtttaccccccgaaatttgccgtctcctcgtctcgctcctctccctgcgcagcccccagatccggcaccgcccgctcctcgatccccgcaccccacgcccgcaggccgggaccggcggggtcgcgcgccgggtaggaggaggagaagaggaagggtggtatggcggcgccgccggcgagggccagggccgactacgactaccttatcaagctgctcctcattggagacagcggtgttggcaagagttgcctcctgttgcggttctctgatggttccttcactacaagctttattaccacaattggtattgactttaagatacgaacgatagaattggatggcaagcgtataaagctacagatttgggatacggcgggccaagaacgcttccggactattaccaccgacatccgaaactggattcggaacattgaacaacacgcctctgataatgtcaacaagattttggttggcaacaaggccgatatggacgaaagcaagagggctgtacctactgcaaaaggacaagcacttgctgatgagtacgggatcaagttttttgaaacgttttggatccctggacctttgtttgggtttcaataaatttccctgtaaggacttgagctcctccagttctttcaaaagaaaaattgcatgacagttgtcaccttcagtgaacagtttctttaataaaaaaacagagtttgcagttgtttttgatctcacagatttctgtgtcttcagagtgcgaagacaaacctgaatgtggagcaagtgttttttctccatcgcacgtgacatcaagcagaggcttgcggagactgattcaaagccagaggtacaaataactgtgcataggtatgcttgtcgttccattattcatcgtgttcactgttctgaacaatgtaggacaaggcaatcaaaattaacaagccagaccagggttccgaggcaccagctgcccagcgatctgcttgctgcggctcataagcagatgcacgatggccatagcctttggttatttgacattatttatttcccgcttggctgttataggaaggatttgaagaagccacttatgatataccgatgtggttgtactcgtggttgcttccattctttgaagcaaccacctcttgctgttgacgtagctattgctattgctgggagctattgcactcttgcattggatccgttggaaaaactctcccctccctacagtgtgtaatgaatgaaatccatgtcgttgggtttgcatggaataacgtgtcgctcttgtgtgtgtgttttaagtgtcgccgttccttgataatcgaatttgttgggaccaagaatatatctacctggaatgtctgtatccacagaaagtctggatcttcgatttaggttaaaaggaaacgtatctggaaatagaccgctgcatgttgtaatgtttgaaaaaagagtaaataaaacttgtacagttgtatatactataattgtaggcagcttgtcaaagaggagggcagtccagtatcagcgatttccgttcgcagtgcgctgtgttgccgagcacggcgtcattccggcacttggcgcagttccccgacggcgccaggctcaagtccaaacagattccgctggcacagccagcgccgccaacgttggcttcctcaaccgacgtggcgtccccagagcggagctcacattcggactcggctgccagcgaagtcctgcggtgccgacgcatgtggccgcccagcgcctggccgaccgcgaactcgagcccgcagatggggcagccgtgcagcctcggccccgccgcgctctcgcgcggctcatccagcctcgttcggcgtagtagccccgggtcgccgacgccgtaggggtaagggtagggcttggggcgcctgtggctggcgcggtggccgcccagcgcctggaacgtcgggaacctcctcctgcacgtcttgcactcgaacacgcgcccgcgcgcgccgagccccgccgccgccgtcctcgcgccgccctgttgccgctgcgagaggagcatggggacggcgccggtctccat

SEQ ID NO: 138898 - DNA, 422 bp, Zea Mays
aggacaaggcaatcaaaattaacaagccagaccagggttccgaggcaccagctgcccagcgatctgcttgctgcggctcataagcagatgcacgatggccatagcctttggttatttgacattatttatttcccgcttggctgttataggaaggatttgaagaagccacttatgatataccgatgtggttgtactcgtggttgcttccattctttgaagcaaccacctcttgctgttgacgtagctattgctattgctgggagctattgcactcttgcattggatccgttggaaaaactctcccctccctacagtgtgtaatgaatgaaatccatgtcgttgggtttgcatggaataacgtgtcgctcttgtgtgtgtgttttaagtgtcgccgttccttgataatcgaatttgttgggacc

SEQ ID NO: 138899 - DNA, 638 bp, Zea Mays
tcatgcgccaggcgaatcaaaccactacctgatttgtttaccccccgaaatttgccgtctcctcgtctcgctcctctccctgcgcagcccccagatccggcaccgcccgctcctcgatccccgcaccccacgcccgcaggccgggaccggcggggtcgcgcgccgggtaggaggaggagaagaggaagggtggtatggcggcgccgccggcgagggccagggccgactacgactaccttatcaagctgctcctcattggagacagcggtgttggcaagagttgcctcctgttgcggttctctgatggttccttcactacaagctttattaccacaattggtattgactttaagatacgaacgatagaattggatggcaagcgtataaagctacagatttgggatacggcgggccaagaacgcttccggactattaccaccgacatccgaaactggattcggaacattgaacaacacgcctctgataatgtcaacaagattttggttggcaacaaggccgatatggacgaaagcaagagggctgtacctactgcaaaaggacaagcacttgctgatgagtacgggatcaagttttttgaaacgttttggatccctggacctttgtttgggtttcaataa

SEQ ID NO: 138900 - DNA, 1111 bp, Zea Mays
gattggtccttgccttctcacacggatcgctgagccccatccaacagctcgtatcaaccgaaaccaatgccacgcaacgctccagattgcagtaccgccctccacacaacgaaaacacaaacgcacacaagcacacgacgcaagggtgacgactgacgagagggagagagagagaggcgaggaaggagggagagagcacgggggattgatcgaagatggatgccggagcaaaggtggtgaagaaggccgcggcggggcgtcgcggcgggggcggccccaagaagaagccggtctctcgctccgtgaaggccggcctccagttccccgtaggccgtatcggccgctacctcaagcagggtcgctactcccagcgtgtcggcaccggcgcccccgtctacctcgctgccgtcctcgagtacctcgccgccgagctcctcgagttggcggggaacgcagcgcgggacaacaagaagaaccggatcatcccgcggcacgtactgctggcgatccgcaacgacgaggagctcgggaagctactggccggcgtcaccatcgcacacggcggggttctgcccaacatcaaccctgtgctgctccccaagaaaaccgctgtcgctgctgccaaggaaggcaaagagaagaagtcacccaagaaggccgccgccgccaagtcgcccaaaaaggtttaaagtttaggcaaacaatgtggtgcatgttttgcaaaatgcctgagttgggttgttcgctgctgctggattaaagccgttcggactactgctgtctgtagaaaaaacagaagccggtggattaaagccgcaacgaacatgcttgtcatttctgttagttgatcactagtactatatagtccatttgggatgattacacaacattatgtggtgttaatgccaactgggtatgggtttggctgtattggtgtcgacatttctcttcgatgaacaatggcagtacaattggcctgctgttcaataaagcccatctccttttctactcctcggttgtagataatggaaatatggtagccggatatcattcatctatatatcttctgtttaaatttgttattagagtaattcatcaaacttggagaagg

SEQ ID NO: 138901 - DNA, 1090 bp, Zea Mays
gattggtccttgccttctcacacggatcgctgagccccatccaacagctcgtatcaaccgaaaccaatgccacgcaacgctccagattgcagtaccgccctccacacaacgaaaacacaaacgcacacaagcacacgacgcaagggtgacgactgacgagagggagagagagagaggcgaggaaggagggagagagcacgggggattgatcgaagatggatgccggagcaaaggtggtgaagaaggccgcggcggggcgtcgcggcgggggcggccccaagaagaagccggtctctcgctccgtgaaggccggcctccagttccccgtaggccgtatcggccgctacctcaagcagggtcgctactcccagcgtgtcggcaccggcgcccccgtctacctcgctgccgtcctcgagtacctcgccgccgagctcctcgagttggcggggaacgcagcgcgggacaacaagaagaaccggatcatcccgcggcacgtactgctggcgatccgcaacgacgaggagctcgggaagctactggccggcgtcaccatcgcacacggcggggttctgcccaacatcaaccctgtgctgctccccaagaaaaccgctgtcgctgctgccaaggaaggcaaagagaagaagtcacccaagaaggccgccgccgccaagtcgcccaaaaaggtggccgcctcgtaggtccctggcaatgctgatgcactgtctctctctgtcctctctgaactgaaacgctcctagctgtcgttgtcggtcatggtcgttgttgtttgatgcgcttttattgtggttgttcgtgtgtaattgcttgcctttcacccatttggcatgcactgtgtagggtcacactggtctaggttttcaatctgggaaacaccggtttagattcaaggagcgtgaactgtgaaggcaggtgagagggtgggatctgtgaatcattaggtgctgtttgtaataagattgcaaagatgtgtaaaatttgttttgtgcttccattccgtgcttgattgtctgaatgtgatttctttttccattaattggtgacctttgttgtgttttatgcttgcatctgc

SEQ ID NO: 138902 - DNA, 842 bp, Zea Mays
ctactactactactcactagcggtagctcacaatggcaggcacaaagctagtatcactggggctcattgttctcatgagcatggggttagcaaatgctgtgagggtggctagattctctactgctgatgggagtggacaaggagggggagggggtggcggttacgtgaatggtgcgggatcaggggtcgggtctggcaccggagtaggtgacagtagtccggagggtgtccatgcaagtgctggagggggtggcgcaggcggtggaactagccagtatggtggatctgcatatggtgtagggttagggtcaggttcggcgagtagcacgtacagtggtagtgatggagggtcttccagtgctggtggtgctggcgggggcggtggcggcggaaaagctggaggttcttgggactccagcgctcaagggtctggtagtggcgtcggttctggttctgcctattctaacaggtatccgtacgggccaagatatgcaggtgcaactgctaatggcaacggtggcggcacggggaacagccagaatggcggtgctggcggcggtaaaggttctggatctgggttcggcgatgccattccctgatttctgtatcgagtgaatctaaagctggagcccatcgccctttcttgttttggagtcacaggattactgtttttgttttgttttttttcttttctagctgtgttgtgcttttgttagaatttgaattaataaagggcccggctgttcaagtaacagtagcagtctagtgtaagcctgtaaaggtgcagcttatgcgaagatgtaagcctgccagtttatgaaagaaatcatactcctttgtca

SEQ ID NO: 138903 - DNA, 1474 bp, Zea Mays
agaagtctgtttgtctgattgtagttgattataaagaagctagagctgatattagaagtctgatattagaagtatgtttgtctgattgcagttgattataaagaagctagagcttccagtcaagtttgatattagaagtcttcttttgcttttacattttgtttttttatgatcttgatcttagaagcagggttttggtaccagcttaactaattttctgaagttttatgttcttactttaattataactagatgattgcaataagatatcatgaggcgcgccgaggagaacagggacctcctctccgcctcctccttcgacaggcagctgctgcggaaggaggtggtgaggagggtcaaggccgcggtggcgggacgtgagtgaagtgagctttgtcgagcctatatgtggaggtcggtcgtgaagctgggactaggacaagggcgagctgaaggctagaagctgtaaatgcacccttcaagagtcttcataggccaagtctctacgtaggtgttgacaaaaaggaaaattcatgacaatgcgtttatatgagattgtccaatatcgaaaccaagaatacatgggggacaactgtattcgatttttgtttctctttcgtggagtattactgaaatatatgcttccaatgttgaagtttccaaattaaatgttatctctgtacaaagtgtgcaggctcggttataggaattttataaagcaaatgacaaatatacatgtacgaacttcaaatatttcctggtactaacctctctgctctgagatgacatgttcttttgttgttatgaaatcaaatatttcttcatgatctcttataatctgtcaaatgatgtttgcccagtggcaatagaaaacccttatattaaagagataatcgatgatgatgcgaacagacctaaagattagaaggaaacagtgggcgatgaaagcaaggaatttgggaggtacatgcgacagagagaagagcaagagaagcaggaagcggagttgttcactcgggctcttgtaaccaaacatgataagcagatcgagaagcgcataaggagacaacttcatgggctaggaggcttaactgacggttttggccttgggatgaacatgctgttgggaggagacaaggaagatgatggcggttcaagaaagtcgcatggcaaaagcggaaactgaaagaagcacgtgaagaacagcaagaagaggatgaggcattagccctagacccacactgttgtagcacttcaatatactgatagagcctagaagatggttcaagcaagccacacgaaaagttgaagccggagaaaataccaagaaaccaagtagagaaaaaaagttttggttcctataggcgtattatttctgaaacacaaaacttgatctgagcgactgatcgtgagctaatgtaacagtatgaattatatggcttgaacatggtaggtgtaaaatgttttgttcatc

SEQ ID NO: 138904 - DNA, 1682 bp, Zea Mays
gtacgaggcccatctcccacgacaaatgaaaaccctaatctccagcaccccggcggcctccagcgctcccgctccttgctcgcctccacccgcggcaaccaccgccctgcggcccccgccgcttgccagcctccaccgcgccgcgagtcgcgttgttcctgcaccagctggtcctggagcacgggaggacgagcatgtcctggttcggccccaaccccaaggtgaccatcgtcgacccggacctggccaaggacgtgctgtccaacaagttcggccacttcgagaagctcaaggtcccggtgctgtccaagatgctgggctccggcgtggccagccacgagggcgagaagtgggtcaagcaccggaggatcctcaaccctgcgttccatcttgagaagctcaagcgcatgctgccggcgttttctacgtgctgcgaggagctggtgagcaggtgggcggcggagtcccttggctccgacggctcatgcgagctggacgtctggccggagctgcagaacctgacgggagacgtcatttctcgcaccgcgttcagcagcagctacagcgaagggagaaggatcttccagctacaggccgagcaagcttcgcttgtcatgaccaacattcggaagatcatgatccccgactacatgtacttgcctaccgtgaacaacaggaagatgcgcaggaacaacagggaggtggagtcaatcctgcgagagataatcgggaagaggatccaggcgatggaacgaggcgagggcaccaaagacgacctggtgggtctactgttggagacaaacatgagagacgacatggggatgacgatcgaagacgtgatcgaggagtgcaaggtgttctacttcgccgggatggagaccatgtcggtgctgctacgtggacgatggtggtgctcagcatgcacccggagtggcaggaccgcgcgagggaggaggtgacggctctgttcggcagggacggcaagcccgagtacgacggtctaagccgcctcaaagtcgtgaccatggtgctctacgaggtgctccggctgtacccgtcggccacctccgtcgtccggcaaacgtacaaggagatggaggtcggaggcgtcacctaccccgccggcgtgatcctggagctgcccgtgctgctcatccaccacgacccggacatctggggaggcgcgcgagttcaggcctgacaggttctccgagggcgtgtctagggcctccaaggaccccggcgcgttcctcccgttcggctagggcccgcgcatctgcatcggccagaacttcgcgctgttggaggccaagatggcgctctgcatgatcctccagtggttcgagttcgggctcgcgccatcctacgctcatgcgccgcataccgtgataaccttgcatcctatgcacggtgcgcagcttaagctcagagcaatatgatctcgacacgatgggtgtcccatcgttgatgccattgttacgtataaccttacaattcagataggcattcggcccctgttaatgtctgaaataagtatcttcgcgttggcattttgtaatgtgcttttcacgtaccattggtgctttattgccttttgtatataaacatgtggatatatgtaactcatacattacacaaacaaacacaaacacaccagagccagagctatagggtggagctat

SEQ ID NO: 138905 - DNA, 1863 bp, Zea Mays
gtacgaggcccatctcccacgacaaatgaaaaccctaatctccagcaccccggcggcctccagcgctcccgctccttgctcgcctccacccgcggcaaccaccgccctgcggcccccgccgcttgccagcctccaccgcgccgcgagtcgcgttgttcctgcaccagctggtcctggagcacgggaggacgagcatgtcctggttcggccccaaccccaaggtgaccatcgtcgacccggacctggccaaggacgtgctgtccaacaagttcggccacttcgagaagctcaaggtcccggtgctgtccaagatgctgggctccggcgtggccagccacgagggcgagaagtgggtcaagcaccggaggatcctcaaccctgcgttccatcttgagaagctcaaggtactactaactactacatataattaattgcatataattaattgatccttggaattatctggcaatgtgcagcgcatgctgccggcgttttctacgtgctgcgaggagctggtgagcaggtgggcggcggagtcccttggctccgacggctcatgcgagctggacgtctggccggagctgcagaacctgacgggagacgtcatttctcgcaccgcgttcagcagcagctacagcgaagggagaaggatcttccagctacaggccgagcaagcttcgcttgtcatgaccaacattcggaagatcatgatccccgactacatgtgagttagtagttagtactaccttggttgttgtgtgctcagtactgacgattaaacagttagcagtgtgttcagtactgattaaacagtatcctaaaacaaaatgtttcacggaacgtacggggccatgccttgccttgatcaggtacttgcctaccgtgaacaacaggaagatgcgcaggaacaacagggaggtggagtcaatcctgcgagagataatcgggaagaggatccaggcgatggaacgaggcgagggcaccaaagacgacctggtgggtctactgttggagacaaacatgagagacgacatggggatgacgatcgaagacgtgatcgaggagtgcaaggtgttctacttcgccgggatggagaccatgtcggtgctgctacgtggacgatggtggtgctcagcatgcacccggagtggcaggaccgcgcgagggaggaggtgacggctctgttcggcagggacggcaagcccgagtacgacggtctaagccgcctcaaagtcgtgaccatggtgctctacgaggtgctccggctgtacccgtcggccacctccgtcgtccggcaaacgtacaaggagatggaggtcggaggcgtcacctaccccgccggcgtgatcctggagctgcccgtgctgctcatccaccacgacccggacatctggggaggcgcgcgagttcaggcctgacaggttctccgagggcgtgtctagggcctccaaggaccccggcgcgttcctcccgttcggctagggcccgcgcatctgcatcggccagaacttcgcgctgttggaggccaagatggcgctctgcatgatcctccagtggttcgagttcgggctcgcgccatcctacgctcatgcgccgcataccgtgataaccttgcatcctatgcacggtgcgcagcttaagctcagagcaatatgatctcgacacgatgggtgtcccatcgttgatgccattgttacgtataaccttacaattcagataggcattcggcccctgttaatgtctgaaataagtatcttcgcgttggcattttgtaatgtgcttttcacgtaccattggtgctttattgccttttgtatataaacatgtggatatatgtaactcatacattacacaaacaaacac

SEQ ID NO: 138906 - DNA, 852 bp, Zea Mays
gtacgaggcccatctcccacgacaaatgaaaaccctaatctccagcaccccggcggcctccagcgctcccgctccttgctcgcctccacccgcggcaaccaccgccctgcggcccccgccgcttgccagcctccaccgcgccgcgagtcgcgttgttcctgcaccagctggtcctggagcacgggaggacgagcatgtcctggttcggccccaaccccaaggtgaccatcgtcgacccggacctggccaaggacgtgctgtccaacaagttcggccacttcgagaagctcaaggtcccggtgctgtccaagatgctgggctccggcgtggccagccacgagggcgagaagtgggtcaagcaccggaggatcctcaaccctgcgttccatcttgagaagctcaagcgcatgctgccggcgttttctacgtgctgcgaggagctggtgagcaggtgggcggcggagtcccttggctccgacggctcatgcgagctggacgtctggccggagctgcagaacctgacgggagacgtcatttctcgcaccgcgttcagcagcagctacagcgaagggagaaggatcttccagctacaggccgagcaagcttcgcttgtcatgaccaacattcggaagatcatgatccccgactacatgtgagttagtagttagtactaccttggttgttgtgtgctcagtactgacgattaaacagttagcagtgtgttcagtactgattaaacagtatcctaaaacaaaatgtttcacggaacgtacggggccatgccttgccttgatcaggtacttgcctaccgtgaacaacaggaagatgcgcaggaacaacagggaggtggag

SEQ ID NO: 138907 - DNA, 409 bp, Zea Mays
ggggtactggccaccagttcaccatgggcgactcctcgtcgtcatcggcagcctacatcaaaatggttcaccatatgatagagaagtgcatctgcttcaacctgagcaaggaagagtgcatggacgcgctggagaagcatgccaacgtcaagcctgtcgtcacttccacggtgtggaaggagctagagaaagagaacaaggagttcttcgagacgtacaacaaggaccgcgaggagcggaaggtggaggcggagacgatggcgcggatcgagaagatgctctccgaggcggcggcctccaagagctccgacgacgaaggctagctagctatagcacgcgatccgttagcttagctagctctctagagctatagatcatgcagctccgacgatcctctccatgcatggga

SEQ ID NO: 138908 - DNA, 1133 bp, Zea Mays
gaataagcgagagcaatggcgggaaggcgagaggacgtcgacggagaggtgcagcggcgggacgaagaggaagaggaggagtacatcgacatggacctgagctcggcagcgcccggggcgcgggagttcgagttcatgtcggcgccgctggacaggtggggggagcccctggcgtcgccggcggacgagctcttctacaagggcaagctgctgccgctgcacctgccgccgcgcatccagatggtggaggagctcctggtggacggccgcggccgcggggacctcctcttccccctccaccacggcaccaccaccagcagcagcagcaccgccccggcgacgccgtacgagtcgtgcgccgcgtcgccggccgactcgcgctacgtcagcggggagctcagcgtcgaggcgtacttccaggagtacgcggccgcccgcctggcgctggcggacgccgcggagcccggggagaggaggccgacgacgacgtggtccaggaagctcaggttcgtgcggcagctcaacctgggcctccgcctcaaggcgtccaaggcgtacctcaagaccatattcgcggcggccaagccggggcagcagcacacggacgcccgcatggacgatgttggcgcgccgacgggagcgcaggaggagctggcccgtggtcacctcagggcgtggaggaagaacccgttcgcccagatcagaagcaacaggtgcgtcgcctcccagtcccatgccgcgcccgccgcaggaggagggcggtgcaaggaacgcgagcacggccacaggcggtccttctccagcgtcatcgtccggtactcctcgtcgaacaagacgtccccagtccctgcgctgccgccgccgccgtcctcgagcgagtccgactgcgcggggccggcgctcaggaggagcagcagcgccagctccgaggtggagaaccccatccaggggttcatcgcctactgcaagaagtcccagcagcttgcctccgtcaggaagagcgccagcgacgccggcttccgcttcctgtcggccgcggcgtccaagatcgccgccgagtccgacggccttgatgacctcaccgagatttgcagaggatgataggaccatcaatcctgatcattgtacaatga

SEQ ID NO: 138909 - DNA, 3628 bp, Zea Mays
aaatccaattccgacctcgccatcgacggaggcggcgtcgcggcgcggcgcgggatcgggcggcgcctccagaagcctctcggacggccgagaccaacaggccggaggaggaggcgatcaggacgagcccaatcgctctcagtcccagctacctccccgtttctttgggaccgaattcgagtcgatgaaggaattgctcgaatcgaggcctggattgacgggtgtttgaggctcggtgaccgaggagcgccgcttcagatatgaacgtggtgggaagggttgggtcggtgatctcgcagggggtgtactccgttgcaacacccttccacccatttggcggtgcggttgacattatcgcggttgagcagcctgatggttcgtaccgcaccacaccatggtacgtccgttttgggaagttccagggcgtgctcaagggtgctgagaaggtcgtcaccatcagagtcaatggcgtcgaagccaacttccacatgcagcttgacaattccggccaagcctatttcatgcgtgagcttgtgcccggcggtgaagattctggaacaggttcagacgacgaaactgtcaatgagcctgaacctccagcgcgtagtaagagtgatggggaactttacattggtcctagcgacagactgggtagccaagagctcaatgtggagcatcaagagaagcaaactagggatgagtttgagtcatatgatggttatggtaggttagaggaatcagaagatttgtcaacccaagcggatgggggaaattcggaggtggttctagttagtgtggacggacatgtgctcactgcacctatttcttcaacagaggagggtatggaggatgtgcagttatgcgaccctcagtttcatttgggacctgggcagagctctagtggggagttcacccgaagtggcgaggtctgggatgctgacattttagatggtttatacatatcacaggaaaaggtaaagattaattctggacatcagtcagaggttttaacagagaatggagaggtaccggttgaaaaggatgggtcacatcacatctcagtggacaaagatgaagtacatgtgtcaatcaatgatgatgaagctcatgctgtttctacaaatgaagttgaggttcaggatgtgtcaaggtcagggaatggtgatgtggtttatcaaaccatgaccagtgaaggtgagtcccatagtattttaggggacatagatgttggccatcaaacattgaccagggaggatgactctcctggtgtttcaggggagaatgttgtgggttatcaacccttgaccaatgaacataaagctcatgatatattagagaacaatgatgaggatcaaccacccctgaacaatgaagatgaatcttgtgatgtgccagtgcttgaaaaagacaaggattgcaactccccagctaataaggatgaggtttgtgatctcaacaatgaggatactgaggataccagtgctagttttggtaaaaacgacgctttccagagctgtttggatctgacgtcacaaatagatgacggggattcaggaaacgaactattttcacctggatctgattctcagagggatgctgagcataatttgggtaactgttctgttgctgaaacagatttggaggaaggtgaaagtaaaactgcttactgtggtcagtatggtcctttacaggagggagtgaatgtttcattatttaccttagaagttgataagactcaaaacaaagagagttctcctgctggaggttctcatgatagggacaaggaaattgcctctgaaattgaggctgccgcatctgatggtttacagtcatccatggcgaccagtggtaaagacaaactggggagcattccagagcactcagaagttgaagatgaacagaataaagaagaacattctcagtcacagaatggcttgggtgttgagatttctctttgtgggaacatgttacgaccaggaatgggccgagaatctgctgaggaagtgtttcaacagaatcttgtccatgaggaggatttcaaatcatctggatcaacaatgataaaaaatgcaaaccttattgtcaaagttgacaataattatttcccctggaataaagtttctcatgttattcttgggaaggctgtatatggctcaaagtttcccttagaacccactgatgctgttccggttgaacaacaggaaacacccaaatcaagagaggactctcttagaatgtctccctcaagccggagatggaggctttggctcaatccctttcggataacaagatcccttcaacgtagtaacagtgattcttccgaagacattttccttgactcagagtctgttttgagtccaatggatgatcaaactctggagaacaacaaaaaccagtcacctagaaagcaattcgtacggactttgattcccacaagtgaacaggtagcatctttaaatctgaaggagggccaaaacttggtgacctttagcttctccaccagagttcttgggaagcaacaggttgatgcacatatttacttgtggaaatggaatgctaaaattgtgatatctgatgtggatggcaccataacaaggtctgacgtgctgggtcaggtcatgcctttggttggacgtgattggagtcactcaggtgttgctcgccttttttctgcaattaaggaaaacggttatcaactactattccttagtgctagagcaattgtccaggcatatctcacgaagaacttcctctttaatctcaaacaggatgggaaagcactacccaatgggcctgttgtaatttcacctgatggcttgtttccttcactctaccgagaagttatacggagagccccacatgaattcaagattgcttgcctggaggacattaaggcgctctttccttctgattacaatccattttatgctgggtttggtaacagagatactgatgagctcagttacaagaagatgggaatacctaaaggcaagatttttatcatcaacccaaagggtgaagtggctgtcaacagttctgttgatgtgaagtcttatacgtccctacatacccttgtcaatgacatgtttccaccaacaactctggttgagcaggaagactacaacaactggaattactggaaggtgccattaccagatgttgatttgtagtgtagttttgacagaaacagccgtagataccagtagatcctgcaaaagcctagcagtagagcttcctgtaccctaatattcagccaccacgacggttttaggtccaatttgtgaaggtctcaagaattccgggatgtatggttttctgaaagccaatggcccaaggaaacgttgccactttatttccttcgacggagctttcacgtgatcatacggcttttgggtagtcatctgattgtcttcgtcgaacttgttgtacccagaggtctgagccctagaccctcgattcattagagaactcgtgatctggtcattgtccaagctactttgttctgattgcaggaaatctttaggtgccaaaagcagctgtacattttttttttcgtgatccaaaaacagctgtacatcgtatatcagcgcatagaagagaattgctaagcatatctgcatcttgaaac

SEQ ID NO: 138910 - DNA, 4228 bp, Zea Mays
gccgcgtcgtcggcttctccgctcttcacctgctccctctcgacgaactacgaagccatccccgcctccgcaaaccgccccgagcctccgacgtattccctggccagtaggccacttcccttctggccttcctactctctccacgctccacagctgtgagcctgtgaccctccgcttcgacgcggacgccgcaggccgttgacgatacaacgcaccccgccgaaaggggctgggactccttttccgtttccttcgcacatctcctcgctttccgccgagagaacttttttcagtcaatcataataataataataaaaaattcgccgttcggccccgaatttcccctctgtttctgcttcatctgacgcatctgatccattcccccttctcgacgcggatcgaatcacgagcgtgtggcggcggctgtggtggttagggacttagggttggagctcctggaggatggcgagccacggcgccggggtggctgctggatctgacgccccgcacgctgaggttgtcagtatgggtcaaacaaatctatctccatatcctctttcttccagtcatcattcatggtcctctgcaactgggtcagcaacggtttcatggaacaatacagtggacaaacttagccaagatacagtttactatgatccacaaagggatgtatcagattcaggagggaatcaaaatgtagaaagtagcgtgcctcatgttgcccagtcgagtagggggatggcagatgtagcccattctcacatgtcttactctagttcagatcaacatgtctataaccctgtagaatatgccaactattattatagctacccacaagcaacaaatgattcttctgtccagcaaggagcaaaccaacatccaggtgcagcttatcagcctcttacttcatttcaaaattcagggtcttacattgatcctacaagtaacacatattacaatgctgggggtcatcagaccgtgccaggatatggaagcagcagctactattatcagaacaacacatggaatggtggaagcacagggaatacttttgctcaatcataccagaactactcatcatctgatacaaatgcacaacaaagttctacttcagtgcctgccaattctttaccatatcagcagcagtataaccagtggccatactattacaatcaatctgtgccaagtgcttctagcaatccagttgctgggaacagtactacagataacttaactggtaacatgccttctggctattcatatcctagtagccagccacctccaccaggaacaacatcatggaaaagtaattcagttgcttctgttgcacctcctatgcaggttccaggtgttccaggacagcaaagtcaatatggcaaccaggcagaaggccattataaccagggacctggtgtgcaatggtctcaaaatcattatgcctaccagacacagccataccctcagaagactaattccaatcatccacaactaagcaaccatgaagatcaacaggagactgtatattctaacagtccaagcacaaatctttcgtcgaaccatgtttctgaaaattttaaaccaaacttgcaggattctgtgacaatggacacttccagcgaaggcaaaatacaggttcctataaatcctcaaattgccccaggtttctctatggtgataccaaagaatgagaagaaacattctggacttgatttatcaaagaaacctgcctatgttagtgtctccatgcctacgaatgatgctaaagcaactcaagttggtcttgatgctagattacccttttcactccgtaactatgctacgaggaacctcaatcgttgcaagaatgatgcccagagggaggcctgccgaagcataatgaatgagatcacaaaaaaagcttttgctgagggaacccttcttactaagaactgggacactgaaccactatttcctttgcctgaaagtactgtgggcatgactggaacaagcagtgtaaacaatttaagtcccttctcatcagtttccaccccaaggaaacgtgtgaaaagtagatgggagcctgttgtggatgaaaatgttaccaataaggtggaacaaatagcaaaaggattgatcggcagtaatgtccacagtacttcggaccctaaaaatagaatgggtagcagttgggatcataggaagtttctccagtcttctcaagcaccttcaaataaagtcaatcagaggtctgccaagaagcaaaaaatgggtagtaatttgagtcaaatacagaatggaaatgcttcaagtgacagtgagaaggaacatgatctaaccaaatattatgccagtgcaactgcactagcaaattcgcctgaggaaaagaaacgtagggagcatagatccaagcgttttgaaaagagtaaagattcatcatttaaatcaagaaatgtttctgcaaataaagatgctatgactaatttgcgtgcaagaagggcaattttgtcttttcgtactagaacctatgaaggcggcactttggctgttgaggatatggattgggatgcactgacagtcaaaggaacatgtcaggaaattgagaaaagatatctacgacttacagaagcacctgatcctgccaaaataaggccagaagatgtcctggagaaggcccttgcaatggttgaaacatcacaaaagaattatctttacaagtgtgatcaactaaaatctatccgccaagatcttacagttcagagaatccagaatgaactgactataaaggtttatgaaacacatgcccgattagctatgcaagctggtgatttacatgaatttaaccagtgccagtcacaactgaagaggctatatgcacaaggaatcaagggttgctattttgaattttctgcttacaatttgctgtgtgtcatgctacactctaataataaacgagacttgctgtcatcaatggcaagcttatcaaaagaagccaaacaagatgcagctgttaagcatgcccttgcagttcatgcttctgttttatctggcaattatgttctatttttcaaactgtacaagaaggcgcccaatttgaactcatgcctcatggatctatatgtggagcggatgcgcttcgaagctatgaaatgcatgtctaggtcatatcgcccaactgtacctgtgggatatgttgcacagattttggggttcatgagaactgatacaggctgtgcaaccaatggggatgatggattagaagaatgcgaaaaatggttgaaagcgcatgggatagttctttcagaaggtaacagtggggaattacaaatagacatgaaggcttcgtcttctacactttacatgccagagccagagaatgcggttgcacatggtgatgcatcacttgctgttgatgactttttggcacggactgacgggcatcttaaaaggtgcagcagcgatgagccaacggtggatactccgtagtgtagtatattggtgctgctgtggcagtcgtgccgagatgtggacgcactgcacttctcccgtagaaactgcaaagggggcatgaaatggagctgcccaacgaagctcgcggagctaagagagtcggaacaactgaacaaggatgtggtcatcgggttttgccacttgcgcaaattgatccagtcatccagagttgcaccgcgatgagcttcgttgagaagacagagaagaaagcagcattacccgacatgagcagaagtttttatgtcgtggtggtttgctcacaagggcctgttccgataggagtagattgaaggtattagaagatattaaatttcttagtcttgtttggaagtaaggggattggaggaactgaagatttgaaggggccaaaatcctagaaggggattttagccttggctgatttgatgacccctccaatctctctcaatctccttatcatcaaatcagccctgcctcgattctcttctcccaaacaagccagcccttactagtaaaaattgaatagaaaaaaagatttaatcctcctcaatctccttcaaccaaacaaggtctaacttgcattaagcgtagaaagtattgtgaaaaacagctacagctttgaagcatacatcatacattatcttttccggtgctctttttttctggctgccccttcctctgtgaagattgtgaattactttttcttgcacgtaaatttattttcctatcccatagaataatgaaaattatatactaatgttcc

SEQ ID NO: 138911 - DNA, 2086 bp, Zea Mays
ctcgattcactccacgcgccaaacttagcatccctctcctcccgcctcccctccaccggtatcggtgtcctcctccggtctcccctccctctgggaaggcccttggatctctcgatctccaaggcctgccttccattgccatagccatcgaccgtcgttctcgtctcgtggtggtcttgtgcccctctccggtctcctgagcaagccaccactagtctggtcacgctcccctgctccgcaccggacgggcgggtttcatttggtgcgcgtgcggcgagctcgggcatggcgttccacgaagtggagacgccgcgtcgatgctgagacgccggggcatggtcggcgcgcagtgacggcggccggcggctcggtccgtccgtgcgtgcgtgcgtgcccagcattcttgcccctgtcgagtcatcggctcgtcgctcgctcgcgcccacgccgctcgccccgcgtccacagggtcgccgccacggggaggcgcagagggaaaaggaagatgagctgctttccgtgcttcggcggcggaaagggcaacaacgacgacgccgacgcggagagcccgggcgacgcggccccggcgtctaacatgacgccacccgcgatggtgcaggcgcccgccgcgtacttcccagctcccgccgccgctccaacggccgcggcgccgcccaagcccggtggcgggaaccaggcgcacgaggcttccgccgatgactcggcgctgcggctcgccatcacggggcaggcgttcgcgttccgcgagctcgccgccgccacagaccacttcacgccgtacaacctcgtcggtgaaggcggcttcttccgggtctacaagggccggttagagaagagcgggcagaccgtggccatcaagcagctggacaagcatgggttccaggacaacaaggcgttcttgaccggggtcgccaagctcagccagctccaccacgagaacctcgtcgacatcattggctactgcgctgacggagaccagcggctgctggtgtacgagtccgtgcccgccggcaccttagaagaccacctgttcgatctgccggcggacaagaagccgatggactggtgcacgaggatgaaggtggcgcacggcgccgcgcaggggctggagtacctgcacgagacagcgaacccgccggtggtgtacggggaattcaaggcctcccacatacttctcgacgagaagctcacgcccaagctctccgacttcgggctcgcgcagctcggccaggccgggggcagcatgccggtggtggcgtcgcccatgatgggctccttcggctgctgcgcgccggagtacgatcgcacagggcaggccaccatgaagtccgacgcgtacagcttcggggtggtgctggtgcagctcatctccgggaggagggccgtcgataccagcaagccggtggacgagcagaacgttgtcacctgggccatgccgatgttcaaggaccagaagagataccatgagctggttgatccactcataaagaaggaataccctgccaaagcgttgaaccaggtggtcgccatggctgcgatgtgcttgcaggaagaggactccgtgcgaccgctgatggccgacgtcgtcatgacgctaggcttcctcacggcgatgccgcctgacccaccggcccctgccgctccaccgcctgccgccgccccggagccgaaggaagacaaagaatcggaccattcagactcctcgtcatcttcttcttcagacgacgacgaagataacgaggaggaggaaaccgaggagcaatgataagggcgggtgtgttcagcttcgaaggcttcaaacgtggaagggccacgcagatgaagtggcttcgtgcacttggcgtgtacggagctcaatatgtgggaccttggagccacttggacttggtggttgtggcagttaaattggggtgttcacaagtgagtaatctttttttttgtgatgacgccaagcatgtaaaaatgtgagctatgacatactgatgggttacacattttgcactttaatttgtttttcgtatggtcattacaatttatacatggaaaatccacgtggaattacggc

SEQ ID NO: 138912 - DNA, 2516 bp, Zea Mays
cccatgagtttgctatgtttgcatgatgtggagaccgctatatttggcttctcaatcccccgtgtttcatagatatgcatgcgtcttctatatatggccaaaaaaaaaagacttccagctctgtctctaaaaaaagaacatgagtagttaattatcatggcgaccgcgggttaaacagaggtggctggtagcgaggcccaaacaggcggaaggagaacatcgatcggtcgtggctgtttccacagccggaccgaataggtgagcaaagtagagtgctttgaaatgaatagctatgcgatttctgttcttctcgatctactcgtcgagacgaggcgcaagagaaagcgtttgatccccataccaacacaacaacacatgcgcctttagctcgctccatccatgtcatgtgaatgctacaatgtttctaacatctttgcatgcaactctctcctagctccttcatgtgtttattatacttgtttgatcacgtttttgaacgagatccttcatgtgtctatgacccgtcgtcgataccgaagcggcgcggccgggaaatggggagaaaaggcaagtggttcgacaccgtgcagaggatcctgatcacctctgaacctgatcccgtggagacgcagaacgatgatgccgccaaggactggaagctcgatcatcacgagaaggctgcgaagctgagagacaataagtcggccatcaggaggatatggcagttcggcaaatcaaactcgtccggtgcttccgcctccgcgacggcgccggaggacgcggaggttcttcagtttccgaagtcgccaaggtcggacaacgagtaccatgtcgtccaggacctcaccgaggaggtgccgttcatggagacgagaggcgaggaagaagaagaagaagacggcgagcgcatgaaccctggggatgaggtggccgcgtcaccagattccaaggccgacgccgcgcccatgacagcgtggtccgcgcgttcaaaggaggacattgccgccaccaggatccaggcggcttgcaggggccatctggcgaggagagggcaacaggagagagggatggctaggctgatgtcgctggttgacgaggggttcgccgtcaggcgccagacccaggaagcgttgtactgcatgcagatgatgacgaggatccagactcagctgtacacgagacggctcaagaccgagaaggacaagaaggttctcaagagtcagaccaaggccgttaataaacatagcctggacaaagcaaagattggtgaaggctgggaccatagcctgcagtccaaggagcagatggaaacggtgcagaagatgaagcaggaagctgctacaaggcggcaaagggccttgtcatacgcattctctcaacagtggaggaacaggaacacctcttctgcgcgagctgcgcatgggcctgctcccatgtacatggaacctggcaacccgaactggggctggtgctgggcggagcgctggatggcggctacgaggccgtgggagaaccagaccatgccaccgccggacactggccgcgcagcatccaaaagcgctagcacccgactgcctcgagtcgccgtgtcggtccagatacccacggccaccactactccaaagggcaagccgttccgcccaccgaactggtcgtcgtcgtcgtcgctgtcgtccccgtcgacgcccccgccacggaggacggccacgctcgccagcccgaggagcggcccgctccacgccacgagcggcctccagcacagcaagagcctgcagccagaccaccgccgcccgcggagcagccaggaactctcggcaaacagcccgcgccgcgccgccgtgccggcgagtcccaggtgcgccagcgggagcagcagcccgctccacccttccagcggcgccggcgcgcagcacgcgacgacgacggcgaccatgcggctcgagcgccgcccgcggagcagccaggaccgcgggatgagcagcccacgcctgctgggcgccaaggacgccccgctgcggcgcaccgcgagcctacggtctgagctcccgataaggctgagcctaggaagcgccgtcgcggccgcggccgtgggagacgacgagggcgcgccggtgacgcccagctacattcatccagctaaaaagtccgtgagggccaaggttagatgccccagcccgtcggcggcagcggccactcctgacatgtttgacgctctcgagagcagcccagcacctcctctacaagtgcctccctcgccatcgtcagccaagaagcgtttgtcccaggcgttcgcggacaagccgagtgcctcatcgccgagcaaggtggcgttggagagggtaaggcggcactcgcagctaatttccagtcccaggatgtcgctgtcctgagtcaaagaaggagatggaacgcaaagtgttgtaattatacgatacgtcgggtgacacttttgttttccttttgcgtgtgtatgttttacttgttacgtgtgacatggtggaattttttgtgcttat

SEQ ID NO: 138913 - DNA, 2235 bp, Zea Mays
cccatgagtttgctatgtttgcatgatgtggagaccgctatatttggcttctcaatcccccgtgtttcatagatatgcatgcgtcttctatatatggccaaaaaaaaaagacttccagctctgtctctaaaaaaagaacatgagtagttaattatcatggcgaccgcgggttaaacagaggtggctggtagcgaggcccaaacaggcggaaggagaacatcgatcggtcgtggctgtttccacagccggaccgaatagcggcgcggccgggaaatggggagaaaaggcaagtggttcgacaccgtgcagaggatcctgatcacctctgaacctgatcccgtggagacgcagaacgatgatgccgccaaggactggaagctcgatcatcacgagaaggctgcgaagctgagagacaataagtcggccatcaggaggatatggcagttcggcaaatcaaactcgtccggtgcttccgcctccgcgacggcgccggaggacgcggaggttcttcagtttccgaagtcgccaaggtcggacaacgagtaccatgtcgtccaggacctcaccgaggaggtgccgttcatggagacgagaggcgaggaagaagaagaagaagacggcgagcgcatgaaccctggggatgaggtggccgcgtcaccagattccaaggccgacgccgcgcccatgacagcgtggtccgcgcgttcaaaggaggacattgccgccaccaggatccaggcggcttgcaggggccatctggcgaggagagggcaacaggagagagggatggctaggctgatgtcgctggttgacgaggggttcgccgtcaggcgccagacccaggaagcgttgtactgcatgcagatgatgacgaggatccagactcagctgtacacgagacggctcaagaccgagaaggacaagaaggttctcaagagtcagaccaaggccgttaataaacatagcctggacaaagcaaagattggtgaaggctgggaccatagcctgcagtccaaggagcagatggaaacggtgcagaagatgaagcaggaagctgctacaaggcggcaaagggccttgtcatacgcattctctcaacagtggaggaacaggaacacctcttctgcgcgagctgcgcatgggcctgctcccatgtacatggaacctggcaacccgaactggggctggtgctgggcggagcgctggatggcggctacgaggccgtgggagaaccagaccatgccaccgccggacactggccgcgcagcatccaaaagcgctagcacccgactgcctcgagtcgccgtgtcggtccagatacccacggccaccactactccaaagggcaagccgttccgcccaccgaactggtcgtcgtcgtcgtcgctgtcgtccccgtcgacgcccccgccacggaggacggccacgctcgccagcccgaggagcggcccgctccacgccacgagcggcctccagcacagcaagagcctgcagccagaccaccgccgcccgcggagcagccaggaactctcggcaaacagcccgcgccgcgccgccgtgccggcgagtcccaggtgcgccagcgggagcagcagcccgctccacccttccagcggcgccggcgcgcagcacgcgacgacgacggcgaccatgcggctcgagcgccgcccgcggagcagccaggaccgcgggatgagcagcccacgcctgctgggcgccaaggacgccccgctgcggcgcaccgcgagcctacggtctgagctcccgataaggctgagcctaggaagcgccgtcgcggccgcggccgtgggagacgacgagggcgcgccggtgacgcccagctacattcatccagctaaaaagtccgtgagggccaaggttagatgccccagcccgtcggcggcagcggccactcctgacatgtttgacgctctcgagagcagcccagcacctcctctacaagtgcctccctcgccatcgtcagccaagaagcgtttgtcccaggcgttcgcggacaagccgagtgcctcatcgccgagcaaggtggcgttggagagggtaaggcggcactcgcagctaatttccagtcccaggatgtcgctgtcctgagtcaaagaaggagatggaacgcaaagtgttgtaattatacgatacgtcgggtgacacttttgttttccttttgcgtgtgtatgttttacttgttacgtgtgacatggtggaattttttgtgcttat

SEQ ID NO: 138914 - DNA, 79 bp, Zea Mays
ctcccctaatagtaataggttttgtcgtctccgtttctttacgtacaaattaaattttaagtttatattttttaaggtg

SEQ ID NO: 138915 - DNA, 1112 bp, Zea Mays
atccctgcatcgcaccctcccgggccgccttctcttctccagcgtccgatctcccactcccctccctcaccgcagctctcccacctccgccctccccccgcacgcgctcgccacctcgccctcccctccacgttgctcgcacccgcgcttatataagtgcaggaggagctcatggcggaagctccggcgagccctggcggcggcggcgggagccacgagagcgggagccccaggggaggcggaggcggtggcagcgtcagggagcaggacaggttcctgcccatcgccaacatcagtcgcatcatgaagaaggccatcccggctaacgggaagatcgccaaggacgctaaggagaccgtgcaggagtgcgtctccgagttcatctccttcatcactagcgaagcgagtgacaagtgccagagggagaagcggaagaccatcaatggcgacgatctgctgtgggccatggccacgctggggtttgaagactacattgaacccctcaaggtgtacctgcagaagtacagagaggtgcagggtgatagcaagttaactgcaaaatctagcgatggctcaattaaaaaggatgcccttggtcatgtgggagcaagtagctcagctgcacaagggatgggccaacagggagcatacaaccaaggaatgggttatatgcaaccccagtaccataacggggatatctcaaactaatggaggtatggaccttttctgcgacagctgctcttacctgaggcgattttttttgtcttagttatttactaagacaccttgcggtgaccattaaagagtaaccaatcgccctcaataggtccgtttttatctgccagaactgatgaggtcgctcactaggagtaagtcgcttccctgggaacggttgtcggctagcaccgctcttgtatgtatattaagagtaacttaatgattggtcttttggctgcgatttgattacatgtatttgtatcgggaggcataaatattgtgtaatttgtgttaaagactggtgtaattgaactatgggaagagctgctttggttgtaaccatattttgatgcccgtatattaggcaaaaatagaaggctgtgggcgtgcacaac

SEQ ID NO: 138916 - DNA, 1137 bp, Zea Mays
acccgccagcacgaatcgtgacgcagatcaagcaaaccctaactgccaaccctactatattttttttttcttgcccctctcgatcccgccgccgacgccgacgccgcagccgcagccttagccttgccttcgaactcgaagcccgttgcatccggctaccgcagcgtcgccaaccgtcacagccggtctcctccctccgctaccatggggaagacacgcggtatgggagctgggcgcaagctcaagacccaccgcaggaaccagaggtgggctgacaaggcatacaagaaaagccacttgggcaatgagtggaagaaaccttttgctggatcatctcacgccaagggcatcgttctggagaagattggtattgaggccaagcagccgaactctgccatccgtaagtgtgcccgtgttcagctggtgaagaatgggaaaaagattgctgcctttgtgccaaatgatggttgcctaaactacatcgaggagaatgatgaggtgttgattgctgggtttggtcgtaagggccatgctgtgggagatatccctggtgtcaggttcaaggttgtgaaggtatctggtgtgtcgctgctcgcgctcttcaaggagaagaaggagaagccaaggtcttagatcactttcgatagtcaagaatggagtaaactgacaggctctactatggagtaaactgccaaggttttagatcactttcgatagtgaggttcaaggttgtgaagtttagcgacagagctgttaattctgagctgtactttttgttaacattgctatcgagactcgagagttttgttcccattttgaagtattaatattgcatcggcatgtgccgattcttactgagatgtatgttttgatatttgccccgttgtttgttttgcctcaacgcccttttgatctctaaaaaacatatttattaatacaattttagaaacaaattataacatgtaaatcagttaaaaatgtttctgtaaatatggattttgaaattttctgataatagggatttggtgaaattatggagaatgagatatagagtacaaaatttagaggacgttgttagagatcacgaagatatagagtacataatcttttagagcgtgtggtaaaaaataaataata

SEQ ID NO: 138917 - DNA, 3105 bp, Zea Mays
aagtgggtcactcgtcacgcccatctcattcattccgtcgcaggctcgcagtcgcagcgccgttgcggacgcagccacgcaggcgcaggaggcaagacgggacctcgccctcccccgccttgcctttgagtgcttccactccacctcatcagtcgccgcccccgccccgccgcgccgcgggcccctccacctaccctcggcgcccgcccttcttggcccagcgcccctgcacatctgcctgccccccctcggccgccggcggcggcgatcgcgggtagccgccccaaccggccgaggttgcatagaggtgctggtatcttactctgcttctggttatgctatctgcctatgacttcagcttcccaaacttctccctgcttcttgcccctggttggtaaaaatctgtaacaactgctgccctgactgcaaaagacgcaactatgcgtctttcttcttctcttcaagatttgccgaccttcaccagaattgatgctttggaaaggggttctagcgtaggcagtgatctgagctcagggcgcccaaaacctgtccgcatgcttcaaagagatggtgccgtcgcaagcttttcaaaagaaagaacacccccctcatcgccgacaaatagaaagaaatgcatgagagcagccgggtgtgctattgcattgatcttactggtgttctttgcgtatggttcatggagatattttcatgtgttcctctctgaaggaagatctgaatactatgttgttcttgattgtggcagcactggtacgagagtttatgtctatgaatggcatattaatcataatgacgcaaatgcatttcctattgttttgaaacctttagggaatgctcccaagaagaaatctggtaaattaacccgactatatcagcgaatggagacagaacctggattgagcaagctcgttcacaatgaatctggattgaagaaggcaatagagccccttcttcagatggctgagaaattgatccctagacatgcacacaagcacactccactttttctatatgctactgctggtgttcgcaagctacctagtgcagattcagagtggctcctggataagtcctgggatatcctgaacaattcatcatttttatgtagtagagatagagttaagatcattagtggcatggatgaagcttattatggatggatagctcttaaccacaacatggatatgcttggcacctcatcatctaaaatgacatatggttcacttgatttagggggatcatcattacaggttacatttgagaatgataaatcagtgcaggatgagacaagcattcgtctgagtattggttcagttgaacatcacctcagtgcttattctcttactggttatgggttaaatgatgcatttgataaatctgtagcacatctagtgaaaagactgggaggagttgctagcaatggcaaggttcaagtcaaacatccctgtctacagactggattcaaggaagattatatttgttcttactgccatccattgaaacaagatggaagtcccagtgtcggcgagaagaacagtggcaaagagaagcagggaatagctgttgaactggtcggagcacctcagtggaatgaatgtagtgctcttgcaaaagtaacagtcaatctttctgagtggtccagtgcaagtccagggcttgattgtaacatccatccttgtgctcttgcctctaactttccccgaccatatgggcagtttttcgctatctctggcttctatgtggtttttaaattttttaatttgactgctgatgcgactctaggtgatgttcaaaaaagaggtcaggaattttgtgaaaaaccatggaaagttgcaaagagtagtgttcctccacagccttttgtagaacaatattgcttcagagctccttatatttcatcactactgagagagggattgcagattaaagatagtcaggtgataattggctctggcagtattacttggactcatggagttgctttgctggaggctggtcaagcattgtcttcacgactagatattcaaggataccgaatactgcacagggagataaatccaaatattctcatagtactgtttctgatttcaattgtgttggtcatatgtgccatactatgcgtcagcaattcgataccaagatcattccgcaagtcttatctgccaattcataggcataattctggaggcagttctgttcttggtatgggattgcctttcaaacatttattatggaatcccattagttcaggtgatggtagaacaaagacaccactgagccctactgttgctgggtcagatcctcatccatttgcaggactaggaggcagcagtgtcgagcttatggagtcctcgaggcaatccttgggtgcctatcacagctattctgttgggagcttaggtcagatgcagttttctagcggggtgaggaaccctagccgaggtcagactacacttcaaagtcggaggtcgcaatcaagagaggatctcagttcttcacttgctgatattcattttccaaaagtgtagcactgcatcaaggaatgactagaatgagatccttacatgccataacaaactctgtaaataatagctccagagttcgaactgcttgatttcttctctaatcagaagtcaattttgtctgtccgcttacacttcaatgaggtttaggattcatataaatgaacttatgacttgtgcctatcctggacatgatacatccattcatcccattgtatgtgctcaagaacataccatagcagtgaagttctggtagtgtactggaagatatatttatgccgttcaccagactggttgaccatggctacagcctacaactttatagatcgattgtgctgcaatcagggatgttatttttttgtatctgagacataataaaggtgcatgtggtctcatgtactgttgtaccctctaggctctagtggctctgtgaggttactcttctttcctggaataccttttgataggctactctgtggtatcaactgaaatcatgaaacactgacatcagttctactggattatctagttgcgtactgtgtatacacatctattgagttttttt

SEQ ID NO: 138918 - DNA, 3620 bp, Zea Mays
aagtgggtcactcgtcacgcccatctcattcattccgtcgcaggctcgcagtcgcagcgccgttgcggacgcagccacgcaggcgcaggaggcaagacgggacctcgccctcccccgccttgcctttgagtgcttccactccacctcatcagtcgccgcccccgccccgccgcgccgcgggcccctccacctaccctcggcgcccgcccttcttggcccagcgcccctgcacatctgcctgccccccctcggccgccggcggcggcgatcgcgggtagccgccccaaccggccgaggttgcatagaggtgctggtatcttactctgcttctggttatgctatctgcctatgacttcagcttcccaaacttctccctgcttcttgcccctggttggtaaaaatctgtaacaactgctgccctgactgcaaaagacgcaactatgcgtctttcttcttctcttcaagatttgccgaccttcaccagaattgatgctttggaaaggggttctagcgtaggcagtgatctgagctcagggcgcccaaaacctgtccgcatgcttcaaagagatggtgccgtcgcaagcttttcaaaagaaagaacacccccctcatcgccgacaaatagaaagaaatgcatgagagcagccgggtgtgctattgcattgatcttactggtgttctttgcgtatggttcatggagatattttcatgtgttcctctctgaaggaagatctgaatactatgttgttcttgattgtggcagcactggtacgagagtttatgtctatgaatggcatattaatcataatgacgcaaatgcatttcctattgttttgaaacctttagggaatgctcccaagaagaaatctggtaaattaacccgactatatcagcgaatggagacagaacctggattgagcaagctcgttcacaatgaatctggattgaagaaggcaatagagccccttcttcagatggctgagaaattgatccctagacatgcacacaagcacactccactttttctatatgctactgctggtgttcgcaagctacctagtgcagattcagagtggctcctggataagtcctgggatatcctgaacaattcatcatttttatgtagtagagatagagttaagatcattagtggcatggatgaagcttattatggatggatagctcttaaccacaacatggatatgcttggcacctcatcatctaaaatgacatatggttcacttgatttagggggatcatcattacaggttacatttgagaatgataaatcagtgcaggatgagacaagcattcgtctgagtattggttcagttgaacatcacctcagtgcttattctcttactggttatgggttaaatgatgcatttgataaatctgtagcacatctagtgaaaagactgggaggagttgctagcaatggcaaggttcaagtcaaacatccctgtctacagactggattcaaggaagattatatttgttcttactgccatccattgaaacaagatggaagtcccagtgtcggcgagaagaacagtggcaaagagaagcagggaatagctgttgaactggtcggagcacctcagtggaatgaatgtagtgctcttgcaaaagtaacagtcaatctttctgagtggtccagtgcaagtccagggcttgattgtaacatccatccttgtgctcttgcctctaactttccccgaccatatgggcagtttttcgctatctctggcttctatgtggtttttaaattttttaatttgactgctgatgcgactctaggtgatgttcaaaaaagaggtcaggaattttgtgaaaaaccatggaaagttgcaaagagtagtgttcctccacagccttttgtagaacaatattgcttcagagctccttatatttcatcactactgagagagggattgcagattaaagatagtcaggtgataattggctctggcagtattacttggactcatggagttgctttgctggaggctggtcaagcattgtcttcacgactagatattcaaggataccgaatactgcacagggagataaatccaaatattctcatagtactgtttctgatttcaattgtgttggtcatatgtgccatactatgcgtcagcaattcgataccaagatcattccgcaagtcttatctgccaattcataggcataattctggaggcagttctgttcttggtatgggattgcctttcaaacatttattatggaatcccattagttcaggtatgcgcaagtgtgtttttctcttttatgttcccgccatcttggtttctccccttctgtataaagttaacataccatgtaaggactacagggtttggattattttcaccccggttggctgctagatacacttgttttaagacaaagggctcttaacttgtttcgttggaaagcataaagcaacttgacatttcgttagttttccaatattctactatgtaaccttctaggaatcagctttacgtagaactgttgtgtggtgcaacttcaaggacgtgggacctttcatgttttcacttctgccttatgttacaaaatgccatttggactaaactttgtgatgttacctcaaatgtatctattatatcaccaatccttgtgactcttctctactaaatgatactacacagaatgagtgtttttcgtcacatgaattcaagttatcttttaagttcttcaaaaatacgtgaaacttactttactgtaacttaccttagataatcaaacatttgaactttcttaattttgcaggtgatggtagaacaaagacaccactgagccctactgttgctgggtcagatcctcatccatttgcaggactaggaggcagcagtgtcgagcttatggagtcctcgaggcaatccttgggtgcctatcacagctattctgttgggagcttaggtcagatgcagttttctagcggggtgaggaaccctagccgaggtcagactacacttcaaagtcggaggtcgcaatcaagagaggatctcagttcttcacttgctgatattcattttccaaaagtgtagcactgcatcaaggaatgactagaatgagatccttacatgccataacaaactctgtaaataatagctccagagttcgaactgcttgatttcttctctaatcagaagtcaattttgtctgtccgcttacacttcaatgaggtttaggattcatataaatgaacttatgacttgtgcctatcctggacatgatacatccattcatcccattgtatgtgctcaagaacataccatagcagtgaagttctggtagtgtactggaagatatatttatgccgttcaccagactggttgaccatggctacagcctacaactttatagatcgattgtgctgcaatcagggatgttatttttttgtatctgagacataataaaggtgcatgtggtctcatgtactgttgtaccctctaggctctagtggctctgtgaggttactcttctttcctggaataccttttgataggctactctgtggtatcaactgaaatcatgaaacactgacatcagttctactggattatctagttgcgtactgtgtatacaca

SEQ ID NO: 138919 - DNA, 897 bp, Zea Mays
gatcctgtcctgtgcaatcaaatccaacagtgtcccctctcctcctcttgtcgtccaccacccagtccccagctgcctcgctgatggccaccgagaccatccaggttccggcgccggccatgccggcagtagctgggcgcgccgccaccagaggcggcagcagggcgggcctgccgccgccgccgcggaggggccagatcaaggagaagatcctcaaggacgtcgtcgctgctgtctccgccatggccgcgggcctcgtcaagaatagccgcggcgacggcgaggagggtctcccggcctccgtcgacgccgacgacaacaagtgaaacggccggtccccagaagtataagaagagccgcgccgcgcgttctcacttccgcccgcggcctgcccgatgccctcgctcctctgctgctatcatgtgctcattttagtgcacgcggtagagggctggcagagggccaaatatttacaaagaagctctcgtgaatctctcctccgtgtttgaagtatttgtggggtgtctgttggtcagatggatcggttgccatattagagcacgcgctggtccatccatccgtccacggtcagtcttgctgctttctggtctcgttttgtttgggtttcagtggctgctgtcaggaggttactgctgttttttaaggaagagcctccgggactgcggttggtgatgctggttagtcttaagtttctgttgtttgatcagtgtgttgtgtaagcttgtgccgttttgtcgagcgcttggttgtgtaaggttcaggaggactggaggaggggatcagcaagtattatggtctggtcccttcctctctgtgtcaccgaccccttcgctgtaactctgctttgctgtcatgtcaaataaagcttcttgtttg

SEQ ID NO: 138920 - DNA, 709 bp, Zea Mays
cgaccatatgcgtgagctgctggacgcgtgaatagtagtgatttcttactcattttccgcatccgtgacctgctggagacagccttagggaaaagtacgaggaagctatggcttcacttgcccaaatggagaaccgagctgtaatggcagaaacaatgttagaggctacactgcagtaccaatctagccagcagaaagcactgtccccttgcccttctccaaggccatcaatgctcgatgcatcccctagtcaggcaagtcagaattcatcgcaggtgtttcagccaagaaggaaaaacttgcttggcccattttcgctgagttggcgtgataagaacaaggaaaagccgaacaatgttgaagactctgcgaacacaaagtttaccaatagtgatgaaatggtagatgagaagcagatggaaaccctggatctagataacgaacagagagcagaatcaactaaagaagatggcaagatgagagcagaaacccctcagaaagacgacgatctggtaagggtccaattaaccacggaccatttgaatggacaccatgaacagatgcaagaaataaaactggattggtaagcacaatggcacccagtccaagtaccttcggcaacacttctcagtgtatttgtgacctgatcacggtgccagttggtgcagcattgagggtggcctaatgttctttatatcccccccccccc

SEQ ID NO: 138921 - DNA, 2615 bp, Zea Mays
cccaggtacggacactctcctactccgcccggcgcccatccccgcgcacgcccagcagtccagccggaggccagatcaaagcgccaccgccacgccgcacttagctaatcccgccgctgccccggggtcgctaggaggagatgaagcccaaaagcctcccgttcatcgccttcgagcacaagcgggatgcgtacggctttgctgtgcggccacaacacctgcaacgttacaaggagtacgctggcatctacaaggaggaagaggaggagagatccgatagatggaagaattttctggagaggcagcctgagtcatctggacaggatgctggtgataatgctacgggtgatggttctgaatcactgcatgagaagaccgtagcagggccacagaagattcaaatatggacgccaattagatcgtccctgagcaacattgagcagataatgagcctgcgcatcgggaagaagcaatcttctgctggcaagcagcaagcaaaggacggaacccatcacgtgaaaggtgaagagagcaagttgtcggaggattcagatgacgaattctatgatgtagataaggttgatctgagccaagaagcgcaatcgagtgatactaggaatgctgatgttggaagcaggaaccaagaagaaaattacatttcaagggaagagttggagtgcctggtccatggtggactgccgatggttttgaggggagagctatggcaagcttttgttggtactggagctcgtaggatagaagggtattatgatagtcttgcagcagagggtgaattagataacaaaagttctccaacttctgaaggtgttcaagaaaagtggattgggcaaatagataaggacttgcccagaacttttcctggtcatcctgctttagatgaggatggaagaaatgctttgagacgcttgcttatagcttatgcgaaacacaatccatcagttggttactgccaggcaatgaacttctttgctggtctcttgcttctattgatgccagaggagaatgcattttggacattggttgggattatggaggactattttgatggctacttttctgaagaaatgattgagtcacaggtggatcaacttgttttagaggagttagttcgagagaagttccctaaattagcaaatcacctggattaccttggacttcaagttgcatgggttactgggccatggttcttatccatcttcacaaatgtgcttccctgggaaagtgttctccgtgtctgggatgtgcttttgttcgatggaaacagagtaatgctgttccggaccgctcttgcgctactggagttctatggtcctgcacttgttactacaaaagatgccggtgatgcagttacccttttgcaatctttagctggttccacatttgacagcagccagcttgtcttgacagctcgtatgggatatcaatccgtaaatgaaacaatattgcaagagctaagtaataaacaccgcccatctgttatgtctgccatggaagaaagagcgaaaggtctaggcgtttggacagatactaatggtcttgcatcaaaactgtataactttaaacgtgatcctgaaccactggtttctttaagcaactcagcagaccagttgagtgatgtgggagatggggatgccaatcaagaaagtgatcctgtaaacatggatgacgagtatgttggtgtgacagtgaaatctgagattgattctttgcctgatccaaaggaccaggttgcctggctgaagttggagttgtgccaactcctagaggagagaagatcagcagttctcagagctgatgaactagaaacagcactcatggaaatggttaagcaagacaatagacgccaattaagtgcaaaggttgagcagtttgaacaagaaatatctgaattcagagaggctttgtcagataagcaggagcaggagcaagcaatgtttcaggtcctgatgcgtgtcgaacaagaactgaaaattgcagaggaagctcgcatctcagccgagcaggatgctgctgctcagagatacgcagcaaatgttctacaggaaaagtacgaggaagctatggcttcacttgcccaaatggagaaccgagctgtaatggcagaaacaatgttagaggctacactgcagtaccaatctagccagcagaaagcactgtccccttgcccttctccaaggccatcaatgctcgatgcatcccctagtcaggcaagtcagaattcatcgcaggtgtttcagccaagaaggaaaaacttgcttggcccattttcgctgagttggcgtgataagaacaaggaaaagccgaacaatgttgaagactctgcgaacacaaagtttaccaatagtgatgaaatggtagatgagaagcagatggaaaccctggatctagataacgaacagagagcagaatcaactaaagaagatggcaagatgagagcagaaacccctcagaaagacgacgatctggtaagggtccaattaaccacggaccatttgaatggacaccatgaacagatgcaagaaataaaactggattggtaagcacaatggcacccagtccaagtaccttcggcaacacttctcagtgtatttgtg

SEQ ID NO: 138922 - DNA, 522 bp, Zea Mays
atcatagcccgacgaaattctccgttctgttcgtgtgacctcggcagtacaactatagctcaattaatcgtcatcggcaaaccagaccagcgacggaaaatattacatccatcgcagatcagatcgtagtatggcgctcttgctcgcgttaatctcgacccggtttcatcctcagggactccagttgagccgggaagaagcggccgtcagatcaaggagctaggcaggagcatcttctgtccaggcaagggcgcaaggcaggggaccggtcgaccggggccggcgccatggctgtgacgcagagcacgcagctcggcctcgccaccgcgttgttcggcgtcctctccttcgtcctcaccgacctcaagaaagtactgtgtcttctgttttgcttgcctctgttctcgctgcctgctgaaaaactaccgaggtgaactgagcgactgcagagatcgagatatggggaattaattccatcattatacgtgaaacttccgtaactataggaattacgaatgaaaa

SEQ ID NO: 138923 - DNA, 1356 bp, Zea Mays
atgttccatccttcatcctcctcgtcgccacccaactacagtgacctctccatgcaccacgcagtgagcttctcctctgctgtgcccacagctccaactgagattcctcgcggggggttcttccatggcaacggtggcttgctagcacttgccaatgttgctgcatcagcgccgcctccctacccctcctccctgccttcctactacatacatgggaacgtcagctcgcatttcctccctcttcgcctccagttgtcgtctgaacagctcagcacttcggcgtgccagttgcctcttccccatgtcccttcttccccttcctcatcctccggtgaccttttcgagttcagcgctggagccatgcggcgtgtcttcagtactggtgacctccaggtgatgaatgtcgcggcgtctccatcaccgccaccactttcagtacacggccaagatgccggagggcctcctttcactcagaaggttggccgttacagcgctgaagaacgcagggagaagatcgagcgttaccgtacgaagcgtaaccagaggaacttccacaaaaagatcacgtatgcctgcaggaagacgctggcggacagcaggcccagggtgcagggccgcttcgcgaggaacgccgagacacaggccgaggcggttgcaggccacgagagggaggccgcctcagacaacagcagctacgagcactgccaccacagcgacctcaccaccgccaacagctacgacgtccagtgcagggaaagtggcaaaaccacgacattggacgacggcaagtggtggaacctgacctgggccgtgcgaggggcgtctcctgattggcgctgtctgagtggaaaattccaaacatccaagctctatgatttcctcaaaaagcaagatagggtgacgaaccctgctgcagccttcatttggagcaataaagcgccaccgagagcccaattcttcgcttggctactcacccaggggaaaattcagtccaaagaaaatctgctgctgaaaaaaattgtggatgaggacacttgcgatgtgtgtggccaggaacgcgaaactgctgatcacattgttctccgctgccactttgccaagaccttctggcttgcgattggctttcacatccccaatgacatgactgtgcaaaatttgcaccagattgaacggccctcaaacctcccgcaaaatgagttcagctcctttgtcatcctatgttgctggcagttgtggaaacgcagaaatggttttgttttcaggcaagaggcagccaccctcaaccaaactctccagctaatttgcgccgaagctgccagttggagtcacggcatagctctaaagaatccggagtaa

SEQ ID NO: 138924 - DNA, 2840 bp, Zea Mays
atggaggacagggtgaagtcaatgctcgagctcattggggccgacggcgattcgttcggcaagaaggccgaactctacttccaaagccggccagagctcatcaatcacgtggaggagatgtttagatcctaccaggcccttgccgacaggtttgatcgcatatccagtgagctgcacaaggccaaccacaccattgccactgtgtttccggaccatgtacagttctcaatgcaagagggggatggtgaggagttcccgaaggcaatcggtgggattgatctcagcaacttcaaattccctacgttggaaggcttgtccatgggctcgcagagcgcgagtaggggcaccagtccggtccccaagagggggaccaagccacaccgaagggtcaccacaaacatgaacgaggagaaggcgcaggaagagatagacaagctccagaaacaaatcctggcactacagaccgagaaagagttcttgaagactacttatgacagcgcactaggcaagtatctagacattgagaaacaggtggccgagttgcaggatgaggtctgcaatttgcaagatgctttcagcactggtgtagccattgaagacaatgaagctcgagcattgatggctgcacaagccattatatcatgtgaggatacgttggtgaacttgcaggaccagaaaaacagaatgactgaagaggcgaaggtggagctccgacgagccaatgaggcaattgaaaagctgaaaagcttcaagaatgaatgtgagctgcctcatgcaccaatgaatgtacatgatcactatgaaatagaactggtcaatgcactgcccctcgatgatgctgatgattctgctctgaacgagagcaggcttgacctccaggaaatatgtcaaacagtaaaagatataatcgaatcttatcctgaactatcagttgcagaattagcggaaaaggttgatcgacttgtggaaaaggtgatcaaccttgaacttgctactacttcacagaatgctcacatcaatagaatgaagattgagatagatggacttcatgagcgcctgcatgctttggagcaagacaatgtagctttggctgttgattctagtaacttggctgacaggttgaggatagttgaagaaatgctgcaagaagtacaacaaatttggaagtctatacgaaatgggtccgagaatatttgtaaacaaatgactgaagccacccatgaacttactgaattcattgaaacattacattctcctaagcaagaaatcagtgacttcgtggattcattgcgagactccaaaggcgatgcttctctggaagatgattcaggactaacaagtctgtatgtgcaaaatgagccatccaaatctttacgtgtcgctacaagtgaaattgagaaatatgaagaaacctcagaaggtcttgtagcccagaaacagctagttccaaaagaatccgaaggtgagggtaagattatattagaagattacgcatctgtacttcagagctacaaaaatacagagcaaaagctttcggaaattgagaagagaaatcaagattaccatcttgaggcaatgtcagaactgaaggaacttaagagtgtcaatgcaagaaaagatgaggagatccactcgcttaggcacatgctaagttctttgcagaaaaagatgagtgcctctattattgagagtttagagaagtcagaagaaacatccaagataagcgccattactactacagaagacaaagagattgctaagtcagaacaaacatccaagataagcaccagtcctactacagaagacaaagaaattgctgagatagaggaatacattaagcaatggcaagttgatgaaccgctagcttcttcggttgcagaggagaaatttagagtagaaattgacagggtgttgggggagaacttgaacttctggttgaggtttagcacattatatcatcaaatacggaatttccaaatctcttttgacatgttgaaaactgagatgcacagaatgactgatgaacaggaagatgagggcatttatggctttgctggtagttatcaggtagcaaagctagaatcagcagtactagaaaagaaattgagggacctaaatacagatcttcaagtttggattgaaaggaacgtgcgattgaaaggagagctagagaacagattttcatcactatgcagcatacaagaagacatatcaaagattacaactctagataaatgtgatgaagttcacttcaacccttttcaagctgcaaaatttcaaggagaggtgcttaatatgaaacaagagaataacaaagtcgctaaggagctagaagctgggctggaccatgtaagaggccttcaagtggagcttggaagggtgatcttgaagcttagagagaatctcaaggtatctattgcaagaagccaccgaactcaacaaaacttccggaccctgtcaacgaaaggtggtgttccccttagagcttttctgtttggctcaaagtcaaagagaccatcactcttttcgtgcatgcctggggtgcataagcaacacagtggttcaaaggctgggcgtggatgagtactagcaatttgtttttcgacatttaatcctaaagatatctcagtgtacatgacaattcatatgtgacaaatgatcttcggtcttaaatgtaaaagaccctcatctgctatatcaaatttggtttgtgatccactcactcctgctttgatacattgcctatatgatattcatttcagaactaaatttgatggaagtatatgatgtattaatgtgaaatggtttaaaatgctcaaggtactggaagaacctatgtg

SEQ ID NO: 138925 - DNA, 1614 bp, Zea Mays
attgattcaacttaacagtagcgattacagagaattagaatcccggaaagaagaacaacatgaggttagggatgggagaagaatgccgaagccactctacaagggtctagaagatcctagagagggaagtagagaatatatgggagggagtaaacttgagaagcaagatgaactgcgtaatctcattccccctgcctttctggtgactgtctctctttgtagtgttcctttagcaacctgggccgtatgggccatttgggctcacattcctaacacttgtgcgagggggggcgacaccgacgctcgcgtgattaccctcattgccctacgtcatcaaggcggcgagcccctgagacgaacaacctttgcgccattggtgttgtgttgcgtgagggggagtgcgagggctccccgacaccatggcctgcaccgacagtgtgaagggtccccaggtctccgattacatttgtgtcctgcattcacagacgatcagcttggttctagacgaagtcactcgatggttggttcaaggtatcagaagcagggcgaagccagataataaagttattgagtccactccaacgtcacgaatgccctgtggcccattcgcggacacgtaccatcatcatcggtacgatcacgagcagggcagagatcacggcaccgccgctgtggtcaacgcgagaccaccaccagctgccgcgtcggatgtggcccgtctccgtcattgtgtcgtggcctcgcgccctgccggctgccgcctcgtcttctcttttttatttttttccctacggaaaggaagagaaaagaagtgggaaagccgacccaaaccagacgacttcctccctcggctgggatggccaagccaagcaaccaagcgggggtgtcggtccgccgagcggagggcgagcatggtgagggccctcgaccgctactcctccggcaaggatgtcgcctacagctgtggatactgcggcttcgcgttgaacttgagctcctccacgcggaacacggccaacattgggtccaagtacggcaagcacatcaggaaaggcgtcgtctccttcttcgcgatcgacgagagccgcttcacgcaggccgacgaggtgagctgcacgccgtacttccgctccagccgttcgtggggcttcttcaggaacaggacgcggctgctctgccggaagtgcggtggccacactggtcatgcctacgaagacgaggggccagcagatgacctggacatgagctccaggggaagcagcacgtcccctcggaagaagtatgttatcaagatcagtgcgctgcggccgtcatcagacgactctggtgctctcctctccccgtgatggcgatctggattctgagctgcaaccatgtgtaaattaagggatagtggttctcttcagttacttcgtgagcagaatttttttggtttattatacgttacaagttacatcatgttcagatttattttgtgtaataaggtgtggttgatgtaatatcttgtttatgattaggtcatggagataatagacatctagctttagcattgatgttcctgtttgctagtcagtttttttcttttcatttgattaatcacaactaattaaaaaa

SEQ ID NO: 138926 - DNA, 2442 bp, Zea Mays
ttggatcccgtgccgccgcctcgcctcgcccgttctcggtacgccagcgaccccgtcactgtagctgcgtgcctgcgcggccctgcgcttgcttcgccctcgcttcgctccaaacgatagagctggggcaggctgagcgaccgcgagcttgacccgggcgcacgtcggctcgcactgtcgcacccagccatgtcggcgcctggattcgatgacccccagcttccgccgctgcggctgcgcgcctcgtgcggcggcagcggcggcgtgatcgccagcccacgctcctgctcctcctctgataccttcgtcagcatgcgttccacgccctcagcctcaggtatgccgaatctgtgcggcgggctacggtctccacctcgcacgccgtcggaggcgtcttcgtcggagatggagttcgggacggcccgcgagtacgacaccactgatccgttcttcagtgactactggctgtacgacaaccacctgttccacagcaagctagagagcgacggcagcgaaggggaggacaagttcgttgttggtcctgacgtcagcttgcagcggagtgaggtgcgggagcttggcgacggatgcggtcgcgggcacgtacgtacagaccgcaatgcggactctgatgggtgcacagatgcgaatgcttgctcgtcgccaccttgcggttgctgctataatgaggagttggtggtgagagattcttgctccgctgtttatgggaggtgtcagatcatggaggaccacgcggaggggcttgatgagtgcgttgcagaagcgttccggttcagactgaatgcgtttgttgatgctggcgaccagtcagtggcttccaagaaaggacaggacgactggctggatcttactgttctggagaaggaacttcaaatgcttactccgcacttggctgatgcagatgctcttgagaatactggacttgaagatgacttgagagggaatatcaacctagatgtctgtatggtaacaaacgagaaaaatgctgatggcaaagaatttctaaaagatacttactgcatacattctttacctgagagtgcaatcccttttgatgtttatggtgtggaagacttcaaggtagaagatacatatgttcaaaaccctactactcacaaatttcaggaagatccaaaaactgatcctgcagtctctaagtttcagcaggagtatgaggtatttgacctgaaaattttccaccggaagagcaggacaggctttgaggaaaacaaagaattcgctattgtcatggattcagttgtagctggaagatatcgtatcactgagtatcttggttctgctgcattcagcaaggttgtccgggcacacgacctccacactggagttgatgtatgccttaaaataataaaaaatgacaaggatttctttgaccagagtttggatgagataaagctcctcaagtttgtcaataaatatgatccagatgatgatcatcatatactgcgtctctatgattatttttattatcaggaacatctcttcattgtcactgaattactacgtgcaaacctttatgagtttcagaaatataatcagcagtctggtgatgaggtgtacttttcactgcccagaatacaggctatagctcaacaatgtttggaggctttggtgtacttgcatcatctaaacatagttcactgtgatctgaaaccagagaatatccttctgaagagctacagcagatgtgaaatcaaagtcattgatcttggaagcagctgcttcttgtcagacaacttaaacttatatgttcagtcacgttcttatcgatctcctgaggtcatcctgggtttgccatatgatcagaaaattgacatttggtctcttggctgcatcttagctgaactgtacactggggaagtgctctttcctaatgaatcagtaccaatcattcttgctcgtatgattgggacaattggtccaattgatatggaaatgcttgcctcaggacaggagacccagaagtacttcacagatgactatgaccttttccacaaggacgaggaaacgggtcagttggagtatttgatcccagagaaatcctctttgcggcgccacttgcagtgtccggacaagaaatttgttgaatttctgtcttacctgctgcaaataaatcccagaaacagaccaacggctagcgaagcattgcaacaccgatggctttcgttcaaatatagtccaacggccaatcaaactcgttactgacaagtaggcttcactttctgaagctattggcccttgaaacaacatgtttcattgtaatactcaagttgtataccaagaataataaagagagctcctcattttgtgtgtcttatttgcatcataaaaagagcacctatgtaatggagagtgactaaataaaacaattattctaaaataaagaaaaagtgcatttgttgg

SEQ ID NO: 138927 - DNA, 2219 bp, Zea Mays
cgttccagtggaccattgggctcaagaacagcccgacgtgggatgggagtgtcctcaaacccatccgggatccggccatcccgcacgcctcgtcctcactcctcagtcctcacccccgacacaggtctcgctggtagcttgccctcgtctgcgccacgcctcctctagcccacctcctgctcctcccccactcgcacagtgctcaatgccgcacaaaccctagtgcccccactccctgtctcgcgtggcagccatgggaaactgttgccgctcgccggccgccgcggcgcgggaagacgtcaagtcgtcgcacttcccggcctccgccggcgggaagaagaagccccaccaggcgcggaacggcggcgggggcggcgccggggagaagaagcggctgtctgtgctcggggaggaggggtgcgacgttggcgccgggatcgaagagaagtacgcgctggaccgggagctcgggcgcggcgagttcggcgtgacgtacctgtgcatggaccgtggcacgcgggagctgctggcctgcaagtcgatctccaagcggaagctgcggacgcccgtcgacgtggaggacgtgcggcgggaggtggccatcatgcggcacctgcccaagagccccaccatcgtgtccctgcgggaggcgtgcgaggacgacggcgccgtgcacctcgtcatggagctctgcgagggaggggagctgttcgaccgcatcgtcgccaggggccattacacggaacgcgcggcggccgcggtcacgcgcaccatcctcgaggtcgtgcagctctgccatcgccacggcgtcatccaccgggacctcaagcccgagaacttcctcttcgccaacaagaaggagaactcgccgctcaaggccatcgacttcggcctctccatcttcttcaagcccggcgaaaagttttcggaaattgtgggaagcccatactacatggctcctgaagtcttgaagaggaactatggacctgaaatagacatatggagcgctggtgttatcttgtatattttgttatgtggtgttcctccattttgggctgagactgaacaaggagttgcacaagctattcttcggggaaatgtagattttaagcgagaaccctggcccaatgtttcagataatgctaaagatcttgttcggcagatgcttcaacctgatccaaagctcaggctaacagcaaagcaagttcttgagcatccctggcttcaaaatgctaagaaagctccaaacgttcctcttggagacattgtaaagtcaaggctgaaacagttttcaaggatgaacagattcaaaagaagagctctaagggttattgctgatcacttgtcggctgaagaggttcaggacataaaggagatgttcaaggtgatggatactgataatgatggtatagtttcttatgaagagttaaagagcgggatcgcaaattttggttctcatcttgcagaatcagaagtgcaaatgcttatcgaagctgtggatacaaatggtagaggagcactagattacggtgaatttttggctgtctcgctccatttacaaaggatggcaaatgacgagcaccttcggcgggccttcctatttttcgacaaggatggcaacggtttcatcgagcccgaggagcttcaggaagccctgatggaggacgggggagctgataccatggacgtggtcaatgacatattgcaagaagttgacacagacaaggatgggaaaattagctacgacgaatttgtagcgatgatgaaaactggcacggactggaggaaggcatcgcggcactattcaagagggcgcttcaatagccttagcataaagctgataaaagacgggtctgtaaagctgggtagcgggtgaggttgcagctctgcaaccgatgctcttctcttctcttctccacgcattgcccctcgggcccactaatgattatttgtggtccgggatttagatagtcggagcctccctgattggtttactcgtgtaattagcagccttttccagtgtcgctggggagcatctgctgaaggattgcacacctgcacgcctgctcatctcctccggtgtagtacctgacgctcaaaatgttgtaaaaatgttttggtgttgacctcaaatataatgcaatttgctcgctggtaccgtgtgctgtcaccctatactcatttgcacctacaaatcggtgaagagtaactatgacagt

SEQ ID NO: 138928 - DNA, 958 bp, Zea Mays
catgaaacaacttatttcactctcaaagcaactttgtcgaggtgttgtttttagtgcaactttgctgcagtagattccgctttttactctcgatgaaaggtttcctatatggctgatcgaattttgcttatccttgctgatcaatactactgcagtagattcctcttattgtttccattaaaatttcacccattaactttaccttttagcttttaatggtaatatatttgttggcattctcttgtgtccaaagagattcttcctcagtgccttcatcctgtgcagtacactatttttcaaatgtttacagtagaatgtatggctgcatgtagtgatagcttagttttgcatggtgttgaatcttttgtgatcatgcacgcatagaccaaaatatttgacttcaaagcttggaccaagctaatatgacctgtaaaaaagaaaggagggatgagtacagagtattatgtgatgaaattgtgcaaggacatagcggagcgtgctccaaagcttgacattgtggtcacaaacaagcttgctaggcttcacggcgacgactaatgtgcaatcaggccctatgtgcaagcgtgcaagtgagcattctggtcctttagatcatgaatcatgatctaactagccaagaagattagatgactatatgatgtagtaaagattgcaagtttggttaatttgtctgtaggaaactgccctgattgaagatttccttttcccccctatgatattttgttgtatggattgcaatgagctcagcatagagcagctacaattccgaatgatgctctgcgacgttagcttaggtaccgcagggagcagggtgcaatatcatagggatatagactttgccagcaatcagttttgccaaatggcgcagcaaagtccacaacttaagaccaaaagtccacaacctatagacacaggcaggaacattttaacattctag

SEQ ID NO: 138929 - DNA, 566 bp, Zea Mays
ccgtatataaccgccgcctcgccagcgtcacctcgaatccaaacctgcctccgccgcctcgccagcgtcacctcgaatccaaacctgcctccgccgcctcgcggttggccacctcgcttcctaccatgtcgttgcgctccgatccgaaaatgtcgtgatggttttgcgtttttgttgttctttgttggtgatctgatgatgggggcagcggtgtcttcgccattcctgacaaggaagatcgtgaagaagcgcgtcaaacagttcagcatcgacgtgctgcagtggacggcaagcggatatccgtcacatcggttctgatgtacgcgatgcgcgctctacacaagatcagaaggtcaaaggtactctgaccatcctctcagtttgtagtctcgaatcctgctcagagcttagctgcactccgttcaaccctaatccctcccaacctaggccttgtttgaatgcaatctacttgtttgagtggattaggttggattttagttagggtggaaattaaactaaattccaccccatccaaaagagggctcatgtggatagctcagccaaac

SEQ ID NO: 138930 - DNA, 1088 bp, Zea Mays
ggccgcgcccggtcgccagcctcggcgaaccacacgccaccgcccgcctagcttgaccacacacgagcgagcgagtagctaccgatcgacgacgctccttctgcttctccccgtcgtcgtcgtcgtcccatgcacctctgccacatattgtgagcgagcggcagcggtgtgtgccgaacaatggcagcgcaggaggccgcagcaggcggcgggagcccgcaggtggtgatgcggtggcggtacggggacgtgggcgacagcaacttcgcggtgcacgggcgcgcggtgccgctgctggtggggctgctgtgcgccgtcgtcttcttcgtcgcgctgtgcctgtacctccgctggaggtgccaccgccgccacgcgcccgacgacccggaggcggacgccagctccccgtcgtcggccgcagcgccgtcgctccccggcctcgacgccgacgccatccgagggctgcccgtgacgctgtaccgcccgcccgcgtcgccgcgcctccgaggggaggccggcgacgacgacccggcggcggcgctgtgctccatctgcatcagcgcgctgctggccggcgagaaggtgaaggtgctcccgccgtgcggccactgcttccacccggactgcgtcgacgcctggctccggtcccagcccagctgcccgctctgccggtgcctcctcgccgccgccgccgccaaggacgccgtctgagtgccaacgccaggcgcttcgatcgtcgcatgacaagcgggcccagctaccagcgtccctcgacacccgcgggcttttaaatcagcgcactagttaatgatagcggccgccaagaccgcgtcagatctactcgttgtgagtgcgtttgtaaagactaaagaagccttggtttattagggcctgatcaccaatggcgtggcgtggcgtgccgctgccctccgagtccgacgagttgtttggaggcaggcgtggggtcggtcacctgaccaaatcagccgggcggggggtttctctgtggcgcaaggctctccactcaccagtgcaagagaaaagtggtgtaagctgtacatagcttttgagtatttataaccagagag

SEQ ID NO: 138931 - DNA, 2753 bp, Zea Mays
tttttccgctaaagaaaagcaccggatccattttcctctcgggggagcggattgggtagttgcctgcttattgactagttcttggcgtggcggctaactattgtgaattttgttttagtctgtcctgttggcttcttccttccgcttctcctttctggccgccgaaggcaaaccacgcggcttgttcttattgaatccatcaaggacgcaggaaagataggatcttcggctccgattctcggagcaacagcgcgaccgcagcgggttttggtgcttcctttctttagggttgtgtccttgcagaagttgctctgtggaatggggacctgtgggaggagagttctgggggtatggtttttcttctggttcttgttgacacttgagcagtgcacatccctgaatcgtgaaggtgctgctctgctgagatttaaggcggcgatcgaggcagacccatatggtgctttgttggactggaatcaagagagtttgagcccctgtacttggtttggtgtggaatgctccgatgatggactagtcatgtctctgagcttagcaaatcttggtctaaagggcgttttgtctccagagcttggaaagcttatgcaaatgaaatctctaattttgcacaacaactcattctatggtaccatacctagagaaataggagacctgcaggatctaaaaatgttggatctgggatataataatttcagtggatcaattccatcagagctacaacacatattatcgctagaatttctgtgcagatttcttgaaggtaacagactttctgggcgttcaccagttggagtacaccaactcactaggatatgtgaacatgaaaatcaagtacctaccactaccacaaggattgttacaatcaaaatcagaagactgttaatgagcaaacaaaaagattttaaaatggtcaatattacggggcatccaataagatttccattgaattctccggcagcaccatctccttctgatcccattccaccccctcccgcaccaccatctccttctgaacccattccacccccttctgcaccaccaagccaagagaacaagagcaaaagttctgcaacactatatgcatcgattggagcagttattgttttttttatggtggcctcgtcagcactatgtttcttttactactgccgcaagaagactagcactgttgtacctttgtctgcaaacagttcaagcaggcaattgcagaccactaccatggaagggataactttattcagacgatctgagcttgaaacagcctgtgaaggtttcagcaacataattgacacactacctggatttacactgtttaaaggaactctcccatgtggagcagaaatagctgtggcgtctacatcggtggcttatgcaggaggttggtccgctatagatgaagcacattacatgaataaggttggagctttgtcaaaggtaaaccataagaatcttttgaaccttgtgggttattgtgaagacgaaaaaccattcattcggatgatggtgttcgagtatgcttcaaatggatcactatttgagcgcttgcatgttaaagaagcggagcatctgaattggcagtcacgcctacggatagctatgggagtactgtactgcctgcagtatatgcaccagcagaacactcctgtaaccctaaagaatctaaacagttcatacatatacttgactgaggacgatgccgcaaaggtttcagacatcagcttcagcgttgacaagagagaagatgatgagtatgatgctcctgatgagtatagcacagtgtataagtttgctttgctactgcttgagaccatctccggaaggcgtccatattctgaagacgatggcctccttgttctatgggcacgcagatatctcacctgcgctagcccggtgatgggtatgattgatccaacgctaaattcagtccccgaggagcatgccagagcattatcagagctgattcggttgtgcctaagtgaggaccgaaggcagaggccgacaatggcagaggtcaccaagaggatgcaagagatcactgggatcactcaagatcaggcgattccgaggaacagcgcactttggtgggcagaacttgaaatcatgacatcatgaagcctgtcgactgtgcaactgacttgccccgactctacagctcagtccatcttctatgagaaccgtaggaaattgtacagtttacccttttttaatacaaagatacacagctcttctgtgtcgagaaaaaaaaatgtgtacagtttagtatttttaagcggggcataagttgtacagcagtacaggtatacccagggtcacaattcttccgttctttttttaaccaaatatttattttgttatttgttccggggtcaattctttcattctttttgtagccaaatatttatttcattatttgttctatggaaagcaaaacaatctgagaaagcctgcaaagtatttaggcagggcataagttgtacaggtatgcccgggcacacaattcttttgttttttaaccaagtatttacttcattatttgttcttggaaagcaaagaaatccaagaaagcctgtgaagtacaaggatatgccatttgtgctgtgaacagaaaacaactggaacctactgtagctattaactgaaacagtcgcagccacagcaagctcaaacgaccagcattgctggatccattttattgaaatggcaatcgctggtttgtcttttttttttcttatata

SEQ ID NO: 138932 - DNA, 996 bp, Zea Mays
atgggcgtgctcgctgccgcggaggtcgagccagcactcgagcgactgtccagagttgacgcgcgcggcgggaacagatccggtaccgagggcgcccacgccgatgaggtgctggttcttgaccgtgaaggtgaccaccacggcggggcaggtgcagtgcaagcagaacgattggttctaggccagcgactgtccagagttgacgcgcgcggcgggaacagatccggtaccgagggcgcccacgccgatgaggtgctggttcttgaccgtgaaggtgaccaccacggcggggcaggtgcagtgcaagcagaacgattggttctaggccaggtgctgaaggcgagcacggaggaagatggggctcatgttcgggaagctcttcagccggctcttcaccaagaaggagatgcgaatcctcatggtcggtctcaacgccaccggacgccgatcatggatgccatctcttggaatctcatgatctcagggtatgcaactgctatggtctctgctaatgcaaagattggggatctagattcagctagagtgttgtttgatcagatgcctgataataactttgttttgtggaatgcaatgattagagggtacaaccacaactcgaggtataatgaggcattgtgcacatttcagcagatgatgcttgagggaagattcatgcctgatgaagcaacattagtaagtgttgtctcagcctgcactcagctaggcagtgttgaatactgcaactggatcagttcttacattagtaaaagcaacactcatataactgttgcattaggaaatgcactcgtagtttgcaaaatgtggagatgtaggaagaccgcggaggttccactgtccctattctcttgcatttttacaggtgccttgtgctccgagcatgtcagcagcatgtacattgctatggacaaactcacgaatatatcacacaacattgtacatgctacggttccaatagtggatgtcgaagtcaaatag

SEQ ID NO: 138933 - DNA, 737 bp, Zea Mays
cgcgatctactccatcacgccgccactccacgcgctcccgcgagcacgccatgaggcgtcggacactcgatgttttcactcctcccttctccctcgcaatggaaccgagagccgaaagcatcgatcgtctcatagcgtgcttgctgccgtggaggttgagccagcactcgagcggttgtctggaggcgagtaggcgacgcacacaacggtaacagatccagcccaggtcaaggtgctgaaggcgagcacggaggaagatggggctcatgttcgggaagctcttcagccggctcttcaccaagaaggagatgcgaatcctcatggtcggtctcaacgccaccggtaaaaccaccatcctctaggggagatcatcacaaccatccccaccatcggaggaaggacacaggtggacggcgtcaaccgtgggttccgacgaacctacaagctcggcctgccataaaaccggagataagatccgcgagaggaagctgatcctggcgatatagggttcagatgatgcttgagggaagattcatgcctgatgaagcaacattagtgccttgtgctccgagcatgtcagcaggtagaggtccaggattagtggaaaaccttgttaatattttctacaagcatctgtgtggagctaatttagatagtcaggtatcattctatttttgattcatcgagtgacctacaatcttacacaaatatatggtaaaaataaaacttgttttgac

SEQ ID NO: 138934 - DNA, 104 bp, Zea Mays
tatgaaccaacatctaaactgtaaacacgacattatcatagttgagtacagggataattatctcttatgtcttactgtaaaatctgaaacaattgtcttgcaac

SEQ ID NO: 138935 - DNA, 979 bp, Zea Mays
atgcggctgcttcggtgggcggatgaggaggtcactgatccaaaggctcacctagaggatcgttcaaaggctaagtgtctatcacagtggtatgaatatcaggaaaatgcttttgctcctgttttcgccaaaatagatttcattgtaaagctgttttcgcccatgtgcagttcaaaagggagagggttggatggtcccaaattactctctactgcttgtgctattagcaactcctgcattctgaatgcagctaatcatattagaaaaggggaaggtgtaggtgacttcattttcttgtgatctattctactataagtagtgtgtaattgcagttatagcctaaacatattggagagattcagtttaactgtgaggggacaagatcatcccatgcccatcggtgttaaaattggagaggtttagtttagttgtttggtagatggggagactactaaatgagaaacctgaatgacaaataagcctcagatgaatattgagttcgaatttgttctccaaatgaatttctatttttgtcagtttgtgtaggcctgaattagtcaagccacactttcttcttgtgtagtacaatccttaattggctgcttttagttctagcttcgtgagtcaaacgattttatacttgtttcctttctatgcttccgttcttattttgtgctaagctgaacaatgcttggttgcagtgagcataaatggatctttctagattacccgaggcagcaggcgactggtgactattgaaaccatcgactggcgccaccaaattggaagaaatacacttgaagaaccgtcctgtcagtctccttgtcgcggagcatttaccttttcttgcaggtaacttgggatcgacttactgacatgagcaacaatctgatgacactacaagacaccgctatgcaatggtcgccaccctctttgggatgatgcagaggtcaaagcaacaaatagctatattttaaaa

SEQ ID NO: 138936 - DNA, 1104 bp, Zea Mays
ctcacgccgccggtgatcgctggtgaccacgggggcattacagcacacgccgccggtgatcgccggtgaccacgggggcattacagcaccgccgagctcctccccggcgccacgttcagacgtccgtcgagcggccggtgccgccgcgccgaggtgcgcccctgctccctgtttaggccgaacgcccaagctccgccacgcccccgcctccgccccgctcttgttcgtgcgttctgcccaaccatgaccgagatctgccatcggggaggacatcggcttcgtcaaccgccatcgatggagggcatcctcgcctaccgagccagaagagacgaactcgatcccgctacacaagaactgtcggccccatcacacggcacgcggcccagtccaccagaacggagccaatgcgtctggacctggtggtcgatcccgctacacaatatgtaaagggaggcataaatgttgcgcttggaaacatgagtgaagatgattggaagtggcatatgtatggcactattaagtgaagcgattggctcggttaccaggattttatttagtatatgtgcagagaagcaccaaaaactgttatagagcttgagaactatggattatcaaaaactgttatgaggagagaaaagatgcaagagaatgtagaggccggacgacaatgcggctgcttcggtggtgtcatgggaaagagataaacggccttatccattcgcagtgcattgcaagaagtttccagaaatcgacggttgttcgttaaaatgcgatcgtgcgatggagaataaaaaggacgatgtggcgcactgaggaagcagggcggatgaggaggtcactgatccaaaggctcacctagaggatcgttcaaaggctaagtgtctatcacagtggtatgaatatcaggaaaatgcttttgctcctgttttcgccaaaatagatttcattgtaaagctgttttcgcccatgtgcagttcaaaagggagagggttggatggtcccaaattactctctactgcttgtgctattagcaactcctgcattctgaatgcagctaatcatattagaaaaggggaaggtgtaggtgacttcattttcttgtga

SEQ ID NO: 138937 - DNA, 108 bp, Zea Mays
gacattatttttgcacaaagcaagatgattttcattcatgcccatcagtcttcattacgacatgtattgagtaaatttagcatgccaaggacaaacatatcctcttaa

SEQ ID NO: 138938 - DNA, 106 bp, Zea Mays
ccgaacgttaagatcattcattaccgttattaagccatttcctacattaataattcaatcactgttaataaataagattaatctgtatcatctattcttaacaaag

SEQ ID NO: 138939 - DNA, 1525 bp, Zea Mays
ggccagagcatgccaaacaccctaactccagagttgtaaactctatggagtttttggagctgcagtacaattttttggagtacctcttttgctgctctgaaaactccaaaaaagcaacctagtcatggagttttgagttatttacccgccattgccactggttatgagaaacaatctaaactctggagcagagctgctccacccagagtttgagtagagctgctctggggtggagcagagccatgccaaacacacccttacttacgcggcgagacacgtacgggtacaaataaaaccccgtgcgacgtgcccgtgcccagtgacagcctccgcgcgccgcgtcgtcgtcactgtgcagagctgctgcaggttcgaaagcgatggccgcgctctacgccctcgtcgcggtctcgctgctgcccgttctcgtcacggcggagtgcgactgctcggacgacgacgccacgggccgcgacaaggcgggagcgctgcggctaaagatcatcgccatcttcttcatcctggcggggggcgcggccggcgcggcggtgccggcgctggggcgcaggctccccgcgctgcgcccgggcgcgggcccgttcctcgccgtcagggccttcgcgggcggcgtcatcctcgccacggggctggttcacatcctgcccgcggccttcgacgcgctgggctcgccgtgcctcgcggcggccggcgggccgtgggccaggttcccattcgccggaacggtcgccatgctcgccgcggtcgccacgctcgtggtggacacggtcgccacggggtacctgcgccggaaggccgcggcggtcggcgacgagccaccgcagctcggcggggacgaccccgaggaggcctccggcggcgggcgccacggccacgcgcacggtgtcgacgacgacgacgacgacctcgtacgccaccgcgtcgtctctcaggtgctggagctgggcgtggtggtgcactcgctgatcatcggcatgtccctgggcgcctcggatttccccagcacggtgcgcccgctcgtcccggcgttgacgttccaccagctcttcgagggcatcggcctcggcgggtgcatcgtccaggccaaatttcgcctcaggtcaatggtggcgatggcagtcttcttctccctgacgaccccgatcggcgtggccatcggcatcgggatatcgtcggcgtacgacgagacgagccagacggcgctggtcgtgcagggcctgttcgaggccgcggccgcggggatcctggtgtacatggcgctcgtcgacatcctccgcgaggacttcatgagcgcccgggtgcagggcagcgcgcccctgcaggccgcgctgagcgcctcgctgctgctgggagctggcttgatgtccatgctcgccatctgggcatgagtgaccagaacgtgagctgaagcgcagtgagtgaattgtagtagtttcgttaggttcgtgttacagtgggtcagccgcttgcccgctttcgagtgtacagaagaggaggggtttgtttt

SEQ ID NO: 138940 - DNA, 256 bp, Zea Mays
atggtcaataaatttcagttcaagaaaactagagtctttgagtggtcttgacggcttatacaagaaagctcattttactgtactatataaagtctggaaatccgtgtagcccttaactatttgctacattagacatggcgggtttaaaatccatcatgttatactatcaacctatcactatagcattctcaatagaaccagttcaatatatgtttggttgtgtgcttgtaagggttgtactctaaatacttctcat

SEQ ID NO: 138941 - DNA, 111 bp, Zea Mays
aaaaatatgaaaacaaatatgatttcagtgatatcccttcgtattcgatccgattacatccctagctgggggtgtcgtgcagtctctagcctgccttcggtggggtggggg

SEQ ID NO: 138942 - DNA, 1063 bp, Zea Mays
ccccaccctccacgcgcctccgcctatcgccatcacgcctccgtcccgcccccttcacttcactcgatcgactcgtatagcaggccagcagcagcaggtagtagcgttcagttcacctccctttctccactcccccctgcccgtcgctctcccccgcatcccatcgcgacccaacccggcgcccgccccggatacggtgcgcgtctccactgatccgcacgatcgcgcgctcgcccgcgccccggccccggcggccggccgggtgagcagtagctggagctgcgtctgcgtgcatggatccctcggggccagccgggccgtcctcggcggcggggagcggcgacgacgcgctcgcgccgccgcagcatcaggtccagccgctggctcaggcgcagccgcagccgcagcaggccgctccgcctccgcagctcagcaggtacgaatcgcagaagcggcgggactggaacacgttcctgcagtacctgcggaaccaccggccgccgctcacgctggcgcggtgcagcggcgcgcacgtcatcgagttcctcaagtacctggaccagttcggcaagaccaaggtgcacgccgccgggtgcgcctacttcggccagcctaacccgccggcgccctgcccgtgcccgctgcgccaggcctgggggtccctcgacgcgctcatcggccgcctgcgcgccgcgtacgaggagagcggccacgcgccggagtccaaccccttcgcggcgcgcgccgtgcggatctacctccgcgacgtccgcgacgcgcacgccaaggcgcggggcataccctacgagaagaagagccgcaagcgcaagcagccgccggcggcggccacaggagaagcgtcgtcgtcttcgtcctcggccgcggcagcgcgggaggccgctgccgccgcgagcgccggggacgggtccagcagtggcagcgtggcggcgaaagctgcaccgaccaccggcggcggccagggaagcgccactactacagccgctcctgcaccgaccagcacgtcccgagtacagtagaaccaacttttgaaaatcatgtctat

SEQ ID NO: 138943 - DNA, 2952 bp, Zea Mays
atgacactaatcactaaaaaccagtaccaggtggatcgtggatctagatcaggcgacgggaacgggtacgcagcaggcggggcaccggacgagcccgttctcgttgcactcggcacaggcgcggaacccgccgccgcccttgaggctgtaccgcttgtggctgccgtcgcaggcgccgcaaagcaggtagcgctcgccgccgcagcgggcgcagctgccggagaacgcgggcccgggagcgggggcgacgatgcggcggagctccccggactcgtggaggcgccggacctcgtcggcgccgccgaggtggcggccgccgacgaagacctggggcagcgccacgcgggggaggagcgcggcgagctcgggcaggtggccggggtccatggagaggtcgcgctcgtcgacggccgcgcggagcccgcgcaggatggcgcgcaccgcgcggcagtcctcgtaggtgccgcggacgacgcggagggacgtgaagtacagcaccacccgcccgccgcccggcaccggctccttgtccttgccaacgggcgccgccggaggccgggacgggggctggtggagcgtgcggagggcccggagcgcggaggcggcgacgcggatgcggtgcaagacgcgcggcgacggggaggcggagggcggggctgtggcggcggagtccggcgccagcagcgaccggaggtccttgagagacgggttggggatggagaggcgcgaggacgcgccggcgcctgcggcggggacgagggctgtggaggcacgcagcgcagattcccatcagagacgtcgatccgcagcatgggtcgagttgagctcgacttccagtcgacatgcacatcgagggcgcggtcagatcaccatggtcgtggctgctacatcagcggtgtagagtgtgaggcttgtctgaggtggtctgaaggcttattggatctgctagctcgtggtgaagagtccatagttgataaggaaaccaagcgagttgccgatccagacatccatgatgagttacctcatgttaatagcactcagtttgctttagagcttcacgtgaatgctgcttctatggtgcctcttgaaaatgagatggtagagaacaaagatgcagagaaatttcgtgagaaaatgcctttcgataacatcgtatgggatgaggaactagcatcagatggcaacacacatgatggcttattgcagcagctagctgaggtggaggaccagacccagtacaagaaggtctgcacagtgttgtctgagagcgaggcacaggtgtatgatgaaatacttggcaaggttgtatgggacgaggaaatgtcatccgagcttgacatggacaatgacttattgggactgctggtttctggcggggagtacccagttgatgagcaggttgtggatgactcctcggatttcaaagagtttggattggtcgatgcagaccatgtttttgtggaagggctcgatgaagatagcaaagcagtttgcaaggcaagcatgagtgatgagctaactcttgagataaacactccttttctctttggggttgctatagatcacgtgaatgagatgcctgtcaacatcaatttgcaagatggcctatcacaggagcgagcaagtggtagagagtatgtgtatgatgataagatggaccctattgttgagcctgactttgatctcagttttgctgtcagtattcaagaggagtgggatattcaatcacttgtgagggtgccagaacaagatcttattctgaaaatttgtgagcagtaccatggaggacaacccattgttttgacctgtcaatatatgattcaaactgatcaccattttggtggtacaagaaaaggagacaatgagcagagaggagtatgctttgcaaggactcatgttgcatggggacaagctgtgttgcaaccatgggcaagaaatgctttcagtcctggacaagttgagcagctacatcaaattgattctgctgcacataaggtcgctctggagctgggtatcaatttaccatctgatccatcagttcggatgcaatgggatccgggcatcagtacggccacagcttggggacaagctgtgtttcgaggggccggtaaatgtcatgacccaagtgtggcccagaagaagcccagcctacctgcccatttgccaaggccgaagcccactctatccaacccaattgctgaagccaaagaccacgaggacaaagaggagctgaggcatcgatgcagaggacaggaaattattcagaaagaagaaagaccgaggaacacaggaagctcgtcttcctcctctggctgtgagatcctatccccctctcgatttcccctgcaattactcacgctcccggattgatctcgccggtgtagccacgggtattacaaggcggcggcggtgtcagagctgtgcgccttcacccaggacgcccacatgaggattgacgcggcgcggttgtgcgggctcaggcgggaggcgcgtcgcggacgggaacggcactgctactactactttgcttcgctcgccttcagctttgtgtcttctcgcgcggcgaggactggggagtgggttttatgagatgggagtatgggacgagctttcgtccaaccaagccccagcgggccagcccactgaaacagttgttatccattggactcatttattcgcggtcgcttccccagtccccaccgccgcttcgctgcggcctccccagtccccggcagccggcgctccacactccgtcgtccgtcctcgccgcttcatctcttctgaccggaggctccaacaaggtggtgggtcctcccaatcaagggcccgaacaagtacagacatacgcgtcaaccggtggctatgcctatacgtacgtactcaagaaaattcagagaacggtagcgggacaagttgaaagcggacgcagtggaacatgcaaagcgggtgaag

SEQ ID NO: 138944 - DNA, 2133 bp, Zea Mays
tgcgtccggtggtggcggatgaggagggggaggaggaattgtagcagagcgctcgatgccgacgtcgccggccgcggcggcggcggtgccggccacggggccgaggccaccggtcacgtcgatggagcggaccgtgcgcgcgctggaccgccagatctcgcagttcgtggccatggaccggctgatttgggcggactccgccgacgcggacgcgttcctggaggcggtcgacgatctcatcggcaccgtgcaggagctggacgccgcggggaccaaccgcgccctgctcgaccgcgccgacgagttgctcagccggtgcatggcgcggctggaggacgagttcagggcgctcatagagcgccccgacgacgccgcccccgcggtgccgggcgggttcgggtcggacgggagcgacgacgacgacgatgacttcggggccggggacggctacggcgacgagccgatccccatcgccaagccggtgacggactatgacgtcgtgatcgatgctctctcgccggggtccatcgccaacgtccaccagattgccaggaggatggtggacgccggctttggccgcgagtgcgctgaggcctacgccgcggcgcggcgcggctttgtcgacgaaagcgttgcgcgcctcggcgtccgctcccgcaccgccgaggaggttcacgcctcaccctgggaggtgcttgagttcgacatcgcccgctggatcccggccttcaacatgatgtttcgcatcctgatccccagtgagcgccgcctatgtgaccgcgttttcgacggcctcgcccccttcggcgatctcgccttcatcgccgccgtgcgtacccaggctctgcagctcatatcgttcggtgacgctatctcttcctcaagccgctcgccggagcgcctcttccgcgtcgttgacatgtacgaggctgtgcgtgacattctccctgaccttgatcctgtgttctctgacccatactctgctgcactccatgcggaggtctccgccatgtgcaacacactggggtcctctatcaaaggtatatttatggagttggaaaatctcatccgccgtgaccctgcccgagttgctgcccaaggtggtgccatacatcctatcactcggtatgttatgaactatctccgtgctgcgtgtgggtcgcggcagacattggaagaggtgatggaaggtgactttggtgttaatagagctgcgcctgtggctgttgaccctgaccgccccacatcatcccttgccgtgcacatcgcatggatcatggatgttcttcaaaagaatttggatacaaagtctaggatataccgtgatccatctcttgcttgtatcttcttgatgaataatggcaagtacatcatacagaaggtgaatgacagtgagttgggtgtttttctcggtaatgagtggatcaagcagatgacaactaaagttcgccggtggagcatggattatcagcggacaacatggggcaaggttacaactgtgctgcagactggtagtccaggcattggtggactcccagcaaaggcaatgctgcagaaaatgcgaatgtttaatacgtactttgaggagatctacgcagcgcagtcagaatgggtgatagcagatgaccagctaagggtggacattagggcagcagtggaggagacagtgatgccagtttacgcctctttaattgccaagttgaagtcttctcctgaaactgggcgggatttgtacatcaaatacactccagaggatgttgtagcccatatccagcacttgtttgaaggaccagcaaagtgataaaggatatgtagccttgtagcctgctatactgcagcttctgctcttctgaacttgtgaagatgctgtcatggattctcctattcgtggttaatttcttgtactcacgtaaggtgatgctgttgtctcaaattacaactgtgcattgctgtttttgtcatccatgaggaagttatgcagttcggcaaatgttgtatatgtgtgtaggtgtatctgtatcaatgagtagcatgattattttgtaacagtattaggattccatctctgtttcaagcactactttaatctaacccccattatgttatgtgtggagatcaatatttattttaagt

SEQ ID NO: 138945 - DNA, 2290 bp, Zea Mays
ggagccctcatccagatcggagccagcgcgccgtgtgatgccgttccggccgtgggagtagctgtcttgcccccggcccaggagccatggcggaggatggcgaggagaagctgctcgcgacggtgcagcgcatcgtgcagacgctggggagcagcgacaccatgacagaggacatcctcaaggtgttctccaactacgacggccgcctctcgctcgacaagctctacgccgcggcggcggcggtgccggccacggggccgaggccaccggtcacgtcgatggagcggaccgtgcgcgcgctggaccgccagatctcgcagttcgtggccatggaccggctgatttgggcggactccgccgacgcggacgcgttcctggaggcggtcgacgatctcatcggcaccgtgcaggagctggacgccgcggggaccaaccgcgccctgctcgaccgcgccgacgagttgctcagccggtgcatggcgcggctggaggacgagttcagggcgctcatagagcgccccgacgacgccgcccccgcggtgccgggcgggttcgggtcggacgggagcgacgacgacgacgatgacttcggggccggggacggctacggcgacgagccgatccccatcgccaagccggtgacggactatgacgtcgtgatcgatgctctctcgccggggtccatcgccaacgtccaccagattgccaggaggatggtggacgccggctttggccgcgagtgcgctgaggcctacgccgcggcgcggcgcggctttgtcgacgaaagcgttgcgcgcctcggcgtccgctcccgcaccgccgaggaggttcacgcctcaccctgggaggtgcttgagttcgacatcgcccgctggatcccggccttcaacatgatgtttcgcatcctgatccccagtgagcgccgcctatgtgaccgcgttttcgacggcctcgcccccttcggcgatctcgccttcatcgccgccgtgcgtacccaggctctgcagctcatatcgttcggtgacgctatctcttcctcaagccgctcgccggagcgcctcttccgcgtcgttgacatgtacgaggctgtgcgtgacattctccctgaccttgatcctgtgttctctgacccatactctgctgcactccatgcggaggtctccgccatgtgcaacacactggggtcctctatcaaaggtatatttatggagttggaaaatctcatccgccgtgaccctgcccgagttgctgcccaaggtggtgccatacatcctatcactcggtatgttatgaactatctccgtgctgcgtgtgggtcgcggcagacattggaagaggtgatggaaggtgactttggtgttaatagagctgcgcctgtggctgttgaccctgaccgccccacatcatcccttgccgtgcacatcgcatggatcatggatgttcttcaaaagaatttggatacaaagtctaggatataccgtgatccatctcttgcttgtatcttcttgatgaataatggcaagtacatcatacagaaggtgaatgacagtgagttgggtgtttttctcggtaatgagtggatcaagcagatgacaactaaagttcgccggtggagcatggattatcagcggacaacatggggcaaggttacaactgtgctgcagactggtagtccaggcattggtggactcccagcaaaggcaatgctgcagaaaatgcgaatgtttaatacgtactttgaggagatctacgcagcgcagtcagaatgggtgatagcagatgaccagctaagggtggacattagggcagcagtggaggagacagtgatgccagtttacgcctctttaattgccaagttgaagtcttctcctgaaactgggcgggatttgtacatcaaatacactccagaggatgttgtagcccatatccagcacttgtttgaaggaccagcaaagtgataaaggatatgtagccttgtagcctgctatactgcagcttctgctcttctgaacttgtgaagatgctgtcatggattctcctattcgtggttaatttcttgtactcacgtaaggtgatgctgttgtctcaaattacaactgtgcattgctgtttttgtcatccatgaggaagttatgcagttcggcaaatgttgtatatgtgtgtaggtgtatctgtatcaatgagtagcatgattattttgtaacagtattaggattccatctctgtttcaagcactactttaatctaacccccattatgttatgtgtggagatcaatatttattttaagt

SEQ ID NO: 138946 - DNA, 309 bp, Zea Mays
accagatcttgccgtccgccgcctcaaaccccagatccgggtgcgccaaggaatgaaagcagcccttgggccgcgctgttgccgggggccgcgttgggctcgtcgaggaagaggtcctcgggcacgcggaacgcgccgtgcgccgcgacgagggccccgccgacgagcagcccggagatgatgagcgacgcgacggaggtgaagaacagcaggacgaaggacgcgccgacgagccccagcagcgtctcgcggtcggagaaggctcggccgaagagggcgacaggctggtcggacgcgcggaagaggtag

SEQ ID NO: 138947 - DNA, 2056 bp, Zea Mays
atcctggacgcccgtccggctctgctccattcccttcgtctccctccagcagcctccggccatcgccctctgcgatgacctccacgacgccggggaccttcggaacgctggctaactccggaccggtcgcgctctcgttcccgacgaccacctccttcgcaagcttcctaggcggcggttcgagtcctagccgaataatggacagcgggggaggagtcgggctgtccaagttcaaggccatgaccccgccttccctcccgctgtcgtcgtcgtgcccgccgccgccgcagtcgtacctccacgcgttctccggcctcctcgactcgcccatcctcttgactcccagcctattcccgtcgccgacgacgggcgcgatcccgtcggagcccttcaactggatggggacggcggagaacgacctaagcggcagcggcgtagaggctgagcagcgccagcagtacaccgactttgcgttccagacggcggcggcggcgacgtccacgattattaccggtgcggcgcacacggcgtccttcccgcagtcgtctgtgctgatgcccccatcgcgttgcactgttacagggacgagtaggagactcgtacagcggcgagatgctgcagcagcagccgtggacctaccaggaaccgacggcgcaattcgaggcgccggcggcgcaggctggcaacatgttcggcaccggcggcggctacggcgcggctcccggcttccgcgagcagaggcagagccaccgcccgtcgtcggacgacgggtacaactggcgcaagtacgggcagaagcagatgaaggggagcgagaacccgcgcagctactacaagtgcagcttcccgggctgccccaccaagaagaaggtggagcagtcgccggacggccaggtcacggagatcgtgtacaagggcacgcacaaccacccgaagccgcagagtacgcgccggggcgccagctcggcgccggcgtcgtacgtggtgcagagcgccagcgacgcggtgatgcccgagcattcctggggcgcgctgtccggaacacccgtggtgacgccggagaactcgtccgggtccttcggcggcgacggcgacgaggtcaacggcatgagctcgcggctgggcggtagcttcggcgccgacgatctcgacgacgatgaacccgactccaagagatggaggaaagacggtggcgacgccgacgcagcagggtgctcggtgtcggtggccagcaacaaccggacggtgcgggagccgagggttgtcgtgcagacgatgagcgacatcgacgtcctggacgacggctaccggtggcgcaagtacgggcagaaggtcgtcaagggcaacccgaacccgaggagctactacaagtgcacgggggcagggtgtctggtgaggaagcacgtggagcgcgcgtgccacgacacgtgcgcggtggtcaccacgtacgagggcaagcacaaccacgacgtgcccccggcgcgcggcagcgcctcgctctaccgcgccgcgctggcggcgcagatgccgccacagcaggccgcgagctaccagggcgcgccgatgccggccgcggagagaggcagcttcgccttgtccgggttcggcgacccggtgggcacggcgtactcttattacacgaaccaccaccaggagcaggagcagcagcagcagcagccgaaccaggcgatgcgctacgccaaggacgagccacaagactgcatgtcgtttttcgagcagcaactcctgttctgaccagatgaaacgctgccacatcgattgtggcaagacatgctcgcacttgtgaattgtgattcttttttttttactcgacacactatgtacactatctgtagtgatttgtttggaggctccaactttgcaggcatctgcagagtgggattgccttctgtaagatgtaggacacatcatttccgtagcctcctagggagcaaaggtcagggcaaatgatttttcagcagtttgactgctttttttttgtcaaaaaggaaatcgttgtaagtgcgcagatcttaaaagaaaaggtattcagttc

SEQ ID NO: 138948 - DNA, 1945 bp, Zea Mays
aggcgtcgccatggccctcctccaacatcaaccagcgactcacacacccgcgcgccgcttctgtagggccccaaccaaccgcgcagggagaaaaccaccacagcacatgcagcgcctcgcctcctcccggaggctcctccaggccgcgctcgcccccgcccgggccaactccagcctctccgcggccgccgtcgccgcgcccgcgccagcgaatggcgccttcccgaagatgccggccttcgactacacgccgccgccgtacgacgggccgcgcgccgaggagatcttccggaagcgcgctcagttcctcagcccatccctttttcatttctacgatcgcccattgaacatagtcgaaggaaagatgcagtacctatttgatgaggatggccgtcgttacctggatgctttcggtggcattgcaacagtttgttgtgggcactgccatccagatgttgttgaagccatagtaaaccaggcaaagcggatccagcactccacagttctatatctcaatcatgcaattgcagattttgccgaggcattggcttccaaaatgcctggtgatctgaaggttgttttcttcacaaattcaggcacggaggcaaatgagcttgcactgatgattgcacggctttacactggttgcaatgacattatctctcttaggaatggataccatgggaatgctgctggaacaatgggtgctactgctcaatccaattggaaattcaatgttgttcagacgggagtacaccatgcgcttaatccagaccccttcagaggtgcttttggttctgacggggagaaatacgccagagatgttcaggaaatcatcgaatttggaactacagggagagttggtgggttcatttcggaagccatacagggggttggtggaatagtggaactggcaccaggatacttgcccgtggcatacagtatggtaaggaaagccggtgggctctgcatcgccgacgaagttcaggcaggagtcgcgagaactggaagccacttctggggattcgaagggcatggtgtcatcccggacatagtcaccatggccaagggtatcgggaatggcatacccataggagctgtagtaacgacgccagagatcgctcaggtgttgacccgcagaagctacttcaatacctttggtggtaaccctgtcagcactgcaggcgggcatgcggtgctcaaagtgctggagaaggagaagctccaggagaatgcgtttgttgtgggctcctacctaaaggaacagcttaacaatctgaaagacaagcatgagatcatcggtgacgttaggggcaaaggcttccttcttggagttgagctggtgacagaccatgaaaagaaaaccccagccaaagctgagatctcacgtgtcatgaaccatatgaaagatatgggagtgttggttggtaagggtggtttctacgggaacgtttttaggataacaccaccgttgtgcttcaccaaagaggattccgacttcttcattgaggtgatggacattgcgctctcgaagctgtgaggcaagcagggcgaagatgatgtgcaaaccctggtccgtcgccatgggatttttgcccatgaataatattaagattaatgagacagcacctcgttgtctcttaatctaagacgatgccatgtcatccggtggcatggtattcctaatcctacctgccaaatcactggtattgctcgctgtctcgtaatcagacccatggagcaatatgattcttgtaaactctagcttcatccaatctgttcctcctgatctaactagtctgaatagcagctgttcgtttgtgaccaatatcaacttcttttcagatgctccatatattcctgctctctgtaaacaaaccattatcactgttcaatagatgcggagatgtggatataaaaattacatatacgggtactctttggt

SEQ ID NO: 138949 - DNA, 112 bp, Zea Mays
gattggctaggttggccttttattctattttatatacgtataattgtacacgctgaacaattctgggcacaaatgttgttgtttttttacagcacgcacaaatattggttac

SEQ ID NO: 138950 - DNA, 531 bp, Zea Mays
atgatgtttcaccacaaatttatgacatcacgacagggcacagttctttctggagtttgttcccagcttcaaatcctacgcatctcaccacccgcttgctcgcgatctgaatcagtccacaagtgtgcccaaaatgtcatcctctctgaagaggaggtactctttatcagccgcaagcttgacttcagatccaccatactcgggcagaagaacagtgtcgccttccttcagagcaactgggatcagattgcctgccttgtcgcgctcaccagggccaacagccaccactttagcagcattcagctgcttggatgtttccgggaggaggatgccgccggcggtcttcttgggctgcaccagcttctccaccagcacccggttcagcgacgggagcagcctcttggccatcgccgccctcctctcgtttcccttcttcttgcgcagcaagacaaagaagaaaaaagctcgacgcttccacagttccactcgcggctcgcctcgtggagttgcaactgggctcctggtggcaga

SEQ ID NO: 138951 - DNA, 944 bp, Zea Mays
tgttgaacacgaagcaggcaatggtttccgtcatcaaaccgtcacgataatgatgtcactgatcatctggagcaatgacttctctacaattctctagtaaagttaaacatgcagcaactccgaaattgaccaaagtaacaaatccgcaaattgacacgtgaaaaaagacagcaaatttacatcaaaccaaacgacagtggctaccagctaaatatatgctcatccctatcttaaacagcagaggcctatttgtttctaccgatcataggctggccaccaccctttggactcggcatgctggtagacctgctgatcttgcttccggcgccaaaactcttcacgtcgatcaggtctccaaacaagttgtccggcatgtaatatggtctggctgctgccactggagattcttttggccgctgattccctttcacccgagcatttgtagccacgttcgaaccagtgtatgtttgaggaatagagaagttgtaactttgcaccggtgttggtgctggagatggaacatgttgcgctgatggagcagcatacggtgttgacatagttggataggcagctgaaggggcaacagaagcagcaggagtgtttggcgtttggtatgtcacaggctggaaaggattagctgaattggcacttgcaggcatagcccatgggggtgctggattgctcgacacatattgttggggttgagtcgaatatgccccaggctgtgcaaccggtcccgtttgggcccatggtgccacatagttattgtatggaacatatccctgatttgttggataaacctgggtgttggcagggtaatttgccccgttcgccacagcaggctgatagcttggcagtgtttctggtccatttgatgtgacactcggctgactcccattttggttctgagttgaagagtctgcagatgattcaggactgtacaa

SEQ ID NO: 138952 - DNA, 2309 bp, Zea Mays
cggctggctacaagccgacactgttgcagctgtttggactgctgcagctgcaatccatagagagaaaaatactgtagaagccgcagccgcagccggattgcagccgcagcaagccacagcgaacaagctggatatttcaacggtaccgcacttacgttatctctgatcttctatcttatcccatatttcaaaatctactttacaatataaaacaatattttctacggtcgtatacacaattccaacagtaccgggcgtacgccgtccgatacgtttcgtcctcctatgtcccacctggcagtctcgcagcgcaaaccatctcaccaactagccatctatttataggcgtcgccatggccctcctccaacatcaaccagcgactcacacacccgcccgccgcttctgtagccgccgccgccaccccccccccccccccccccccccccccccaaccaaccaaccgcgcagggagaaaaccacagcgcagcacatgcagcgcctcgcctcctcccggaggctcctccaggccgcgctcgccgcggccgccgtcgccgcgcccgcgccagcgaatggcgccttccccaagatgccggccttcgactacacgccgccgccgtacaacgggccgcgcgccgagatcttccggaagcgcgctcagttcctcagcccatccctctttcatttctacgatcgcccattggacatagtcgaaggaaagatgcagtacctatttgatgaggatggccgtcgttacctggatgctttcggtggcattgctacagtttgctgtgggcactgccatccagatgtggttgaagccatagtaaaccaggcaaagcggatccagcactccacagttctatatctcaatcatgcaattgcagattttgccgaggcattggcttccaaaatgcctggtgatctgaaggttgttttcttcacaaattcaggcacggaggcaaatgagcttgcactgatgattgcacggctttacactggttgcaatgacattatctctcttaggaatggataccatgggaatgctgctggaacaatgggtgctactgctcaatccaattggaaattcaaggttgttcagatgggagtacaccatgcgcttaatccagaccccttcagaggtgcttttggttctgacggggagaaatacgccagagatgttcaggaaatcatcgaatttggaactacagggagagttggtgggttcatttcggaagccatacagggggttggtggaatagtggaactggcaccaggatacttgcccgtggcatacagtatggtaaggaaagccggtgggctctgcatcgctgacgaagttcaggcaggagtcgcgcgaactgggagccacttctggggattcgaagggcatggtgtcatcccggacatagtcaccatggccaagggtatcgggaatggcatacccataggagctgtcgtaacgacgccagagatcgctcaggtgttgacccgcaaaagctacttcaataggagtacctttgatggtaaccctgtcagcactgcaggcgggcatgcggtgctcaaagtgctggagaaggagaagctccaggagaatgcgtttgttgtgggctcctatctaaaggaacagcttaacaatctgaaagacaagcatgagatcatcggtgacgttaggggcaaaggcttccttcttggagttgagctggtgacagaccgtgagaagaaaaccccagccaaagctgagatctcacgtgtcatgaaccatatgaaagatatgggagtgttggttggtaagggtggtttctacgggaacgtttttaggataacaccgccgttgtgcttcaccaaagaggattccgacttcttcattgaggtgatggacattgcgctctcgaagctgtgaggcaggcagggcgaagatgatgtgcaaaccctggtccgtggccatgggttttttgcccatgaataatattaagattagtgagacagcacctcgttgtctcttaatctaagacgatgccatgtcatccggtggcatggtattcctgcttgcccataaataagggacgagttgtgagacagcacctcgttgtctcgtgatcagacccatggtccatggagcaatacgattcttgtaaactctagcttcatccaatctgttcctcctgatctaactagtctgaatagcaactgttcgtttgttaccaatatcaacttcttttcagatgctccatatattcctgctctctgtaaacaaacaattatcactgttcaatagatgcggagatgtggatataaaaattacatatac

SEQ ID NO: 138953 - DNA, 2402 bp, Zea Mays
cggctggctacaagccgacactgttgcagctgtttggactgctgcagctgcaatccatagagagaaaaatactgtagaagccgcagccgcagccggattgcagccgcagcaagccacagcgaacaagctggatatttcaacggtaccgcacttacgttatctctgatcttctatcttatcccatatttcaaaatctactttacaatataaaacaatattttctacggtcgtatacacaattccaacagtaccgggcgtacgccgtccgatacgtttcgtcctcctatgtcccacctggcagtctcgcagcgcaaaccatctcaccaactagccatctatttataggcgtcgccatggccctcctccaacatcaaccagcgactcacacacccgcccgccgcttctgtagccgccgccgccaccccccccccccccccccccccccccccccaaccaaccaaccgcgcagggagaaaaccacagcgcagcacatgcagcgcctcgcctcctcccggaggctcctccaggccgcgctcgccgcggccgccgtcgccgcgcccgcgccagcgaatggcgccttccccaagatgccggccttcgactacacgccgccgccgtacaacgggccgcgcgccgagatcttccggaagcgcgctcagttcctcagcccatccctctttcatttctacgatcgcccattggacatagtcgaaggaaagatgcagtacctatttgatgaggatggccgtcgttacctggatgctttcggtggcattgctacagtttgctgtgggcactgccatccagatgtggttgaagccatagtaaaccaggcaaagcggatccagcactccacagttctatatctcaatcatgcaattgcagattttgccgaggcattggcttccaaaatgcctggtgatctgaaggttgttttcttcacaaattcaggcacggaggcaaatgagcttgcactgatgattgcacggctttacactggttgcaatgacattatctctcttaggaatggataccatgggaatgctgctggaacaatgggtgctactgctcaatccaattggaaattcaaggttgttcagatgggagtacaccatgcgcttaatccagaccccttcagaggtgcttttggttctgacggggagaaatacgccagagatgttcaggaaatcatcgaatttggaactacagggagagttggtgggttcatttcggaagccatacaggtattccaatatcaaagcgtcggttaggcatctccatcactcttaaacgaaaaccaattttctcccctgaacatggcatgttcttttccgaagggggttggtggaatagtggaactggcaccaggatacttgcccgtggcatacagtatggtaaggaaagccggtgggctctgcatcgctgacgaagttcaggcaggagtcgcgcgaactgggagccacttctggggattcgaagggcatggtgtcatcccggacatagtcaccatggccaagggtatcgggaatggcatacccataggagctgtcgtaacgacgccagagatcgctcaggtgttgacccgcaaaagctacttcaataggagtacctttgatggtaaccctgtcagcactgcaggcgggcatgcggtgctcaaagtgctggagaaggagaagctccaggagaatgcgtttgttgtgggctcctatctaaaggaacagcttaacaatctgaaagacaagcatgagatcatcggtgacgttaggggcaaaggcttccttcttggagttgagctggtgacagaccgtgagaagaaaaccccagccaaagctgagatctcacgtgtcatgaaccatatgaaagatatgggagtgttggttggtaagggtggtttctacgggaacgtttttaggataacaccgccgttgtgcttcaccaaagaggattccgacttcttcattgaggtgatggacattgcgctctcgaagctgtgaggcaggcagggcgaagatgatgtgcaaaccctggtccgtggccatgggttttttgcccatgaataatattaagattagtgagacagcacctcgttgtctcttaatctaagacgatgccatgtcatccggtggcatggtattcctgcttgcccataaataagggacgagttgtgagacagcacctcgttgtctcgtgatcagacccatggtccatggagcaatacgattcttgtaaactctagcttcatccaatctgttcctcctgatctaactagtctgaatagcaactgttcgtttgttaccaatatcaacttcttttcagatgctccatatattcctgctctctgtaaacaaacaattatcactgttcaatagatgcggagatgtggatataaaaattacatatac

SEQ ID NO: 138954 - DNA, 1531 bp, Zea Mays
gatcttctatcttatcccatatttcaaaatctactttacaatataaaacaatattttctacggtcgtatacacaattccaacagtaccgggcgtacgccgtccgatacgtttcgtcctcctatgtcccacctggcagtctcgcagcgcaaaccatctcaccaactagccatctatttataggcgtcgccatggccctcctccaacatcaaccagcgactcacacacccgcccgccgcttctgtagccgccgccgccaccccccccccccccccccccccccccccccaaccaaccaaccgcgcagggagaaaaccacagcgcagcacatgcagcgcctcgcctcctcccggaggctcctccaggccgcgctcgccgcggccgccgtcgccgcgcccgcgccagcgaatggcgccttccccaagatgccggccttcgactacacgccgccgccgtacaacgggccgcgcgccgagatcttccggaagcgcgctcagttcctcagcccatccctctttcatttctacgatcgcccagtacgtgtgccgctcccccatcgccactccagtcttcagttctgtgggaaggactatactgctacgaccaaaaagaaaaacaaaaaaaactgtaaattaccttcggatttcaatattttttcggtaaaaactgcaccaattgtcgccctggtgatcagttaaaatacgaagaatcgaactactagcatttttcgtaactaaaacattttttgtttactgttttgagaaatgcggtcttcttggtagtcctttggcacagagcagcagtgatctttgtcgttttccgagaggtttgataggattgctgatactgcatgtgctctgttcttatctgaagtaaaatgagatctgagataaatatacaaaagtatgcaaccaagatctgtgtcagaacccaataaaatgtcagcactcaacagccgcaaattctgtattgcaggcagtatgactcgaacaggagtcttaagtgaatcaataaaagaaacttgtaataccagtaccacaagctgtcgagtgtcgacagcaggagtattgtttttttttcagtgaatagtagatccttttgccaaatgaacatgccggatgggttgacaaatgaataagtgacaggcttttcctgggttgttgcaaattgcaatgacgtggctgcccagttttgcctgcaaacttgtagaaaatctaggttgtaccgattaatttccacttttttactaatggtcagatgcctgatttctatcttctcttcaaaagatactgtatccatctttttgcttatttttttcctgtattaagatgctcagctttacatgctcatgaactaacagtgaaggttgttgtctgaaaacatactatatttcaggtgggcacctgaaatataacaactctctaatttccgcaactatttttttgtgccctcttagatctcaaatatatgtagctgcgccactttttctttgtttgtcagaatatacatggttactgacaacacaacatttaa

SEQ ID NO: 138955 - DNA, 1165 bp, Zea Mays
atcgcatcgctcaacgagagttcttcttggatcgtggactcgatcgaatactcgatcgcggcgccacacattgcccacgccgcgccgactagctagctaccagcctagctaccaccaacgactaccacaccactgcacttcgtcccactgctcggcccgatcacgatcgatccagtgaagatgccgccagctcccagccccggcgcacacggcgccagcggcgcggcgacgccgcccagcaagccgcagagcccgctgcgcatcacgcacgacggcgagttctacgcgcgcctgctcaccagggagagctcgctgggcaacccctccttccgctactacggcgcgggcaccggcgccgtgccgttcgtgtgggagtcccagccggggacgcccaaggacgcctactcctgccggatgctggccaccgccgccgccggggtcgggccggtcatcaccccgccgccctcctactacctccacggcgtgccgctcgggcgtgccaaccggcgccacggcaagacgaccggcgggtacaagtacaagcagctcaagtgggtcaagctcagcttcatcgccaccgtcttccgccgccttgccttcggtaataagtcgcggccctcgtcggcggcggcggcggcggtcaagtcctcgtcctcgtcctcgtcctcatcgtcctctgctcgctggctcttctccggctccagcgccgccgaggcccgtgaccaggagtgctgcggctacgacgatcctgcggctgctgagccgcggacgaagggggcggtgctgtgcctcggcatccgggcgaccccgtggatggtgcagttctgcggcggccagagggagcaggctggctgggtgtacggctggcgcccgtagtcgtcgtccggtcgctgtcgaccaaatcatatgtgcaacggccggtccgtgtccgtgcatgcagtgtgattggccggacgcccggacccgacctttatattggatctaattgttcgtgcatatggatgttcctgtgtttgatccagtgtccgtcaccgtgctcggaaacaagataagataaaagctgtttcggggtggcgtgagcgtgactggcgtcgtgttgctatgcccatatatatatgtatacatgtatcttgcacctcccccgaaccattgttgttgttgtcta

SEQ ID NO: 138956 - DNA, 1776 bp, Zea Mays
ccctgctgctgctggctgtgtatcagttgccccagaggcaggccgatgtgatgcggctacagtgcgtgcggggggaacaccgtccagaggcgagcaggctgcctcgctcacgtccgctcatctgatcatctcgtcgtcgccatccaccctccctcgtgtcgtctcgagtctgttcgtgcccggccccccggccgtttccgggtttcggatacgcatttggctgttgcctctccgatccttgctatagtagtagctacttccttctccagccgctcgagcacgcgagccctgatccacgctagcttgagatgatagagctagagctagagcgagctatctaatccacctacctccgaggcctagcgctttgcagctacctagtggccgtcttgttccgtccggcagcgcaggtcggccgggtcgttggctcgttgctagctaagcgaaagcaagagagagaggtacggcgcggacggtgggtgggagttcaggcgattccgccgccgttgcccatggggaggcagtcgacgaggtggtggagtggcggctccggatccgcgcggacgctgggcgtcggcgtcgcggtggtggttgccctcgtcgtctccctctgcttcgccttcatcggcggccgtcgtctcgcggggacactggtgggtggcggcacccccgcttcagattccggcgggaggaccatggcagcggcagcagcccatcccggcggtcaggtggcgacgaccgatgaggagatggtttacaccggacggcggcgcctgctgtcgggcggcccgggctcgcatccgccgcggtgcgcgtccaaatgcggcagctgcaacccatgctacccggtgcacgtgtccgtgccgccgggggtcctggtcaccacggagtactacccggaggcgtggcggtgcaagtgccggaaccagctctacatgccgtgaccgtcgtcacatgcagtgagtggacgacgctcgtccaactggagacgaagacgaccaagggcggccctgcccgctgcccaagcccaatggctgcgagtcgcgacgccgggagcgtacgacctgaccagcgccgcgggcccgcccgtgcgcgcgcgtggcactggcactggcactggcaccagcaccggcaccgcggcgtgtgccactgtgccttggaccggcgcgtggccgaccgggcagagacggcctgcgaaccggcgctgccgtgtgccgtgcccgcgtgtgtgcagcgcaggcgcagcgcttgcgttcccgcgccgcgcatctatcgctgagctgagcgcccggcagtccgccgcgggcctaccacgagggctcgcacgggcacgacggcaggcagggcgccgtggtgattaagaaaaaggctgcgcctgctctgcctcgccgtactgttcgccttgttcgtatacgattggacgtatgcctttgatttcttggccactcaatgccattttttttcctcttttacttttctcttcgcgccttctcgaattgacccgttttttttttttgcgtgttgccattttcacagccgctacatgtgtatatgatgttgcgtattcgtacattttgcattagccaacaacatgtttgctgcctcagtcactgaaaagatgcgcgtccaagtttggattgattcagtgtatatagaatattattaatacttatgtctctaaatagataactgcgattctacgaaacagatttcctgattatttggtatcacaaatgttactaccctttttatagacgtgcatgtctttaaaatttt

SEQ ID NO: 138957 - DNA, 579 bp, Zea Mays
gctgcgaatctgcgagccgggcgcgtccatctccatgcagggggtggagatggtttacaccggacggcggcgcctgctgtcgggcggcccgggctcgcatccgccgcggtgcgcgtccaaatgcggcagctgcaacccatgctacccggtgcacgtgtccgtgccgccgggggtcctggtcaccacggagtactacccggaggcgtggcggtgcaagtgccggaaccagctctacatgccgtgaccgtcgtcacatgcagtgagtggacgacgctcgtccaactggagacgaagacgaccaagggcggccctgcccgctgcccaagcccaatggctgcgagtcgcgacgccgggagcgtacgacctgaccagcgccgcgggcccgcccgtgcgcgcgcgtggcactggcactggcactggcaccagcaccggcaccgcggcgtgtgccactgtgccttggaccggcgcgtggccgaccgggcagagacggcctgcgaaccggcgctgccgtgtgccgtgcccgcgtgtgtgcagcgcaggcgcagcgcttgcgttcccgcgccgcgcatctatcgctga

SEQ ID NO: 138958 - DNA, 1599 bp, Zea Mays
tgcatcagtgccgaggtcgcattcaacaagtttgatgatcctttctttgcctcgtggatggagtcattgcaaccatcgttcagaggtgttgggcgtcagacgatgagaaatgattgtattgctagattcaagatgatgaggcaagagctaaggaatgagctacagagtattaactctcggatttgcttgacatctgatctttggacctcaaatcagaagttgggttatctttgcttgacagcccactacattgatgcaaactttatcttgaaaaagaagactattgcattcaaagatgtcaaatatccacacacgggcctagcagtcgaagaagtaattacgaagtgtctcatagagtgggggataaaagagaaggtgtttactatcacattggataatgcctccaacaatcaatcagcatgtgacctccttcgagaaagtggacgttcagacatgttatttggaggcgagcatcttcatatccgatgttgtgcacatatcttgaatctcctagttcaagatggaatggcaattgctcatggagcaatcgataagattcgtgatctggtcagacatatcatatcctcaccctctcgcatacaagcttttaatgagattgctgagaggtctggattgccttcaaaggccggattaattcttgatgttccaaatcgttggaattcgacacacaacatgattatggaggccattgagtacaaagttgtcttgaagagatatgctgaggaacaacttgagccttcaccagatgatgaagagtggacaaattctgaggcaattggagagtttcttggggcatttgaggaagctacaaaagcattctcagcacatagaagtccaacatctcatttgtttttgcataatgtgttatgtatccatcaagctctaagaaatgaaaattggcaaatcaattgtgtgcttgaggatttggcactagcaatggattctaagttcgataaatactgggagaagggcaagtataatatggcacttgtcatagccactatacttgacccgtcaaagaagatggattttttggactttttttatgagaagacgtgtcaacagtttatcgacatccagataaacatgtccttggccaaacaatggttcaccaaattttttggtgaatatgcaaaaatcgttcaaaaagatactacagtctcacctattgttgctacaaatactagtactttgggcccaccgattcttggaaaaagaaggttggataaagaattttctcagtggtcccaaacaagaggaagacgtcttgcaaagtctgagcttgacgcatacttagaagaagaatttgtgagaacagatgaaagatttgaaattctaagttggtggaggacaaatgcaaacaaatacccagtgctttcagctatggcgcgtgatttattagcaatacctttgagcactgttccttcggagtctgcttttagcgccggtggtcgcattcttgctgataatcgaagcttaatgacaccagaaacacttgaatgccttgtatgttgcaaggattggttgtatgagtacccaaatattcaagtttatccagttgtgtttggacccagctag

SEQ ID NO: 138959 - DNA, 118 bp, Zea Mays
gtgcgtgttgtttcgcgcagcgtgtcgttggggtcccgacgacatccgtctaccctctagacgacttctgtctactcccccgtctacctcgtcgattcccctgcgctaattaattttc

SEQ ID NO: 138960 - DNA, 1453 bp, Zea Mays
caccaaaccgcggagaaatttagatgcacaccgcccccgagttgtagttgtagccgactataaatagttgggggctgggagggcgagctcctcactgccaaccacacgttcccaagccagccattggttggtagcaagccaagctaatcaagctagctttagatacccgctcccgctcttcttccctccgacgaagtcagctgacgatatatacagcaggctagcttcggagttcggggcactcagcgatggccattgccggcgctcttctcctcctgctcggactcctcgcgcgggaggccgctgccggcgggtggcagagcgcgcacgccacgttctacggcggcggggacgcgtccggcacaatgggcggcgcctgcgggtacggcaacctgtacagcacggggtacggcacgagcacggcggcgctgagcacggcgctgttcaacgacggcgcggcgtgcgggtcctgctacgagctgcggtgcgacaacgacgggcggtggtgcctgccgggcaccatcaccgtcacggccaccaacttctgcccgcccaactacggcctccccagcgacgacggcggctggtgcaacccgccgcgcccgcacttcgacatggccgagccggccttcctccgcatcgcgcagtaccgcgccggcatcgtgcccgtcgcgttcaggagagtgccgtgcgtgaagaagggcggcatccggttcaccatcaacgggcactcctacttcaacctggtgctggtgaccaacgtggcgggcgccggcgacgtgcgctccgtctccatccggggctcccgcacggggtggcagcccatgtcccggaactggggccagaactggcagagcaactcgtacctggacaggcaggcgctctcgttccaggtcaccgccagcgacggccgcaccgtcaccagcaacggcgccgtccccgctggctggcagttcggccagaccttcgagggcggccagttctgaggatgaacagctagcgcgcgcgcggctagctattggataattagttacggtactgtcgatttgtttgtttttttttttttttttgcgcgtgatgatcgagtgcatgcaagagaaagagacgacgaggagaacgacgaagacgaagacgaagcctctctccgggtatattgaaggaaggagaaggctttgcgcgcgctatgctgaggctgctaatctagcacccgcctagacgtttcccttttctcttctctggtggattacggactggatcggaccaaagatcgatccagctcctagtactaataatatagttgtacttgagaaaaatgaaataattgtaatttattgtttttttggggacctttgatattattgtactcgcgcgcgccggccttgcgtggaaattgaagttcgcaataaggccggccgccggcttttattcagcgtgccctctcgtcccttcagta

SEQ ID NO: 138961 - DNA, 1586 bp, Zea Mays
caccaaaccgcggagaaatttagatgcacaccgcccccgagttgtagttgtagccgactataaatagttgggggctgggagggcgagctcctcactgccaaccacacgttcccaagccagccattggttggtagcaagccaagctaatcaagctagctttagatacccgctcccgctcttcttccctccgacgaagtcagctgacgatatatacagcaggctagcttcggagttcggggcactcagcgatggccattgccggcgctcttctcctcctgctcggactcctcgcgcgggaggccgctgccggcgggtggcagagcgcgcacgccacgttctacggcggcggggacgcgtccggcacaatgggtaagcccctgactcgattgccctgctacctctctgtcgtactacgtttccatcggctcagcatcacacatgaagaaactgatccttcttctttcttctttcttcttcttctctgcgcgtgcacggacgacaggcggcgcctgcgggtacggcaacctgtacagcacggggtacggcacgagcacggcggcgctgagcacggcgctgttcaacgacggcgcggcgtgcgggtcctgctacgagctgcggtgcgacaacgacgggcggtggtgcctgccgggcaccatcaccgtcacggccaccaacttctgcccgcccaactacggcctccccagcgacgacggcggctggtgcaacccgccgcgcccgcacttcgacatggccgagccggccttcctccgcatcgcgcagtaccgcgccggcatcgtgcccgtcgcgttcaggagagtgccgtgcgtgaagaagggcggcatccggttcaccatcaacgggcactcctacttcaacctggtgctggtgaccaacgtggcgggcgccggcgacgtgcgctccgtctccatccggggctcccgcacggggtggcagcccatgtcccggaactggggccagaactggcagagcaactcgtacctggacaggcaggcgctctcgttccaggtcaccgccagcgacggccgcaccgtcaccagcaacggcgccgtccccgctggctggcagttcggccagaccttcgagggcggccagttctgaggatgaacagctagcgcgcgcgcggctagctattggataattagttacggtactgtcgatttgtttgtttttttttttttttttgcgcgtgatgatcgagtgcatgcaagagaaagagacgacgaggagaacgacgaagacgaagacgaagcctctctccgggtatattgaaggaaggagaaggctttgcgcgcgctatgctgaggctgctaatctagcacccgcctagacgtttcccttttctcttctctggtggattacggactggatcggaccaaagatcgatccagctcctagtactaataatatagttgtacttgagaaaaatgaaataattgtaatttattgtttttttggggacctttgatattattgtactcgcgcgcgccggccttgcgtggaaattgaagttcgcaataaggccggccgccggcttttattcagcgtgccctctcgtcccttcagta

SEQ ID NO: 138962 - DNA, 91 bp, Zea Mays
gtcaagctgtcgctcggctttccagcttagttttgtctcgctgctgtgtccaatcgctgaataacgggcagtctcagtctgtcagtcacat

SEQ ID NO: 138963 - DNA, 747 bp, Zea Mays
agtctaacaaatacactcaagtcctgacatgtaaactgtaaagttggactgttgcttggtggatctgtattgaactttattttttttaaaatgttttatggcttgtatagtttgtattcacttctcacctaagctacaatttgtttttccagcctttcaagatttggcacattgacataatgacatgggttggtcacggattggatgtcaattttgctccctgtaccttgtagattatcggttatgtcaattttcgaaatttctatcgtgatggataacatttgaataaaacatagttaaataaacatgactactgtttcagtctttcgaaattctgatgctatagtgtcagtatactatgtcattttagggaaaatatatgtcatgtttattttgataaaattatatgatttctcactcaattcttgtcggtggcttcaggatttgttattttgtatatcgatctgtgtcatttgacaaagtactttgacttggtataatatgagtgttacttcgaccaaaagagcttggtaaagtgtgagaaactccgcaaacttcttctgcagacgatgactagcaacagttatgacgagggtcaagatagccgccatacatgatacattgagtacaacatcaagataaacactccctccccacacacaacttttgccttccgttcactctgtatgttgtgtttattacggttgcatatgttgtgtttattatggcatcaacacgttccattag

SEQ ID NO: 138964 - DNA, 1459 bp, Zea Mays
gttcagccatacctgccatgtcacaagaaagagagataaaaagtatttaatagtagacctaatgatgctcatttgtaattgtagatattcgtatatcctttttctgcaaccttgtgaaacatgtgatggtttgacttggaacaaactttgggtctgatatagtaaaatgcaatgtatgtggagggaagtagtagaacaagacagaacaagtgccaaataaggttatatagtagaatacaatgtgtggagggaaatagtagaacaacacaaaacaagtgccaaataaggttacaaggtttatagtagcgattgcttagctgctacaacgacactcatagattagcctggcatttgcaatgtcgctcttgtatttgccataacctcacttaaggtcacacattgcctctgggaccttgacctccgctactgttgtcgcctggccgcgtcgacttcaccaatgccggggtgtccaacctcatcagcttcaccgtcgtcgactgctcccacacaaccgagctgtgggtcctggtaccggtcgcgccccgcctctgctccttctgcttcagcgagtggcagactatcgatacactcgatttcaattgttttttacgctatttactgtattgcaatgggacaatggatgattaggatttgttttttaagactggcccatgatttatcgtcgtatactatttctttaatagattgttcgctacatctactgatctacatgttcacatgtttcaacttctgtcagcatccgtagttactatatgaatgctcattctgtgtcaccttttaagtttacaaatgctcttttccaggtcacatatggaaagtgaagaacccaaatgatttcttcacaggaagcttggaccaatcttcaactcatggggcgcttcatcctcggcctcctacgcatgcacttctcctgcttctcctgctggtcatcgcccaagatgttgcatggtgtcagtgtgtcagatgtgccgtaacagatgactccaaaatggattgcatgctcttcaaatagctacagataactatcttcacataaaatggagagtacaatgtttataaaagaaggaatatggataaggatccagattctcctatagcatatgaagaggcaaaggaaatggcaagccaaagctgcacaatttctgatgatcactcgttgttactgttatccattatctcctcagaggcattgcttttaaattcaacagcagacatggcaggtacgtgtccactttcttctcaaggaattgcactagaggttggactttgtgggtcaagagaaatttaatgcctattgttaatacaacctttagctatttttccatgatgatggagttggacaagtaccatattgagtataagtgttagcctattatatctttgtacaaccatggcaaacgaataatttcttataacaccatgaagataatgtttaacg

SEQ ID NO: 138965 - DNA, 538 bp, Zea Mays
ggttaattaaacgtaacaataaatagccccgattaaatggcttataaatatacttggatctgttcatttttcacatatcagctattaatgaagccttcactgggttcattttgtactactccattacttatttacagttacaagtattctaagaaacttaatatttcatcatcaaagttgtattcagacagtttcatttacattgctctgattttttgtactaggagctactgacaatggaaagcaacgattagagtaacttgatgagtgaggactattcattcagttgcttcgatcaataagtgaactaatggatgcatgtttcttttgataagtcacatatggaaagtgaagaacccaaatgatttcttcacaggaagcttggaccaatcttcaactcatggggcgcttcatcctcggcctcctacgcatgcacttctcctgcttctcctgctggtcatcgcccaaggatgaattgctgctcttgaccatagggattggagcagcatgtagtttatactttatcctggttttctct

SEQ ID NO: 138966 - DNA, 504 bp, Zea Mays
atggacatggacgagcaggggaaactgccagctggcggcgcggctgttgtcgccgtggacgtcgtcatgtcgcggttcagcctcgacgtgagcgccgggtgcggtgggcggcacagcacgctgctcgacgagtacgagcggctggcgttcgaggcccagctcaaccgggccatcgtcctgcgccgctgctactccgagcccagccccgtccggtacgcggaggcggagcaccagcgcccaccagcgggtgctgatgacgcgcgcgcgccgccaccgcctcgcggggcacccgacctgcagggaggggcggcgcggcgcgacggcggcggcggcggggacggggacgggggctgtaggttctggcggctccacgaggtgctggcccggtggatcgaggcgttgaggccggtgttgcgctggctgaggagcccgtgggagtgccggaggaggaagcagccgccgccgccgccgccgcgggtgcagttgatggactaccttcgttaa

SEQ ID NO: 138967 - DNA, 1179 bp, Zea Mays
gaaatcacaatgcggttcggccggtgcccctactgccggaccatggtctaccagaaccctcaagcggtcgtcttcttctgcagcaaatgccgcaccccgatcagaggcaagaacccttcgtcgacggaaggaatcgaccaggccctgagcaggcttgagatcctctcggtggacaacgcgtcggtgttctccgatgagctcgatgcctgtcaggacattgttgcacctccccgttcctcctcgccggcaccacatggaggattcggttccatgtggcggggtcatcctgctaccaatggcgcacctgctagtgctggatgtgacgatagtgtcgttgactcagacgaacaagataggatccggctgttctcccgacggacgagacgcacgtcgggctctgattcgagcgttctgcgctacggtatgctgatggcagcggattcggagacggaggaagggttctcttcgccgaggaacgcgtgcgagcggcagcggcaccgccgccggagatcgctcctgggatcgcaagcgttcgagacatcgaccggacatgacccgtacggcgtcgcgccgtctctgctgagagacccgtccttccacaacgagctggtcaacgcgctggacaacctccgaggcctggtcgccgctatcgagccgtcctcgagctcgagcggcaggagagcgtctgcgccgcccgacgcccgcctgtttcgccggctggagtcgcagctcgcgcgggcgttgcacgtcgatggacgcggcggccaccgccggaacgcgagcagcgccgtctcctcctcgtcgtcctgcagctatcgcagcgaacggcggaagaaccactgccgcccggtcctgggcggcgcaccgttcctagtttgcggcagctgctccgagctgctgcaggcgccggcggcgacggggctgccgcgtgggaaggtcgtcaggctgcggtgcggcgggtgcgaggaggtgatcgagatgacggaggtgccggcgggtgtcggtggctcggcgccgcacaagaagacctgggcgctgtccccgccgccggtgttggaccccagcagttgcaacagcggcgcggttggggacggtgcgcagcacctaccgccacagccgctgcaccgcgcgttggggtacagttcaccgagcccgcttctgcagagccggcggtactga

SEQ ID NO: 138968 - DNA, 2217 bp, Zea Mays
ccagtaacaaacgctccaaaggctttaaaaagcgagctcggtgacacactccgatcggaggaatccctgaaagaacgtctcgtgccgtcgccagtgtgccacgagcgggcgcggccaattaaataaaaaaaatccccgcgtacccagccaacgcgacgcgggcagctcgctaaacaccgcaggccaaggcgtgcgcttttgcgctccgagtccgaccaggcaagtgaccaactaactgctcacggagacccgacggccgtcgacggtcgcgagacgccctttccaccgctccaaaatgcaccagagccgactagcgagctaggtagcttccaaatcttcggggcttgcattgcattgtccgcctgcctaagcacgcaacgcaaggaaggtatagtattctctacttcatcttccagtcctcctgctagctagctttgcctacaaagcaaccaaaaagcgagcgggcggcaccacacgtcggtcgagtgcctatcccttgaagcccttcgacaacaccgagaggaacggaacggaacggatcgccccctttatacaagcacactcgccgcgcaacactcccgaaacgtgcatcgcgactagttagcagttactgccgcggacagagcacggcaggaaggaacgagcattcgtgcgcgagagctggtggcacatggaccgccgggactcctccgaggcgccggggccggccgtgaacggcactggcggcgtcggaggcgcgggcgcggcggcgcccggggtcgtcgacgcgaccttcgacaccaacacggtgatcctgctggcggcgctgttcctggcgctgctgctcgccatcgcgctcaactcgctggccaggttcgcgctctggtgcggaggccgggccgcggccgggggcggcgaggtggcggcgtcgccgagcgtcgccgcgtcgtcctgcgcgggcgtccggggcgggatcaagaagcgcgcgctgcggagcatccccgtggaggtttacgtcggcggggatgcgaaagacgacgaggaggagggggccgggagcggggacgtgtgcgccatctgcctcggcgagttcgcggacggcgagaaggtgcgcgtgctgccgcggtgcggccacgcgttccacgtcccgtgcgtcgacgcctggctgctgtcccgcggctcgtgcccgacgtgccgccgccccgtcatggacgccaagcctgccagtgccagtgccacaggcggcaggggagtggcccagcagagcgcccgccgcccggacagcgacaccgtcgccgtggtcattgcgtgagggacgacggaggggagcatgggcgtggccatgggcccatggccatcgcaagcagcagagacctagtggtaggagcgagcacacgcaacgaagcaaggtatagagtagcgctctgtactgttccggcgtcgctgtggataagttcatgtaaaaaatatctccgtagcctgccctgctctggtagccgcatcgtccgatattatccggcgacggctggcccacttgcactagatgacgctacatgcttggagtgtactgctcgctagtgtagcatcttcttgccgttgccgttgccgtcaaatgtagtgcacgagtagctgcccagttgctctgtcacagttttcagtttcggtggtgccgtgcaacaatttgttacagataagcaaccatgcggccggccggccgttcgttcgtcgtcgccggcgccggcgccggctggtccgcgtttccgctgccgcacgcgtcacacctgcaagcgttacgctggccgtgcgctgatcggcgttcgacatgccgaccaaacaaccaccgagtgccttactctgaatcgaagctgatcgggcgctgctgctgctgcaaccaccgagatcagtccgtggcgccaaacccgatggccatggctagctgcacggtgcgtggtccgtcgtcgtcgcccgatgctcacgccacacgcatgcacagacatacgcgtcatgagcagctggctgatgaaccggcctgaaccgggggcggaaggcactctggcacttgtctttgtctgtcttgttttgatgcacctgtattgtatctctacttgtgttgtgtccaattcccttgcacacaaaaggaggatgacaagtgctaagtcattttcgcccctgtccttttctggactcatgcatatctgatatctccattatgcaacttgagtaaaatatatgttctgg

SEQ ID NO: 138969 - DNA, 626 bp, Zea Mays
cggtaatggcggtggctcgttccctcccctagcccccggcgtcacccgtccctcccctcctgccgctgccgccgccgccgccgccgggataccgaccgccctcggtcctccgcggccgcatcacgccacgcgaccgaccttccctgctgcggcgtttcggaaacaaaacggagaagtgtcgtcccttgcagagagggttcaggggtctggatatcctgacgaaactgactcgagccgatggggtgctgtggaagcagtgccgtagatgacgaggaacatctggactacagctccggaagagtgaccatcataccagacctgaagtgttgggagcagaaattggaggaagcgaatgaacttggacagacagttgtggtaaagttcagtgcgacttggtgtggaccatgcaggaacgctgctccactatacgccgagctttccttgaagcattctgatcttgttttcttctccattgacgtcgacgaactgccggaattggtcacgcaattcgatgtacgcgcaactccaacgttcatcttcatgagagacatgaaggagatcgacaagctggtcgggggcaaccaggaagaactccagaagaagttcgatccgtactgccagtgaca

SEQ ID NO: 138970 - DNA, 1905 bp, Zea Mays
atgtggcatctcaagctgatagctttaatttatggctctcttttctttatgcacattccatatgctagaggttctgacctaaacaccgataagcaggcccttcttgcatttgctgcatcactgcctcatggcagaaaggtcaactggacctccacaacccaagtctgcacgtcctgggttggcattacatgcacaccggacatgaagcgtgtgcgtgaagtcaggttacctgcaatagggctctttggtcctatcccatcaggcacacttagcaagctcgatgccttggaggtgttgagccttaggtcaaaccgtcttactattaatctccctcctgatgtaccatctattccctcacttcgctctctttatcttcaacacaataacctgtctggaatcataccaagttcactttcttccagtctaacattcttagacctgtcctataactcgttcaatggagaaataccatcgaaggtgcaagacatcactgaactgacagcattgcttctccagaacaactctctttctggacccatccctgaccttcgcctccccaagttgagacatttggatttgagcaacaataacctgagtggacctataccaccctccctgcagaagttcccagctacttcttttctgggaaatgcctttctgtgtggatttccattggaaccatgtccagggacaccacctgcttctccatcgtcgccatcgtcccaaaatgccaaaagaagcttctggaaaaagctcagccttggtatcataattgcaatagttgctggaggaggggttgtattcatattgatcctgatcctcttggtatgtatcttcaaaagaaagaaaaatgcagagtctggcataggatcatcttcatccaaaggaaaggcaattgcaggtaaaaggggagaaaaatccaagggggaatacagcagcagtggtattcaagaagcagagagaaataaactgtttttctttgagggctcttcatataattttgacttggaggatctgttgagggcttcggctgaagtccttggaaaaggaagttatgggactacgtacaaagctgttctggaggatggaacaacagtggtggtcaagagattgaaggaagtggtggcgggaaagagggaatttgaacagcagatggagctaattggcaaggtttgccatcatcagaacactgccccattgcgtgcttactactactccaaggatgagaagctcttggtgtatgactatgtcccactaggtagcctttgtgctgctttgcatggtaacaaagctgctggaagaaccccattggactgggagaccagggtgaagatagctctgggcactgcacgcggaatggcttatcttcactccgtgggtagcggcgggaagttcattcacgggaacatcaagtcaagcaacatccttctctcacaggaactcggcgcctgcgtcaccgagttcggccttgcccagctcatgtccacgccccacgtccacccgcggctcgtcgggtaccggtcgcccgaggtcctcgagaccaggaaaccgacgcagaaatctgacgtctacagcttcggcgtcctcctcctcgagatgctcacaggcaaagcccctctcaggtcccccgggcgcgacgactccatcgaacacctcccgaggtgggtgcagtccgtggtccgggaggagtggacgtcggaggtcttcgacgtcgacctgctgaggcacccgaacctagaggacgagatggtccagatgctccacgtcgcgatggcatgcgtcgcggtcgtccccgacgagcggcctcggatggaggaggtggtcggcaggatcgaggagatccggagctcctactcggacacgaagacgtccccggaggacaatccgagggagggcgctttctaa

SEQ ID NO: 138971 - DNA, 2256 bp, Zea Mays
cacgctctcccacgcagcccttccagcaccaccaccaccagcagcaagcatcgtcgtcccccgtccgcctctccgcttccttccaggcttctagccctctctcctcggcatctctagcgcgggcggcatctatagtagccctagccccggccgcggcattggaggaaggcagcggcattggctgcgggaaccggagaaggaggcattgactaggtacaagcctctgtaacctgccggatccggatccgaatccgcgctgccgactgccggagtttgggggcaacgaagcttgctctagtctctagagatggaggacctactgggttcggagatcgggaagaacgactacgattggctcctaactcctcctgggaccccacgtgttcctgcactggagggcgctgagaaaacaccatcctcaaatatattaccgaagcgcactacaactagatcatcctcaactaccagagcatctaggctttcaatatctcaaacagagaatgggaattcgacgattcccactagacctgcaagaagtaactctgtcagccgatcatctatccagtcagctctcatgaatggcaacaacaggacatcagttctgaatacaagcatttcttcagtcacttcaagacctacaactcctagtaggcgaagcagcacagttggcacaccaaagcattcagctccagctgcacgtccagtgcctgcaagatcctctactcctgttaatactcgtccatctacaccagcaaaaactcgcccatctactcctacgagaactcgtccaacagcaccaaactcttcaactgattccgctgctgccaagactacattcacacataatgcaaggccatcaactccaaattcccggtcccgtattgttcccaattcatcttcaagtgcaactcatgtaataagccgtccgagcgcctccttgagtgcaacaagcagaccagggtcttcctcaggtaatgttcctgggataagccgtgccacctcattgtcctcaagttcggttccttcaatgagccgttccagctcacgatcatctacacctacacgacagcctgcaattcgctcatcagctccagctattggtcgttctccttctgttggacggacttctagcatcaacagctttacgacttcgtccaggtctgcagccagtactggcaggaactcagcaccttcatctgctccatcatctcgtccaagttctccaaacccacgaccccgagctccagtgcgacctcttgatatccccgattttccaaatgaaactccaccaaatctaaggacaaaattacctgaaagaccaccatctgctggcagatcacggccaggaatggctttaggcataagatcaaccccaaatactgaaccttcagctgcctcagctcctgtgaagaagatctctgtgcctgctgtgagccgaagtaaattttctgatgcatcatcaaagacctctactctcacaaatggacaccaaaatcgacaggctgacaggtccaatattgacagtcaagctaatagaccctcgagaccttccacgggtaccacagataatggatttgggaggtcgatatcaaggaggtcacttgacatggctatcaagcacatggacattcggcagaacttgggtggcattcgcggcacatccctgtttccccagagcatccgctcggctgctgccaaggtccgtccagctcgggcatcagacccagggcatggcatctcaaacggggaccagcgctacagtgacaatggaaagcagcgtgaacggacacctctcccggggactcaaacggggttctctcacgtaatggtggcagctcaaccgattcgccagacagggggagcatcgggaccaaggagaccctgagcgaactggacatctatggtagctcgcgctatgaagcgatgcttctcagggaggacgtgcggaacacaaactggctgcacgggcttgatgacaagcccgaccaaagccccctgttcgaccaccggttcgagccgctgccggagcccttcagcccgttatgacagctgctgcttgtaaattatggtcatcactatgattgactggtcgggttttctgtccttttgtgctgtcaccattacgtgagagaaccccctttgtgctgcaagatgtgtatggttccgtctgttctctgtcctataattgactggttctgcactccccccaatccaatttcagaaaccgaagacgtttgagattgcggggtttgagtc

SEQ ID NO: 138972 - DNA, 249 bp, Zea Mays
atgcagtgcatgctgcgccggactgccgggtgccgctgccgcccccctggcgtctggcgagatgggaatgagacggaggagcactgcaactgcaaggctgcagtgacgcgcgagattggcgcgggtaccggaaatgggaactattttcccggggaggtcgtactatttcccctcaacaagacagtcacatgtggcactcgaaaaactgcaggaaactacagaaggaatgttgaaaccaggattatatga
